United States Patent Application Publication US 2005/0244851 A1 - sequence listing, part 76

SEQ ID NO: 2957788 - DNA, 25 bp, Homo sapien
tccaggacacgcaagctcactctga

SEQ ID NO: 2957789 - DNA, 25 bp, Homo sapien
tgcttgtttttgactccaggaggcc

SEQ ID NO: 2957790 - DNA, 25 bp, Homo sapien
gagctggctccaggacacgcaagct

SEQ ID NO: 2957791 - DNA, 25 bp, Homo sapien
tcaagggccagaaatggcatgtgct

SEQ ID NO: 2957792 - DNA, 25 bp, Homo sapien
tgggagccagctaacctgatgcctg

SEQ ID NO: 2957793 - DNA, 25 bp, Homo sapien
cggatttatatcctgggcgcgccac

SEQ ID NO: 2957794 - DNA, 25 bp, Homo sapien
cagcgtatctggcacggtgggacac

SEQ ID NO: 2957795 - DNA, 25 bp, Homo sapien
ggctagagacctcccctgaaacgat

SEQ ID NO: 2957796 - DNA, 25 bp, Homo sapien
tcccagcgagaccagaaccggcgac

SEQ ID NO: 2957797 - DNA, 25 bp, Homo sapien
ctcccagcgagaccagaaccggcga

SEQ ID NO: 2957798 - DNA, 25 bp, Homo sapien
ccagcgagaccagaaccggcgacac

SEQ ID NO: 2957799 - DNA, 25 bp, Homo sapien
cccagcgagaccagaaccggcgaca

SEQ ID NO: 2957800 - DNA, 25 bp, Homo sapien
gggcagatgccggcgtgggaatagc

SEQ ID NO: 2957801 - DNA, 25 bp, Homo sapien
ccggcgtgggaatagcggatgggcg

SEQ ID NO: 2957802 - DNA, 25 bp, Homo sapien
gtgggaatagcggatgggcggcagc

SEQ ID NO: 2957803 - DNA, 25 bp, Homo sapien
cagatgccggcgtgggaatagcgga

SEQ ID NO: 2957804 - DNA, 25 bp, Homo sapien
ctggtccgtctcacactcccgcctg

SEQ ID NO: 2957805 - DNA, 25 bp, Homo sapien
ccgtctcacactcccgcctgcaggt

SEQ ID NO: 2957806 - DNA, 25 bp, Homo sapien
ctgtgcgtccacccagaggttggga

SEQ ID NO: 2957807 - DNA, 25 bp, Homo sapien
gcgtccacccagaggttgggattca

SEQ ID NO: 2957808 - DNA, 25 bp, Homo sapien
accccactcacgttgtcctcctcac

SEQ ID NO: 2957809 - DNA, 25 bp, Homo sapien
ggaccccactcacgttgtcctcctc

SEQ ID NO: 2957810 - DNA, 25 bp, Homo sapien
gaccccactcacgttgtcctcctca

SEQ ID NO: 2957811 - DNA, 25 bp, Homo sapien
ccccactcacgttgtcctcctcaca

SEQ ID NO: 2957812 - DNA, 25 bp, Homo sapien
acattgcggcttctggaccccattc

SEQ ID NO: 2957813 - DNA, 25 bp, Homo sapien
tcacattgcggcttctggaccccat

SEQ ID NO: 2957814 - DNA, 25 bp, Homo sapien
ttgcggcttctggaccccattcacc

SEQ ID NO: 2957815 - DNA, 25 bp, Homo sapien
attgcggcttctggaccccattcac

SEQ ID NO: 2957816 - DNA, 25 bp, Homo sapien
tccagcttctggatcccactcacct

SEQ ID NO: 2957817 - DNA, 25 bp, Homo sapien
agcttctggatcccactcacctggt

SEQ ID NO: 2957818 - DNA, 25 bp, Homo sapien
cagcttctggatcccactcacctgg

SEQ ID NO: 2957819 - DNA, 25 bp, Homo sapien
actccagcttctggatcccactcac

SEQ ID NO: 2957820 - DNA, 25 bp, Homo sapien
tccagcttctggatcccactcacct

SEQ ID NO: 2957821 - DNA, 25 bp, Homo sapien
cagcttctggatcccactcacctgg

SEQ ID NO: 2957822 - DNA, 25 bp, Homo sapien
agcttctggatcccactcacctggt

SEQ ID NO: 2957823 - DNA, 25 bp, Homo sapien
actccagcttctggatcccactcac

SEQ ID NO: 2957824 - DNA, 25 bp, Homo sapien
cagcttctggatcccactcacctgg

SEQ ID NO: 2957825 - DNA, 25 bp, Homo sapien
tccagcttctggatcccactcacct

SEQ ID NO: 2957826 - DNA, 25 bp, Homo sapien
agcttctggatcccactcacctggt

SEQ ID NO: 2957827 - DNA, 25 bp, Homo sapien
actccagcttctggatcccactcac

SEQ ID NO: 2957828 - DNA, 25 bp, Homo sapien
ggcctcacggctctcaaagttgttg

SEQ ID NO: 2957829 - DNA, 25 bp, Homo sapien
tctttgcacttacacacgggctggc

SEQ ID NO: 2957830 - DNA, 25 bp, Homo sapien
gatagcggcaggttacaacggccag

SEQ ID NO: 2957831 - DNA, 25 bp, Homo sapien
tgcccagtccacgtgaagcagagtg

SEQ ID NO: 2957832 - DNA, 25 bp, Homo sapien
tttgcccaggtctcacaaagagcct

SEQ ID NO: 2957833 - DNA, 25 bp, Homo sapien
gaaatacgtattctgctggtgccgt

SEQ ID NO: 2957834 - DNA, 25 bp, Homo sapien
tctgctcacagcaatcgaggaggct

SEQ ID NO: 2957835 - DNA, 25 bp, Homo sapien
tgatctatgtccaaggaagccagtg

SEQ ID NO: 2957836 - DNA, 25 bp, Homo sapien
tgccaatagtagttctggcaaagcc

SEQ ID NO: 2957837 - DNA, 25 bp, Homo sapien
cacagctcccttcagtgccccaaaa

SEQ ID NO: 2957838 - DNA, 25 bp, Homo sapien
ccaatagtagttctggcaaagcctg

SEQ ID NO: 2957839 - DNA, 25 bp, Homo sapien
attgccaatagtagttctggcaaag

SEQ ID NO: 2957840 - DNA, 25 bp, Homo sapien
tgatgcatccaatctgcaacattct

SEQ ID NO: 2957841 - DNA, 25 bp, Homo sapien
ctccaccacgtctgtagttacactg

SEQ ID NO: 2957842 - DNA, 25 bp, Homo sapien
ttttcttccattaggtgatgcatcc

SEQ ID NO: 2957843 - DNA, 25 bp, Homo sapien
ccacgtctgtagttacactgttctt

SEQ ID NO: 2957844 - DNA, 25 bp, Homo sapien
gcggggacacatgtttaggccccac

SEQ ID NO: 2957845 - DNA, 25 bp, Homo sapien
ttgaccagcggggacacatgtttag

SEQ ID NO: 2957846 - DNA, 25 bp, Homo sapien
accagcggggacacatgtttaggcc

SEQ ID NO: 2957847 - DNA, 25 bp, Homo sapien
ccagcggggacacatgtttaggccc

SEQ ID NO: 2957848 - DNA, 25 bp, Homo sapien
gtaggaagaatgtgtgctgctaacc

SEQ ID NO: 2957849 - DNA, 25 bp, Homo sapien
cagatgtagccacagtaggaagaat

SEQ ID NO: 2957850 - DNA, 25 bp, Homo sapien
atgtagccacagtaggaagaatgtg

SEQ ID NO: 2957851 - DNA, 25 bp, Homo sapien
tcagatgtagccacagtaggaagaa

SEQ ID NO: 2957852 - DNA, 25 bp, Homo sapien
gatatggcctcttacagtatttaag

SEQ ID NO: 2957853 - DNA, 25 bp, Homo sapien
taaagtatactctcagatatggcct

SEQ ID NO: 2957854 - DNA, 25 bp, Homo sapien
tattgtttctacgacatggtattgc

SEQ ID NO: 2957855 - DNA, 25 bp, Homo sapien
tttactacagtgatctgtgacagca

SEQ ID NO: 2957856 - DNA, 25 bp, Homo sapien
tagtggccgtagcaacaaggttgca

SEQ ID NO: 2957857 - DNA, 25 bp, Homo sapien
aaacctaattttgtggcgtagcagc

SEQ ID NO: 2957858 - DNA, 25 bp, Homo sapien
tttatgcccataagtgacccagcct

SEQ ID NO: 2957859 - DNA, 25 bp, Homo sapien
aacctcggcttgaatgtgaatgacc

SEQ ID NO: 2957860 - DNA, 25 bp, Homo sapien
tacttgctgccgaataggtattttc

SEQ ID NO: 2957861 - DNA, 25 bp, Homo sapien
tatgctcttagtatacttaaggccg

SEQ ID NO: 2957862 - DNA, 25 bp, Homo sapien
cttaaggccgaaactatatagaata

SEQ ID NO: 2957863 - DNA, 25 bp, Homo sapien
tctccggctgttaccgtgagaggga

SEQ ID NO: 2957864 - DNA, 25 bp, Homo sapien
tccctttgtcaccacgaatatggaa

SEQ ID NO: 2957865 - DNA, 25 bp, Homo sapien
caacttcagtgtgcaaatagatccc

SEQ ID NO: 2957866 - DNA, 25 bp, Homo sapien
ttttcttatccccacccagtgctga

SEQ ID NO: 2957867 - DNA, 25 bp, Homo sapien
tgatccagcaaacgtttaaaggtcg

SEQ ID NO: 2957868 - DNA, 25 bp, Homo sapien
caagcaattgggcttaatcagctgc

SEQ ID NO: 2957869 - DNA, 25 bp, Homo sapien
ttgggcttaatcagctgcctctgcc

SEQ ID NO: 2957870 - DNA, 25 bp, Homo sapien
cttcaagcaattgggcttaatcagc

SEQ ID NO: 2957871 - DNA, 25 bp, Homo sapien
gcaattgggcttaatcagctgcctc

SEQ ID NO: 2957872 - DNA, 25 bp, Homo sapien
taactaccttccaccgagcctgaat

SEQ ID NO: 2957873 - DNA, 25 bp, Homo sapien
tctccgaggaggctcgtactctctt

SEQ ID NO: 2957874 - DNA, 25 bp, Homo sapien
cgaagcagcccgtaagtatctcggg

SEQ ID NO: 2957875 - DNA, 25 bp, Homo sapien
gagcctgaatttcgctcggctgcac

SEQ ID NO: 2957876 - DNA, 25 bp, Homo sapien
gaataaacggatccgagtcgcagcc

SEQ ID NO: 2957877 - DNA, 25 bp, Homo sapien
tggtagctattccacgagcaggatc

SEQ ID NO: 2957878 - DNA, 25 bp, Homo sapien
cactttctgggtactcttgccgctc

SEQ ID NO: 2957879 - DNA, 25 bp, Homo sapien
tcaattaatcgggtgcacaagtccc

SEQ ID NO: 2957880 - DNA, 25 bp, Homo sapien
aagccctagaaatgcacgcatgcgt

SEQ ID NO: 2957881 - DNA, 25 bp, Homo sapien
ttattctgtgcacctgcgatccagc

SEQ ID NO: 2957882 - DNA, 25 bp, Homo sapien
gccctagaaatgcacgcatgcgtgt

SEQ ID NO: 2957883 - DNA, 25 bp, Homo sapien
ttctgtgcacctgcgatccagcaag

SEQ ID NO: 2957884 - DNA, 25 bp, Homo sapien
gcaggttgtgaaaaaggcacttacc

SEQ ID NO: 2957885 - DNA, 25 bp, Homo sapien
cctaggtacccgcacatatttcagc

SEQ ID NO: 2957886 - DNA, 25 bp, Homo sapien
gatgtaatttcgtgtatttctctgg

SEQ ID NO: 2957887 - DNA, 25 bp, Homo sapien
gacgctcgattccactcccgatgta

SEQ ID NO: 2957888 - DNA, 25 bp, Homo sapien
aaggcggctccaaccagattttgcg

SEQ ID NO: 2957889 - DNA, 25 bp, Homo sapien
caaaagcttctaggcctggcatgta

SEQ ID NO: 2957890 - DNA, 25 bp, Homo sapien
tactcctcggtgagctgcggtttaa

SEQ ID NO: 2957891 - DNA, 25 bp, Homo sapien
caatcgcctcgttgcgaagggacca

SEQ ID NO: 2957892 - DNA, 25 bp, Homo sapien
cccgcagttctagatgtttggtaca

SEQ ID NO: 2957893 - DNA, 25 bp, Homo sapien
tactaatcaagacacatggtcccgc

SEQ ID NO: 2957894 - DNA, 25 bp, Homo sapien
tcctaggccaagcagcaataactca

SEQ ID NO: 2957895 - DNA, 25 bp, Homo sapien
ggtgtgaaactcagacctcccagta

SEQ ID NO: 2957896 - DNA, 25 bp, Homo sapien
tctgcagaacagtgtcacagtgcca

SEQ ID NO: 2957897 - DNA, 25 bp, Homo sapien
aacgggtgagctggcaacagtgtct

SEQ ID NO: 2957898 - DNA, 25 bp, Homo sapien
gataggaaaagcatagcaccctcag

SEQ ID NO: 2957899 - DNA, 25 bp, Homo sapien
cacctctactgcaatgaagcctggg

SEQ ID NO: 2957900 - DNA, 25 bp, Homo sapien
cgtgctcggcacacagacagatttt

SEQ ID NO: 2957901 - DNA, 25 bp, Homo sapien
gcgcgtgctcggcacacagacagat

SEQ ID NO: 2957902 - DNA, 25 bp, Homo sapien
tggtagagggatggggagcgcgtgc

SEQ ID NO: 2957903 - DNA, 25 bp, Homo sapien
gagcgcgtgctcggcacacagacag

SEQ ID NO: 2957904 - DNA, 25 bp, Homo sapien
agccagggatgacgcgccagccagg

SEQ ID NO: 2957905 - DNA, 25 bp, Homo sapien
atcaaagccagggatgacgcgccag

SEQ ID NO: 2957906 - DNA, 25 bp, Homo sapien
aaagccagggatgacgcgccagcca

SEQ ID NO: 2957907 - DNA, 25 bp, Homo sapien
tcaaagccagggatgacgcgccagc

SEQ ID NO: 2957908 - DNA, 25 bp, Homo sapien
catcagagaaaacagcgagttccct

SEQ ID NO: 2957909 - DNA, 25 bp, Homo sapien
cagccatcagagaaaacagcgagtt

SEQ ID NO: 2957910 - DNA, 25 bp, Homo sapien
gccatcagagaaaacagcgagttcc

SEQ ID NO: 2957911 - DNA, 25 bp, Homo sapien
cagcgagttccctggggtttaggat

SEQ ID NO: 2957912 - DNA, 25 bp, Homo sapien
cttcgttcagaagcacgggcagctt

SEQ ID NO: 2957913 - DNA, 25 bp, Homo sapien
tgaattccaccggtgtcccagatgg

SEQ ID NO: 2957914 - DNA, 25 bp, Homo sapien
gcagcttcaacgcagcctccagatt

SEQ ID NO: 2957915 - DNA, 25 bp, Homo sapien
gcggcactggctgcttcgttcagaa

SEQ ID NO: 2957916 - DNA, 25 bp, Homo sapien
agaaccagccccatcagaaatccct

SEQ ID NO: 2957917 - DNA, 25 bp, Homo sapien
ctctctaggggctgttaaaaccatc

SEQ ID NO: 2957918 - DNA, 25 bp, Homo sapien
tcagaccctgtcctgtcacagatgc

SEQ ID NO: 2957919 - DNA, 25 bp, Homo sapien
gctggctacgggctggtctcctcct

SEQ ID NO: 2957920 - DNA, 25 bp, Homo sapien
ggaggttgaagtgaacagagatcat

SEQ ID NO: 2957921 - DNA, 25 bp, Homo sapien
tagtccagctgcttgggaagctgag

SEQ ID NO: 2957922 - DNA, 25 bp, Homo sapien
gcaggagaatcgcttgaactcagga

SEQ ID NO: 2957923 - DNA, 25 bp, Homo sapien
ggttgaagtgaacagagatcatgcc

SEQ ID NO: 2957924 - DNA, 25 bp, Homo sapien
tgtgctagggattccagggcatgct

SEQ ID NO: 2957925 - DNA, 25 bp, Homo sapien
tggggccacgacaaaacaggcctgg

SEQ ID NO: 2957926 - DNA, 25 bp, Homo sapien
ctattcgtctgctatgagacctgga

SEQ ID NO: 2957927 - DNA, 25 bp, Homo sapien
gtgaagctgctattcgtctgctatg

SEQ ID NO: 2957928 - DNA, 25 bp, Homo sapien
tagggtgagccaggtttcatgagca

SEQ ID NO: 2957929 - DNA, 25 bp, Homo sapien
ttaaaccctatattccagcccgcag

SEQ ID NO: 2957930 - DNA, 25 bp, Homo sapien
gtcagccagcaggaggtaacccctg

SEQ ID NO: 2957931 - DNA, 25 bp, Homo sapien
agcagtgagagagcatagcttccca

SEQ ID NO: 2957932 - DNA, 25 bp, Homo sapien
taggcctagcgtccctccctgaaag

SEQ ID NO: 2957933 - DNA, 25 bp, Homo sapien
caggtactgggctttccaaggctgc

SEQ ID NO: 2957934 - DNA, 25 bp, Homo sapien
agcgtccctccctgaaagtatttgg

SEQ ID NO: 2957935 - DNA, 25 bp, Homo sapien
aagtatttggggacgagcccagctg

SEQ ID NO: 2957936 - DNA, 25 bp, Homo sapien
ggtggcagagccacccatcggggtg

SEQ ID NO: 2957937 - DNA, 25 bp, Homo sapien
ctggggtggcagagccacccatcgg

SEQ ID NO: 2957938 - DNA, 25 bp, Homo sapien
tggcagagccacccatcggggtgcc

SEQ ID NO: 2957939 - DNA, 25 bp, Homo sapien
tggggtggcagagccacccatcggg

SEQ ID NO: 2957940 - DNA, 25 bp, Homo sapien
tgtttggcttcgaaccggttctgta

SEQ ID NO: 2957941 - DNA, 25 bp, Homo sapien
gacgtgccattgtttggcttcgaac

SEQ ID NO: 2957942 - DNA, 25 bp, Homo sapien
gttctgtaagggtggccccagtcca

SEQ ID NO: 2957943 - DNA, 25 bp, Homo sapien
tggactgtgacgtgccattgtttgg

SEQ ID NO: 2957944 - DNA, 25 bp, Homo sapien
aggaaagctgcaggccgtcattctg

SEQ ID NO: 2957945 - DNA, 25 bp, Homo sapien
agctgcaggccgtcattctgcttcc

SEQ ID NO: 2957946 - DNA, 25 bp, Homo sapien
gcaggaaagctgcaggccgtcattc

SEQ ID NO: 2957947 - DNA, 25 bp, Homo sapien
caggaaagctgcaggccgtcattct

SEQ ID NO: 2957948 - DNA, 25 bp, Homo sapien
atgaggttgagacggccattctgac

SEQ ID NO: 2957949 - DNA, 25 bp, Homo sapien
tcactcgtcagtccagagggaggct

SEQ ID NO: 2957950 - DNA, 25 bp, Homo sapien
actcgtcagtccagagggaggcttc

SEQ ID NO: 2957951 - DNA, 25 bp, Homo sapien
gcttccatgaggttgagacggccat

SEQ ID NO: 2957952 - DNA, 25 bp, Homo sapien
gcaaaggcgaccgaatttctcttcc

SEQ ID NO: 2957953 - DNA, 25 bp, Homo sapien
caggaaggctgtcggttgtaagagg

SEQ ID NO: 2957954 - DNA, 25 bp, Homo sapien
tcggttgtaagaggaggctctgcaa

SEQ ID NO: 2957955 - DNA, 25 bp, Homo sapien
gaggctctgcaacatcgccagcaaa

SEQ ID NO: 2957956 - DNA, 25 bp, Homo sapien
catccctggcatgaggttagttctc

SEQ ID NO: 2957957 - DNA, 25 bp, Homo sapien
cagctctcagtggaggtcactagtg

SEQ ID NO: 2957958 - DNA, 25 bp, Homo sapien
cctggtcatgttgggactggaaccc

SEQ ID NO: 2957959 - DNA, 25 bp, Homo sapien
caagcctaagggttggagacgagcc

SEQ ID NO: 2957960 - DNA, 25 bp, Homo sapien
cacacagacgtggttgttgagttcg

SEQ ID NO: 2957961 - DNA, 25 bp, Homo sapien
taacccatggtatgtaggaatccat

SEQ ID NO: 2957962 - DNA, 25 bp, Homo sapien
caggtggagacatcaagtaacccat

SEQ ID NO: 2957963 - DNA, 25 bp, Homo sapien
gttgagttcgttaggatagataaag

SEQ ID NO: 2957964 - DNA, 25 bp, Homo sapien
tccagtccatggcagaacccaaatg

SEQ ID NO: 2957965 - DNA, 25 bp, Homo sapien
tatctgcaaagggagttactctgtg

SEQ ID NO: 2957966 - DNA, 25 bp, Homo sapien
ttgttaccgagcgatagtatctgca

SEQ ID NO: 2957967 - DNA, 25 bp, Homo sapien
aatgaataagcatgcagaagccaga

SEQ ID NO: 2957968 - DNA, 25 bp, Homo sapien
taaaacagcattagccgcccggtta

SEQ ID NO: 2957969 - DNA, 25 bp, Homo sapien
taatttgggtttcatcgacaagtaa

SEQ ID NO: 2957970 - DNA, 25 bp, Homo sapien
gccacagccggctctgataagcggc

SEQ ID NO: 2957971 - DNA, 25 bp, Homo sapien
cggctctgataagcggccgcagcga

SEQ ID NO: 2957972 - DNA, 25 bp, Homo sapien
tgtctgcgatggtcctgcaccctca

SEQ ID NO: 2957973 - DNA, 25 bp, Homo sapien
ctctgtctgcgatggtcctgcaccc

SEQ ID NO: 2957974 - DNA, 25 bp, Homo sapien
ccctcagtgcttgtttcccaccttc

SEQ ID NO: 2957975 - DNA, 25 bp, Homo sapien
gtttttggagccctctagccctgtg

SEQ ID NO: 2957976 - DNA, 25 bp, Homo sapien
gcacaccccagtgcgtgtacgcgag

SEQ ID NO: 2957977 - DNA, 25 bp, Homo sapien
ttgatgtgtgatgcgctgagtgcat

SEQ ID NO: 2957978 - DNA, 25 bp, Homo sapien
cgagtgttgatgtgtgatgcgctga

SEQ ID NO: 2957979 - DNA, 25 bp, Homo sapien
cccagtgcgtgtacgcgagtgttga

SEQ ID NO: 2957980 - DNA, 25 bp, Homo sapien
aggagcgcagggaggctccgggtca

SEQ ID NO: 2957981 - DNA, 25 bp, Homo sapien
gcgcagggaggctccgggtcaacat

SEQ ID NO: 2957982 - DNA, 25 bp, Homo sapien
agcgcagggaggctccgggtcaaca

SEQ ID NO: 2957983 - DNA, 25 bp, Homo sapien
gccgcaggagcgcagggaggctccg

SEQ ID NO: 2957984 - DNA, 25 bp, Homo sapien
tgtgattctgggaccacctgtgcag

SEQ ID NO: 2957985 - DNA, 25 bp, Homo sapien
ctgttggaggatgcggtttgcagcc

SEQ ID NO: 2957986 - DNA, 25 bp, Homo sapien
tggcttgggagagggcacccctttg

SEQ ID NO: 2957987 - DNA, 25 bp, Homo sapien
atcgagcaacgacggcctggctgtt

SEQ ID NO: 2957988 - DNA, 25 bp, Homo sapien
attgactggtcagggcgcatcggcc

SEQ ID NO: 2957989 - DNA, 25 bp, Homo sapien
cccatgctgacatcccatttggcaa

SEQ ID NO: 2957990 - DNA, 25 bp, Homo sapien
gaggttggaaaagccgctgactctt

SEQ ID NO: 2957991 - DNA, 25 bp, Homo sapien
ttccagaccctgagttcattgactg

SEQ ID NO: 2957992 - DNA, 25 bp, Homo sapien
accgctggcgcgcagacctggtgca

SEQ ID NO: 2957993 - DNA, 25 bp, Homo sapien
gtcaccgctggcgcgcagacctggt

SEQ ID NO: 2957994 - DNA, 25 bp, Homo sapien
tggcgcgcagacctggtgcagccgt

SEQ ID NO: 2957995 - DNA, 25 bp, Homo sapien
cactgggggtcaccgctggcgcgca

SEQ ID NO: 2957996 - DNA, 25 bp, Homo sapien
cgagtgtccaggagagtaatgcaag

SEQ ID NO: 2957997 - DNA, 25 bp, Homo sapien
ccagcagcatcgttgaggatgtcag

SEQ ID NO: 2957998 - DNA, 25 bp, Homo sapien
tcagtgacgcaggtgagaggctacg

SEQ ID NO: 2957999 - DNA, 25 bp, Homo sapien
aggctacgagtgtccaggagagtaa

SEQ ID NO: 2958000 - DNA, 25 bp, Homo sapien
tttgtgggtaccaggtgctcattca

SEQ ID NO: 2958001 - DNA, 25 bp, Homo sapien
atttcaaggagtttgtgggtaccag

SEQ ID NO: 2958002 - DNA, 25 bp, Homo sapien
ggagtttgtgggtaccaggtgctca

SEQ ID NO: 2958003 - DNA, 25 bp, Homo sapien
gagtttgtgggtaccaggtgctcat

SEQ ID NO: 2958004 - DNA, 25 bp, Homo sapien
gaatcatgtagcctgcaccacttgg

SEQ ID NO: 2958005 - DNA, 25 bp, Homo sapien
aagcacggacttggcttggatgccc

SEQ ID NO: 2958006 - DNA, 25 bp, Homo sapien
ggttgtgtggactagcagccttcat

SEQ ID NO: 2958007 - DNA, 25 bp, Homo sapien
tttgacgcaccagtttgtcccgagg

SEQ ID NO: 2958008 - DNA, 25 bp, Homo sapien
gactcaaccagatttagggctcttc

SEQ ID NO: 2958009 - DNA, 25 bp, Homo sapien
gaccctttaacataggctgccttag

SEQ ID NO: 2958010 - DNA, 25 bp, Homo sapien
tattatgaccgttaccaaaggactc

SEQ ID NO: 2958011 - DNA, 25 bp, Homo sapien
cctacatttgagacgagacccttta

SEQ ID NO: 2958012 - DNA, 25 bp, Homo sapien
gaaattgccagtgttcaaccattgc

SEQ ID NO: 2958013 - DNA, 25 bp, Homo sapien
ccattgctgatctgcaaaagcgaca

SEQ ID NO: 2958014 - DNA, 25 bp, Homo sapien
gcttgcgtactttgggttgatctca

SEQ ID NO: 2958015 - DNA, 25 bp, Homo sapien
gaatgtaactgcctgtagctaccac

SEQ ID NO: 2958016 - DNA, 25 bp, Homo sapien
cacaagaaagagacaccaaagtgtt

SEQ ID NO: 2958017 - DNA, 25 bp, Homo sapien
tgttgttcagccatgtttgtatgac

SEQ ID NO: 2958018 - DNA, 25 bp, Homo sapien
taaacatcccagagtcagatcccat

SEQ ID NO: 2958019 - DNA, 25 bp, Homo sapien
taatttaggaaatcaggagttagag

SEQ ID NO: 2958020 - DNA, 25 bp, Homo sapien
taccagtggcttttatgcatataca

SEQ ID NO: 2958021 - DNA, 25 bp, Homo sapien
agccagaggaggcatttggatccat

SEQ ID NO: 2958022 - DNA, 25 bp, Homo sapien
acgattaggctagattgtgaagtac

SEQ ID NO: 2958023 - DNA, 25 bp, Homo sapien
aaaattgtagccactcatgtattaa

SEQ ID NO: 2958024 - DNA, 25 bp, Homo sapien
ccttttgagcttgaagggttatcct

SEQ ID NO: 2958025 - DNA, 25 bp, Homo sapien
gccaaatgttcctagattgctctta

SEQ ID NO: 2958026 - DNA, 25 bp, Homo sapien
tgcagaacagctatatacttggtat

SEQ ID NO: 2958027 - DNA, 25 bp, Homo sapien
tcagcactgggaggattttttaaag

SEQ ID NO: 2958028 - DNA, 25 bp, Homo sapien
tggtgtcttgtaatcgtttgtgggt

SEQ ID NO: 2958029 - DNA, 25 bp, Homo sapien
gacaggaaatggtgtcattatctcc

SEQ ID NO: 2958030 - DNA, 25 bp, Homo sapien
tttgtgagaattacagctcttatgg

SEQ ID NO: 2958031 - DNA, 25 bp, Homo sapien
aggtactggaaaactgggcttctct

SEQ ID NO: 2958032 - DNA, 25 bp, Homo sapien
ttataggtccgcactaccgtgcctg

SEQ ID NO: 2958033 - DNA, 25 bp, Homo sapien
catatggccagcatctgaaacctga

SEQ ID NO: 2958034 - DNA, 25 bp, Homo sapien
tgttaaagcttaggcactgaattca

SEQ ID NO: 2958035 - DNA, 25 bp, Homo sapien
aatcacttctagcacgttttctggc

SEQ ID NO: 2958036 - DNA, 25 bp, Homo sapien
ttgtcctgaatgtggcctagtgtgt

SEQ ID NO: 2958037 - DNA, 25 bp, Homo sapien
tggcctagtgtgtcatcttacagtg

SEQ ID NO: 2958038 - DNA, 25 bp, Homo sapien
ttcagggcataatgtatgtaacttg

SEQ ID NO: 2958039 - DNA, 25 bp, Homo sapien
ccttcttcagggcataatgtatgta

SEQ ID NO: 2958040 - DNA, 25 bp, Homo sapien
ctaaagtgattaactattgattact

SEQ ID NO: 2958041 - DNA, 25 bp, Homo sapien
cagcttggaagactattgttgtaat

SEQ ID NO: 2958042 - DNA, 25 bp, Homo sapien
ttgcaaaaagtatactaaagtgatt

SEQ ID NO: 2958043 - DNA, 25 bp, Homo sapien
ctcagcttggaagactattgttgta

SEQ ID NO: 2958044 - DNA, 25 bp, Homo sapien
catggacttattataaaaactttgt

SEQ ID NO: 2958045 - DNA, 25 bp, Homo sapien
aataacgcctcttttttcatggact

SEQ ID NO: 2958046 - DNA, 25 bp, Homo sapien
ggtactatattatctatgcactaag

SEQ ID NO: 2958047 - DNA, 25 bp, Homo sapien
ctatattatctatgcactaaggaaa

SEQ ID NO: 2958048 - DNA, 25 bp, Homo sapien
ctattgttttgtcagatgttgccct

SEQ ID NO: 2958049 - DNA, 25 bp, Homo sapien
aagcctattcactattgttttgtca

SEQ ID NO: 2958050 - DNA, 25 bp, Homo sapien
gctttacaaagcctattcactattg

SEQ ID NO: 2958051 - DNA, 25 bp, Homo sapien
tgaaagctttacaaagcctattcac

SEQ ID NO: 2958052 - DNA, 25 bp, Homo sapien
aaatagttaataggctggctgtcgc

SEQ ID NO: 2958053 - DNA, 25 bp, Homo sapien
gaatgacgtcatcgcttgggagctg

SEQ ID NO: 2958054 - DNA, 25 bp, Homo sapien
cacagcgccatgagtcctggatgca

SEQ ID NO: 2958055 - DNA, 25 bp, Homo sapien
gcataaatgctaggagcagcagctc

SEQ ID NO: 2958056 - DNA, 25 bp, Homo sapien
tgatctcagatgatctgtccgcctt

SEQ ID NO: 2958057 - DNA, 25 bp, Homo sapien
tgtccgccttggcctcccaaagtgc

SEQ ID NO: 2958058 - DNA, 25 bp, Homo sapien
ctgatctcagatgatctgtccgcct

SEQ ID NO: 2958059 - DNA, 25 bp, Homo sapien
ctctgtttaaaattgaaatccaggc

SEQ ID NO: 2958060 - DNA, 25 bp, Homo sapien
aattgaaatctaattcacatatcat

SEQ ID NO: 2958061 - DNA, 25 bp, Homo sapien
tctgtttaaaattgaaatccaggct

SEQ ID NO: 2958062 - DNA, 25 bp, Homo sapien
taaaaattgaaatctaattcacata

SEQ ID NO: 2958063 - DNA, 25 bp, Homo sapien
tgcctcagcttaacagccttagtgg

SEQ ID NO: 2958064 - DNA, 25 bp, Homo sapien
tgtcttacctgcattaagttggagg

SEQ ID NO: 2958065 - DNA, 25 bp, Homo sapien
caaaggaatgattctgcctaaggct

SEQ ID NO: 2958066 - DNA, 25 bp, Homo sapien
gaccaggcctaggagtagcacacat

SEQ ID NO: 2958067 - DNA, 25 bp, Homo sapien
ttagtctagtaaaatacctgcaagc

SEQ ID NO: 2958068 - DNA, 25 bp, Homo sapien
tgcacccgtggctgtgattttaagc

SEQ ID NO: 2958069 - DNA, 25 bp, Homo sapien
taagaataagcactccactagatag

SEQ ID NO: 2958070 - DNA, 25 bp, Homo sapien
catcttgtgtcaggatcttagtcta

SEQ ID NO: 2958071 - DNA, 25 bp, Homo sapien
aataattgacaatactctagggaaa

SEQ ID NO: 2958072 - DNA, 25 bp, Homo sapien
gatgcacgaagttgataacacgaaa

SEQ ID NO: 2958073 - DNA, 25 bp, Homo sapien
caaagaatttctcccctgggagtct

SEQ ID NO: 2958074 - DNA, 25 bp, Homo sapien
caaaattgaccgttcagatgcacga

SEQ ID NO: 2958075 - DNA, 25 bp, Homo sapien
cgtaaccttacatcatctgcttgca

SEQ ID NO: 2958076 - DNA, 25 bp, Homo sapien
gaaggcagggctagttggatactca

SEQ ID NO: 2958077 - DNA, 25 bp, Homo sapien
tctagccaatgaacacttggaaggc

SEQ ID NO: 2958078 - DNA, 25 bp, Homo sapien
gatactcatagtcatgttccctgtg

SEQ ID NO: 2958079 - DNA, 25 bp, Homo sapien
gctgaacttggtcgctaagcaacaa

SEQ ID NO: 2958080 - DNA, 25 bp, Homo sapien
aactgtgtgtcccttattaggtgtc

SEQ ID NO: 2958081 - DNA, 25 bp, Homo sapien
agcagatgtgaaactgtgtgtccct

SEQ ID NO: 2958082 - DNA, 25 bp, Homo sapien
tgaatcattccacaaaggtaggtct

SEQ ID NO: 2958083 - DNA, 25 bp, Homo sapien
gaattgtagttacctgggcatgcca

SEQ ID NO: 2958084 - DNA, 25 bp, Homo sapien
tactcgctttgtgaatcagagagat

SEQ ID NO: 2958085 - DNA, 25 bp, Homo sapien
gcacctggccaagtggaatcttact

SEQ ID NO: 2958086 - DNA, 25 bp, Homo sapien
catgccatgatctttagacgtttgc

SEQ ID NO: 2958087 - DNA, 25 bp, Homo sapien
caccatattatttacgtttgagaac

SEQ ID NO: 2958088 - DNA, 25 bp, Homo sapien
tgtcatttgtatacccactatatag

SEQ ID NO: 2958089 - DNA, 25 bp, Homo sapien
gacattatgatactttgcctctcag

SEQ ID NO: 2958090 - DNA, 25 bp, Homo sapien
aatattctgccatataaccaccata

SEQ ID NO: 2958091 - DNA, 25 bp, Homo sapien
ctttgaaatcttgaccagtgatatt

SEQ ID NO: 2958092 - DNA, 25 bp, Homo sapien
ttttactttgaaatcttgaccagtg

SEQ ID NO: 2958093 - DNA, 25 bp, Homo sapien
tactttgaaatcttgaccagtgata

SEQ ID NO: 2958094 - DNA, 25 bp, Homo sapien
ccagtgatatttgattattgctttg

SEQ ID NO: 2958095 - DNA, 25 bp, Homo sapien
cacctggcctaaaaaacacatattt

SEQ ID NO: 2958096 - DNA, 25 bp, Homo sapien
cacacttggcccacacttgatattt

SEQ ID NO: 2958097 - DNA, 25 bp, Homo sapien
gagactgagtttcacgctctgttgc

SEQ ID NO: 2958098 - DNA, 25 bp, Homo sapien
ttgattgattgagacgagatctcac

SEQ ID NO: 2958099 - DNA, 25 bp, Homo sapien
tcctgtcagtccgtgtaaatatggg

SEQ ID NO: 2958100 - DNA, 25 bp, Homo sapien
aaattgcccgactgctagactctgg

SEQ ID NO: 2958101 - DNA, 25 bp, Homo sapien
ccattgggcaaagggtcatgacctg

SEQ ID NO: 2958102 - DNA, 25 bp, Homo sapien
gtcacacgtgccaagaaaaccatct

SEQ ID NO: 2958103 - DNA, 25 bp, Homo sapien
ctctccccagggccagtgccctcat

SEQ ID NO: 2958104 - DNA, 25 bp, Homo sapien
tcttgaacctcctttttccactctc

SEQ ID NO: 2958105 - DNA, 25 bp, Homo sapien
tcctctccccagggccagtgccctc

SEQ ID NO: 2958106 - DNA, 25 bp, Homo sapien
tctcctctccccagggccagtgccc

SEQ ID NO: 2958107 - DNA, 25 bp, Homo sapien
tcctcatactgaaatttcaagtcca

SEQ ID NO: 2958108 - DNA, 25 bp, Homo sapien
ctcctcatactgaaatttcaagtcc

SEQ ID NO: 2958109 - DNA, 25 bp, Homo sapien
tctcctcatactgaaatttcaagtc

SEQ ID NO: 2958110 - DNA, 25 bp, Homo sapien
gtctcctcatactgaaatttcaagt

SEQ ID NO: 2958111 - DNA, 25 bp, Homo sapien
tatatgacacgctatttgaagacag

SEQ ID NO: 2958112 - DNA, 25 bp, Homo sapien
cttttgaaacagtaacatgcaggcc

SEQ ID NO: 2958113 - DNA, 25 bp, Homo sapien
ccttctaagagactggaaagcctgc

SEQ ID NO: 2958114 - DNA, 25 bp, Homo sapien
gaaagcctgctacagatatgctgag

SEQ ID NO: 2958115 - DNA, 25 bp, Homo sapien
gacctctgcagcgactctaagaacc

SEQ ID NO: 2958116 - DNA, 25 bp, Homo sapien
cagcgactctaagaacctttccaaa

SEQ ID NO: 2958117 - DNA, 25 bp, Homo sapien
tctgcagcgactctaagaacctttc

SEQ ID NO: 2958118 - DNA, 25 bp, Homo sapien
ctgacctctgcagcgactctaagaa

SEQ ID NO: 2958119 - DNA, 25 bp, Homo sapien
tctaataccatcgaccttttctcct

SEQ ID NO: 2958120 - DNA, 25 bp, Homo sapien
acaatgattctaataccatcgacct

SEQ ID NO: 2958121 - DNA, 25 bp, Homo sapien
cattttctgctcttatcaacaatga

SEQ ID NO: 2958122 - DNA, 25 bp, Homo sapien
tctgctcttatcaacaatgattcta

SEQ ID NO: 2958123 - DNA, 25 bp, Homo sapien
ctcctcaatgcttctgaggccctga

SEQ ID NO: 2958124 - DNA, 25 bp, Homo sapien
tcctcaatgcttctgaggccctgat

SEQ ID NO: 2958125 - DNA, 25 bp, Homo sapien
cctcaatgcttctgaggccctgatt

SEQ ID NO: 2958126 - DNA, 25 bp, Homo sapien
ctcaatgcttctgaggccctgattc

SEQ ID NO: 2958127 - DNA, 25 bp, Homo sapien
agcacttgcacgcacggaacgcttc

SEQ ID NO: 2958128 - DNA, 25 bp, Homo sapien
attttgcagaacaccgctcgcccac

SEQ ID NO: 2958129 - DNA, 25 bp, Homo sapien
ttctgcgcagatccgctgccggaga

SEQ ID NO: 2958130 - DNA, 25 bp, Homo sapien
cggaacgcttctgcgcagatccgct

SEQ ID NO: 2958131 - DNA, 25 bp, Homo sapien
cagctgcttaggtttgaactccggc

SEQ ID NO: 2958132 - DNA, 25 bp, Homo sapien
cttaggtttgaactccggctgcagc

SEQ ID NO: 2958133 - DNA, 25 bp, Homo sapien
gctgcttaggtttgaactccggctg

SEQ ID NO: 2958134 - DNA, 25 bp, Homo sapien
gccagcacccgaaacgcgcccggga

SEQ ID NO: 2958135 - DNA, 25 bp, Homo sapien
gacaaagcccaaagactgcggagaa

SEQ ID NO: 2958136 - DNA, 25 bp, Homo sapien
gactaaagcgccagaaatacaccct

SEQ ID NO: 2958137 - DNA, 25 bp, Homo sapien
tgctctcgacagacacaaataaggc

SEQ ID NO: 2958138 - DNA, 25 bp, Homo sapien
tcggtcccggtgacacaacagtaag

SEQ ID NO: 2958139 - DNA, 25 bp, Homo sapien
gagactctatggtacctagccacag

SEQ ID NO: 2958140 - DNA, 25 bp, Homo sapien
caccaggctgacttagtcctgtgta

SEQ ID NO: 2958141 - DNA, 25 bp, Homo sapien
cagcatcttagcactgtagtccaat

SEQ ID NO: 2958142 - DNA, 25 bp, Homo sapien
ctttagttaacctcttcttacagca

SEQ ID NO: 2958143 - DNA, 25 bp, Homo sapien
taggaggcccctcgccttgaaagac

SEQ ID NO: 2958144 - DNA, 25 bp, Homo sapien
ttgaaagacgatccctaaagtagac

SEQ ID NO: 2958145 - DNA, 25 bp, Homo sapien
cagcttgagataggaggcccctcgc

SEQ ID NO: 2958146 - DNA, 25 bp, Homo sapien
tcgccttgaaagacgatccctaaag

SEQ ID NO: 2958147 - DNA, 25 bp, Homo sapien
tttacagaagactgcgctcatgacc

SEQ ID NO: 2958148 - DNA, 25 bp, Homo sapien
aatagtttgacttaatgccacagcc

SEQ ID NO: 2958149 - DNA, 25 bp, Homo sapien
tactgtgtaccaaacactgcggtgg

SEQ ID NO: 2958150 - DNA, 25 bp, Homo sapien
gagagtaactattccgtccagatcc

SEQ ID NO: 2958151 - DNA, 25 bp, Homo sapien
gtttgatcgcaatgaaggtacgctc

SEQ ID NO: 2958152 - DNA, 25 bp, Homo sapien
tttcagaccaacaaggcggaatcct

SEQ ID NO: 2958153 - DNA, 25 bp, Homo sapien
cgctggaccccatctggtttgatcg

SEQ ID NO: 2958154 - DNA, 25 bp, Homo sapien
tcaaaacgcttgataatctctccca

SEQ ID NO: 2958155 - DNA, 25 bp, Homo sapien
aatgggaacaatgaagtccacttac

SEQ ID NO: 2958156 - DNA, 25 bp, Homo sapien
tatgaaggaatcaaaatgggaacaa

SEQ ID NO: 2958157 - DNA, 25 bp, Homo sapien
atgaaggaatcaaaatgggaacaat

SEQ ID NO: 2958158 - DNA, 25 bp, Homo sapien
caaaatgggaacaatgaagtccact

SEQ ID NO: 2958159 - DNA, 25 bp, Homo sapien
acttgtgttcactctaccgtggaga

SEQ ID NO: 2958160 - DNA, 25 bp, Homo sapien
tagcaatgcacctcctattacagag

SEQ ID NO: 2958161 - DNA, 25 bp, Homo sapien
caagatgtagccaaacgctagggca

SEQ ID NO: 2958162 - DNA, 25 bp, Homo sapien
cagagatgcagtcatatgtggaact

SEQ ID NO: 2958163 - DNA, 25 bp, Homo sapien
ggcaactaccggccctgagtgcatg

SEQ ID NO: 2958164 - DNA, 25 bp, Homo sapien
ggtccttcaggtcaacgtagtgttc

SEQ ID NO: 2958165 - DNA, 25 bp, Homo sapien
gccggcaaagaatggacggtccttc

SEQ ID NO: 2958166 - DNA, 25 bp, Homo sapien
catgtatttcaccaggccggcaaag

SEQ ID NO: 2958167 - DNA, 25 bp, Homo sapien
gaaaaccaatcacagcagaaaatct

SEQ ID NO: 2958168 - DNA, 25 bp, Homo sapien
tatggtcaaagaagaaaaccaatca

SEQ ID NO: 2958169 - DNA, 25 bp, Homo sapien
agaagaagatatggtcaaagaagaa

SEQ ID NO: 2958170 - DNA, 25 bp, Homo sapien
ctccaaggacagaagaagatatggt

SEQ ID NO: 2958171 - DNA, 25 bp, Homo sapien
gttggtctccccgagcatgactcgg

SEQ ID NO: 2958172 - DNA, 25 bp, Homo sapien
gcttggagtctgcagggttggtctc

SEQ ID NO: 2958173 - DNA, 25 bp, Homo sapien
atgactcggcccgtcttcaccacat

SEQ ID NO: 2958174 - DNA, 25 bp, Homo sapien
agggttggtctccccgagcatgact

SEQ ID NO: 2958175 - DNA, 25 bp, Homo sapien
tggtgcaaacagtgagagccttcag

SEQ ID NO: 2958176 - DNA, 25 bp, Homo sapien
cacttcgtgtaacagaggtacgact

SEQ ID NO: 2958177 - DNA, 25 bp, Homo sapien
gccagcaaagtgtgttgtaccaggt

SEQ ID NO: 2958178 - DNA, 25 bp, Homo sapien
agccaaacgccaacttaagagggag

SEQ ID NO: 2958179 - DNA, 25 bp, Homo sapien
gagaaagagatagtcacatgaccaa

SEQ ID NO: 2958180 - DNA, 25 bp, Homo sapien
tggagaaagagatagtcacatgacc

SEQ ID NO: 2958181 - DNA, 25 bp, Homo sapien
ggtggagaaagagatagtcacatga

SEQ ID NO: 2958182 - DNA, 25 bp, Homo sapien
ctgggtggagaaagagatagtcaca

SEQ ID NO: 2958183 - DNA, 25 bp, Homo sapien
ggtgaaaccacaagccgatctcctt

SEQ ID NO: 2958184 - DNA, 25 bp, Homo sapien
accacaagccgatctccttctctgc

SEQ ID NO: 2958185 - DNA, 25 bp, Homo sapien
acaagccgatctccttctctgcact

SEQ ID NO: 2958186 - DNA, 25 bp, Homo sapien
gtgaaaccacaagccgatctccttc

SEQ ID NO: 2958187 - DNA, 25 bp, Homo sapien
ttctgagcacagctcgtgtaatcta

SEQ ID NO: 2958188 - DNA, 25 bp, Homo sapien
tctgagcacagctcgtgtaatctac

SEQ ID NO: 2958189 - DNA, 25 bp, Homo sapien
tcattcatagatccagttctgagca

SEQ ID NO: 2958190 - DNA, 25 bp, Homo sapien
gatgtgaaaagcaatgtggtctgcc

SEQ ID NO: 2958191 - DNA, 25 bp, Homo sapien
atggatgtgaaaagcaatgtggtct

SEQ ID NO: 2958192 - DNA, 25 bp, Homo sapien
aaatggatgtgaaaagcaatgtggt

SEQ ID NO: 2958193 - DNA, 25 bp, Homo sapien
tgaaaagcaatgtggtctgccctcc

SEQ ID NO: 2958194 - DNA, 25 bp, Homo sapien
atggtcggggatggtaacactgtac

SEQ ID NO: 2958195 - DNA, 25 bp, Homo sapien
tccctccaaattatgatgaagttcc

SEQ ID NO: 2958196 - DNA, 25 bp, Homo sapien
aataactagatttcctacagcctgg

SEQ ID NO: 2958197 - DNA, 25 bp, Homo sapien
ctgtacagggagaactcacagctcc

SEQ ID NO: 2958198 - DNA, 25 bp, Homo sapien
tggccacgtagcacatgctccatag

SEQ ID NO: 2958199 - DNA, 25 bp, Homo sapien
gcaggcaaagaatgcctgtgtgtat

SEQ ID NO: 2958200 - DNA, 25 bp, Homo sapien
taggtcaggttattcagtgtacatg

SEQ ID NO: 2958201 - DNA, 25 bp, Homo sapien
gcaatgcaacaatatgaagtaacca

SEQ ID NO: 2958202 - DNA, 25 bp, Homo sapien
gaggaaagtctagaccctgtcatag

SEQ ID NO: 2958203 - DNA, 25 bp, Homo sapien
gagttttccagttcaccctgaggtg

SEQ ID NO: 2958204 - DNA, 25 bp, Homo sapien
cactaaagtgcggtcgagttttcca

SEQ ID NO: 2958205 - DNA, 25 bp, Homo sapien
tgtcatagagattaggcctgtcatc

SEQ ID NO: 2958206 - DNA, 25 bp, Homo sapien
cttagcgggatgctcttctcgcagg

SEQ ID NO: 2958207 - DNA, 25 bp, Homo sapien
ccccgcctacaggatggcgttcaga

SEQ ID NO: 2958208 - DNA, 25 bp, Homo sapien
gcaaaccgggagctttgctcagcac

SEQ ID NO: 2958209 - DNA, 25 bp, Homo sapien
ttcagactccttagcgggatgctct

SEQ ID NO: 2958210 - DNA, 25 bp, Homo sapien
ccgagcaccggcattaaccttgact

SEQ ID NO: 2958211 - DNA, 25 bp, Homo sapien
ccggcattaaccttgacttggctct

SEQ ID NO: 2958212 - DNA, 25 bp, Homo sapien
ttgagccctggttaagcctcggcct

SEQ ID NO: 2958213 - DNA, 25 bp, Homo sapien
gtcgtgcacccacggtccttatcct

SEQ ID NO: 2958214 - DNA, 25 bp, Homo sapien
agatcgagacggatccagagacagg

SEQ ID NO: 2958215 - DNA, 25 bp, Homo sapien
acgcggccggagaacagtgtccacg

SEQ ID NO: 2958216 - DNA, 25 bp, Homo sapien
agcagagagctggtgcgaccaccac

SEQ ID NO: 2958217 - DNA, 25 bp, Homo sapien
gcgccctcgccaggcagagatcgag

SEQ ID NO: 2958218 - DNA, 25 bp, Homo sapien
gcggcagcgcaagcggaagagggaa

SEQ ID NO: 2958219 - DNA, 25 bp, Homo sapien
gaggagtcgccaggggatgcgcccc

SEQ ID NO: 2958220 - DNA, 25 bp, Homo sapien
gcagcgcaagcggaagagggaacgg

SEQ ID NO: 2958221 - DNA, 25 bp, Homo sapien
ctgcggcagcgcaagcggaagaggg

SEQ ID NO: 2958222 - DNA, 25 bp, Homo sapien
agcccgaaggcccgcggggcgcaag

SEQ ID NO: 2958223 - DNA, 25 bp, Homo sapien
ggacacgtggcttcccggccgcttc

SEQ ID NO: 2958224 - DNA, 25 bp, Homo sapien
tcccgctccgacgccgcgcgggacc

SEQ ID NO: 2958225 - DNA, 25 bp, Homo sapien
cgtccctctgcggagcccgaaggcc

SEQ ID NO: 2958226 - DNA, 25 bp, Homo sapien
gcgagaggtgcggtcagggcccggg

SEQ ID NO: 2958227 - DNA, 25 bp, Homo sapien
gaggtgcggtcagggcccgggcgca

SEQ ID NO: 2958228 - DNA, 25 bp, Homo sapien
tgcggggcgagaggtgcggtcaggg

SEQ ID NO: 2958229 - DNA, 25 bp, Homo sapien
cccgggcgcaggctctggcggggcc

SEQ ID NO: 2958230 - DNA, 25 bp, Homo sapien
ttgatggcgatgaaggtgcgctcca

SEQ ID NO: 2958231 - DNA, 25 bp, Homo sapien
cacgccgtccggcttgatggcgatg

SEQ ID NO: 2958232 - DNA, 25 bp, Homo sapien
cgccgtccggcttgatggcgatgaa

SEQ ID NO: 2958233 - DNA, 25 bp, Homo sapien
cgcccaccaggccgcgctgcacgcc

SEQ ID NO: 2958234 - DNA, 25 bp, Homo sapien
ttcaggtcaatgtagtgctgcttca

SEQ ID NO: 2958235 - DNA, 25 bp, Homo sapien
tcaggtcaatgtagtgctgcttcag

SEQ ID NO: 2958236 - DNA, 25 bp, Homo sapien
caggtcaatgtagtgctgcttcagg

SEQ ID NO: 2958237 - DNA, 25 bp, Homo sapien
taacatgctagggtaaggattccag

SEQ ID NO: 2958238 - DNA, 25 bp, Homo sapien
cactcaggacaggtagggtctaaca

SEQ ID NO: 2958239 - DNA, 25 bp, Homo sapien
gattatcagctaaccccagcagaga

SEQ ID NO: 2958240 - DNA, 25 bp, Homo sapien
gacttcccagtttagctgagacaga

SEQ ID NO: 2958241 - DNA, 25 bp, Homo sapien
tgctggattggtctccccaagcatc

SEQ ID NO: 2958242 - DNA, 25 bp, Homo sapien
agtccccacgaatggtgcctggctt

SEQ ID NO: 2958243 - DNA, 25 bp, Homo sapien
ccaagcatcactcggcctgtcttca

SEQ ID NO: 2958244 - DNA, 25 bp, Homo sapien
aagtccccacgaatggtgcctggct

SEQ ID NO: 2958245 - DNA, 25 bp, Homo sapien
tacaggcgtaaacccctggcctgaa

SEQ ID NO: 2958246 - DNA, 25 bp, Homo sapien
ttacaggcgtaaacccctggcctga

SEQ ID NO: 2958247 - DNA, 25 bp, Homo sapien
caggcgtaaacccctggcctgaaag

SEQ ID NO: 2958248 - DNA, 25 bp, Homo sapien
gctatacaactgtaaaagtgcttga

SEQ ID NO: 2958249 - DNA, 25 bp, Homo sapien
ggacagcactccagactctttcagc

SEQ ID NO: 2958250 - DNA, 25 bp, Homo sapien
gactctttcagccaaattgccactt

SEQ ID NO: 2958251 - DNA, 25 bp, Homo sapien
tgcaaaagtctgtttaatgggtacc

SEQ ID NO: 2958252 - DNA, 25 bp, Homo sapien
tgtagtcaaccagttcttcaggctt

SEQ ID NO: 2958253 - DNA, 25 bp, Homo sapien
cttgtagtcaaccagttcttcaggc

SEQ ID NO: 2958254 - DNA, 25 bp, Homo sapien
atgagcacaagacttgtagtcaacc

SEQ ID NO: 2958255 - DNA, 25 bp, Homo sapien
gtagtcaaccagttcttcaggctta

SEQ ID NO: 2958256 - DNA, 25 bp, Homo sapien
ggcaaatatgctctataaaagaatg

SEQ ID NO: 2958257 - DNA, 25 bp, Homo sapien
ataaaagaatgatcaatcctgttgc

SEQ ID NO: 2958258 - DNA, 25 bp, Homo sapien
tattggcaaatatgctctataaaag

SEQ ID NO: 2958259 - DNA, 25 bp, Homo sapien
aaaagaatgatcaatcctgttgcct

SEQ ID NO: 2958260 - DNA, 25 bp, Homo sapien
acctccacctcccatgttcacacca

SEQ ID NO: 2958261 - DNA, 25 bp, Homo sapien
aacctccacctcccatgttcacacc

SEQ ID NO: 2958262 - DNA, 25 bp, Homo sapien
cctccacctcccatgttcacaccat

SEQ ID NO: 2958263 - DNA, 25 bp, Homo sapien
taaccttttccttgccgtgtatgag

SEQ ID NO: 2958264 - DNA, 25 bp, Homo sapien
tcttattctacgatactaacacggg

SEQ ID NO: 2958265 - DNA, 25 bp, Homo sapien
tgcgtgatgtgaataccctctccca

SEQ ID NO: 2958266 - DNA, 25 bp, Homo sapien
tacggttcaaaatgtactgctgacc

SEQ ID NO: 2958267 - DNA, 25 bp, Homo sapien
gagcgctctagcgtttaccagtgag

SEQ ID NO: 2958268 - DNA, 25 bp, Homo sapien
tctcctctggaatataggtagggct

SEQ ID NO: 2958269 - DNA, 25 bp, Homo sapien
tgttaatggaaagccccaggagacc

SEQ ID NO: 2958270 - DNA, 25 bp, Homo sapien
gttgtgactgaatgagagcgctcta

SEQ ID NO: 2958271 - DNA, 25 bp, Homo sapien
ggttgacaagatattcaggatctca

SEQ ID NO: 2958272 - DNA, 25 bp, Homo sapien
catcaccacaaaggtcatggaaggg

SEQ ID NO: 2958273 - DNA, 25 bp, Homo sapien
cactaaagtgttaaactggaatggt

SEQ ID NO: 2958274 - DNA, 25 bp, Homo sapien
caggatctcagtctacacattgagg

SEQ ID NO: 2958275 - DNA, 25 bp, Homo sapien
gattaatgcactatgcctggttctt

SEQ ID NO: 2958276 - DNA, 25 bp, Homo sapien
gaaaactatagctgaagggtgatac

SEQ ID NO: 2958277 - DNA, 25 bp, Homo sapien
actgtaccctgctgatccttcagct

SEQ ID NO: 2958278 - DNA, 25 bp, Homo sapien
aaagcattgtacatgtcttggaagg

SEQ ID NO: 2958279 - DNA, 25 bp, Homo sapien
taagtagtgtcaccaagtgaggtac

SEQ ID NO: 2958280 - DNA, 25 bp, Homo sapien
tggacccacagtacctcattagatg

SEQ ID NO: 2958281 - DNA, 25 bp, Homo sapien
tcattagatgcccttgggaccagat

SEQ ID NO: 2958282 - DNA, 25 bp, Homo sapien
gaaatatagtctgtgtaacatacat

SEQ ID NO: 2958283 - DNA, 25 bp, Homo sapien
cctcgacttctcgggtacaagcaat

SEQ ID NO: 2958284 - DNA, 25 bp, Homo sapien
tagaaatggtgtctcaccatattac

SEQ ID NO: 2958285 - DNA, 25 bp, Homo sapien
gccaaggcggatggctttagaccag

SEQ ID NO: 2958286 - DNA, 25 bp, Homo sapien
tttaaattggactggacgcggtggc

SEQ ID NO: 2958287 - DNA, 25 bp, Homo sapien
tgctttgctggaacccacaataaaa

SEQ ID NO: 2958288 - DNA, 25 bp, Homo sapien
ctttgctggaacccacaataaaagg

SEQ ID NO: 2958289 - DNA, 25 bp, Homo sapien
gctttgctggaacccacaataaaag

SEQ ID NO: 2958290 - DNA, 25 bp, Homo sapien
cttgctttgctggaacccacaataa

SEQ ID NO: 2958291 - DNA, 25 bp, Homo sapien
gcctgcagctctccgaccccaggaa

SEQ ID NO: 2958292 - DNA, 25 bp, Homo sapien
acaaaggatctggtgagagccgagc

SEQ ID NO: 2958293 - DNA, 25 bp, Homo sapien
agcgcggcagccgctttgtgtgcca

SEQ ID NO: 2958294 - DNA, 25 bp, Homo sapien
gcggcagccgctttgtgtgccaggt

SEQ ID NO: 2958295 - DNA, 25 bp, Homo sapien
ccaatcggggcgcgggtcacggcgc

SEQ ID NO: 2958296 - DNA, 25 bp, Homo sapien
tcggggcgcgggtcacggcgcaggc

SEQ ID NO: 2958297 - DNA, 25 bp, Homo sapien
aggcgcgctggggagggagggctat

SEQ ID NO: 2958298 - DNA, 25 bp, Homo sapien
gcgcgggtcacggcgcaggcgcgct

SEQ ID NO: 2958299 - DNA, 25 bp, Homo sapien
ctgcgcatgcgcccaggcccctcgc

SEQ ID NO: 2958300 - DNA, 25 bp, Homo sapien
cggcatcgttaggtttgaggagaaa

SEQ ID NO: 2958301 - DNA, 25 bp, Homo sapien
ccgctccggcggcatcgttaggttt

SEQ ID NO: 2958302 - DNA, 25 bp, Homo sapien
gctccggcggcatcgttaggtttga

SEQ ID NO: 2958303 - DNA, 25 bp, Homo sapien
tcgttaggtttgaggagaaacgcag

SEQ ID NO: 2958304 - DNA, 25 bp, Homo sapien
tctccggtccagtttcattcgtctc

SEQ ID NO: 2958305 - DNA, 25 bp, Homo sapien
gcttcgctccggttctccggtccag

SEQ ID NO: 2958306 - DNA, 25 bp, Homo sapien
cttccgcttcggcttcgctccggtt

SEQ ID NO: 2958307 - DNA, 25 bp, Homo sapien
cggttctccggtccagtttcattcg

SEQ ID NO: 2958308 - DNA, 25 bp, Homo sapien
gatgaaggggcaggcttttggggag

SEQ ID NO: 2958309 - DNA, 25 bp, Homo sapien
atgaaggggcaggcttttggggagg

SEQ ID NO: 2958310 - DNA, 25 bp, Homo sapien
ggatgaaggggcaggcttttgggga

SEQ ID NO: 2958311 - DNA, 25 bp, Homo sapien
gccggagccgtctctcttcctccgc

SEQ ID NO: 2958312 - DNA, 25 bp, Homo sapien
cggagccgtctctcttcctccgccg

SEQ ID NO: 2958313 - DNA, 25 bp, Homo sapien
ggagccgtctctcttcctccgccgc

SEQ ID NO: 2958314 - DNA, 25 bp, Homo sapien
ctgccggagccgtctctcttcctcc

SEQ ID NO: 2958315 - DNA, 25 bp, Homo sapien
ccaagcaccgctccacggccggttt

SEQ ID NO: 2958316 - DNA, 25 bp, Homo sapien
aagcaccgctccacggccggtttgt

SEQ ID NO: 2958317 - DNA, 25 bp, Homo sapien
ctccaagcaccgctccacggccggt

SEQ ID NO: 2958318 - DNA, 25 bp, Homo sapien
cggccggtttgtcctcctccagcct

SEQ ID NO: 2958319 - DNA, 25 bp, Homo sapien
ccgcagcaacgcgtcctcgtcgttc

SEQ ID NO: 2958320 - DNA, 25 bp, Homo sapien
cagcaacgcgtcctcgtcgttctcg

SEQ ID NO: 2958321 - DNA, 25 bp, Homo sapien
agcaacgcgtcctcgtcgttctcga

SEQ ID NO: 2958322 - DNA, 25 bp, Homo sapien
aacgcgtcctcgtcgttctcgacgt

SEQ ID NO: 2958323 - DNA, 25 bp, Homo sapien
ttctccacttctgagtcacccgagt

SEQ ID NO: 2958324 - DNA, 25 bp, Homo sapien
gagtcacccgagtcttcatgttctt

SEQ ID NO: 2958325 - DNA, 25 bp, Homo sapien
cacttctgagtcacccgagtcttca

SEQ ID NO: 2958326 - DNA, 25 bp, Homo sapien
cacccgagtcttcatgttcttgaac

SEQ ID NO: 2958327 - DNA, 25 bp, Homo sapien
catcatatccttccgaaaccgattg

SEQ ID NO: 2958328 - DNA, 25 bp, Homo sapien
tcatcatatccttccgaaaccgatt

SEQ ID NO: 2958329 - DNA, 25 bp, Homo sapien
agatgttttccgcttagtagtctct

SEQ ID NO: 2958330 - DNA, 25 bp, Homo sapien
tgaagatgttttccgcttagtagtc

SEQ ID NO: 2958331 - DNA, 25 bp, Homo sapien
atgttttccgcttagtagtctctgc

SEQ ID NO: 2958332 - DNA, 25 bp, Homo sapien
tctgaagatgttttccgcttagtag

SEQ ID NO: 2958333 - DNA, 25 bp, Homo sapien
acatgtaactccaagcacacaaacc

SEQ ID NO: 2958334 - DNA, 25 bp, Homo sapien
ggatatactccggactctcaggatt

SEQ ID NO: 2958335 - DNA, 25 bp, Homo sapien
gcagaaaatagccatggtacaagtt

SEQ ID NO: 2958336 - DNA, 25 bp, Homo sapien
taaactcaaaagatcgaagaagcag

SEQ ID NO: 2958337 - DNA, 25 bp, Homo sapien
atgtggatatgaaattcccagtcct

SEQ ID NO: 2958338 - DNA, 25 bp, Homo sapien
agttgatgtggatatgaaattccca

SEQ ID NO: 2958339 - DNA, 25 bp, Homo sapien
gttgatgtggatatgaaattcccag

SEQ ID NO: 2958340 - DNA, 25 bp, Homo sapien
gatgtggatatgaaattcccagtcc

SEQ ID NO: 2958341 - DNA, 25 bp, Homo sapien
agtaggacgttcagcattcgcatgc

SEQ ID NO: 2958342 - DNA, 25 bp, Homo sapien
gatccgagcaacagtaggacgttca

SEQ ID NO: 2958343 - DNA, 25 bp, Homo sapien
gcacagatgagatccgagcaacagt

SEQ ID NO: 2958344 - DNA, 25 bp, Homo sapien
tctgtgcaccgggatggaactgcac

SEQ ID NO: 2958345 - DNA, 25 bp, Homo sapien
atagtgatacagcattatctaatcc

SEQ ID NO: 2958346 - DNA, 25 bp, Homo sapien
acagcattatctaatccagcaacca

SEQ ID NO: 2958347 - DNA, 25 bp, Homo sapien
ctgaaatagtgatacagcattatct

SEQ ID NO: 2958348 - DNA, 25 bp, Homo sapien
gcattatctaatccagcaaccatca

SEQ ID NO: 2958349 - DNA, 25 bp, Homo sapien
attaactttccagccagcatgtcat

SEQ ID NO: 2958350 - DNA, 25 bp, Homo sapien
aattaactttccagccagcatgtca

SEQ ID NO: 2958351 - DNA, 25 bp, Homo sapien
gaattaactttccagccagcatgtc

SEQ ID NO: 2958352 - DNA, 25 bp, Homo sapien
cagcaatgccatttatgagcaagaa

SEQ ID NO: 2958353 - DNA, 25 bp, Homo sapien
ccagcaatgccatttatgagcaaga

SEQ ID NO: 2958354 - DNA, 25 bp, Homo sapien
gatgctgcaacccttccattaattt

SEQ ID NO: 2958355 - DNA, 25 bp, Homo sapien
taattttcatgcttccaatcagttc

SEQ ID NO: 2958356 - DNA, 25 bp, Homo sapien
gtggatgctgcaacccttccattaa

SEQ ID NO: 2958357 - DNA, 25 bp, Homo sapien
aattttcatgcttccaatcagttct

SEQ ID NO: 2958358 - DNA, 25 bp, Homo sapien
atgtaaataaccttgtgaaagtctg

SEQ ID NO: 2958359 - DNA, 25 bp, Homo sapien
taaataaccttgtgaaagtctgatt

SEQ ID NO: 2958360 - DNA, 25 bp, Homo sapien
caatgtaaataaccttgtgaaagtc

SEQ ID NO: 2958361 - DNA, 25 bp, Homo sapien
tgtaaataaccttgtgaaagtctga

SEQ ID NO: 2958362 - DNA, 25 bp, Homo sapien
aacctttgccttatatgtctgcctg

SEQ ID NO: 2958363 - DNA, 25 bp, Homo sapien
caggatattgctctaaagttcaccc

SEQ ID NO: 2958364 - DNA, 25 bp, Homo sapien
ctagagtaagcgtgcaggttaagca

SEQ ID NO: 2958365 - DNA, 25 bp, Homo sapien
aaaaggcaacatgagatggccaggc

SEQ ID NO: 2958366 - DNA, 25 bp, Homo sapien
cctagatgtggcaatgcttaatcca

SEQ ID NO: 2958367 - DNA, 25 bp, Homo sapien
ccattcctagatgtggcaatgctta

SEQ ID NO: 2958368 - DNA, 25 bp, Homo sapien
gatgtggcaatgcttaatccatata

SEQ ID NO: 2958369 - DNA, 25 bp, Homo sapien
aatgcttaatccatataaactgcct

SEQ ID NO: 2958370 - DNA, 25 bp, Homo sapien
atcttcagaatcaagtagtagaaca

SEQ ID NO: 2958371 - DNA, 25 bp, Homo sapien
ctgcatcttcagaatcaagtagtag

SEQ ID NO: 2958372 - DNA, 25 bp, Homo sapien
cttcagaatcaagtagtagaacaca

SEQ ID NO: 2958373 - DNA, 25 bp, Homo sapien
gcatcttcagaatcaagtagtagaa

SEQ ID NO: 2958374 - DNA, 25 bp, Homo sapien
tactgtcctggtgactcattacctg

SEQ ID NO: 2958375 - DNA, 25 bp, Homo sapien
tacctgatgcctgcctattgctgca

SEQ ID NO: 2958376 - DNA, 25 bp, Homo sapien
taaatggttgttggccaagcacatc

SEQ ID NO: 2958377 - DNA, 25 bp, Homo sapien
gctgcagtgacctcaaggctcatct

SEQ ID NO: 2958378 - DNA, 25 bp, Homo sapien
tacaaagagaccagctatcaccact

SEQ ID NO: 2958379 - DNA, 25 bp, Homo sapien
cacagatgtcctatagaacctccaa

SEQ ID NO: 2958380 - DNA, 25 bp, Homo sapien
tatcaccactatagccacagatgtc

SEQ ID NO: 2958381 - DNA, 25 bp, Homo sapien
ggctaaactttactgactcttcttg

SEQ ID NO: 2958382 - DNA, 25 bp, Homo sapien
gtatatatttaccactccacaatta

SEQ ID NO: 2958383 - DNA, 25 bp, Homo sapien
ggattgaaggtcagagaagtaacac

SEQ ID NO: 2958384 - DNA, 25 bp, Homo sapien
ttctgaagcaattgccaagatttct

SEQ ID NO: 2958385 - DNA, 25 bp, Homo sapien
attttttctgaagcaattgccaaga

SEQ ID NO: 2958386 - DNA, 25 bp, Homo sapien
ccaagatttctgtagtaggattgaa

SEQ ID NO: 2958387 - DNA, 25 bp, Homo sapien
cgagaattgcctccgttctgttaag

SEQ ID NO: 2958388 - DNA, 25 bp, Homo sapien
aaacccgagaattgcctccgttctg

SEQ ID NO: 2958389 - DNA, 25 bp, Homo sapien
gcctccgttctgttaagacaacagg

SEQ ID NO: 2958390 - DNA, 25 bp, Homo sapien
gaattgcctccgttctgttaagaca

SEQ ID NO: 2958391 - DNA, 25 bp, Homo sapien
gcctcttgggggcaagcaattcttc

SEQ ID NO: 2958392 - DNA, 25 bp, Homo sapien
tttgagatcaagtctcactcactct

SEQ ID NO: 2958393 - DNA, 25 bp, Homo sapien
ccgcctcttgggggcaagcaattct

SEQ ID NO: 2958394 - DNA, 25 bp, Homo sapien
ctcttgggggcaagcaattcttctg

SEQ ID NO: 2958395 - DNA, 25 bp, Homo sapien
aagtctgggctcttaagtgtcacca

SEQ ID NO: 2958396 - DNA, 25 bp, Homo sapien
atcaaaccgtcctgcgccgtgggtt

SEQ ID NO: 2958397 - DNA, 25 bp, Homo sapien
tgcctattattctactgtgtccatg

SEQ ID NO: 2958398 - DNA, 25 bp, Homo sapien
gacaagattgatgtacactgtaccc

SEQ ID NO: 2958399 - DNA, 25 bp, Homo sapien
tccacttctcggagaaaaatccatg

SEQ ID NO: 2958400 - DNA, 25 bp, Homo sapien
caaagtatccacttctcggagaaaa

SEQ ID NO: 2958401 - DNA, 25 bp, Homo sapien
ttctcggagaaaaatccatggtatg

SEQ ID NO: 2958402 - DNA, 25 bp, Homo sapien
aggcaaagtatccacttctcggaga

SEQ ID NO: 2958403 - DNA, 25 bp, Homo sapien
cacaccaggcagttaggttcagact

SEQ ID NO: 2958404 - DNA, 25 bp, Homo sapien
ccagtcactggtatagctagaaaca

SEQ ID NO: 2958405 - DNA, 25 bp, Homo sapien
tagcattcactaccaacacaaggag

SEQ ID NO: 2958406 - DNA, 25 bp, Homo sapien
cctggacagcgcatataagttttgg

SEQ ID NO: 2958407 - DNA, 25 bp, Homo sapien
ttagaagtctgagtaatggtgcaac

SEQ ID NO: 2958408 - DNA, 25 bp, Homo sapien
caggcctgaaaggacaccatgagaa

SEQ ID NO: 2958409 - DNA, 25 bp, Homo sapien
gaatgcaacattagagatcagacct

SEQ ID NO: 2958410 - DNA, 25 bp, Homo sapien
tacatacctgatttatagctgctgg

SEQ ID NO: 2958411 - DNA, 25 bp, Homo sapien
tctgtgaaacagagcaagctgctaa

SEQ ID NO: 2958412 - DNA, 25 bp, Homo sapien
cttaagcacagctggatctataaat

SEQ ID NO: 2958413 - DNA, 25 bp, Homo sapien
ttaagcacagctggatctataaatc

SEQ ID NO: 2958414 - DNA, 25 bp, Homo sapien
agtctcgctgattgctagcacagca

SEQ ID NO: 2958415 - DNA, 25 bp, Homo sapien
ctgggagggtcctatgcccacggag

SEQ ID NO: 2958416 - DNA, 25 bp, Homo sapien
ctggctgggagggtcctatgcccac

SEQ ID NO: 2958417 - DNA, 25 bp, Homo sapien
cggagtctcgctgattgctagcaca

SEQ ID NO: 2958418 - DNA, 25 bp, Homo sapien
cagcctcaagagaggtaggtccact

SEQ ID NO: 2958419 - DNA, 25 bp, Homo sapien
tgttgatccgaagcacattcctcgt

SEQ ID NO: 2958420 - DNA, 25 bp, Homo sapien
catcaatattgcatggtccaaggca

SEQ ID NO: 2958421 - DNA, 25 bp, Homo sapien
tttagcacagcacccggtacactga

SEQ ID NO: 2958422 - DNA, 25 bp, Homo sapien
ctcttacatccatcccccgtgcccg

SEQ ID NO: 2958423 - DNA, 25 bp, Homo sapien
tctcttacatccatcccccgtgccc

SEQ ID NO: 2958424 - DNA, 25 bp, Homo sapien
aaggacatctattccggctggccag

SEQ ID NO: 2958425 - DNA, 25 bp, Homo sapien
tctcagatcttaagaatgcccaagg

SEQ ID NO: 2958426 - DNA, 25 bp, Homo sapien
aacagcacagaccttcgttggaggc

SEQ ID NO: 2958427 - DNA, 25 bp, Homo sapien
tccaaaagccaaagaccctgtagtc

SEQ ID NO: 2958428 - DNA, 25 bp, Homo sapien
cacttcagtctgggcgacacagtaa

SEQ ID NO: 2958429 - DNA, 25 bp, Homo sapien
cttcagtctgggcgacacagtaaga

SEQ ID NO: 2958430 - DNA, 25 bp, Homo sapien
gcacttcagtctgggcgacacagta

SEQ ID NO: 2958431 - DNA, 25 bp, Homo sapien
tcagtctgggcgacacagtaagacg

SEQ ID NO: 2958432 - DNA, 25 bp, Homo sapien
ttctcatccagaggcgaagggagtg

SEQ ID NO: 2958433 - DNA, 25 bp, Homo sapien
atgggaaccacaaggtgctgtacac

SEQ ID NO: 2958434 - DNA, 25 bp, Homo sapien
cacccaacagggtcatgatgagatc

SEQ ID NO: 2958435 - DNA, 25 bp, Homo sapien
cagatcagatcacgagtttggcctc

SEQ ID NO: 2958436 - DNA, 25 bp, Homo sapien
cagaggctgccgtacaggcagagct

SEQ ID NO: 2958437 - DNA, 25 bp, Homo sapien
ctcaggccttgggagtagaatcgaa

SEQ ID NO: 2958438 - DNA, 25 bp, Homo sapien
tgggctcccaactcgcattttggtg

SEQ ID NO: 2958439 - DNA, 25 bp, Homo sapien
tacagcaccggactcagtgaagacc

SEQ ID NO: 2958440 - DNA, 25 bp, Homo sapien
ccccatcgacataagtctgattttc

SEQ ID NO: 2958441 - DNA, 25 bp, Homo sapien
aaacccccatcgacataagtctgat

SEQ ID NO: 2958442 - DNA, 25 bp, Homo sapien
ccatcgacataagtctgattttctt

SEQ ID NO: 2958443 - DNA, 25 bp, Homo sapien
tctaaaacccccatcgacataagtc

SEQ ID NO: 2958444 - DNA, 25 bp, Homo sapien
gaagatgtggaagccattctcctga

SEQ ID NO: 2958445 - DNA, 25 bp, Homo sapien
cagttccaggtatgctgctgagcac

SEQ ID NO: 2958446 - DNA, 25 bp, Homo sapien
gggaatctctacctctaacctgcca

SEQ ID NO: 2958447 - DNA, 25 bp, Homo sapien
cagaaggtgccttttgtgaacagag

SEQ ID NO: 2958448 - DNA, 25 bp, Homo sapien
taacactgcccgaggcttcactcgg

SEQ ID NO: 2958449 - DNA, 25 bp, Homo sapien
ttcactcggcgcctccctagacccg

SEQ ID NO: 2958450 - DNA, 25 bp, Homo sapien
gacccctaacactgcccgaggcttc

SEQ ID NO: 2958451 - DNA, 25 bp, Homo sapien
gcctccctagacccggatgagcttg

SEQ ID NO: 2958452 - DNA, 25 bp, Homo sapien
cgtggtcagcgtccacactctgaag

SEQ ID NO: 2958453 - DNA, 25 bp, Homo sapien
catggtcatggccatgtctctcaga

SEQ ID NO: 2958454 - DNA, 25 bp, Homo sapien
ctgggaccacgtggtcagcgtccac

SEQ ID NO: 2958455 - DNA, 25 bp, Homo sapien
atggccatgtctctcagatccagcc

SEQ ID NO: 2958456 - DNA, 25 bp, Homo sapien
ggaaggatggcggatggatcccgcc

SEQ ID NO: 2958457 - DNA, 25 bp, Homo sapien
gatggatcccgccagtgatctgggt

SEQ ID NO: 2958458 - DNA, 25 bp, Homo sapien
tgcagcttctcggatctggggatct

SEQ ID NO: 2958459 - DNA, 25 bp, Homo sapien
gcgctgcagcttctcggatctgggt

SEQ ID NO: 2958460 - DNA, 25 bp, Homo sapien
cagagacagaggaattaaaagaagc

SEQ ID NO: 2958461 - DNA, 25 bp, Homo sapien
ccaggtctgtggaaggtctatattc

SEQ ID NO: 2958462 - DNA, 25 bp, Homo sapien
cctcagttctgttgttaagccatag

SEQ ID NO: 2958463 - DNA, 25 bp, Homo sapien
gaagcagatgtatccatttcccaat

SEQ ID NO: 2958464 - DNA, 25 bp, Homo sapien
gtgtcttctattggcagactcttga

SEQ ID NO: 2958465 - DNA, 25 bp, Homo sapien
aacctgtgccaatgtctgcatgaag

SEQ ID NO: 2958466 - DNA, 25 bp, Homo sapien
gatgtggttgggacaaatctgctat

SEQ ID NO: 2958467 - DNA, 25 bp, Homo sapien
catctcttacaagtgttgaaattac

SEQ ID NO: 2958468 - DNA, 25 bp, Homo sapien
tcagcaatagatgcctggtccacgg

SEQ ID NO: 2958469 - DNA, 25 bp, Homo sapien
taactaagtgttgaaagggcctgat

SEQ ID NO: 2958470 - DNA, 25 bp, Homo sapien
cagctgtcacgtcacagggtccaaa

SEQ ID NO: 2958471 - DNA, 25 bp, Homo sapien
tggatgcatccggactaagtgggaa

SEQ ID NO: 2958472 - DNA, 25 bp, Homo sapien
tcaaaacacgttgttcagccaaagg

SEQ ID NO: 2958473 - DNA, 25 bp, Homo sapien
tctaggcctcatccttaaggtgaca

SEQ ID NO: 2958474 - DNA, 25 bp, Homo sapien
gattccacagagcactgcgtgggta

SEQ ID NO: 2958475 - DNA, 25 bp, Homo sapien
gcatatggctaatcagtcaacccgg

SEQ ID NO: 2958476 - DNA, 25 bp, Homo sapien
cccagaaggtatccgtgctcagtgg

SEQ ID NO: 2958477 - DNA, 25 bp, Homo sapien
tggagagggagatacacggaaggcg

SEQ ID NO: 2958478 - DNA, 25 bp, Homo sapien
tacacggaaggcgacagtcttggtg

SEQ ID NO: 2958479 - DNA, 25 bp, Homo sapien
cagagaagacccagaaggtatccgt

SEQ ID NO: 2958480 - DNA, 25 bp, Homo sapien
ttttgtgatattggccatcaaccat

SEQ ID NO: 2958481 - DNA, 25 bp, Homo sapien
tgctgacaatgactcttgcccgtga

SEQ ID NO: 2958482 - DNA, 25 bp, Homo sapien
tgattgccttccacgtactcaggtg

SEQ ID NO: 2958483 - DNA, 25 bp, Homo sapien
gactgaactctgaaaatagctccct

SEQ ID NO: 2958484 - DNA, 25 bp, Homo sapien
tactcaggtgacagggtggtgcctt

SEQ ID NO: 2958485 - DNA, 25 bp, Homo sapien
ctcaaaccatgagatgatgtccacc

SEQ ID NO: 2958486 - DNA, 25 bp, Homo sapien
ccatgagatgatgtccacccagaac

SEQ ID NO: 2958487 - DNA, 25 bp, Homo sapien
caaaccatgagatgatgtccaccca

SEQ ID NO: 2958488 - DNA, 25 bp, Homo sapien
aaccatgagatgatgtccacccaga

SEQ ID NO: 2958489 - DNA, 25 bp, Homo sapien
gaaactgctcttgccgtaggggtat

SEQ ID NO: 2958490 - DNA, 25 bp, Homo sapien
tgccgtaggggtatcagaccacagg

SEQ ID NO: 2958491 - DNA, 25 bp, Homo sapien
tgctcttgccgtaggggtatcagac

SEQ ID NO: 2958492 - DNA, 25 bp, Homo sapien
tggaaactgctcttgccgtaggggt

SEQ ID NO: 2958493 - DNA, 25 bp, Homo sapien
acatctgcctgattccagatatcag

SEQ ID NO: 2958494 - DNA, 25 bp, Homo sapien
gcctgattccagatatcagctatca

SEQ ID NO: 2958495 - DNA, 25 bp, Homo sapien
gattccagatatcagctatcaggta

SEQ ID NO: 2958496 - DNA, 25 bp, Homo sapien
tcaggtattttccaatatcccacat

SEQ ID NO: 2958497 - DNA, 25 bp, Homo sapien
ggcaggatgaccaacatcaagatca

SEQ ID NO: 2958498 - DNA, 25 bp, Homo sapien
catggggcaggatgaccaacatcaa

SEQ ID NO: 2958499 - DNA, 25 bp, Homo sapien
ccgtacatggggcaggatgaccaac

SEQ ID NO: 2958500 - DNA, 25 bp, Homo sapien
cccccgtacatggggcaggatgacc

SEQ ID NO: 2958501 - DNA, 25 bp, Homo sapien
tcagtgtagctccacatagcttgtc

SEQ ID NO: 2958502 - DNA, 25 bp, Homo sapien
ttgttccttggatgtagagcttctc

SEQ ID NO: 2958503 - DNA, 25 bp, Homo sapien
tctctgctcaaattcgctagacaac

SEQ ID NO: 2958504 - DNA, 25 bp, Homo sapien
gacaactgccaaaacatcagtgtag

SEQ ID NO: 2958505 - DNA, 25 bp, Homo sapien
caagactgagttttggggccttcca

SEQ ID NO: 2958506 - DNA, 25 bp, Homo sapien
aggctctgacattgcttgtccttga

SEQ ID NO: 2958507 - DNA, 25 bp, Homo sapien
ttgatgtatcgccttccatacacag

SEQ ID NO: 2958508 - DNA, 25 bp, Homo sapien
tccatccacagattcccattcaggc

SEQ ID NO: 2958509 - DNA, 25 bp, Homo sapien
tcatcccactctggctttcagcagc

SEQ ID NO: 2958510 - DNA, 25 bp, Homo sapien
tttcagcagctcctttataagaagt

SEQ ID NO: 2958511 - DNA, 25 bp, Homo sapien
gcagctcctttataagaagttgaag

SEQ ID NO: 2958512 - DNA, 25 bp, Homo sapien
gctcctttataagaagttgaaggat

SEQ ID NO: 2958513 - DNA, 25 bp, Homo sapien
gcagagaagctatcattgaaagcac

SEQ ID NO: 2958514 - DNA, 25 bp, Homo sapien
gaaagcacagtcaagcccatatttt

SEQ ID NO: 2958515 - DNA, 25 bp, Homo sapien
agcaaattcatacaggaaaatccag

SEQ ID NO: 2958516 - DNA, 25 bp, Homo sapien
gctatggaggaactgctacaagcag

SEQ ID NO: 2958517 - DNA, 25 bp, Homo sapien
tgcctcttacaaaggagcgcacagc

SEQ ID NO: 2958518 - DNA, 25 bp, Homo sapien
ggcaacggggggcaacaggctgtgt

SEQ ID NO: 2958519 - DNA, 25 bp, Homo sapien
cttgcctcttacaaaggagcgcaca

SEQ ID NO: 2958520 - DNA, 25 bp, Homo sapien
ctcttacaaaggagcgcacagcctt

SEQ ID NO: 2958521 - DNA, 25 bp, Homo sapien
gcactgagttgaagagttcacaaaa

SEQ ID NO: 2958522 - DNA, 25 bp, Homo sapien
cacaaaatagttcacttggatgaca

SEQ ID NO: 2958523 - DNA, 25 bp, Homo sapien
accaagcactgagttgaagagttca

SEQ ID NO: 2958524 - DNA, 25 bp, Homo sapien
acaaaatagttcacttggatgacaa

SEQ ID NO: 2958525 - DNA, 25 bp, Homo sapien
agtgatttgtggtgcctgcaaaagc

SEQ ID NO: 2958526 - DNA, 25 bp, Homo sapien
aagtccttcagtgatctgggtccct

SEQ ID NO: 2958527 - DNA, 25 bp, Homo sapien
ggctcagtgatttgtggtgcctgca

SEQ ID NO: 2958528 - DNA, 25 bp, Homo sapien
cctccttctgattgtttgttccaag

SEQ ID NO: 2958529 - DNA, 25 bp, Homo sapien
tccagatccttcctaggttggtgtc

SEQ ID NO: 2958530 - DNA, 25 bp, Homo sapien
ctttaagtgtctccatgagtgtctt

SEQ ID NO: 2958531 - DNA, 25 bp, Homo sapien
tatccactccagtgtcttcatcatg

SEQ ID NO: 2958532 - DNA, 25 bp, Homo sapien
agtgtctccatgagtgtcttatcca

SEQ ID NO: 2958533 - DNA, 25 bp, Homo sapien
taggtctttctgctggtggtgagaa

SEQ ID NO: 2958534 - DNA, 25 bp, Homo sapien
aacctgggtgttgtgtttatctgcc

SEQ ID NO: 2958535 - DNA, 25 bp, Homo sapien
ctagaataagagctgcccaatatta

SEQ ID NO: 2958536 - DNA, 25 bp, Homo sapien
tgaactccaggtgttcagacaacct

SEQ ID NO: 2958537 - DNA, 25 bp, Homo sapien
tttactgtttggctgagtttctgtg

SEQ ID NO: 2958538 - DNA, 25 bp, Homo sapien
tgtttggctgagtttctgtgatggc

SEQ ID NO: 2958539 - DNA, 25 bp, Homo sapien
tgaaaacctcacctccaatttactg

SEQ ID NO: 2958540 - DNA, 25 bp, Homo sapien
tagaaccagagatagcttcccagca

SEQ ID NO: 2958541 - DNA, 25 bp, Homo sapien
tgtcttagcaagagcaatcatcgcc

SEQ ID NO: 2958542 - DNA, 25 bp, Homo sapien
gcaatcatcgccttctcagtcatat

SEQ ID NO: 2958543 - DNA, 25 bp, Homo sapien
gcaagagcaatcatcgccttctcag

SEQ ID NO: 2958544 - DNA, 25 bp, Homo sapien
tccattgtcttagcaagagcaatca

SEQ ID NO: 2958545 - DNA, 25 bp, Homo sapien
cagttccctcagattagtcacgtcc

SEQ ID NO: 2958546 - DNA, 25 bp, Homo sapien
ttccctcagattagtcacgtccagg

SEQ ID NO: 2958547 - DNA, 25 bp, Homo sapien
tccagttccctcagattagtcacgt

SEQ ID NO: 2958548 - DNA, 25 bp, Homo sapien
gatccagttccctcagattagtcac

SEQ ID NO: 2958549 - DNA, 25 bp, Homo sapien
ttttgtcattaccaagatcaatcaa

SEQ ID NO: 2958550 - DNA, 25 bp, Homo sapien
cattaccaagatcaatcaagttgaa

SEQ ID NO: 2958551 - DNA, 25 bp, Homo sapien
tgtcattaccaagatcaatcaagtt

SEQ ID NO: 2958552 - DNA, 25 bp, Homo sapien
ctctgtgtcttttgtcattaccaag

SEQ ID NO: 2958553 - DNA, 25 bp, Homo sapien
tgactcttccagatatccatctgtc

SEQ ID NO: 2958554 - DNA, 25 bp, Homo sapien
ccctgactcttccagatatccatct

SEQ ID NO: 2958555 - DNA, 25 bp, Homo sapien
gactcttccagatatccatctgtct

SEQ ID NO: 2958556 - DNA, 25 bp, Homo sapien
catctgtctgtctggtcagagccat

SEQ ID NO: 2958557 - DNA, 25 bp, Homo sapien
cagctgtaatttactcttggctctc

SEQ ID NO: 2958558 - DNA, 25 bp, Homo sapien
ctcgtagtgatctcagcttctctct

SEQ ID NO: 2958559 - DNA, 25 bp, Homo sapien
tcagctgtaatttactcttggctct

SEQ ID NO: 2958560 - DNA, 25 bp, Homo sapien
cactcaagtcaccagtctcagaagt

SEQ ID NO: 2958561 - DNA, 25 bp, Homo sapien
gcttttcatgtgcccaatagcggct

SEQ ID NO: 2958562 - DNA, 25 bp, Homo sapien
caagcttgacttccacagcatgctg

SEQ ID NO: 2958563 - DNA, 25 bp, Homo sapien
ttccacagcatgctgggtctgaagg

SEQ ID NO: 2958564 - DNA, 25 bp, Homo sapien
ccaatagcggctttgtcccatgaaa

SEQ ID NO: 2958565 - DNA, 25 bp, Homo sapien
tgttgtaccttctagcatactctcc

SEQ ID NO: 2958566 - DNA, 25 bp, Homo sapien
tccagtgtttctatttcctcagcag

SEQ ID NO: 2958567 - DNA, 25 bp, Homo sapien
gcagtttccgctaagcagtttattt

SEQ ID NO: 2958568 - DNA, 25 bp, Homo sapien
agaacacgaggctccagtgtttcta

SEQ ID NO: 2958569 - DNA, 25 bp, Homo sapien
tccaggaggtagaagcctgagttcc

SEQ ID NO: 2958570 - DNA, 25 bp, Homo sapien
attcagctggctgatggaggtcagc

SEQ ID NO: 2958571 - DNA, 25 bp, Homo sapien
gcaccttccaggaggtagaagcctg

SEQ ID NO: 2958572 - DNA, 25 bp, Homo sapien
tggctgatggaggtcagcaccttcc

SEQ ID NO: 2958573 - DNA, 25 bp, Homo sapien
cttctctggttctgagggcttcagt

SEQ ID NO: 2958574 - DNA, 25 bp, Homo sapien
tgccaactcccaaacacctgttctg

SEQ ID NO: 2958575 - DNA, 25 bp, Homo sapien
tgtttcttcgcagtccccaggctct

SEQ ID NO: 2958576 - DNA, 25 bp, Homo sapien
aaacagtgcctataacctgccaact

SEQ ID NO: 2958577 - DNA, 25 bp, Homo sapien
ttcatctgcaacctgataacttgtg

SEQ ID NO: 2958578 - DNA, 25 bp, Homo sapien
gcaacctgataacttgtggccagaa

SEQ ID NO: 2958579 - DNA, 25 bp, Homo sapien
cctgataacttgtggccagaattcc

SEQ ID NO: 2958580 - DNA, 25 bp, Homo sapien
tctgcaacctgataacttgtggcca

SEQ ID NO: 2958581 - DNA, 25 bp, Homo sapien
ttctcttcgcatcattgaggcaagt

SEQ ID NO: 2958582 - DNA, 25 bp, Homo sapien
catcctgtttcacgcaggagccagg

SEQ ID NO: 2958583 - DNA, 25 bp, Homo sapien
ttgaggcaagttatcatgggcccag

SEQ ID NO: 2958584 - DNA, 25 bp, Homo sapien
acattagatctgctgagttcccttc

SEQ ID NO: 2958585 - DNA, 25 bp, Homo sapien
caggtaggtaaatgataaccccaca

SEQ ID NO: 2958586 - DNA, 25 bp, Homo sapien
gactgcattggatgtccagaatctg

SEQ ID NO: 2958587 - DNA, 25 bp, Homo sapien
catctgttgactttgcagaggtggg

SEQ ID NO: 2958588 - DNA, 25 bp, Homo sapien
gaggtgggtcccacagtcaccattt

SEQ ID NO: 2958589 - DNA, 25 bp, Homo sapien
tttctctggctaaaaagctcttcca

SEQ ID NO: 2958590 - DNA, 25 bp, Homo sapien
tgtcagcactggacagatctgtgag

SEQ ID NO: 2958591 - DNA, 25 bp, Homo sapien
gaagcattagtatgtggacactcac

SEQ ID NO: 2958592 - DNA, 25 bp, Homo sapien
tgaccaccacgagtgaggatgaagg

SEQ ID NO: 2958593 - DNA, 25 bp, Homo sapien
tacctcctggaggaagtgatgccaa

SEQ ID NO: 2958594 - DNA, 25 bp, Homo sapien
gccacgacaaagcactttccttgtt

SEQ ID NO: 2958595 - DNA, 25 bp, Homo sapien
tcacatcccatcataggagagagag

SEQ ID NO: 2958596 - DNA, 25 bp, Homo sapien
gatgcttgaagggtttgggaggcag

SEQ ID NO: 2958597 - DNA, 25 bp, Homo sapien
ccagatgtctcttgccacgacaaag

SEQ ID NO: 2958598 - DNA, 25 bp, Homo sapien
gtgtcatctgcacatgaagtggagg

SEQ ID NO: 2958599 - DNA, 25 bp, Homo sapien
catctgcacatgaagtggaggtggg

SEQ ID NO: 2958600 - DNA, 25 bp, Homo sapien
agtgtcatctgcacatgaagtggag

SEQ ID NO: 2958601 - DNA, 25 bp, Homo sapien
gtcatctgcacatgaagtggaggtg

SEQ ID NO: 2958602 - DNA, 25 bp, Homo sapien
ctcctctgcatagcacgtttcacca

SEQ ID NO: 2958603 - DNA, 25 bp, Homo sapien
gtcctgcctgacacttcccagctcc

SEQ ID NO: 2958604 - DNA, 25 bp, Homo sapien
tctgcatagcacgtttcaccaccat

SEQ ID NO: 2958605 - DNA, 25 bp, Homo sapien
ctctgcatagcacgtttcaccacca

SEQ ID NO: 2958606 - DNA, 25 bp, Homo sapien
aaactctccaattgatctcctttgt

SEQ ID NO: 2958607 - DNA, 25 bp, Homo sapien
aactctccaattgatctcctttgtc

SEQ ID NO: 2958608 - DNA, 25 bp, Homo sapien
ggaagcttccggggcttcttcttga

SEQ ID NO: 2958609 - DNA, 25 bp, Homo sapien
gcttccggggcttcttcttgagctg

SEQ ID NO: 2958610 - DNA, 25 bp, Homo sapien
tgtcagcaatcctcccctgagctat

SEQ ID NO: 2958611 - DNA, 25 bp, Homo sapien
taagcaggtcccctcatcctgatgg

SEQ ID NO: 2958612 - DNA, 25 bp, Homo sapien
cagtactccaagagtgctgtcagca

SEQ ID NO: 2958613 - DNA, 25 bp, Homo sapien
tgtactcaagccatagacaggcaat

SEQ ID NO: 2958614 - DNA, 25 bp, Homo sapien
aggttctgatgtgaccgcctgggca

SEQ ID NO: 2958615 - DNA, 25 bp, Homo sapien
gagtctgctgatctgtcctggccca

SEQ ID NO: 2958616 - DNA, 25 bp, Homo sapien
agtctgctgatctgtcctggcccag

SEQ ID NO: 2958617 - DNA, 25 bp, Homo sapien
ggttctgatgtgaccgcctgggcat

SEQ ID NO: 2958618 - DNA, 25 bp, Homo sapien
gctgtgggagcatgaaggtctctgg

SEQ ID NO: 2958619 - DNA, 25 bp, Homo sapien
ttaagagttgtcatcatccactggt

SEQ ID NO: 2958620 - DNA, 25 bp, Homo sapien
ctgtgggagcatgaaggtctctggc

SEQ ID NO: 2958621 - DNA, 25 bp, Homo sapien
agctgtgggagcatgaaggtctctg

SEQ ID NO: 2958622 - DNA, 25 bp, Homo sapien
cagattcttccttcagatccatcat

SEQ ID NO: 2958623 - DNA, 25 bp, Homo sapien
tcttccttcagatccatcatgagca

SEQ ID NO: 2958624 - DNA, 25 bp, Homo sapien
cttccttcagatccatcatgagcat

SEQ ID NO: 2958625 - DNA, 25 bp, Homo sapien
ttcttccttcagatccatcatgagc

SEQ ID NO: 2958626 - DNA, 25 bp, Homo sapien
ctcttcccctaatgatgctgaaccc

SEQ ID NO: 2958627 - DNA, 25 bp, Homo sapien
ctaagtaattgccattgtacagatg

SEQ ID NO: 2958628 - DNA, 25 bp, Homo sapien
tggcatctctgaacctgcagttaaa

SEQ ID NO: 2958629 - DNA, 25 bp, Homo sapien
tatgatcatttggacaacaagcgac

SEQ ID NO: 2958630 - DNA, 25 bp, Homo sapien
gaaagtggaacattagtggctcgat

SEQ ID NO: 2958631 - DNA, 25 bp, Homo sapien
gcaagatgtttatctacaacaccat

SEQ ID NO: 2958632 - DNA, 25 bp, Homo sapien
gaagctgatgtccagttgcaagatg

SEQ ID NO: 2958633 - DNA, 25 bp, Homo sapien
tctacaacaccattgagcagccggg

SEQ ID NO: 2958634 - DNA, 25 bp, Homo sapien
agcagccggggcacaaggtcagatt

SEQ ID NO: 2958635 - DNA, 25 bp, Homo sapien
tggcagtggcaagccatagatagct

SEQ ID NO: 2958636 - DNA, 25 bp, Homo sapien
aggaggaaagcctgattgctgaatg

SEQ ID NO: 2958637 - DNA, 25 bp, Homo sapien
gtgttgtcagcaggccacagttcca

SEQ ID NO: 2958638 - DNA, 25 bp, Homo sapien
gatgtttaagaagtacagctgtgtt

SEQ ID NO: 2958639 - DNA, 25 bp, Homo sapien
tgcgaatgcatgaacccatgtcttt

SEQ ID NO: 2958640 - DNA, 25 bp, Homo sapien
caaaggtgtccaaatcacttggcct

SEQ ID NO: 2958641 - DNA, 25 bp, Homo sapien
aatgttaagcatttgcgaatgcatg

SEQ ID NO: 2958642 - DNA, 25 bp, Homo sapien
ggcctcggcacttcacaaatgttaa

SEQ ID NO: 2958643 - DNA, 25 bp, Homo sapien
agagttagagacaatactagtgtca

SEQ ID NO: 2958644 - DNA, 25 bp, Homo sapien
cagagttagagacaatactagtgtc

SEQ ID NO: 2958645 - DNA, 25 bp, Homo sapien
gagttagagacaatactagtgtcat

SEQ ID NO: 2958646 - DNA, 25 bp, Homo sapien
catgagcaccagtcagtaaaatgtc

SEQ ID NO: 2958647 - DNA, 25 bp, Homo sapien
aaatgtcactagcaaagaagatgca

SEQ ID NO: 2958648 - DNA, 25 bp, Homo sapien
atgtcactagcaaagaagatgcact

SEQ ID NO: 2958649 - DNA, 25 bp, Homo sapien
gcacactggtttactggggaagatg

SEQ ID NO: 2958650 - DNA, 25 bp, Homo sapien
tctgttaggtcataagccacgtggc

SEQ ID NO: 2958651 - DNA, 25 bp, Homo sapien
tgtggacaccacagtaagctttgaa

SEQ ID NO: 2958652 - DNA, 25 bp, Homo sapien
gagtgccttgtaccatataccctct

SEQ ID NO: 2958653 - DNA, 25 bp, Homo sapien
agccacgtggccagaagcctttaga

SEQ ID NO: 2958654 - DNA, 25 bp, Homo sapien
gatggcaaggttaggtctgtaagct

SEQ ID NO: 2958655 - DNA, 25 bp, Homo sapien
gcagagacccgtgaagttgtttgtg

SEQ ID NO: 2958656 - DNA, 25 bp, Homo sapien
tccagtcttgactcggtgctctggc

SEQ ID NO: 2958657 - DNA, 25 bp, Homo sapien
tgtgtaggaacaagagagctgagca

SEQ ID NO: 2958658 - DNA, 25 bp, Homo sapien
ttcagttcttcaactgccaaaaatt

SEQ ID NO: 2958659 - DNA, 25 bp, Homo sapien
ttcttcaactgccaaaaattggtgc

SEQ ID NO: 2958660 - DNA, 25 bp, Homo sapien
agttcttcaactgccaaaaattggt

SEQ ID NO: 2958661 - DNA, 25 bp, Homo sapien
tcttcaactgccaaaaattggtgca

SEQ ID NO: 2958662 - DNA, 25 bp, Homo sapien
ggtgctctgataccaccatatttca

SEQ ID NO: 2958663 - DNA, 25 bp, Homo sapien
tgttttggctctagcactatacgta

SEQ ID NO: 2958664 - DNA, 25 bp, Homo sapien
cttaggagtggtgttacatgtctgt

SEQ ID NO: 2958665 - DNA, 25 bp, Homo sapien
agcctattaattgcatctctgcagc

SEQ ID NO: 2958666 - DNA, 25 bp, Homo sapien
gaatgcatgctggaaatacgttcaa

SEQ ID NO: 2958667 - DNA, 25 bp, Homo sapien
agcagcgtagcatgcaacaatgtga

SEQ ID NO: 2958668 - DNA, 25 bp, Homo sapien
actgtttccagcagcgtagcatgca

SEQ ID NO: 2958669 - DNA, 25 bp, Homo sapien
tatttcacaacccaggtggcaacca

SEQ ID NO: 2958670 - DNA, 25 bp, Homo sapien
caccaaaagttgctacgatccaagg

SEQ ID NO: 2958671 - DNA, 25 bp, Homo sapien
accaaaagttgctacgatccaaggt

SEQ ID NO: 2958672 - DNA, 25 bp, Homo sapien
caagaaatgcgtttaggtggaattc

SEQ ID NO: 2958673 - DNA, 25 bp, Homo sapien
cttttgttcccagtgagagtgtaaa

SEQ ID NO: 2958674 - DNA, 25 bp, Homo sapien
ccaaccatggagaggaacacctgac

SEQ ID NO: 2958675 - DNA, 25 bp, Homo sapien
ccagaacctggagaccaaatgaacc

SEQ ID NO: 2958676 - DNA, 25 bp, Homo sapien
gggagtgaggaccagaacctggaga

SEQ ID NO: 2958677 - DNA, 25 bp, Homo sapien
tggagaccaaatgaaccaaccatgg

SEQ ID NO: 2958678 - DNA, 25 bp, Homo sapien
ctcatagagggaccgtttataacca

SEQ ID NO: 2958679 - DNA, 25 bp, Homo sapien
gatccctcatagagggaccgtttat

SEQ ID NO: 2958680 - DNA, 25 bp, Homo sapien
catgaggatccctcatagagggacc

SEQ ID NO: 2958681 - DNA, 25 bp, Homo sapien
gaggatccctcatagagggaccgtt

SEQ ID NO: 2958682 - DNA, 25 bp, Homo sapien
gggattatatcagggagagtctcag

SEQ ID NO: 2958683 - DNA, 25 bp, Homo sapien
tggatacctggggattatatcaggg

SEQ ID NO: 2958684 - DNA, 25 bp, Homo sapien
tatcagggagagtctcagcaagaga

SEQ ID NO: 2958685 - DNA, 25 bp, Homo sapien
aaactactgttgtcgccaatttcct

SEQ ID NO: 2958686 - DNA, 25 bp, Homo sapien
catctacactgacaagaacatatgc

SEQ ID NO: 2958687 - DNA, 25 bp, Homo sapien
taatttccctgagtataatgtgcct

SEQ ID NO: 2958688 - DNA, 25 bp, Homo sapien
taatgtgcctttacaattgagtaga

SEQ ID NO: 2958689 - DNA, 25 bp, Homo sapien
tagtctgcaaagagaccggcaaggt

SEQ ID NO: 2958690 - DNA, 25 bp, Homo sapien
tggctaatgcaatcgtgggttctgg

SEQ ID NO: 2958691 - DNA, 25 bp, Homo sapien
tgggttctggctagacaagttcaac

SEQ ID NO: 2958692 - DNA, 25 bp, Homo sapien
aactcttgggcataagttggagctg

SEQ ID NO: 2958693 - DNA, 25 bp, Homo sapien
caagttcaacattcatagggcaagc

SEQ ID NO: 2958694 - DNA, 25 bp, Homo sapien
gaatctgtagattgcactgggcagc

SEQ ID NO: 2958695 - DNA, 25 bp, Homo sapien
tgatccttccaatttgtgagtatgg

SEQ ID NO: 2958696 - DNA, 25 bp, Homo sapien
ttactggtctatagaaatggtactg

SEQ ID NO: 2958697 - DNA, 25 bp, Homo sapien
tatggctattgcaaattagattaca

SEQ ID NO: 2958698 - DNA, 25 bp, Homo sapien
tacgccttggtcatttcactgcagt

SEQ ID NO: 2958699 - DNA, 25 bp, Homo sapien
actcagtaactccatacgccttggt

SEQ ID NO: 2958700 - DNA, 25 bp, Homo sapien
tagagcatccaattcccactgtcag

SEQ ID NO: 2958701 - DNA, 25 bp, Homo sapien
tcactgcagttagagcatccaattc

SEQ ID NO: 2958702 - DNA, 25 bp, Homo sapien
ttctccctgtttctggtatctgttt

SEQ ID NO: 2958703 - DNA, 25 bp, Homo sapien
ttttatttgaggcaaagactggggc

SEQ ID NO: 2958704 - DNA, 25 bp, Homo sapien
aaagggcagattcttctccctgttt

SEQ ID NO: 2958705 - DNA, 25 bp, Homo sapien
tatttgaggcaaagactggggccat

SEQ ID NO: 2958706 - DNA, 25 bp, Homo sapien
agaggtccgtataacattcagtgtc

SEQ ID NO: 2958707 - DNA, 25 bp, Homo sapien
agacaacagtagatgttaatccagc

SEQ ID NO: 2958708 - DNA, 25 bp, Homo sapien
tagatgttaatccagcagagcgaat

SEQ ID NO: 2958709 - DNA, 25 bp, Homo sapien
cagaagaggtccgtataacattcag

SEQ ID NO: 2958710 - DNA, 25 bp, Homo sapien
tggcagatactacagttaatatgct

SEQ ID NO: 2958711 - DNA, 25 bp, Homo sapien
ttccagtttgccacttgatagccat

SEQ ID NO: 2958712 - DNA, 25 bp, Homo sapien
aatatgctgctttccagtttgccac

SEQ ID NO: 2958713 - DNA, 25 bp, Homo sapien
cttggcagatactacagttaatatg

SEQ ID NO: 2958714 - DNA, 25 bp, Homo sapien
cttacctctgcagtgggccaaccaa

SEQ ID NO: 2958715 - DNA, 25 bp, Homo sapien
tctgcagtgggccaaccaagaaaca

SEQ ID NO: 2958716 - DNA, 25 bp, Homo sapien
tacctctgcagtgggccaaccaaga

SEQ ID NO: 2958717 - DNA, 25 bp, Homo sapien
tgcagtgggccaaccaagaaacatt

SEQ ID NO: 2958718 - DNA, 25 bp, Homo sapien
ctgctctccaggtgacacatcagca

SEQ ID NO: 2958719 - DNA, 25 bp, Homo sapien
tctccaggtgacacatcagcaccat

SEQ ID NO: 2958720 - DNA, 25 bp, Homo sapien
ggcaacatttcatgcccataggaca

SEQ ID NO: 2958721 - DNA, 25 bp, Homo sapien
ctacaaagccaacgttgaggggttg

SEQ ID NO: 2958722 - DNA, 25 bp, Homo sapien
tttgatgaagaatcctcagctgcat

SEQ ID NO: 2958723 - DNA, 25 bp, Homo sapien
gctgatcttccacaacagtgatggg

SEQ ID NO: 2958724 - DNA, 25 bp, Homo sapien
tgacaggcactttatgtctcgctga

SEQ ID NO: 2958725 - DNA, 25 bp, Homo sapien
cagcaaacgccttcgccttgagagg

SEQ ID NO: 2958726 - DNA, 25 bp, Homo sapien
tattggccaaacatcctgacaggca

SEQ ID NO: 2958727 - DNA, 25 bp, Homo sapien
tcttcctcatgtcacctcctaaaag

SEQ ID NO: 2958728 - DNA, 25 bp, Homo sapien
gagggttcctttgcagcccgctgtg

SEQ ID NO: 2958729 - DNA, 25 bp, Homo sapien
cctttctggaagagtgcatatttat

SEQ ID NO: 2958730 - DNA, 25 bp, Homo sapien
tcctaaaaggtagacttccagagcc

SEQ ID NO: 2958731 - DNA, 25 bp, Homo sapien
catgctgtcactttagcagcatcca

SEQ ID NO: 2958732 - DNA, 25 bp, Homo sapien
tggcaatggagctgctggaacacat

SEQ ID NO: 2958733 - DNA, 25 bp, Homo sapien
ctggaacacatgctgtcactttagc

SEQ ID NO: 2958734 - DNA, 25 bp, Homo sapien
gaacacatgctgtcactttagcagc

SEQ ID NO: 2958735 - DNA, 25 bp, Homo sapien
gccgggacacagtgcttctctgcta

SEQ ID NO: 2958736 - DNA, 25 bp, Homo sapien
gacacagtgcttctctgctatcatc

SEQ ID NO: 2958737 - DNA, 25 bp, Homo sapien
tctgctatcatcttaatctctcttc

SEQ ID NO: 2958738 - DNA, 25 bp, Homo sapien
tcggacagccgggacacagtgcttc

SEQ ID NO: 2958739 - DNA, 25 bp, Homo sapien
tcaggcaataccaagacccagagga

SEQ ID NO: 2958740 - DNA, 25 bp, Homo sapien
attttgcagccatatccaaaccttg

SEQ ID NO: 2958741 - DNA, 25 bp, Homo sapien
ggaagaatcagaaccctttctgaac

SEQ ID NO: 2958742 - DNA, 25 bp, Homo sapien
tggtttcttggcttggtcgggtcta

SEQ ID NO: 2958743 - DNA, 25 bp, Homo sapien
aagaccccaacctcttacaagtgag

SEQ ID NO: 2958744 - DNA, 25 bp, Homo sapien
caatggcaaagtggagcagttggca

SEQ ID NO: 2958745 - DNA, 25 bp, Homo sapien
catgtattatgtcgccctttatgga

SEQ ID NO: 2958746 - DNA, 25 bp, Homo sapien
ctcttacaagtgaggttcccttctc

SEQ ID NO: 2958747 - DNA, 25 bp, Homo sapien
cccagcatgggttgtaggccttgtt

SEQ ID NO: 2958748 - DNA, 25 bp, Homo sapien
tagataccttctgcagtacatactg

SEQ ID NO: 2958749 - DNA, 25 bp, Homo sapien
tatcaggcacatgtaattagaaacc

SEQ ID NO: 2958750 - DNA, 25 bp, Homo sapien
tttagcccaatggaaatcgggtgga

SEQ ID NO: 2958751 - DNA, 25 bp, Homo sapien
cacggggactcattaccgaacagcc

SEQ ID NO: 2958752 - DNA, 25 bp, Homo sapien
ggactcattaccgaacagccatctt

SEQ ID NO: 2958753 - DNA, 25 bp, Homo sapien
acggagaaggtgcactctgcaagca

SEQ ID NO: 2958754 - DNA, 25 bp, Homo sapien
agcatgtccacatactaagaagggt

SEQ ID NO: 2958755 - DNA, 25 bp, Homo sapien
aaagattgttcgctctgtcctcaga

SEQ ID NO: 2958756 - DNA, 25 bp, Homo sapien
ggataccaattgtcatagccgttga

SEQ ID NO: 2958757 - DNA, 25 bp, Homo sapien
aatatcaatggctcttccagaagga

SEQ ID NO: 2958758 - DNA, 25 bp, Homo sapien
tccagaaggatatttgagacattgg

SEQ ID NO: 2958759 - DNA, 25 bp, Homo sapien
ctccaaagattttgaatatgcggat

SEQ ID NO: 2958760 - DNA, 25 bp, Homo sapien
tgcggatgagacaaaagctattcat

SEQ ID NO: 2958761 - DNA, 25 bp, Homo sapien
tgaatatgcggatgagacaaaagct

SEQ ID NO: 2958762 - DNA, 25 bp, Homo sapien
agattttgaatatgcggatgagaca

SEQ ID NO: 2958763 - DNA, 25 bp, Homo sapien
cacttacaagtataatctgcatcac

SEQ ID NO: 2958764 - DNA, 25 bp, Homo sapien
taagcgtaggtgtaattagcaccag

SEQ ID NO: 2958765 - DNA, 25 bp, Homo sapien
tgaaatatttggatgtaagcgtagg

SEQ ID NO: 2958766 - DNA, 25 bp, Homo sapien
taggtgtaattagcaccagaaaatc

SEQ ID NO: 2958767 - DNA, 25 bp, Homo sapien
caaaataagaactctagtggtccaa

SEQ ID NO: 2958768 - DNA, 25 bp, Homo sapien
ttatacaagcagatcatcaagctcc

SEQ ID NO: 2958769 - DNA, 25 bp, Homo sapien
actctagtggtccaaaaggagcaga

SEQ ID NO: 2958770 - DNA, 25 bp, Homo sapien
tacaagcagatcatcaagctccaaa

SEQ ID NO: 2958771 - DNA, 25 bp, Homo sapien
gacgagtgagtaggtcaaggctcct

SEQ ID NO: 2958772 - DNA, 25 bp, Homo sapien
taggtcaaggctcctaatgatcagc

SEQ ID NO: 2958773 - DNA, 25 bp, Homo sapien
gaagtatatttgtgggtgagatgtt

SEQ ID NO: 2958774 - DNA, 25 bp, Homo sapien
gctcctaatgatcagcttcttgcct

SEQ ID NO: 2958775 - DNA, 25 bp, Homo sapien
tctcttctgtacctggtacatgcat

SEQ ID NO: 2958776 - DNA, 25 bp, Homo sapien
gtggtcctgtgcctcggttgagcca

SEQ ID NO: 2958777 - DNA, 25 bp, Homo sapien
cagtttgtaccccagtcctgatgag

SEQ ID NO: 2958778 - DNA, 25 bp, Homo sapien
gttgagccacgagatgtcacctgtg

SEQ ID NO: 2958779 - DNA, 25 bp, Homo sapien
taaactctgcattgcggatctctga

SEQ ID NO: 2958780 - DNA, 25 bp, Homo sapien
ttccagattaaactctgcattgcgg

SEQ ID NO: 2958781 - DNA, 25 bp, Homo sapien
gattaaactctgcattgcggatctc

SEQ ID NO: 2958782 - DNA, 25 bp, Homo sapien
tgcattgcggatctctgacagtttc

SEQ ID NO: 2958783 - DNA, 25 bp, Homo sapien
tcatgcataacctgagctctgcttt

SEQ ID NO: 2958784 - DNA, 25 bp, Homo sapien
atgcataacctgagctctgctttga

SEQ ID NO: 2958785 - DNA, 25 bp, Homo sapien
ctctgctttgagtcacacagagaat

SEQ ID NO: 2958786 - DNA, 25 bp, Homo sapien
catgcataacctgagctctgctttg

SEQ ID NO: 2958787 - DNA, 25 bp, Homo sapien
ctactttcatcaggaaaattcacca

SEQ ID NO: 2958788 - DNA, 25 bp, Homo sapien
tactttcatcaggaaaattcaccat

SEQ ID NO: 2958789 - DNA, 25 bp, Homo sapien
cataatgccccatcggctcttcttg

SEQ ID NO: 2958790 - DNA, 25 bp, Homo sapien
aacactgttatgagcagtccagcca

SEQ ID NO: 2958791 - DNA, 25 bp, Homo sapien
cttctttgtgaacactgttatgagc

SEQ ID NO: 2958792 - DNA, 25 bp, Homo sapien
ttgtgaacactgttatgagcagtcc

SEQ ID NO: 2958793 - DNA, 25 bp, Homo sapien
tcgagggcaacttgccgcggactgc

SEQ ID NO: 2958794 - DNA, 25 bp, Homo sapien
ttcgagggcaacttgccgcggactg

SEQ ID NO: 2958795 - DNA, 25 bp, Homo sapien
ccccggaagcaggagaagaactgcc

SEQ ID NO: 2958796 - DNA, 25 bp, Homo sapien
aggagaagaactgccccggagcgca

SEQ ID NO: 2958797 - DNA, 25 bp, Homo sapien
tcgggcaataatccctgcctctctt

SEQ ID NO: 2958798 - DNA, 25 bp, Homo sapien
cggctggcggtttcgggcaataatc

SEQ ID NO: 2958799 - DNA, 25 bp, Homo sapien
gatccgtaggcgaggaaataacgac

SEQ ID NO: 2958800 - DNA, 25 bp, Homo sapien
tattgcggaaaatctcgacagcggc

SEQ ID NO: 2958801 - DNA, 25 bp, Homo sapien
taacgacccctgcagttgtattgcg

SEQ ID NO: 2958802 - DNA, 25 bp, Homo sapien
tagttgcgggcgatggaagccaggc

SEQ ID NO: 2958803 - DNA, 25 bp, Homo sapien
tggagttgggcgaaggcgcagttgg

SEQ ID NO: 2958804 - DNA, 25 bp, Homo sapien
tgctggcacccggacttggaaaggc

SEQ ID NO: 2958805 - DNA, 25 bp, Homo sapien
ttccaatagtcccggatcctcctgg

SEQ ID NO: 2958806 - DNA, 25 bp, Homo sapien
ccgctgctggcacccggacttggaa

SEQ ID NO: 2958807 - DNA, 25 bp, Homo sapien
ggtctgccctttgtgtcgctgtcca

SEQ ID NO: 2958808 - DNA, 25 bp, Homo sapien
tgtcgctgtccattctactccatga

SEQ ID NO: 2958809 - DNA, 25 bp, Homo sapien
tgatttgaggtaccaccaaggtttg

SEQ ID NO: 2958810 - DNA, 25 bp, Homo sapien
tctgttctgccacaggtctgccctt

SEQ ID NO: 2958811 - DNA, 25 bp, Homo sapien
catgaaccaaggtgctgatgggtgt

SEQ ID NO: 2958812 - DNA, 25 bp, Homo sapien
tttgccgtcgccaagagaaagggac

SEQ ID NO: 2958813 - DNA, 25 bp, Homo sapien
gatgggtgtgtttcctctgctaaca

SEQ ID NO: 2958814 - DNA, 25 bp, Homo sapien
tgccaagcccttattacatgaacca

SEQ ID NO: 2958815 - DNA, 25 bp, Homo sapien
tctcttcttggacatttaagtcagc

SEQ ID NO: 2958816 - DNA, 25 bp, Homo sapien
ctgtctcttcttggacatttaagtc

SEQ ID NO: 2958817 - DNA, 25 bp, Homo sapien
aagtcagctgcggacatgcacttac

SEQ ID NO: 2958818 - DNA, 25 bp, Homo sapien
atttaagtcagctgcggacatgcac

SEQ ID NO: 2958819 - DNA, 25 bp, Homo sapien
gagacagctggggagtggtccacat

SEQ ID NO: 2958820 - DNA, 25 bp, Homo sapien
tcagaagaaagtagagacagctggg

SEQ ID NO: 2958821 - DNA, 25 bp, Homo sapien
gacagctggggagtggtccacatgc

SEQ ID NO: 2958822 - DNA, 25 bp, Homo sapien
ttcagaagaaagtagagacagctgg

SEQ ID NO: 2958823 - DNA, 25 bp, Homo sapien
ggcaacacggacaaaatatatcttc

SEQ ID NO: 2958824 - DNA, 25 bp, Homo sapien
aacctaatcgcactgtctttcttct

SEQ ID NO: 2958825 - DNA, 25 bp, Homo sapien
cagattccttgttctgagggctgga

SEQ ID NO: 2958826 - DNA, 25 bp, Homo sapien
ggaaacctaatcgcactgtctttct

SEQ ID NO: 2958827 - DNA, 25 bp, Homo sapien
cataaaacaatctaggtctgaagct

SEQ ID NO: 2958828 - DNA, 25 bp, Homo sapien
tgcaagtttgtgcaccagagcctga

SEQ ID NO: 2958829 - DNA, 25 bp, Homo sapien
tggatctcccattgccataaaacaa

SEQ ID NO: 2958830 - DNA, 25 bp, Homo sapien
tgtttggtacagtggaaaaattcaa

SEQ ID NO: 2958831 - DNA, 25 bp, Homo sapien
ctagcctaatgaatataggacataa

SEQ ID NO: 2958832 - DNA, 25 bp, Homo sapien
ccaaaggaatcatcaggtggcagag

SEQ ID NO: 2958833 - DNA, 25 bp, Homo sapien
gaaataatggccaaaggaatcatca

SEQ ID NO: 2958834 - DNA, 25 bp, Homo sapien
gcctaatgaatataggacataaatg

SEQ ID NO: 2958835 - DNA, 25 bp, Homo sapien
cacctccacttgaaatgtctccacg

SEQ ID NO: 2958836 - DNA, 25 bp, Homo sapien
tcccacctccacttgaaatgtctcc

SEQ ID NO: 2958837 - DNA, 25 bp, Homo sapien
cctccacttgaaatgtctccacgaa

SEQ ID NO: 2958838 - DNA, 25 bp, Homo sapien
tccacttgaaatgtctccacgaatt

SEQ ID NO: 2958839 - DNA, 25 bp, Homo sapien
tcattgtttaagctatggttgagtt

SEQ ID NO: 2958840 - DNA, 25 bp, Homo sapien
gccagcctgttgtcttaagaggcat

SEQ ID NO: 2958841 - DNA, 25 bp, Homo sapien
taagctatggttgagtttctgccag

SEQ ID NO: 2958842 - DNA, 25 bp, Homo sapien
gtttctgccagcctgttgtcttaag

SEQ ID NO: 2958843 - DNA, 25 bp, Homo sapien
gagtcttgaaggcattgtccaaaaa

SEQ ID NO: 2958844 - DNA, 25 bp, Homo sapien
tgggctagtcaacaagggaaggaaa

SEQ ID NO: 2958845 - DNA, 25 bp, Homo sapien
gggtaggaaattgatcaatctgtag

SEQ ID NO: 2958846 - DNA, 25 bp, Homo sapien
aggaaagtaggaatgggcttaactg

SEQ ID NO: 2958847 - DNA, 25 bp, Homo sapien
aattgctggttgtcagaattagagg

SEQ ID NO: 2958848 - DNA, 25 bp, Homo sapien
gtcagaattagaggcgcatctttct

SEQ ID NO: 2958849 - DNA, 25 bp, Homo sapien
gaattagaggcgcatctttctacac

SEQ ID NO: 2958850 - DNA, 25 bp, Homo sapien
agagaattgctggttgtcagaatta

SEQ ID NO: 2958851 - DNA, 25 bp, Homo sapien
gatgaatgaggtatatgtacttctc

SEQ ID NO: 2958852 - DNA, 25 bp, Homo sapien
cctcaagtcgaaggctcatttttga

SEQ ID NO: 2958853 - DNA, 25 bp, Homo sapien
tctttctcctcaagtcgaaggctca

SEQ ID NO: 2958854 - DNA, 25 bp, Homo sapien
gctttaatgccaccagtataattga

SEQ ID NO: 2958855 - DNA, 25 bp, Homo sapien
aaaagaacaatcattaaaggagtct

SEQ ID NO: 2958856 - DNA, 25 bp, Homo sapien
aaagaacaatcattaaaggagtctg

SEQ ID NO: 2958857 - DNA, 25 bp, Homo sapien
cttgattcttcccaatttagattga

SEQ ID NO: 2958858 - DNA, 25 bp, Homo sapien
gattcttcccaatttagattgaccc

SEQ ID NO: 2958859 - DNA, 25 bp, Homo sapien
cttcccaatttagattgacccacat

SEQ ID NO: 2958860 - DNA, 25 bp, Homo sapien
ttcttcccaatttagattgacccac

SEQ ID NO: 2958861 - DNA, 25 bp, Homo sapien
ttaaatcaaaagctttgctcaaaat

SEQ ID NO: 2958862 - DNA, 25 bp, Homo sapien
taagcagtacttctgagcacagact

SEQ ID NO: 2958863 - DNA, 25 bp, Homo sapien
cagtacttctgagcacagactttaa

SEQ ID NO: 2958864 - DNA, 25 bp, Homo sapien
tggtaagcagtacttctgagcacag

SEQ ID NO: 2958865 - DNA, 25 bp, Homo sapien
tttcaggatcaaggatctcatatag

SEQ ID NO: 2958866 - DNA, 25 bp, Homo sapien
ttaatgagttgcatttttcaggatc

SEQ ID NO: 2958867 - DNA, 25 bp, Homo sapien
tttgaattgtcaacagcaatctgta

SEQ ID NO: 2958868 - DNA, 25 bp, Homo sapien
tcatataggtcgttggttttctcac

SEQ ID NO: 2958869 - DNA, 25 bp, Homo sapien
gtaaccagaactttatcacatcctg

SEQ ID NO: 2958870 - DNA, 25 bp, Homo sapien
tttgtaaccagaactttatcacatc

SEQ ID NO: 2958871 - DNA, 25 bp, Homo sapien
taaatttgtaaccagaactttatca

SEQ ID NO: 2958872 - DNA, 25 bp, Homo sapien
aatttgtaaccagaactttatcaca

SEQ ID NO: 2958873 - DNA, 25 bp, Homo sapien
aggagatagatggtctttttcattt

SEQ ID NO: 2958874 - DNA, 25 bp, Homo sapien
gatagatggtctttttcatttcgtt

SEQ ID NO: 2958875 - DNA, 25 bp, Homo sapien
gagatagatggtctttttcatttcg

SEQ ID NO: 2958876 - DNA, 25 bp, Homo sapien
ggagatagatggtctttttcatttc

SEQ ID NO: 2958877 - DNA, 25 bp, Homo sapien
cctgttcatcgttcaaagcttgaat

SEQ ID NO: 2958878 - DNA, 25 bp, Homo sapien
tccagcattccctgttcatcgttca

SEQ ID NO: 2958879 - DNA, 25 bp, Homo sapien
ttagttatccgtcttatcaatagaa

SEQ ID NO: 2958880 - DNA, 25 bp, Homo sapien
cattccctgttcatcgttcaaagct

SEQ ID NO: 2958881 - DNA, 25 bp, Homo sapien
tctgatgcaagtttaaggcccatac

SEQ ID NO: 2958882 - DNA, 25 bp, Homo sapien
tattttggaactcataggtgtgaca

SEQ ID NO: 2958883 - DNA, 25 bp, Homo sapien
caagtcataggactggtaagtagca

SEQ ID NO: 2958884 - DNA, 25 bp, Homo sapien
ttaaggtacctgacaacatgatctg

SEQ ID NO: 2958885 - DNA, 25 bp, Homo sapien
tgagacatgtggtaagcaagcctaa

SEQ ID NO: 2958886 - DNA, 25 bp, Homo sapien
cagcagcacttttgatgcttgagag

SEQ ID NO: 2958887 - DNA, 25 bp, Homo sapien
caatgttgctgaacaatagcagcag

SEQ ID NO: 2958888 - DNA, 25 bp, Homo sapien
agagctgatgaatgaccaaggttgc

SEQ ID NO: 2958889 - DNA, 25 bp, Homo sapien
tagctgcagaactggaacctctcca

SEQ ID NO: 2958890 - DNA, 25 bp, Homo sapien
tctgcaaagtaggttagagccccct

SEQ ID NO: 2958891 - DNA, 25 bp, Homo sapien
tttgctcagtgtctgacactgagga

SEQ ID NO: 2958892 - DNA, 25 bp, Homo sapien
agttcccctttgtcccaagctctat

SEQ ID NO: 2958893 - DNA, 25 bp, Homo sapien
tcatgatgtaatttctttcccatct

SEQ ID NO: 2958894 - DNA, 25 bp, Homo sapien
atgatgtaatttctttcccatctac

SEQ ID NO: 2958895 - DNA, 25 bp, Homo sapien
catgatgtaatttctttcccatcta

SEQ ID NO: 2958896 - DNA, 25 bp, Homo sapien
cagaaaggatcccatcttcagagct

SEQ ID NO: 2958897 - DNA, 25 bp, Homo sapien
catcttcagagcttccactttgagc

SEQ ID NO: 2958898 - DNA, 25 bp, Homo sapien
tttgagcttctgattgcccacaatc

SEQ ID NO: 2958899 - DNA, 25 bp, Homo sapien
gagcttctgattgcccacaatccat

SEQ ID NO: 2958900 - DNA, 25 bp, Homo sapien
gcgttgtccacttctactcttgcca

SEQ ID NO: 2958901 - DNA, 25 bp, Homo sapien
ggaccttgtagaatgccagtaggct

SEQ ID NO: 2958902 - DNA, 25 bp, Homo sapien
tgccagaaaagtgacgaagctgtgc

SEQ ID NO: 2958903 - DNA, 25 bp, Homo sapien
tccagaatgaatattagcgttgtcc

SEQ ID NO: 2958904 - DNA, 25 bp, Homo sapien
gatggctagactgtgaaaaattttc

SEQ ID NO: 2958905 - DNA, 25 bp, Homo sapien
cagatggctagactgtgaaaaattt

SEQ ID NO: 2958906 - DNA, 25 bp, Homo sapien
tcagatggctagactgtgaaaaatt

SEQ ID NO: 2958907 - DNA, 25 bp, Homo sapien
tgtcagatggctagactgtgaaaaa

SEQ ID NO: 2958908 - DNA, 25 bp, Homo sapien
ccagtagcagaattatcggatcaaa

SEQ ID NO: 2958909 - DNA, 25 bp, Homo sapien
tattttccttcagctaggtatccag

SEQ ID NO: 2958910 - DNA, 25 bp, Homo sapien
tctttatccagtaagtggttggtga

SEQ ID NO: 2958911 - DNA, 25 bp, Homo sapien
gctggcatcaaactcggacctcagg

SEQ ID NO: 2958912 - DNA, 25 bp, Homo sapien
tgcttaaagcacaccaattgcacca

SEQ ID NO: 2958913 - DNA, 25 bp, Homo sapien
atggggattccctatggccagctga

SEQ ID NO: 2958914 - DNA, 25 bp, Homo sapien
gggattccctatggccagctgatgc

SEQ ID NO: 2958915 - DNA, 25 bp, Homo sapien
cacaccaattgcaccatagaatggg

SEQ ID NO: 2958916 - DNA, 25 bp, Homo sapien
tgtcatgtccacgagtcgctttagc

SEQ ID NO: 2958917 - DNA, 25 bp, Homo sapien
tgccatgcagcctgaactgtcatgt

SEQ ID NO: 2958918 - DNA, 25 bp, Homo sapien
gcagcctgaactgtcatgtccacga

SEQ ID NO: 2958919 - DNA, 25 bp, Homo sapien
cacgagtcgctttagccgaatacat

SEQ ID NO: 2958920 - DNA, 25 bp, Homo sapien
tcaagagcacccatagctctctgga

SEQ ID NO: 2958921 - DNA, 25 bp, Homo sapien
accactatgaacagcatgcacttgg

SEQ ID NO: 2958922 - DNA, 25 bp, Homo sapien
tgggcccatcctgactctgtagttt

SEQ ID NO: 2958923 - DNA, 25 bp, Homo sapien
aaattccaaaaccactatgaacagc

SEQ ID NO: 2958924 - DNA, 25 bp, Homo sapien
gaactcattttctgcagttactgcc

SEQ ID NO: 2958925 - DNA, 25 bp, Homo sapien
agaactcattttctgcagttactgc

SEQ ID NO: 2958926 - DNA, 25 bp, Homo sapien
actcattttctgcagttactgccat

SEQ ID NO: 2958927 - DNA, 25 bp, Homo sapien
gaagaactcattttctgcagttact

SEQ ID NO: 2958928 - DNA, 25 bp, Homo sapien
gtctggaggcctccgtttttacagc

SEQ ID NO: 2958929 - DNA, 25 bp, Homo sapien
gcctccgtttttacagcagctcgta

SEQ ID NO: 2958930 - DNA, 25 bp, Homo sapien
gtttttacagcagctcgtatcacag

SEQ ID NO: 2958931 - DNA, 25 bp, Homo sapien
tacagcagctcgtatcacagcagct

SEQ ID NO: 2958932 - DNA, 25 bp, Homo sapien
agtggccactaatgtgagtctctcc

SEQ ID NO: 2958933 - DNA, 25 bp, Homo sapien
ggtccagtggccactaatgtgagtc

SEQ ID NO: 2958934 - DNA, 25 bp, Homo sapien
ccaagatgtaacatgagatgagcca

SEQ ID NO: 2958935 - DNA, 25 bp, Homo sapien
gaagtctcttcccataagctcttcc

SEQ ID NO: 2958936 - DNA, 25 bp, Homo sapien
cgttttttgtggctgtgccttctgg

SEQ ID NO: 2958937 - DNA, 25 bp, Homo sapien
tggtggaggccacgttttttgtggc

SEQ ID NO: 2958938 - DNA, 25 bp, Homo sapien
ccacgttttttgtggctgtgccttc

SEQ ID NO: 2958939 - DNA, 25 bp, Homo sapien
ttttttgtggctgtgccttctggga

SEQ ID NO: 2958940 - DNA, 25 bp, Homo sapien
tgccctttgcaaaagaagcacagag

SEQ ID NO: 2958941 - DNA, 25 bp, Homo sapien
ggataatgtatattggctgccaagc

SEQ ID NO: 2958942 - DNA, 25 bp, Homo sapien
gctaaaatgaaagcttgccaactga

SEQ ID NO: 2958943 - DNA, 25 bp, Homo sapien
gcaagtatgaagcaaaagactgttt

SEQ ID NO: 2958944 - DNA, 25 bp, Homo sapien
tgtccatatccaacattaataatga

SEQ ID NO: 2958945 - DNA, 25 bp, Homo sapien
tccatatccaacattaataatgatg

SEQ ID NO: 2958946 - DNA, 25 bp, Homo sapien
taaattgtccatatccaacattaat

SEQ ID NO: 2958947 - DNA, 25 bp, Homo sapien
ctttaaattgtccatatccaacatt

SEQ ID NO: 2958948 - DNA, 25 bp, Homo sapien
catctctctagaacctgagctgtac

SEQ ID NO: 2958949 - DNA, 25 bp, Homo sapien
gaatttgtgctccagatacatctct

SEQ ID NO: 2958950 - DNA, 25 bp, Homo sapien
cagttgccttggataggaatttgtg

SEQ ID NO: 2958951 - DNA, 25 bp, Homo sapien
gaacctgagctgtactcttagcaca

SEQ ID NO: 2958952 - DNA, 25 bp, Homo sapien
acaaaagtgtgatctggacccaatt

SEQ ID NO: 2958953 - DNA, 25 bp, Homo sapien
caaaagtgtgatctggacccaatta

SEQ ID NO: 2958954 - DNA, 25 bp, Homo sapien
tacaaaagtgtgatctggacccaat

SEQ ID NO: 2958955 - DNA, 25 bp, Homo sapien
aaagtgtgatctggacccaattatt

SEQ ID NO: 2958956 - DNA, 25 bp, Homo sapien
tgatttttgtggaccataaagccca

SEQ ID NO: 2958957 - DNA, 25 bp, Homo sapien
gatttttgtggaccataaagcccaa

SEQ ID NO: 2958958 - DNA, 25 bp, Homo sapien
ttttgtggaccataaagcccaagat

SEQ ID NO: 2958959 - DNA, 25 bp, Homo sapien
tttgatttttgtggaccataaagcc

SEQ ID NO: 2958960 - DNA, 25 bp, Homo sapien
tctatcaaccttgtccaatttatca

SEQ ID NO: 2958961 - DNA, 25 bp, Homo sapien
tttataggtattaggaaccatgcca

SEQ ID NO: 2958962 - DNA, 25 bp, Homo sapien
tcaaaatagagagcaggaaatactt

SEQ ID NO: 2958963 - DNA, 25 bp, Homo sapien
gaaccatgccaaacaggataaattg

SEQ ID NO: 2958964 - DNA, 25 bp, Homo sapien
gatgtgtagtacaagttgtcttaaa

SEQ ID NO: 2958965 - DNA, 25 bp, Homo sapien
taaataatttgtcatgaaggccttt

SEQ ID NO: 2958966 - DNA, 25 bp, Homo sapien
atgaaggcctttttgcagaaacaaa

SEQ ID NO: 2958967 - DNA, 25 bp, Homo sapien
tttgatgtgtagtacaagttgtctt

SEQ ID NO: 2958968 - DNA, 25 bp, Homo sapien
tgtgactcttcaggggtactgccat

SEQ ID NO: 2958969 - DNA, 25 bp, Homo sapien
tttgtgactcttcaggggtactgcc

SEQ ID NO: 2958970 - DNA, 25 bp, Homo sapien
tccttttatctttgtgactcttcag

SEQ ID NO: 2958971 - DNA, 25 bp, Homo sapien
cttttatctttgtgactcttcaggg

SEQ ID NO: 2958972 - DNA, 25 bp, Homo sapien
aattgagctggggacccgagtcata

SEQ ID NO: 2958973 - DNA, 25 bp, Homo sapien
gggacccgagtcatatcctccctct

SEQ ID NO: 2958974 - DNA, 25 bp, Homo sapien
ccctgcaattgagctggggacccga

SEQ ID NO: 2958975 - DNA, 25 bp, Homo sapien
tatggtccctgcaattgagctgggg

SEQ ID NO: 2958976 - DNA, 25 bp, Homo sapien
cataaaaggtgtcaagatgatggat

SEQ ID NO: 2958977 - DNA, 25 bp, Homo sapien
acctctggcagttatcactttgaag

SEQ ID NO: 2958978 - DNA, 25 bp, Homo sapien
tcaagtacctctggcagttatcact

SEQ ID NO: 2958979 - DNA, 25 bp, Homo sapien
aaactcataaaaggtgtcaagatga

SEQ ID NO: 2958980 - DNA, 25 bp, Homo sapien
acactcaagagtgagatgatgagaa

SEQ ID NO: 2958981 - DNA, 25 bp, Homo sapien
gcacactcaagagtgagatgatgag

SEQ ID NO: 2958982 - DNA, 25 bp, Homo sapien
cacactcaagagtgagatgatgaga

SEQ ID NO: 2958983 - DNA, 25 bp, Homo sapien
tacgtagaacttcctttcaacagcc

SEQ ID NO: 2958984 - DNA, 25 bp, Homo sapien
cagtccaatgcacttccttatacgt

SEQ ID NO: 2958985 - DNA, 25 bp, Homo sapien
tccaatgcacttccttatacgtaga

SEQ ID NO: 2958986 - DNA, 25 bp, Homo sapien
tccttatacgtagaacttcctttca

SEQ ID NO: 2958987 - DNA, 25 bp, Homo sapien
ggcctgtagccccttatatttggct

SEQ ID NO: 2958988 - DNA, 25 bp, Homo sapien
tgggaacattcactcgatgtccata

SEQ ID NO: 2958989 - DNA, 25 bp, Homo sapien
gatgtaactaatgtccgtaccacca

SEQ ID NO: 2958990 - DNA, 25 bp, Homo sapien
gaaggaacttgtctgatatgaaact

SEQ ID NO: 2958991 - DNA, 25 bp, Homo sapien
tttgctttctggatgtaatgcaatc

SEQ ID NO: 2958992 - DNA, 25 bp, Homo sapien
tgctttctggatgtaatgcaatccc

SEQ ID NO: 2958993 - DNA, 25 bp, Homo sapien
tttctggatgtaatgcaatccccat

SEQ ID NO: 2958994 - DNA, 25 bp, Homo sapien
gctttctggatgtaatgcaatcccc

SEQ ID NO: 2958995 - DNA, 25 bp, Homo sapien
agctgtcaggatgaacttgtatttt

SEQ ID NO: 2958996 - DNA, 25 bp, Homo sapien
ttcacacctttgcaaaaaggtgaat

SEQ ID NO: 2958997 - DNA, 25 bp, Homo sapien
ggacatctctctaacagctgtcagg

SEQ ID NO: 2958998 - DNA, 25 bp, Homo sapien
tggacatctctctaacagctgtcag

SEQ ID NO: 2958999 - DNA, 25 bp, Homo sapien
gactgagcaggtggcctatagatga

SEQ ID NO: 2959000 - DNA, 25 bp, Homo sapien
ccaaagtcaaccttaagaagcagag

SEQ ID NO: 2959001 - DNA, 25 bp, Homo sapien
gctcctacagctctacttagaggga

SEQ ID NO: 2959002 - DNA, 25 bp, Homo sapien
tgcctggtggttagagcctgactga

SEQ ID NO: 2959003 - DNA, 25 bp, Homo sapien
gggacaaaatcgcagactcattcca

SEQ ID NO: 2959004 - DNA, 25 bp, Homo sapien
cagtgactacgttcaccttgttaat

SEQ ID NO: 2959005 - DNA, 25 bp, Homo sapien
tgagatcagaaatcacaagcctttc

SEQ ID NO: 2959006 - DNA, 25 bp, Homo sapien
tcaacactgcctatcatgtccatat

SEQ ID NO: 2959007 - DNA, 25 bp, Homo sapien
tatctctttgagtgttataatcaca

SEQ ID NO: 2959008 - DNA, 25 bp, Homo sapien
ttcaaaactcttactaacatctgtc

SEQ ID NO: 2959009 - DNA, 25 bp, Homo sapien
gaacaaattccctgttgccacccaa

SEQ ID NO: 2959010 - DNA, 25 bp, Homo sapien
tcacagaagccttcaggtgaacaaa

SEQ ID NO: 2959011 - DNA, 25 bp, Homo sapien
aaaagagctttgtgagtcttccctg

SEQ ID NO: 2959012 - DNA, 25 bp, Homo sapien
caaaagagctttgtgagtcttccct

SEQ ID NO: 2959013 - DNA, 25 bp, Homo sapien
ccaaaagagctttgtgagtcttccc

SEQ ID NO: 2959014 - DNA, 25 bp, Homo sapien
tccaaaagagctttgtgagtcttcc

SEQ ID NO: 2959015 - DNA, 25 bp, Homo sapien
accatggaagccatgagttaacttg

SEQ ID NO: 2959016 - DNA, 25 bp, Homo sapien
catgagttaacttggtgaagagaac

SEQ ID NO: 2959017 - DNA, 25 bp, Homo sapien
gaagccatgagttaacttggtgaag

SEQ ID NO: 2959018 - DNA, 25 bp, Homo sapien
agttaacttggtgaagagaacagtg

SEQ ID NO: 2959019 - DNA, 25 bp, Homo sapien
caactcgtagtgctctgatgctgaa

SEQ ID NO: 2959020 - DNA, 25 bp, Homo sapien
gctgacttggcgacatcatgtacag

SEQ ID NO: 2959021 - DNA, 25 bp, Homo sapien
tctttgctatgacagcagtgttgcc

SEQ ID NO: 2959022 - DNA, 25 bp, Homo sapien
cctgggaactctcatcaactcgtag

SEQ ID NO: 2959023 - DNA, 25 bp, Homo sapien
aaatagagagggatagtttttcatc

SEQ ID NO: 2959024 - DNA, 25 bp, Homo sapien
tagagagggatagtttttcatcatc

SEQ ID NO: 2959025 - DNA, 25 bp, Homo sapien
gagggatagtttttcatcatccaca

SEQ ID NO: 2959026 - DNA, 25 bp, Homo sapien
ctagaaatagagagggatagttttt

SEQ ID NO: 2959027 - DNA, 25 bp, Homo sapien
gcaaaatgtaccttaacaggagttg

SEQ ID NO: 2959028 - DNA, 25 bp, Homo sapien
tcaaggctagcagcaaaatgtacct

SEQ ID NO: 2959029 - DNA, 25 bp, Homo sapien
gcaaggtcaaggctagcagcaaaat

SEQ ID NO: 2959030 - DNA, 25 bp, Homo sapien
ctggtgtgattcttgcaaggtcaag

SEQ ID NO: 2959031 - DNA, 25 bp, Homo sapien
cgcttggtgatagtcgattttccct

SEQ ID NO: 2959032 - DNA, 25 bp, Homo sapien
gcacagtcagtcttacagctcataa

SEQ ID NO: 2959033 - DNA, 25 bp, Homo sapien
gatagtcgattttccctttgtggtc

SEQ ID NO: 2959034 - DNA, 25 bp, Homo sapien
gggttcttcgtctcattgcttcaag

SEQ ID NO: 2959035 - DNA, 25 bp, Homo sapien
tgacacaatagcaagccaaagaggt

SEQ ID NO: 2959036 - DNA, 25 bp, Homo sapien
ttttaactggccgaccagtgcctgg

SEQ ID NO: 2959037 - DNA, 25 bp, Homo sapien
caaaaactgcgtatgtgtcttgcat

SEQ ID NO: 2959038 - DNA, 25 bp, Homo sapien
catcacttacccgtttaagtcgtgt

SEQ ID NO: 2959039 - DNA, 25 bp, Homo sapien
ctgaccattcctcactgcgttattg

SEQ ID NO: 2959040 - DNA, 25 bp, Homo sapien
tcactgcgttattgcatttgatctg

SEQ ID NO: 2959041 - DNA, 25 bp, Homo sapien
ctccctccaacacattgtggtccac

SEQ ID NO: 2959042 - DNA, 25 bp, Homo sapien
tgcatttgatctgtcctccctccaa

SEQ ID NO: 2959043 - DNA, 25 bp, Homo sapien
ctgacaaatgttgagtattagacca

SEQ ID NO: 2959044 - DNA, 25 bp, Homo sapien
actgacaaatgttgagtattagacc

SEQ ID NO: 2959045 - DNA, 25 bp, Homo sapien
tgacaaatgttgagtattagaccac

SEQ ID NO: 2959046 - DNA, 25 bp, Homo sapien
gaagggaccaggcttcttttcatgt

SEQ ID NO: 2959047 - DNA, 25 bp, Homo sapien
tcatgtccagtgatattacagattc

SEQ ID NO: 2959048 - DNA, 25 bp, Homo sapien
ggagtttgaggtcatcagttcagca

SEQ ID NO: 2959049 - DNA, 25 bp, Homo sapien
gattctccagaggaccataaataca

SEQ ID NO: 2959050 - DNA, 25 bp, Homo sapien
aaactttgtgcacatcagttgcatt

SEQ ID NO: 2959051 - DNA, 25 bp, Homo sapien
aactttgtgcacatcagttgcattc

SEQ ID NO: 2959052 - DNA, 25 bp, Homo sapien
actttgtgcacatcagttgcattct

SEQ ID NO: 2959053 - DNA, 25 bp, Homo sapien
tttgtgcacatcagttgcattcttc

SEQ ID NO: 2959054 - DNA, 25 bp, Homo sapien
catgttgagacatgtgtgaggtatc

SEQ ID NO: 2959055 - DNA, 25 bp, Homo sapien
caagtatgctcactagcgatgccat

SEQ ID NO: 2959056 - DNA, 25 bp, Homo sapien
tacaagacgtggtacaagtatgctc

SEQ ID NO: 2959057 - DNA, 25 bp, Homo sapien
ctggcatcagatcctacaagacgtg

SEQ ID NO: 2959058 - DNA, 25 bp, Homo sapien
tggttctgaagtagaactagccttc

SEQ ID NO: 2959059 - DNA, 25 bp, Homo sapien
taagggaagtatacatgctagagat

SEQ ID NO: 2959060 - DNA, 25 bp, Homo sapien
ggaagcagtgcttgaccatctgaag

SEQ ID NO: 2959061 - DNA, 25 bp, Homo sapien
tcagcaaatgctacgaaggtggatt

SEQ ID NO: 2959062 - DNA, 25 bp, Homo sapien
aggagattcatgattagagttggcc

SEQ ID NO: 2959063 - DNA, 25 bp, Homo sapien
ttcatgattagagttggccagagga

SEQ ID NO: 2959064 - DNA, 25 bp, Homo sapien
gtgaaggcatggactctgttgtgcc

SEQ ID NO: 2959065 - DNA, 25 bp, Homo sapien
ttcacaggagattcatgattagagt

SEQ ID NO: 2959066 - DNA, 25 bp, Homo sapien
tcatctgtaaagaatggagaagctt

SEQ ID NO: 2959067 - DNA, 25 bp, Homo sapien
agaagcttctgttctaccattgcca

SEQ ID NO: 2959068 - DNA, 25 bp, Homo sapien
tagtatgaatgagggccccaatctc

SEQ ID NO: 2959069 - DNA, 25 bp, Homo sapien
gatcttacttaaagcaaattcatct

SEQ ID NO: 2959070 - DNA, 25 bp, Homo sapien
aaagggatggtggatccagttccag

SEQ ID NO: 2959071 - DNA, 25 bp, Homo sapien
aaaacataaacaagacgacactgag

SEQ ID NO: 2959072 - DNA, 25 bp, Homo sapien
taaacaagacgacactgagcaaaag

SEQ ID NO: 2959073 - DNA, 25 bp, Homo sapien
cttgcaaaggatctaaaacataaac

SEQ ID NO: 2959074 - DNA, 25 bp, Homo sapien
gctggcaacattaagtatctggtaa

SEQ ID NO: 2959075 - DNA, 25 bp, Homo sapien
taggattcaggctcagtacttatgc

SEQ ID NO: 2959076 - DNA, 25 bp, Homo sapien
gagtaacggttcagcttcatgggaa

SEQ ID NO: 2959077 - DNA, 25 bp, Homo sapien
taagtctgatatgagcaccttttcc

SEQ ID NO: 2959078 - DNA, 25 bp, Homo sapien
taaacaagtgtttctagaaaactgc

SEQ ID NO: 2959079 - DNA, 25 bp, Homo sapien
ctaaacaagtgtttctagaaaactg

SEQ ID NO: 2959080 - DNA, 25 bp, Homo sapien
gttcagcccaactgctcccatgagg

SEQ ID NO: 2959081 - DNA, 25 bp, Homo sapien
tcccatgagggtaaactgaatttca

SEQ ID NO: 2959082 - DNA, 25 bp, Homo sapien
taagatatctctgaggtccaatcgg

SEQ ID NO: 2959083 - DNA, 25 bp, Homo sapien
catttctatggagattagactggaa

SEQ ID NO: 2959084 - DNA, 25 bp, Homo sapien
gaagccaatgctctgtaccatttca

SEQ ID NO: 2959085 - DNA, 25 bp, Homo sapien
tgaagccaatgctctgtaccatttc

SEQ ID NO: 2959086 - DNA, 25 bp, Homo sapien
aagccaatgctctgtaccatttcat

SEQ ID NO: 2959087 - DNA, 25 bp, Homo sapien
catttcatattgcttccgtggagtg

SEQ ID NO: 2959088 - DNA, 25 bp, Homo sapien
tcatttcatattgcttccgtggagt

SEQ ID NO: 2959089 - DNA, 25 bp, Homo sapien
atttcatattgcttccgtggagtgt

SEQ ID NO: 2959090 - DNA, 25 bp, Homo sapien
gtattccagataggccaagaaagtg

SEQ ID NO: 2959091 - DNA, 25 bp, Homo sapien
gggtattccagataggccaagaaag

SEQ ID NO: 2959092 - DNA, 25 bp, Homo sapien
ggtattccagataggccaagaaagt

SEQ ID NO: 2959093 - DNA, 25 bp, Homo sapien
gagactctggcaacggctaagaggc

SEQ ID NO: 2959094 - DNA, 25 bp, Homo sapien
gatgcatagtgagcttctcaccaga

SEQ ID NO: 2959095 - DNA, 25 bp, Homo sapien
tgaaatgagatttcataaccaccag

SEQ ID NO: 2959096 - DNA, 25 bp, Homo sapien
gaggcaacccctgtccaaagaatga

SEQ ID NO: 2959097 - DNA, 25 bp, Homo sapien
cttccaaagagcgatgccagccagt

SEQ ID NO: 2959098 - DNA, 25 bp, Homo sapien
tggtaacctgcttcactagagggct

SEQ ID NO: 2959099 - DNA, 25 bp, Homo sapien
tagccacatggttgggtgcatgccc

SEQ ID NO: 2959100 - DNA, 25 bp, Homo sapien
gcttgaagtattcccagaccactga

SEQ ID NO: 2959101 - DNA, 25 bp, Homo sapien
tctgttcataggagtgagctaattt

SEQ ID NO: 2959102 - DNA, 25 bp, Homo sapien
ctgttcataggagtgagctaatttc

SEQ ID NO: 2959103 - DNA, 25 bp, Homo sapien
ctctgttcataggagtgagctaatt

SEQ ID NO: 2959104 - DNA, 25 bp, Homo sapien
tgttcataggagtgagctaatttct

SEQ ID NO: 2959105 - DNA, 25 bp, Homo sapien
tttccgatcagatttcctgccacag

SEQ ID NO: 2959106 - DNA, 25 bp, Homo sapien
gggagtttaatgaatgccgtctgat

SEQ ID NO: 2959107 - DNA, 25 bp, Homo sapien
tgttttgaagcttcatcctccaaag

SEQ ID NO: 2959108 - DNA, 25 bp, Homo sapien
tgctgaatgtttccgatcagatttc

SEQ ID NO: 2959109 - DNA, 25 bp, Homo sapien
gaatagttgatgattgaattcccac

SEQ ID NO: 2959110 - DNA, 25 bp, Homo sapien
cccatgagagaatagttgatgattg

SEQ ID NO: 2959111 - DNA, 25 bp, Homo sapien
aaatactattttccgtagttgagct

SEQ ID NO: 2959112 - DNA, 25 bp, Homo sapien
tttccgtagttgagctgtcagccat

SEQ ID NO: 2959113 - DNA, 25 bp, Homo sapien
tttggctcactgtttgttactggtg

SEQ ID NO: 2959114 - DNA, 25 bp, Homo sapien
gatttggctcactgtttgttactgg

SEQ ID NO: 2959115 - DNA, 25 bp, Homo sapien
atttggctcactgtttgttactggt

SEQ ID NO: 2959116 - DNA, 25 bp, Homo sapien
tgatttggctcactgtttgttactg

SEQ ID NO: 2959117 - DNA, 25 bp, Homo sapien
ctggtctcccatgcactaaagcaca

SEQ ID NO: 2959118 - DNA, 25 bp, Homo sapien
tctcccatgcactaaagcacatctt

SEQ ID NO: 2959119 - DNA, 25 bp, Homo sapien
taaagcacatcttcattaccccttc

SEQ ID NO: 2959120 - DNA, 25 bp, Homo sapien
aaagcacatcttcattaccccttca

SEQ ID NO: 2959121 - DNA, 25 bp, Homo sapien
tctctgggtcactatattctgtcaa

SEQ ID NO: 2959122 - DNA, 25 bp, Homo sapien
tctgggtcactatattctgtcaaat

SEQ ID NO: 2959123 - DNA, 25 bp, Homo sapien
tctgtcaaatttgttgctgactgca

SEQ ID NO: 2959124 - DNA, 25 bp, Homo sapien
ctctgggtcactatattctgtcaaa

SEQ ID NO: 2959125 - DNA, 25 bp, Homo sapien
cagcagtgagagcattagtgtaaga

SEQ ID NO: 2959126 - DNA, 25 bp, Homo sapien
tagtgtaagaatcaactccaacggc

SEQ ID NO: 2959127 - DNA, 25 bp, Homo sapien
cactgaagagatcctgatcgtaact

SEQ ID NO: 2959128 - DNA, 25 bp, Homo sapien
tcccatttcaatcacagcagtgaga

SEQ ID NO: 2959129 - DNA, 25 bp, Homo sapien
tatctgtaagggtctgtgtagcagt

SEQ ID NO: 2959130 - DNA, 25 bp, Homo sapien
acacctctgaaacttagccgtctta

SEQ ID NO: 2959131 - DNA, 25 bp, Homo sapien
ggaagccggggttccacacctctga

SEQ ID NO: 2959132 - DNA, 25 bp, Homo sapien
tagccgtcttatctgtaagggtctg

SEQ ID NO: 2959133 - DNA, 25 bp, Homo sapien
cccgtgagggtccttgacaagtagc

SEQ ID NO: 2959134 - DNA, 25 bp, Homo sapien
gcctcgaactcaaggtcctccagga

SEQ ID NO: 2959135 - DNA, 25 bp, Homo sapien
gatgagtccattgtaaccctccaga

SEQ ID NO: 2959136 - DNA, 25 bp, Homo sapien
ggcctgagcattgcgtgctgccaca

SEQ ID NO: 2959137 - DNA, 25 bp, Homo sapien
ccctggttgaggacaaggtatgcac

SEQ ID NO: 2959138 - DNA, 25 bp, Homo sapien
aggtatgcaccatggccaaaacagc

SEQ ID NO: 2959139 - DNA, 25 bp, Homo sapien
ttaggattaagttgcccataggggc

SEQ ID NO: 2959140 - DNA, 25 bp, Homo sapien
tgagaggtaaccctggttgaggaca

SEQ ID NO: 2959141 - DNA, 25 bp, Homo sapien
acccaatagtctgcacctttatagc

SEQ ID NO: 2959142 - DNA, 25 bp, Homo sapien
tgctggttaatgttctcaggaagca

SEQ ID NO: 2959143 - DNA, 25 bp, Homo sapien
aactgcaggatcagttgctggttaa

SEQ ID NO: 2959144 - DNA, 25 bp, Homo sapien
aaacgccacacccaatagtctgcac

SEQ ID NO: 2959145 - DNA, 25 bp, Homo sapien
ctgtcagtgtcgcagatgatgtgat

SEQ ID NO: 2959146 - DNA, 25 bp, Homo sapien
gtctctgtcagtgtcgcagatgatg

SEQ ID NO: 2959147 - DNA, 25 bp, Homo sapien
tgtcgcagatgatgtgatccagcac

SEQ ID NO: 2959148 - DNA, 25 bp, Homo sapien
cagtgtcgcagatgatgtgatccag

SEQ ID NO: 2959149 - DNA, 25 bp, Homo sapien
gtgggaaggccagcccattgtctat

SEQ ID NO: 2959150 - DNA, 25 bp, Homo sapien
ttgataacaggctccttcaccatca

SEQ ID NO: 2959151 - DNA, 25 bp, Homo sapien
taggagtcaggctgcttttgtggga

SEQ ID NO: 2959152 - DNA, 25 bp, Homo sapien
ctatggcagacaccttgataacagg

SEQ ID NO: 2959153 - DNA, 25 bp, Homo sapien
aagtttcagacagtgcttcctttgc

SEQ ID NO: 2959154 - DNA, 25 bp, Homo sapien
agtttcagacagtgcttcctttgcc

SEQ ID NO: 2959155 - DNA, 25 bp, Homo sapien
tcaggtcacgggtattctctcaaac

SEQ ID NO: 2959156 - DNA, 25 bp, Homo sapien
cagggtccaagtcagctgcatggga

SEQ ID NO: 2959157 - DNA, 25 bp, Homo sapien
cgggtattctctcaaacattgttcc

SEQ ID NO: 2959158 - DNA, 25 bp, Homo sapien
agtcagctgcatgggattgtcaagg

SEQ ID NO: 2959159 - DNA, 25 bp, Homo sapien
gacacgtatattcttcactccattt

SEQ ID NO: 2959160 - DNA, 25 bp, Homo sapien
tcagggacacgtatattcttcactc

SEQ ID NO: 2959161 - DNA, 25 bp, Homo sapien
cagggacacgtatattcttcactcc

SEQ ID NO: 2959162 - DNA, 25 bp, Homo sapien
gggacacgtatattcttcactccat

SEQ ID NO: 2959163 - DNA, 25 bp, Homo sapien
gatcccgtgagtgcagcagttgttt

SEQ ID NO: 2959164 - DNA, 25 bp, Homo sapien
actgaaattgatcccgtgagtgcag

SEQ ID NO: 2959165 - DNA, 25 bp, Homo sapien
attgatcccgtgagtgcagcagttg

SEQ ID NO: 2959166 - DNA, 25 bp, Homo sapien
gaaattgatcccgtgagtgcagcag

SEQ ID NO: 2959167 - DNA, 25 bp, Homo sapien
caacacctggatttcccaaagacag

SEQ ID NO: 2959168 - DNA, 25 bp, Homo sapien
caaagacagggactttgtcttgttc

SEQ ID NO: 2959169 - DNA, 25 bp, Homo sapien
cagcctctacaacacctggatttcc

SEQ ID NO: 2959170 - DNA, 25 bp, Homo sapien
ctggatttcccaaagacagggactt

SEQ ID NO: 2959171 - DNA, 25 bp, Homo sapien
ggttgcccaggtgccatatgacaca

SEQ ID NO: 2959172 - DNA, 25 bp, Homo sapien
acacacatgcttaagcaggagcaaa

SEQ ID NO: 2959173 - DNA, 25 bp, Homo sapien
cagatatagtagtggggttgcccag

SEQ ID NO: 2959174 - DNA, 25 bp, Homo sapien
aagaatatcataccctcgtcgcagg

SEQ ID NO: 2959175 - DNA, 25 bp, Homo sapien
gtgattggcctgcatgaatacctct

SEQ ID NO: 2959176 - DNA, 25 bp, Homo sapien
agcaggttcctctgatagccaacac

SEQ ID NO: 2959177 - DNA, 25 bp, Homo sapien
cagctttcgtagcaggagtcagtcc

SEQ ID NO: 2959178 - DNA, 25 bp, Homo sapien
gatagccaacacttggtgattggcc

SEQ ID NO: 2959179 - DNA, 25 bp, Homo sapien
ttactcataaagaggcagagtagct

SEQ ID NO: 2959180 - DNA, 25 bp, Homo sapien
ggtgtaatgttttcagtgctgaaat

SEQ ID NO: 2959181 - DNA, 25 bp, Homo sapien
agttgttttgagtttgtactattct

SEQ ID NO: 2959182 - DNA, 25 bp, Homo sapien
ttgttttgagtttgtactattcttg

SEQ ID NO: 2959183 - DNA, 25 bp, Homo sapien
ggcagacttgtagccatctcttgat

SEQ ID NO: 2959184 - DNA, 25 bp, Homo sapien
tgtggcagacttgtagccatctctt

SEQ ID NO: 2959185 - DNA, 25 bp, Homo sapien
cttgtggcagacttgtagccatctc

SEQ ID NO: 2959186 - DNA, 25 bp, Homo sapien
gcagacttgtagccatctcttgatt

SEQ ID NO: 2959187 - DNA, 25 bp, Homo sapien
gactgacggatctctccctccaggg

SEQ ID NO: 2959188 - DNA, 25 bp, Homo sapien
agactgacggatctctccctccagg

SEQ ID NO: 2959189 - DNA, 25 bp, Homo sapien
tgtgccgatctacttgtttagcttg

SEQ ID NO: 2959190 - DNA, 25 bp, Homo sapien
caaatgctgtgaagtacgttgaaat

SEQ ID NO: 2959191 - DNA, 25 bp, Homo sapien
gaatatttccctgatcaataattat

SEQ ID NO: 2959192 - DNA, 25 bp, Homo sapien
gggctgaagctgtcataagaagaat

SEQ ID NO: 2959193 - DNA, 25 bp, Homo sapien
agcctggaaaagctaacaggctctt

SEQ ID NO: 2959194 - DNA, 25 bp, Homo sapien
tagcttgaagctgaagcaagcctgg

SEQ ID NO: 2959195 - DNA, 25 bp, Homo sapien
caagtctttacttgaagaagttcca

SEQ ID NO: 2959196 - DNA, 25 bp, Homo sapien
actaactgctttccccacatctgga

SEQ ID NO: 2959197 - DNA, 25 bp, Homo sapien
ctaaatttcagtgtcacccaaacaa

SEQ ID NO: 2959198 - DNA, 25 bp, Homo sapien
aaatttcagtgtcacccaaacaagc

SEQ ID NO: 2959199 - DNA, 25 bp, Homo sapien
cttccctgaaatctaaatttcagtg

SEQ ID NO: 2959200 - DNA, 25 bp, Homo sapien
atttcagtgtcacccaaacaagcat

SEQ ID NO: 2959201 - DNA, 25 bp, Homo sapien
tggcaggacggtgggctctgtcttt

SEQ ID NO: 2959202 - DNA, 25 bp, Homo sapien
tgattcaggattcccacacctgctc

SEQ ID NO: 2959203 - DNA, 25 bp, Homo sapien
ttgccgttggcaggacggtgggctc

SEQ ID NO: 2959204 - DNA, 25 bp, Homo sapien
agaatcttgattcaggattcccaca

SEQ ID NO: 2959205 - DNA, 25 bp, Homo sapien
ctatcagaagtagcacatgcaaagg

SEQ ID NO: 2959206 - DNA, 25 bp, Homo sapien
cacaaaggggattgtttcccagctt

SEQ ID NO: 2959207 - DNA, 25 bp, Homo sapien
gggaaaccttctatcagaagtagca

SEQ ID NO: 2959208 - DNA, 25 bp, Homo sapien
ccttctatcagaagtagcacatgca

SEQ ID NO: 2959209 - DNA, 25 bp, Homo sapien
caacccttcgggtgacttgatttgg

SEQ ID NO: 2959210 - DNA, 25 bp, Homo sapien
cttgatttggttataagctgtgggc

SEQ ID NO: 2959211 - DNA, 25 bp, Homo sapien
cagacaggggtgagtatcaagatta

SEQ ID NO: 2959212 - DNA, 25 bp, Homo sapien
gctgggatcagctttagtcaaccct

SEQ ID NO: 2959213 - DNA, 25 bp, Homo sapien
gaaaaagattgctacctgaaccaga

SEQ ID NO: 2959214 - DNA, 25 bp, Homo sapien
ggtccttgtctagtccacactgatt

SEQ ID NO: 2959215 - DNA, 25 bp, Homo sapien
agttgccagggatgggttcttccag

SEQ ID NO: 2959216 - DNA, 25 bp, Homo sapien
cagattccctcttacaaggtctaaa

SEQ ID NO: 2959217 - DNA, 25 bp, Homo sapien
ggccggggtagcagcagtggacggg

SEQ ID NO: 2959218 - DNA, 25 bp, Homo sapien
ggggtagcagcagtggacggggccg

SEQ ID NO: 2959219 - DNA, 25 bp, Homo sapien
gcagaggctactgaaggagcaagat

SEQ ID NO: 2959220 - DNA, 25 bp, Homo sapien
gcgcagaggctactgaaggagcaag

SEQ ID NO: 2959221 - DNA, 25 bp, Homo sapien
ccttgtgcctttgcgagaatcttaa

SEQ ID NO: 2959222 - DNA, 25 bp, Homo sapien
gaagagatgatggatgccgccctta

SEQ ID NO: 2959223 - DNA, 25 bp, Homo sapien
gcctcagagggatttagtgaaccag

SEQ ID NO: 2959224 - DNA, 25 bp, Homo sapien
catgggtttactctgcagatgggcc

SEQ ID NO: 2959225 - DNA, 25 bp, Homo sapien
tgttgatctgagaatagagaataca

SEQ ID NO: 2959226 - DNA, 25 bp, Homo sapien
tcagtttgttgatctgagaatagag

SEQ ID NO: 2959227 - DNA, 25 bp, Homo sapien
tgagaatagagaatacattgtatac

SEQ ID NO: 2959228 - DNA, 25 bp, Homo sapien
gatctgagaatagagaatacattgt

SEQ ID NO: 2959229 - DNA, 25 bp, Homo sapien
taaggatacatactgtccgtgcttg

SEQ ID NO: 2959230 - DNA, 25 bp, Homo sapien
taaaaatactctgatataatgatcc

SEQ ID NO: 2959231 - DNA, 25 bp, Homo sapien
tcaactccaaggtgtaagaagtggg

SEQ ID NO: 2959232 - DNA, 25 bp, Homo sapien
caaaatagtttgttgacccaggagg

SEQ ID NO: 2959233 - DNA, 25 bp, Homo sapien
gaatacttcataggttggcttgcac

SEQ ID NO: 2959234 - DNA, 25 bp, Homo sapien
tgagagaagtatagctcccaactac

SEQ ID NO: 2959235 - DNA, 25 bp, Homo sapien
cattctagatgttgccagttgcttc

SEQ ID NO: 2959236 - DNA, 25 bp, Homo sapien
tagatgacatagatcacatcggtgc

SEQ ID NO: 2959237 - DNA, 25 bp, Homo sapien
gcccggagcactgagcagggttgca

SEQ ID NO: 2959238 - DNA, 25 bp, Homo sapien
gcgcccggagcactgagcagggttg

SEQ ID NO: 2959239 - DNA, 25 bp, Homo sapien
cggagcactgagcagggttgcagtc

SEQ ID NO: 2959240 - DNA, 25 bp, Homo sapien
cccggagcactgagcagggttgcag

SEQ ID NO: 2959241 - DNA, 25 bp, Homo sapien
ggaggtatcagggagcgctccaggg

SEQ ID NO: 2959242 - DNA, 25 bp, Homo sapien
gaggtatcagggagcgctccagggc

SEQ ID NO: 2959243 - DNA, 25 bp, Homo sapien
gtgatggaggtatcagggagcgctc

SEQ ID NO: 2959244 - DNA, 25 bp, Homo sapien
aggtatcagggagcgctccagggcc

SEQ ID NO: 2959245 - DNA, 25 bp, Homo sapien
tgttttcacaagaggtcatccccgg

SEQ ID NO: 2959246 - DNA, 25 bp, Homo sapien
tccccggagagatggtagcaatcat

SEQ ID NO: 2959247 - DNA, 25 bp, Homo sapien
tattgacatcgagggcgcgtctagc

SEQ ID NO: 2959248 - DNA, 25 bp, Homo sapien
gttgatctccgtgaccacagcgagg

SEQ ID NO: 2959249 - DNA, 25 bp, Homo sapien
catgtccaatcggatagtggccacg

SEQ ID NO: 2959250 - DNA, 25 bp, Homo sapien
tcttttggatctcggtcagagcatc

SEQ ID NO: 2959251 - DNA, 25 bp, Homo sapien
caaagaccgggcaatgcaaaaatca

SEQ ID NO: 2959252 - DNA, 25 bp, Homo sapien
tggtatccttccctaacagagtggg

SEQ ID NO: 2959253 - DNA, 25 bp, Homo sapien
cctgtataagagtggtggaaactgc

SEQ ID NO: 2959254 - DNA, 25 bp, Homo sapien
tgtttcccatcagtgtattttaaga

SEQ ID NO: 2959255 - DNA, 25 bp, Homo sapien
ggatctttagataatttggacagtt

SEQ ID NO: 2959256 - DNA, 25 bp, Homo sapien
gcatttcggacctgatctctcgcca

SEQ ID NO: 2959257 - DNA, 25 bp, Homo sapien
ttgtatgttaagaaggtcatccagc

SEQ ID NO: 2959258 - DNA, 25 bp, Homo sapien
tgcatgaagcacatagatggaagct

SEQ ID NO: 2959259 - DNA, 25 bp, Homo sapien
gacagcataataggaggtgttttcc

SEQ ID NO: 2959260 - DNA, 25 bp, Homo sapien
tccactgctgtaggaggacaagatg

SEQ ID NO: 2959261 - DNA, 25 bp, Homo sapien
attccaggcttctatcactgtcact

SEQ ID NO: 2959262 - DNA, 25 bp, Homo sapien
ttattccaggcttctatcactgtca

SEQ ID NO: 2959263 - DNA, 25 bp, Homo sapien
ctcttattccaggcttctatcactg

SEQ ID NO: 2959264 - DNA, 25 bp, Homo sapien
tcttattccaggcttctatcactgt

SEQ ID NO: 2959265 - DNA, 25 bp, Homo sapien
ttgtggctagggtggcaatatccat

SEQ ID NO: 2959266 - DNA, 25 bp, Homo sapien
agttgttgtacttgggttgctatgc

SEQ ID NO: 2959267 - DNA, 25 bp, Homo sapien
gattaacaggagaagagtcgttaaa

SEQ ID NO: 2959268 - DNA, 25 bp, Homo sapien
gagtcgttaaacagggctgtgttct

SEQ ID NO: 2959269 - DNA, 25 bp, Homo sapien
gctgtgttctctgatccaatggcaa

SEQ ID NO: 2959270 - DNA, 25 bp, Homo sapien
cagccacttaggctcttgaagagta

SEQ ID NO: 2959271 - DNA, 25 bp, Homo sapien
cacttaggctcttgaagagtacccc

SEQ ID NO: 2959272 - DNA, 25 bp, Homo sapien
ctctgcagccacttaggctcttgaa

SEQ ID NO: 2959273 - DNA, 25 bp, Homo sapien
tctgcagccacttaggctcttgaag

SEQ ID NO: 2959274 - DNA, 25 bp, Homo sapien
gaaagccaagcccttagcatgcagt

SEQ ID NO: 2959275 - DNA, 25 bp, Homo sapien
cagtttggtgaccagttcttcccag

SEQ ID NO: 2959276 - DNA, 25 bp, Homo sapien
tagcatgcagtttggtgaccagttc

SEQ ID NO: 2959277 - DNA, 25 bp, Homo sapien
agccaagcccttagcatgcagtttg

SEQ ID NO: 2959278 - DNA, 25 bp, Homo sapien
ttcatcttaactgtgagctcagcca

SEQ ID NO: 2959279 - DNA, 25 bp, Homo sapien
ttattttcatcttaactgtgagctc

SEQ ID NO: 2959280 - DNA, 25 bp, Homo sapien
tattttcatcttaactgtgagctca

SEQ ID NO: 2959281 - DNA, 25 bp, Homo sapien
tgggtttagggactgttcgaagata

SEQ ID NO: 2959282 - DNA, 25 bp, Homo sapien
gactgttcgaagatagatgttttgc

SEQ ID NO: 2959283 - DNA, 25 bp, Homo sapien
gttcgaagatagatgttttgcagtt

SEQ ID NO: 2959284 - DNA, 25 bp, Homo sapien
tagggactgttcgaagatagatgtt

SEQ ID NO: 2959285 - DNA, 25 bp, Homo sapien
ccatgtcgccagtatagcaacacca

SEQ ID NO: 2959286 - DNA, 25 bp, Homo sapien
gggaccccatgtcgccagtatagca

SEQ ID NO: 2959287 - DNA, 25 bp, Homo sapien
tcgccagtatagcaacaccagagaa

SEQ ID NO: 2959288 - DNA, 25 bp, Homo sapien
tgtggggaccccatgtcgccagtat

SEQ ID NO: 2959289 - DNA, 25 bp, Homo sapien
ctgaactctcatccggacgtctcaa

SEQ ID NO: 2959290 - DNA, 25 bp, Homo sapien
tgaactctcatccggacgtctcaat

SEQ ID NO: 2959291 - DNA, 25 bp, Homo sapien
actgaactctcatccggacgtctca

SEQ ID NO: 2959292 - DNA, 25 bp, Homo sapien
gcaaaaatcatgtctttccaatgtc

SEQ ID NO: 2959293 - DNA, 25 bp, Homo sapien
tgaaaatcaagtgtccctgaggaaa

SEQ ID NO: 2959294 - DNA, 25 bp, Homo sapien
aagccctctgctcagggttcaggca

SEQ ID NO: 2959295 - DNA, 25 bp, Homo sapien
tttatagccacatcactgaaaatca

SEQ ID NO: 2959296 - DNA, 25 bp, Homo sapien
aagcatcattgatagactggtccac

SEQ ID NO: 2959297 - DNA, 25 bp, Homo sapien
gtggcatggaaggtattgcttctga

SEQ ID NO: 2959298 - DNA, 25 bp, Homo sapien
tggaaaggtttttcgttcatatgta

SEQ ID NO: 2959299 - DNA, 25 bp, Homo sapien
cctgaatggattatgtgatgtctcc

SEQ ID NO: 2959300 - DNA, 25 bp, Homo sapien
cttctgaggtttttctccagtatga

SEQ ID NO: 2959301 - DNA, 25 bp, Homo sapien
tctgaggtttttctccagtatgaac

SEQ ID NO: 2959302 - DNA, 25 bp, Homo sapien
ctgaggtttttctccagtatgaact

SEQ ID NO: 2959303 - DNA, 25 bp, Homo sapien
acttctgaggtttttctccagtatg

SEQ ID NO: 2959304 - DNA, 25 bp, Homo sapien
tggcattgaaggtaagacttctgac

SEQ ID NO: 2959305 - DNA, 25 bp, Homo sapien
cattgaaggtaagacttctgactga

SEQ ID NO: 2959306 - DNA, 25 bp, Homo sapien
ctatgatggcattgaaggtaagact

SEQ ID NO: 2959307 - DNA, 25 bp, Homo sapien
tgatggcattgaaggtaagacttct

SEQ ID NO: 2959308 - DNA, 25 bp, Homo sapien
aaaggcatgaattatcccagaaagc

SEQ ID NO: 2959309 - DNA, 25 bp, Homo sapien
tgtcacaaaccttaaggtttctctc

SEQ ID NO: 2959310 - DNA, 25 bp, Homo sapien
ctgatgttgtacaagacatgagtca

SEQ ID NO: 2959311 - DNA, 25 bp, Homo sapien
tgtacaagacatgagtcatgccaaa

SEQ ID NO: 2959312 - DNA, 25 bp, Homo sapien
agacatgagtcatgccaaaaaacct

SEQ ID NO: 2959313 - DNA, 25 bp, Homo sapien
aagtctatgataaagtgcaaggttt

SEQ ID NO: 2959314 - DNA, 25 bp, Homo sapien
tatgaagtctatgataaagtgcaag

SEQ ID NO: 2959315 - DNA, 25 bp, Homo sapien
gcttttctactaaaagccttgccac

SEQ ID NO: 2959316 - DNA, 25 bp, Homo sapien
ctatgataaagtgcaaggtttgctt

SEQ ID NO: 2959317 - DNA, 25 bp, Homo sapien
tcatttatgtctttcaaggtgtgac

SEQ ID NO: 2959318 - DNA, 25 bp, Homo sapien
ctctccggtatgacgtctataatga

SEQ ID NO: 2959319 - DNA, 25 bp, Homo sapien
gacgtctataatgacatgcaaggtt

SEQ ID NO: 2959320 - DNA, 25 bp, Homo sapien
catgcaaggtttcctttttgactga

SEQ ID NO: 2959321 - DNA, 25 bp, Homo sapien
ggtatgacgtctataatgacatgca

SEQ ID NO: 2959322 - DNA, 25 bp, Homo sapien
tctaatgttgtgcaagatttgattg

SEQ ID NO: 2959323 - DNA, 25 bp, Homo sapien
cattatacttgtaagacttgtctcc

SEQ ID NO: 2959324 - DNA, 25 bp, Homo sapien
tctctaatgttgtgcaagatttgat

SEQ ID NO: 2959325 - DNA, 25 bp, Homo sapien
aagacttgtctccagtataaattgc

SEQ ID NO: 2959326 - DNA, 25 bp, Homo sapien
caaggattaacctcggactgaagac

SEQ ID NO: 2959327 - DNA, 25 bp, Homo sapien
ctgatgtgtaatactgtgtgaatgt

SEQ ID NO: 2959328 - DNA, 25 bp, Homo sapien
caccaatgaactgcaagctatgaac

SEQ ID NO: 2959329 - DNA, 25 bp, Homo sapien
gaatgtgaagtcaagactttgctac

SEQ ID NO: 2959330 - DNA, 25 bp, Homo sapien
cacgatagtctgtgtagtagacaca

SEQ ID NO: 2959331 - DNA, 25 bp, Homo sapien
ccgatgccagagttacacgatagtc

SEQ ID NO: 2959332 - DNA, 25 bp, Homo sapien
ccaataatcagaaacttctggcaag

SEQ ID NO: 2959333 - DNA, 25 bp, Homo sapien
ctggcaagccgatgccagagttaca

SEQ ID NO: 2959334 - DNA, 25 bp, Homo sapien
gtgttttgtggcagtcaataaccac

SEQ ID NO: 2959335 - DNA, 25 bp, Homo sapien
ttccacttttggtcacttgattgga

SEQ ID NO: 2959336 - DNA, 25 bp, Homo sapien
cttttggtcacttgattggattttc

SEQ ID NO: 2959337 - DNA, 25 bp, Homo sapien
tgtgttttgtggcagtcaataacca

SEQ ID NO: 2959338 - DNA, 25 bp, Homo sapien
cttctcagaggtcttcaatggcatc

SEQ ID NO: 2959339 - DNA, 25 bp, Homo sapien
tcctcagcctgaaattcacatctct

SEQ ID NO: 2959340 - DNA, 25 bp, Homo sapien
catctcctcagcctgaaattcacat

SEQ ID NO: 2959341 - DNA, 25 bp, Homo sapien
ggtcttcaatggcatctcctcagcc

SEQ ID NO: 2959342 - DNA, 25 bp, Homo sapien
aatcacaatgttcctgattattatc

SEQ ID NO: 2959343 - DNA, 25 bp, Homo sapien
ggaatcacaatgttcctgattatta

SEQ ID NO: 2959344 - DNA, 25 bp, Homo sapien
gaatcacaatgttcctgattattat

SEQ ID NO: 2959345 - DNA, 25 bp, Homo sapien
tggaatcacaatgttcctgattatt

SEQ ID NO: 2959346 - DNA, 25 bp, Homo sapien
cccagtctctgagcaagccacgaaa

SEQ ID NO: 2959347 - DNA, 25 bp, Homo sapien
gggcaccatcacctcggggatggaa

SEQ ID NO: 2959348 - DNA, 25 bp, Homo sapien
gccacgaaaatttatggtgaactta

SEQ ID NO: 2959349 - DNA, 25 bp, Homo sapien
tctgagcaagccacgaaaatttatg

SEQ ID NO: 2959350 - DNA, 25 bp, Homo sapien
ctactgcctctagattccacttctg

SEQ ID NO: 2959351 - DNA, 25 bp, Homo sapien
ggcctactgcctctagattccactt

SEQ ID NO: 2959352 - DNA, 25 bp, Homo sapien
aaggcctactgcctctagattccac

SEQ ID NO: 2959353 - DNA, 25 bp, Homo sapien
ctgcctctagattccacttctgtgt

SEQ ID NO: 2959354 - DNA, 25 bp, Homo sapien
agataggtgcaataagcggccggcc

SEQ ID NO: 2959355 - DNA, 25 bp, Homo sapien
agggaagtccttgtgtggtcccacg

SEQ ID NO: 2959356 - DNA, 25 bp, Homo sapien
tttcataaggaatgctggagatagg

SEQ ID NO: 2959357 - DNA, 25 bp, Homo sapien
gaacttgtccctcagtagcagggaa

SEQ ID NO: 2959358 - DNA, 25 bp, Homo sapien
ttctatgctgcacacggagagcata

SEQ ID NO: 2959359 - DNA, 25 bp, Homo sapien
cgtaggcaacataaaagcatcatca

SEQ ID NO: 2959360 - DNA, 25 bp, Homo sapien
tatttagaatgatgaaccgtaggca

SEQ ID NO: 2959361 - DNA, 25 bp, Homo sapien
cacacggagagcatatttagaatga

SEQ ID NO: 2959362 - DNA, 25 bp, Homo sapien
cttctttcagatcttatgttaattt

SEQ ID NO: 2959363 - DNA, 25 bp, Homo sapien
tcctttggaacactttcattctcac

SEQ ID NO: 2959364 - DNA, 25 bp, Homo sapien
tccctagctgctgccttaccatgtg

SEQ ID NO: 2959365 - DNA, 25 bp, Homo sapien
cataattacgccaatcacccgataa

SEQ ID NO: 2959366 - DNA, 25 bp, Homo sapien
ccatgtggtctagtccctctgcttc

SEQ ID NO: 2959367 - DNA, 25 bp, Homo sapien
tcttcataattacgccaatcacccg

SEQ ID NO: 2959368 - DNA, 25 bp, Homo sapien
caattgcgctcaggggtatagttca

SEQ ID NO: 2959369 - DNA, 25 bp, Homo sapien
tttgcaattgcgctcaggggtatag

SEQ ID NO: 2959370 - DNA, 25 bp, Homo sapien
aatttgcaattgcgctcaggggtat

SEQ ID NO: 2959371 - DNA, 25 bp, Homo sapien
gcaattgcgctcaggggtatagttc

SEQ ID NO: 2959372 - DNA, 25 bp, Homo sapien
tctccctgggaggtaaggcgcaggt

SEQ ID NO: 2959373 - DNA, 25 bp, Homo sapien
cctgggaggtaaggcgcaggtcagc

SEQ ID NO: 2959374 - DNA, 25 bp, Homo sapien
tccctgggaggtaaggcgcaggtca

SEQ ID NO: 2959375 - DNA, 25 bp, Homo sapien
ggttctccctgggaggtaaggcgca

SEQ ID NO: 2959376 - DNA, 25 bp, Homo sapien
cttttgaaacccctctatgtcatca

SEQ ID NO: 2959377 - DNA, 25 bp, Homo sapien
taatttgacacaacatagtgaaagt

SEQ ID NO: 2959378 - DNA, 25 bp, Homo sapien
ccaaataatttgacacaacatagtg

SEQ ID NO: 2959379 - DNA, 25 bp, Homo sapien
ttttgaaacccctctatgtcatcat

SEQ ID NO: 2959380 - DNA, 25 bp, Homo sapien
tctgttagggccattctcatgctat

SEQ ID NO: 2959381 - DNA, 25 bp, Homo sapien
ggttcgtccagccttaacactgaca

SEQ ID NO: 2959382 - DNA, 25 bp, Homo sapien
cactgacagcttgtagtgtagtagc

SEQ ID NO: 2959383 - DNA, 25 bp, Homo sapien
cactgactctgccttggttcgtcca

SEQ ID NO: 2959384 - DNA, 25 bp, Homo sapien
ataaatgtgtcctgatttgcttcca

SEQ ID NO: 2959385 - DNA, 25 bp, Homo sapien
ctcttctataaatgtgtcctgattt

SEQ ID NO: 2959386 - DNA, 25 bp, Homo sapien
tctataaatgtgtcctgatttgctt

SEQ ID NO: 2959387 - DNA, 25 bp, Homo sapien
cttctataaatgtgtcctgatttgc

SEQ ID NO: 2959388 - DNA, 25 bp, Homo sapien
cactgggactaattctagcttaggg

SEQ ID NO: 2959389 - DNA, 25 bp, Homo sapien
gtcccaagctatccattcactgtct

SEQ ID NO: 2959390 - DNA, 25 bp, Homo sapien
ttaggggtgtggagctctctttccc

SEQ ID NO: 2959391 - DNA, 25 bp, Homo sapien
gtcttccactgggactaattctagc

SEQ ID NO: 2959392 - DNA, 25 bp, Homo sapien
acaagttcatgttgggttattgaac

SEQ ID NO: 2959393 - DNA, 25 bp, Homo sapien
catgttgggttattgaacataactc

SEQ ID NO: 2959394 - DNA, 25 bp, Homo sapien
ggaaacgacatctttcccatccctg

SEQ ID NO: 2959395 - DNA, 25 bp, Homo sapien
gactaaggaaacgacatctttccca

SEQ ID NO: 2959396 - DNA, 25 bp, Homo sapien
acaaggcagccgcaagttaagcatg

SEQ ID NO: 2959397 - DNA, 25 bp, Homo sapien
cagccgcaagttaagcatgtgacag

SEQ ID NO: 2959398 - DNA, 25 bp, Homo sapien
tctttacaaggcagccgcaagttaa

SEQ ID NO: 2959399 - DNA, 25 bp, Homo sapien
ggcagccgcaagttaagcatgtgac

SEQ ID NO: 2959400 - DNA, 25 bp, Homo sapien
cttcactgactgactcagacggcag

SEQ ID NO: 2959401 - DNA, 25 bp, Homo sapien
actgactgactcagacggcagagca

SEQ ID NO: 2959402 - DNA, 25 bp, Homo sapien
tgactcagacggcagagcatgtatg

SEQ ID NO: 2959403 - DNA, 25 bp, Homo sapien
tcagacggcagagcatgtatgtcac

SEQ ID NO: 2959404 - DNA, 25 bp, Homo sapien
ttattcctctatccttgctatgcag

SEQ ID NO: 2959405 - DNA, 25 bp, Homo sapien
tcagccacaagaaggtcgtcttcat

SEQ ID NO: 2959406 - DNA, 25 bp, Homo sapien
tggtagcactgaccacagacgctga

SEQ ID NO: 2959407 - DNA, 25 bp, Homo sapien
cagacgctgacggacagagaaagta

SEQ ID NO: 2959408 - DNA, 25 bp, Homo sapien
gttggctaggaaacacaaagtaaga

SEQ ID NO: 2959409 - DNA, 25 bp, Homo sapien
tgagttctggatgacgaacttggca

SEQ ID NO: 2959410 - DNA, 25 bp, Homo sapien
tggatgacgaacttggcattctcta

SEQ ID NO: 2959411 - DNA, 25 bp, Homo sapien
acacaaagtaagagtaattgagttc

SEQ ID NO: 2959412 - DNA, 25 bp, Homo sapien
caacaggcctttccaggctgacatt

SEQ ID NO: 2959413 - DNA, 25 bp, Homo sapien
ccaacaggcctttccaggctgacat

SEQ ID NO: 2959414 - DNA, 25 bp, Homo sapien
gcccttctattgcagttagcacctc

SEQ ID NO: 2959415 - DNA, 25 bp, Homo sapien
agtgtggattgttgtgatttctgag

SEQ ID NO: 2959416 - DNA, 25 bp, Homo sapien
gggagcccttctattgcagttagca

SEQ ID NO: 2959417 - DNA, 25 bp, Homo sapien
cctcagggagcccttctattgcagt

SEQ ID NO: 2959418 - DNA, 25 bp, Homo sapien
gttgctctcagaaccagcaccttgc

SEQ ID NO: 2959419 - DNA, 25 bp, Homo sapien
ttgctctcagaaccagcaccttgcc

SEQ ID NO: 2959420 - DNA, 25 bp, Homo sapien
tgttgctctcagaaccagcaccttg

SEQ ID NO: 2959421 - DNA, 25 bp, Homo sapien
ttgttgctctcagaaccagcacctt

SEQ ID NO: 2959422 - DNA, 25 bp, Homo sapien
gatcaagcctgctcttatctaaaag

SEQ ID NO: 2959423 - DNA, 25 bp, Homo sapien
gcctgctcttatctaaaaggcttgt

SEQ ID NO: 2959424 - DNA, 25 bp, Homo sapien
tgttcgtgagatcaagcctgctctt

SEQ ID NO: 2959425 - DNA, 25 bp, Homo sapien
gtctcttttatgttcgtgagatcaa

SEQ ID NO: 2959426 - DNA, 25 bp, Homo sapien
gattaccaggtggacacacatcaat

SEQ ID NO: 2959427 - DNA, 25 bp, Homo sapien
ggacacacatcaataggaccagctt

SEQ ID NO: 2959428 - DNA, 25 bp, Homo sapien
caggtatcagattaccaggtggaca

SEQ ID NO: 2959429 - DNA, 25 bp, Homo sapien
agcctgagcaggtatcagattacca

SEQ ID NO: 2959430 - DNA, 25 bp, Homo sapien
ttctgagtccattgggcaacatctg

SEQ ID NO: 2959431 - DNA, 25 bp, Homo sapien
tcctcagatacacatttagacacat

SEQ ID NO: 2959432 - DNA, 25 bp, Homo sapien
tgagtccattgggcaacatctgtcc

SEQ ID NO: 2959433 - DNA, 25 bp, Homo sapien
ttgcaaaagaattagttcaaacttc

SEQ ID NO: 2959434 - DNA, 25 bp, Homo sapien
attatctcctctctgctgtaccaca

SEQ ID NO: 2959435 - DNA, 25 bp, Homo sapien
taccacattttagtctggctggtca

SEQ ID NO: 2959436 - DNA, 25 bp, Homo sapien
tcccattatctcctctctgctgtac

SEQ ID NO: 2959437 - DNA, 25 bp, Homo sapien
gctgtaccacattttagtctggctg

SEQ ID NO: 2959438 - DNA, 25 bp, Homo sapien
ccttggttaggatttcccagcatga

SEQ ID NO: 2959439 - DNA, 25 bp, Homo sapien
tttcccagcatgaggatattgcctt

SEQ ID NO: 2959440 - DNA, 25 bp, Homo sapien
ccagcatgaggatattgcctttgcc

SEQ ID NO: 2959441 - DNA, 25 bp, Homo sapien
gtccttggttaggatttcccagcat

SEQ ID NO: 2959442 - DNA, 25 bp, Homo sapien
gagtgtcacatgcatgtaatacaca

SEQ ID NO: 2959443 - DNA, 25 bp, Homo sapien
tacacagtagagctgtcctcctcct

SEQ ID NO: 2959444 - DNA, 25 bp, Homo sapien
catgcatgtaatacacagtagagct

SEQ ID NO: 2959445 - DNA, 25 bp, Homo sapien
ctagctgagtgtcacatgcatgtaa

SEQ ID NO: 2959446 - DNA, 25 bp, Homo sapien
gatattttctatccctgcagattct

SEQ ID NO: 2959447 - DNA, 25 bp, Homo sapien
aaatggagccagaaaccttttggag

SEQ ID NO: 2959448 - DNA, 25 bp, Homo sapien
ggatattttctatccctgcagattc

SEQ ID NO: 2959449 - DNA, 25 bp, Homo sapien
tggagccagaaaccttttggaggaa

SEQ ID NO: 2959450 - DNA, 25 bp, Homo sapien
gacacccgcaatcagtttctgtctg

SEQ ID NO: 2959451 - DNA, 25 bp, Homo sapien
gcattctccaactgacctcctgaca

SEQ ID NO: 2959452 - DNA, 25 bp, Homo sapien
gaatcctctgtaacttctcacagct

SEQ ID NO: 2959453 - DNA, 25 bp, Homo sapien
tttctgtctgttgcagaatcctctg

SEQ ID NO: 2959454 - DNA, 25 bp, Homo sapien
gttggacgcgtattgtcttatgtca

SEQ ID NO: 2959455 - DNA, 25 bp, Homo sapien
tattggtggatcctccaaaatgctc

SEQ ID NO: 2959456 - DNA, 25 bp, Homo sapien
cttatgtcaagcataaagttttggc

SEQ ID NO: 2959457 - DNA, 25 bp, Homo sapien
gttgtttgtattcctcttgtggttg

SEQ ID NO: 2959458 - DNA, 25 bp, Homo sapien
gacgctctttactagcactacaact

SEQ ID NO: 2959459 - DNA, 25 bp, Homo sapien
caatgacgctctttactagcactac

SEQ ID NO: 2959460 - DNA, 25 bp, Homo sapien
tctttactagcactacaactttctt

SEQ ID NO: 2959461 - DNA, 25 bp, Homo sapien
ctccaatgacgctctttactagcac

SEQ ID NO: 2959462 - DNA, 25 bp, Homo sapien
tgtccacagcaccagaggggttttt

SEQ ID NO: 2959463 - DNA, 25 bp, Homo sapien
atgtccacagcaccagaggggtttt

SEQ ID NO: 2959464 - DNA, 25 bp, Homo sapien
tccacagcaccagaggggtttttcc

SEQ ID NO: 2959465 - DNA, 25 bp, Homo sapien
acagcaccagaggggtttttccatt

SEQ ID NO: 2959466 - DNA, 25 bp, Homo sapien
ctgaggacatcagggttccatgaga

SEQ ID NO: 2959467 - DNA, 25 bp, Homo sapien
catgagatgttagtttcttgaaaga

SEQ ID NO: 2959468 - DNA, 25 bp, Homo sapien
ggttccatgagatgttagtttcttg

SEQ ID NO: 2959469 - DNA, 25 bp, Homo sapien
cagggttccatgagatgttagtttc

SEQ ID NO: 2959470 - DNA, 25 bp, Homo sapien
ttcatatttgctgatgtacgtattg

SEQ ID NO: 2959471 - DNA, 25 bp, Homo sapien
ctaaatagttgaaggcatattcttt

SEQ ID NO: 2959472 - DNA, 25 bp, Homo sapien
tttgctgatgtacgtattggaatcc

SEQ ID NO: 2959473 - DNA, 25 bp, Homo sapien
gatgtacgtattggaatccttgtac

SEQ ID NO: 2959474 - DNA, 25 bp, Homo sapien
gagaatttgtgattgatgtatcggc

SEQ ID NO: 2959475 - DNA, 25 bp, Homo sapien
tgtgattgatgtatcggcataaatc

SEQ ID NO: 2959476 - DNA, 25 bp, Homo sapien
cttcttcttgagaatttgtgattga

SEQ ID NO: 2959477 - DNA, 25 bp, Homo sapien
gatgtatcggcataaatcagcccca

SEQ ID NO: 2959478 - DNA, 25 bp, Homo sapien
gctttgctcatctgtattcatcctc

SEQ ID NO: 2959479 - DNA, 25 bp, Homo sapien
catctcccacataccttacgtaata

SEQ ID NO: 2959480 - DNA, 25 bp, Homo sapien
aaatctttacacagcccacttgtct

SEQ ID NO: 2959481 - DNA, 25 bp, Homo sapien
ccttccatctgacaacacatctccc

SEQ ID NO: 2959482 - DNA, 25 bp, Homo sapien
cccagctggccgaccgccgtgccct

SEQ ID NO: 2959483 - DNA, 25 bp, Homo sapien
ccacgaggcttgctcccagctggcc

SEQ ID NO: 2959484 - DNA, 25 bp, Homo sapien
tcccagctggccgaccgccgtgccc

SEQ ID NO: 2959485 - DNA, 25 bp, Homo sapien
gggccacgaggcttgctcccagctg

SEQ ID NO: 2959486 - DNA, 25 bp, Homo sapien
ctgtggttacacacggagtaagagt

SEQ ID NO: 2959487 - DNA, 25 bp, Homo sapien
agagtttcatatgggattccagggc

SEQ ID NO: 2959488 - DNA, 25 bp, Homo sapien
cacacggagtaagagtttcatatgg

SEQ ID NO: 2959489 - DNA, 25 bp, Homo sapien
ggttacacacggagtaagagtttca

SEQ ID NO: 2959490 - DNA, 25 bp, Homo sapien
ccctgctttaatcgaatacatgagt

SEQ ID NO: 2959491 - DNA, 25 bp, Homo sapien
cttccctgctttaatcgaatacatg

SEQ ID NO: 2959492 - DNA, 25 bp, Homo sapien
tccctgctttaatcgaatacatgag

SEQ ID NO: 2959493 - DNA, 25 bp, Homo sapien
ttccctgctttaatcgaatacatga

SEQ ID NO: 2959494 - DNA, 25 bp, Homo sapien
tcaatcaagaactaaatctacagtc

SEQ ID NO: 2959495 - DNA, 25 bp, Homo sapien
acagctcttcagttagactgatgtg

SEQ ID NO: 2959496 - DNA, 25 bp, Homo sapien
ttcagttagactgatgtgggacaga

SEQ ID NO: 2959497 - DNA, 25 bp, Homo sapien
gtctttcgcctaccagacaacagct

SEQ ID NO: 2959498 - DNA, 25 bp, Homo sapien
tctgatagctatgggtgcaggtaaa

SEQ ID NO: 2959499 - DNA, 25 bp, Homo sapien
gccaaggaccccatatgctgtgtct

SEQ ID NO: 2959500 - DNA, 25 bp, Homo sapien
tagcaggttggaagtgagttgtttc

SEQ ID NO: 2959501 - DNA, 25 bp, Homo sapien
aagctgtcacagcatgccaaggacc

SEQ ID NO: 2959502 - DNA, 25 bp, Homo sapien
ccaaagctctgggattattacttac

SEQ ID NO: 2959503 - DNA, 25 bp, Homo sapien
gccaaagctctgggattattactta

SEQ ID NO: 2959504 - DNA, 25 bp, Homo sapien
ggccaaagctctgggattattactt

SEQ ID NO: 2959505 - DNA, 25 bp, Homo sapien
cttctgctttaatagtctgatcctc

SEQ ID NO: 2959506 - DNA, 25 bp, Homo sapien
gctttaatagtctgatcctctcctt

SEQ ID NO: 2959507 - DNA, 25 bp, Homo sapien
ctgctttaatagtctgatcctctcc

SEQ ID NO: 2959508 - DNA, 25 bp, Homo sapien
gatcctctccttttccattgggcat

SEQ ID NO: 2959509 - DNA, 25 bp, Homo sapien
cctgtggtttcccacgtgtacatac

SEQ ID NO: 2959510 - DNA, 25 bp, Homo sapien
gaagacccacaccttctgaagttgc

SEQ ID NO: 2959511 - DNA, 25 bp, Homo sapien
tctgaagacccacaccttctgaagt

SEQ ID NO: 2959512 - DNA, 25 bp, Homo sapien
atacaaggaagtgcctctgaagacc

SEQ ID NO: 2959513 - DNA, 25 bp, Homo sapien
cccagttacaaatttccataggcat

SEQ ID NO: 2959514 - DNA, 25 bp, Homo sapien
tgtccaagtatctcccaagattcca

SEQ ID NO: 2959515 - DNA, 25 bp, Homo sapien
cattaagtgggttgccctaactcca

SEQ ID NO: 2959516 - DNA, 25 bp, Homo sapien
tgagctgcctatttggattgtccaa

SEQ ID NO: 2959517 - DNA, 25 bp, Homo sapien
tgtaacatgaataccagaatggtga

SEQ ID NO: 2959518 - DNA, 25 bp, Homo sapien
caaagttggggagttcttctctgca

SEQ ID NO: 2959519 - DNA, 25 bp, Homo sapien
tctctgtaacatgaataccagaatg

SEQ ID NO: 2959520 - DNA, 25 bp, Homo sapien
tggtgaaagaactataaccttcagt

SEQ ID NO: 2959521 - DNA, 25 bp, Homo sapien
ccagatctccacactgtgctccact

SEQ ID NO: 2959522 - DNA, 25 bp, Homo sapien
tccacactgtgctccactcagggat

SEQ ID NO: 2959523 - DNA, 25 bp, Homo sapien
cagatctccacactgtgctccactc

SEQ ID NO: 2959524 - DNA, 25 bp, Homo sapien
cactgtgctccactcagggatgtaa

SEQ ID NO: 2959525 - DNA, 25 bp, Homo sapien
cactgtttgtgtcttgtggttcagt

SEQ ID NO: 2959526 - DNA, 25 bp, Homo sapien
gatcactgtttgtgtcttgtggttc

SEQ ID NO: 2959527 - DNA, 25 bp, Homo sapien
tcactgtttgtgtcttgtggttcag

SEQ ID NO: 2959528 - DNA, 25 bp, Homo sapien
actgtttgtgtcttgtggttcagtg

SEQ ID NO: 2959529 - DNA, 25 bp, Homo sapien
gtccaaattccattctatgtatcac

SEQ ID NO: 2959530 - DNA, 25 bp, Homo sapien
cagatcctattgcatctgttgatgt

SEQ ID NO: 2959531 - DNA, 25 bp, Homo sapien
tctgttgatgtctgcttcacttgca

SEQ ID NO: 2959532 - DNA, 25 bp, Homo sapien
ttctatgtatcacagatcctattgc

SEQ ID NO: 2959533 - DNA, 25 bp, Homo sapien
tagtttcagattgcacacagtgagc

SEQ ID NO: 2959534 - DNA, 25 bp, Homo sapien
ggtttgcccttgaaagcatgcctct

SEQ ID NO: 2959535 - DNA, 25 bp, Homo sapien
tctttctcagtcagatccaattgct

SEQ ID NO: 2959536 - DNA, 25 bp, Homo sapien
gggtgtcagtcttcatgagtgtgca

SEQ ID NO: 2959537 - DNA, 25 bp, Homo sapien
tcctgtactctgttccgttctgcat

SEQ ID NO: 2959538 - DNA, 25 bp, Homo sapien
cagcctgattctaaaaacgggagag

SEQ ID NO: 2959539 - DNA, 25 bp, Homo sapien
ggctttccgtttcttctggcaagga

SEQ ID NO: 2959540 - DNA, 25 bp, Homo sapien
tactatttcctcgagggaccacagg

SEQ ID NO: 2959541 - DNA, 25 bp, Homo sapien
gcttcgaatttagggcttcccagga

SEQ ID NO: 2959542 - DNA, 25 bp, Homo sapien
gtcattcttctctgcgcctctttgg

SEQ ID NO: 2959543 - DNA, 25 bp, Homo sapien
tagagacccaggctttgatcctgcc

SEQ ID NO: 2959544 - DNA, 25 bp, Homo sapien
cttgctgggcaccttgtcattcttc

SEQ ID NO: 2959545 - DNA, 25 bp, Homo sapien
tgatcctgccgcttgctgggcacct

SEQ ID NO: 2959546 - DNA, 25 bp, Homo sapien
cagaggcggtgcgttctgcgctgcc

SEQ ID NO: 2959547 - DNA, 25 bp, Homo sapien
ccgctcggtacccttggctcctcct

SEQ ID NO: 2959548 - DNA, 25 bp, Homo sapien
ttcgcccgagcgcttcccgggctct

SEQ ID NO: 2959549 - DNA, 25 bp, Homo sapien
caggaaatccgcctccaccgctctc

SEQ ID NO: 2959550 - DNA, 25 bp, Homo sapien
tagggatcccggtgactcttgccaa

SEQ ID NO: 2959551 - DNA, 25 bp, Homo sapien
gtcgcgtagggatcccggtgactct

SEQ ID NO: 2959552 - DNA, 25 bp, Homo sapien
gtggcccacggaggtcgcgtaggga

SEQ ID NO: 2959553 - DNA, 25 bp, Homo sapien
tggcccacggaggtcgcgtagggat

SEQ ID NO: 2959554 - DNA, 25 bp, Homo sapien
tgaggttctacagtgagttggccaa

SEQ ID NO: 2959555 - DNA, 25 bp, Homo sapien
tggactaactccgtcctctgcaggc

SEQ ID NO: 2959556 - DNA, 25 bp, Homo sapien
cccaggcggcatcgaaaggaaggta

SEQ ID NO: 2959557 - DNA, 25 bp, Homo sapien
tctgcaggccgagaatggatcaagc

SEQ ID NO: 2959558 - DNA, 25 bp, Homo sapien
taccgagaagtttctggtgtctcct

SEQ ID NO: 2959559 - DNA, 25 bp, Homo sapien
tcgtggaggcccaaacactccatgc

SEQ ID NO: 2959560 - DNA, 25 bp, Homo sapien
tgccctggagaatgtgcctttagga

SEQ ID NO: 2959561 - DNA, 25 bp, Homo sapien
aacgggcataacaataccgtgccct

SEQ ID NO: 2959562 - DNA, 25 bp, Homo sapien
aactggcgctggataactatccgaa

SEQ ID NO: 2959563 - DNA, 25 bp, Homo sapien
caactatgtaaaaacttccattgca

SEQ ID NO: 2959564 - DNA, 25 bp, Homo sapien
aattatttcaaactggcgctggata

SEQ ID NO: 2959565 - DNA, 25 bp, Homo sapien
ttcaaactggcgctggataactatc

SEQ ID NO: 2959566 - DNA, 25 bp, Homo sapien
gccaagaaaaagctgttgagtctga

SEQ ID NO: 2959567 - DNA, 25 bp, Homo sapien
ctgccaagaaaaagctgttgagtct

SEQ ID NO: 2959568 - DNA, 25 bp, Homo sapien
tgccaagaaaaagctgttgagtctg

SEQ ID NO: 2959569 - DNA, 25 bp, Homo sapien
ccaagaaaaagctgttgagtctgag

SEQ ID NO: 2959570 - DNA, 25 bp, Homo sapien
ggtagtgttaattatgtcacagatg

SEQ ID NO: 2959571 - DNA, 25 bp, Homo sapien
catcctgggtagtgttaattatgtc

SEQ ID NO: 2959572 - DNA, 25 bp, Homo sapien
cctgggtagtgttaattatgtcaca

SEQ ID NO: 2959573 - DNA, 25 bp, Homo sapien
ccatcctgggtagtgttaattatgt

SEQ ID NO: 2959574 - DNA, 25 bp, Homo sapien
acaaggtaagttggatttctttatg

SEQ ID NO: 2959575 - DNA, 25 bp, Homo sapien
tgacaaggtaagttggatttcttta

SEQ ID NO: 2959576 - DNA, 25 bp, Homo sapien
aaggtaagttggatttctttatgat

SEQ ID NO: 2959577 - DNA, 25 bp, Homo sapien
ggtaagttggatttctttatgattg

SEQ ID NO: 2959578 - DNA, 25 bp, Homo sapien
tagctcgttgccatcttgaattcct

SEQ ID NO: 2959579 - DNA, 25 bp, Homo sapien
gaggtttctctttatcactcaggct

SEQ ID NO: 2959580 - DNA, 25 bp, Homo sapien
gagttgaggtttctctttatcactc

SEQ ID NO: 2959581 - DNA, 25 bp, Homo sapien
atgatcatagctcgttgccatcttg

SEQ ID NO: 2959582 - DNA, 25 bp, Homo sapien
gctcctaacgcagcgtgatgttggc

SEQ ID NO: 2959583 - DNA, 25 bp, Homo sapien
tcctcttgataaagactaatgctcc

SEQ ID NO: 2959584 - DNA, 25 bp, Homo sapien
tgaccatgcacagtcttgggctggg

SEQ ID NO: 2959585 - DNA, 25 bp, Homo sapien
gatgttggctgattagtgccgtgac

SEQ ID NO: 2959586 - DNA, 25 bp, Homo sapien
taactagttgtaccgtcttacgcaa

SEQ ID NO: 2959587 - DNA, 25 bp, Homo sapien
ccaagtctcactctccctaggtgta

SEQ ID NO: 2959588 - DNA, 25 bp, Homo sapien
tacgcaaatacctagcctccaagtc

SEQ ID NO: 2959589 - DNA, 25 bp, Homo sapien
gcttctagctcaatgtgagtttaca

SEQ ID NO: 2959590 - DNA, 25 bp, Homo sapien
cagagactggaaacttggaccacag

SEQ ID NO: 2959591 - DNA, 25 bp, Homo sapien
gattcagtagcttaactaaattctc

SEQ ID NO: 2959592 - DNA, 25 bp, Homo sapien
tctgaatgtctaatggcaagttgta

SEQ ID NO: 2959593 - DNA, 25 bp, Homo sapien
aatggcaagttgtatctgggattca

SEQ ID NO: 2959594 - DNA, 25 bp, Homo sapien
tttgaatgccatgggcaaaatgctc

SEQ ID NO: 2959595 - DNA, 25 bp, Homo sapien
ccttgaactagtcagttagctggaa

SEQ ID NO: 2959596 - DNA, 25 bp, Homo sapien
caataattatgtaccccactcagaa

SEQ ID NO: 2959597 - DNA, 25 bp, Homo sapien
gaaaaagggcaccatccaatgccaa

SEQ ID NO: 2959598 - DNA, 25 bp, Homo sapien
gaggtatacttctttgacttcgctt

SEQ ID NO: 2959599 - DNA, 25 bp, Homo sapien
tgaacgcctttcttaaccaggtcga

SEQ ID NO: 2959600 - DNA, 25 bp, Homo sapien
tttgacttcgcttacatccacacct

SEQ ID NO: 2959601 - DNA, 25 bp, Homo sapien
tcttaaccaggtcgaggtatacttc

SEQ ID NO: 2959602 - DNA, 25 bp, Homo sapien
gtcaagtccttttaagccacagctg

SEQ ID NO: 2959603 - DNA, 25 bp, Homo sapien
catgggtcaaagaaaggcctcctac

SEQ ID NO: 2959604 - DNA, 25 bp, Homo sapien
gattagtctagggtggaacatgcca

SEQ ID NO: 2959605 - DNA, 25 bp, Homo sapien
tggtagctcaattcatgtcaagtcc

SEQ ID NO: 2959606 - DNA, 25 bp, Homo sapien
cagtagggacagatgttggaggatt

SEQ ID NO: 2959607 - DNA, 25 bp, Homo sapien
gggaccaatgtaacagtcgagttct

SEQ ID NO: 2959608 - DNA, 25 bp, Homo sapien
tgttctgggaccaatgtaacagtcg

SEQ ID NO: 2959609 - DNA, 25 bp, Homo sapien
taacagtcgagttctttggagcaat

SEQ ID NO: 2959610 - DNA, 25 bp, Homo sapien
tatccaattcactgtgcagttttcc

SEQ ID NO: 2959611 - DNA, 25 bp, Homo sapien
tcgcacattcattttcaccatatcc

SEQ ID NO: 2959612 - DNA, 25 bp, Homo sapien
tcaccatatccaattcactgtgcag

SEQ ID NO: 2959613 - DNA, 25 bp, Homo sapien
cattttcaccatatccaattcactg

SEQ ID NO: 2959614 - DNA, 25 bp, Homo sapien
gtattctccatcaatatggcggaca

SEQ ID NO: 2959615 - DNA, 25 bp, Homo sapien
gagtattctccatcaatatggcgga

SEQ ID NO: 2959616 - DNA, 25 bp, Homo sapien
aggagtattctccatcaatatggcg

SEQ ID NO: 2959617 - DNA, 25 bp, Homo sapien
tctccatcaatatggcggacatcac

SEQ ID NO: 2959618 - DNA, 25 bp, Homo sapien
tttgactgatagtccctgaaatcgt

SEQ ID NO: 2959619 - DNA, 25 bp, Homo sapien
agacactttgactgatagtccctga

SEQ ID NO: 2959620 - DNA, 25 bp, Homo sapien
gactgatagtccctgaaatcgtaca

SEQ ID NO: 2959621 - DNA, 25 bp, Homo sapien
gatagtccctgaaatcgtacaacac

SEQ ID NO: 2959622 - DNA, 25 bp, Homo sapien
gaaggattgtttgccacagatggat

SEQ ID NO: 2959623 - DNA, 25 bp, Homo sapien
taatatacttaaagccacggatcca

SEQ ID NO: 2959624 - DNA, 25 bp, Homo sapien
ctccaagaggagaaatacagtagac

SEQ ID NO: 2959625 - DNA, 25 bp, Homo sapien
gtcaagaaccccaaggatccttagc

SEQ ID NO: 2959626 - DNA, 25 bp, Homo sapien
tccaaaagcccctgcagttataagg

SEQ ID NO: 2959627 - DNA, 25 bp, Homo sapien
gaaattaagaatagcactccccaca

SEQ ID NO: 2959628 - DNA, 25 bp, Homo sapien
tatttcagatcaaccatagtggagt

SEQ ID NO: 2959629 - DNA, 25 bp, Homo sapien
gatgactccctaggcttatgctgaa

SEQ ID NO: 2959630 - DNA, 25 bp, Homo sapien
ttagagtaaggctttctgtagttgt

SEQ ID NO: 2959631 - DNA, 25 bp, Homo sapien
gttacaatcctcataggatcaaatt

SEQ ID NO: 2959632 - DNA, 25 bp, Homo sapien
caaatttcagattcccttgatttta

SEQ ID NO: 2959633 - DNA, 25 bp, Homo sapien
tagagtaaggctttctgtagttgtc

SEQ ID NO: 2959634 - DNA, 25 bp, Homo sapien
ctctcatatccaaggatagcattat

SEQ ID NO: 2959635 - DNA, 25 bp, Homo sapien
gcattattcaaatcctcattcacct

SEQ ID NO: 2959636 - DNA, 25 bp, Homo sapien
tgaattagctcaacagttacatctt

SEQ ID NO: 2959637 - DNA, 25 bp, Homo sapien
caaatcctcattcacctgaattagc

SEQ ID NO: 2959638 - DNA, 25 bp, Homo sapien
tggtggcttccttctggttcttatt

SEQ ID NO: 2959639 - DNA, 25 bp, Homo sapien
ttggtggcttccttctggttcttat

SEQ ID NO: 2959640 - DNA, 25 bp, Homo sapien
tgctccaaaatcctttgttggtttc

SEQ ID NO: 2959641 - DNA, 25 bp, Homo sapien
tggttcttattttgctccaaaatcc

SEQ ID NO: 2959642 - DNA, 25 bp, Homo sapien
gacttaggtcgaggagatcttgaga

SEQ ID NO: 2959643 - DNA, 25 bp, Homo sapien
aaagttgattattcatggtgttgag

SEQ ID NO: 2959644 - DNA, 25 bp, Homo sapien
ttattcatggtgttgagttctccca

SEQ ID NO: 2959645 - DNA, 25 bp, Homo sapien
agttctcccagagtggccctaggca

SEQ ID NO: 2959646 - DNA, 25 bp, Homo sapien
ccttcttaggtggtatttaatcacg

SEQ ID NO: 2959647 - DNA, 25 bp, Homo sapien
ccattgctatactgggtttgactca

SEQ ID NO: 2959648 - DNA, 25 bp, Homo sapien
taacatagcgctctgacattcaacc

SEQ ID NO: 2959649 - DNA, 25 bp, Homo sapien
catttgccgggaagtaatcacatct

SEQ ID NO: 2959650 - DNA, 25 bp, Homo sapien
gagatactcccttacctgatgctga

SEQ ID NO: 2959651 - DNA, 25 bp, Homo sapien
tgaatttctccgcttgcatcagaga

SEQ ID NO: 2959652 - DNA, 25 bp, Homo sapien
gccattgggctgaacaacttctaca

SEQ ID NO: 2959653 - DNA, 25 bp, Homo sapien
aagcaggccaggtgaattccatgag

SEQ ID NO: 2959654 - DNA, 25 bp, Homo sapien
gcagaactggcatttcaacttggac

SEQ ID NO: 2959655 - DNA, 25 bp, Homo sapien
cccattttataaagtgagactctca

SEQ ID NO: 2959656 - DNA, 25 bp, Homo sapien
ctcaaaagttaggtggctgagaggt

SEQ ID NO: 2959657 - DNA, 25 bp, Homo sapien
gacaaccaccctttaaggcaatcat

SEQ ID NO: 2959658 - DNA, 25 bp, Homo sapien
cccaagctgatccagaatgcaaagg

SEQ ID NO: 2959659 - DNA, 25 bp, Homo sapien
gaatatttttactccggaaacagca

SEQ ID NO: 2959660 - DNA, 25 bp, Homo sapien
tccctgccatgagaagaagttgttg

SEQ ID NO: 2959661 - DNA, 25 bp, Homo sapien
taactgactctacacatcccactgg

SEQ ID NO: 2959662 - DNA, 25 bp, Homo sapien
tctccaaggctagcaagttcatctg

SEQ ID NO: 2959663 - DNA, 25 bp, Homo sapien
ggctagcaagttcatctgtggatga

SEQ ID NO: 2959664 - DNA, 25 bp, Homo sapien
tggatgaagactgggttttaagttg

SEQ ID NO: 2959665 - DNA, 25 bp, Homo sapien
gttgtttgttacatcagaacttgga

SEQ ID NO: 2959666 - DNA, 25 bp, Homo sapien
gggaatctatatggtgataaggttt

SEQ ID NO: 2959667 - DNA, 25 bp, Homo sapien
aattctttgcaatatatctcagggt

SEQ ID NO: 2959668 - DNA, 25 bp, Homo sapien
tttcaatgtatagaggagtaatata

SEQ ID NO: 2959669 - DNA, 25 bp, Homo sapien
tagaggagtaatatataagataact

SEQ ID NO: 2959670 - DNA, 25 bp, Homo sapien
caggcaagaattggagtgacatgac

SEQ ID NO: 2959671 - DNA, 25 bp, Homo sapien
ggagatttgggacacatacaggaaa

SEQ ID NO: 2959672 - DNA, 25 bp, Homo sapien
gaaatccaaggagtacccacaagtc

SEQ ID NO: 2959673 - DNA, 25 bp, Homo sapien
cagatgtccccgtaatagttgtgga

SEQ ID NO: 2959674 - DNA, 25 bp, Homo sapien
tggcttgaggtgaggttttggctgg

SEQ ID NO: 2959675 - DNA, 25 bp, Homo sapien
attatcatatgcgtggcttgaggtg

SEQ ID NO: 2959676 - DNA, 25 bp, Homo sapien
tatcatatgcgtggcttgaggtgag

SEQ ID NO: 2959677 - DNA, 25 bp, Homo sapien
gcgtggcttgaggtgaggttttggc

SEQ ID NO: 2959678 - DNA, 25 bp, Homo sapien
tcttttattactgagactcctacac

SEQ ID NO: 2959679 - DNA, 25 bp, Homo sapien
cacttgcaagtacattgttccaaga

SEQ ID NO: 2959680 - DNA, 25 bp, Homo sapien
cacatgttcatataaacgttctaca

SEQ ID NO: 2959681 - DNA, 25 bp, Homo sapien
catataaacgttctacattaagctt

SEQ ID NO: 2959682 - DNA, 25 bp, Homo sapien
aaacactgaatttgaatgttccaga

SEQ ID NO: 2959683 - DNA, 25 bp, Homo sapien
ctgtagaaacactgaatttgaatgt

SEQ ID NO: 2959684 - DNA, 25 bp, Homo sapien
agaaacactgaatttgaatgttcca

SEQ ID NO: 2959685 - DNA, 25 bp, Homo sapien
acactgaatttgaatgttccagaaa

SEQ ID NO: 2959686 - DNA, 25 bp, Homo sapien
ctgcaatggtttgtagactaactgg

SEQ ID NO: 2959687 - DNA, 25 bp, Homo sapien
aaaggtggcagactctggtttgatg

SEQ ID NO: 2959688 - DNA, 25 bp, Homo sapien
gatggtgctgctgcaatggtttgta

SEQ ID NO: 2959689 - DNA, 25 bp, Homo sapien
agactctggtttgatggtgctgctg

SEQ ID NO: 2959690 - DNA, 25 bp, Homo sapien
tatttgatgcgaataataaggtccc

SEQ ID NO: 2959691 - DNA, 25 bp, Homo sapien
tttgatgcgaataataaggtcccat

SEQ ID NO: 2959692 - DNA, 25 bp, Homo sapien
gatgcgaataataaggtcccatgta

SEQ ID NO: 2959693 - DNA, 25 bp, Homo sapien
ttatttgatgcgaataataaggtcc

SEQ ID NO: 2959694 - DNA, 25 bp, Homo sapien
tataagtcagtcataatggtatctg

SEQ ID NO: 2959695 - DNA, 25 bp, Homo sapien
ggtgtcccaatgctactcccaagtt

SEQ ID NO: 2959696 - DNA, 25 bp, Homo sapien
cacaaccaaaacagactggtgtccc

SEQ ID NO: 2959697 - DNA, 25 bp, Homo sapien
ttccaaacctcaactaaagattcat

SEQ ID NO: 2959698 - DNA, 25 bp, Homo sapien
taagggatcaaactccattacctcg

SEQ ID NO: 2959699 - DNA, 25 bp, Homo sapien
gtgacagcaggagctaagggatcaa

SEQ ID NO: 2959700 - DNA, 25 bp, Homo sapien
cattacctcgtagtaattaggtggc

SEQ ID NO: 2959701 - DNA, 25 bp, Homo sapien
ggctggagatcactttttgtcatcg

SEQ ID NO: 2959702 - DNA, 25 bp, Homo sapien
accacatcaggcctaatagccatac

SEQ ID NO: 2959703 - DNA, 25 bp, Homo sapien
tagcaataccaagtgttacttggtt

SEQ ID NO: 2959704 - DNA, 25 bp, Homo sapien
tcttcccctaatgaggccactaatt

SEQ ID NO: 2959705 - DNA, 25 bp, Homo sapien
cctaatagccatacttctaattctg

SEQ ID NO: 2959706 - DNA, 25 bp, Homo sapien
gggactaaggcacacctggctgatt

SEQ ID NO: 2959707 - DNA, 25 bp, Homo sapien
caaggtctcgttatgctgtcagggc

SEQ ID NO: 2959708 - DNA, 25 bp, Homo sapien
tataaggggtgtgtctcataaagga

SEQ ID NO: 2959709 - DNA, 25 bp, Homo sapien
tgtgttgatcactaaaagtggaccc

SEQ ID NO: 2959710 - DNA, 25 bp, Homo sapien
taggacctaggtcaagggatccagg

SEQ ID NO: 2959711 - DNA, 25 bp, Homo sapien
gtggaagcatgcgtgggccaactca

SEQ ID NO: 2959712 - DNA, 25 bp, Homo sapien
gagactgagagacatcgccatcgtt

SEQ ID NO: 2959713 - DNA, 25 bp, Homo sapien
tacgtggtataactgtagggctcaa

SEQ ID NO: 2959714 - DNA, 25 bp, Homo sapien
gaaaccatgatcaccaagttcataa

SEQ ID NO: 2959715 - DNA, 25 bp, Homo sapien
tcatctccctcaaaacgatttcagt

SEQ ID NO: 2959716 - DNA, 25 bp, Homo sapien
tctgtgatcctgtctattcctggct

SEQ ID NO: 2959717 - DNA, 25 bp, Homo sapien
ccccagaatggtgctacaattttaa

SEQ ID NO: 2959718 - DNA, 25 bp, Homo sapien
tctttatatgcgtcttacatatgtc

SEQ ID NO: 2959719 - DNA, 25 bp, Homo sapien
ccatgccaggcccattcaattcttt

SEQ ID NO: 2959720 - DNA, 25 bp, Homo sapien
tcttacatatgtctgtagctggaaa

SEQ ID NO: 2959721 - DNA, 25 bp, Homo sapien
attcaattctttatatgcgtcttac

SEQ ID NO: 2959722 - DNA, 25 bp, Homo sapien
attaatcttccagcttatttaaact

SEQ ID NO: 2959723 - DNA, 25 bp, Homo sapien
tcttccagcttatttaaactatgtg

SEQ ID NO: 2959724 - DNA, 25 bp, Homo sapien
taatcttccagcttatttaaactat

SEQ ID NO: 2959725 - DNA, 25 bp, Homo sapien
aatcttccagcttatttaaactatg

SEQ ID NO: 2959726 - DNA, 25 bp, Homo sapien
cagtcaccatcattttgagctcctt

SEQ ID NO: 2959727 - DNA, 25 bp, Homo sapien
agtcaccatcattttgagctccttt

SEQ ID NO: 2959728 - DNA, 25 bp, Homo sapien
gtcaccatcattttgagctcctttg

SEQ ID NO: 2959729 - DNA, 25 bp, Homo sapien
gagctcctttgtgctggtgagcatc

SEQ ID NO: 2959730 - DNA, 25 bp, Homo sapien
tggtagtgagctgatcatccacttt

SEQ ID NO: 2959731 - DNA, 25 bp, Homo sapien
cttcattatagcagaaatgtgccac

SEQ ID NO: 2959732 - DNA, 25 bp, Homo sapien
tcttcattatagcagaaatgtgcca

SEQ ID NO: 2959733 - DNA, 25 bp, Homo sapien
ttcattatagcagaaatgtgccacc

SEQ ID NO: 2959734 - DNA, 25 bp, Homo sapien
gactgcactggcgttttacagagct

SEQ ID NO: 2959735 - DNA, 25 bp, Homo sapien
agaacaaaggcttaatccccaagag

SEQ ID NO: 2959736 - DNA, 25 bp, Homo sapien
tatttgtttcaagtcataggccaga

SEQ ID NO: 2959737 - DNA, 25 bp, Homo sapien
tattctttaaaacaggtggtgccag

SEQ ID NO: 2959738 - DNA, 25 bp, Homo sapien
tacattaggtgtaaagcactattaa

SEQ ID NO: 2959739 - DNA, 25 bp, Homo sapien
aattgacttttactatcatgtaact

SEQ ID NO: 2959740 - DNA, 25 bp, Homo sapien
agtataaattctgttacattaggtg

SEQ ID NO: 2959741 - DNA, 25 bp, Homo sapien
tcacttaaactgtcagaggactaat

SEQ ID NO: 2959742 - DNA, 25 bp, Homo sapien
ctcttgatgccctatgattatttct

SEQ ID NO: 2959743 - DNA, 25 bp, Homo sapien
aatactcttgatgccctatgattat

SEQ ID NO: 2959744 - DNA, 25 bp, Homo sapien
cataaatactcttgatgccctatga

SEQ ID NO: 2959745 - DNA, 25 bp, Homo sapien
agacataaatactcttgatgcccta

SEQ ID NO: 2959746 - DNA, 25 bp, Homo sapien
gtaatctggcaacccggcctccgta

SEQ ID NO: 2959747 - DNA, 25 bp, Homo sapien
ccgtaatctggcaacccggcctccg

SEQ ID NO: 2959748 - DNA, 25 bp, Homo sapien
gtagcccgactgcaagcgctgccac

SEQ ID NO: 2959749 - DNA, 25 bp, Homo sapien
ccggcctccgtagcccgactgcaag

SEQ ID NO: 2959750 - DNA, 25 bp, Homo sapien
gaaggctttaactgggtgccgcagc

SEQ ID NO: 2959751 - DNA, 25 bp, Homo sapien
cctgtgtatgtggaacctgcggata

SEQ ID NO: 2959752 - DNA, 25 bp, Homo sapien
cctgcggatactgatggccaactgt

SEQ ID NO: 2959753 - DNA, 25 bp, Homo sapien
aatttgtatccctctccctgacgag

SEQ ID NO: 2959754 - DNA, 25 bp, Homo sapien
caactatcttgagacacttcctgca

SEQ ID NO: 2959755 - DNA, 25 bp, Homo sapien
ttcctgcagatcctatattactctg

SEQ ID NO: 2959756 - DNA, 25 bp, Homo sapien
tactctgactaatattattccagga

SEQ ID NO: 2959757 - DNA, 25 bp, Homo sapien
actatcttgagacacttcctgcaga

SEQ ID NO: 2959758 - DNA, 25 bp, Homo sapien
ttttcaagtagactgggtgatacta

SEQ ID NO: 2959759 - DNA, 25 bp, Homo sapien
tcatgctttcaccaaagtagccttg

SEQ ID NO: 2959760 - DNA, 25 bp, Homo sapien
gactgggtgatactacagtagatgt

SEQ ID NO: 2959761 - DNA, 25 bp, Homo sapien
gccttggatttaacagctgtataaa

SEQ ID NO: 2959762 - DNA, 25 bp, Homo sapien
caatgggccttcattccggttaatt

SEQ ID NO: 2959763 - DNA, 25 bp, Homo sapien
taccttcaggccaaggcctgtttcc

SEQ ID NO: 2959764 - DNA, 25 bp, Homo sapien
tcctagtaccttcaggccaaggcct

SEQ ID NO: 2959765 - DNA, 25 bp, Homo sapien
ttcctgaatatataccaatgggcct

SEQ ID NO: 2959766 - DNA, 25 bp, Homo sapien
tgttgactgagacaagttgatctcc

SEQ ID NO: 2959767 - DNA, 25 bp, Homo sapien
ttgttgactgagacaagttgatctc

SEQ ID NO: 2959768 - DNA, 25 bp, Homo sapien
ctcaacttggctccggtaattatgc

SEQ ID NO: 2959769 - DNA, 25 bp, Homo sapien
ttggctccggtaattatgctttttg

SEQ ID NO: 2959770 - DNA, 25 bp, Homo sapien
gcttcttcaaatgatacaccaatca

SEQ ID NO: 2959771 - DNA, 25 bp, Homo sapien
aacttggctccggtaattatgcttt

SEQ ID NO: 2959772 - DNA, 25 bp, Homo sapien
tgtcttatgaatgctatctcccaag

SEQ ID NO: 2959773 - DNA, 25 bp, Homo sapien
acttaatgttgaggcttgaggtcca

SEQ ID NO: 2959774 - DNA, 25 bp, Homo sapien
tctttgggattagtatttcaggagg

SEQ ID NO: 2959775 - DNA, 25 bp, Homo sapien
gaagcttctataagtgatgtacatg

SEQ ID NO: 2959776 - DNA, 25 bp, Homo sapien
ctgttttgttgtatccagtttttat

SEQ ID NO: 2959777 - DNA, 25 bp, Homo sapien
ctgtattagacaaacccacagtact

SEQ ID NO: 2959778 - DNA, 25 bp, Homo sapien
gtattagacaaacccacagtactgt

SEQ ID NO: 2959779 - DNA, 25 bp, Homo sapien
gtaattggaatctgtactgttttgt

SEQ ID NO: 2959780 - DNA, 25 bp, Homo sapien
agttttcctcatctgccaatgacat

SEQ ID NO: 2959781 - DNA, 25 bp, Homo sapien
aagttttcctcatctgccaatgaca

SEQ ID NO: 2959782 - DNA, 25 bp, Homo sapien
ctgaaagcccctcatagaagttttc

SEQ ID NO: 2959783 - DNA, 25 bp, Homo sapien
agcccctcatagaagttttcctcat

SEQ ID NO: 2959784 - DNA, 25 bp, Homo sapien
cgaacagagggatttagggagatct

SEQ ID NO: 2959785 - DNA, 25 bp, Homo sapien
ttcttgtagcccataattttcagtc

SEQ ID NO: 2959786 - DNA, 25 bp, Homo sapien
cagtttctctgccttaaagcgaaca

SEQ ID NO: 2959787 - DNA, 25 bp, Homo sapien
gcccataattttcagtccaggcaga

SEQ ID NO: 2959788 - DNA, 25 bp, Homo sapien
tatcataggaccaagcaaaggtgtg

SEQ ID NO: 2959789 - DNA, 25 bp, Homo sapien
gccatgaatctaccgatgggtgaga

SEQ ID NO: 2959790 - DNA, 25 bp, Homo sapien
gaggacctccctatacctagaggaa

SEQ ID NO: 2959791 - DNA, 25 bp, Homo sapien
tgaggtgggccataaaacccagctg

SEQ ID NO: 2959792 - DNA, 25 bp, Homo sapien
catgcaagggtgttaggttttctca

SEQ ID NO: 2959793 - DNA, 25 bp, Homo sapien
gatgggccggaactatttgtacaaa

SEQ ID NO: 2959794 - DNA, 25 bp, Homo sapien
ggacaggcatgctaataccgctcta

SEQ ID NO: 2959795 - DNA, 25 bp, Homo sapien
taccgctctaatctaccatcttggg

SEQ ID NO: 2959796 - DNA, 25 bp, Homo sapien
agtagtttttgattacatagatgaa

SEQ ID NO: 2959797 - DNA, 25 bp, Homo sapien
tacctgtttacccgagtagtgttca

SEQ ID NO: 2959798 - DNA, 25 bp, Homo sapien
ctgtttacccgagtagtgttcactg

SEQ ID NO: 2959799 - DNA, 25 bp, Homo sapien
gggatacaagtagtttttgattaca

SEQ ID NO: 2959800 - DNA, 25 bp, Homo sapien
ggcaaaagaatcctactacatcaga

SEQ ID NO: 2959801 - DNA, 25 bp, Homo sapien
tatgatttggcacatgtaaaatggc

SEQ ID NO: 2959802 - DNA, 25 bp, Homo sapien
taccagaaacagtcgaccaggatta

SEQ ID NO: 2959803 - DNA, 25 bp, Homo sapien
taagtgcctattgaagattagcttc

SEQ ID NO: 2959804 - DNA, 25 bp, Homo sapien
gctgaataccaagataatttagagc

SEQ ID NO: 2959805 - DNA, 25 bp, Homo sapien
tctcagggcttggtgttgttccttt

SEQ ID NO: 2959806 - DNA, 25 bp, Homo sapien
gtctcagggcttggtgttgttcctt

SEQ ID NO: 2959807 - DNA, 25 bp, Homo sapien
ttcctttgtgggctgaataccaaga

SEQ ID NO: 2959808 - DNA, 25 bp, Homo sapien
catgtgcaccaacatttacttcatc

SEQ ID NO: 2959809 - DNA, 25 bp, Homo sapien
atatattggaaatttcatgtgcacc

SEQ ID NO: 2959810 - DNA, 25 bp, Homo sapien
tattggaaatttcatgtgcaccaac

SEQ ID NO: 2959811 - DNA, 25 bp, Homo sapien
aatttcatgtgcaccaacatttact

SEQ ID NO: 2959812 - DNA, 25 bp, Homo sapien
gcttgttgtaaactacccaaccatc

SEQ ID NO: 2959813 - DNA, 25 bp, Homo sapien
ttgtaaactacccaaccatctttgc

SEQ ID NO: 2959814 - DNA, 25 bp, Homo sapien
tcattggcttgttgtaaactaccca

SEQ ID NO: 2959815 - DNA, 25 bp, Homo sapien
ctatttcattggcttgttgtaaact

SEQ ID NO: 2959816 - DNA, 25 bp, Homo sapien
tatgaaattcaataaggggcaaaaa

SEQ ID NO: 2959817 - DNA, 25 bp, Homo sapien
agccttttgagtggtgattccatgt

SEQ ID NO: 2959818 - DNA, 25 bp, Homo sapien
taatctatgttgttataagtcaaaa

SEQ ID NO: 2959819 - DNA, 25 bp, Homo sapien
tgggagtggcggctgactgggaagg

SEQ ID NO: 2959820 - DNA, 25 bp, Homo sapien
ctttcacacttgagcctttccattt

SEQ ID NO: 2959821 - DNA, 25 bp, Homo sapien
ggtggcatggacatgttgtcccagt

SEQ ID NO: 2959822 - DNA, 25 bp, Homo sapien
gatgtcccttaagaatagccctgca

SEQ ID NO: 2959823 - DNA, 25 bp, Homo sapien
tatgtgcctatgacgaattagtggt

SEQ ID NO: 2959824 - DNA, 25 bp, Homo sapien
ggatccaaaattgccacgacttgct

SEQ ID NO: 2959825 - DNA, 25 bp, Homo sapien
attctggagctcttctgtcaattgt

SEQ ID NO: 2959826 - DNA, 25 bp, Homo sapien
gcttatctgattccaataatttttc

SEQ ID NO: 2959827 - DNA, 25 bp, Homo sapien
atactgcattcactagttgcttgaa

SEQ ID NO: 2959828 - DNA, 25 bp, Homo sapien
tgctcagacctataaagcatctaaa

SEQ ID NO: 2959829 - DNA, 25 bp, Homo sapien
tgctttgccccaccactaaaacaat

SEQ ID NO: 2959830 - DNA, 25 bp, Homo sapien
taggacttgtatgaaattccttccc

SEQ ID NO: 2959831 - DNA, 25 bp, Homo sapien
ctagtcacaggcaccataatagcac

SEQ ID NO: 2959832 - DNA, 25 bp, Homo sapien
gctagtcacaggcaccataatagca

SEQ ID NO: 2959833 - DNA, 25 bp, Homo sapien
ttaaacttggattgggtgtatcagg

SEQ ID NO: 2959834 - DNA, 25 bp, Homo sapien
ttgggtgtatcaggacatagcccca

SEQ ID NO: 2959835 - DNA, 25 bp, Homo sapien
tgatattttaaacttggattgggtg

SEQ ID NO: 2959836 - DNA, 25 bp, Homo sapien
tggattgggtgtatcaggacatagc

SEQ ID NO: 2959837 - DNA, 25 bp, Homo sapien
tctggccatataaactcatggaggt

SEQ ID NO: 2959838 - DNA, 25 bp, Homo sapien
tagattacttattcatgcagacatg

SEQ ID NO: 2959839 - DNA, 25 bp, Homo sapien
gattcacatcttacatcagccttta

SEQ ID NO: 2959840 - DNA, 25 bp, Homo sapien
caggagggcctcatgtggaaaaagt

SEQ ID NO: 2959841 - DNA, 25 bp, Homo sapien
ttacttggaggtttctacttgcagc

SEQ ID NO: 2959842 - DNA, 25 bp, Homo sapien
gtcttcatgaagcttaccctccagt

SEQ ID NO: 2959843 - DNA, 25 bp, Homo sapien
gcaggtcatgtaggccctcataggc

SEQ ID NO: 2959844 - DNA, 25 bp, Homo sapien
ctgccttactttgactgagatggaa

SEQ ID NO: 2959845 - DNA, 25 bp, Homo sapien
taactaggttagaatctcagatcag

SEQ ID NO: 2959846 - DNA, 25 bp, Homo sapien
taatgaaaatctttgtaggctacca

SEQ ID NO: 2959847 - DNA, 25 bp, Homo sapien
ttgggacaaagcacggtaacagctc

SEQ ID NO: 2959848 - DNA, 25 bp, Homo sapien
ccccacaaggtaacatgatctagaa

SEQ ID NO: 2959849 - DNA, 25 bp, Homo sapien
caggacattgatgcacaggaaagtt

SEQ ID NO: 2959850 - DNA, 25 bp, Homo sapien
gatcaacttcacactagactgctgc

SEQ ID NO: 2959851 - DNA, 25 bp, Homo sapien
cattcagatgatcaagagagtctct

SEQ ID NO: 2959852 - DNA, 25 bp, Homo sapien
gagagatgtggccaaccaattgcct

SEQ ID NO: 2959853 - DNA, 25 bp, Homo sapien
ttggcctctaacagacggatcactt

SEQ ID NO: 2959854 - DNA, 25 bp, Homo sapien
gagcctttagctctgtaatcttggc

SEQ ID NO: 2959855 - DNA, 25 bp, Homo sapien
tgtttcttcaactacagctttggct

SEQ ID NO: 2959856 - DNA, 25 bp, Homo sapien
tgaatccgactacgcagggctcttg

SEQ ID NO: 2959857 - DNA, 25 bp, Homo sapien
aaaagtttttcgagccatttctgat

SEQ ID NO: 2959858 - DNA, 25 bp, Homo sapien
catttctgattttcgtaattggcag

SEQ ID NO: 2959859 - DNA, 25 bp, Homo sapien
gaagcttttcagtggatgcctcaaa

SEQ ID NO: 2959860 - DNA, 25 bp, Homo sapien
ggcagtcgagtaccatgattctctt

SEQ ID NO: 2959861 - DNA, 25 bp, Homo sapien
taaaggagtagaattatcagaaaat

SEQ ID NO: 2959862 - DNA, 25 bp, Homo sapien
aaaggagtagaattatcagaaaata

SEQ ID NO: 2959863 - DNA, 25 bp, Homo sapien
ataaaggagtagaattatcagaaaa

SEQ ID NO: 2959864 - DNA, 25 bp, Homo sapien
gataaaggagtagaattatcagaaa

SEQ ID NO: 2959865 - DNA, 25 bp, Homo sapien
ggaagtctgagaagctaacacagct

SEQ ID NO: 2959866 - DNA, 25 bp, Homo sapien
aatccatatcaagtaaggcacgaac

SEQ ID NO: 2959867 - DNA, 25 bp, Homo sapien
cagcgttgctgggatgctacgtcca

SEQ ID NO: 2959868 - DNA, 25 bp, Homo sapien
tccttagattcaagcgccagcgttg

SEQ ID NO: 2959869 - DNA, 25 bp, Homo sapien
caagccaagccatctattacccaga

SEQ ID NO: 2959870 - DNA, 25 bp, Homo sapien
cagagggtctttgaatgttacccca

SEQ ID NO: 2959871 - DNA, 25 bp, Homo sapien
aagccaagccatctattacccagaa

SEQ ID NO: 2959872 - DNA, 25 bp, Homo sapien
ctttgaatgttaccccataccaagc

SEQ ID NO: 2959873 - DNA, 25 bp, Homo sapien
tctagatattccttagagcctggtt

SEQ ID NO: 2959874 - DNA, 25 bp, Homo sapien
gaaagtagaggcaattacccaagta

SEQ ID NO: 2959875 - DNA, 25 bp, Homo sapien
catagtataacatcctagagaacac

SEQ ID NO: 2959876 - DNA, 25 bp, Homo sapien
gctttctgagaaaatcccatagtat

SEQ ID NO: 2959877 - DNA, 25 bp, Homo sapien
gatggccatgtatgcaatgatgtgg

SEQ ID NO: 2959878 - DNA, 25 bp, Homo sapien
caccagcagtagtcatggcagtggc

SEQ ID NO: 2959879 - DNA, 25 bp, Homo sapien
aaataacaataatgtggcaccagca

SEQ ID NO: 2959880 - DNA, 25 bp, Homo sapien
gggaacatcttaccctaccagaggc

SEQ ID NO: 2959881 - DNA, 25 bp, Homo sapien
tcaaatgtatccaagttgaaagaag

SEQ ID NO: 2959882 - DNA, 25 bp, Homo sapien
tgtatccaagttgaaagaagcttta

SEQ ID NO: 2959883 - DNA, 25 bp, Homo sapien
ccaagttgaaagaagctttagacaa

SEQ ID NO: 2959884 - DNA, 25 bp, Homo sapien
gaaagaagctttagacaataataat

SEQ ID NO: 2959885 - DNA, 25 bp, Homo sapien
cacagtttccggtgacaattacatt

SEQ ID NO: 2959886 - DNA, 25 bp, Homo sapien
agatgctgattaagacatttagcca

SEQ ID NO: 2959887 - DNA, 25 bp, Homo sapien
taagatgctgattaagacatttagc

SEQ ID NO: 2959888 - DNA, 25 bp, Homo sapien
tctaacacaacatcaataataacat

SEQ ID NO: 2959889 - DNA, 25 bp, Homo sapien
gtgtgaacctgaggatttcaacaaa

SEQ ID NO: 2959890 - DNA, 25 bp, Homo sapien
gccccagttgtccttctgcttgaca

SEQ ID NO: 2959891 - DNA, 25 bp, Homo sapien
ctaaaggatcaagccccagttgtcc

SEQ ID NO: 2959892 - DNA, 25 bp, Homo sapien
acctgaggatttcaacaaatgccac

SEQ ID NO: 2959893 - DNA, 25 bp, Homo sapien
aatagcactgtgtagtcccaagaac

SEQ ID NO: 2959894 - DNA, 25 bp, Homo sapien
tcaataatgctggttggataaggtc

SEQ ID NO: 2959895 - DNA, 25 bp, Homo sapien
gagctattaactctgtctggaggtt

SEQ ID NO: 2959896 - DNA, 25 bp, Homo sapien
ggataaggtctcacattttcagaaa

SEQ ID NO: 2959897 - DNA, 25 bp, Homo sapien
ccagtaaagagtgcaagattccagc

SEQ ID NO: 2959898 - DNA, 25 bp, Homo sapien
tgaaggattcatccggagactgtcc

SEQ ID NO: 2959899 - DNA, 25 bp, Homo sapien
ccaagggagaggatcacacaaaggc

SEQ ID NO: 2959900 - DNA, 25 bp, Homo sapien
gagtctgtccaacacaacacttaga

SEQ ID NO: 2959901 - DNA, 25 bp, Homo sapien
gagtgcctaaaagccctaagaatgt

SEQ ID NO: 2959902 - DNA, 25 bp, Homo sapien
tctcataaggagtctgaagagtgcc

SEQ ID NO: 2959903 - DNA, 25 bp, Homo sapien
gtctaagaaggaaatgtgctacagc

SEQ ID NO: 2959904 - DNA, 25 bp, Homo sapien
caaaagcagttcactcatgtctgta

SEQ ID NO: 2959905 - DNA, 25 bp, Homo sapien
ctcaaaaataatgctatacactaca

SEQ ID NO: 2959906 - DNA, 25 bp, Homo sapien
tctcaaaaataatgctatacactac

SEQ ID NO: 2959907 - DNA, 25 bp, Homo sapien
caaaaataatgctatacactacaac

SEQ ID NO: 2959908 - DNA, 25 bp, Homo sapien
tcaaaaataatgctatacactacaa

SEQ ID NO: 2959909 - DNA, 25 bp, Homo sapien
tctgtcatttccaaccatggttaaa

SEQ ID NO: 2959910 - DNA, 25 bp, Homo sapien
ctgtcatttccaaccatggttaaac

SEQ ID NO: 2959911 - DNA, 25 bp, Homo sapien
tccatctgctgtgtaagcttcctcc

SEQ ID NO: 2959912 - DNA, 25 bp, Homo sapien
catctgctgtgtaagcttcctccca

SEQ ID NO: 2959913 - DNA, 25 bp, Homo sapien
ctgctgtgtaagcttcctcccaccc

SEQ ID NO: 2959914 - DNA, 25 bp, Homo sapien
ttccatctgctgtgtaagcttcctc

SEQ ID NO: 2959915 - DNA, 25 bp, Homo sapien
atcacatgaaacgaaaatggtgagg

SEQ ID NO: 2959916 - DNA, 25 bp, Homo sapien
cacatgaaacgaaaatggtgaggct

SEQ ID NO: 2959917 - DNA, 25 bp, Homo sapien
catgaaacgaaaatggtgaggcttc

SEQ ID NO: 2959918 - DNA, 25 bp, Homo sapien
gaaacgaaaatggtgaggcttcatt

SEQ ID NO: 2959919 - DNA, 25 bp, Homo sapien
tgcctggctaatgtttttttgtatt

SEQ ID NO: 2959920 - DNA, 25 bp, Homo sapien
actccgcctcccgggtacacaacat

SEQ ID NO: 2959921 - DNA, 25 bp, Homo sapien
atgcctggctaatgtttttttgtat

SEQ ID NO: 2959922 - DNA, 25 bp, Homo sapien
gcaaactccgcctcccgggtacaca

SEQ ID NO: 2959923 - DNA, 25 bp, Homo sapien
ttcccatgagaagttaactcttatt

SEQ ID NO: 2959924 - DNA, 25 bp, Homo sapien
gaatcctccaatctgtgcccatggt

SEQ ID NO: 2959925 - DNA, 25 bp, Homo sapien
tgcaccccaccaacaatatcttctt

SEQ ID NO: 2959926 - DNA, 25 bp, Homo sapien
gcccatggtcttatctcttattaaa

SEQ ID NO: 2959927 - DNA, 25 bp, Homo sapien
cactcatcacgggatggatccagga

SEQ ID NO: 2959928 - DNA, 25 bp, Homo sapien
attcaggacactcatcacgggatgg

SEQ ID NO: 2959929 - DNA, 25 bp, Homo sapien
gagttctctagagcaatcctcttca

SEQ ID NO: 2959930 - DNA, 25 bp, Homo sapien
ccaggatgtagtctgtgttacatga

SEQ ID NO: 2959931 - DNA, 25 bp, Homo sapien
aagcagctgtttagtcctggccaca

SEQ ID NO: 2959932 - DNA, 25 bp, Homo sapien
gagcatctcttatggcaccgacctg

SEQ ID NO: 2959933 - DNA, 25 bp, Homo sapien
tttctaaagcgaagctccacaggca

SEQ ID NO: 2959934 - DNA, 25 bp, Homo sapien
caatgaagacttcgtgatgaccaca

SEQ ID NO: 2959935 - DNA, 25 bp, Homo sapien
cctgcacctctttgttggacggctg

SEQ ID NO: 2959936 - DNA, 25 bp, Homo sapien
tcaattgcttgaatgtccagggaca

SEQ ID NO: 2959937 - DNA, 25 bp, Homo sapien
tagatgttccaagactgctttccag

SEQ ID NO: 2959938 - DNA, 25 bp, Homo sapien
tctcccgtgggagtgaaccaaagtc

SEQ ID NO: 2959939 - DNA, 25 bp, Homo sapien
ttcaacccgtaacatgagagcagtc

SEQ ID NO: 2959940 - DNA, 25 bp, Homo sapien
tcacagcaggtaactagaactcagc

SEQ ID NO: 2959941 - DNA, 25 bp, Homo sapien
caaaacggactggaatctggcctag

SEQ ID NO: 2959942 - DNA, 25 bp, Homo sapien
gcattccaggacaggctatggcagt

SEQ ID NO: 2959943 - DNA, 25 bp, Homo sapien
ctgatacacacaacgatctggatga

SEQ ID NO: 2959944 - DNA, 25 bp, Homo sapien
tacagttacggagaatagagcagta

SEQ ID NO: 2959945 - DNA, 25 bp, Homo sapien
tccaatcctagagaatgaatgtatc

SEQ ID NO: 2959946 - DNA, 25 bp, Homo sapien
tgttataaaagcatagcaggagagc

SEQ ID NO: 2959947 - DNA, 25 bp, Homo sapien
gaggctaagaagttccaggagatgc

SEQ ID NO: 2959948 - DNA, 25 bp, Homo sapien
aatctgagtctcaaggccccaaaac

SEQ ID NO: 2959949 - DNA, 25 bp, Homo sapien
ggagatgcctctgtaagctggagaa

SEQ ID NO: 2959950 - DNA, 25 bp, Homo sapien
tgctctgttcaagccctcagtggat

SEQ ID NO: 2959951 - DNA, 25 bp, Homo sapien
caggcctgattattgctgttgaaca

SEQ ID NO: 2959952 - DNA, 25 bp, Homo sapien
tgttcacgtcccttcactgcttgca

SEQ ID NO: 2959953 - DNA, 25 bp, Homo sapien
gagtcagaggactacacagatttcc

SEQ ID NO: 2959954 - DNA, 25 bp, Homo sapien
tctagtgaggtaggcaagacaggcc

SEQ ID NO: 2959955 - DNA, 25 bp, Homo sapien
cagttggagggaaagcataccagtc

SEQ ID NO: 2959956 - DNA, 25 bp, Homo sapien
gacatccgtgtatttcttcgcccca

SEQ ID NO: 2959957 - DNA, 25 bp, Homo sapien
taataagtcatcttctgggcaaggt

SEQ ID NO: 2959958 - DNA, 25 bp, Homo sapien
gcctatgagggtgcatgctgcctac

SEQ ID NO: 2959959 - DNA, 25 bp, Homo sapien
gctttgtcagcgctcagtgcatttc

SEQ ID NO: 2959960 - DNA, 25 bp, Homo sapien
aagctttgtcagcgctcagtgcatt

SEQ ID NO: 2959961 - DNA, 25 bp, Homo sapien
agctccaggatgctatatcatccat

SEQ ID NO: 2959962 - DNA, 25 bp, Homo sapien
ggaagctttgtcagcgctcagtgca

SEQ ID NO: 2959963 - DNA, 25 bp, Homo sapien
cctgatcgacaactctagagggctg

SEQ ID NO: 2959964 - DNA, 25 bp, Homo sapien
cgacaactctagagggctggagctt

SEQ ID NO: 2959965 - DNA, 25 bp, Homo sapien
tctaaatccctgatcgacaactcta

SEQ ID NO: 2959966 - DNA, 25 bp, Homo sapien
cctcacagccatcccgtggtccaga

SEQ ID NO: 2959967 - DNA, 25 bp, Homo sapien
agagaaagaggtgcgtgtctgtcca

SEQ ID NO: 2959968 - DNA, 25 bp, Homo sapien
ctattccataaggtgctctggagag

SEQ ID NO: 2959969 - DNA, 25 bp, Homo sapien
taaagggcccttctgttagtggcag

SEQ ID NO: 2959970 - DNA, 25 bp, Homo sapien
gtgccctctgctactattccataag

SEQ ID NO: 2959971 - DNA, 25 bp, Homo sapien
tgaaactattcatctcaccaaactg

SEQ ID NO: 2959972 - DNA, 25 bp, Homo sapien
ccaggaagtaaatgatggagggttc

SEQ ID NO: 2959973 - DNA, 25 bp, Homo sapien
aagtgatatttagaagccccttagt

SEQ ID NO: 2959974 - DNA, 25 bp, Homo sapien
tactgcctagctcaagccatcatca

SEQ ID NO: 2959975 - DNA, 25 bp, Homo sapien
gatgtagacctaaaacagcatggca

SEQ ID NO: 2959976 - DNA, 25 bp, Homo sapien
gcatggcaaatagccattggcatgg

SEQ ID NO: 2959977 - DNA, 25 bp, Homo sapien
gtgatgttagctgcatatgccatgc

SEQ ID NO: 2959978 - DNA, 25 bp, Homo sapien
gccattggcatggatgtgatgttag

SEQ ID NO: 2959979 - DNA, 25 bp, Homo sapien
acatttcctttgctacgaccttagc

SEQ ID NO: 2959980 - DNA, 25 bp, Homo sapien
ccttagcagtaacgtcttgattgga

SEQ ID NO: 2959981 - DNA, 25 bp, Homo sapien
ggaatgtattcaaatttcctaggca

SEQ ID NO: 2959982 - DNA, 25 bp, Homo sapien
gtcttgattggacttctttcctgga

SEQ ID NO: 2959983 - DNA, 25 bp, Homo sapien
gcattgactagttgagcacgtgtcc

SEQ ID NO: 2959984 - DNA, 25 bp, Homo sapien
acatgaagtcccctgttgtccacag

SEQ ID NO: 2959985 - DNA, 25 bp, Homo sapien
tgttctcagaaagccgaagctatct

SEQ ID NO: 2959986 - DNA, 25 bp, Homo sapien
ccttatccagaacaggtggactgta

SEQ ID NO: 2959987 - DNA, 25 bp, Homo sapien
tgtgggtactttgcagaacccctaa

SEQ ID NO: 2959988 - DNA, 25 bp, Homo sapien
tccagagtcaaaatgggtagggacg

SEQ ID NO: 2959989 - DNA, 25 bp, Homo sapien
tccttacctggaggatgtacacctg

SEQ ID NO: 2959990 - DNA, 25 bp, Homo sapien
gatattgtgcattgccactctctgg

SEQ ID NO: 2959991 - DNA, 25 bp, Homo sapien
ccaagaacttggccatcagaacaag

SEQ ID NO: 2959992 - DNA, 25 bp, Homo sapien
aagaacttggccatcagaacaagaa

SEQ ID NO: 2959993 - DNA, 25 bp, Homo sapien
caagaacttggccatcagaacaaga

SEQ ID NO: 2959994 - DNA, 25 bp, Homo sapien
cataagtgggaataaggcaggtcta

SEQ ID NO: 2959995 - DNA, 25 bp, Homo sapien
gatagatgatagcagaccggagccc

SEQ ID NO: 2959996 - DNA, 25 bp, Homo sapien
agcttagctgccagtcagacccaga

SEQ ID NO: 2959997 - DNA, 25 bp, Homo sapien
gctttagagaagtcccctagccctg

SEQ ID NO: 2959998 - DNA, 25 bp, Homo sapien
gggtccctcttctctgaaatatcaa

SEQ ID NO: 2959999 - DNA, 25 bp, Homo sapien
ctgaaatatcaagcaggccatcgct

SEQ ID NO: 2960000 - DNA, 25 bp, Homo sapien
ccatcgctgacgtaggtaggtttgg

SEQ ID NO: 2960001 - DNA, 25 bp, Homo sapien
caggccatcgctgacgtaggtaggt

SEQ ID NO: 2960002 - DNA, 25 bp, Homo sapien
catcgagctatcaccagctttgaca

SEQ ID NO: 2960003 - DNA, 25 bp, Homo sapien
gtagagctcagcttctccgcagtaa

SEQ ID NO: 2960004 - DNA, 25 bp, Homo sapien
cagctgatcttatcccgccgtagag

SEQ ID NO: 2960005 - DNA, 25 bp, Homo sapien
gaatgcagtccctgtcctaaagcag

SEQ ID NO: 2960006 - DNA, 25 bp, Homo sapien
gcatctgccgtgctctccctctcct

SEQ ID NO: 2960007 - DNA, 25 bp, Homo sapien
cacagcatctgccgtgctctccctc

SEQ ID NO: 2960008 - DNA, 25 bp, Homo sapien
tgtgttactctattagtccatgtgc

SEQ ID NO: 2960009 - DNA, 25 bp, Homo sapien
ggaattatgccaattcgtttgtgtt

SEQ ID NO: 2960010 - DNA, 25 bp, Homo sapien
tctattagtccatgtgctttgaggg

SEQ ID NO: 2960011 - DNA, 25 bp, Homo sapien
taaacatcctccctatactcttggc

SEQ ID NO: 2960012 - DNA, 25 bp, Homo sapien
ggcggggaggcgccgagggtagcta

SEQ ID NO: 2960013 - DNA, 25 bp, Homo sapien
aggcgccgagggtagctaaggggag

SEQ ID NO: 2960014 - DNA, 25 bp, Homo sapien
gttggctgccgagcgcatcccggct

SEQ ID NO: 2960015 - DNA, 25 bp, Homo sapien
cggggaggcgccgagggtagctaag

SEQ ID NO: 2960016 - DNA, 25 bp, Homo sapien
gagcggagcgctcgggtgtgaggag

SEQ ID NO: 2960017 - DNA, 25 bp, Homo sapien
ggtgtgaggagaaccggcaaatcct

SEQ ID NO: 2960018 - DNA, 25 bp, Homo sapien
accggcaaatcctcgcgggcgctgg

SEQ ID NO: 2960019 - DNA, 25 bp, Homo sapien
gagcgctcgggtgtgaggagaaccg

SEQ ID NO: 2960020 - DNA, 25 bp, Homo sapien
tgtaagaatgaaatgtactgatccg

SEQ ID NO: 2960021 - DNA, 25 bp, Homo sapien
aaatgtactgatccgatattttccc

SEQ ID NO: 2960022 - DNA, 25 bp, Homo sapien
cttgtccatgttaggtgttccctgt

SEQ ID NO: 2960023 - DNA, 25 bp, Homo sapien
ttaggtgttccctgtaagaatgaaa

SEQ ID NO: 2960024 - DNA, 25 bp, Homo sapien
agatggagcttaatagacacttgca

SEQ ID NO: 2960025 - DNA, 25 bp, Homo sapien
tttcttgtctgccatgaatacctga

SEQ ID NO: 2960026 - DNA, 25 bp, Homo sapien
tacctgacgcagatggagcttaata

SEQ ID NO: 2960027 - DNA, 25 bp, Homo sapien
catgaatacctgacgcagatggagc

SEQ ID NO: 2960028 - DNA, 25 bp, Homo sapien
ggttttgatagtgagattgggtggg

SEQ ID NO: 2960029 - DNA, 25 bp, Homo sapien
gttttgatagtgagattgggtgggg

SEQ ID NO: 2960030 - DNA, 25 bp, Homo sapien
gggagtcctttgtgcagcccggtgg

SEQ ID NO: 2960031 - DNA, 25 bp, Homo sapien
ggagtcctttgtgcagcccggtggg

SEQ ID NO: 2960032 - DNA, 25 bp, Homo sapien
gtctctcgtgaacggtctgaatcca

SEQ ID NO: 2960033 - DNA, 25 bp, Homo sapien
attattaggaaagggattctagaga

SEQ ID NO: 2960034 - DNA, 25 bp, Homo sapien
ggtaatagtctctcgtgaacggtct

SEQ ID NO: 2960035 - DNA, 25 bp, Homo sapien
tattaggaaagggattctagagaag

SEQ ID NO: 2960036 - DNA, 25 bp, Homo sapien
ccacgctgcagagaggtgttaacgg

SEQ ID NO: 2960037 - DNA, 25 bp, Homo sapien
atgcaaaaagcagagcgggaagcgg

SEQ ID NO: 2960038 - DNA, 25 bp, Homo sapien
ctataagtccgaatgggatgcaaaa

SEQ ID NO: 2960039 - DNA, 25 bp, Homo sapien
tttcccacgctgcagagaggtgtta

SEQ ID NO: 2960040 - DNA, 25 bp, Homo sapien
tttccagtgcagacggtcccaggag

SEQ ID NO: 2960041 - DNA, 25 bp, Homo sapien
tactcgctctcaaggcggtggagaa

SEQ ID NO: 2960042 - DNA, 25 bp, Homo sapien
gctccccggcgacgtgcaggatgct

SEQ ID NO: 2960043 - DNA, 25 bp, Homo sapien
gtcctttgccaaaagtactcgctct

SEQ ID NO: 2960044 - DNA, 25 bp, Homo sapien
ggagcggtcgggacattttctccat

SEQ ID NO: 2960045 - DNA, 25 bp, Homo sapien
gggagcggtcgggacattttctcca

SEQ ID NO: 2960046 - DNA, 25 bp, Homo sapien
gaggcgggataaaggtgggattcag

SEQ ID NO: 2960047 - DNA, 25 bp, Homo sapien
cagggacctgagcacgccgtaggga

SEQ ID NO: 2960048 - DNA, 25 bp, Homo sapien
taccgctcttttatcacttttcctg

SEQ ID NO: 2960049 - DNA, 25 bp, Homo sapien
gcagaagaagggaaagctggactta

SEQ ID NO: 2960050 - DNA, 25 bp, Homo sapien
aacaataccgctcttttatcacttt

SEQ ID NO: 2960051 - DNA, 25 bp, Homo sapien
gaaaaacaataccgctcttttatca

SEQ ID NO: 2960052 - DNA, 25 bp, Homo sapien
gggaccgtcgggctgttactctcat

SEQ ID NO: 2960053 - DNA, 25 bp, Homo sapien
actggaaagtatctccgtcataggg

SEQ ID NO: 2960054 - DNA, 25 bp, Homo sapien
ttgtcccataaggtaggccccagga

SEQ ID NO: 2960055 - DNA, 25 bp, Homo sapien
catacagttcggagatgggatgcca

SEQ ID NO: 2960056 - DNA, 25 bp, Homo sapien
aagggagaatcttcagggcacttac

SEQ ID NO: 2960057 - DNA, 25 bp, Homo sapien
ctgaagggagaatcttcagggcact

SEQ ID NO: 2960058 - DNA, 25 bp, Homo sapien
cctccctttctgaagggagaatctt

SEQ ID NO: 2960059 - DNA, 25 bp, Homo sapien
ctcctccctttctgaagggagaatc

SEQ ID NO: 2960060 - DNA, 25 bp, Homo sapien
tcctaacatggtacacatcctaaat

SEQ ID NO: 2960061 - DNA, 25 bp, Homo sapien
tgactctcagtaggaaccaaggtgt

SEQ ID NO: 2960062 - DNA, 25 bp, Homo sapien
tatgcattgcaactctgattgggca

SEQ ID NO: 2960063 - DNA, 25 bp, Homo sapien
gaaccttacaaaatgacatcccctg

SEQ ID NO: 2960064 - DNA, 25 bp, Homo sapien
ggtgtgaacacccaatatgtgcagg

SEQ ID NO: 2960065 - DNA, 25 bp, Homo sapien
ttttcattgctgagacataaaaaat

SEQ ID NO: 2960066 - DNA, 25 bp, Homo sapien
tttcattgctgagacataaaaaatg

SEQ ID NO: 2960067 - DNA, 25 bp, Homo sapien
tctctagtaaaagcctgcatggtct

SEQ ID NO: 2960068 - DNA, 25 bp, Homo sapien
gcattgattcccattggtcagggcc

SEQ ID NO: 2960069 - DNA, 25 bp, Homo sapien
tttattgggtacaaatggacaggcg

SEQ ID NO: 2960070 - DNA, 25 bp, Homo sapien
gacaggcgtgcttaactctttccat

SEQ ID NO: 2960071 - DNA, 25 bp, Homo sapien
cacctttgcgggttggccgatgaca

SEQ ID NO: 2960072 - DNA, 25 bp, Homo sapien
tgtaaaaacacagggtgctcacctg

SEQ ID NO: 2960073 - DNA, 25 bp, Homo sapien
tgaagcaggtatcagcaccctcact

SEQ ID NO: 2960074 - DNA, 25 bp, Homo sapien
agttatatggctggtagatcccacc

SEQ ID NO: 2960075 - DNA, 25 bp, Homo sapien
aagagtccattctttcctatctgga

SEQ ID NO: 2960076 - DNA, 25 bp, Homo sapien
tgatttcatcctgatctccatggtt

SEQ ID NO: 2960077 - DNA, 25 bp, Homo sapien
ctccatggtttttggccactgagat

SEQ ID NO: 2960078 - DNA, 25 bp, Homo sapien
gctattaggactgtgtttctctgaa

SEQ ID NO: 2960079 - DNA, 25 bp, Homo sapien
tttatcaacgcctgttatttctgcc

SEQ ID NO: 2960080 - DNA, 25 bp, Homo sapien
ttgttgctacgtgttttccatctct

SEQ ID NO: 2960081 - DNA, 25 bp, Homo sapien
ttgaaattgttgctacgtgttttcc

SEQ ID NO: 2960082 - DNA, 25 bp, Homo sapien
ctttgaaattgttgctacgtgtttt

SEQ ID NO: 2960083 - DNA, 25 bp, Homo sapien
aaattgttgctacgtgttttccatc

SEQ ID NO: 2960084 - DNA, 25 bp, Homo sapien
attcctgtctcgtgaccaaggagct

SEQ ID NO: 2960085 - DNA, 25 bp, Homo sapien
ggagctgaatcaatagacttccttt

SEQ ID NO: 2960086 - DNA, 25 bp, Homo sapien
gaataagcctccttcagagagtaaa

SEQ ID NO: 2960087 - DNA, 25 bp, Homo sapien
ttttccaggacatcggaagcaacac

SEQ ID NO: 2960088 - DNA, 25 bp, Homo sapien
gcacaaaaacgcaaagcacgttcca

SEQ ID NO: 2960089 - DNA, 25 bp, Homo sapien
caacagcacaaaaacgcaaagcacg

SEQ ID NO: 2960090 - DNA, 25 bp, Homo sapien
acaaaaacgcaaagcacgttccaca

SEQ ID NO: 2960091 - DNA, 25 bp, Homo sapien
gcagatcaacagcacaaaaacgcaa

SEQ ID NO: 2960092 - DNA, 25 bp, Homo sapien
gccctgtggtcaacttgttcccaat

SEQ ID NO: 2960093 - DNA, 25 bp, Homo sapien
acatatgacttaatctccggacttt

SEQ ID NO: 2960094 - DNA, 25 bp, Homo sapien
caatttgaacagggtgttgggggca

SEQ ID NO: 2960095 - DNA, 25 bp, Homo sapien
atgacttaatctccggactttcaaa

SEQ ID NO: 2960096 - DNA, 25 bp, Homo sapien
caccaccgtggatgttctgccaagg

SEQ ID NO: 2960097 - DNA, 25 bp, Homo sapien
tgcgaaagtgtgttccgaagtgaaa

SEQ ID NO: 2960098 - DNA, 25 bp, Homo sapien
tgaaatgtaagcttggcccagtgcc

SEQ ID NO: 2960099 - DNA, 25 bp, Homo sapien
tctgccaaggagtgatgcgaaagtg

SEQ ID NO: 2960100 - DNA, 25 bp, Homo sapien
aactcttacaggtgatctgggaaca

SEQ ID NO: 2960101 - DNA, 25 bp, Homo sapien
ctcttacaggtgatctgggaacatg

SEQ ID NO: 2960102 - DNA, 25 bp, Homo sapien
tcttacaggtgatctgggaacatgc

SEQ ID NO: 2960103 - DNA, 25 bp, Homo sapien
cttacaggtgatctgggaacatgca

SEQ ID NO: 2960104 - DNA, 25 bp, Homo sapien
ccatccgtttgataggagctctgta

SEQ ID NO: 2960105 - DNA, 25 bp, Homo sapien
tctgtagtcagagaaaacttggtgc

SEQ ID NO: 2960106 - DNA, 25 bp, Homo sapien
tggcgatcggccgttgcccagtcca

SEQ ID NO: 2960107 - DNA, 25 bp, Homo sapien
catgtaatggtcgttccaccggcat

SEQ ID NO: 2960108 - DNA, 25 bp, Homo sapien
gatgtgtttatcacttcatggtgct

SEQ ID NO: 2960109 - DNA, 25 bp, Homo sapien
gctttgactgatatggactgtgccg

SEQ ID NO: 2960110 - DNA, 25 bp, Homo sapien
gcagatcagcatagtgtgggcacaa

SEQ ID NO: 2960111 - DNA, 25 bp, Homo sapien
ttaagaccgttatcagaaggaactg

SEQ ID NO: 2960112 - DNA, 25 bp, Homo sapien
aatctattcgtgaaagacacattct

SEQ ID NO: 2960113 - DNA, 25 bp, Homo sapien
tgaccatatgcgtctccctgttgca

SEQ ID NO: 2960114 - DNA, 25 bp, Homo sapien
ggagaaaatctattcgtgaaagaca

SEQ ID NO: 2960115 - DNA, 25 bp, Homo sapien
tcttgaccatatgcgtctccctgtt

SEQ ID NO: 2960116 - DNA, 25 bp, Homo sapien
gcccaacacatccatatattcatgt

SEQ ID NO: 2960117 - DNA, 25 bp, Homo sapien
gagggccacacgcacagctgatgcc

SEQ ID NO: 2960118 - DNA, 25 bp, Homo sapien
ctgagggccacacgcacagctgatg

SEQ ID NO: 2960119 - DNA, 25 bp, Homo sapien
tgatgcccaacacatccatatattc

SEQ ID NO: 2960120 - DNA, 25 bp, Homo sapien
ggtgaacactgaatgcctccaactt

SEQ ID NO: 2960121 - DNA, 25 bp, Homo sapien
ggaggtgaacactgaatgcctccaa

SEQ ID NO: 2960122 - DNA, 25 bp, Homo sapien
aggtgaacactgaatgcctccaact

SEQ ID NO: 2960123 - DNA, 25 bp, Homo sapien
gaggtgaacactgaatgcctccaac

SEQ ID NO: 2960124 - DNA, 25 bp, Homo sapien
ccccacatggagatctatttttgca

SEQ ID NO: 2960125 - DNA, 25 bp, Homo sapien
aaggcggcctgacatctggtccaca

SEQ ID NO: 2960126 - DNA, 25 bp, Homo sapien
tgagctgcggatgctttgctcgtac

SEQ ID NO: 2960127 - DNA, 25 bp, Homo sapien
cggatgctttgctcgtacaacttgc

SEQ ID NO: 2960128 - DNA, 25 bp, Homo sapien
ggaagccgtaacattccttgagtac

SEQ ID NO: 2960129 - DNA, 25 bp, Homo sapien
agccgtaacattccttgagtactca

SEQ ID NO: 2960130 - DNA, 25 bp, Homo sapien
gaaggaagccgtaacattccttgag

SEQ ID NO: 2960131 - DNA, 25 bp, Homo sapien
ctgaagaaggaagccgtaacattcc

SEQ ID NO: 2960132 - DNA, 25 bp, Homo sapien
ttgacagcaagacctaaaaaaccta

SEQ ID NO: 2960133 - DNA, 25 bp, Homo sapien
gggaggatatagaaaggtccatttc

SEQ ID NO: 2960134 - DNA, 25 bp, Homo sapien
gacagctgtgtatccgacttgacag

SEQ ID NO: 2960135 - DNA, 25 bp, Homo sapien
aatcaccgatataacagatgacagc

SEQ ID NO: 2960136 - DNA, 25 bp, Homo sapien
gagcttgtggttctctataaatttt

SEQ ID NO: 2960137 - DNA, 25 bp, Homo sapien
tgagcttgtggttctctataaattt

SEQ ID NO: 2960138 - DNA, 25 bp, Homo sapien
tgtggttctctataaatttttatta

SEQ ID NO: 2960139 - DNA, 25 bp, Homo sapien
gcttgtggttctctataaattttta

SEQ ID NO: 2960140 - DNA, 25 bp, Homo sapien
ccctctctctcgtccacttcctcca

SEQ ID NO: 2960141 - DNA, 25 bp, Homo sapien
ctccctctctctcgtccacttcctc

SEQ ID NO: 2960142 - DNA, 25 bp, Homo sapien
cctctctctcgtccacttcctccat

SEQ ID NO: 2960143 - DNA, 25 bp, Homo sapien
tccctctctctcgtccacttcctcc

SEQ ID NO: 2960144 - DNA, 25 bp, Homo sapien
gggtcaaacatttcctggccaggga

SEQ ID NO: 2960145 - DNA, 25 bp, Homo sapien
catcagggatgaagactttgcgagc

SEQ ID NO: 2960146 - DNA, 25 bp, Homo sapien
gggtctggctcataacccactggga

SEQ ID NO: 2960147 - DNA, 25 bp, Homo sapien
cagagaacttgcgtttgcgagggtc

SEQ ID NO: 2960148 - DNA, 25 bp, Homo sapien
atctctggctgttattcctcgcagc

SEQ ID NO: 2960149 - DNA, 25 bp, Homo sapien
tatctctggctgttattcctcgcag

SEQ ID NO: 2960150 - DNA, 25 bp, Homo sapien
ctatctctggctgttattcctcgca

SEQ ID NO: 2960151 - DNA, 25 bp, Homo sapien
ttctccaggaacgaggcccggatgg

SEQ ID NO: 2960152 - DNA, 25 bp, Homo sapien
tggcggagggccgagttctccttct

SEQ ID NO: 2960153 - DNA, 25 bp, Homo sapien
tgttgttctttctgcgccttgccca

SEQ ID NO: 2960154 - DNA, 25 bp, Homo sapien
gatggcgatctggttctctttcagc

SEQ ID NO: 2960155 - DNA, 25 bp, Homo sapien
gttcttgcatttgcccagctccttc

SEQ ID NO: 2960156 - DNA, 25 bp, Homo sapien
atgttcttgcatttgcccagctcct

SEQ ID NO: 2960157 - DNA, 25 bp, Homo sapien
tggcaagtatgttcttgcatttgcc

SEQ ID NO: 2960158 - DNA, 25 bp, Homo sapien
aagtatgttcttgcatttgcccagc

SEQ ID NO: 2960159 - DNA, 25 bp, Homo sapien
actaaaagacgatgagagggctacc

SEQ ID NO: 2960160 - DNA, 25 bp, Homo sapien
tgagatccactattttaccagggcc

SEQ ID NO: 2960161 - DNA, 25 bp, Homo sapien
cttataaaggactagagctgcggag

SEQ ID NO: 2960162 - DNA, 25 bp, Homo sapien
cctagggaatagtctggccatgctc

SEQ ID NO: 2960163 - DNA, 25 bp, Homo sapien
tcaacctcataaaacgtgcgggccc

SEQ ID NO: 2960164 - DNA, 25 bp, Homo sapien
tgggtgacgttaactgacttctttc

SEQ ID NO: 2960165 - DNA, 25 bp, Homo sapien
tagagcaggattcgtcatcacaagc

SEQ ID NO: 2960166 - DNA, 25 bp, Homo sapien
gcagcaacgtgccattccaggaact

SEQ ID NO: 2960167 - DNA, 25 bp, Homo sapien
ttgctgatggattgacgaggagacc

SEQ ID NO: 2960168 - DNA, 25 bp, Homo sapien
gacactatgagagaagcattgctga

SEQ ID NO: 2960169 - DNA, 25 bp, Homo sapien
cagctaccatttgatacggccataa

SEQ ID NO: 2960170 - DNA, 25 bp, Homo sapien
gaggagaccaccagatcattaaagg

SEQ ID NO: 2960171 - DNA, 25 bp, Homo sapien
aatcactcagagtcaagccatggcc

SEQ ID NO: 2960172 - DNA, 25 bp, Homo sapien
tgtgagttccccaccaaaccagtgg

SEQ ID NO: 2960173 - DNA, 25 bp, Homo sapien
aaagggactctcataatagctgcag

SEQ ID NO: 2960174 - DNA, 25 bp, Homo sapien
gaacctctgggtggtctagtacagg

SEQ ID NO: 2960175 - DNA, 25 bp, Homo sapien
tgaaacaacgtctctaccacccatt

SEQ ID NO: 2960176 - DNA, 25 bp, Homo sapien
attcccataccatcagccatcctgc

SEQ ID NO: 2960177 - DNA, 25 bp, Homo sapien
tgttggtgaagtcacactatgaaac

SEQ ID NO: 2960178 - DNA, 25 bp, Homo sapien
caaagctggcgctagtctatgaact

SEQ ID NO: 2960179 - DNA, 25 bp, Homo sapien
ccccatcagagcttatgggaggcat

SEQ ID NO: 2960180 - DNA, 25 bp, Homo sapien
gccccatcagagcttatgggaggca

SEQ ID NO: 2960181 - DNA, 25 bp, Homo sapien
gcttatcttcactcacttcaaccat

SEQ ID NO: 2960182 - DNA, 25 bp, Homo sapien
tcctgcttatcttcactcacttcaa

SEQ ID NO: 2960183 - DNA, 25 bp, Homo sapien
cttcctgacaagctcctgcttatct

SEQ ID NO: 2960184 - DNA, 25 bp, Homo sapien
acaagctcctgcttatcttcactca

SEQ ID NO: 2960185 - DNA, 25 bp, Homo sapien
ctctgtgttgccacctgggatatcc

SEQ ID NO: 2960186 - DNA, 25 bp, Homo sapien
tgccacctgggatatccctctccat

SEQ ID NO: 2960187 - DNA, 25 bp, Homo sapien
tgttgccacctgggatatccctctc

SEQ ID NO: 2960188 - DNA, 25 bp, Homo sapien
tctgtgttgccacctgggatatccc

SEQ ID NO: 2960189 - DNA, 25 bp, Homo sapien
tcgcctgtgggagtgttctgttctc

SEQ ID NO: 2960190 - DNA, 25 bp, Homo sapien
ttcctctcacccccttcccaggcca

SEQ ID NO: 2960191 - DNA, 25 bp, Homo sapien
cacccccttcccaggccacaggatg

SEQ ID NO: 2960192 - DNA, 25 bp, Homo sapien
cctctcacccccttcccaggccaca

SEQ ID NO: 2960193 - DNA, 25 bp, Homo sapien
tctcacccccttcccaggccacagg

SEQ ID NO: 2960194 - DNA, 25 bp, Homo sapien
gcatcgtcttcacaggcaaagttca

SEQ ID NO: 2960195 - DNA, 25 bp, Homo sapien
gagggactgttaagctgtacaacgg

SEQ ID NO: 2960196 - DNA, 25 bp, Homo sapien
tgtacaacggtgttcagacgtggcg

SEQ ID NO: 2960197 - DNA, 25 bp, Homo sapien
gtttattgtaccctgagtccctcac

SEQ ID NO: 2960198 - DNA, 25 bp, Homo sapien
tttcttgtgtcagcttccctctgta

SEQ ID NO: 2960199 - DNA, 25 bp, Homo sapien
gcctttcttgtgtcagcttccctct

SEQ ID NO: 2960200 - DNA, 25 bp, Homo sapien
agaagggtgaaggagtttctgcaat

SEQ ID NO: 2960201 - DNA, 25 bp, Homo sapien
gggcctgagagaagggtgaaggagt

SEQ ID NO: 2960202 - DNA, 25 bp, Homo sapien
gaaacagcccatggttagccagcac

SEQ ID NO: 2960203 - DNA, 25 bp, Homo sapien
ctggaggtccaactggccgagattt

SEQ ID NO: 2960204 - DNA, 25 bp, Homo sapien
agggaacacatctgaggcccccagg

SEQ ID NO: 2960205 - DNA, 25 bp, Homo sapien
tgaggaaggtccacgtgagtgggct

SEQ ID NO: 2960206 - DNA, 25 bp, Homo sapien
acaggaactttgtcgtatgaggagg

SEQ ID NO: 2960207 - DNA, 25 bp, Homo sapien
cacaggaactttgtcgtatgaggag

SEQ ID NO: 2960208 - DNA, 25 bp, Homo sapien
gcacaggaactttgtcgtatgagga

SEQ ID NO: 2960209 - DNA, 25 bp, Homo sapien
ggcacaggaactttgtcgtatgagg

SEQ ID NO: 2960210 - DNA, 25 bp, Homo sapien
cctgtacataagggaagcaggtgac

SEQ ID NO: 2960211 - DNA, 25 bp, Homo sapien
agattttccaagtgcctggggggct

SEQ ID NO: 2960212 - DNA, 25 bp, Homo sapien
gactcaacatgcaagaggcccagga

SEQ ID NO: 2960213 - DNA, 25 bp, Homo sapien
ccaggaggggaatttcatttcgcac

SEQ ID NO: 2960214 - DNA, 25 bp, Homo sapien
ggggaatttcatttcgcacgtccat

SEQ ID NO: 2960215 - DNA, 25 bp, Homo sapien
ctcaaggactcaacatgcaagaggc

SEQ ID NO: 2960216 - DNA, 25 bp, Homo sapien
tctgtctcaggacggttccaatgaa

SEQ ID NO: 2960217 - DNA, 25 bp, Homo sapien
ggttccaatgaagcgtggagcatct

SEQ ID NO: 2960218 - DNA, 25 bp, Homo sapien
tcaggacggttccaatgaagcgtgg

SEQ ID NO: 2960219 - DNA, 25 bp, Homo sapien
gtctgtctcaggacggttccaatga

SEQ ID NO: 2960220 - DNA, 25 bp, Homo sapien
cccagtgaactaggccaactatgct

SEQ ID NO: 2960221 - DNA, 25 bp, Homo sapien
gtgaactaggccaactatgctggaa

SEQ ID NO: 2960222 - DNA, 25 bp, Homo sapien
gagtcctgcccagtgaactaggcca

SEQ ID NO: 2960223 - DNA, 25 bp, Homo sapien
tcctgcccagtgaactaggccaact

SEQ ID NO: 2960224 - DNA, 25 bp, Homo sapien
ttaggaagccttttgtacacagcat

SEQ ID NO: 2960225 - DNA, 25 bp, Homo sapien
cacacattacttgcctgggattaaa

SEQ ID NO: 2960226 - DNA, 25 bp, Homo sapien
ttccagaccatccatatttgaggcc

SEQ ID NO: 2960227 - DNA, 25 bp, Homo sapien
tagacatctaccaacttgaatgcag

SEQ ID NO: 2960228 - DNA, 25 bp, Homo sapien
cttagctaagcaaaaggaactatgc

SEQ ID NO: 2960229 - DNA, 25 bp, Homo sapien
aaggtactttcctgtgtacaaggca

SEQ ID NO: 2960230 - DNA, 25 bp, Homo sapien
aagccatttccccaacttggaagct

SEQ ID NO: 2960231 - DNA, 25 bp, Homo sapien
ggatccttcctaaacatcaccaagc

SEQ ID NO: 2960232 - DNA, 25 bp, Homo sapien
agtactttctttgatttgcctgctg

SEQ ID NO: 2960233 - DNA, 25 bp, Homo sapien
tctgttctcattttctttgggagcc

SEQ ID NO: 2960234 - DNA, 25 bp, Homo sapien
tgcctgctgttttttcccgaacaaa

SEQ ID NO: 2960235 - DNA, 25 bp, Homo sapien
tgggagcctcagtactttctttgat

SEQ ID NO: 2960236 - DNA, 25 bp, Homo sapien
gccagacctgggtagacaagcacaa

SEQ ID NO: 2960237 - DNA, 25 bp, Homo sapien
tctgattcaattgatgagcacagcc

SEQ ID NO: 2960238 - DNA, 25 bp, Homo sapien
gggtagacaagcacaatctttcttt

SEQ ID NO: 2960239 - DNA, 25 bp, Homo sapien
ccagccacagttctgattcaattga

SEQ ID NO: 2960240 - DNA, 25 bp, Homo sapien
gtgctgatgccatcaatatctgcct

SEQ ID NO: 2960241 - DNA, 25 bp, Homo sapien
ctgatgccatcaatatctgcctgct

SEQ ID NO: 2960242 - DNA, 25 bp, Homo sapien
gccatcaatatctgcctgctggctg

SEQ ID NO: 2960243 - DNA, 25 bp, Homo sapien
tgccatcaatatctgcctgctggct

SEQ ID NO: 2960244 - DNA, 25 bp, Homo sapien
tctgatgaatgttgaatagcccttg

SEQ ID NO: 2960245 - DNA, 25 bp, Homo sapien
tcaagcccatcagctatttggacct

SEQ ID NO: 2960246 - DNA, 25 bp, Homo sapien
ggacctgaccatcaatatgtgctga

SEQ ID NO: 2960247 - DNA, 25 bp, Homo sapien
taaagtatctagcacaggacctgac

SEQ ID NO: 2960248 - DNA, 25 bp, Homo sapien
ttatgagagcaccaaagcagctcat

SEQ ID NO: 2960249 - DNA, 25 bp, Homo sapien
cttatgagagcaccaaagcagctca

SEQ ID NO: 2960250 - DNA, 25 bp, Homo sapien
actttgtgttattcatttgtgcatc

SEQ ID NO: 2960251 - DNA, 25 bp, Homo sapien
catttgtgcatctgctagggtgagg

SEQ ID NO: 2960252 - DNA, 25 bp, Homo sapien
tgttattcatttgtgcatctgctag

SEQ ID NO: 2960253 - DNA, 25 bp, Homo sapien
atctgctagggtgaggtcgaattgc

SEQ ID NO: 2960254 - DNA, 25 bp, Homo sapien
ctgtggccagtgaatgtgacagtgt

SEQ ID NO: 2960255 - DNA, 25 bp, Homo sapien
atgtgacagtgtgcatgaccaagta

SEQ ID NO: 2960256 - DNA, 25 bp, Homo sapien
caagtagaaagtgatgctgatttac

SEQ ID NO: 2960257 - DNA, 25 bp, Homo sapien
tgaccaagtagaaagtgatgctgat

SEQ ID NO: 2960258 - DNA, 25 bp, Homo sapien
ttttgtcaatctgtttgttggcatc

SEQ ID NO: 2960259 - DNA, 25 bp, Homo sapien
tgccccccaacttccttaatctgga

SEQ ID NO: 2960260 - DNA, 25 bp, Homo sapien
cttaatctggatttgacgttttggg

SEQ ID NO: 2960261 - DNA, 25 bp, Homo sapien
gggagcttttgtcaatctgtttgtt

SEQ ID NO: 2960262 - DNA, 25 bp, Homo sapien
taaatagacagtgccaatatgttct

SEQ ID NO: 2960263 - DNA, 25 bp, Homo sapien
ttcttacattctgtgccattcccac

SEQ ID NO: 2960264 - DNA, 25 bp, Homo sapien
tgtgcactctcgccactctgcaagg

SEQ ID NO: 2960265 - DNA, 25 bp, Homo sapien
catccctgcaatggattggtggtgt

SEQ ID NO: 2960266 - DNA, 25 bp, Homo sapien
gcgagttaaataggcaaggtaccca

SEQ ID NO: 2960267 - DNA, 25 bp, Homo sapien
tgacaggtagaaactcatgtatctg

SEQ ID NO: 2960268 - DNA, 25 bp, Homo sapien
ataggcttgcctttagatcgggtgc

SEQ ID NO: 2960269 - DNA, 25 bp, Homo sapien
tgtttcctagtaatgggctgatcaa

SEQ ID NO: 2960270 - DNA, 25 bp, Homo sapien
tgtgatggccatctgctggaaactc

SEQ ID NO: 2960271 - DNA, 25 bp, Homo sapien
tattacagtgagcagttgtattgcc

SEQ ID NO: 2960272 - DNA, 25 bp, Homo sapien
gtttggtgcccaatggttaagtcat

SEQ ID NO: 2960273 - DNA, 25 bp, Homo sapien
gtggaactagatgcataaattcaca

SEQ ID NO: 2960274 - DNA, 25 bp, Homo sapien
tatagcatatttaagtccaagggaa

SEQ ID NO: 2960275 - DNA, 25 bp, Homo sapien
tttgctctagaggagaccttcaagg

SEQ ID NO: 2960276 - DNA, 25 bp, Homo sapien
ttaggacccaaacatccaagttctg

SEQ ID NO: 2960277 - DNA, 25 bp, Homo sapien
caaccaggaaatctttgtcattggg

SEQ ID NO: 2960278 - DNA, 25 bp, Homo sapien
ttggtttgtgtattaggtatccact

SEQ ID NO: 2960279 - DNA, 25 bp, Homo sapien
caacagtccatggttaaattctacc

SEQ ID NO: 2960280 - DNA, 25 bp, Homo sapien
gactgataatggagacacacttggt

SEQ ID NO: 2960281 - DNA, 25 bp, Homo sapien
cactgtgggtatctgatcctgcgtc

SEQ ID NO: 2960282 - DNA, 25 bp, Homo sapien
tgtctaagggcaaaatggaaccgta

SEQ ID NO: 2960283 - DNA, 25 bp, Homo sapien
gaagccctgtgcatgcggtttgatt

SEQ ID NO: 2960284 - DNA, 25 bp, Homo sapien
aacttcataccggtgtgtctaaggg

SEQ ID NO: 2960285 - DNA, 25 bp, Homo sapien
tccagtcatgatcagtgaagccctg

SEQ ID NO: 2960286 - DNA, 25 bp, Homo sapien
gaacctgcttcttaagggacaccac

SEQ ID NO: 2960287 - DNA, 25 bp, Homo sapien
tttggcacgatgaccctagcaatgg

SEQ ID NO: 2960288 - DNA, 25 bp, Homo sapien
gattgtgcgccagaagaacctgctt

SEQ ID NO: 2960289 - DNA, 25 bp, Homo sapien
ggacaccaccagcaaaagggcagat

SEQ ID NO: 2960290 - DNA, 25 bp, Homo sapien
ggccttatctgctgttttatcctgt

SEQ ID NO: 2960291 - DNA, 25 bp, Homo sapien
tagccacatcctcgtaagtcccttc

SEQ ID NO: 2960292 - DNA, 25 bp, Homo sapien
aagtcccttctgtagatggccttat

SEQ ID NO: 2960293 - DNA, 25 bp, Homo sapien
tatcctgtggatctaactctgtttg

SEQ ID NO: 2960294 - DNA, 25 bp, Homo sapien
gaagttatcattcaatgggcacaga

SEQ ID NO: 2960295 - DNA, 25 bp, Homo sapien
gggaatggaagttatcattcaatgg

SEQ ID NO: 2960296 - DNA, 25 bp, Homo sapien
aatggaagttatcattcaatgggca

SEQ ID NO: 2960297 - DNA, 25 bp, Homo sapien
tggaagttatcattcaatgggcaca

SEQ ID NO: 2960298 - DNA, 25 bp, Homo sapien
atacaggaacatgcctccacaccag

SEQ ID NO: 2960299 - DNA, 25 bp, Homo sapien
tagaatagtagaatatcctaggtgg

SEQ ID NO: 2960300 - DNA, 25 bp, Homo sapien
aagtcatttaacatcctcttttttg

SEQ ID NO: 2960301 - DNA, 25 bp, Homo sapien
taggtggacatgacctgaaaagtca

SEQ ID NO: 2960302 - DNA, 25 bp, Homo sapien
cgaaacagcaaaggctgtcggcact

SEQ ID NO: 2960303 - DNA, 25 bp, Homo sapien
tctggaatccccactccgtgtaggc

SEQ ID NO: 2960304 - DNA, 25 bp, Homo sapien
gaattttacttaagccactctctcc

SEQ ID NO: 2960305 - DNA, 25 bp, Homo sapien
tgtcggcactcctccaagtagtcag

SEQ ID NO: 2960306 - DNA, 25 bp, Homo sapien
ggtatctaccgcagagttgtgacaa

SEQ ID NO: 2960307 - DNA, 25 bp, Homo sapien
ggatatttgccagacccatactaag

SEQ ID NO: 2960308 - DNA, 25 bp, Homo sapien
cattcatacaagttatagggccgtt

SEQ ID NO: 2960309 - DNA, 25 bp, Homo sapien
gaagacatttgacccagcaggtcca

SEQ ID NO: 2960310 - DNA, 25 bp, Homo sapien
gacttttgataagagccataggatt

SEQ ID NO: 2960311 - DNA, 25 bp, Homo sapien
cagtgttcacttgatatgagctcag

SEQ ID NO: 2960312 - DNA, 25 bp, Homo sapien
cataggattatgctatagatgtgca

SEQ ID NO: 2960313 - DNA, 25 bp, Homo sapien
gcaaaatttacagcctggttgggaa

SEQ ID NO: 2960314 - DNA, 25 bp, Homo sapien
aagccctggtgaccgcatattggcc

SEQ ID NO: 2960315 - DNA, 25 bp, Homo sapien
tcttcacagatcaccaaagccctgg

SEQ ID NO: 2960316 - DNA, 25 bp, Homo sapien
tgaatctgtcggacttaaaaccttg

SEQ ID NO: 2960317 - DNA, 25 bp, Homo sapien
taaaaccttggacagtgttgaattc

SEQ ID NO: 2960318 - DNA, 25 bp, Homo sapien
tagccttgaacaaaacattccggga

SEQ ID NO: 2960319 - DNA, 25 bp, Homo sapien
cgaagacattgcaaggaagtgaagc

SEQ ID NO: 2960320 - DNA, 25 bp, Homo sapien
actggaaccaaagacaatagccttg

SEQ ID NO: 2960321 - DNA, 25 bp, Homo sapien
gggacaccacgggtatcagcagaat

SEQ ID NO: 2960322 - DNA, 25 bp, Homo sapien
taccacctcagtcaatctctggaag

SEQ ID NO: 2960323 - DNA, 25 bp, Homo sapien
aagccaaattgggttcctatcctgg

SEQ ID NO: 2960324 - DNA, 25 bp, Homo sapien
cattctgagttcctagagcagcacc

SEQ ID NO: 2960325 - DNA, 25 bp, Homo sapien
ccaaaggaggaccatagggcgtagt

SEQ ID NO: 2960326 - DNA, 25 bp, Homo sapien
tgttggacctcacctacgtgacctt

SEQ ID NO: 2960327 - DNA, 25 bp, Homo sapien
tcatctgcacatttgcagagtagca

SEQ ID NO: 2960328 - DNA, 25 bp, Homo sapien
aagtaacacccattgtgttggacct

SEQ ID NO: 2960329 - DNA, 25 bp, Homo sapien
cagagtagcatcagatccatggaga

SEQ ID NO: 2960330 - DNA, 25 bp, Homo sapien
acataaagttaacacttcacaaatt

SEQ ID NO: 2960331 - DNA, 25 bp, Homo sapien
gctcatttacctctgtgcagctgaa

SEQ ID NO: 2960332 - DNA, 25 bp, Homo sapien
gatgatacggcataagggcatggac

SEQ ID NO: 2960333 - DNA, 25 bp, Homo sapien
cttctagtgatagcggttcagggac

SEQ ID NO: 2960334 - DNA, 25 bp, Homo sapien
cattcatttgattgtgtgggagcct

SEQ ID NO: 2960335 - DNA, 25 bp, Homo sapien
caacacagttgaaatctccatgtat

SEQ ID NO: 2960336 - DNA, 25 bp, Homo sapien
catgtatttgcgtaatcagtaatgc

SEQ ID NO: 2960337 - DNA, 25 bp, Homo sapien
ccctgcttagaaaaatccctgttgt

SEQ ID NO: 2960338 - DNA, 25 bp, Homo sapien
gatccgtgagcgtagagactctgct

SEQ ID NO: 2960339 - DNA, 25 bp, Homo sapien
agtggttatacatagccccaaagga

SEQ ID NO: 2960340 - DNA, 25 bp, Homo sapien
tcataagacagctgtcaggtacatc

SEQ ID NO: 2960341 - DNA, 25 bp, Homo sapien
cagttacttcccctcataagacagc

SEQ ID NO: 2960342 - DNA, 25 bp, Homo sapien
ccaaatcctctgagtggttatacat

SEQ ID NO: 2960343 - DNA, 25 bp, Homo sapien
tggacaacctccaatatgtgaatgg

SEQ ID NO: 2960344 - DNA, 25 bp, Homo sapien
tcctaagcctgttcttcgtcttggc

SEQ ID NO: 2960345 - DNA, 25 bp, Homo sapien
gtcttggctctaacactttcatctg

SEQ ID NO: 2960346 - DNA, 25 bp, Homo sapien
tcagttcaaggactagagtctcaag

SEQ ID NO: 2960347 - DNA, 25 bp, Homo sapien
ggacatctccccttccagaatgagc

SEQ ID NO: 2960348 - DNA, 25 bp, Homo sapien
atctcctcccaaattctagaagatg

SEQ ID NO: 2960349 - DNA, 25 bp, Homo sapien
tatcatagcatgaattccatggcac

SEQ ID NO: 2960350 - DNA, 25 bp, Homo sapien
ccatgctgtgtaatctggaatagac

SEQ ID NO: 2960351 - DNA, 25 bp, Homo sapien
atagcatgaattccatggcactgag

SEQ ID NO: 2960352 - DNA, 25 bp, Homo sapien
tgatcttttgcctgggggacccaag

SEQ ID NO: 2960353 - DNA, 25 bp, Homo sapien
tatttcctctccagtggcaacagac

SEQ ID NO: 2960354 - DNA, 25 bp, Homo sapien
atctgatcttttgcctgggggaccc

SEQ ID NO: 2960355 - DNA, 25 bp, Homo sapien
atatctgatcttttgcctgggggac

SEQ ID NO: 2960356 - DNA, 25 bp, Homo sapien
ttttcacgttcaccactcacctgta

SEQ ID NO: 2960357 - DNA, 25 bp, Homo sapien
actcacctgtactgataaaccctct

SEQ ID NO: 2960358 - DNA, 25 bp, Homo sapien
gttcttttcacgttcaccactcacc

SEQ ID NO: 2960359 - DNA, 25 bp, Homo sapien
tactgataaaccctcttcatccaca

SEQ ID NO: 2960360 - DNA, 25 bp, Homo sapien
caactgccaaagggtcaagcccctt

SEQ ID NO: 2960361 - DNA, 25 bp, Homo sapien
atgcaactgccaaagggtcaagccc

SEQ ID NO: 2960362 - DNA, 25 bp, Homo sapien
gcaactgccaaagggtcaagcccct

SEQ ID NO: 2960363 - DNA, 25 bp, Homo sapien
gcttagataagccaaagcgcaggcc

SEQ ID NO: 2960364 - DNA, 25 bp, Homo sapien
tcctgatgcttagataagccaaagc

SEQ ID NO: 2960365 - DNA, 25 bp, Homo sapien
tgagatcctgatgcttagataagcc

SEQ ID NO: 2960366 - DNA, 25 bp, Homo sapien
ggcttaatgagatcctgatgcttag

SEQ ID NO: 2960367 - DNA, 25 bp, Homo sapien
gtggctggggaaggctcacaatcat

SEQ ID NO: 2960368 - DNA, 25 bp, Homo sapien
tttcacgtggctggggaaggctcac

SEQ ID NO: 2960369 - DNA, 25 bp, Homo sapien
agtttcacgtggctggggaaggctc

SEQ ID NO: 2960370 - DNA, 25 bp, Homo sapien
gtttcacgtggctggggaaggctca

SEQ ID NO: 2960371 - DNA, 25 bp, Homo sapien
tccatcgctgatgctctgcatcaag

SEQ ID NO: 2960372 - DNA, 25 bp, Homo sapien
catctccatagagacctctggagca

SEQ ID NO: 2960373 - DNA, 25 bp, Homo sapien
tgcatcaagtagcatctccatagag

SEQ ID NO: 2960374 - DNA, 25 bp, Homo sapien
atttgattccatcgctgatgctctg

SEQ ID NO: 2960375 - DNA, 25 bp, Homo sapien
atgatggcgtggctgggaatggtac

SEQ ID NO: 2960376 - DNA, 25 bp, Homo sapien
tgttcctccaggcatcatgtccata

SEQ ID NO: 2960377 - DNA, 25 bp, Homo sapien
cacagttgaaatatgtcagttgttc

SEQ ID NO: 2960378 - DNA, 25 bp, Homo sapien
cagttgaaatatgtcagttgttcct

SEQ ID NO: 2960379 - DNA, 25 bp, Homo sapien
gttgaaatatgtcagttgttcctcc

SEQ ID NO: 2960380 - DNA, 25 bp, Homo sapien
tagtgattgttctgaggacgaggcc

SEQ ID NO: 2960381 - DNA, 25 bp, Homo sapien
tgacagcacggttatggagaaaggc

SEQ ID NO: 2960382 - DNA, 25 bp, Homo sapien
tggactggtcatagcacaatggatg

SEQ ID NO: 2960383 - DNA, 25 bp, Homo sapien
gatcttgtatgcaaagggcttagca

SEQ ID NO: 2960384 - DNA, 25 bp, Homo sapien
cagtcagtggcatgtgttcattctg

SEQ ID NO: 2960385 - DNA, 25 bp, Homo sapien
gtcagtggcatgtgttcattctgta

SEQ ID NO: 2960386 - DNA, 25 bp, Homo sapien
agtcagtggcatgtgttcattctgt

SEQ ID NO: 2960387 - DNA, 25 bp, Homo sapien
tcagtggcatgtgttcattctgtag

SEQ ID NO: 2960388 - DNA, 25 bp, Homo sapien
tctctttaagtgacccatagtcttt

SEQ ID NO: 2960389 - DNA, 25 bp, Homo sapien
gacccatagtctttcataaagtcag

SEQ ID NO: 2960390 - DNA, 25 bp, Homo sapien
ggagctttatatcaaactctttact

SEQ ID NO: 2960391 - DNA, 25 bp, Homo sapien
aagtgacccatagtctttcataaag

SEQ ID NO: 2960392 - DNA, 25 bp, Homo sapien
gcttataccagctggaacaatcaca

SEQ ID NO: 2960393 - DNA, 25 bp, Homo sapien
cagttgtgggtcattggtttggaaa

SEQ ID NO: 2960394 - DNA, 25 bp, Homo sapien
aaccctggagtctgagtagggagtc

SEQ ID NO: 2960395 - DNA, 25 bp, Homo sapien
tggcacagattgttttcccctccgg

SEQ ID NO: 2960396 - DNA, 25 bp, Homo sapien
cgtgccaacgagtggtgttgcaaag

SEQ ID NO: 2960397 - DNA, 25 bp, Homo sapien
gctgtggatcaaatggcaagtctgt

SEQ ID NO: 2960398 - DNA, 25 bp, Homo sapien
tggatcaaatggcaagtctgtctgc

SEQ ID NO: 2960399 - DNA, 25 bp, Homo sapien
ctttcaagggatgcgtgccaacgag

SEQ ID NO: 2960400 - DNA, 25 bp, Homo sapien
ggttcaccctgtaaagtagccaaga

SEQ ID NO: 2960401 - DNA, 25 bp, Homo sapien
gagactgaatacgaccaaatgggcc

SEQ ID NO: 2960402 - DNA, 25 bp, Homo sapien
cattgggcctggaaaacgtgctctg

SEQ ID NO: 2960403 - DNA, 25 bp, Homo sapien
ccctaagggctacttctgagactga

SEQ ID NO: 2960404 - DNA, 25 bp, Homo sapien
cttcattaccaaaaggctttttatg

SEQ ID NO: 2960405 - DNA, 25 bp, Homo sapien
ttacatttataaaggtcttcattac

SEQ ID NO: 2960406 - DNA, 25 bp, Homo sapien
tcattaccaaaaggctttttatgaa

SEQ ID NO: 2960407 - DNA, 25 bp, Homo sapien
catttataaaggtcttcattaccaa

SEQ ID NO: 2960408 - DNA, 25 bp, Homo sapien
gccgcggacacccttagtgtgggcc

SEQ ID NO: 2960409 - DNA, 25 bp, Homo sapien
cgcggacacccttagtgtgggcctg

SEQ ID NO: 2960410 - DNA, 25 bp, Homo sapien
agggcaggccgcggacacccttagt

SEQ ID NO: 2960411 - DNA, 25 bp, Homo sapien
caggccgcggacacccttagtgtgg

SEQ ID NO: 2960412 - DNA, 25 bp, Homo sapien
tgatgcccgaggtctccactaggag

SEQ ID NO: 2960413 - DNA, 25 bp, Homo sapien
ccagaactgctcctccgagaagctt

SEQ ID NO: 2960414 - DNA, 25 bp, Homo sapien
gtccagcagccggtagatgctgatg

SEQ ID NO: 2960415 - DNA, 25 bp, Homo sapien
actaggagctgccagtcggccccgg

SEQ ID NO: 2960416 - DNA, 25 bp, Homo sapien
ctccagagcttgagacagggtccgg

SEQ ID NO: 2960417 - DNA, 25 bp, Homo sapien
tgcacggcagtcacttggaggcacc

SEQ ID NO: 2960418 - DNA, 25 bp, Homo sapien
cttcctgagccggagaagacgcgcc

SEQ ID NO: 2960419 - DNA, 25 bp, Homo sapien
gtccgggcggagctccttcctgagc

SEQ ID NO: 2960420 - DNA, 25 bp, Homo sapien
tcttctcctgaatgtagttacaacc

SEQ ID NO: 2960421 - DNA, 25 bp, Homo sapien
tctcctgaatgtagttacaacccat

SEQ ID NO: 2960422 - DNA, 25 bp, Homo sapien
tcttcttctcctgaatgtagttaca

SEQ ID NO: 2960423 - DNA, 25 bp, Homo sapien
tctcttcttctcctgaatgtagtta

SEQ ID NO: 2960424 - DNA, 25 bp, Homo sapien
taacatactggtcccattgttttct

SEQ ID NO: 2960425 - DNA, 25 bp, Homo sapien
catatagatgtctgccagtagagtt

SEQ ID NO: 2960426 - DNA, 25 bp, Homo sapien
ttttctgtaatctgagtccatatag

SEQ ID NO: 2960427 - DNA, 25 bp, Homo sapien
tccagaacaccaaagactttatact

SEQ ID NO: 2960428 - DNA, 25 bp, Homo sapien
tagtaaagctctcggatggaccaga

SEQ ID NO: 2960429 - DNA, 25 bp, Homo sapien
tgccagcccattaaggtcacaggag

SEQ ID NO: 2960430 - DNA, 25 bp, Homo sapien
gcaagacacggccatggtgacgaat

SEQ ID NO: 2960431 - DNA, 25 bp, Homo sapien
tgtagattaaggagtgtgccagccc

SEQ ID NO: 2960432 - DNA, 25 bp, Homo sapien
cgtcttactattatgtgcaaacagc

SEQ ID NO: 2960433 - DNA, 25 bp, Homo sapien
tttgcactatgccacagctagggtg

SEQ ID NO: 2960434 - DNA, 25 bp, Homo sapien
cacagctagggtgaccaaatttccc

SEQ ID NO: 2960435 - DNA, 25 bp, Homo sapien
cctaataatccttccgtcttactat

SEQ ID NO: 2960436 - DNA, 25 bp, Homo sapien
cagtctagcacattcataggtcgga

SEQ ID NO: 2960437 - DNA, 25 bp, Homo sapien
tgaaagcttattgcccagggacaga

SEQ ID NO: 2960438 - DNA, 25 bp, Homo sapien
tacagctaacctggaacggagtcac

SEQ ID NO: 2960439 - DNA, 25 bp, Homo sapien
gaaggttccagaatgagcaacgtcc

SEQ ID NO: 2960440 - DNA, 25 bp, Homo sapien
gaccacagtctctccgttgcattct

SEQ ID NO: 2960441 - DNA, 25 bp, Homo sapien
ctccgttgcattcttgttcatagag

SEQ ID NO: 2960442 - DNA, 25 bp, Homo sapien
aaacaccatacaagaagcaatatct

SEQ ID NO: 2960443 - DNA, 25 bp, Homo sapien
tcagagacaatgttatctgtgcctg

SEQ ID NO: 2960444 - DNA, 25 bp, Homo sapien
catacaagaagcaatatctttagca

SEQ ID NO: 2960445 - DNA, 25 bp, Homo sapien
gctgagaaaccagctctacctctct

SEQ ID NO: 2960446 - DNA, 25 bp, Homo sapien
agccagttaaggcaagacaccaacg

SEQ ID NO: 2960447 - DNA, 25 bp, Homo sapien
cagttaaggcaagacaccaacgcca

SEQ ID NO: 2960448 - DNA, 25 bp, Homo sapien
ttaaggcaagacaccaacgccagca

SEQ ID NO: 2960449 - DNA, 25 bp, Homo sapien
ggcaagacaccaacgccagcattgt

SEQ ID NO: 2960450 - DNA, 25 bp, Homo sapien
caggtctcgccgctgccgaaggtag

SEQ ID NO: 2960451 - DNA, 25 bp, Homo sapien
ctcgccgctgccgaaggtagacata

SEQ ID NO: 2960452 - DNA, 25 bp, Homo sapien
gtccaggtctcgccgctgccgaagg

SEQ ID NO: 2960453 - DNA, 25 bp, Homo sapien
ggtctcgccgctgccgaaggtagac

SEQ ID NO: 2960454 - DNA, 25 bp, Homo sapien
agacctctcgccaagctgaggcatg

SEQ ID NO: 2960455 - DNA, 25 bp, Homo sapien
ccaggctctgcttgtattgcttcac

SEQ ID NO: 2960456 - DNA, 25 bp, Homo sapien
tgaggcatggaggtgctccgggcca

SEQ ID NO: 2960457 - DNA, 25 bp, Homo sapien
tccgggccaggatcacatggatctt

SEQ ID NO: 2960458 - DNA, 25 bp, Homo sapien
cacccgggttatcgaagtaatacat

SEQ ID NO: 2960459 - DNA, 25 bp, Homo sapien
agccaggacggaatttggccacccg

SEQ ID NO: 2960460 - DNA, 25 bp, Homo sapien
cccgggttatcgaagtaatacatga

SEQ ID NO: 2960461 - DNA, 25 bp, Homo sapien
cttggcggcccagttaatgagccag

SEQ ID NO: 2960462 - DNA, 25 bp, Homo sapien
taaaagagcctcattacgcctgaga

SEQ ID NO: 2960463 - DNA, 25 bp, Homo sapien
ttgtctccaagccaggtcagtctgt

SEQ ID NO: 2960464 - DNA, 25 bp, Homo sapien
ggcactattgttcctactaagagca

SEQ ID NO: 2960465 - DNA, 25 bp, Homo sapien
tgtcttattccccagtaagcagagg

SEQ ID NO: 2960466 - DNA, 25 bp, Homo sapien
tgcaaagcaggctgatggtccccat

SEQ ID NO: 2960467 - DNA, 25 bp, Homo sapien
ccaaggaatctgttgagctctctag

SEQ ID NO: 2960468 - DNA, 25 bp, Homo sapien
cctgggcagtctctagtgatacaaa

SEQ ID NO: 2960469 - DNA, 25 bp, Homo sapien
ttgagcactgggcaagacttttcct

SEQ ID NO: 2960470 - DNA, 25 bp, Homo sapien
gatgacaaaaagtaggactgaggac

SEQ ID NO: 2960471 - DNA, 25 bp, Homo sapien
ataggctccctaactggatttcaac

SEQ ID NO: 2960472 - DNA, 25 bp, Homo sapien
ggtcactcttgattctttgggatgt

SEQ ID NO: 2960473 - DNA, 25 bp, Homo sapien
gacgaacaaaaatgaataggctccc

SEQ ID NO: 2960474 - DNA, 25 bp, Homo sapien
cttgaggtagttctgacaggctctt

SEQ ID NO: 2960475 - DNA, 25 bp, Homo sapien
ttgccatgtctttcaagaagttagg

SEQ ID NO: 2960476 - DNA, 25 bp, Homo sapien
aggtagttctgacaggctcttgcca

SEQ ID NO: 2960477 - DNA, 25 bp, Homo sapien
tgaggtagttctgacaggctcttgc

SEQ ID NO: 2960478 - DNA, 25 bp, Homo sapien
tcacaagctgcaaaagagccagccc

SEQ ID NO: 2960479 - DNA, 25 bp, Homo sapien
tccagagacattgggtggttgcact

SEQ ID NO: 2960480 - DNA, 25 bp, Homo sapien
tggtagtgtgtaggcctctgaagac

SEQ ID NO: 2960481 - DNA, 25 bp, Homo sapien
ccatattgaactgtagaagaaggca

SEQ ID NO: 2960482 - DNA, 25 bp, Homo sapien
aatggacattggcacgtcatccagt

SEQ ID NO: 2960483 - DNA, 25 bp, Homo sapien
cacaaagcataaggcaaatggacat

SEQ ID NO: 2960484 - DNA, 25 bp, Homo sapien
gaaagtcagctctgaacgaaatgcc

SEQ ID NO: 2960485 - DNA, 25 bp, Homo sapien
tccagtttgggtgcactgaaagtca

SEQ ID NO: 2960486 - DNA, 25 bp, Homo sapien
gaaagacttactggattatcacctc

SEQ ID NO: 2960487 - DNA, 25 bp, Homo sapien
ctccacaagtaggaacgaggaaaga

SEQ ID NO: 2960488 - DNA, 25 bp, Homo sapien
taggaacgaggaaagacttactgga

SEQ ID NO: 2960489 - DNA, 25 bp, Homo sapien
acgaggaaagacttactggattatc

SEQ ID NO: 2960490 - DNA, 25 bp, Homo sapien
tccaaatggtctggcatcataacag

SEQ ID NO: 2960491 - DNA, 25 bp, Homo sapien
aatgcaaagcttgagaggtacaggc

SEQ ID NO: 2960492 - DNA, 25 bp, Homo sapien
catattatgtgtccggtcaggcctc

SEQ ID NO: 2960493 - DNA, 25 bp, Homo sapien
gtcaggcctctgatacttctccaaa

SEQ ID NO: 2960494 - DNA, 25 bp, Homo sapien
tttacctggctgtgaactgttatcc

SEQ ID NO: 2960495 - DNA, 25 bp, Homo sapien
tgcagagtcattaagccaccagtta

SEQ ID NO: 2960496 - DNA, 25 bp, Homo sapien
caaacagtctgaggtatcccacatt

SEQ ID NO: 2960497 - DNA, 25 bp, Homo sapien
aatttttccctgagatcatcaaggc

SEQ ID NO: 2960498 - DNA, 25 bp, Homo sapien
agatgatgtgcaagaggaaacgcat

SEQ ID NO: 2960499 - DNA, 25 bp, Homo sapien
aagatgatgtgcaagaggaaacgca

SEQ ID NO: 2960500 - DNA, 25 bp, Homo sapien
gcttgaggtcaggagctcaaggcca

SEQ ID NO: 2960501 - DNA, 25 bp, Homo sapien
agaggccgaggccagtggattgctt

SEQ ID NO: 2960502 - DNA, 25 bp, Homo sapien
ttgagaggccgaggccagtggattg

SEQ ID NO: 2960503 - DNA, 25 bp, Homo sapien
ttgaggtcaggagctcaaggccagc

SEQ ID NO: 2960504 - DNA, 25 bp, Homo sapien
tccccaggtatccacgaattatctc

SEQ ID NO: 2960505 - DNA, 25 bp, Homo sapien
tgctgactgcttctagtcccataca

SEQ ID NO: 2960506 - DNA, 25 bp, Homo sapien
tatccacgaattatctctaagaagt

SEQ ID NO: 2960507 - DNA, 25 bp, Homo sapien
ctgctgactgcttctagtcccatac

SEQ ID NO: 2960508 - DNA, 25 bp, Homo sapien
gctggaatttgtcgttagagctcac

SEQ ID NO: 2960509 - DNA, 25 bp, Homo sapien
cacaaagggtcaaaatgcggaaact

SEQ ID NO: 2960510 - DNA, 25 bp, Homo sapien
aaatagcttgtggtctcttggcagg

SEQ ID NO: 2960511 - DNA, 25 bp, Homo sapien
gggacttcatcactgaagggacaag

SEQ ID NO: 2960512 - DNA, 25 bp, Homo sapien
tcagcttcgttcttttggcttacga

SEQ ID NO: 2960513 - DNA, 25 bp, Homo sapien
atgatattgcctaggtattcttcca

SEQ ID NO: 2960514 - DNA, 25 bp, Homo sapien
tgtgtggcactatttctgaggcctc

SEQ ID NO: 2960515 - DNA, 25 bp, Homo sapien
cttcagcttcgttcttttggcttac

SEQ ID NO: 2960516 - DNA, 25 bp, Homo sapien
tagttttggggtctgtggcttcctg

SEQ ID NO: 2960517 - DNA, 25 bp, Homo sapien
ctccagaatgacagctgtgacatat

SEQ ID NO: 2960518 - DNA, 25 bp, Homo sapien
tttcaaacgcaagacataatctgta

SEQ ID NO: 2960519 - DNA, 25 bp, Homo sapien
gggggtggagggtcaagagtctcac

SEQ ID NO: 2960520 - DNA, 25 bp, Homo sapien
ttcaaacgcaagacataatctgtaa

SEQ ID NO: 2960521 - DNA, 25 bp, Homo sapien
gattctgagcttcccgcttggttct

SEQ ID NO: 2960522 - DNA, 25 bp, Homo sapien
tgggtttgccaaaaacttgatgagg

SEQ ID NO: 2960523 - DNA, 25 bp, Homo sapien
ctattgcagaatgtttgggtttgcc

SEQ ID NO: 2960524 - DNA, 25 bp, Homo sapien
tgcagaatgtttgggtttgccaaaa

SEQ ID NO: 2960525 - DNA, 25 bp, Homo sapien
catgtctttatctttatgtccttcc

SEQ ID NO: 2960526 - DNA, 25 bp, Homo sapien
cacccatttcagtgtttcaacaaag

SEQ ID NO: 2960527 - DNA, 25 bp, Homo sapien
ctgcacccatttcagtgtttcaaca

SEQ ID NO: 2960528 - DNA, 25 bp, Homo sapien
caacaaagactcagcttcttttctc

SEQ ID NO: 2960529 - DNA, 25 bp, Homo sapien
gatgatagtgaacacatctgtgaat

SEQ ID NO: 2960530 - DNA, 25 bp, Homo sapien
ccagtacatagatgatagtgaacac

SEQ ID NO: 2960531 - DNA, 25 bp, Homo sapien
taattcagggcttatgagaaaaaac

SEQ ID NO: 2960532 - DNA, 25 bp, Homo sapien
gaatttcacatctgcgaaaatactg

SEQ ID NO: 2960533 - DNA, 25 bp, Homo sapien
tagctcaggcggagctgtgcctgaa

SEQ ID NO: 2960534 - DNA, 25 bp, Homo sapien
gagcatcagcagagctagctgtgac

SEQ ID NO: 2960535 - DNA, 25 bp, Homo sapien
atagctcaggcggagctgtgcctga

SEQ ID NO: 2960536 - DNA, 25 bp, Homo sapien
gcatcagcagagctagctgtgacca

SEQ ID NO: 2960537 - DNA, 25 bp, Homo sapien
ttctgtacctgctccagaggaggcc

SEQ ID NO: 2960538 - DNA, 25 bp, Homo sapien
gaactctgccctttgatgagcagag

SEQ ID NO: 2960539 - DNA, 25 bp, Homo sapien
cagcttttctgtacctgctccagag

SEQ ID NO: 2960540 - DNA, 25 bp, Homo sapien
ccactgttccacattcagtgttcct

SEQ ID NO: 2960541 - DNA, 25 bp, Homo sapien
gatgattattacaggtgtctgctcc

SEQ ID NO: 2960542 - DNA, 25 bp, Homo sapien
cctcagtgatgattattacaggtgt

SEQ ID NO: 2960543 - DNA, 25 bp, Homo sapien
tcagtgatgattattacaggtgtct

SEQ ID NO: 2960544 - DNA, 25 bp, Homo sapien
agtgatgattattacaggtgtctgc

SEQ ID NO: 2960545 - DNA, 25 bp, Homo sapien
ccgctgcctctatgaaattccagca

SEQ ID NO: 2960546 - DNA, 25 bp, Homo sapien
gaaacaaagccactgaagagtattt

SEQ ID NO: 2960547 - DNA, 25 bp, Homo sapien
gcctctatgaaattccagcatcatt

SEQ ID NO: 2960548 - DNA, 25 bp, Homo sapien
gctgcctctatgaaattccagcatc

SEQ ID NO: 2960549 - DNA, 25 bp, Homo sapien
aggacaccgtcacaccacatgtgct

SEQ ID NO: 2960550 - DNA, 25 bp, Homo sapien
tgtcttgggtttagaacactctctt

SEQ ID NO: 2960551 - DNA, 25 bp, Homo sapien
gcatctatgaatcagtgtcttgggt

SEQ ID NO: 2960552 - DNA, 25 bp, Homo sapien
tacagggccatgatagcatctatga

SEQ ID NO: 2960553 - DNA, 25 bp, Homo sapien
gaaaccctccgcagagtcgctgagg

SEQ ID NO: 2960554 - DNA, 25 bp, Homo sapien
gaaaatggccaaggcgttcctcgag

SEQ ID NO: 2960555 - DNA, 25 bp, Homo sapien
gaggcggccctcttcggcaggacca

SEQ ID NO: 2960556 - DNA, 25 bp, Homo sapien
gggatggagagacgctagggcctgg

SEQ ID NO: 2960557 - DNA, 25 bp, Homo sapien
ctgaggtaatggaggtaggcggcat

SEQ ID NO: 2960558 - DNA, 25 bp, Homo sapien
tcgcataggggtccctgtgcatgtg

SEQ ID NO: 2960559 - DNA, 25 bp, Homo sapien
ctccaggatcatcgcataggggtcc

SEQ ID NO: 2960560 - DNA, 25 bp, Homo sapien
ggatcatcgcataggggtccctgtg

SEQ ID NO: 2960561 - DNA, 25 bp, Homo sapien
catcgcataggggtccctgtgcatg

SEQ ID NO: 2960562 - DNA, 25 bp, Homo sapien
tgagtaaagaagagctcccagggca

SEQ ID NO: 2960563 - DNA, 25 bp, Homo sapien
tggagaaaaagtcagcacagagtca

SEQ ID NO: 2960564 - DNA, 25 bp, Homo sapien
gctgcttgaccttttgccacacgta

SEQ ID NO: 2960565 - DNA, 25 bp, Homo sapien
cacagagtcatagttgaatgtctcc

SEQ ID NO: 2960566 - DNA, 25 bp, Homo sapien
gcaggcatccgatttccgctgattt

SEQ ID NO: 2960567 - DNA, 25 bp, Homo sapien
agggtcctttcttgcaggcatccga

SEQ ID NO: 2960568 - DNA, 25 bp, Homo sapien
caccgtgtaccgctggcttttccag

SEQ ID NO: 2960569 - DNA, 25 bp, Homo sapien
tgttgcctgtcaccgtgtaccgctg

SEQ ID NO: 2960570 - DNA, 25 bp, Homo sapien
gctgtctccagactagcatgccttt

SEQ ID NO: 2960571 - DNA, 25 bp, Homo sapien
gggctgtctccagactagcatgcct

SEQ ID NO: 2960572 - DNA, 25 bp, Homo sapien
ggctgtctccagactagcatgcctt

SEQ ID NO: 2960573 - DNA, 25 bp, Homo sapien
tgtctccagactagcatgccttttg

SEQ ID NO: 2960574 - DNA, 25 bp, Homo sapien
ctggcatggagctatagatgtcctg

SEQ ID NO: 2960575 - DNA, 25 bp, Homo sapien
ggaccatcggaagcctccttgacct

SEQ ID NO: 2960576 - DNA, 25 bp, Homo sapien
tgccatcaggattcagcctgccgta

SEQ ID NO: 2960577 - DNA, 25 bp, Homo sapien
gtcctgtgggaccatcggaagcctc

SEQ ID NO: 2960578 - DNA, 25 bp, Homo sapien
aattgttttttggagccctgtagct

SEQ ID NO: 2960579 - DNA, 25 bp, Homo sapien
gagccctgtagcttcttccaagatg

SEQ ID NO: 2960580 - DNA, 25 bp, Homo sapien
tttggagccctgtagcttcttccaa

SEQ ID NO: 2960581 - DNA, 25 bp, Homo sapien
tggagccctgtagcttcttccaaga

SEQ ID NO: 2960582 - DNA, 25 bp, Homo sapien
ccttgtagggatctactttgtcagc

SEQ ID NO: 2960583 - DNA, 25 bp, Homo sapien
gaatgtatcttggccttccttgtag

SEQ ID NO: 2960584 - DNA, 25 bp, Homo sapien
tgtatcttggccttccttgtaggga

SEQ ID NO: 2960585 - DNA, 25 bp, Homo sapien
acatgcatcgagtggttctgtgggg

SEQ ID NO: 2960586 - DNA, 25 bp, Homo sapien
gggcatggattgtcttcaactttat

SEQ ID NO: 2960587 - DNA, 25 bp, Homo sapien
tatggcaattgtaggtgcttttcga

SEQ ID NO: 2960588 - DNA, 25 bp, Homo sapien
tgattagcactatggcaattgtagg

SEQ ID NO: 2960589 - DNA, 25 bp, Homo sapien
ggtgcttttcgaggctttgcattca

SEQ ID NO: 2960590 - DNA, 25 bp, Homo sapien
cgtttatgtcattatccgtgttcga

SEQ ID NO: 2960591 - DNA, 25 bp, Homo sapien
gatagctcccctaacacaagcaggg

SEQ ID NO: 2960592 - DNA, 25 bp, Homo sapien
ttccccagatgaacaccgactcgtt

SEQ ID NO: 2960593 - DNA, 25 bp, Homo sapien
tggggctgttagtttccaccggctg

SEQ ID NO: 2960594 - DNA, 25 bp, Homo sapien
ttttcctgttgcaaatgaaacaaac

SEQ ID NO: 2960595 - DNA, 25 bp, Homo sapien
tttacctcttcccagcctgtgcacg

SEQ ID NO: 2960596 - DNA, 25 bp, Homo sapien
tgtgcacgggctccagtcgctgctg

SEQ ID NO: 2960597 - DNA, 25 bp, Homo sapien
tcttcccagcctgtgcacgggctcc

SEQ ID NO: 2960598 - DNA, 25 bp, Homo sapien
ctgggaaagctcctctggacagtga

SEQ ID NO: 2960599 - DNA, 25 bp, Homo sapien
gtgatgtctttctgccatgcagccc

SEQ ID NO: 2960600 - DNA, 25 bp, Homo sapien
tttctgccatgcagcccactttaaa

SEQ ID NO: 2960601 - DNA, 25 bp, Homo sapien
gctcctctggacagtgatgtctttc

SEQ ID NO: 2960602 - DNA, 25 bp, Homo sapien
gaagtgcgcttagctctatgctggc

SEQ ID NO: 2960603 - DNA, 25 bp, Homo sapien
tcctgcccaagaagtgcgcttagct

SEQ ID NO: 2960604 - DNA, 25 bp, Homo sapien
tcaaatcctgcccaagaagtgcgct

SEQ ID NO: 2960605 - DNA, 25 bp, Homo sapien
tgcccaagaagtgcgcttagctcta

SEQ ID NO: 2960606 - DNA, 25 bp, Homo sapien
attttcattattaaggatgattctg

SEQ ID NO: 2960607 - DNA, 25 bp, Homo sapien
tgggtacgctttgccaataacagat

SEQ ID NO: 2960608 - DNA, 25 bp, Homo sapien
acagaaatggcaattgaatgtgctt

SEQ ID NO: 2960609 - DNA, 25 bp, Homo sapien
ctgactctcctaaagcaacacttgg

SEQ ID NO: 2960610 - DNA, 25 bp, Homo sapien
tctgctgttggatgccggtttctgc

SEQ ID NO: 2960611 - DNA, 25 bp, Homo sapien
ggatgccggtttctgctgagtactg

SEQ ID NO: 2960612 - DNA, 25 bp, Homo sapien
gtcagaacatgggcatctaaaaata

SEQ ID NO: 2960613 - DNA, 25 bp, Homo sapien
ggacagctccactttttgcttaaag

SEQ ID NO: 2960614 - DNA, 25 bp, Homo sapien
tgccgtgacaacatccaactgctgc

SEQ ID NO: 2960615 - DNA, 25 bp, Homo sapien
gctgcacgtcctgttcatcctcttg

SEQ ID NO: 2960616 - DNA, 25 bp, Homo sapien
atccaactgctgcacgtcctgttca

SEQ ID NO: 2960617 - DNA, 25 bp, Homo sapien
ttcttggttgccgtgacaacatcca

SEQ ID NO: 2960618 - DNA, 25 bp, Homo sapien
tcaggtctttattcacacaataccc

SEQ ID NO: 2960619 - DNA, 25 bp, Homo sapien
tttattcacacaatacccttcatgg

SEQ ID NO: 2960620 - DNA, 25 bp, Homo sapien
cacaatacccttcatggtttttatc

SEQ ID NO: 2960621 - DNA, 25 bp, Homo sapien
catggtttttatctaaatgccaaag

SEQ ID NO: 2960622 - DNA, 25 bp, Homo sapien
ccaggagagcagtgtgagagaaaaa

SEQ ID NO: 2960623 - DNA, 25 bp, Homo sapien
tgtgagagaaaaaccaaatgtgtct

SEQ ID NO: 2960624 - DNA, 25 bp, Homo sapien
gtgtgagagaaaaaccaaatgtgtc

SEQ ID NO: 2960625 - DNA, 25 bp, Homo sapien
ggagcacagctcgatattttcagat

SEQ ID NO: 2960626 - DNA, 25 bp, Homo sapien
acagccagcccacacgatagaggct

SEQ ID NO: 2960627 - DNA, 25 bp, Homo sapien
aagcttttggagcacagctcgatat

SEQ ID NO: 2960628 - DNA, 25 bp, Homo sapien
acctcagaactaagagggcctctcc

SEQ ID NO: 2960629 - DNA, 25 bp, Homo sapien
cttttcatgtcgctcattacctgaa

SEQ ID NO: 2960630 - DNA, 25 bp, Homo sapien
ctccttcagtgctgattgacttttc

SEQ ID NO: 2960631 - DNA, 25 bp, Homo sapien
tttcaaaggcgactgcagtcagcat

SEQ ID NO: 2960632 - DNA, 25 bp, Homo sapien
cagtgctgattgacttttcaaaggc

SEQ ID NO: 2960633 - DNA, 25 bp, Homo sapien
cctgcagaactcagggtgtacaatt

SEQ ID NO: 2960634 - DNA, 25 bp, Homo sapien
cagacttgataaccagaggctgcca

SEQ ID NO: 2960635 - DNA, 25 bp, Homo sapien
ccatgatacatgctgctctccggtc

SEQ ID NO: 2960636 - DNA, 25 bp, Homo sapien
caatgggactcggtggagcactgtc

SEQ ID NO: 2960637 - DNA, 25 bp, Homo sapien
aattgcatttcagcttatgtgctgc

SEQ ID NO: 2960638 - DNA, 25 bp, Homo sapien
cacttactgttgtcctcatgacaac

SEQ ID NO: 2960639 - DNA, 25 bp, Homo sapien
cactcatctcacttactgttgtcct

SEQ ID NO: 2960640 - DNA, 25 bp, Homo sapien
tttgtacacatgtaacataaattgc

SEQ ID NO: 2960641 - DNA, 25 bp, Homo sapien
ggctcagaagcggcctgtcagtgct

SEQ ID NO: 2960642 - DNA, 25 bp, Homo sapien
gaagcggcctgtcagtgctcccagc

SEQ ID NO: 2960643 - DNA, 25 bp, Homo sapien
agaagcggcctgtcagtgctcccag

SEQ ID NO: 2960644 - DNA, 25 bp, Homo sapien
ctcagaagcggcctgtcagtgctcc

SEQ ID NO: 2960645 - DNA, 25 bp, Homo sapien
ctggctgggatcctcgttccccaca

SEQ ID NO: 2960646 - DNA, 25 bp, Homo sapien
taatgcttccccgtgcaaatttgac

SEQ ID NO: 2960647 - DNA, 25 bp, Homo sapien
cccctggaggactgaatgtggtatt

SEQ ID NO: 2960648 - DNA, 25 bp, Homo sapien
ctccttggcccacagaacagtccag

SEQ ID NO: 2960649 - DNA, 25 bp, Homo sapien
tgaaatccaggcgtcagcaaggttg

SEQ ID NO: 2960650 - DNA, 25 bp, Homo sapien
tagctgcgtaattccaatctctgtg

SEQ ID NO: 2960651 - DNA, 25 bp, Homo sapien
ttatcttataaggacgcatcactgg

SEQ ID NO: 2960652 - DNA, 25 bp, Homo sapien
tatagcccatgctaaacccaggatg

SEQ ID NO: 2960653 - DNA, 25 bp, Homo sapien
agacatctgctccaatgctcctcgg

SEQ ID NO: 2960654 - DNA, 25 bp, Homo sapien
gtctgcttcagggatttgtgcctca

SEQ ID NO: 2960655 - DNA, 25 bp, Homo sapien
ctgtaaaatgaggcgatggaaagca

SEQ ID NO: 2960656 - DNA, 25 bp, Homo sapien
tcctcggctgtccatctgcaatttc

SEQ ID NO: 2960657 - DNA, 25 bp, Homo sapien
taaggtgctgagcattttgggaaga

SEQ ID NO: 2960658 - DNA, 25 bp, Homo sapien
ggcattcatcataaggtgctgagca

SEQ ID NO: 2960659 - DNA, 25 bp, Homo sapien
ttggtgctcggcattcatcataagg

SEQ ID NO: 2960660 - DNA, 25 bp, Homo sapien
caggaagggacgatattttggtgct

SEQ ID NO: 2960661 - DNA, 25 bp, Homo sapien
gacacaggactgagctcttgagttg

SEQ ID NO: 2960662 - DNA, 25 bp, Homo sapien
gagagacacaggactgagctcttga

SEQ ID NO: 2960663 - DNA, 25 bp, Homo sapien
gagacacaggactgagctcttgagt

SEQ ID NO: 2960664 - DNA, 25 bp, Homo sapien
agagacacaggactgagctcttgag

SEQ ID NO: 2960665 - DNA, 25 bp, Homo sapien
ctgttgaatgcaaaacaatggcctc

SEQ ID NO: 2960666 - DNA, 25 bp, Homo sapien
gatatttagaactattgttttccta

SEQ ID NO: 2960667 - DNA, 25 bp, Homo sapien
cctccaaacaccaattaccgatatt

SEQ ID NO: 2960668 - DNA, 25 bp, Homo sapien
caccaattaccgatatttagaacta

SEQ ID NO: 2960669 - DNA, 25 bp, Homo sapien
cttacgtttccagttgtcttgctca

SEQ ID NO: 2960670 - DNA, 25 bp, Homo sapien
gcatcttacgtttccagttgtcttg

SEQ ID NO: 2960671 - DNA, 25 bp, Homo sapien
catgcatcttacgtttccagttgtc

SEQ ID NO: 2960672 - DNA, 25 bp, Homo sapien
ttacgtttccagttgtcttgctcat

SEQ ID NO: 2960673 - DNA, 25 bp, Homo sapien
cagtgaagctggtaaagtttctgct

SEQ ID NO: 2960674 - DNA, 25 bp, Homo sapien
gctggtaaagtttctgctctcacat

SEQ ID NO: 2960675 - DNA, 25 bp, Homo sapien
tggtgctgatcagtgaagctggtaa

SEQ ID NO: 2960676 - DNA, 25 bp, Homo sapien
gatcagtgaagctggtaaagtttct

SEQ ID NO: 2960677 - DNA, 25 bp, Homo sapien
gccaagggcacatctttccaaggaa

SEQ ID NO: 2960678 - DNA, 25 bp, Homo sapien
ccttggtcagtagaaatctgttgcc

SEQ ID NO: 2960679 - DNA, 25 bp, Homo sapien
taggtatggaagtatgaaagtcggc

SEQ ID NO: 2960680 - DNA, 25 bp, Homo sapien
atgaaagtcggcatgggtcatggaa

SEQ ID NO: 2960681 - DNA, 25 bp, Homo sapien
cccagcaggagcacctttagggttt

SEQ ID NO: 2960682 - DNA, 25 bp, Homo sapien
tacccacttgattaggattacaaag

SEQ ID NO: 2960683 - DNA, 25 bp, Homo sapien
ctaagcttctggatagatcatcaga

SEQ ID NO: 2960684 - DNA, 25 bp, Homo sapien
tgaccaaagtcaatgtacccacttg

SEQ ID NO: 2960685 - DNA, 25 bp, Homo sapien
actgctgttttaaccattgctgtag

SEQ ID NO: 2960686 - DNA, 25 bp, Homo sapien
agaccgttggtttgcagagagcctc

SEQ ID NO: 2960687 - DNA, 25 bp, Homo sapien
ccattgctgtagaccgttggtttgc

SEQ ID NO: 2960688 - DNA, 25 bp, Homo sapien
tttaaccattgctgtagaccgttgg

SEQ ID NO: 2960689 - DNA, 25 bp, Homo sapien
gaggctttgcagtgaagagtgtctc

SEQ ID NO: 2960690 - DNA, 25 bp, Homo sapien
ctgagtgggctcacaagtctttgaa

SEQ ID NO: 2960691 - DNA, 25 bp, Homo sapien
acccacggattcttggaaggcagca

SEQ ID NO: 2960692 - DNA, 25 bp, Homo sapien
tgcaccacccacaatgtcaagctga

SEQ ID NO: 2960693 - DNA, 25 bp, Homo sapien
taagttataggattgagtaacattc

SEQ ID NO: 2960694 - DNA, 25 bp, Homo sapien
ctggcttgcttgttttaagttatag

SEQ ID NO: 2960695 - DNA, 25 bp, Homo sapien
tagcaagtgtttcaatctggacaaa

SEQ ID NO: 2960696 - DNA, 25 bp, Homo sapien
gagtaacattctttaggggaatagc

SEQ ID NO: 2960697 - DNA, 25 bp, Homo sapien
cagatgaaggcttctagcctgaatc

SEQ ID NO: 2960698 - DNA, 25 bp, Homo sapien
cagaagagaccttgagtacccttac

SEQ ID NO: 2960699 - DNA, 25 bp, Homo sapien
gaatcttagggtttgcacatttggg

SEQ ID NO: 2960700 - DNA, 25 bp, Homo sapien
ccataaacatggatgaggaccacag

SEQ ID NO: 2960701 - DNA, 25 bp, Homo sapien
tagcacaggatgtaccgacctctca

SEQ ID NO: 2960702 - DNA, 25 bp, Homo sapien
ttctcagatgagacaatagcacagg

SEQ ID NO: 2960703 - DNA, 25 bp, Homo sapien
tggacgtgtcgcttcatttctcaga

SEQ ID NO: 2960704 - DNA, 25 bp, Homo sapien
aggatgtaccgacctctcagggcag

SEQ ID NO: 2960705 - DNA, 25 bp, Homo sapien
tccttctgttagctcatgtgcagcc

SEQ ID NO: 2960706 - DNA, 25 bp, Homo sapien
tgttagctcatgtgcagcccagagt

SEQ ID NO: 2960707 - DNA, 25 bp, Homo sapien
agctcatgtgcagcccagagtgtta

SEQ ID NO: 2960708 - DNA, 25 bp, Homo sapien
ttctgttagctcatgtgcagcccag

SEQ ID NO: 2960709 - DNA, 25 bp, Homo sapien
aatctcgtagattggtacaagtcca

SEQ ID NO: 2960710 - DNA, 25 bp, Homo sapien
ggtaaatacaattctggcagagtcc

SEQ ID NO: 2960711 - DNA, 25 bp, Homo sapien
ttgtgccagacagagaatgatttca

SEQ ID NO: 2960712 - DNA, 25 bp, Homo sapien
gacttaatagtctgcaacttgtgcc

SEQ ID NO: 2960713 - DNA, 25 bp, Homo sapien
ggctgtatgtgatccttagcactgt

SEQ ID NO: 2960714 - DNA, 25 bp, Homo sapien
cctgaatcaggctgtatgtgatcct

SEQ ID NO: 2960715 - DNA, 25 bp, Homo sapien
aatcaggctgtatgtgatccttagc

SEQ ID NO: 2960716 - DNA, 25 bp, Homo sapien
gtatgtgatccttagcactgtgctc

SEQ ID NO: 2960717 - DNA, 25 bp, Homo sapien
gaattaaacacagtcttcgagaagc

SEQ ID NO: 2960718 - DNA, 25 bp, Homo sapien
ctgcaggagctaggtagacccttga

SEQ ID NO: 2960719 - DNA, 25 bp, Homo sapien
aacacagtcttcgagaagcatagag

SEQ ID NO: 2960720 - DNA, 25 bp, Homo sapien
gacccttgaataggcagagatgaat

SEQ ID NO: 2960721 - DNA, 25 bp, Homo sapien
tgtgcagaatcagataggtctgtgt

SEQ ID NO: 2960722 - DNA, 25 bp, Homo sapien
taaatgtacattagagagggacagg

SEQ ID NO: 2960723 - DNA, 25 bp, Homo sapien
cgataaaatattgtacagtgtgtgc

SEQ ID NO: 2960724 - DNA, 25 bp, Homo sapien
ctaagttccactgtaatcgataaaa

SEQ ID NO: 2960725 - DNA, 25 bp, Homo sapien
tcccattgtcttctttgccgttctt

SEQ ID NO: 2960726 - DNA, 25 bp, Homo sapien
catagctgataaccacagtgtgggc

SEQ ID NO: 2960727 - DNA, 25 bp, Homo sapien
cagtgtgggcccggtactttccatc

SEQ ID NO: 2960728 - DNA, 25 bp, Homo sapien
ccagataacactgtgatccatagct

SEQ ID NO: 2960729 - DNA, 25 bp, Homo sapien
tgaggagggggcaacatgtagggct

SEQ ID NO: 2960730 - DNA, 25 bp, Homo sapien
cattgaggagggggcaacatgtagg

SEQ ID NO: 2960731 - DNA, 25 bp, Homo sapien
ttgaggagggggcaacatgtagggc

SEQ ID NO: 2960732 - DNA, 25 bp, Homo sapien
attgaggagggggcaacatgtaggg

SEQ ID NO: 2960733 - DNA, 25 bp, Homo sapien
gcagctgcatccgtaagagcttcag

SEQ ID NO: 2960734 - DNA, 25 bp, Homo sapien
gcatccgtaagagcttcagttggaa

SEQ ID NO: 2960735 - DNA, 25 bp, Homo sapien
agctgcagctgcatccgtaagagct

SEQ ID NO: 2960736 - DNA, 25 bp, Homo sapien
gctgcatccgtaagagcttcagttg

SEQ ID NO: 2960737 - DNA, 25 bp, Homo sapien
gaagttactggcttcacatctatta

SEQ ID NO: 2960738 - DNA, 25 bp, Homo sapien
agcttctgaagttactggcttcaca

SEQ ID NO: 2960739 - DNA, 25 bp, Homo sapien
actggcttcacatctattattaagg

SEQ ID NO: 2960740 - DNA, 25 bp, Homo sapien
ggcttcacatctattattaaggagg

SEQ ID NO: 2960741 - DNA, 25 bp, Homo sapien
cattgaggaataggacagccacact

SEQ ID NO: 2960742 - DNA, 25 bp, Homo sapien
cactgaatagggatgtaaaatttgt

SEQ ID NO: 2960743 - DNA, 25 bp, Homo sapien
cagccacactgaatagggatgtaaa

SEQ ID NO: 2960744 - DNA, 25 bp, Homo sapien
ctgcattgaggaataggacagccac

SEQ ID NO: 2960745 - DNA, 25 bp, Homo sapien
gaccaggtacttcatttgtggggct

SEQ ID NO: 2960746 - DNA, 25 bp, Homo sapien
ggaccaggtacttcatttgtggggc

SEQ ID NO: 2960747 - DNA, 25 bp, Homo sapien
cgggaccaggtacttcatttgtggg

SEQ ID NO: 2960748 - DNA, 25 bp, Homo sapien
cccgggaccaggtacttcatttgtg

SEQ ID NO: 2960749 - DNA, 25 bp, Homo sapien
ctttaaaccaagtgctcaaccaggg

SEQ ID NO: 2960750 - DNA, 25 bp, Homo sapien
gaacagactttgaccgaagcccttg

SEQ ID NO: 2960751 - DNA, 25 bp, Homo sapien
ggttaccctcctcggatcacagtag

SEQ ID NO: 2960752 - DNA, 25 bp, Homo sapien
taggacatgtgcctgattcagtagc

SEQ ID NO: 2960753 - DNA, 25 bp, Homo sapien
attttgctgcaagtaaaatgcctgt

SEQ ID NO: 2960754 - DNA, 25 bp, Homo sapien
ttgctgcaagtaaaatgcctgtctt

SEQ ID NO: 2960755 - DNA, 25 bp, Homo sapien
aatgcctgtctttaaagagtagcct

SEQ ID NO: 2960756 - DNA, 25 bp, Homo sapien
ctgcaagtaaaatgcctgtctttaa

SEQ ID NO: 2960757 - DNA, 25 bp, Homo sapien
gaaacagtctgtgaccacacggtga

SEQ ID NO: 2960758 - DNA, 25 bp, Homo sapien
catatagtgacttaaaatgcggcct

SEQ ID NO: 2960759 - DNA, 25 bp, Homo sapien
taaagagatcctgcggtaacacgtg

SEQ ID NO: 2960760 - DNA, 25 bp, Homo sapien
tacagagtggccataacgcagtaca

SEQ ID NO: 2960761 - DNA, 25 bp, Homo sapien
gtcaaagtaggactctctggtttcc

SEQ ID NO: 2960762 - DNA, 25 bp, Homo sapien
tagtgtctcctagcttccacttctg

SEQ ID NO: 2960763 - DNA, 25 bp, Homo sapien
tgatagtgtctcctagcttccactt

SEQ ID NO: 2960764 - DNA, 25 bp, Homo sapien
gtctgtgttgaaatgtcaaagtagg

SEQ ID NO: 2960765 - DNA, 25 bp, Homo sapien
gctgtgtaacttgaacaaatcactt

SEQ ID NO: 2960766 - DNA, 25 bp, Homo sapien
caaatcactttattacctccaggtc

SEQ ID NO: 2960767 - DNA, 25 bp, Homo sapien
aattctagtcttggttccatcattg

SEQ ID NO: 2960768 - DNA, 25 bp, Homo sapien
ttccatcattggttagctgtgtaac

SEQ ID NO: 2960769 - DNA, 25 bp, Homo sapien
gaatggggcagtggttcagaaatcc

SEQ ID NO: 2960770 - DNA, 25 bp, Homo sapien
gtgctgaaggattgttttatttgcc

SEQ ID NO: 2960771 - DNA, 25 bp, Homo sapien
agaatggggcagtggttcagaaatc

SEQ ID NO: 2960772 - DNA, 25 bp, Homo sapien
gtgtgctgaaggattgttttatttg

SEQ ID NO: 2960773 - DNA, 25 bp, Homo sapien
gaatcgtccaagagttgcaaggcca

SEQ ID NO: 2960774 - DNA, 25 bp, Homo sapien
cagggctggcataaaagggaatcgt

SEQ ID NO: 2960775 - DNA, 25 bp, Homo sapien
tgagggcccctggttcaaggactgt

SEQ ID NO: 2960776 - DNA, 25 bp, Homo sapien
caaggactgtggagatacaaccaac

SEQ ID NO: 2960777 - DNA, 25 bp, Homo sapien
gaaaaagcaaagcccgcacactgga

SEQ ID NO: 2960778 - DNA, 25 bp, Homo sapien
ttctgttctttactccaggtttcac

SEQ ID NO: 2960779 - DNA, 25 bp, Homo sapien
ccgcacactggagcctccttttatg

SEQ ID NO: 2960780 - DNA, 25 bp, Homo sapien
cttacaccttcaaaatgtgagactc

SEQ ID NO: 2960781 - DNA, 25 bp, Homo sapien
tagcctggagggtcggtgactgtga

SEQ ID NO: 2960782 - DNA, 25 bp, Homo sapien
gtgtcctcatttccccgtagcctgg

SEQ ID NO: 2960783 - DNA, 25 bp, Homo sapien
gagagggagtcccttgaacaggccc

SEQ ID NO: 2960784 - DNA, 25 bp, Homo sapien
tctcgaattgtccaaaggaaactat

SEQ ID NO: 2960785 - DNA, 25 bp, Homo sapien
tgttagtgtcgagatctttctcata

SEQ ID NO: 2960786 - DNA, 25 bp, Homo sapien
tagtgtcgagatctttctcatattc

SEQ ID NO: 2960787 - DNA, 25 bp, Homo sapien
gaagaagctggtgttagtgtcgaga

SEQ ID NO: 2960788 - DNA, 25 bp, Homo sapien
tgaagaagctggtgttagtgtcgag

SEQ ID NO: 2960789 - DNA, 25 bp, Homo sapien
catttctagtttagaccatgggtca

SEQ ID NO: 2960790 - DNA, 25 bp, Homo sapien
gagcctagtgctgtctttaaaatac

SEQ ID NO: 2960791 - DNA, 25 bp, Homo sapien
cacctaacaggtaaagccatcagaa

SEQ ID NO: 2960792 - DNA, 25 bp, Homo sapien
ggtcatgaaagttcctaaaagttca

SEQ ID NO: 2960793 - DNA, 25 bp, Homo sapien
ccgtgactatggagcctcggagact

SEQ ID NO: 2960794 - DNA, 25 bp, Homo sapien
tgcgagcagaactgtctttccctgg

SEQ ID NO: 2960795 - DNA, 25 bp, Homo sapien
tccctttgtgaagccccgtgactat

SEQ ID NO: 2960796 - DNA, 25 bp, Homo sapien
ccttgtggtggtccacatgggcctg

SEQ ID NO: 2960797 - DNA, 25 bp, Homo sapien
cattatgctcaactttagatattgg

SEQ ID NO: 2960798 - DNA, 25 bp, Homo sapien
tcatgcattatgctcaactttagat

SEQ ID NO: 2960799 - DNA, 25 bp, Homo sapien
tagatattggatctggaattggaag

SEQ ID NO: 2960800 - DNA, 25 bp, Homo sapien
gatattggatctggaattggaagca

SEQ ID NO: 2960801 - DNA, 25 bp, Homo sapien
gaattgtaaattcctatacttctca

SEQ ID NO: 2960802 - DNA, 25 bp, Homo sapien
tgtctaggaagtgcttagtcattac

SEQ ID NO: 2960803 - DNA, 25 bp, Homo sapien
cctatacttctcattaccagtttgt

SEQ ID NO: 2960804 - DNA, 25 bp, Homo sapien
tcctgcaagtcaaacatgtagaatt

SEQ ID NO: 2960805 - DNA, 25 bp, Homo sapien
caggtgctcatgaaagcttgtcttc

SEQ ID NO: 2960806 - DNA, 25 bp, Homo sapien
cttcatgtcgttaattttcagagga

SEQ ID NO: 2960807 - DNA, 25 bp, Homo sapien
caagagtaattttgatatcagatat

SEQ ID NO: 2960808 - DNA, 25 bp, Homo sapien
aggctggagacaggtgctcatgaaa

SEQ ID NO: 2960809 - DNA, 25 bp, Homo sapien
gaagggcttatttcgagctcggcag

SEQ ID NO: 2960810 - DNA, 25 bp, Homo sapien
tcgagctcggcagcattgaggagtt

SEQ ID NO: 2960811 - DNA, 25 bp, Homo sapien
ttatttcgagctcggcagcattgag

SEQ ID NO: 2960812 - DNA, 25 bp, Homo sapien
gaacaagaagggcttatttcgagct

SEQ ID NO: 2960813 - DNA, 25 bp, Homo sapien
agcaccgacgtgataatcggagtcc

SEQ ID NO: 2960814 - DNA, 25 bp, Homo sapien
tgtagcaccgacgtgataatcggag

SEQ ID NO: 2960815 - DNA, 25 bp, Homo sapien
cgggctgtagcaccgacgtgataat

SEQ ID NO: 2960816 - DNA, 25 bp, Homo sapien
ggctgtagcaccgacgtgataatcg

SEQ ID NO: 2960817 - DNA, 25 bp, Homo sapien
gccacatttttgagaaacgggattc

SEQ ID NO: 2960818 - DNA, 25 bp, Homo sapien
gatggcccatattcctcgtagtgca

SEQ ID NO: 2960819 - DNA, 25 bp, Homo sapien
tagtgcaatccgatgacagagtgtt

SEQ ID NO: 2960820 - DNA, 25 bp, Homo sapien
gactcttcgaaaagagatggcccat

SEQ ID NO: 2960821 - DNA, 25 bp, Homo sapien
tctgaataccagatcatcaaatatg

SEQ ID NO: 2960822 - DNA, 25 bp, Homo sapien
tatgtctggctaactcccgtacagc

SEQ ID NO: 2960823 - DNA, 25 bp, Homo sapien
taacgttacttagagcctattgatg

SEQ ID NO: 2960824 - DNA, 25 bp, Homo sapien
ttgaatatctcttagttccttggac

SEQ ID NO: 2960825 - DNA, 25 bp, Homo sapien
caagttgttggtaattgtccagtgc

SEQ ID NO: 2960826 - DNA, 25 bp, Homo sapien
cagtttatgctgttcgaggcagcag

SEQ ID NO: 2960827 - DNA, 25 bp, Homo sapien
cagcagaggaacaagttgttggtaa

SEQ ID NO: 2960828 - DNA, 25 bp, Homo sapien
ctgtgcaaagcaagcgaatctcctt

SEQ ID NO: 2960829 - DNA, 25 bp, Homo sapien
agcagagagcctcgattgccgccat

SEQ ID NO: 2960830 - DNA, 25 bp, Homo sapien
tgcttacataagcagagagcctcga

SEQ ID NO: 2960831 - DNA, 25 bp, Homo sapien
ttgctgcttacataagcagagagcc

SEQ ID NO: 2960832 - DNA, 25 bp, Homo sapien
cataagcagagagcctcgattgccg

SEQ ID NO: 2960833 - DNA, 25 bp, Homo sapien
tagcagttaacttgcatctgtcctc

SEQ ID NO: 2960834 - DNA, 25 bp, Homo sapien
tctgcatagccccaatctcttgagg

SEQ ID NO: 2960835 - DNA, 25 bp, Homo sapien
gccccaatctcttgaggtagcagtt

SEQ ID NO: 2960836 - DNA, 25 bp, Homo sapien
tctcttgaggtagcagttaacttgc

SEQ ID NO: 2960837 - DNA, 25 bp, Homo sapien
cagtttctcagagaggttcctgtac

SEQ ID NO: 2960838 - DNA, 25 bp, Homo sapien
caccgaggtcttcctgagactcagc

SEQ ID NO: 2960839 - DNA, 25 bp, Homo sapien
cctaaaataggcctcatcgaaggaa

SEQ ID NO: 2960840 - DNA, 25 bp, Homo sapien
catttgttgcgtcattttcacacga

SEQ ID NO: 2960841 - DNA, 25 bp, Homo sapien
tgatacaggaggatctgcacagcat

SEQ ID NO: 2960842 - DNA, 25 bp, Homo sapien
caaacatggcttcattgccctggaa

SEQ ID NO: 2960843 - DNA, 25 bp, Homo sapien
cagaagaatccttgcaatgggcaca

SEQ ID NO: 2960844 - DNA, 25 bp, Homo sapien
ggtgtcaagccctcgctgttaggtg

SEQ ID NO: 2960845 - DNA, 25 bp, Homo sapien
ctcacgtacagaagcattctgcttc

SEQ ID NO: 2960846 - DNA, 25 bp, Homo sapien
aaactcacgtacagaagcattctgc

SEQ ID NO: 2960847 - DNA, 25 bp, Homo sapien
gggcctgctcaaactcacgtacaga

SEQ ID NO: 2960848 - DNA, 25 bp, Homo sapien
gctcaaactcacgtacagaagcatt

SEQ ID NO: 2960849 - DNA, 25 bp, Homo sapien
tagattcgtctaatgagtaggctgg

SEQ ID NO: 2960850 - DNA, 25 bp, Homo sapien
taagtccctaaaccctgtgtgtcac

SEQ ID NO: 2960851 - DNA, 25 bp, Homo sapien
cctggagtctgcactctgctttgaa

SEQ ID NO: 2960852 - DNA, 25 bp, Homo sapien
tagaagacaggcctgaccaatggtt

SEQ ID NO: 2960853 - DNA, 25 bp, Homo sapien
ataatgtttcaagcccattctttgt

SEQ ID NO: 2960854 - DNA, 25 bp, Homo sapien
tctttgttgatagcctccacattta

SEQ ID NO: 2960855 - DNA, 25 bp, Homo sapien
tgtttcaagcccattctttgttgat

SEQ ID NO: 2960856 - DNA, 25 bp, Homo sapien
cattctttgttgatagcctccacat

SEQ ID NO: 2960857 - DNA, 25 bp, Homo sapien
gcctgttttcatgcgtctgtagagc

SEQ ID NO: 2960858 - DNA, 25 bp, Homo sapien
catgcgtctgtagagccgatacctc

SEQ ID NO: 2960859 - DNA, 25 bp, Homo sapien
gctcaaagcctgttttcatgcgtct

SEQ ID NO: 2960860 - DNA, 25 bp, Homo sapien
gtctgtagagccgatacctccactc

SEQ ID NO: 2960861 - DNA, 25 bp, Homo sapien
cattaggcattagggcgtagcggat

SEQ ID NO: 2960862 - DNA, 25 bp, Homo sapien
ccatgactctgtagagctgaaaaaa

SEQ ID NO: 2960863 - DNA, 25 bp, Homo sapien
tgtggtcagagcacccatcaggagc

SEQ ID NO: 2960864 - DNA, 25 bp, Homo sapien
gctgacaacggccatccatgactct

SEQ ID NO: 2960865 - DNA, 25 bp, Homo sapien
tttatacctggttactacagctgca

SEQ ID NO: 2960866 - DNA, 25 bp, Homo sapien
taagaggctcttggaagctgacagt

SEQ ID NO: 2960867 - DNA, 25 bp, Homo sapien
gctggttaccatgagacagacattg

SEQ ID NO: 2960868 - DNA, 25 bp, Homo sapien
gctgcattgacgctaagaggctctt

SEQ ID NO: 2960869 - DNA, 25 bp, Homo sapien
gatgaaactcttcatcgaaatcctg

SEQ ID NO: 2960870 - DNA, 25 bp, Homo sapien
tgaaactcttcatcgaaatcctgag

SEQ ID NO: 2960871 - DNA, 25 bp, Homo sapien
atgaaactcttcatcgaaatcctga

SEQ ID NO: 2960872 - DNA, 25 bp, Homo sapien
taagctgctctactaagttggtgac

SEQ ID NO: 2960873 - DNA, 25 bp, Homo sapien
gaaacttggcaagtcactatgcact

SEQ ID NO: 2960874 - DNA, 25 bp, Homo sapien
tccctgaggcgtatgggctcagcaa

SEQ ID NO: 2960875 - DNA, 25 bp, Homo sapien
aagacagtgagcttggaggagccac

SEQ ID NO: 2960876 - DNA, 25 bp, Homo sapien
ctaatcctggagtcgcaatggataa

SEQ ID NO: 2960877 - DNA, 25 bp, Homo sapien
ggagtcgcaatggataatgtgtgta

SEQ ID NO: 2960878 - DNA, 25 bp, Homo sapien
tcctggagtcgcaatggataatgtg

SEQ ID NO: 2960879 - DNA, 25 bp, Homo sapien
tcgcaatggataatgtgtgtatttt

SEQ ID NO: 2960880 - DNA, 25 bp, Homo sapien
cagagtgtatccctggtgggtccgc

SEQ ID NO: 2960881 - DNA, 25 bp, Homo sapien
gggtccgcataagagcgtccaccat

SEQ ID NO: 2960882 - DNA, 25 bp, Homo sapien
tggtgggtccgcataagagcgtcca

SEQ ID NO: 2960883 - DNA, 25 bp, Homo sapien
tatccctggtgggtccgcataagag

SEQ ID NO: 2960884 - DNA, 25 bp, Homo sapien
tgtgagttgaatgtagtttttgaga

SEQ ID NO: 2960885 - DNA, 25 bp, Homo sapien
atatatgtgagttgaatgtagtttt

SEQ ID NO: 2960886 - DNA, 25 bp, Homo sapien
tgagttgaatgtagtttttgagaat

SEQ ID NO: 2960887 - DNA, 25 bp, Homo sapien
tatgtgagttgaatgtagtttttga

SEQ ID NO: 2960888 - DNA, 25 bp, Homo sapien
aagagccccttgcaaactactggta

SEQ ID NO: 2960889 - DNA, 25 bp, Homo sapien
gctggtccaagttctaaaacctcaa

SEQ ID NO: 2960890 - DNA, 25 bp, Homo sapien
tgcaaactactggtataagtccaag

SEQ ID NO: 2960891 - DNA, 25 bp, Homo sapien
ccttcagttcgtggccaaagaccca

SEQ ID NO: 2960892 - DNA, 25 bp, Homo sapien
gcagacaaagccatgatggccaagt

SEQ ID NO: 2960893 - DNA, 25 bp, Homo sapien
ctaggcagacaaagccatgatggcc

SEQ ID NO: 2960894 - DNA, 25 bp, Homo sapien
agacaaagccatgatggccaagttt

SEQ ID NO: 2960895 - DNA, 25 bp, Homo sapien
taggcagacaaagccatgatggcca

SEQ ID NO: 2960896 - DNA, 25 bp, Homo sapien
tctgactgcagttgtgttgacagca

SEQ ID NO: 2960897 - DNA, 25 bp, Homo sapien
taattgctggatggtgttgacaaaa

SEQ ID NO: 2960898 - DNA, 25 bp, Homo sapien
tgcagggaccaatggttgctttcac

SEQ ID NO: 2960899 - DNA, 25 bp, Homo sapien
tgacaaaagtttgagtcccatcatc

SEQ ID NO: 2960900 - DNA, 25 bp, Homo sapien
gattgagtgggtttgacttatgtgt

SEQ ID NO: 2960901 - DNA, 25 bp, Homo sapien
acttatgtgtggacatagatatggg

SEQ ID NO: 2960902 - DNA, 25 bp, Homo sapien
ttctcttgtagaagtacagaatcgg

SEQ ID NO: 2960903 - DNA, 25 bp, Homo sapien
gaagtacagaatcggggctcagatt

SEQ ID NO: 2960904 - DNA, 25 bp, Homo sapien
tggagagagctccagcaagctattt

SEQ ID NO: 2960905 - DNA, 25 bp, Homo sapien
cagcctctgacagcgcttccacagg

SEQ ID NO: 2960906 - DNA, 25 bp, Homo sapien
cagcagagccatacccatgttgctt

SEQ ID NO: 2960907 - DNA, 25 bp, Homo sapien
gagccatacccatgttgcttgcatg

SEQ ID NO: 2960908 - DNA, 25 bp, Homo sapien
tgcacttgcctttctacttctcttt

SEQ ID NO: 2960909 - DNA, 25 bp, Homo sapien
ggttgcacttgcctttctacttctc

SEQ ID NO: 2960910 - DNA, 25 bp, Homo sapien
gttttggttgcacttgcctttctac

SEQ ID NO: 2960911 - DNA, 25 bp, Homo sapien
cggttttggttgcacttgcctttct

SEQ ID NO: 2960912 - DNA, 25 bp, Homo sapien
aaattcttgtgctttgatcatcagc

SEQ ID NO: 2960913 - DNA, 25 bp, Homo sapien
tccctttgggaaatcttgccatgtt

SEQ ID NO: 2960914 - DNA, 25 bp, Homo sapien
tgttcctgggcatctcgcttgcttt

SEQ ID NO: 2960915 - DNA, 25 bp, Homo sapien
gagtcacacagttcccttgctctgg

SEQ ID NO: 2960916 - DNA, 25 bp, Homo sapien
aagtcttcggacatactccattcca

SEQ ID NO: 2960917 - DNA, 25 bp, Homo sapien
taagtcctgtgattgtgcatctcag

SEQ ID NO: 2960918 - DNA, 25 bp, Homo sapien
ctcagagtctgcagattatccatga

SEQ ID NO: 2960919 - DNA, 25 bp, Homo sapien
catgatgatttctccagccaaagga

SEQ ID NO: 2960920 - DNA, 25 bp, Homo sapien
tcccagcacaaatatcagcaatagg

SEQ ID NO: 2960921 - DNA, 25 bp, Homo sapien
cagcacaaatatcagcaatagggaa

SEQ ID NO: 2960922 - DNA, 25 bp, Homo sapien
actgatatcccagcacaaatatcag

SEQ ID NO: 2960923 - DNA, 25 bp, Homo sapien
gatatcccagcacaaatatcagcaa

SEQ ID NO: 2960924 - DNA, 25 bp, Homo sapien
atgaggccagtctttttctgatctc

SEQ ID NO: 2960925 - DNA, 25 bp, Homo sapien
tctgatctccttagaacacgacagt

SEQ ID NO: 2960926 - DNA, 25 bp, Homo sapien
atctctcagagcctttgatccactc

SEQ ID NO: 2960927 - DNA, 25 bp, Homo sapien
ttgcatctctcagagcctttgatcc

SEQ ID NO: 2960928 - DNA, 25 bp, Homo sapien
tattgtaagccgagacttgaacaaa

SEQ ID NO: 2960929 - DNA, 25 bp, Homo sapien
taagccgagacttgaacaaaatact

SEQ ID NO: 2960930 - DNA, 25 bp, Homo sapien
agacttgaacaaaatactgttggcc

SEQ ID NO: 2960931 - DNA, 25 bp, Homo sapien
ctttcatattgtaagccgagacttg

SEQ ID NO: 2960932 - DNA, 25 bp, Homo sapien
agaggcacatgccggtgtcgtggtc

SEQ ID NO: 2960933 - DNA, 25 bp, Homo sapien
ggcacatgccggtgtcgtggtctga

SEQ ID NO: 2960934 - DNA, 25 bp, Homo sapien
ggtgtcgtggtctgagcaggtcccc

SEQ ID NO: 2960935 - DNA, 25 bp, Homo sapien
acatgccggtgtcgtggtctgagca

SEQ ID NO: 2960936 - DNA, 25 bp, Homo sapien
ctatgtaccataccatataacataa

SEQ ID NO: 2960937 - DNA, 25 bp, Homo sapien
atgtaccataccatataacataagt

SEQ ID NO: 2960938 - DNA, 25 bp, Homo sapien
tatgtaccataccatataacataag

SEQ ID NO: 2960939 - DNA, 25 bp, Homo sapien
cttacattcactggcgatatcggga

SEQ ID NO: 2960940 - DNA, 25 bp, Homo sapien
ttctggtaatgagacacttcaactg

SEQ ID NO: 2960941 - DNA, 25 bp, Homo sapien
gatatcgggattttcctgatcgtaa

SEQ ID NO: 2960942 - DNA, 25 bp, Homo sapien
aactgtgacacaatgccgagcttac

SEQ ID NO: 2960943 - DNA, 25 bp, Homo sapien
tctgcggatgagcaccccgcacatg

SEQ ID NO: 2960944 - DNA, 25 bp, Homo sapien
caagcaggcgatgccaaggatttgg

SEQ ID NO: 2960945 - DNA, 25 bp, Homo sapien
tggaagctgccattgttcagagctc

SEQ ID NO: 2960946 - DNA, 25 bp, Homo sapien
tgtggttggtttcttgtgtcgggca

SEQ ID NO: 2960947 - DNA, 25 bp, Homo sapien
gctcggacctgctgcagcagacctt

SEQ ID NO: 2960948 - DNA, 25 bp, Homo sapien
tgatgaagggctcggacctgctgca

SEQ ID NO: 2960949 - DNA, 25 bp, Homo sapien
tgctgatgaagggctcggacctgct

SEQ ID NO: 2960950 - DNA, 25 bp, Homo sapien
gctctctgtcgtcatagtctttcca

SEQ ID NO: 2960951 - DNA, 25 bp, Homo sapien
ggcccagcacagatttttatcctta

SEQ ID NO: 2960952 - DNA, 25 bp, Homo sapien
gatggcccagcacagatttttatcc

SEQ ID NO: 2960953 - DNA, 25 bp, Homo sapien
tcagttgatggcccagcacagattt

SEQ ID NO: 2960954 - DNA, 25 bp, Homo sapien
gttgatggcccagcacagattttta

SEQ ID NO: 2960955 - DNA, 25 bp, Homo sapien
ggagtttacttcattcatgttggca

SEQ ID NO: 2960956 - DNA, 25 bp, Homo sapien
gttggcatgtctagcccctactatg

SEQ ID NO: 2960957 - DNA, 25 bp, Homo sapien
gcagtagttccctaacttgtaagga

SEQ ID NO: 2960958 - DNA, 25 bp, Homo sapien
ggagttctgaagcaacagttcattt

SEQ ID NO: 2960959 - DNA, 25 bp, Homo sapien
tcctaagaaccttgtggcttctata

SEQ ID NO: 2960960 - DNA, 25 bp, Homo sapien
tcagtctaaactaacttttctccta

SEQ ID NO: 2960961 - DNA, 25 bp, Homo sapien
tttctcctaagaaccttgtggcttc

SEQ ID NO: 2960962 - DNA, 25 bp, Homo sapien
gaaccttgtggcttctatactgtac

SEQ ID NO: 2960963 - DNA, 25 bp, Homo sapien
cacttatcctcaggttcatgtaggg

SEQ ID NO: 2960964 - DNA, 25 bp, Homo sapien
ttcatgtagggattctgctcattca

SEQ ID NO: 2960965 - DNA, 25 bp, Homo sapien
cctcaggttcatgtagggattctgc

SEQ ID NO: 2960966 - DNA, 25 bp, Homo sapien
tccctttagtgtcacttatcctcag

SEQ ID NO: 2960967 - DNA, 25 bp, Homo sapien
agactgactgcttgcggcctgtggt

SEQ ID NO: 2960968 - DNA, 25 bp, Homo sapien
tcttcacaaacttgttcgaggaatg

SEQ ID NO: 2960969 - DNA, 25 bp, Homo sapien
tcgaggaatggaacaggtgtttcag

SEQ ID NO: 2960970 - DNA, 25 bp, Homo sapien
gtttcaggcttcttgagactgactg

SEQ ID NO: 2960971 - DNA, 25 bp, Homo sapien
ctatttcaacaattggtacttgatc

SEQ ID NO: 2960972 - DNA, 25 bp, Homo sapien
aactggtgtgagagtcatctatttc

SEQ ID NO: 2960973 - DNA, 25 bp, Homo sapien
aaatataacggctatgtagagtccc

SEQ ID NO: 2960974 - DNA, 25 bp, Homo sapien
tcattggtgactaagatattgtctt

SEQ ID NO: 2960975 - DNA, 25 bp, Homo sapien
tagctgtgctgttgctgcgagcatc

SEQ ID NO: 2960976 - DNA, 25 bp, Homo sapien
gcctcagccaccttatatcttccca

SEQ ID NO: 2960977 - DNA, 25 bp, Homo sapien
ggatgaggatattggtatgctttgc

SEQ ID NO: 2960978 - DNA, 25 bp, Homo sapien
tctgccgagtttgcagcactgtgga

SEQ ID NO: 2960979 - DNA, 25 bp, Homo sapien
cctttcaatgtaagagcaatgtaca

SEQ ID NO: 2960980 - DNA, 25 bp, Homo sapien
ttagacacctttcaatgtaagagca

SEQ ID NO: 2960981 - DNA, 25 bp, Homo sapien
tcaatgtaagagcaatgtacacttc

SEQ ID NO: 2960982 - DNA, 25 bp, Homo sapien
taagagcaatgtacacttctccctc

SEQ ID NO: 2960983 - DNA, 25 bp, Homo sapien
taatgggctcatagtaaactcttcc

SEQ ID NO: 2960984 - DNA, 25 bp, Homo sapien
acctccctgatggtgactatgagta

SEQ ID NO: 2960985 - DNA, 25 bp, Homo sapien
cagtagaatgtctaaagctgttggc

SEQ ID NO: 2960986 - DNA, 25 bp, Homo sapien
tttccatgtcgatctttaatgggct

SEQ ID NO: 2960987 - DNA, 25 bp, Homo sapien
ggctgccatcacaactggctaattt

SEQ ID NO: 2960988 - DNA, 25 bp, Homo sapien
tgcctgccttggcctcccaaagtgc

SEQ ID NO: 2960989 - DNA, 25 bp, Homo sapien
ctgacctcaggtgacctgcctgcct

SEQ ID NO: 2960990 - DNA, 25 bp, Homo sapien
tgttggccaggttggtcttgaaccc

SEQ ID NO: 2960991 - DNA, 25 bp, Homo sapien
ctaacaacctttcaccagattggaa

SEQ ID NO: 2960992 - DNA, 25 bp, Homo sapien
tattgtgggcctaagggagggtgaa

SEQ ID NO: 2960993 - DNA, 25 bp, Homo sapien
taaggcctattgtgggcctaaggga

SEQ ID NO: 2960994 - DNA, 25 bp, Homo sapien
tgtgtaaggcctattgtgggcctaa

SEQ ID NO: 2960995 - DNA, 25 bp, Homo sapien
aagactgtgtaaggcctattgtggg

SEQ ID NO: 2960996 - DNA, 25 bp, Homo sapien
tggcagagaatgttgggcaactttt

SEQ ID NO: 2960997 - DNA, 25 bp, Homo sapien
gagctacagagctttaggtaaccca

SEQ ID NO: 2960998 - DNA, 25 bp, Homo sapien
gttttcacggatcttcacgtggcag

SEQ ID NO: 2960999 - DNA, 25 bp, Homo sapien
ctgatgactccttttgtgataggat

SEQ ID NO: 2961000 - DNA, 25 bp, Homo sapien
ggcagtcagaagtatgatccacact

SEQ ID NO: 2961001 - DNA, 25 bp, Homo sapien
tgccatctggagctcgtagaagaac

SEQ ID NO: 2961002 - DNA, 25 bp, Homo sapien
gaggtatattgatctgctgaaggag

SEQ ID NO: 2961003 - DNA, 25 bp, Homo sapien
cactttccatagattcagagccaga

SEQ ID NO: 2961004 - DNA, 25 bp, Homo sapien
atttccaacacctcctgtgtgtaga

SEQ ID NO: 2961005 - DNA, 25 bp, Homo sapien
aacacctcctgtgtgtagaggcgga

SEQ ID NO: 2961006 - DNA, 25 bp, Homo sapien
caagttcaaacatctgaagagggag

SEQ ID NO: 2961007 - DNA, 25 bp, Homo sapien
ggctgtacagacgtcgtctgaggca

SEQ ID NO: 2961008 - DNA, 25 bp, Homo sapien
atcatgtgatttattgaccctccac

SEQ ID NO: 2961009 - DNA, 25 bp, Homo sapien
atgtgatttattgaccctccactgg

SEQ ID NO: 2961010 - DNA, 25 bp, Homo sapien
tgggacaagggggaacagatataac

SEQ ID NO: 2961011 - DNA, 25 bp, Homo sapien
gttgccaaagccatcatgtgattta

SEQ ID NO: 2961012 - DNA, 25 bp, Homo sapien
tgcttctaaatctggtggctgggga

SEQ ID NO: 2961013 - DNA, 25 bp, Homo sapien
tcctgcaaattgtacaattcatttg

SEQ ID NO: 2961014 - DNA, 25 bp, Homo sapien
ctcttgctaattgcctcttactggc

SEQ ID NO: 2961015 - DNA, 25 bp, Homo sapien
catttgaactgaccgaactcttgct

SEQ ID NO: 2961016 - DNA, 25 bp, Homo sapien
gttgggtgttcagagaatccagctc

SEQ ID NO: 2961017 - DNA, 25 bp, Homo sapien
gtgtctttgtttggcagctgcaacc

SEQ ID NO: 2961018 - DNA, 25 bp, Homo sapien
tccagctccacaacagcagaaaggc

SEQ ID NO: 2961019 - DNA, 25 bp, Homo sapien
cgctgtctgagattgcttccctgag

SEQ ID NO: 2961020 - DNA, 25 bp, Homo sapien
tgtgaacaccaatgggtgagtggct

SEQ ID NO: 2961021 - DNA, 25 bp, Homo sapien
gaacaccaatgggtgagtggctaca

SEQ ID NO: 2961022 - DNA, 25 bp, Homo sapien
agctgtgaacaccaatgggtgagtg

SEQ ID NO: 2961023 - DNA, 25 bp, Homo sapien
caccaatgggtgagtggctacagct

SEQ ID NO: 2961024 - DNA, 25 bp, Homo sapien
gatccatctcatttcacgccagact

SEQ ID NO: 2961025 - DNA, 25 bp, Homo sapien
gatgtagaattgatcttctttaggc

SEQ ID NO: 2961026 - DNA, 25 bp, Homo sapien
tatcagcttagtgatgggcaagcca

SEQ ID NO: 2961027 - DNA, 25 bp, Homo sapien
gtatcttgcatactgtagagcatcc

SEQ ID NO: 2961028 - DNA, 25 bp, Homo sapien
gagttaggcccctgggatcatcaag

SEQ ID NO: 2961029 - DNA, 25 bp, Homo sapien
taagggtctgctgcgcaatgtcgtg

SEQ ID NO: 2961030 - DNA, 25 bp, Homo sapien
tgccctcagagagcgatagcgactg

SEQ ID NO: 2961031 - DNA, 25 bp, Homo sapien
tcaggctatggagaaactcggcaca

SEQ ID NO: 2961032 - DNA, 25 bp, Homo sapien
tttctgacatgggagaggcggtggg

SEQ ID NO: 2961033 - DNA, 25 bp, Homo sapien
gtatttctgacatgggagaggcggt

SEQ ID NO: 2961034 - DNA, 25 bp, Homo sapien
tatttctgacatgggagaggcggtg

SEQ ID NO: 2961035 - DNA, 25 bp, Homo sapien
atttctgacatgggagaggcggtgg

SEQ ID NO: 2961036 - DNA, 25 bp, Homo sapien
cgcttgaaaatgagtgggtacacag

SEQ ID NO: 2961037 - DNA, 25 bp, Homo sapien
ggtgatgtaaaacgcaggtagcagc

SEQ ID NO: 2961038 - DNA, 25 bp, Homo sapien
gtaagggtgatgtaaaacgcaggta

SEQ ID NO: 2961039 - DNA, 25 bp, Homo sapien
tttataacattcaaaacgcttgaaa

SEQ ID NO: 2961040 - DNA, 25 bp, Homo sapien
tgatctcctggcaaggacacagtag

SEQ ID NO: 2961041 - DNA, 25 bp, Homo sapien
atgatctcctggcaaggacacagta

SEQ ID NO: 2961042 - DNA, 25 bp, Homo sapien
aggataacaatgaacgagggtccag

SEQ ID NO: 2961043 - DNA, 25 bp, Homo sapien
catgatctcctggcaaggacacagt

SEQ ID NO: 2961044 - DNA, 25 bp, Homo sapien
tgcgttgcagacataccttctcttg

SEQ ID NO: 2961045 - DNA, 25 bp, Homo sapien
tgaacatcttatgagaggtgaccag

SEQ ID NO: 2961046 - DNA, 25 bp, Homo sapien
tttccttgaagatacgaccttgaag

SEQ ID NO: 2961047 - DNA, 25 bp, Homo sapien
ctacatacgaagttgagagagctgt

SEQ ID NO: 2961048 - DNA, 25 bp, Homo sapien
tttgaaaatcagtcactggagggtg

SEQ ID NO: 2961049 - DNA, 25 bp, Homo sapien
gaggagcaaagagccttaactaata

SEQ ID NO: 2961050 - DNA, 25 bp, Homo sapien
caaactgatgcttgtggtcacatac

SEQ ID NO: 2961051 - DNA, 25 bp, Homo sapien
tcacaaggcaagaggcaatacagcg

SEQ ID NO: 2961052 - DNA, 25 bp, Homo sapien
tctgaacaagtaacaaccaataatc

SEQ ID NO: 2961053 - DNA, 25 bp, Homo sapien
gtttacagaggtttaaagcacacaa

SEQ ID NO: 2961054 - DNA, 25 bp, Homo sapien
cacaaaattgtgcagatagcgtact

SEQ ID NO: 2961055 - DNA, 25 bp, Homo sapien
gttgcatacatagcaataagacaca

SEQ ID NO: 2961056 - DNA, 25 bp, Homo sapien
ggaagtcacatttaacacaccatac

SEQ ID NO: 2961057 - DNA, 25 bp, Homo sapien
tttcttgaaaatacacttaggcagg

SEQ ID NO: 2961058 - DNA, 25 bp, Homo sapien
tataaattggtaggttgaagaggca

SEQ ID NO: 2961059 - DNA, 25 bp, Homo sapien
gaaataaagtcattccctctgatag

SEQ ID NO: 2961060 - DNA, 25 bp, Homo sapien
ccccgtgaggaagccctcagctggt

SEQ ID NO: 2961061 - DNA, 25 bp, Homo sapien
tggctcctggtccccgtgaggaagc

SEQ ID NO: 2961062 - DNA, 25 bp, Homo sapien
gaggaagccctcagctggtaaggag

SEQ ID NO: 2961063 - DNA, 25 bp, Homo sapien
tggtccccgtgaggaagccctcagc

SEQ ID NO: 2961064 - DNA, 25 bp, Homo sapien
tcagggttcagggacgatttccaga

SEQ ID NO: 2961065 - DNA, 25 bp, Homo sapien
tctgaatgagagctcacgaggtgcc

SEQ ID NO: 2961066 - DNA, 25 bp, Homo sapien
cactggctgacactacagaaatgag

SEQ ID NO: 2961067 - DNA, 25 bp, Homo sapien
ttccagaggcgggagaactctctga

SEQ ID NO: 2961068 - DNA, 25 bp, Homo sapien
gagacattccagagtcaccgaagcc

SEQ ID NO: 2961069 - DNA, 25 bp, Homo sapien
tgctggtgcccctgccatttataga

SEQ ID NO: 2961070 - DNA, 25 bp, Homo sapien
tccaaacattctagcaggaagagac

SEQ ID NO: 2961071 - DNA, 25 bp, Homo sapien
tctcatagccgaggacaggcagagc

SEQ ID NO: 2961072 - DNA, 25 bp, Homo sapien
ttcaacgtcatttggatcctggctg

SEQ ID NO: 2961073 - DNA, 25 bp, Homo sapien
gaatgttggtctcaggagttggtct

SEQ ID NO: 2961074 - DNA, 25 bp, Homo sapien
agtggaattcaacgtcatttggatc

SEQ ID NO: 2961075 - DNA, 25 bp, Homo sapien
acagaagtggaattcaacgtcattt

SEQ ID NO: 2961076 - DNA, 25 bp, Homo sapien
tcaaataagggtcatggcttgtggc

SEQ ID NO: 2961077 - DNA, 25 bp, Homo sapien
tgtggcccatcctcaggcaaatcaa

SEQ ID NO: 2961078 - DNA, 25 bp, Homo sapien
tggcttgtggcccatcctcaggcaa

SEQ ID NO: 2961079 - DNA, 25 bp, Homo sapien
aataagggtcatggcttgtggccca

SEQ ID NO: 2961080 - DNA, 25 bp, Homo sapien
taaataatggagatgctaacacagt

SEQ ID NO: 2961081 - DNA, 25 bp, Homo sapien
cctgggggtaaataatggagatgct

SEQ ID NO: 2961082 - DNA, 25 bp, Homo sapien
gggtaaataatggagatgctaacac

SEQ ID NO: 2961083 - DNA, 25 bp, Homo sapien
gggggtaaataatggagatgctaac

SEQ ID NO: 2961084 - DNA, 25 bp, Homo sapien
agtcaagcatataccacgatggtgg

SEQ ID NO: 2961085 - DNA, 25 bp, Homo sapien
gtcaagcatataccacgatggtgga

SEQ ID NO: 2961086 - DNA, 25 bp, Homo sapien
ggagtcaagcatataccacgatggt

SEQ ID NO: 2961087 - DNA, 25 bp, Homo sapien
gagtcaagcatataccacgatggtg

SEQ ID NO: 2961088 - DNA, 25 bp, Homo sapien
gagaatgagacgattctgcttttgt

SEQ ID NO: 2961089 - DNA, 25 bp, Homo sapien
ctggagaatgagacgattctgcttt

SEQ ID NO: 2961090 - DNA, 25 bp, Homo sapien
cactggagaatgagacgattctgct

SEQ ID NO: 2961091 - DNA, 25 bp, Homo sapien
ggagaatgagacgattctgcttttg

SEQ ID NO: 2961092 - DNA, 25 bp, Homo sapien
tagtcagtggatcatggatgagaaa

SEQ ID NO: 2961093 - DNA, 25 bp, Homo sapien
gtcagtggatcatggatgagaaatg

SEQ ID NO: 2961094 - DNA, 25 bp, Homo sapien
tcagtggatcatggatgagaaatgg

SEQ ID NO: 2961095 - DNA, 25 bp, Homo sapien
atagtcagtggatcatggatgagaa

SEQ ID NO: 2961096 - DNA, 25 bp, Homo sapien
gacgcagcccaatgcaagagcttct

SEQ ID NO: 2961097 - DNA, 25 bp, Homo sapien
ttttcccagcctgaatgacgcagcc

SEQ ID NO: 2961098 - DNA, 25 bp, Homo sapien
agtcacaattgtccagataaccagg

SEQ ID NO: 2961099 - DNA, 25 bp, Homo sapien
gataaccaggtcaaaggtgcacctt

SEQ ID NO: 2961100 - DNA, 25 bp, Homo sapien
gaaacttgaaaggtgagctgacagc

SEQ ID NO: 2961101 - DNA, 25 bp, Homo sapien
gctattttcccgaaggtctccaggc

SEQ ID NO: 2961102 - DNA, 25 bp, Homo sapien
ggtaaatcggtctctggtctcagtg

SEQ ID NO: 2961103 - DNA, 25 bp, Homo sapien
tttcacaagaatgcgtgcagcacct

SEQ ID NO: 2961104 - DNA, 25 bp, Homo sapien
tggcaccggtttgtctgtctcgcag

SEQ ID NO: 2961105 - DNA, 25 bp, Homo sapien
gtttgtctgtctcgcagggtccaag

SEQ ID NO: 2961106 - DNA, 25 bp, Homo sapien
gcgtccgcgcacgttggcaccggtt

SEQ ID NO: 2961107 - DNA, 25 bp, Homo sapien
cgcgcacgttggcaccggtttgtct

SEQ ID NO: 2961108 - DNA, 25 bp, Homo sapien
ccgcggctgggcatccgaaattact

SEQ ID NO: 2961109 - DNA, 25 bp, Homo sapien
aaaggcacacaagttggccgcaact

SEQ ID NO: 2961110 - DNA, 25 bp, Homo sapien
cgctctgtgcaagcgccgctggctg

SEQ ID NO: 2961111 - DNA, 25 bp, Homo sapien
agcatgagccgccgggagagccctt

SEQ ID NO: 2961112 - DNA, 25 bp, Homo sapien
cacggagcacgagcgcttactgaag

SEQ ID NO: 2961113 - DNA, 25 bp, Homo sapien
tgcacggacttggacggcttgcaca

SEQ ID NO: 2961114 - DNA, 25 bp, Homo sapien
agcacttgcactcggaaatgatggg

SEQ ID NO: 2961115 - DNA, 25 bp, Homo sapien
atgaagcctgggtcgtagtggcccc

SEQ ID NO: 2961116 - DNA, 25 bp, Homo sapien
gttcattgaaaaccctcgctagagg

SEQ ID NO: 2961117 - DNA, 25 bp, Homo sapien
gctaggtctctgtagcccagaaaaa

SEQ ID NO: 2961118 - DNA, 25 bp, Homo sapien
aaactgggaccgtatatacacacac

SEQ ID NO: 2961119 - DNA, 25 bp, Homo sapien
cacagttaaacagtgcattacagga

SEQ ID NO: 2961120 - DNA, 25 bp, Homo sapien
catgcgaagggcactggaatataaa

SEQ ID NO: 2961121 - DNA, 25 bp, Homo sapien
tcccccgtctctttgtacttcaaga

SEQ ID NO: 2961122 - DNA, 25 bp, Homo sapien
cactttccgaagaatggaaaatagc

SEQ ID NO: 2961123 - DNA, 25 bp, Homo sapien
cctgcttcgccatgcgaagggcact

SEQ ID NO: 2961124 - DNA, 25 bp, Homo sapien
gcttggagtcttaaggtagccgaca

SEQ ID NO: 2961125 - DNA, 25 bp, Homo sapien
gggcacagaaagttttgcataaatt

SEQ ID NO: 2961126 - DNA, 25 bp, Homo sapien
ggacggcagttcataaacttaaaca

SEQ ID NO: 2961127 - DNA, 25 bp, Homo sapien
gaatggctgattttaacgttatttg

SEQ ID NO: 2961128 - DNA, 25 bp, Homo sapien
cctctgagaggtgggtcaggtttta

SEQ ID NO: 2961129 - DNA, 25 bp, Homo sapien
tataattgccagcacacctctgaga

SEQ ID NO: 2961130 - DNA, 25 bp, Homo sapien
cagcacacctctgagaggtgggtca

SEQ ID NO: 2961131 - DNA, 25 bp, Homo sapien
cagtcaccagccctataattgccag

SEQ ID NO: 2961132 - DNA, 25 bp, Homo sapien
ttttgatgaagggacacgaggccct

SEQ ID NO: 2961133 - DNA, 25 bp, Homo sapien
ccagaggcatagaggatgtttctta

SEQ ID NO: 2961134 - DNA, 25 bp, Homo sapien
ccagttttgatgaagggacacgagg

SEQ ID NO: 2961135 - DNA, 25 bp, Homo sapien
cttatcgctccaagctctgcactgg

SEQ ID NO: 2961136 - DNA, 25 bp, Homo sapien
tggcatacatggaacaagggtctcg

SEQ ID NO: 2961137 - DNA, 25 bp, Homo sapien
catggaacaagggtctcggagtctg

SEQ ID NO: 2961138 - DNA, 25 bp, Homo sapien
gcatacatggaacaagggtctcgga

SEQ ID NO: 2961139 - DNA, 25 bp, Homo sapien
ctccatcagccacacccaagtcatc

SEQ ID NO: 2961140 - DNA, 25 bp, Homo sapien
gatgaagctagttacttcttgggtg

SEQ ID NO: 2961141 - DNA, 25 bp, Homo sapien
cctgagtttgttgaaggagttgggc

SEQ ID NO: 2961142 - DNA, 25 bp, Homo sapien
gctagttacttcttgggtgacctgg

SEQ ID NO: 2961143 - DNA, 25 bp, Homo sapien
ttataggatgaagctagttacttct

SEQ ID NO: 2961144 - DNA, 25 bp, Homo sapien
tggaagtgaagagatagctggcatt

SEQ ID NO: 2961145 - DNA, 25 bp, Homo sapien
ccccagcacctaggaggatggaagt

SEQ ID NO: 2961146 - DNA, 25 bp, Homo sapien
gtgaagagatagctggcattggatt

SEQ ID NO: 2961147 - DNA, 25 bp, Homo sapien
cagcacctaggaggatggaagtgaa

SEQ ID NO: 2961148 - DNA, 25 bp, Homo sapien
cttcaaggtagtaatatttggactg

SEQ ID NO: 2961149 - DNA, 25 bp, Homo sapien
ttcaaggtagtaatatttggactgg

SEQ ID NO: 2961150 - DNA, 25 bp, Homo sapien
tcaaggtagtaatatttggactggg

SEQ ID NO: 2961151 - DNA, 25 bp, Homo sapien
gggcatccagtctggtccatcaggt

SEQ ID NO: 2961152 - DNA, 25 bp, Homo sapien
gcatccagtctggtccatcaggtcc

SEQ ID NO: 2961153 - DNA, 25 bp, Homo sapien
ggcatccagtctggtccatcaggtc

SEQ ID NO: 2961154 - DNA, 25 bp, Homo sapien
gcagcaggctgtgcggaggacagga

SEQ ID NO: 2961155 - DNA, 25 bp, Homo sapien
caggctgtgcggaggacaggatttg

SEQ ID NO: 2961156 - DNA, 25 bp, Homo sapien
tgcggaggacaggatttggcccccc

SEQ ID NO: 2961157 - DNA, 25 bp, Homo sapien
gctgtgcggaggacaggatttggcc

SEQ ID NO: 2961158 - DNA, 25 bp, Homo sapien
gttcataatcaactaactcaggctg

SEQ ID NO: 2961159 - DNA, 25 bp, Homo sapien
tcctaccagtctctggaaccacagt

SEQ ID NO: 2961160 - DNA, 25 bp, Homo sapien
ttaagtggcctttgtcagctgggaa

SEQ ID NO: 2961161 - DNA, 25 bp, Homo sapien
aagattgactaggtcctcctaccag

SEQ ID NO: 2961162 - DNA, 25 bp, Homo sapien
tgcagccgcgtgtattactaagtgg

SEQ ID NO: 2961163 - DNA, 25 bp, Homo sapien
tactaagtggtgtccaaaatctcca

SEQ ID NO: 2961164 - DNA, 25 bp, Homo sapien
tccaggagaagtgcaaaagaagtct

SEQ ID NO: 2961165 - DNA, 25 bp, Homo sapien
tggaccaccttccaatccgcagagg

SEQ ID NO: 2961166 - DNA, 25 bp, Homo sapien
tctctcttccaatcagatgagcgga

SEQ ID NO: 2961167 - DNA, 25 bp, Homo sapien
ccaatgacactaggtgggccacgtg

SEQ ID NO: 2961168 - DNA, 25 bp, Homo sapien
aagcatgtttgtaccaagtgtggac

SEQ ID NO: 2961169 - DNA, 25 bp, Homo sapien
tagaattcacccaatgactttgcgc

SEQ ID NO: 2961170 - DNA, 25 bp, Homo sapien
ttctgctgggacttcatgaagatgc

SEQ ID NO: 2961171 - DNA, 25 bp, Homo sapien
gagtcacttgaggttgtcctgccca

SEQ ID NO: 2961172 - DNA, 25 bp, Homo sapien
cctgtggcctctttgcgggtctgac

SEQ ID NO: 2961173 - DNA, 25 bp, Homo sapien
tctttgcgggtctgacccttctgct

SEQ ID NO: 2961174 - DNA, 25 bp, Homo sapien
cattggcttctaggaagccatcgca

SEQ ID NO: 2961175 - DNA, 25 bp, Homo sapien
ggactgcattggcttctaggaagcc

SEQ ID NO: 2961176 - DNA, 25 bp, Homo sapien
cttctaggaagccatcgcatgccat

SEQ ID NO: 2961177 - DNA, 25 bp, Homo sapien
gaggactgcattggcttctaggaag

SEQ ID NO: 2961178 - DNA, 25 bp, Homo sapien
ctctctgagggcaagcatcaggcct

SEQ ID NO: 2961179 - DNA, 25 bp, Homo sapien
gagctgttttacacttaggcctcag

SEQ ID NO: 2961180 - DNA, 25 bp, Homo sapien
taatatagttggttgtaagctctct

SEQ ID NO: 2961181 - DNA, 25 bp, Homo sapien
cagaaaggcttctgccactagaaca

SEQ ID NO: 2961182 - DNA, 25 bp, Homo sapien
aatacacacagaccgctcgtggagc

SEQ ID NO: 2961183 - DNA, 25 bp, Homo sapien
aaatacacacagaccgctcgtggag

SEQ ID NO: 2961184 - DNA, 25 bp, Homo sapien
acacacagaccgctcgtggagcact

SEQ ID NO: 2961185 - DNA, 25 bp, Homo sapien
acagaccgctcgtggagcactgcgg

SEQ ID NO: 2961186 - DNA, 25 bp, Homo sapien
ggcagggcacagttcccatcagagt

SEQ ID NO: 2961187 - DNA, 25 bp, Homo sapien
tcagagtcaattagcaggcccacag

SEQ ID NO: 2961188 - DNA, 25 bp, Homo sapien
tgaagtgatggaggtgagatctata

SEQ ID NO: 2961189 - DNA, 25 bp, Homo sapien
acagcccccgatgtgaggtcaggaa

SEQ ID NO: 2961190 - DNA, 25 bp, Homo sapien
aatagctctttctctggcttggagg

SEQ ID NO: 2961191 - DNA, 25 bp, Homo sapien
ggcttggaggcatccttcttttcct

SEQ ID NO: 2961192 - DNA, 25 bp, Homo sapien
cctctataaatagctctttctctgg

SEQ ID NO: 2961193 - DNA, 25 bp, Homo sapien
tgtcctctataaatagctctttctc

SEQ ID NO: 2961194 - DNA, 25 bp, Homo sapien
ttcctgaagcacgtccagggcagct

SEQ ID NO: 2961195 - DNA, 25 bp, Homo sapien
attcctgaagcacgtccagggcagc

SEQ ID NO: 2961196 - DNA, 25 bp, Homo sapien
tcctgaagcacgtccagggcagctg

SEQ ID NO: 2961197 - DNA, 25 bp, Homo sapien
caataggcgtctgaatctgatttat

SEQ ID NO: 2961198 - DNA, 25 bp, Homo sapien
tgtgtccagaacaataggcgtctga

SEQ ID NO: 2961199 - DNA, 25 bp, Homo sapien
cctgcaattgattctgactgtgtcc

SEQ ID NO: 2961200 - DNA, 25 bp, Homo sapien
tctgactgtgtccagaacaataggc

SEQ ID NO: 2961201 - DNA, 25 bp, Homo sapien
gaacgtgcattctacctggtactct

SEQ ID NO: 2961202 - DNA, 25 bp, Homo sapien
gctgccaacagtgcttttgtcttct

SEQ ID NO: 2961203 - DNA, 25 bp, Homo sapien
aaggtctctgagaagaacgtgcatt

SEQ ID NO: 2961204 - DNA, 25 bp, Homo sapien
tggtactcttcaatcaatacagcat

SEQ ID NO: 2961205 - DNA, 25 bp, Homo sapien
catggctataacttgttgtggtccc

SEQ ID NO: 2961206 - DNA, 25 bp, Homo sapien
tgtggtcccagttatacaaccaact

SEQ ID NO: 2961207 - DNA, 25 bp, Homo sapien
tgttgtggtcccagttatacaacca

SEQ ID NO: 2961208 - DNA, 25 bp, Homo sapien
aatttaacttgcacatggctataac

SEQ ID NO: 2961209 - DNA, 25 bp, Homo sapien
taaaggctgcgtagactcaggagcc

SEQ ID NO: 2961210 - DNA, 25 bp, Homo sapien
gagccatgatcgtgtatgtgcgtgc

SEQ ID NO: 2961211 - DNA, 25 bp, Homo sapien
tcagagttgtgagtgaacagtgtgg

SEQ ID NO: 2961212 - DNA, 25 bp, Homo sapien
tatgtgcgtgcacttgacaggccag

SEQ ID NO: 2961213 - DNA, 25 bp, Homo sapien
ttgccatccatccgagaagatggtg

SEQ ID NO: 2961214 - DNA, 25 bp, Homo sapien
tttgccatccatccgagaagatggt

SEQ ID NO: 2961215 - DNA, 25 bp, Homo sapien
ctttgccatccatccgagaagatgg

SEQ ID NO: 2961216 - DNA, 25 bp, Homo sapien
cctgagtcctgctggaatgggtgta

SEQ ID NO: 2961217 - DNA, 25 bp, Homo sapien
ctgagtcctgctggaatgggtgtaa

SEQ ID NO: 2961218 - DNA, 25 bp, Homo sapien
tgagtcctgctggaatgggtgtaac

SEQ ID NO: 2961219 - DNA, 25 bp, Homo sapien
aggcctgtgggacgttgtcttcact

SEQ ID NO: 2961220 - DNA, 25 bp, Homo sapien
cctgtgggacgttgtcttcactgta

SEQ ID NO: 2961221 - DNA, 25 bp, Homo sapien
tgcatctgaattttatcttgcttac

SEQ ID NO: 2961222 - DNA, 25 bp, Homo sapien
atcttgcttactgtacttgatggtc

SEQ ID NO: 2961223 - DNA, 25 bp, Homo sapien
tcccggggcccatgaaggcaaatga

SEQ ID NO: 2961224 - DNA, 25 bp, Homo sapien
tgtctgatggctggagcgttcctgc

SEQ ID NO: 2961225 - DNA, 25 bp, Homo sapien
aaatgagctccctttaaaggcacat

SEQ ID NO: 2961226 - DNA, 25 bp, Homo sapien
ttgatgatttccttgcccgccaagg

SEQ ID NO: 2961227 - DNA, 25 bp, Homo sapien
atttagtgtttgaagatttggagcc

SEQ ID NO: 2961228 - DNA, 25 bp, Homo sapien
gatttggagcctgctacccagttga

SEQ ID NO: 2961229 - DNA, 25 bp, Homo sapien
tttgaagatttggagcctgctaccc

SEQ ID NO: 2961230 - DNA, 25 bp, Homo sapien
ttggagcctgctacccagttgaccc

SEQ ID NO: 2961231 - DNA, 25 bp, Homo sapien
taccagattcgagggacagctgact

SEQ ID NO: 2961232 - DNA, 25 bp, Homo sapien
cattatatttaccagattcgaggga

SEQ ID NO: 2961233 - DNA, 25 bp, Homo sapien
tgagttggagcgcattatatttacc

SEQ ID NO: 2961234 - DNA, 25 bp, Homo sapien
tatttacatgtgtcatgagttggag

SEQ ID NO: 2961235 - DNA, 25 bp, Homo sapien
gtgtttctatgaacgctgctgttct

SEQ ID NO: 2961236 - DNA, 25 bp, Homo sapien
ttctatgaacgctgctgttctgtgg

SEQ ID NO: 2961237 - DNA, 25 bp, Homo sapien
ttgtggtgtgtttctatgaacgctg

SEQ ID NO: 2961238 - DNA, 25 bp, Homo sapien
tggtgtgtttctatgaacgctgctg

SEQ ID NO: 2961239 - DNA, 25 bp, Homo sapien
tatatggctgctttgagtggacaca

SEQ ID NO: 2961240 - DNA, 25 bp, Homo sapien
tcacaattaatgatgccagccggct

SEQ ID NO: 2961241 - DNA, 25 bp, Homo sapien
ccggcttctccggatggatataaat

SEQ ID NO: 2961242 - DNA, 25 bp, Homo sapien
tccatattaggcttgatactcgata

SEQ ID NO: 2961243 - DNA, 25 bp, Homo sapien
ccacaagttgccttccttttgcgac

SEQ ID NO: 2961244 - DNA, 25 bp, Homo sapien
gttgccttccttttgcgacagccag

SEQ ID NO: 2961245 - DNA, 25 bp, Homo sapien
gccagaattactgccgcctgtcctg

SEQ ID NO: 2961246 - DNA, 25 bp, Homo sapien
agccagaattactgccgcctgtcct

SEQ ID NO: 2961247 - DNA, 25 bp, Homo sapien
ctgggaaataggaagtgacgttttg

SEQ ID NO: 2961248 - DNA, 25 bp, Homo sapien
tttggatgcgctattgcaccttctt

SEQ ID NO: 2961249 - DNA, 25 bp, Homo sapien
gacgttttggatgcgctattgcacc

SEQ ID NO: 2961250 - DNA, 25 bp, Homo sapien
taggaagtgacgttttggatgcgct

SEQ ID NO: 2961251 - DNA, 25 bp, Homo sapien
ctgggttggaaggtacttggatgcc

SEQ ID NO: 2961252 - DNA, 25 bp, Homo sapien
agatggcatcgccaggttgttgtga

SEQ ID NO: 2961253 - DNA, 25 bp, Homo sapien
ttcgccttgacttgcggacctgggt

SEQ ID NO: 2961254 - DNA, 25 bp, Homo sapien
tggatgccacagcagagttgggttt

SEQ ID NO: 2961255 - DNA, 25 bp, Homo sapien
ttgtccctgtttaagttggagagaa

SEQ ID NO: 2961256 - DNA, 25 bp, Homo sapien
gagagaagcctgacactggccatca

SEQ ID NO: 2961257 - DNA, 25 bp, Homo sapien
ttggagagaagcctgacactggcca

SEQ ID NO: 2961258 - DNA, 25 bp, Homo sapien
tgtccctgtttaagttggagagaag

SEQ ID NO: 2961259 - DNA, 25 bp, Homo sapien
gcacagctgcactcagcggcttcct

SEQ ID NO: 2961260 - DNA, 25 bp, Homo sapien
tgcagcacatcagctacccggagaa

SEQ ID NO: 2961261 - DNA, 25 bp, Homo sapien
gacgcggaagcaccgctgctcagca

SEQ ID NO: 2961262 - DNA, 25 bp, Homo sapien
cagcacccccgaagaaacacggaat

SEQ ID NO: 2961263 - DNA, 25 bp, Homo sapien
cgcctcgcgcaggaggagaacgacg

SEQ ID NO: 2961264 - DNA, 25 bp, Homo sapien
gggaaacgcttaaggctccagccgc

SEQ ID NO: 2961265 - DNA, 25 bp, Homo sapien
gccagcagggatgaagccgggcggg

SEQ ID NO: 2961266 - DNA, 25 bp, Homo sapien
ggaggagaacgacgctgggccgcca

SEQ ID NO: 2961267 - DNA, 25 bp, Homo sapien
cgtccaggagcccaaggcggctgct

SEQ ID NO: 2961268 - DNA, 25 bp, Homo sapien
cgccgcctcaccttgccgccggtct

SEQ ID NO: 2961269 - DNA, 25 bp, Homo sapien
accttgccgccggtctgacccacgg

SEQ ID NO: 2961270 - DNA, 25 bp, Homo sapien
tgccgccggtctgacccacggaagg

SEQ ID NO: 2961271 - DNA, 25 bp, Homo sapien
tacaccagaaggtgatgaacaccgg

SEQ ID NO: 2961272 - DNA, 25 bp, Homo sapien
cggaagatgtccctgcggtgcagct

SEQ ID NO: 2961273 - DNA, 25 bp, Homo sapien
cataatctccttgcactggaagcgc

SEQ ID NO: 2961274 - DNA, 25 bp, Homo sapien
cgcaaagcttgggttgacagccaca

SEQ ID NO: 2961275 - DNA, 25 bp, Homo sapien
tcctgattcccacggcgcattctgg

SEQ ID NO: 2961276 - DNA, 25 bp, Homo sapien
attcccacggcgcattctgggacag

SEQ ID NO: 2961277 - DNA, 25 bp, Homo sapien
ccacggcgcattctgggacagtgag

SEQ ID NO: 2961278 - DNA, 25 bp, Homo sapien
ggacagtgagtgtccacgaagacca

SEQ ID NO: 2961279 - DNA, 25 bp, Homo sapien
gacccatcagttttgcggctgaagg

SEQ ID NO: 2961280 - DNA, 25 bp, Homo sapien
gatgtccagacttaaggctcaaagg

SEQ ID NO: 2961281 - DNA, 25 bp, Homo sapien
tacatgtcctgaaagaccaagcgtc

SEQ ID NO: 2961282 - DNA, 25 bp, Homo sapien
cagagtggacctaacgggctttaat

SEQ ID NO: 2961283 - DNA, 25 bp, Homo sapien
tacgcatctgattaatggatgttaa

SEQ ID NO: 2961284 - DNA, 25 bp, Homo sapien
ttttttgtctttacgcatctgatta

SEQ ID NO: 2961285 - DNA, 25 bp, Homo sapien
tttttcatgcactcatcatgtactg

SEQ ID NO: 2961286 - DNA, 25 bp, Homo sapien
aaataacttggtggaatgattaggt

SEQ ID NO: 2961287 - DNA, 25 bp, Homo sapien
aaattgccatgagtgaaaaggttta

SEQ ID NO: 2961288 - DNA, 25 bp, Homo sapien
ttccatgccttgagaacaatggtgc

SEQ ID NO: 2961289 - DNA, 25 bp, Homo sapien
tctagataagtcatccagcatatgc

SEQ ID NO: 2961290 - DNA, 25 bp, Homo sapien
gcacactcacataaggaactcacta

SEQ ID NO: 2961291 - DNA, 25 bp, Homo sapien
caagatcctaaattctcccaacagt

SEQ ID NO: 2961292 - DNA, 25 bp, Homo sapien
cactacgagagttggccaggattat

SEQ ID NO: 2961293 - DNA, 25 bp, Homo sapien
cactgctttccaagcttagaggcta

SEQ ID NO: 2961294 - DNA, 25 bp, Homo sapien
ctggactggattcaacaagatccta

SEQ ID NO: 2961295 - DNA, 25 bp, Homo sapien
tctagacaagtcacataagtggagt

SEQ ID NO: 2961296 - DNA, 25 bp, Homo sapien
tatccataattctgtcaacgaccct

SEQ ID NO: 2961297 - DNA, 25 bp, Homo sapien
taagttcactgaattgcacaaccac

SEQ ID NO: 2961298 - DNA, 25 bp, Homo sapien
gagacagtgttacctttcaacagta

SEQ ID NO: 2961299 - DNA, 25 bp, Homo sapien
ggagaagagtacagagttgtagggc

SEQ ID NO: 2961300 - DNA, 25 bp, Homo sapien
tcttcatgtcatcaactgcatccag

SEQ ID NO: 2961301 - DNA, 25 bp, Homo sapien
caagtactcgagctgaataatatgg

SEQ ID NO: 2961302 - DNA, 25 bp, Homo sapien
tgataggaggagttttagttacatc

SEQ ID NO: 2961303 - DNA, 25 bp, Homo sapien
ggatagatcgttgcctgttcccaga

SEQ ID NO: 2961304 - DNA, 25 bp, Homo sapien
tgtaccccaacccaatgtattggat

SEQ ID NO: 2961305 - DNA, 25 bp, Homo sapien
cattacatttcgcaaaacctgcgca

SEQ ID NO: 2961306 - DNA, 25 bp, Homo sapien
aacctgcgcaactggaatttctcca

SEQ ID NO: 2961307 - DNA, 25 bp, Homo sapien
tgtagtatcctttatttgttacttg

SEQ ID NO: 2961308 - DNA, 25 bp, Homo sapien
cttaagttgtagtatcctttatttg

SEQ ID NO: 2961309 - DNA, 25 bp, Homo sapien
atggggtcttatctgcactctgtca

SEQ ID NO: 2961310 - DNA, 25 bp, Homo sapien
caatgaacatggcagcatggacatc

SEQ ID NO: 2961311 - DNA, 25 bp, Homo sapien
cctccatattgtttcccaaaatggt

SEQ ID NO: 2961312 - DNA, 25 bp, Homo sapien
tggacatctgtttgatatactgatt

SEQ ID NO: 2961313 - DNA, 25 bp, Homo sapien
tctgcatcttggctattgtacataa

SEQ ID NO: 2961314 - DNA, 25 bp, Homo sapien
aattgagagccatgagagcatcagg

SEQ ID NO: 2961315 - DNA, 25 bp, Homo sapien
tattaagaattctgctagaaaacag

SEQ ID NO: 2961316 - DNA, 25 bp, Homo sapien
tggtgccttctcacgatgagcatga

SEQ ID NO: 2961317 - DNA, 25 bp, Homo sapien
gcatcaggtccaacagaaaaatagt

SEQ ID NO: 2961318 - DNA, 25 bp, Homo sapien
tggttccatagaataagtaaaccgc

SEQ ID NO: 2961319 - DNA, 25 bp, Homo sapien
aatctttacattcttgcactaaaca

SEQ ID NO: 2961320 - DNA, 25 bp, Homo sapien
cactaaacaatctttggttccatag

SEQ ID NO: 2961321 - DNA, 25 bp, Homo sapien
cattcttgcactaaacaatctttgg

SEQ ID NO: 2961322 - DNA, 25 bp, Homo sapien
taataccttccaagctgggcagtgc

SEQ ID NO: 2961323 - DNA, 25 bp, Homo sapien
accgccccagtatccgatgttcaga

SEQ ID NO: 2961324 - DNA, 25 bp, Homo sapien
agtgctactcgctcaccatccagtt

SEQ ID NO: 2961325 - DNA, 25 bp, Homo sapien
tggctagagggtaagtctcgtcccc

SEQ ID NO: 2961326 - DNA, 25 bp, Homo sapien
ggaaagacccatatactccaacgac

SEQ ID NO: 2961327 - DNA, 25 bp, Homo sapien
cctattcgaaaaggattagccagtt

SEQ ID NO: 2961328 - DNA, 25 bp, Homo sapien
aatctgagcacagtggaaagaccca

SEQ ID NO: 2961329 - DNA, 25 bp, Homo sapien
gacttccagcagaccatcgtcatgc

SEQ ID NO: 2961330 - DNA, 25 bp, Homo sapien
tccacctgcattggcatcatggagc

SEQ ID NO: 2961331 - DNA, 25 bp, Homo sapien
tcttgtgagttatggtgacagtgca

SEQ ID NO: 2961332 - DNA, 25 bp, Homo sapien
aacatcattgcatgtgtcttgtgag

SEQ ID NO: 2961333 - DNA, 25 bp, Homo sapien
cttgatccgaagtactagagatgtc

SEQ ID NO: 2961334 - DNA, 25 bp, Homo sapien
gaacatgtatctacttgcgtgagga

SEQ ID NO: 2961335 - DNA, 25 bp, Homo sapien
tgagacagcacatacttcagagtga

SEQ ID NO: 2961336 - DNA, 25 bp, Homo sapien
gaattgcagctcaaatggttaccta

SEQ ID NO: 2961337 - DNA, 25 bp, Homo sapien
gctgcaggaggatgctcacaattaa

SEQ ID NO: 2961338 - DNA, 25 bp, Homo sapien
tagaccctcaaagatagctaatggt

SEQ ID NO: 2961339 - DNA, 25 bp, Homo sapien
gcagcgaacaagcaccctctaatgg

SEQ ID NO: 2961340 - DNA, 25 bp, Homo sapien
cagttatccaaaagtagttccctag

SEQ ID NO: 2961341 - DNA, 25 bp, Homo sapien
taatgggaaccatgaaactagccct

SEQ ID NO: 2961342 - DNA, 25 bp, Homo sapien
gaccagtagtgatgcaaaaacctta

SEQ ID NO: 2961343 - DNA, 25 bp, Homo sapien
ttggtaaagtgtagaatccctggta

SEQ ID NO: 2961344 - DNA, 25 bp, Homo sapien
gaaaaacttcatgacagaccagtag

SEQ ID NO: 2961345 - DNA, 25 bp, Homo sapien
taaatgtgcccaaaaagtaagtgaa

SEQ ID NO: 2961346 - DNA, 25 bp, Homo sapien
tggccacattctaaacagcgacgga

SEQ ID NO: 2961347 - DNA, 25 bp, Homo sapien
tgcagcgcgtactctgaagaacaag

SEQ ID NO: 2961348 - DNA, 25 bp, Homo sapien
tatgcttaagaatcgcctgaggcgc

SEQ ID NO: 2961349 - DNA, 25 bp, Homo sapien
gaggcgcactgcactaactcctgaa

SEQ ID NO: 2961350 - DNA, 25 bp, Homo sapien
caaagctgcttattgtatctcatgg

SEQ ID NO: 2961351 - DNA, 25 bp, Homo sapien
gctgtagaccaagaaccactttttg

SEQ ID NO: 2961352 - DNA, 25 bp, Homo sapien
tgccacatatatgtttgccctgctg

SEQ ID NO: 2961353 - DNA, 25 bp, Homo sapien
tttgggacactaagtcaaagctgct

SEQ ID NO: 2961354 - DNA, 25 bp, Homo sapien
taagcacttgcaacccgtaggtggg

SEQ ID NO: 2961355 - DNA, 25 bp, Homo sapien
catgtgctccagtttaccgaagtct

SEQ ID NO: 2961356 - DNA, 25 bp, Homo sapien
aataaattgtttacactaggcctgc

SEQ ID NO: 2961357 - DNA, 25 bp, Homo sapien
tagaggctgggtttccattcaggta

SEQ ID NO: 2961358 - DNA, 25 bp, Homo sapien
tgggttcaatctctagctccgggct

SEQ ID NO: 2961359 - DNA, 25 bp, Homo sapien
aattcctcagacagccgcataagcc

SEQ ID NO: 2961360 - DNA, 25 bp, Homo sapien
taagccctagtcctagtgctcagaa

SEQ ID NO: 2961361 - DNA, 25 bp, Homo sapien
tggcctatgtgtgaacatcagcagc

SEQ ID NO: 2961362 - DNA, 25 bp, Homo sapien
tccttgttcaggggccatgctaacc

SEQ ID NO: 2961363 - DNA, 25 bp, Homo sapien
ttgttcaggggccatgctaaccttc

SEQ ID NO: 2961364 - DNA, 25 bp, Homo sapien
aaaatatggaacatttcatgaattt

SEQ ID NO: 2961365 - DNA, 25 bp, Homo sapien
tgttcaggggccatgctaaccttct

SEQ ID NO: 2961366 - DNA, 25 bp, Homo sapien
ctccctccagttgtctgagggtttc

SEQ ID NO: 2961367 - DNA, 25 bp, Homo sapien
cctccctccagttgtctgagggttt

SEQ ID NO: 2961368 - DNA, 25 bp, Homo sapien
catggtcaagatttagtatcagttt

SEQ ID NO: 2961369 - DNA, 25 bp, Homo sapien
attacctaaatcatggtcaagattt

SEQ ID NO: 2961370 - DNA, 25 bp, Homo sapien
ttaattggagtctcggaggccctcc

SEQ ID NO: 2961371 - DNA, 25 bp, Homo sapien
tctcggaggccctccaagttggctg

SEQ ID NO: 2961372 - DNA, 25 bp, Homo sapien
tgcaaaattctgctgtatgcgccaa

SEQ ID NO: 2961373 - DNA, 25 bp, Homo sapien
aaattctgctgtatgcgccaaactg

SEQ ID NO: 2961374 - DNA, 25 bp, Homo sapien
ctgtcatttggaccgacgtggcagt

SEQ ID NO: 2961375 - DNA, 25 bp, Homo sapien
tcatttggaccgacgtggcagtctg

SEQ ID NO: 2961376 - DNA, 25 bp, Homo sapien
agtacttggctgtcatttggaccga

SEQ ID NO: 2961377 - DNA, 25 bp, Homo sapien
ttggctgtcatttggaccgacgtgg

SEQ ID NO: 2961378 - DNA, 25 bp, Homo sapien
cagtaaccagtaactgggttcagca

SEQ ID NO: 2961379 - DNA, 25 bp, Homo sapien
tggagggcagccagtaaccagtaac

SEQ ID NO: 2961380 - DNA, 25 bp, Homo sapien
tctggagggcagccagtaaccagta

SEQ ID NO: 2961381 - DNA, 25 bp, Homo sapien
ctggagggcagccagtaaccagtaa

SEQ ID NO: 2961382 - DNA, 25 bp, Homo sapien
ggcagtgtgccctaattccacgaag

SEQ ID NO: 2961383 - DNA, 25 bp, Homo sapien
taaagcggtgtttggcgttctcctg

SEQ ID NO: 2961384 - DNA, 25 bp, Homo sapien
caatgggccctccatgttcagtgga

SEQ ID NO: 2961385 - DNA, 25 bp, Homo sapien
gataatcatggctgtagacaaggcc

SEQ ID NO: 2961386 - DNA, 25 bp, Homo sapien
acttgggaaacagctgggcttggag

SEQ ID NO: 2961387 - DNA, 25 bp, Homo sapien
cttgggaaacagctgggcttggagg

SEQ ID NO: 2961388 - DNA, 25 bp, Homo sapien
gaatgtaatgcatctcaggcctcgt

SEQ ID NO: 2961389 - DNA, 25 bp, Homo sapien
ggaactctagggcactctaggcagg

SEQ ID NO: 2961390 - DNA, 25 bp, Homo sapien
ggattttcagttcctcgggagagca

SEQ ID NO: 2961391 - DNA, 25 bp, Homo sapien
gacagctacacacctgacatgcagg

SEQ ID NO: 2961392 - DNA, 25 bp, Homo sapien
gctaaagagggtcacacaagtggct

SEQ ID NO: 2961393 - DNA, 25 bp, Homo sapien
aatgacagtgcaggtaccaccgagg

SEQ ID NO: 2961394 - DNA, 25 bp, Homo sapien
tgacaactcttctcggtgatagcct

SEQ ID NO: 2961395 - DNA, 25 bp, Homo sapien
tatcatgcagacaggctatgcggct

SEQ ID NO: 2961396 - DNA, 25 bp, Homo sapien
gcccatgctagtttctaacgcttga

SEQ ID NO: 2961397 - DNA, 25 bp, Homo sapien
gatcaagtggttcctgcaccttggc

SEQ ID NO: 2961398 - DNA, 25 bp, Homo sapien
tccctgcagtaaatcttaaatgtgc

SEQ ID NO: 2961399 - DNA, 25 bp, Homo sapien
tgtgttaccattgttcaaatcaaga

SEQ ID NO: 2961400 - DNA, 25 bp, Homo sapien
tcagcttcctcatccgcagagtggc

SEQ ID NO: 2961401 - DNA, 25 bp, Homo sapien
gggttctgcacccaggcgtcagctt

SEQ ID NO: 2961402 - DNA, 25 bp, Homo sapien
acaatataaccagcgctgctagcgg

SEQ ID NO: 2961403 - DNA, 25 bp, Homo sapien
tgctccgagcgcaagtttgtgcgga

SEQ ID NO: 2961404 - DNA, 25 bp, Homo sapien
ggtccctgtgtagagcagtgaaaat

SEQ ID NO: 2961405 - DNA, 25 bp, Homo sapien
gaatgtgctgcgtatcttgtctcaa

SEQ ID NO: 2961406 - DNA, 25 bp, Homo sapien
taacaggtagttggatttgtcgcag

SEQ ID NO: 2961407 - DNA, 25 bp, Homo sapien
tatgcctggagaattggtgtttcac

SEQ ID NO: 2961408 - DNA, 25 bp, Homo sapien
taccttttttgacactagatggccc

SEQ ID NO: 2961409 - DNA, 25 bp, Homo sapien
ccagcctggactatagacgtgatac

SEQ ID NO: 2961410 - DNA, 25 bp, Homo sapien
taggataagaactacagagcggcgc

SEQ ID NO: 2961411 - DNA, 25 bp, Homo sapien
ggccctcattattcattcataggac

SEQ ID NO: 2961412 - DNA, 25 bp, Homo sapien
tgccattttgggaagtatatggttt

SEQ ID NO: 2961413 - DNA, 25 bp, Homo sapien
cattttgggaagtatatggtttata

SEQ ID NO: 2961414 - DNA, 25 bp, Homo sapien
gcacaacagtttgaagagtgacata

SEQ ID NO: 2961415 - DNA, 25 bp, Homo sapien
acaacagtttgaagagtgacataaa

SEQ ID NO: 2961416 - DNA, 25 bp, Homo sapien
agaagcgggcatttcagttagagga

SEQ ID NO: 2961417 - DNA, 25 bp, Homo sapien
tggaagagtcgagagaacaataaca

SEQ ID NO: 2961418 - DNA, 25 bp, Homo sapien
tattcaaagaagcattggaagagtc

SEQ ID NO: 2961419 - DNA, 25 bp, Homo sapien
tcttggatctggaaccaaaagctgt

SEQ ID NO: 2961420 - DNA, 25 bp, Homo sapien
ctggcatttaccttgcttttcagct

SEQ ID NO: 2961421 - DNA, 25 bp, Homo sapien
gaacctggcatttaccttgcttttc

SEQ ID NO: 2961422 - DNA, 25 bp, Homo sapien
aagaacctggcatttaccttgcttt

SEQ ID NO: 2961423 - DNA, 25 bp, Homo sapien
acctggcatttaccttgcttttcag

SEQ ID NO: 2961424 - DNA, 25 bp, Homo sapien
ttcgtggtctatgatgccagccgag

SEQ ID NO: 2961425 - DNA, 25 bp, Homo sapien
tcagactgcacatactaggattagc

SEQ ID NO: 2961426 - DNA, 25 bp, Homo sapien
caagttcgagtttgaaggcaggaga

SEQ ID NO: 2961427 - DNA, 25 bp, Homo sapien
tagctgttgcctgttgatggaggaa

SEQ ID NO: 2961428 - DNA, 25 bp, Homo sapien
tactcactcacagacatgggattta

SEQ ID NO: 2961429 - DNA, 25 bp, Homo sapien
agagtctctatctgtcgccaggctg

SEQ ID NO: 2961430 - DNA, 25 bp, Homo sapien
gagtgcggtggcgtgatcttggctt

SEQ ID NO: 2961431 - DNA, 25 bp, Homo sapien
ccctctgcctcctgggttcaagcga

SEQ ID NO: 2961432 - DNA, 25 bp, Homo sapien
actgcaccctctgcctcctgggttc

SEQ ID NO: 2961433 - DNA, 25 bp, Homo sapien
aagtaccgcacggcagcatcagcaa

SEQ ID NO: 2961434 - DNA, 25 bp, Homo sapien
acaagtaccgcacggcagcatcagc

SEQ ID NO: 2961435 - DNA, 25 bp, Homo sapien
gacaagtaccgcacggcagcatcag

SEQ ID NO: 2961436 - DNA, 25 bp, Homo sapien
agtaccgcacggcagcatcagcaac

SEQ ID NO: 2961437 - DNA, 25 bp, Homo sapien
cgcgggacgggagagcgccgcagtg

SEQ ID NO: 2961438 - DNA, 25 bp, Homo sapien
cgggagagcgccgcagtgccagctc

SEQ ID NO: 2961439 - DNA, 25 bp, Homo sapien
cgggacgggagagcgccgcagtgcc

SEQ ID NO: 2961440 - DNA, 25 bp, Homo sapien
gacgggagagcgccgcagtgccagc

SEQ ID NO: 2961441 - DNA, 25 bp, Homo sapien
ggcccagcagcagcggcagcagcag

SEQ ID NO: 2961442 - DNA, 25 bp, Homo sapien
tcaggcccagcagcagcggcagcag

SEQ ID NO: 2961443 - DNA, 25 bp, Homo sapien
cagcagcggcagcagcagcaaccac

SEQ ID NO: 2961444 - DNA, 25 bp, Homo sapien
aggcccagcagcagcggcagcagca

SEQ ID NO: 2961445 - DNA, 25 bp, Homo sapien
ggtggcataatagagccaccagaac

SEQ ID NO: 2961446 - DNA, 25 bp, Homo sapien
gcggaccgtcacataatcccatact

SEQ ID NO: 2961447 - DNA, 25 bp, Homo sapien
atgtaggcatccttgcggaccgtca

SEQ ID NO: 2961448 - DNA, 25 bp, Homo sapien
taatagagccaccagaacatgtagg

SEQ ID NO: 2961449 - DNA, 25 bp, Homo sapien
aagtctgcatcgaccatcctgggag

SEQ ID NO: 2961450 - DNA, 25 bp, Homo sapien
ggtgggaggctgcttataaatacca

SEQ ID NO: 2961451 - DNA, 25 bp, Homo sapien
gcttataaataccagcattgttgga

SEQ ID NO: 2961452 - DNA, 25 bp, Homo sapien
tgttggaagacgtcccagtagcatc

SEQ ID NO: 2961453 - DNA, 25 bp, Homo sapien
cgtggtttgagatcactgtcaaggg

SEQ ID NO: 2961454 - DNA, 25 bp, Homo sapien
tccaaatccagtgctagaaccgcct

SEQ ID NO: 2961455 - DNA, 25 bp, Homo sapien
tccagtgctagaaccgcctggaccg

SEQ ID NO: 2961456 - DNA, 25 bp, Homo sapien
ggtggttttccgtggtttgagatca

SEQ ID NO: 2961457 - DNA, 25 bp, Homo sapien
taaactagcgcagaaagaagcatgc

SEQ ID NO: 2961458 - DNA, 25 bp, Homo sapien
ccacggaggaaaacgaaatgttgca

SEQ ID NO: 2961459 - DNA, 25 bp, Homo sapien
tatgcactaactcgaagaagccaga

SEQ ID NO: 2961460 - DNA, 25 bp, Homo sapien
cccacacatgtgaggataccagcgt

SEQ ID NO: 2961461 - DNA, 25 bp, Homo sapien
ccttggcataggcaccactaccatt

SEQ ID NO: 2961462 - DNA, 25 bp, Homo sapien
attcacataactgaacccagtgccc

SEQ ID NO: 2961463 - DNA, 25 bp, Homo sapien
catcatgtctgaagccaccatagcc

SEQ ID NO: 2961464 - DNA, 25 bp, Homo sapien
tcaggagaaccatcatgtctgaagc

SEQ ID NO: 2961465 - DNA, 25 bp, Homo sapien
taaagctctagaccaatgccagctg

SEQ ID NO: 2961466 - DNA, 25 bp, Homo sapien
ccatttttcctccataggactctga

SEQ ID NO: 2961467 - DNA, 25 bp, Homo sapien
cttataaagctctagaccaatgcca

SEQ ID NO: 2961468 - DNA, 25 bp, Homo sapien
ggactctgagaaaatgtagaatgga

SEQ ID NO: 2961469 - DNA, 25 bp, Homo sapien
gagatccaggaatcacccaaggcaa

SEQ ID NO: 2961470 - DNA, 25 bp, Homo sapien
ggcaacccccgcaaagttgcacttg

SEQ ID NO: 2961471 - DNA, 25 bp, Homo sapien
gcacttgatggtccctcgctgaatg

SEQ ID NO: 2961472 - DNA, 25 bp, Homo sapien
gggagatccaggaatcacccaaggc

SEQ ID NO: 2961473 - DNA, 25 bp, Homo sapien
taggccagcctatctcggttgaact

SEQ ID NO: 2961474 - DNA, 25 bp, Homo sapien
tactctctgagaaatgcaagcacac

SEQ ID NO: 2961475 - DNA, 25 bp, Homo sapien
acttcctgtttgatctgggccagag

SEQ ID NO: 2961476 - DNA, 25 bp, Homo sapien
tccgtggcctagctgttaatcacct

SEQ ID NO: 2961477 - DNA, 25 bp, Homo sapien
tccaaagacaaacctactgtcttct

SEQ ID NO: 2961478 - DNA, 25 bp, Homo sapien
tcaagtatgtcatacctctgtcttt

SEQ ID NO: 2961479 - DNA, 25 bp, Homo sapien
acaaatcaagtatgtcatacctctg

SEQ ID NO: 2961480 - DNA, 25 bp, Homo sapien
caaagacaaacctactgtcttctct

SEQ ID NO: 2961481 - DNA, 25 bp, Homo sapien
tgtacaggtaaggtccccaggagag

SEQ ID NO: 2961482 - DNA, 25 bp, Homo sapien
catgctgtacaggtaaggtccccag

SEQ ID NO: 2961483 - DNA, 25 bp, Homo sapien
tgctgtacaggtaaggtccccagga

SEQ ID NO: 2961484 - DNA, 25 bp, Homo sapien
gctgtacaggtaaggtccccaggag

SEQ ID NO: 2961485 - DNA, 25 bp, Homo sapien
cccagagggtgcagatgtgtatcta

SEQ ID NO: 2961486 - DNA, 25 bp, Homo sapien
aatttgtccctgaggcgagctcttg

SEQ ID NO: 2961487 - DNA, 25 bp, Homo sapien
caactctatgtggatgactagtccc

SEQ ID NO: 2961488 - DNA, 25 bp, Homo sapien
gagaacgggagctcacatatcaaag

SEQ ID NO: 2961489 - DNA, 25 bp, Homo sapien
tttacttgggaacgtcaatctggta

SEQ ID NO: 2961490 - DNA, 25 bp, Homo sapien
acttgggaacgtcaatctggtattg

SEQ ID NO: 2961491 - DNA, 25 bp, Homo sapien
actttacttgggaacgtcaatctgg

SEQ ID NO: 2961492 - DNA, 25 bp, Homo sapien
cactttacttgggaacgtcaatctg

SEQ ID NO: 2961493 - DNA, 25 bp, Homo sapien
tatttacggcattcagtacttgctc

SEQ ID NO: 2961494 - DNA, 25 bp, Homo sapien
tctgtagagccccttatttacggca

SEQ ID NO: 2961495 - DNA, 25 bp, Homo sapien
tctgccagacctttgtcttcgagaa

SEQ ID NO: 2961496 - DNA, 25 bp, Homo sapien
ggcattcagtacttgctctgcaacc

SEQ ID NO: 2961497 - DNA, 25 bp, Homo sapien
ccaagcaggctcgcctctgagtgtt

SEQ ID NO: 2961498 - DNA, 25 bp, Homo sapien
aagcaggctcgcctctgagtgtttc

SEQ ID NO: 2961499 - DNA, 25 bp, Homo sapien
gcaggctcgcctctgagtgtttccc

SEQ ID NO: 2961500 - DNA, 25 bp, Homo sapien
gctcgcctctgagtgtttccccttt

SEQ ID NO: 2961501 - DNA, 25 bp, Homo sapien
cagtgtagactccaagtttgacaac

SEQ ID NO: 2961502 - DNA, 25 bp, Homo sapien
gcctgggtggctttctgactctgta

SEQ ID NO: 2961503 - DNA, 25 bp, Homo sapien
caagcaagtcttgcaggcctgggtg

SEQ ID NO: 2961504 - DNA, 25 bp, Homo sapien
tttgacaacaccaaccatgggccct

SEQ ID NO: 2961505 - DNA, 25 bp, Homo sapien
ttaagatgttatagaagttcacccc

SEQ ID NO: 2961506 - DNA, 25 bp, Homo sapien
gacgtgggagtgcttttagttaaga

SEQ ID NO: 2961507 - DNA, 25 bp, Homo sapien
tagactcgactccattgtagacgtg

SEQ ID NO: 2961508 - DNA, 25 bp, Homo sapien
gctctgtgtgaattctagactcgac

SEQ ID NO: 2961509 - DNA, 25 bp, Homo sapien
ctgaggcagggactttaataacttc

SEQ ID NO: 2961510 - DNA, 25 bp, Homo sapien
tttaataacttcaaggttcactcac

SEQ ID NO: 2961511 - DNA, 25 bp, Homo sapien
tggaacctagggtatcctgcagcct

SEQ ID NO: 2961512 - DNA, 25 bp, Homo sapien
gacagaagccagtgcaaaagactaa

SEQ ID NO: 2961513 - DNA, 25 bp, Homo sapien
tccagaacggccaaagagaatcatc

SEQ ID NO: 2961514 - DNA, 25 bp, Homo sapien
gaggacatctttaccaagctgctgg

SEQ ID NO: 2961515 - DNA, 25 bp, Homo sapien
agtaaggccaagaggacatcttttt

SEQ ID NO: 2961516 - DNA, 25 bp, Homo sapien
ctggaagtaaggccaagaggacatc

SEQ ID NO: 2961517 - DNA, 25 bp, Homo sapien
gaagtaaggccaagaggacatcttt

SEQ ID NO: 2961518 - DNA, 25 bp, Homo sapien
tggaagtaaggccaagaggacatct

SEQ ID NO: 2961519 - DNA, 25 bp, Homo sapien
catgagctggcttaaggcatctcgt

SEQ ID NO: 2961520 - DNA, 25 bp, Homo sapien
tccccaggattgatcctcaggaata

SEQ ID NO: 2961521 - DNA, 25 bp, Homo sapien
atctcgttgtaggtgtctcacgtgg

SEQ ID NO: 2961522 - DNA, 25 bp, Homo sapien
gggccattcatgagctggcttaagg

SEQ ID NO: 2961523 - DNA, 25 bp, Homo sapien
tgcaaggacctttggcgcgaaatct

SEQ ID NO: 2961524 - DNA, 25 bp, Homo sapien
ttgagaccagaacgcagtaatgcct

SEQ ID NO: 2961525 - DNA, 25 bp, Homo sapien
gagagctggtcaaaatctgcccgag

SEQ ID NO: 2961526 - DNA, 25 bp, Homo sapien
gaaatctcatctgcaaccaactgtg

SEQ ID NO: 2961527 - DNA, 25 bp, Homo sapien
gaaatttgtgccgactggtcaggtg

SEQ ID NO: 2961528 - DNA, 25 bp, Homo sapien
ggaggtacctttcagcccagagcat

SEQ ID NO: 2961529 - DNA, 25 bp, Homo sapien
tcattaggctggtacactcagggaa

SEQ ID NO: 2961530 - DNA, 25 bp, Homo sapien
caagttctgaacaggtaggcctacc

SEQ ID NO: 2961531 - DNA, 25 bp, Homo sapien
caactcgtccacaatgctaatgact

SEQ ID NO: 2961532 - DNA, 25 bp, Homo sapien
agatccagctgtccattatacaccg

SEQ ID NO: 2961533 - DNA, 25 bp, Homo sapien
gatccagctgtccattatacaccgt

SEQ ID NO: 2961534 - DNA, 25 bp, Homo sapien
tgcctccagcaactcgtccacaatg

SEQ ID NO: 2961535 - DNA, 25 bp, Homo sapien
gaacccataaaactgcctctaggtg

SEQ ID NO: 2961536 - DNA, 25 bp, Homo sapien
tgacatgtccaaggccagttccctt

SEQ ID NO: 2961537 - DNA, 25 bp, Homo sapien
cccaaacccaggtaggctcaggctt

SEQ ID NO: 2961538 - DNA, 25 bp, Homo sapien
tcacccaccgcaagactgacatgtc

SEQ ID NO: 2961539 - DNA, 25 bp, Homo sapien
caaagagaaaggcctggcattaaca

SEQ ID NO: 2961540 - DNA, 25 bp, Homo sapien
gacaaagagaaaggcctggcattaa

SEQ ID NO: 2961541 - DNA, 25 bp, Homo sapien
aggacaaagagaaaggcctggcatt

SEQ ID NO: 2961542 - DNA, 25 bp, Homo sapien
aaagagaaaggcctggcattaacag

SEQ ID NO: 2961543 - DNA, 25 bp, Homo sapien
aaagcaaggttcttgtaggacttga

SEQ ID NO: 2961544 - DNA, 25 bp, Homo sapien
cttgtaggacttgacaaaagcagat

SEQ ID NO: 2961545 - DNA, 25 bp, Homo sapien
aaaagcagatgtttccaaagattta

SEQ ID NO: 2961546 - DNA, 25 bp, Homo sapien
tgactgaatttaggcagttctggcc

SEQ ID NO: 2961547 - DNA, 25 bp, Homo sapien
ttcttggtaagggtcatgctaatga

SEQ ID NO: 2961548 - DNA, 25 bp, Homo sapien
tggagctgatctgttgatttcttgg

SEQ ID NO: 2961549 - DNA, 25 bp, Homo sapien
tcatgctaatgatactagacctagc

SEQ ID NO: 2961550 - DNA, 25 bp, Homo sapien
tccatttggagctgatctgttgatt

SEQ ID NO: 2961551 - DNA, 25 bp, Homo sapien
tcagagccatgtccccttggtcaga

SEQ ID NO: 2961552 - DNA, 25 bp, Homo sapien
ttcagagccatgtccccttggtcag

SEQ ID NO: 2961553 - DNA, 25 bp, Homo sapien
agccatgtccccttggtcagaagga

SEQ ID NO: 2961554 - DNA, 25 bp, Homo sapien
agagccatgtccccttggtcagaag

SEQ ID NO: 2961555 - DNA, 25 bp, Homo sapien
cagatatactgatatgtcaaacaaa

SEQ ID NO: 2961556 - DNA, 25 bp, Homo sapien
gatgttgatttactctttgggtacc

SEQ ID NO: 2961557 - DNA, 25 bp, Homo sapien
tctgcaaggacatatgctaaattgg

SEQ ID NO: 2961558 - DNA, 25 bp, Homo sapien
acagccccagttagatacagggaag

SEQ ID NO: 2961559 - DNA, 25 bp, Homo sapien
taaagtatttcttctgagtaagcgc

SEQ ID NO: 2961560 - DNA, 25 bp, Homo sapien
gttaaagtatttcttctgagtaagc

SEQ ID NO: 2961561 - DNA, 25 bp, Homo sapien
agtatttcttctgagtaagcgccat

SEQ ID NO: 2961562 - DNA, 25 bp, Homo sapien
cagcccaggtggtttgttaaagtat

SEQ ID NO: 2961563 - DNA, 25 bp, Homo sapien
gtggctgcctgctcctttctgccat

SEQ ID NO: 2961564 - DNA, 25 bp, Homo sapien
agtgaagactgcttctcagcttggc

SEQ ID NO: 2961565 - DNA, 25 bp, Homo sapien
gaagactgcttctcagcttggcctc

SEQ ID NO: 2961566 - DNA, 25 bp, Homo sapien
tccttttctccacccagacccagct

SEQ ID NO: 2961567 - DNA, 25 bp, Homo sapien
tgctttgctacacgtgtcaggacct

SEQ ID NO: 2961568 - DNA, 25 bp, Homo sapien
tgctgccagcaatggagatttcttg

SEQ ID NO: 2961569 - DNA, 25 bp, Homo sapien
ccaagcacaatgtgggagatgacat

SEQ ID NO: 2961570 - DNA, 25 bp, Homo sapien
gatgacataaggctcagcgctggcc

SEQ ID NO: 2961571 - DNA, 25 bp, Homo sapien
cttgggcagatataatccgataggc

SEQ ID NO: 2961572 - DNA, 25 bp, Homo sapien
tataatccgataggcgcgggacggt

SEQ ID NO: 2961573 - DNA, 25 bp, Homo sapien
cagcagtggcagaagaaccgtccta

SEQ ID NO: 2961574 - DNA, 25 bp, Homo sapien
aagaaccgtcctagctgctgcgacg

SEQ ID NO: 2961575 - DNA, 25 bp, Homo sapien
tggaaggggcagagctgttttctgt

SEQ ID NO: 2961576 - DNA, 25 bp, Homo sapien
tgtgctcctggtctcttcaggaagc

SEQ ID NO: 2961577 - DNA, 25 bp, Homo sapien
caggaagctcctcgataaaatcaga

SEQ ID NO: 2961578 - DNA, 25 bp, Homo sapien
ggcagagctgttttctgtgctcctg

SEQ ID NO: 2961579 - DNA, 25 bp, Homo sapien
gaaagcaaactgtccgtagccctgc

SEQ ID NO: 2961580 - DNA, 25 bp, Homo sapien
ccctgcggcagcgtgaacaggtgct

SEQ ID NO: 2961581 - DNA, 25 bp, Homo sapien
aagatgccgaaagcaaactgtccgt

SEQ ID NO: 2961582 - DNA, 25 bp, Homo sapien
tgtccgtagccctgcggcagcgtga

SEQ ID NO: 2961583 - DNA, 25 bp, Homo sapien
atgatcccttctagcgtggggaggc

SEQ ID NO: 2961584 - DNA, 25 bp, Homo sapien
tgatcccttctagcgtggggaggcc

SEQ ID NO: 2961585 - DNA, 25 bp, Homo sapien
atcccttctagcgtggggaggcctt

SEQ ID NO: 2961586 - DNA, 25 bp, Homo sapien
tcccttctagcgtggggaggccttc

SEQ ID NO: 2961587 - DNA, 25 bp, Homo sapien
tccatagggtttgagtgcaggactc

SEQ ID NO: 2961588 - DNA, 25 bp, Homo sapien
tggcgggcgtgatgatgccgttgac

SEQ ID NO: 2961589 - DNA, 25 bp, Homo sapien
catagggtttgagtgcaggactccc

SEQ ID NO: 2961590 - DNA, 25 bp, Homo sapien
atggtggcgggcgtgatgatgccgt

SEQ ID NO: 2961591 - DNA, 25 bp, Homo sapien
tgtgcgaaggcgtccaggccgttgg

SEQ ID NO: 2961592 - DNA, 25 bp, Homo sapien
ctgtgcgaaggcgtccaggccgttg

SEQ ID NO: 2961593 - DNA, 25 bp, Homo sapien
gtgcgaaggcgtccaggccgttggc

SEQ ID NO: 2961594 - DNA, 25 bp, Homo sapien
gcgaaggcgtccaggccgttggcca

SEQ ID NO: 2961595 - DNA, 25 bp, Homo sapien
tttctcttcatctgccggtgggggg

SEQ ID NO: 2961596 - DNA, 25 bp, Homo sapien
ggggaggtactggattttctcttca

SEQ ID NO: 2961597 - DNA, 25 bp, Homo sapien
tgctcctcggtgacggggacggtgg

SEQ ID NO: 2961598 - DNA, 25 bp, Homo sapien
tcatctgccggtggggggcccgtgt

SEQ ID NO: 2961599 - DNA, 25 bp, Homo sapien
tatgcagccatcgtggaacaggtgg

SEQ ID NO: 2961600 - DNA, 25 bp, Homo sapien
gcgcgtagtcgtccttgcacacggg

SEQ ID NO: 2961601 - DNA, 25 bp, Homo sapien
cagccatcgtggaacaggtggttgc

SEQ ID NO: 2961602 - DNA, 25 bp, Homo sapien
cagctgctcgcccagcgcgtagtcg

SEQ ID NO: 2961603 - DNA, 25 bp, Homo sapien
ggagcagttcatcccagtcgggccc

SEQ ID NO: 2961604 - DNA, 25 bp, Homo sapien
tgttcgtggccgtgttgtgtcccgg

SEQ ID NO: 2961605 - DNA, 25 bp, Homo sapien
acttgtggcgttctctttactgggc

SEQ ID NO: 2961606 - DNA, 25 bp, Homo sapien
acgacgaggaggagcagttcatccc

SEQ ID NO: 2961607 - DNA, 25 bp, Homo sapien
tccaccgctgaacgtttagagggtg

SEQ ID NO: 2961608 - DNA, 25 bp, Homo sapien
ccaccgctgaacgtttagagggtga

SEQ ID NO: 2961609 - DNA, 25 bp, Homo sapien
caccgctgaacgtttagagggtgag

SEQ ID NO: 2961610 - DNA, 25 bp, Homo sapien
ggcgactgagtcctgtagacaacaa

SEQ ID NO: 2961611 - DNA, 25 bp, Homo sapien
tacattcctcgactgtacactggat

SEQ ID NO: 2961612 - DNA, 25 bp, Homo sapien
tgctcaccctagaggaagccagctg

SEQ ID NO: 2961613 - DNA, 25 bp, Homo sapien
cactcctaagaaatagaatgcagca

SEQ ID NO: 2961614 - DNA, 25 bp, Homo sapien
gagctacgtcatacatgcagaggag

SEQ ID NO: 2961615 - DNA, 25 bp, Homo sapien
taaccaccaccaggtctagaatagt

SEQ ID NO: 2961616 - DNA, 25 bp, Homo sapien
gaagtagccactatcctaacttgtg

SEQ ID NO: 2961617 - DNA, 25 bp, Homo sapien
tagtgttacaactaaatgtgcccca

SEQ ID NO: 2961618 - DNA, 25 bp, Homo sapien
tcagatgccggcattaacccacagg

SEQ ID NO: 2961619 - DNA, 25 bp, Homo sapien
gatgccggcattaacccacagggag

SEQ ID NO: 2961620 - DNA, 25 bp, Homo sapien
cagatgccggcattaacccacaggg

SEQ ID NO: 2961621 - DNA, 25 bp, Homo sapien
agatgccggcattaacccacaggga

SEQ ID NO: 2961622 - DNA, 25 bp, Homo sapien
ggtctacagcgctgggctaacatcc

SEQ ID NO: 2961623 - DNA, 25 bp, Homo sapien
gcgcggtctacagcgctgggctaac

SEQ ID NO: 2961624 - DNA, 25 bp, Homo sapien
cggagccgggtcttgctcgcgctct

SEQ ID NO: 2961625 - DNA, 25 bp, Homo sapien
cgcgctctcgcgagagagccgtcat

SEQ ID NO: 2961626 - DNA, 25 bp, Homo sapien
gctcctcggctaccatcggggtgcg

SEQ ID NO: 2961627 - DNA, 25 bp, Homo sapien
attaaatactgaagacgcgcggcga

SEQ ID NO: 2961628 - DNA, 25 bp, Homo sapien
ccccacgtgctagcccaggcgggtg

SEQ ID NO: 2961629 - DNA, 25 bp, Homo sapien
gcgggatgcggagtccgcgcgccgc

SEQ ID NO: 2961630 - DNA, 25 bp, Homo sapien
ggagaggaagatcccgaaacgccca

SEQ ID NO: 2961631 - DNA, 25 bp, Homo sapien
ctggagcgaagtccaccgggtttgt

SEQ ID NO: 2961632 - DNA, 25 bp, Homo sapien
gcctaccacgatcagcacctttctt

SEQ ID NO: 2961633 - DNA, 25 bp, Homo sapien
agggctcccatgccgttccgagtcg

SEQ ID NO: 2961634 - DNA, 25 bp, Homo sapien
caaatctaaacacgaagtaacgcgc

SEQ ID NO: 2961635 - DNA, 25 bp, Homo sapien
taacagatactgttgcaccaggtcc

SEQ ID NO: 2961636 - DNA, 25 bp, Homo sapien
gaacggtgttccttgatcagtaact

SEQ ID NO: 2961637 - DNA, 25 bp, Homo sapien
ggtccagcagcctagatttcactgg

SEQ ID NO: 2961638 - DNA, 25 bp, Homo sapien
gtgctcggttctgccaccaagggtg

SEQ ID NO: 2961639 - DNA, 25 bp, Homo sapien
catggctcaggtgttggtcccagcc

SEQ ID NO: 2961640 - DNA, 25 bp, Homo sapien
cttgctgggtagtgctcggttctgc

SEQ ID NO: 2961641 - DNA, 25 bp, Homo sapien
cctcagtgctcacaggactgttacc

SEQ ID NO: 2961642 - DNA, 25 bp, Homo sapien
ccagcataggtctgcaaggcacaca

SEQ ID NO: 2961643 - DNA, 25 bp, Homo sapien
caatgggtctaccaggatgtaactc

SEQ ID NO: 2961644 - DNA, 25 bp, Homo sapien
ggactttatcctgcagacaacagag

SEQ ID NO: 2961645 - DNA, 25 bp, Homo sapien
gggccccactgcgtagtctggactt

SEQ ID NO: 2961646 - DNA, 25 bp, Homo sapien
gacatggccttttttacgagagaaa

SEQ ID NO: 2961647 - DNA, 25 bp, Homo sapien
cagcatcccaggcaatgccaagggg

SEQ ID NO: 2961648 - DNA, 25 bp, Homo sapien
aagagcgaacggaactggattgcca

SEQ ID NO: 2961649 - DNA, 25 bp, Homo sapien
tgctgacatggccttttttacgaga

SEQ ID NO: 2961650 - DNA, 25 bp, Homo sapien
ggtgtggacactactttgggacaga

SEQ ID NO: 2961651 - DNA, 25 bp, Homo sapien
aggttccttgatggcagggtcagcc

SEQ ID NO: 2961652 - DNA, 25 bp, Homo sapien
cagacgtcttccacggggagaggtt

SEQ ID NO: 2961653 - DNA, 25 bp, Homo sapien
cactactttgggacagacgtcttcc

SEQ ID NO: 2961654 - DNA, 25 bp, Homo sapien
gagccgactcgatgaacctacttgg

SEQ ID NO: 2961655 - DNA, 25 bp, Homo sapien
gctggagaatagtacaccctttggg

SEQ ID NO: 2961656 - DNA, 25 bp, Homo sapien
tatcctgggctttggcgtctgcgac

SEQ ID NO: 2961657 - DNA, 25 bp, Homo sapien
tgttaggaagaatgcccgaggactc

SEQ ID NO: 2961658 - DNA, 25 bp, Homo sapien
cacttgggagattatctggaaggca

SEQ ID NO: 2961659 - DNA, 25 bp, Homo sapien
ctgttcggttgcttctgagatcact

SEQ ID NO: 2961660 - DNA, 25 bp, Homo sapien
caaccttgccaaccgtggtggccag

SEQ ID NO: 2961661 - DNA, 25 bp, Homo sapien
gaaggcagcccgcttaatctcctca

SEQ ID NO: 2961662 - DNA, 25 bp, Homo sapien
cccattgctgaagggcacagtactt

SEQ ID NO: 2961663 - DNA, 25 bp, Homo sapien
caagagtcttcaagccctgaagtgc

SEQ ID NO: 2961664 - DNA, 25 bp, Homo sapien
gctcttcaggcagctcacgtaggtc

SEQ ID NO: 2961665 - DNA, 25 bp, Homo sapien
caggtgacacaggtggcatcttcca

SEQ ID NO: 2961666 - DNA, 25 bp, Homo sapien
gcttccgcatccatggtccatccat

SEQ ID NO: 2961667 - DNA, 25 bp, Homo sapien
tccgcatccatggtccatccatcct

SEQ ID NO: 2961668 - DNA, 25 bp, Homo sapien
ccgcatccatggtccatccatcctc

SEQ ID NO: 2961669 - DNA, 25 bp, Homo sapien
ttccgcatccatggtccatccatcc

SEQ ID NO: 2961670 - DNA, 25 bp, Homo sapien
acaactcaggaagctcaagcctccc

SEQ ID NO: 2961671 - DNA, 25 bp, Homo sapien
tgtggccgttctttgggcacttacc

SEQ ID NO: 2961672 - DNA, 25 bp, Homo sapien
aaagctgtggccgttctttgggcac

SEQ ID NO: 2961673 - DNA, 25 bp, Homo sapien
aacccaggacacctcgttatcaaag

SEQ ID NO: 2961674 - DNA, 25 bp, Homo sapien
tcgttatcaaagtgccccgctttcc

SEQ ID NO: 2961675 - DNA, 25 bp, Homo sapien
tcagcactcgaaaaacccaggacac

SEQ ID NO: 2961676 - DNA, 25 bp, Homo sapien
gacacctcgttatcaaagtgccccg

SEQ ID NO: 2961677 - DNA, 25 bp, Homo sapien
gcggtctgaactgtctacgctgggg

SEQ ID NO: 2961678 - DNA, 25 bp, Homo sapien
agttagcggtctgaactgtctacgc

SEQ ID NO: 2961679 - DNA, 25 bp, Homo sapien
tgtaagttagcggtctgaactgtct

SEQ ID NO: 2961680 - DNA, 25 bp, Homo sapien
tagcggtctgaactgtctacgctgg

SEQ ID NO: 2961681 - DNA, 25 bp, Homo sapien
cactcgggatattcgtggcctctct

SEQ ID NO: 2961682 - DNA, 25 bp, Homo sapien
caacctacccggagctgaaatggga

SEQ ID NO: 2961683 - DNA, 25 bp, Homo sapien
cgtgtggtacaaactagatgctgct

SEQ ID NO: 2961684 - DNA, 25 bp, Homo sapien
tgctgctgaaagtggtaaaattccc

SEQ ID NO: 2961685 - DNA, 25 bp, Homo sapien
aaccctgagtataatcctttgccaa

SEQ ID NO: 2961686 - DNA, 25 bp, Homo sapien
caaaccctgagtataatcctttgcc

SEQ ID NO: 2961687 - DNA, 25 bp, Homo sapien
tctccaaaccctgagtataatcctt

SEQ ID NO: 2961688 - DNA, 25 bp, Homo sapien
tccaaaccctgagtataatcctttg

SEQ ID NO: 2961689 - DNA, 25 bp, Homo sapien
agccagaccgatggaccacaaacac

SEQ ID NO: 2961690 - DNA, 25 bp, Homo sapien
gatggaccacaaacaccttgacacc

SEQ ID NO: 2961691 - DNA, 25 bp, Homo sapien
tgacacccttccaactatcctaccc

SEQ ID NO: 2961692 - DNA, 25 bp, Homo sapien
gtcctgagagccagaccgatggacc

SEQ ID NO: 2961693 - DNA, 25 bp, Homo sapien
agtcccacttgcttaattggcagcc

SEQ ID NO: 2961694 - DNA, 25 bp, Homo sapien
gcagagacacaagtggtgaacttgg

SEQ ID NO: 2961695 - DNA, 25 bp, Homo sapien
ttgcttaattggcagccgcacccag

SEQ ID NO: 2961696 - DNA, 25 bp, Homo sapien
gagacacaagtggtgaacttggaag

SEQ ID NO: 2961697 - DNA, 25 bp, Homo sapien
tcaacttacagtctagaaggctcag

SEQ ID NO: 2961698 - DNA, 25 bp, Homo sapien
tcaagcttggcaggtgactgtcaac

SEQ ID NO: 2961699 - DNA, 25 bp, Homo sapien
ggctcagaacaaccccaatgaaagg

SEQ ID NO: 2961700 - DNA, 25 bp, Homo sapien
tcagagcagccagtaaccaagaact

SEQ ID NO: 2961701 - DNA, 25 bp, Homo sapien
gaccttcttagggttggagcctgcc

SEQ ID NO: 2961702 - DNA, 25 bp, Homo sapien
ggcattttggaagctctcagtcttc

SEQ ID NO: 2961703 - DNA, 25 bp, Homo sapien
gagactgcaacagctatccacggaa

SEQ ID NO: 2961704 - DNA, 25 bp, Homo sapien
tctcccagatgatgaggtcgacctt

SEQ ID NO: 2961705 - DNA, 25 bp, Homo sapien
aaaactcacatagcgcccctgcttg

SEQ ID NO: 2961706 - DNA, 25 bp, Homo sapien
tgtagatcttggcaccagatgtttg

SEQ ID NO: 2961707 - DNA, 25 bp, Homo sapien
taaggcagggttgaaatgtagatct

SEQ ID NO: 2961708 - DNA, 25 bp, Homo sapien
ttctatgtggcagatctggacgctc

SEQ ID NO: 2961709 - DNA, 25 bp, Homo sapien
gcgtagatattggtgaggttcagct

SEQ ID NO: 2961710 - DNA, 25 bp, Homo sapien
cttcccaatcaagttcagcgctttg

SEQ ID NO: 2961711 - DNA, 25 bp, Homo sapien
acttcttcccaatcaagttcagcgc

SEQ ID NO: 2961712 - DNA, 25 bp, Homo sapien
ccaggatgtcatcggcagagaaggc

SEQ ID NO: 2961713 - DNA, 25 bp, Homo sapien
gattccaggctgagagtaacagagg

SEQ ID NO: 2961714 - DNA, 25 bp, Homo sapien
ccggcattgacctggttgaccacaa

SEQ ID NO: 2961715 - DNA, 25 bp, Homo sapien
cacaatgacctccacggtgatgcca

SEQ ID NO: 2961716 - DNA, 25 bp, Homo sapien
aggtacatctgctggtcgaggctgc

SEQ ID NO: 2961717 - DNA, 25 bp, Homo sapien
gagaagttcagcctagcaagtgtgc

SEQ ID NO: 2961718 - DNA, 25 bp, Homo sapien
ggacaggaacagcaaccggccccaa

SEQ ID NO: 2961719 - DNA, 25 bp, Homo sapien
tagggagcagagtgcgtggaacgcc

SEQ ID NO: 2961720 - DNA, 25 bp, Homo sapien
ccagactgagaagcattcagtctag

SEQ ID NO: 2961721 - DNA, 25 bp, Homo sapien
taggaggcaaccacttgggctcgcc

SEQ ID NO: 2961722 - DNA, 25 bp, Homo sapien
acttcgttggtctcctcgtaggagg

SEQ ID NO: 2961723 - DNA, 25 bp, Homo sapien
ctgatttgccggagcacgtctactt

SEQ ID NO: 2961724 - DNA, 25 bp, Homo sapien
tatatccgccgtagtccacgtatcg

SEQ ID NO: 2961725 - DNA, 25 bp, Homo sapien
gactctgctaaaacacagtaggcag

SEQ ID NO: 2961726 - DNA, 25 bp, Homo sapien
tggcacaactgagccagccacgcag

SEQ ID NO: 2961727 - DNA, 25 bp, Homo sapien
tcagtttggctaagcgagtaatcga

SEQ ID NO: 2961728 - DNA, 25 bp, Homo sapien
cgagtttgtttctatcagactctgc

SEQ ID NO: 2961729 - DNA, 25 bp, Homo sapien
ctgggaaggcaagaaaggaacaagt

SEQ ID NO: 2961730 - DNA, 25 bp, Homo sapien
caagtttaatgtggacatgaaggct

SEQ ID NO: 2961731 - DNA, 25 bp, Homo sapien
tttaatgtggacatgaaggctgact

SEQ ID NO: 2961732 - DNA, 25 bp, Homo sapien
caagaaaggaacaagtttaatgtgg

SEQ ID NO: 2961733 - DNA, 25 bp, Homo sapien
tccctgaaacggcagggtgacaaag

SEQ ID NO: 2961734 - DNA, 25 bp, Homo sapien
gacttctgctccctgaaacggcagg

SEQ ID NO: 2961735 - DNA, 25 bp, Homo sapien
ttctgctccctgaaacggcagggtg

SEQ ID NO: 2961736 - DNA, 25 bp, Homo sapien
aaggacttctgctccctgaaacggc

SEQ ID NO: 2961737 - DNA, 25 bp, Homo sapien
ccctatggagctatggcctggctga

SEQ ID NO: 2961738 - DNA, 25 bp, Homo sapien
cctttgttggaagccccttgatgcc

SEQ ID NO: 2961739 - DNA, 25 bp, Homo sapien
gatagcaatgtaagttcctgggcct

SEQ ID NO: 2961740 - DNA, 25 bp, Homo sapien
tgttagcataaatcctccaggtgag

SEQ ID NO: 2961741 - DNA, 25 bp, Homo sapien
atctgcttccggtgaaaactggtca

SEQ ID NO: 2961742 - DNA, 25 bp, Homo sapien
catctcgctcatggcggcatctgct

SEQ ID NO: 2961743 - DNA, 25 bp, Homo sapien
gcttccggtgaaaactggtcatcgt

SEQ ID NO: 2961744 - DNA, 25 bp, Homo sapien
attccccgtcatctcgctcatggcg

SEQ ID NO: 2961745 - DNA, 25 bp, Homo sapien
cagaggaagaccagttggactgtaa

SEQ ID NO: 2961746 - DNA, 25 bp, Homo sapien
agaccagttggactgtaacttgtca

SEQ ID NO: 2961747 - DNA, 25 bp, Homo sapien
cacagctgaatcagaggaagaccag

SEQ ID NO: 2961748 - DNA, 25 bp, Homo sapien
actccacagctgaatcagaggaaga

SEQ ID NO: 2961749 - DNA, 25 bp, Homo sapien
tcaaaggcttgtgtagtagctgtct

SEQ ID NO: 2961750 - DNA, 25 bp, Homo sapien
ggcttgtgtagtagctgtctaccca

SEQ ID NO: 2961751 - DNA, 25 bp, Homo sapien
ggcaaggcctcgctccaccagggac

SEQ ID NO: 2961752 - DNA, 25 bp, Homo sapien
ttgtgtagtagctgtctacccactg

SEQ ID NO: 2961753 - DNA, 25 bp, Homo sapien
tacctacaggtgacatgtggctgga

SEQ ID NO: 2961754 - DNA, 25 bp, Homo sapien
tcaagcaagcaacatacatccctgg

SEQ ID NO: 2961755 - DNA, 25 bp, Homo sapien
tcctttggctttgcgaagagaaccc

SEQ ID NO: 2961756 - DNA, 25 bp, Homo sapien
tacaaccaggcttggcaggatacca

SEQ ID NO: 2961757 - DNA, 25 bp, Homo sapien
ccatacagtcacctgtccagtgtgc

SEQ ID NO: 2961758 - DNA, 25 bp, Homo sapien
taccatacagtcacctgtccagtgt

SEQ ID NO: 2961759 - DNA, 25 bp, Homo sapien
ctaccatacagtcacctgtccagtg

SEQ ID NO: 2961760 - DNA, 25 bp, Homo sapien
accatacagtcacctgtccagtgtg

SEQ ID NO: 2961761 - DNA, 25 bp, Homo sapien
ccactgcaagttaattcaatgagtt

SEQ ID NO: 2961762 - DNA, 25 bp, Homo sapien
aaacacaccactgcaagttaattca

SEQ ID NO: 2961763 - DNA, 25 bp, Homo sapien
ctgcaagttaattcaatgagttact

SEQ ID NO: 2961764 - DNA, 25 bp, Homo sapien
cacaccactgcaagttaattcaatg

SEQ ID NO: 2961765 - DNA, 25 bp, Homo sapien
ttgaagatttatgtaagttacttac

SEQ ID NO: 2961766 - DNA, 25 bp, Homo sapien
tgaagatttatgtaagttacttact

SEQ ID NO: 2961767 - DNA, 25 bp, Homo sapien
catatttctattggccactgctggt

SEQ ID NO: 2961768 - DNA, 25 bp, Homo sapien
tggaatagtccaggcctacactgtc

SEQ ID NO: 2961769 - DNA, 25 bp, Homo sapien
caaatgcacactggacttagtagga

SEQ ID NO: 2961770 - DNA, 25 bp, Homo sapien
tgtccaacgtgatagccacaagcca

SEQ ID NO: 2961771 - DNA, 25 bp, Homo sapien
gggataaaagaaagattccaggcca

SEQ ID NO: 2961772 - DNA, 25 bp, Homo sapien
aatggggataaaagaaagattccag

SEQ ID NO: 2961773 - DNA, 25 bp, Homo sapien
ctggaaatggggataaaagaaagat

SEQ ID NO: 2961774 - DNA, 25 bp, Homo sapien
taaaagaaagattccaggccaggcg

SEQ ID NO: 2961775 - DNA, 25 bp, Homo sapien
aataaaaaactacgccctgctctgg

SEQ ID NO: 2961776 - DNA, 25 bp, Homo sapien
gcttagagggaatataaggaaggcc

SEQ ID NO: 2961777 - DNA, 25 bp, Homo sapien
gcagactttctgcagtttagaagac

SEQ ID NO: 2961778 - DNA, 25 bp, Homo sapien
gatgcagtcatggaattccctttgg

SEQ ID NO: 2961779 - DNA, 25 bp, Homo sapien
tggctatataaatagggctttgaga

SEQ ID NO: 2961780 - DNA, 25 bp, Homo sapien
tgtatacgtggcaggttattgctgt

SEQ ID NO: 2961781 - DNA, 25 bp, Homo sapien
tagggctttgagatgtatacgtggc

SEQ ID NO: 2961782 - DNA, 25 bp, Homo sapien
caggttattgctgtagcatagctgt

SEQ ID NO: 2961783 - DNA, 25 bp, Homo sapien
ctgcgtgcgagaggccaaggtgagc

SEQ ID NO: 2961784 - DNA, 25 bp, Homo sapien
gcgtgcgagaggccaaggtgagcat

SEQ ID NO: 2961785 - DNA, 25 bp, Homo sapien
tgcgtgcgagaggccaaggtgagca

SEQ ID NO: 2961786 - DNA, 25 bp, Homo sapien
cagcaaagacattctgctcatctgc

SEQ ID NO: 2961787 - DNA, 25 bp, Homo sapien
ctgcgaggtgatgagtgtgctcaga

SEQ ID NO: 2961788 - DNA, 25 bp, Homo sapien
atgagtgtgctcagaagatgcaagg

SEQ ID NO: 2961789 - DNA, 25 bp, Homo sapien
gcaaagacattctgctcatctgcca

SEQ ID NO: 2961790 - DNA, 25 bp, Homo sapien
ggtggtccctaacttgtacaactca

SEQ ID NO: 2961791 - DNA, 25 bp, Homo sapien
aggcttgggaagagccttgatcaga

SEQ ID NO: 2961792 - DNA, 25 bp, Homo sapien
tattttaccgattccatgcaccaaa

SEQ ID NO: 2961793 - DNA, 25 bp, Homo sapien
tgatcagaaagcgacacaaggcctc

SEQ ID NO: 2961794 - DNA, 25 bp, Homo sapien
gatttcccgatgctcttcacaccag

SEQ ID NO: 2961795 - DNA, 25 bp, Homo sapien
gacacttcgaatgtagatctgattg

SEQ ID NO: 2961796 - DNA, 25 bp, Homo sapien
aggcaggagacacttcgaatgtaga

SEQ ID NO: 2961797 - DNA, 25 bp, Homo sapien
ccacgggggtccgatttggccatga

SEQ ID NO: 2961798 - DNA, 25 bp, Homo sapien
aacagcgacttgtcatgagggggta

SEQ ID NO: 2961799 - DNA, 25 bp, Homo sapien
caacagcgacttgtcatgagggggt

SEQ ID NO: 2961800 - DNA, 25 bp, Homo sapien
cagcgacttgtcatgagggggtaat

SEQ ID NO: 2961801 - DNA, 25 bp, Homo sapien
ccaacagcgacttgtcatgaggggg

SEQ ID NO: 2961802 - DNA, 25 bp, Homo sapien
ataagttctgataacccactaccat

SEQ ID NO: 2961803 - DNA, 25 bp, Homo sapien
ccaaactttagtgacactagtgtta

SEQ ID NO: 2961804 - DNA, 25 bp, Homo sapien
ctgataacccactaccatccgacca

SEQ ID NO: 2961805 - DNA, 25 bp, Homo sapien
ataacccactaccatccgaccagct

SEQ ID NO: 2961806 - DNA, 25 bp, Homo sapien
gctgcatgtgggtaacataacctct

SEQ ID NO: 2961807 - DNA, 25 bp, Homo sapien
tgcatgtgggtaacataacctctgg

SEQ ID NO: 2961808 - DNA, 25 bp, Homo sapien
ctgcatgtgggtaacataacctctg

SEQ ID NO: 2961809 - DNA, 25 bp, Homo sapien
agtagttcgttgaccttgagcaggt

SEQ ID NO: 2961810 - DNA, 25 bp, Homo sapien
aatctctctgcgagcggcggagccg

SEQ ID NO: 2961811 - DNA, 25 bp, Homo sapien
aagccccacagcgatcggagcggag

SEQ ID NO: 2961812 - DNA, 25 bp, Homo sapien
gctccgagccccgagatctccgctc

SEQ ID NO: 2961813 - DNA, 25 bp, Homo sapien
gggctcctccgaatctctctgcgag

SEQ ID NO: 2961814 - DNA, 25 bp, Homo sapien
ttggcgctgcccgaggtgccttggc

SEQ ID NO: 2961815 - DNA, 25 bp, Homo sapien
gggtcgtgctgggagtcgttggcgc

SEQ ID NO: 2961816 - DNA, 25 bp, Homo sapien
gcgctgcccgaggtgccttggctcc

SEQ ID NO: 2961817 - DNA, 25 bp, Homo sapien
gctgggagtcgttggcgctgcccga

SEQ ID NO: 2961818 - DNA, 25 bp, Homo sapien
cagaagtgagcaccgatgtcagatc

SEQ ID NO: 2961819 - DNA, 25 bp, Homo sapien
aaacataacagaagtgagcaccgat

SEQ ID NO: 2961820 - DNA, 25 bp, Homo sapien
tgagcaccgatgtcagatcggccat

SEQ ID NO: 2961821 - DNA, 25 bp, Homo sapien
taacagaagtgagcaccgatgtcag

SEQ ID NO: 2961822 - DNA, 25 bp, Homo sapien
ggtctgccagctcagtccaccgata

SEQ ID NO: 2961823 - DNA, 25 bp, Homo sapien
gccagctcagtccaccgataaacat

SEQ ID NO: 2961824 - DNA, 25 bp, Homo sapien
tctgccagctcagtccaccgataaa

SEQ ID NO: 2961825 - DNA, 25 bp, Homo sapien
gctcagtccaccgataaacatttta

SEQ ID NO: 2961826 - DNA, 25 bp, Homo sapien
ctggagcgtttcgtagtgggatctc

SEQ ID NO: 2961827 - DNA, 25 bp, Homo sapien
agcgtttcgtagtgggatctctcat

SEQ ID NO: 2961828 - DNA, 25 bp, Homo sapien
ggagcgtttcgtagtgggatctctc

SEQ ID NO: 2961829 - DNA, 25 bp, Homo sapien
tctcatgaccatacattctctaatt

SEQ ID NO: 2961830 - DNA, 25 bp, Homo sapien
acttgctgggtctgcgaacgtgacg

SEQ ID NO: 2961831 - DNA, 25 bp, Homo sapien
cgtcttggaatctaactcatggtgg

SEQ ID NO: 2961832 - DNA, 25 bp, Homo sapien
taatactttatctacacttgctggg

SEQ ID NO: 2961833 - DNA, 25 bp, Homo sapien
tgcgaacgtgacgaaaccgaagcct

SEQ ID NO: 2961834 - DNA, 25 bp, Homo sapien
tgtcaataaaccaaccgcttctgcc

SEQ ID NO: 2961835 - DNA, 25 bp, Homo sapien
taaacaagatcctcgtttccatgtc

SEQ ID NO: 2961836 - DNA, 25 bp, Homo sapien
aataaaccaaccgcttctgcctcct

SEQ ID NO: 2961837 - DNA, 25 bp, Homo sapien
gtaaacaagatcctcgtttccatgt

SEQ ID NO: 2961838 - DNA, 25 bp, Homo sapien
agtgtgcaaagtttacacgctgaga

SEQ ID NO: 2961839 - DNA, 25 bp, Homo sapien
tgtgcaaagtttacacgctgagatc

SEQ ID NO: 2961840 - DNA, 25 bp, Homo sapien
tcagtgtgcaaagtttacacgctga

SEQ ID NO: 2961841 - DNA, 25 bp, Homo sapien
gtgcaaagtttacacgctgagatct

SEQ ID NO: 2961842 - DNA, 25 bp, Homo sapien
gaagcatgtgagctaaatccacctg

SEQ ID NO: 2961843 - DNA, 25 bp, Homo sapien
gcaaaacgcatgatgctcaatcagg

SEQ ID NO: 2961844 - DNA, 25 bp, Homo sapien
tctcctggaagcatgtgaatctaac

SEQ ID NO: 2961845 - DNA, 25 bp, Homo sapien
tcaatccgagtggaaaaacatcctc

SEQ ID NO: 2961846 - DNA, 25 bp, Homo sapien
tgcgctcgacgaggaaatgcaactt

SEQ ID NO: 2961847 - DNA, 25 bp, Homo sapien
ctcgacgaggaaatgcaactttggg

SEQ ID NO: 2961848 - DNA, 25 bp, Homo sapien
ggttgcgctcgacgaggaaatgcaa

SEQ ID NO: 2961849 - DNA, 25 bp, Homo sapien
cttgggttgcgctcgacgaggaaat

SEQ ID NO: 2961850 - DNA, 25 bp, Homo sapien
cgaaggaacagtgaataccaggctt

SEQ ID NO: 2961851 - DNA, 25 bp, Homo sapien
accttgggatggctaacttagagac

SEQ ID NO: 2961852 - DNA, 25 bp, Homo sapien
gaaattcttggcaatcatctctgag

SEQ ID NO: 2961853 - DNA, 25 bp, Homo sapien
gacgcatggttatctcacaggacta

SEQ ID NO: 2961854 - DNA, 25 bp, Homo sapien
gaaattctcaaagtaccatcacaat

SEQ ID NO: 2961855 - DNA, 25 bp, Homo sapien
ggttccacttctgggagactgtgca

SEQ ID NO: 2961856 - DNA, 25 bp, Homo sapien
aatcccgaagatacataaaaagcat

SEQ ID NO: 2961857 - DNA, 25 bp, Homo sapien
tgctaaagccacaaccttttccgac

SEQ ID NO: 2961858 - DNA, 25 bp, Homo sapien
gtgaaggatcacagacagtttggga

SEQ ID NO: 2961859 - DNA, 25 bp, Homo sapien
aatgtgaaggatcacagacagtttg

SEQ ID NO: 2961860 - DNA, 25 bp, Homo sapien
gaaatgtgaaggatcacagacagtt

SEQ ID NO: 2961861 - DNA, 25 bp, Homo sapien
ctgaaatgtgaaggatcacagacag

SEQ ID NO: 2961862 - DNA, 25 bp, Homo sapien
ttatggaagaaacagcaattcctcc

SEQ ID NO: 2961863 - DNA, 25 bp, Homo sapien
aatactgctaactctgggaagccct

SEQ ID NO: 2961864 - DNA, 25 bp, Homo sapien
ttcacacttatggaagaaacagcaa

SEQ ID NO: 2961865 - DNA, 25 bp, Homo sapien
tccaaacccaggaaatactgctaac

SEQ ID NO: 2961866 - DNA, 25 bp, Homo sapien
gacgaagacctttgtcgcagaccat

SEQ ID NO: 2961867 - DNA, 25 bp, Homo sapien
gaagggcccagttctacagccaggt

SEQ ID NO: 2961868 - DNA, 25 bp, Homo sapien
taggcccaggaacgcagaacttcaa

SEQ ID NO: 2961869 - DNA, 25 bp, Homo sapien
ggtaatctgatccaagctctgagtg

SEQ ID NO: 2961870 - DNA, 25 bp, Homo sapien
ggtagcagctacctccacggtgaaa

SEQ ID NO: 2961871 - DNA, 25 bp, Homo sapien
tatttctctggcgagcgttagcaag

SEQ ID NO: 2961872 - DNA, 25 bp, Homo sapien
cccgctgtgactgaaggcaactaga

SEQ ID NO: 2961873 - DNA, 25 bp, Homo sapien
agccctgctacaacctaagtgtgga

SEQ ID NO: 2961874 - DNA, 25 bp, Homo sapien
tcgggctgccattgcacccatctgg

SEQ ID NO: 2961875 - DNA, 25 bp, Homo sapien
tgcgtgcttagcagagaaccttcca

SEQ ID NO: 2961876 - DNA, 25 bp, Homo sapien
tcccccagaacaggaggtgtgcgtg

SEQ ID NO: 2961877 - DNA, 25 bp, Homo sapien
tgtgcgtgtacacgctcgggctgcc

SEQ ID NO: 2961878 - DNA, 25 bp, Homo sapien
catttgtaggacaaggtgcccctcc

SEQ ID NO: 2961879 - DNA, 25 bp, Homo sapien
gctgacacctgctactgacttggaa

SEQ ID NO: 2961880 - DNA, 25 bp, Homo sapien
tggcaagatgctagaatgacccgac

SEQ ID NO: 2961881 - DNA, 25 bp, Homo sapien
agatggtcagctggttcctccgaga

SEQ ID NO: 2961882 - DNA, 25 bp, Homo sapien
gcatccgccatggtcctatcagtga

SEQ ID NO: 2961883 - DNA, 25 bp, Homo sapien
tgacctttcctagtgcctagccgga

SEQ ID NO: 2961884 - DNA, 25 bp, Homo sapien
cctagccggaaggaagaacagcatt

SEQ ID NO: 2961885 - DNA, 25 bp, Homo sapien
aactggctccaacctactttgcaag

SEQ ID NO: 2961886 - DNA, 25 bp, Homo sapien
tagcaattctacaatggagggacgg

SEQ ID NO: 2961887 - DNA, 25 bp, Homo sapien
tggaggtgcaaaaccactaagtgac

SEQ ID NO: 2961888 - DNA, 25 bp, Homo sapien
gctgctcggttataaggtcccctga

SEQ ID NO: 2961889 - DNA, 25 bp, Homo sapien
gacggttgctatcccatttaacagg

SEQ ID NO: 2961890 - DNA, 25 bp, Homo sapien
atggatgaagccctgaatacattcc

SEQ ID NO: 2961891 - DNA, 25 bp, Homo sapien
gaatacattcctacaccattttctg

SEQ ID NO: 2961892 - DNA, 25 bp, Homo sapien
ttcggtggagggtatggatgaagcc

SEQ ID NO: 2961893 - DNA, 25 bp, Homo sapien
catttcggtggagggtatggatgaa

SEQ ID NO: 2961894 - DNA, 25 bp, Homo sapien
tcatgggaactgctacttggctggt

SEQ ID NO: 2961895 - DNA, 25 bp, Homo sapien
tatgaagtgttatcgatctagggcc

SEQ ID NO: 2961896 - DNA, 25 bp, Homo sapien
cacggcctctttagggtggagaaca

SEQ ID NO: 2961897 - DNA, 25 bp, Homo sapien
ggctccggcaggtatccagaaagta

SEQ ID NO: 2961898 - DNA, 25 bp, Homo sapien
caagtttcaaactaggtccctctga

SEQ ID NO: 2961899 - DNA, 25 bp, Homo sapien
aactactacgtaaggcaggcacgga

SEQ ID NO: 2961900 - DNA, 25 bp, Homo sapien
tatgcataaacgcacaaccacgtgt

SEQ ID NO: 2961901 - DNA, 25 bp, Homo sapien
gacagcagtacttagcgttctccaa

SEQ ID NO: 2961902 - DNA, 25 bp, Homo sapien
tcccaggcggtgtactttacgaaca

SEQ ID NO: 2961903 - DNA, 25 bp, Homo sapien
catgttcagcacatcagcattgggc

SEQ ID NO: 2961904 - DNA, 25 bp, Homo sapien
aaatcgaaacatggagctgcaaggc

SEQ ID NO: 2961905 - DNA, 25 bp, Homo sapien
ggaataatgtgctagccacctccca

SEQ ID NO: 2961906 - DNA, 25 bp, Homo sapien
tgtttaatgaacatgcccctgccag

SEQ ID NO: 2961907 - DNA, 25 bp, Homo sapien
aaattcagatagtaccaggcgtggg

SEQ ID NO: 2961908 - DNA, 25 bp, Homo sapien
cagttcctgctgcatacgcaaggca

SEQ ID NO: 2961909 - DNA, 25 bp, Homo sapien
ccatatgcggcctgtgttgtgctca

SEQ ID NO: 2961910 - DNA, 25 bp, Homo sapien
tctcccgagcatggctgcactcgtg

SEQ ID NO: 2961911 - DNA, 25 bp, Homo sapien
cgagcatggctgcactcgtggaaaa

SEQ ID NO: 2961912 - DNA, 25 bp, Homo sapien
ctctcacatgtaaaagcagctcgta

SEQ ID NO: 2961913 - DNA, 25 bp, Homo sapien
tgtaaaagcagctcgtacgcctctc

SEQ ID NO: 2961914 - DNA, 25 bp, Homo sapien
tcgtaagctggccattcaactgccc

SEQ ID NO: 2961915 - DNA, 25 bp, Homo sapien
ccagatgccgcctcaattattaaag

SEQ ID NO: 2961916 - DNA, 25 bp, Homo sapien
cagccgtttgcagttaaaggtgaac

SEQ ID NO: 2961917 - DNA, 25 bp, Homo sapien
tttaaaagcaaaatcgccctgccag

SEQ ID NO: 2961918 - DNA, 25 bp, Homo sapien
tttacgtgggattacagtcaaacca

SEQ ID NO: 2961919 - DNA, 25 bp, Homo sapien
gcagatgacgccatgaagccccatg

SEQ ID NO: 2961920 - DNA, 25 bp, Homo sapien
tctacactaggagacacaagagtcc

SEQ ID NO: 2961921 - DNA, 25 bp, Homo sapien
cagcagatgaggctgaggttgatcc

SEQ ID NO: 2961922 - DNA, 25 bp, Homo sapien
ttcaccgtgaaaatggaaaaccgca

SEQ ID NO: 2961923 - DNA, 25 bp, Homo sapien
gaaaccgacgccaatctatgcacag

SEQ ID NO: 2961924 - DNA, 25 bp, Homo sapien
gattttgtgaataccagcgaacgct

SEQ ID NO: 2961925 - DNA, 25 bp, Homo sapien
cgcactgggctctaacaaggatgtt

SEQ ID NO: 2961926 - DNA, 25 bp, Homo sapien
aatgacgtggtcacctccgagaagc

SEQ ID NO: 2961927 - DNA, 25 bp, Homo sapien
tgtggcttcaaaactctctgcggcg

SEQ ID NO: 2961928 - DNA, 25 bp, Homo sapien
gcagccccttgtttatggagcccgg

SEQ ID NO: 2961929 - DNA, 25 bp, Homo sapien
tggagcccggataccaatgacgtgg

SEQ ID NO: 2961930 - DNA, 25 bp, Homo sapien
cccagcgacaacagctgggtccagg

SEQ ID NO: 2961931 - DNA, 25 bp, Homo sapien
tcccagcgacaacagctgggtccag

SEQ ID NO: 2961932 - DNA, 25 bp, Homo sapien
gtcccagcgacaacagctgggtcca

SEQ ID NO: 2961933 - DNA, 25 bp, Homo sapien
gggcctctcggtccaaagcagtaaa

SEQ ID NO: 2961934 - DNA, 25 bp, Homo sapien
gaaggctaaacagcacactcgggcc

SEQ ID NO: 2961935 - DNA, 25 bp, Homo sapien
atcaatggtgtagggttcggtaact

SEQ ID NO: 2961936 - DNA, 25 bp, Homo sapien
tagggttcggtaactgcacgacctc

SEQ ID NO: 2961937 - DNA, 25 bp, Homo sapien
cagcaggagccgtggaaatcaaacc

SEQ ID NO: 2961938 - DNA, 25 bp, Homo sapien
caaactcgtggagcttgcaaccaaa

SEQ ID NO: 2961939 - DNA, 25 bp, Homo sapien
gagaagtgacctatagtgctagacc

SEQ ID NO: 2961940 - DNA, 25 bp, Homo sapien
caggagacacgtggcaattgctagc

SEQ ID NO: 2961941 - DNA, 25 bp, Homo sapien
acttgccggcaacacacagttctgt

SEQ ID NO: 2961942 - DNA, 25 bp, Homo sapien
agcgagcttctcacaagagcagggt

SEQ ID NO: 2961943 - DNA, 25 bp, Homo sapien
ttcccaccaacgtgattcagcgagc

SEQ ID NO: 2961944 - DNA, 25 bp, Homo sapien
tacttcatggcaacttgccggcaac

SEQ ID NO: 2961945 - DNA, 25 bp, Homo sapien
gaaacgacacaacctgcaaaacagg

SEQ ID NO: 2961946 - DNA, 25 bp, Homo sapien
ccgctgaaacgacacaacctgcaaa

SEQ ID NO: 2961947 - DNA, 25 bp, Homo sapien
agctctcgccggcagaattgagtat

SEQ ID NO: 2961948 - DNA, 25 bp, Homo sapien
ccggcagaattgagtatgggatgct

SEQ ID NO: 2961949 - DNA, 25 bp, Homo sapien
tttgtgaaatgactcgctcgctccc

SEQ ID NO: 2961950 - DNA, 25 bp, Homo sapien
ctttggtactgggaagaactctctc

SEQ ID NO: 2961951 - DNA, 25 bp, Homo sapien
tgtgaactcttccaaccgtgctggc

SEQ ID NO: 2961952 - DNA, 25 bp, Homo sapien
caaaagtcagggttttcgtctagcg

SEQ ID NO: 2961953 - DNA, 25 bp, Homo sapien
aagtccttcgggagcacaaacacag

SEQ ID NO: 2961954 - DNA, 25 bp, Homo sapien
ccttcgggagcacaaacacaggatc

SEQ ID NO: 2961955 - DNA, 25 bp, Homo sapien
caagtcgccaagtccttcgggagca

SEQ ID NO: 2961956 - DNA, 25 bp, Homo sapien
ctccttgttagccaagtcgccaagt

SEQ ID NO: 2961957 - DNA, 25 bp, Homo sapien
taattgaggcatgcacattgttttt

SEQ ID NO: 2961958 - DNA, 25 bp, Homo sapien
catttatatgcactaagacacacaa

SEQ ID NO: 2961959 - DNA, 25 bp, Homo sapien
aaatcatctgactagctttactgca

SEQ ID NO: 2961960 - DNA, 25 bp, Homo sapien
tgtataatctcaaccaagccaaaag

SEQ ID NO: 2961961 - DNA, 25 bp, Homo sapien
caaggacaacgtggaagtggaaatg

SEQ ID NO: 2961962 - DNA, 25 bp, Homo sapien
gctcctcctcaaggacaacgtggaa

SEQ ID NO: 2961963 - DNA, 25 bp, Homo sapien
gggttgtaccttctcaagagccagt

SEQ ID NO: 2961964 - DNA, 25 bp, Homo sapien
tcagggatggagtggcagtgccaga

SEQ ID NO: 2961965 - DNA, 25 bp, Homo sapien
ctttaccaccagtgggctttggaga

SEQ ID NO: 2961966 - DNA, 25 bp, Homo sapien
gctttggagagcttatctggtgcat

SEQ ID NO: 2961967 - DNA, 25 bp, Homo sapien
gggctttggagagcttatctggtgc

SEQ ID NO: 2961968 - DNA, 25 bp, Homo sapien
gtgggctttggagagcttatctggt

SEQ ID NO: 2961969 - DNA, 25 bp, Homo sapien
gaatcctaaggagcacagatgttcc

SEQ ID NO: 2961970 - DNA, 25 bp, Homo sapien
tcctaaggagcacagatgttcctgc

SEQ ID NO: 2961971 - DNA, 25 bp, Homo sapien
ctaaggagcacagatgttcctgcag

SEQ ID NO: 2961972 - DNA, 25 bp, Homo sapien
acggaatcctaaggagcacagatgt

SEQ ID NO: 2961973 - DNA, 25 bp, Homo sapien
taagagcaatcagtgggtcagtgag

SEQ ID NO: 2961974 - DNA, 25 bp, Homo sapien
tgccccagtggctcaaagaagcaaa

SEQ ID NO: 2961975 - DNA, 25 bp, Homo sapien
tacagccacccatctctgaaatggc

SEQ ID NO: 2961976 - DNA, 25 bp, Homo sapien
aacaaaacaccttccgagccaggca

SEQ ID NO: 2961977 - DNA, 25 bp, Homo sapien
gacaacaccaactcggtcagcaaag

SEQ ID NO: 2961978 - DNA, 25 bp, Homo sapien
cagtgcacctgttagctgaatagca

SEQ ID NO: 2961979 - DNA, 25 bp, Homo sapien
gggcaaccggtgcaagaagacagcc

SEQ ID NO: 2961980 - DNA, 25 bp, Homo sapien
aaaagaggaatagccgctgcacacc

SEQ ID NO: 2961981 - DNA, 25 bp, Homo sapien
gcctcagacagctctccaagggaag

SEQ ID NO: 2961982 - DNA, 25 bp, Homo sapien
tcaaactccgaagaaatgcacaagg

SEQ ID NO: 2961983 - DNA, 25 bp, Homo sapien
tgttgctttcagaggcgttccccag

SEQ ID NO: 2961984 - DNA, 25 bp, Homo sapien
gacagaaaccatgctttcctggaga

SEQ ID NO: 2961985 - DNA, 25 bp, Homo sapien
gacacccagccgtgaaggctagagg

SEQ ID NO: 2961986 - DNA, 25 bp, Homo sapien
ggtggtaaacacgacagggacagcc

SEQ ID NO: 2961987 - DNA, 25 bp, Homo sapien
tccagctaaggactcgaccgtggtg

SEQ ID NO: 2961988 - DNA, 25 bp, Homo sapien
aaagctgtgagtattcgcatggacc

SEQ ID NO: 2961989 - DNA, 25 bp, Homo sapien
ttctgagagaagtcatcatgacccg

SEQ ID NO: 2961990 - DNA, 25 bp, Homo sapien
aagacatgataccatcagatgccag

SEQ ID NO: 2961991 - DNA, 25 bp, Homo sapien
tctgcaaagtgggtcaagagggctt

SEQ ID NO: 2961992 - DNA, 25 bp, Homo sapien
aagagactgcaactgtgagctgaca

SEQ ID NO: 2961993 - DNA, 25 bp, Homo sapien
cagtccccaatacaggcgagagcca

SEQ ID NO: 2961994 - DNA, 25 bp, Homo sapien
tgaaaacccactcccatttggtcag

SEQ ID NO: 2961995 - DNA, 25 bp, Homo sapien
ggaggccaggctatacttgagttgc

SEQ ID NO: 2961996 - DNA, 25 bp, Homo sapien
aaggcgtcacagtgggaaattctcc

SEQ ID NO: 2961997 - DNA, 25 bp, Homo sapien
tggtcagtacaactccgataatggt

SEQ ID NO: 2961998 - DNA, 25 bp, Homo sapien
cagggcatcaaagttatcaagaaga

SEQ ID NO: 2961999 - DNA, 25 bp, Homo sapien
gatggtgcactctgctaaaccacag

SEQ ID NO: 2962000 - DNA, 25 bp, Homo sapien
gacgtccccacccaaggataatctg

SEQ ID NO: 2962001 - DNA, 25 bp, Homo sapien
gcttaagagtccaaccagggcatca

SEQ ID NO: 2962002 - DNA, 25 bp, Homo sapien
ttttgggcaaaaatcctgtgccatg

SEQ ID NO: 2962003 - DNA, 25 bp, Homo sapien
cctgtgccatggaggaagaaagtca

SEQ ID NO: 2962004 - DNA, 25 bp, Homo sapien
ttgttttgggcaaaaatcctgtgcc

SEQ ID NO: 2962005 - DNA, 25 bp, Homo sapien
ctgtgccatggaggaagaaagtcag

SEQ ID NO: 2962006 - DNA, 25 bp, Homo sapien
tgtgtgtttgcaagtctaatttaga

SEQ ID NO: 2962007 - DNA, 25 bp, Homo sapien
agatatcactatttgtatacacttt

SEQ ID NO: 2962008 - DNA, 25 bp, Homo sapien
caaggcaaactcaatctgacagcca

SEQ ID NO: 2962009 - DNA, 25 bp, Homo sapien
cttggaaaacaagccaatagttcag

SEQ ID NO: 2962010 - DNA, 25 bp, Homo sapien
tcctgcggatcaaatcagattgtct

SEQ ID NO: 2962011 - DNA, 25 bp, Homo sapien
tacaggattctcctgcggatcaaat

SEQ ID NO: 2962012 - DNA, 25 bp, Homo sapien
tataattgaccttacaggattctcc

SEQ ID NO: 2962013 - DNA, 25 bp, Homo sapien
aaagagcgactatataattgacctt

SEQ ID NO: 2962014 - DNA, 25 bp, Homo sapien
tactgactagtcatggagaacctat

SEQ ID NO: 2962015 - DNA, 25 bp, Homo sapien
gagaacctattttgctggagatcac

SEQ ID NO: 2962016 - DNA, 25 bp, Homo sapien
tgaaactagactaacacacggcctt

SEQ ID NO: 2962017 - DNA, 25 bp, Homo sapien
ggtatttgaagacccagatctgctg

SEQ ID NO: 2962018 - DNA, 25 bp, Homo sapien
ctcctcgccataagcctttctgtta

SEQ ID NO: 2962019 - DNA, 25 bp, Homo sapien
tggtaaatcggtccccatcatccag

SEQ ID NO: 2962020 - DNA, 25 bp, Homo sapien
agtagacatggtaaatcggtcccca

SEQ ID NO: 2962021 - DNA, 25 bp, Homo sapien
caggatctggaaaattaaggagtaa

SEQ ID NO: 2962022 - DNA, 25 bp, Homo sapien
cagaactgaagtctatttcttatca

SEQ ID NO: 2962023 - DNA, 25 bp, Homo sapien
ttctctgccagtctaccttgcatgg

SEQ ID NO: 2962024 - DNA, 25 bp, Homo sapien
cagtctaccttgcatggccataaca

SEQ ID NO: 2962025 - DNA, 25 bp, Homo sapien
ttgcatggccataacacagaactga

SEQ ID NO: 2962026 - DNA, 25 bp, Homo sapien
aagcaaggcaagtcacgcccactgg

SEQ ID NO: 2962027 - DNA, 25 bp, Homo sapien
gaaactctatcaattatgggggaag

SEQ ID NO: 2962028 - DNA, 25 bp, Homo sapien
gaagagggcatcacacccacccaag

SEQ ID NO: 2962029 - DNA, 25 bp, Homo sapien
cacagtccacatggaaactctatca

SEQ ID NO: 2962030 - DNA, 25 bp, Homo sapien
agcatgactgccaaatggactgtgg

SEQ ID NO: 2962031 - DNA, 25 bp, Homo sapien
tgtggcctgctccacaatttgcatt

SEQ ID NO: 2962032 - DNA, 25 bp, Homo sapien
ccagcatgactgccaaatggactgt

SEQ ID NO: 2962033 - DNA, 25 bp, Homo sapien
ggactgtggcctgctccacaatttg

SEQ ID NO: 2962034 - DNA, 25 bp, Homo sapien
caactcgatgtgatgtaggatgctg

SEQ ID NO: 2962035 - DNA, 25 bp, Homo sapien
tctgtttctactgcaactcgatgtg

SEQ ID NO: 2962036 - DNA, 25 bp, Homo sapien
tgtaggatgctgaagcataggagcc

SEQ ID NO: 2962037 - DNA, 25 bp, Homo sapien
taggatgctgaagcataggagccat

SEQ ID NO: 2962038 - DNA, 25 bp, Homo sapien
tccactactgtgttcgcagataacc

SEQ ID NO: 2962039 - DNA, 25 bp, Homo sapien
gccaaactgctcgaaatattgcttt

SEQ ID NO: 2962040 - DNA, 25 bp, Homo sapien
cagataacccgcctacaaatatttt

SEQ ID NO: 2962041 - DNA, 25 bp, Homo sapien
tgctcgaaatattgctttacatctt

SEQ ID NO: 2962042 - DNA, 25 bp, Homo sapien
gtttccgagtctccttgggcatttg

SEQ ID NO: 2962043 - DNA, 25 bp, Homo sapien
cacagacattcaggtcagagaatgc

SEQ ID NO: 2962044 - DNA, 25 bp, Homo sapien
cagagaatgctgacaggtacaggcc

SEQ ID NO: 2962045 - DNA, 25 bp, Homo sapien
tcttgggttggtcccagcctgttcc

SEQ ID NO: 2962046 - DNA, 25 bp, Homo sapien
gacacccttgagaagcacattgtaa

SEQ ID NO: 2962047 - DNA, 25 bp, Homo sapien
tgtccctgcgtcatgaagtcccaaa

SEQ ID NO: 2962048 - DNA, 25 bp, Homo sapien
aaacaagtgactatccaggctctcc

SEQ ID NO: 2962049 - DNA, 25 bp, Homo sapien
gcgaagggtaggttgtgcacaaaca

SEQ ID NO: 2962050 - DNA, 25 bp, Homo sapien
aacagctgaaaggtgcggaacggct

SEQ ID NO: 2962051 - DNA, 25 bp, Homo sapien
tgagctgccctatcattcccgggaa

SEQ ID NO: 2962052 - DNA, 25 bp, Homo sapien
gctccatccgggacgaagcggagaa

SEQ ID NO: 2962053 - DNA, 25 bp, Homo sapien
tagcgagctcggcactgagctgccc

SEQ ID NO: 2962054 - DNA, 25 bp, Homo sapien
aattggaagcctccaaatgcgggct

SEQ ID NO: 2962055 - DNA, 25 bp, Homo sapien
attggaagcctccaaatgcgggctg

SEQ ID NO: 2962056 - DNA, 25 bp, Homo sapien
taattggaagcctccaaatgcgggc

SEQ ID NO: 2962057 - DNA, 25 bp, Homo sapien
ttggaagcctccaaatgcgggctgc

SEQ ID NO: 2962058 - DNA, 25 bp, Homo sapien
gagcagcccgtgataaaggccggat

SEQ ID NO: 2962059 - DNA, 25 bp, Homo sapien
taggcctaatgaaacagaactttgg

SEQ ID NO: 2962060 - DNA, 25 bp, Homo sapien
caaagggtgcagagtcgtttcagct

SEQ ID NO: 2962061 - DNA, 25 bp, Homo sapien
gccaaagccgattaggataaaccaa

SEQ ID NO: 2962062 - DNA, 25 bp, Homo sapien
catgaatgcagcttcgcacctgcac

SEQ ID NO: 2962063 - DNA, 25 bp, Homo sapien
ctgggagatcgcaggcacccagcgc

SEQ ID NO: 2962064 - DNA, 25 bp, Homo sapien
cagaaaaccccggagctgggagatc

SEQ ID NO: 2962065 - DNA, 25 bp, Homo sapien
ttattccaggtatgactctcctcac

SEQ ID NO: 2962066 - DNA, 25 bp, Homo sapien
accttactggcttcagccgaaatca

SEQ ID NO: 2962067 - DNA, 25 bp, Homo sapien
cttactggcttcagccgaaatcagt

SEQ ID NO: 2962068 - DNA, 25 bp, Homo sapien
cgacaaccttactggcttcagccga

SEQ ID NO: 2962069 - DNA, 25 bp, Homo sapien
caaccttactggcttcagccgaaat

SEQ ID NO: 2962070 - DNA, 25 bp, Homo sapien
tattaaatatcagccgtgtgcctca

SEQ ID NO: 2962071 - DNA, 25 bp, Homo sapien
taccaagtctgaatatacggagctg

SEQ ID NO: 2962072 - DNA, 25 bp, Homo sapien
ttaagtgacgtcttcagagggccca

SEQ ID NO: 2962073 - DNA, 25 bp, Homo sapien
tggtaacttgacaaatctggccggt

SEQ ID NO: 2962074 - DNA, 25 bp, Homo sapien
tccagactccgcttgaaggtgacca

SEQ ID NO: 2962075 - DNA, 25 bp, Homo sapien
aattcattctagtttgcaaggccca

SEQ ID NO: 2962076 - DNA, 25 bp, Homo sapien
gacccttttagagtgtcaggccaag

SEQ ID NO: 2962077 - DNA, 25 bp, Homo sapien
tctggagcacgcaggaaggagtatt

SEQ ID NO: 2962078 - DNA, 25 bp, Homo sapien
tgctcatctaacacttgccggcctg

SEQ ID NO: 2962079 - DNA, 25 bp, Homo sapien
ctcatctaacacttgccggcctgtg

SEQ ID NO: 2962080 - DNA, 25 bp, Homo sapien
cagccacttgctcatctaacacttg

SEQ ID NO: 2962081 - DNA, 25 bp, Homo sapien
cacttgctcatctaacacttgccgg

SEQ ID NO: 2962082 - DNA, 25 bp, Homo sapien
tattttgctctttaactacaagaag

SEQ ID NO: 2962083 - DNA, 25 bp, Homo sapien
gaaataatcgccaaatagaagccca

SEQ ID NO: 2962084 - DNA, 25 bp, Homo sapien
tagaagcccagaggggtgcacagac

SEQ ID NO: 2962085 - DNA, 25 bp, Homo sapien
gaagctcacttttcgctacattggg

SEQ ID NO: 2962086 - DNA, 25 bp, Homo sapien
gacaactgtcctcagtgagaggcag

SEQ ID NO: 2962087 - DNA, 25 bp, Homo sapien
tgacacaatctgacaccaacaccga

SEQ ID NO: 2962088 - DNA, 25 bp, Homo sapien
atctgacaccaacaccgacaactgt

SEQ ID NO: 2962089 - DNA, 25 bp, Homo sapien
gtgagaggcagcagtgcggactcag

SEQ ID NO: 2962090 - DNA, 25 bp, Homo sapien
tcctgtgcaagcatcaggccttcca

SEQ ID NO: 2962091 - DNA, 25 bp, Homo sapien
cttctgatctactccgtcctgtgca

SEQ ID NO: 2962092 - DNA, 25 bp, Homo sapien
tgatctactccgtcctgtgcaagca

SEQ ID NO: 2962093 - DNA, 25 bp, Homo sapien
tactccgtcctgtgcaagcatcagg

SEQ ID NO: 2962094 - DNA, 25 bp, Homo sapien
tgtgcttgctttcacaagagcacat

SEQ ID NO: 2962095 - DNA, 25 bp, Homo sapien
tctgtgcttgctttcacaagagcac

SEQ ID NO: 2962096 - DNA, 25 bp, Homo sapien
catattttatagggtacattaaaat

SEQ ID NO: 2962097 - DNA, 25 bp, Homo sapien
ataattatctgtgcttgctttcaca

SEQ ID NO: 2962098 - DNA, 25 bp, Homo sapien
taaaatttagaagccctggctccag

SEQ ID NO: 2962099 - DNA, 25 bp, Homo sapien
ccaaggctgtatggacacccattca

SEQ ID NO: 2962100 - DNA, 25 bp, Homo sapien
cattcatcacctgcacgaggatggg

SEQ ID NO: 2962101 - DNA, 25 bp, Homo sapien
tcagcacctggtacatcaaaagcac

SEQ ID NO: 2962102 - DNA, 25 bp, Homo sapien
tcttgagggcactaaggataaggac

SEQ ID NO: 2962103 - DNA, 25 bp, Homo sapien
caattgcagctgtacattaggactt

SEQ ID NO: 2962104 - DNA, 25 bp, Homo sapien
tgtgcctctagaaggattaccctca

SEQ ID NO: 2962105 - DNA, 25 bp, Homo sapien
tattattactaggagagcagaaggc

SEQ ID NO: 2962106 - DNA, 25 bp, Homo sapien
tgttacagactagagctccactggc

SEQ ID NO: 2962107 - DNA, 25 bp, Homo sapien
cctatttggaggctgtgtgggatca

SEQ ID NO: 2962108 - DNA, 25 bp, Homo sapien
gaaaaacccttgctggtcatccagg

SEQ ID NO: 2962109 - DNA, 25 bp, Homo sapien
gctgaatgagtagacggaagctcca

SEQ ID NO: 2962110 - DNA, 25 bp, Homo sapien
acaccgccgccaaatgcccggtgga

SEQ ID NO: 2962111 - DNA, 25 bp, Homo sapien
cgccaaatgcccggtggagtctgtg

SEQ ID NO: 2962112 - DNA, 25 bp, Homo sapien
gagtctgtgctgcaagggggtgttc

SEQ ID NO: 2962113 - DNA, 25 bp, Homo sapien
caactggctgacttgcccaagtgca

SEQ ID NO: 2962114 - DNA, 25 bp, Homo sapien
tcacattagtgggttaccagcgtca

SEQ ID NO: 2962115 - DNA, 25 bp, Homo sapien
ttagtgggttaccagcgtcactgcc

SEQ ID NO: 2962116 - DNA, 25 bp, Homo sapien
cactgcctcctacaaagcgctgcct

SEQ ID NO: 2962117 - DNA, 25 bp, Homo sapien
tgaaaacatccgtctccagcacgac

SEQ ID NO: 2962118 - DNA, 25 bp, Homo sapien
ccaggccttgggcaaccagaataat

SEQ ID NO: 2962119 - DNA, 25 bp, Homo sapien
tgtgtcatctcatgggcccacagtg

SEQ ID NO: 2962120 - DNA, 25 bp, Homo sapien
gcccttccagggacaaagttctcca

SEQ ID NO: 2962121 - DNA, 25 bp, Homo sapien
ggcatcttctccgtgctgtgttctt

SEQ ID NO: 2962122 - DNA, 25 bp, Homo sapien
tgtgcatgattgttacaatagtttc

SEQ ID NO: 2962123 - DNA, 25 bp, Homo sapien
tctaagctgtttatcacagaagtgt

SEQ ID NO: 2962124 - DNA, 25 bp, Homo sapien
tatcacagaagtgttaatggaaaag

SEQ ID NO: 2962125 - DNA, 25 bp, Homo sapien
tttctctgagcatctaagctgttta

SEQ ID NO: 2962126 - DNA, 25 bp, Homo sapien
aaaatttacttcttgaaaatagatg

SEQ ID NO: 2962127 - DNA, 25 bp, Homo sapien
gaaaatagatgcatatgtctataat

SEQ ID NO: 2962128 - DNA, 25 bp, Homo sapien
tgcatatgtctataatggacacata

SEQ ID NO: 2962129 - DNA, 25 bp, Homo sapien
ataacctatgtgtctacgatcaagc

SEQ ID NO: 2962130 - DNA, 25 bp, Homo sapien
tttccagttgttactccagccccag

SEQ ID NO: 2962131 - DNA, 25 bp, Homo sapien
accctgttaccctccaatgttgaat

SEQ ID NO: 2962132 - DNA, 25 bp, Homo sapien
gcctataaactttgataatgtccta

SEQ ID NO: 2962133 - DNA, 25 bp, Homo sapien
tgcgcctggctggtgctacagcttt

SEQ ID NO: 2962134 - DNA, 25 bp, Homo sapien
tgcggaggagcaaagccaacgtttt

SEQ ID NO: 2962135 - DNA, 25 bp, Homo sapien
tcataacggtcctaggaaccagcgg

SEQ ID NO: 2962136 - DNA, 25 bp, Homo sapien
gaagtaatagaaaagcgtgcccggc

SEQ ID NO: 2962137 - DNA, 25 bp, Homo sapien
gatggaatgatgctagcggcacccc

SEQ ID NO: 2962138 - DNA, 25 bp, Homo sapien
gattttgcccatcaaatctttttct

SEQ ID NO: 2962139 - DNA, 25 bp, Homo sapien
tctctttccctccctaacttcctgc

SEQ ID NO: 2962140 - DNA, 25 bp, Homo sapien
ccctctttccttccaaagacaggat

SEQ ID NO: 2962141 - DNA, 25 bp, Homo sapien
tccttcccaagacagggtttggctc

SEQ ID NO: 2962142 - DNA, 25 bp, Homo sapien
gcgggagtctcccagctatcaccat

SEQ ID NO: 2962143 - DNA, 25 bp, Homo sapien
tccgttatggacacaggtgcccaag

SEQ ID NO: 2962144 - DNA, 25 bp, Homo sapien
cactcgttgcgatgaaaactgcagc

SEQ ID NO: 2962145 - DNA, 25 bp, Homo sapien
gactataacaggaaggtgccggcac

SEQ ID NO: 2962146 - DNA, 25 bp, Homo sapien
aagttggacctaaatgttgccgaca

SEQ ID NO: 2962147 - DNA, 25 bp, Homo sapien
ctgtgggacactcctgaatatttta

SEQ ID NO: 2962148 - DNA, 25 bp, Homo sapien
tctgctcacaagataaggatccctt

SEQ ID NO: 2962149 - DNA, 25 bp, Homo sapien
tctgcaaatcctttgaggcaattct

SEQ ID NO: 2962150 - DNA, 25 bp, Homo sapien
tagactccaaccaatgcaagaggga

SEQ ID NO: 2962151 - DNA, 25 bp, Homo sapien
ttcagaggtccccataacagcactg

SEQ ID NO: 2962152 - DNA, 25 bp, Homo sapien
tggctactctataagcagaacagct

SEQ ID NO: 2962153 - DNA, 25 bp, Homo sapien
aagtcacggccaacaacagcatcaa

SEQ ID NO: 2962154 - DNA, 25 bp, Homo sapien
aaagtaaccataaagcaccgggctg

SEQ ID NO: 2962155 - DNA, 25 bp, Homo sapien
gaaagcttcatacgttaaccaggcg

SEQ ID NO: 2962156 - DNA, 25 bp, Homo sapien
gaaatgtaacctagcctgcaagtga

SEQ ID NO: 2962157 - DNA, 25 bp, Homo sapien
gcagctccatgtttcgcaaggaaga

SEQ ID NO: 2962158 - DNA, 25 bp, Homo sapien
cccccaccctcgccatctgagctct

SEQ ID NO: 2962159 - DNA, 25 bp, Homo sapien
tctctcccctatgcaagaaggtggc

SEQ ID NO: 2962160 - DNA, 25 bp, Homo sapien
ccccaccctcgccatctgagctctc

SEQ ID NO: 2962161 - DNA, 25 bp, Homo sapien
ctctcccctatgcaagaaggtggca

SEQ ID NO: 2962162 - DNA, 25 bp, Homo sapien
aggaagacttgattcctgtccttga

SEQ ID NO: 2962163 - DNA, 25 bp, Homo sapien
gacttgattcctgtccttgagttca

SEQ ID NO: 2962164 - DNA, 25 bp, Homo sapien
taaatgaggaagacttgattcctgt

SEQ ID NO: 2962165 - DNA, 25 bp, Homo sapien
agactttttaaatgaggaagacttg

SEQ ID NO: 2962166 - DNA, 25 bp, Homo sapien
cgccctaactgctgtcaatttaaaa

SEQ ID NO: 2962167 - DNA, 25 bp, Homo sapien
gatctcaggaactatgtggcactca

SEQ ID NO: 2962168 - DNA, 25 bp, Homo sapien
tagtcctgtcttttgcagaatccca

SEQ ID NO: 2962169 - DNA, 25 bp, Homo sapien
caaggtcaagatgtctctgtagatc

SEQ ID NO: 2962170 - DNA, 25 bp, Homo sapien
ttccaatgaactcagccagatcttg

SEQ ID NO: 2962171 - DNA, 25 bp, Homo sapien
gattccaatgaactcagccagatct

SEQ ID NO: 2962172 - DNA, 25 bp, Homo sapien
cagcctttgattccaatgaactcag

SEQ ID NO: 2962173 - DNA, 25 bp, Homo sapien
gaactcagccagatcttggagtgca

SEQ ID NO: 2962174 - DNA, 25 bp, Homo sapien
tgggcatgaaataaacatcaggaca

SEQ ID NO: 2962175 - DNA, 25 bp, Homo sapien
gacaagcgtagctgcagccatacgc

SEQ ID NO: 2962176 - DNA, 25 bp, Homo sapien
tctcctgtggccaatgcagtctcgg

SEQ ID NO: 2962177 - DNA, 25 bp, Homo sapien
taatacgggctgatattgatgggca

SEQ ID NO: 2962178 - DNA, 25 bp, Homo sapien
ttaccaagtgtgaaaatgcacagcc

SEQ ID NO: 2962179 - DNA, 25 bp, Homo sapien
aatggatctccacgactctgaccga

SEQ ID NO: 2962180 - DNA, 25 bp, Homo sapien
tgccaaaatggatctccacgactct

SEQ ID NO: 2962181 - DNA, 25 bp, Homo sapien
acgactctgaccgaaccagggaagg

SEQ ID NO: 2962182 - DNA, 25 bp, Homo sapien
tctttgtacctgaaatgggcacctg

SEQ ID NO: 2962183 - DNA, 25 bp, Homo sapien
aattctttgtacctgaaatgggcac

SEQ ID NO: 2962184 - DNA, 25 bp, Homo sapien
ttctttgtacctgaaatgggcacct

SEQ ID NO: 2962185 - DNA, 25 bp, Homo sapien
ctttgtacctgaaatgggcacctgc

SEQ ID NO: 2962186 - DNA, 25 bp, Homo sapien
ggctcgcaaagacctcctgaataga

SEQ ID NO: 2962187 - DNA, 25 bp, Homo sapien
gggcaaccattgtcataaagaatac

SEQ ID NO: 2962188 - DNA, 25 bp, Homo sapien
gaatagataaagtgtcaggacgaaa

SEQ ID NO: 2962189 - DNA, 25 bp, Homo sapien
tctttcctctgtagtccggctgtac

SEQ ID NO: 2962190 - DNA, 25 bp, Homo sapien
ttatcaaacatcagcattgcatctt

SEQ ID NO: 2962191 - DNA, 25 bp, Homo sapien
cctgttggtagttttatcaaacatc

SEQ ID NO: 2962192 - DNA, 25 bp, Homo sapien
ggtagttttatcaaacatcagcatt

SEQ ID NO: 2962193 - DNA, 25 bp, Homo sapien
caaacatcagcattgcatcttccac

SEQ ID NO: 2962194 - DNA, 25 bp, Homo sapien
aattaagtacagatgccctctacac

SEQ ID NO: 2962195 - DNA, 25 bp, Homo sapien
tcattgcagaggttcatagactcca

SEQ ID NO: 2962196 - DNA, 25 bp, Homo sapien
taaagtggatgggacagaagcagca

SEQ ID NO: 2962197 - DNA, 25 bp, Homo sapien
cattcccaaggctgtaatcactaca

SEQ ID NO: 2962198 - DNA, 25 bp, Homo sapien
caaggttcaatggtaggtgccagca

SEQ ID NO: 2962199 - DNA, 25 bp, Homo sapien
tgcagagtgtaagagcctgagctcc

SEQ ID NO: 2962200 - DNA, 25 bp, Homo sapien
tatcaagattgctaacatggcctgc

SEQ ID NO: 2962201 - DNA, 25 bp, Homo sapien
tacagaagggcatcgcaagtcagct

SEQ ID NO: 2962202 - DNA, 25 bp, Homo sapien
cctctttgccaaggaatgattcaat

SEQ ID NO: 2962203 - DNA, 25 bp, Homo sapien
ttgccaaggaatgattcaattgtcc

SEQ ID NO: 2962204 - DNA, 25 bp, Homo sapien
tcctctttgccaaggaatgattcaa

SEQ ID NO: 2962205 - DNA, 25 bp, Homo sapien
caaggaatgattcaattgtccatta

SEQ ID NO: 2962206 - DNA, 25 bp, Homo sapien
attaccaccgaaccttgtctggttg

SEQ ID NO: 2962207 - DNA, 25 bp, Homo sapien
cggtcccttgttgccgctgctatta

SEQ ID NO: 2962208 - DNA, 25 bp, Homo sapien
gcattttgattgaatgtctgttgaa

SEQ ID NO: 2962209 - DNA, 25 bp, Homo sapien
caataaccgcggtcccttgttgccg

SEQ ID NO: 2962210 - DNA, 25 bp, Homo sapien
tgtctatgcaactactaaacatcac

SEQ ID NO: 2962211 - DNA, 25 bp, Homo sapien
actttttgtctatgcaactactaaa

SEQ ID NO: 2962212 - DNA, 25 bp, Homo sapien
tactaaacatcaccaaatggatccc

SEQ ID NO: 2962213 - DNA, 25 bp, Homo sapien
aatggatcccaatgggaatttcaaa

SEQ ID NO: 2962214 - DNA, 25 bp, Homo sapien
tttcctaggacattcacagtgagcc

SEQ ID NO: 2962215 - DNA, 25 bp, Homo sapien
ggttaagcccttgaaatctgagaga

SEQ ID NO: 2962216 - DNA, 25 bp, Homo sapien
ggatgccacgatgcgtactaaagag

SEQ ID NO: 2962217 - DNA, 25 bp, Homo sapien
gaggcccacctatgatctgcatgga

SEQ ID NO: 2962218 - DNA, 25 bp, Homo sapien
tcagaaagctccacagaagtaagcc

SEQ ID NO: 2962219 - DNA, 25 bp, Homo sapien
tcggcagacgtcatgcagcaactgg

SEQ ID NO: 2962220 - DNA, 25 bp, Homo sapien
taagccattatgtgagttctaagcc

SEQ ID NO: 2962221 - DNA, 25 bp, Homo sapien
gatttctaccctcggctgaacagca

SEQ ID NO: 2962222 - DNA, 25 bp, Homo sapien
gccacatcagccctaaaaagcttgg

SEQ ID NO: 2962223 - DNA, 25 bp, Homo sapien
cagtggtgccaacattctcaaaaca

SEQ ID NO: 2962224 - DNA, 25 bp, Homo sapien
aagaccagtatcagcctctcaaaag

SEQ ID NO: 2962225 - DNA, 25 bp, Homo sapien
gatgccacttttgaataggccaggc

SEQ ID NO: 2962226 - DNA, 25 bp, Homo sapien
tgtgatgtcactggacgccctgacc

SEQ ID NO: 2962227 - DNA, 25 bp, Homo sapien
gaacatcaggtgtgaccctcgtcat

SEQ ID NO: 2962228 - DNA, 25 bp, Homo sapien
tgttgggaggatctcaagctgtcac

SEQ ID NO: 2962229 - DNA, 25 bp, Homo sapien
gcaaagcctctctcccagtagtgag

SEQ ID NO: 2962230 - DNA, 25 bp, Homo sapien
cggtgcttccactgagaaggtggcc

SEQ ID NO: 2962231 - DNA, 25 bp, Homo sapien
ggtgcttccactgagaaggtggcca

SEQ ID NO: 2962232 - DNA, 25 bp, Homo sapien
ccggtgcttccactgagaaggtggc

SEQ ID NO: 2962233 - DNA, 25 bp, Homo sapien
gtgcttccactgagaaggtggccat

SEQ ID NO: 2962234 - DNA, 25 bp, Homo sapien
accgcgcttggctgaacctctgagt

SEQ ID NO: 2962235 - DNA, 25 bp, Homo sapien
agagacagcgggatccagcaagcct

SEQ ID NO: 2962236 - DNA, 25 bp, Homo sapien
ttcttgatacatgggaggcaaacag

SEQ ID NO: 2962237 - DNA, 25 bp, Homo sapien
agcaagcctctctttgctcttggca

SEQ ID NO: 2962238 - DNA, 25 bp, Homo sapien
gttgcatgttcaccactaggattct

SEQ ID NO: 2962239 - DNA, 25 bp, Homo sapien
aaccacgctatcctcaaggcgggag

SEQ ID NO: 2962240 - DNA, 25 bp, Homo sapien
ccagctagggaagttggtattgcca

SEQ ID NO: 2962241 - DNA, 25 bp, Homo sapien
gacaagcactcgatgcaggagccaa

SEQ ID NO: 2962242 - DNA, 25 bp, Homo sapien
agactctctccagacgtccagtggc

SEQ ID NO: 2962243 - DNA, 25 bp, Homo sapien
cacttggccattgtggccagactct

SEQ ID NO: 2962244 - DNA, 25 bp, Homo sapien
ggcagcctgtggagacgtccaccac

SEQ ID NO: 2962245 - DNA, 25 bp, Homo sapien
tctctccagacgtccagtggccttg

SEQ ID NO: 2962246 - DNA, 25 bp, Homo sapien
cctttactgagctgcgaggaaccgt

SEQ ID NO: 2962247 - DNA, 25 bp, Homo sapien
tgactcctctccataccggcagtaa

SEQ ID NO: 2962248 - DNA, 25 bp, Homo sapien
tggtggcaaccaccgcctttactga

SEQ ID NO: 2962249 - DNA, 25 bp, Homo sapien
gaaccgtacaggcattgccctaatg

SEQ ID NO: 2962250 - DNA, 25 bp, Homo sapien
aacaccagtgcccagggtaggagtt

SEQ ID NO: 2962251 - DNA, 25 bp, Homo sapien
atccctggtttcaggccacaggcaa

SEQ ID NO: 2962252 - DNA, 25 bp, Homo sapien
ggtaggagttgcttgggaccagcag

SEQ ID NO: 2962253 - DNA, 25 bp, Homo sapien
ggccacaggcaacaccagtgcccag

SEQ ID NO: 2962254 - DNA, 25 bp, Homo sapien
tcgaaccctatctgcagatgtgaca

SEQ ID NO: 2962255 - DNA, 25 bp, Homo sapien
ggctgtgccaagaggaattaactta

SEQ ID NO: 2962256 - DNA, 25 bp, Homo sapien
tgtgccgtacacaagctctgggtct

SEQ ID NO: 2962257 - DNA, 25 bp, Homo sapien
gaaggtcttccgtgctacttctcga

SEQ ID NO: 2962258 - DNA, 25 bp, Homo sapien
tggtcacctcatgcccataagttac

SEQ ID NO: 2962259 - DNA, 25 bp, Homo sapien
cctcatgcccataagttacagccat

SEQ ID NO: 2962260 - DNA, 25 bp, Homo sapien
ttggtcacctcatgcccataagtta

SEQ ID NO: 2962261 - DNA, 25 bp, Homo sapien
tcacctcatgcccataagttacagc

SEQ ID NO: 2962262 - DNA, 25 bp, Homo sapien
gaaaacatctattcctacaacaaac

SEQ ID NO: 2962263 - DNA, 25 bp, Homo sapien
gcacccagccaacatggattatggt

SEQ ID NO: 2962264 - DNA, 25 bp, Homo sapien
agccaacatggattatggtcttctg

SEQ ID NO: 2962265 - DNA, 25 bp, Homo sapien
gcaccaccgtgccactaatgtttgt

SEQ ID NO: 2962266 - DNA, 25 bp, Homo sapien
atcaacaatgcctctggagtaccca

SEQ ID NO: 2962267 - DNA, 25 bp, Homo sapien
tccaaagctttgcttgcgggtggtg

SEQ ID NO: 2962268 - DNA, 25 bp, Homo sapien
ccaaagctttgcttgcgggtggtgt

SEQ ID NO: 2962269 - DNA, 25 bp, Homo sapien
aagagatgttattatcaacaatgcc

SEQ ID NO: 2962270 - DNA, 25 bp, Homo sapien
gtcagggcagcagattagttcacaa

SEQ ID NO: 2962271 - DNA, 25 bp, Homo sapien
tccgagtgcgctctatagcagtgat

SEQ ID NO: 2962272 - DNA, 25 bp, Homo sapien
tgtgatttgaaagtgcctgcggctg

SEQ ID NO: 2962273 - DNA, 25 bp, Homo sapien
cattttataaggacagacagggtgg

SEQ ID NO: 2962274 - DNA, 25 bp, Homo sapien
ggttcaggcacccattcagactaaa

SEQ ID NO: 2962275 - DNA, 25 bp, Homo sapien
taacgctgtctttaagaagcctctg

SEQ ID NO: 2962276 - DNA, 25 bp, Homo sapien
tccaaggcagaccagggaaagacaa

SEQ ID NO: 2962277 - DNA, 25 bp, Homo sapien
aaagtgtaaatgacagatcctgctt

SEQ ID NO: 2962278 - DNA, 25 bp, Homo sapien
agtaggactgggatgccagacttga

SEQ ID NO: 2962279 - DNA, 25 bp, Homo sapien
cagatgtacctgaagtaggactggg

SEQ ID NO: 2962280 - DNA, 25 bp, Homo sapien
gccagacttgatgctagaagtttct

SEQ ID NO: 2962281 - DNA, 25 bp, Homo sapien
ccccaaccgcagatgtacctgaagt

SEQ ID NO: 2962282 - DNA, 25 bp, Homo sapien
gatgagcacagcagagtgacttctc

SEQ ID NO: 2962283 - DNA, 25 bp, Homo sapien
agcacagcagagtgacttctccgaa

SEQ ID NO: 2962284 - DNA, 25 bp, Homo sapien
gcacagcagagtgacttctccgaac

SEQ ID NO: 2962285 - DNA, 25 bp, Homo sapien
caggatgagcacagcagagtgactt

SEQ ID NO: 2962286 - DNA, 25 bp, Homo sapien
ttttcaaaagcagcagcatgtttct

SEQ ID NO: 2962287 - DNA, 25 bp, Homo sapien
agcagcagcatgtttctgattactg

SEQ ID NO: 2962288 - DNA, 25 bp, Homo sapien
aaagcagcagcatgtttctgattac

SEQ ID NO: 2962289 - DNA, 25 bp, Homo sapien
tcaaaagcagcagcatgtttctgat

SEQ ID NO: 2962290 - DNA, 25 bp, Homo sapien
ataccctgaatggtaattcaggact

SEQ ID NO: 2962291 - DNA, 25 bp, Homo sapien
cataccctgaatggtaattcaggac

SEQ ID NO: 2962292 - DNA, 25 bp, Homo sapien
ccataccctgaatggtaattcagga

SEQ ID NO: 2962293 - DNA, 25 bp, Homo sapien
cccaagccacttctctttgggcttt

SEQ ID NO: 2962294 - DNA, 25 bp, Homo sapien
gggtatttgttcctcaagcgctcct

SEQ ID NO: 2962295 - DNA, 25 bp, Homo sapien
gaaagctgctgggaacgctatccta

SEQ ID NO: 2962296 - DNA, 25 bp, Homo sapien
agggcattcagctcaccctactggg

SEQ ID NO: 2962297 - DNA, 25 bp, Homo sapien
gtaagtgctgctttaccacatggcc

SEQ ID NO: 2962298 - DNA, 25 bp, Homo sapien
tgcagggttgcaccctccttggatg

SEQ ID NO: 2962299 - DNA, 25 bp, Homo sapien
atgaaggtggtagaactggaccctg

SEQ ID NO: 2962300 - DNA, 25 bp, Homo sapien
tagcgttaacatggcgagggagcac

SEQ ID NO: 2962301 - DNA, 25 bp, Homo sapien
cccgcctccgacagcgtttccagca

SEQ ID NO: 2962302 - DNA, 25 bp, Homo sapien
ccgcctccgacagcgtttccagcat

SEQ ID NO: 2962303 - DNA, 25 bp, Homo sapien
agactttctccacaacatcttcatt

SEQ ID NO: 2962304 - DNA, 25 bp, Homo sapien
gatttcatggaaatgaatctcacag

SEQ ID NO: 2962305 - DNA, 25 bp, Homo sapien
ggaaatgaatctcacagactttctc

SEQ ID NO: 2962306 - DNA, 25 bp, Homo sapien
ttattattgatttcatggaaatgaa

SEQ ID NO: 2962307 - DNA, 25 bp, Homo sapien
tgaaaatattcacgacttggccctt

SEQ ID NO: 2962308 - DNA, 25 bp, Homo sapien
cccagcagaactgggtagctgcagt

SEQ ID NO: 2962309 - DNA, 25 bp, Homo sapien
tatgcattgcctatggacgctaccc

SEQ ID NO: 2962310 - DNA, 25 bp, Homo sapien
cagagtttgtccacctcagtatgaa

SEQ ID NO: 2962311 - DNA, 25 bp, Homo sapien
gtgcacctgacatagtcaccctcca

SEQ ID NO: 2962312 - DNA, 25 bp, Homo sapien
ttacgtgcacctgacatagtcaccc

SEQ ID NO: 2962313 - DNA, 25 bp, Homo sapien
tacgtgcacctgacatagtcaccct

SEQ ID NO: 2962314 - DNA, 25 bp, Homo sapien
cgtgcacctgacatagtcaccctcc

SEQ ID NO: 2962315 - DNA, 25 bp, Homo sapien
ctgtcggccaggtaggtcccatctc

SEQ ID NO: 2962316 - DNA, 25 bp, Homo sapien
caggatgtgcaaagagagcttccca

SEQ ID NO: 2962317 - DNA, 25 bp, Homo sapien
tcccaggccgcactatttggggaaa

SEQ ID NO: 2962318 - DNA, 25 bp, Homo sapien
tgtcggccaggtaggtcccatctcc

SEQ ID NO: 2962319 - DNA, 25 bp, Homo sapien
tcagttctaacatctgctccagggt

SEQ ID NO: 2962320 - DNA, 25 bp, Homo sapien
tcactcctgcgtgagcttcagagag

SEQ ID NO: 2962321 - DNA, 25 bp, Homo sapien
cctgactagcgtgagtatgtggcca

SEQ ID NO: 2962322 - DNA, 25 bp, Homo sapien
tgaggcagcaattgcacccctgtaa

SEQ ID NO: 2962323 - DNA, 25 bp, Homo sapien
gatggataaaattccccagtgctca

SEQ ID NO: 2962324 - DNA, 25 bp, Homo sapien
tctcactccaaacaggtcgtgtctg

SEQ ID NO: 2962325 - DNA, 25 bp, Homo sapien
gaccgtctgactgtctggctaacag

SEQ ID NO: 2962326 - DNA, 25 bp, Homo sapien
tggtcttgcgcctgatcagcttgac

SEQ ID NO: 2962327 - DNA, 25 bp, Homo sapien
cagtggatccgaagcccttgcaaag

SEQ ID NO: 2962328 - DNA, 25 bp, Homo sapien
agtctgaggagtatgccaagctttg

SEQ ID NO: 2962329 - DNA, 25 bp, Homo sapien
gtgctgtggccctgcgttacaccct

SEQ ID NO: 2962330 - DNA, 25 bp, Homo sapien
aaaggtaagctcactgccctggcat

SEQ ID NO: 2962331 - DNA, 25 bp, Homo sapien
gggctcccttcccactgtagcccca

SEQ ID NO: 2962332 - DNA, 25 bp, Homo sapien
cagagggcagggcacgggggctccc

SEQ ID NO: 2962333 - DNA, 25 bp, Homo sapien
cttcccactgtagccccacacaggc

SEQ ID NO: 2962334 - DNA, 25 bp, Homo sapien
gcagggcacgggggctcccttccca

SEQ ID NO: 2962335 - DNA, 25 bp, Homo sapien
gctgggtcaacggtgagtgttcccc

SEQ ID NO: 2962336 - DNA, 25 bp, Homo sapien
agtgccaaccacctgctgggtcaac

SEQ ID NO: 2962337 - DNA, 25 bp, Homo sapien
tttgggcagcaatgactgtctgagt

SEQ ID NO: 2962338 - DNA, 25 bp, Homo sapien
ggccaggggccatggcgcatacact

SEQ ID NO: 2962339 - DNA, 25 bp, Homo sapien
atccccatgccaagcatgaacgcgt

SEQ ID NO: 2962340 - DNA, 25 bp, Homo sapien
tgaacgcgtccatggtgtaaggcag

SEQ ID NO: 2962341 - DNA, 25 bp, Homo sapien
catgacttctttcggctgagctttc

SEQ ID NO: 2962342 - DNA, 25 bp, Homo sapien
tgtcccaggtgggaacatgacttct

SEQ ID NO: 2962343 - DNA, 25 bp, Homo sapien
gtttgccccactggtaggtgaccca

SEQ ID NO: 2962344 - DNA, 25 bp, Homo sapien
tgacccagttgggagtagaggcctc

SEQ ID NO: 2962345 - DNA, 25 bp, Homo sapien
ttagaaaacgtagccttagcccaca

SEQ ID NO: 2962346 - DNA, 25 bp, Homo sapien
taaatagacaggattatcgcccacc

SEQ ID NO: 2962347 - DNA, 25 bp, Homo sapien
cattaacactagacagctcatgtgc

SEQ ID NO: 2962348 - DNA, 25 bp, Homo sapien
gatacaattctttgtcagaccacaa

SEQ ID NO: 2962349 - DNA, 25 bp, Homo sapien
gccagaagtgatttaaacagcagca

SEQ ID NO: 2962350 - DNA, 25 bp, Homo sapien
tagaagtgggactcttagccaaacc

SEQ ID NO: 2962351 - DNA, 25 bp, Homo sapien
ctgtggtgcagtgggtactcacagg

SEQ ID NO: 2962352 - DNA, 25 bp, Homo sapien
gctgtggtgcagtgggtactcacag

SEQ ID NO: 2962353 - DNA, 25 bp, Homo sapien
tgtggtgcagtgggtactcacaggc

SEQ ID NO: 2962354 - DNA, 25 bp, Homo sapien
tttaccaggcaagatacagttgcat

SEQ ID NO: 2962355 - DNA, 25 bp, Homo sapien
taccccatgggtaggataaatgaag

SEQ ID NO: 2962356 - DNA, 25 bp, Homo sapien
gaagaagactagtgcctctgtgacc

SEQ ID NO: 2962357 - DNA, 25 bp, Homo sapien
ttaggcacaaccacagctacagcag

SEQ ID NO: 2962358 - DNA, 25 bp, Homo sapien
tgtccggctcaaaggtgggagacct

SEQ ID NO: 2962359 - DNA, 25 bp, Homo sapien
gagaccacccagagtatggagaaaa

SEQ ID NO: 2962360 - DNA, 25 bp, Homo sapien
caggtgtaggttttccccaaggatg

SEQ ID NO: 2962361 - DNA, 25 bp, Homo sapien
gattctgtcaaacgctgtaaaagct

SEQ ID NO: 2962362 - DNA, 25 bp, Homo sapien
gaagcttttctttgagggctcagca

SEQ ID NO: 2962363 - DNA, 25 bp, Homo sapien
tcagtacgactgcacctaagaatgc

SEQ ID NO: 2962364 - DNA, 25 bp, Homo sapien
ctaagaatgcttttggctaacgtgc

SEQ ID NO: 2962365 - DNA, 25 bp, Homo sapien
tcgtttctgggcctgctagggtgaa

SEQ ID NO: 2962366 - DNA, 25 bp, Homo sapien
tactctggacgcctgatcaatccca

SEQ ID NO: 2962367 - DNA, 25 bp, Homo sapien
cactggccactgcacaatttatctg

SEQ ID NO: 2962368 - DNA, 25 bp, Homo sapien
aatttatctgctccaatactctgga

SEQ ID NO: 2962369 - DNA, 25 bp, Homo sapien
tcaatcccacagtaattatctcttg

SEQ ID NO: 2962370 - DNA, 25 bp, Homo sapien
gacacttgtagaaactgccactggg

SEQ ID NO: 2962371 - DNA, 25 bp, Homo sapien
tgggcacacaagaaactcagctggc

SEQ ID NO: 2962372 - DNA, 25 bp, Homo sapien
ggatgggcgtttcaccacaagcgta

SEQ ID NO: 2962373 - DNA, 25 bp, Homo sapien
tgcagttttgacactccacggaggt

SEQ ID NO: 2962374 - DNA, 25 bp, Homo sapien
tctggaaaacgctgggcctgatgag

SEQ ID NO: 2962375 - DNA, 25 bp, Homo sapien
tggaaaacgctgggcctgatgagcc

SEQ ID NO: 2962376 - DNA, 25 bp, Homo sapien
cctgggcctctggaaaacgctgggc

SEQ ID NO: 2962377 - DNA, 25 bp, Homo sapien
tgggcctctggaaaacgctgggcct

SEQ ID NO: 2962378 - DNA, 25 bp, Homo sapien
caggagtcacagtttagcggccaaa

SEQ ID NO: 2962379 - DNA, 25 bp, Homo sapien
tcgtgatgcatcctcccaaggcagt

SEQ ID NO: 2962380 - DNA, 25 bp, Homo sapien
taaaatctcacggagggtggcaatg

SEQ ID NO: 2962381 - DNA, 25 bp, Homo sapien
cagacagagcatgcgaactcaggag

SEQ ID NO: 2962382 - DNA, 25 bp, Homo sapien
ggtagccacggccataggtcgccac

SEQ ID NO: 2962383 - DNA, 25 bp, Homo sapien
gaactgatagccatagcttggagca

SEQ ID NO: 2962384 - DNA, 25 bp, Homo sapien
ctgggaactgatagccatagcttgg

SEQ ID NO: 2962385 - DNA, 25 bp, Homo sapien
taggtcgccacgaagttgggatatc

SEQ ID NO: 2962386 - DNA, 25 bp, Homo sapien
gataatctaaacagctcacccagga

SEQ ID NO: 2962387 - DNA, 25 bp, Homo sapien
tcaaacattgggcaggtggacacag

SEQ ID NO: 2962388 - DNA, 25 bp, Homo sapien
caagtcttgatacccacgcagaggg

SEQ ID NO: 2962389 - DNA, 25 bp, Homo sapien
tggtatcggagacaggacaagagct

SEQ ID NO: 2962390 - DNA, 25 bp, Homo sapien
gagatgcgtgagcctttgcacctgt

SEQ ID NO: 2962391 - DNA, 25 bp, Homo sapien
ggagggccgagatgcgtgagccttt

SEQ ID NO: 2962392 - DNA, 25 bp, Homo sapien
gagggccgagatgcgtgagcctttg

SEQ ID NO: 2962393 - DNA, 25 bp, Homo sapien
agggccgagatgcgtgagcctttgc

SEQ ID NO: 2962394 - DNA, 25 bp, Homo sapien
ggactgtggccatgacaaacggatg

SEQ ID NO: 2962395 - DNA, 25 bp, Homo sapien
ggaatagactctgaccctagcctgg

SEQ ID NO: 2962396 - DNA, 25 bp, Homo sapien
tacctaggctttgtgtctggaaaca

SEQ ID NO: 2962397 - DNA, 25 bp, Homo sapien
gcaaccttactcttgtggccactgg

SEQ ID NO: 2962398 - DNA, 25 bp, Homo sapien
atccccggggcatggcaggggttcg

SEQ ID NO: 2962399 - DNA, 25 bp, Homo sapien
catggcaggggttcgcagaatctac

SEQ ID NO: 2962400 - DNA, 25 bp, Homo sapien
ggcatggcaggggttcgcagaatct

SEQ ID NO: 2962401 - DNA, 25 bp, Homo sapien
cggggcatggcaggggttcgcagaa

SEQ ID NO: 2962402 - DNA, 25 bp, Homo sapien
catcaggatagttgggaggtgacat

SEQ ID NO: 2962403 - DNA, 25 bp, Homo sapien
atagttgggaggtgacatgactgct

SEQ ID NO: 2962404 - DNA, 25 bp, Homo sapien
aacatcaggatagttgggaggtgac

SEQ ID NO: 2962405 - DNA, 25 bp, Homo sapien
agaaaacatcaggatagttgggagg

SEQ ID NO: 2962406 - DNA, 25 bp, Homo sapien
gtaaagtgggcatacagtgaggaca

SEQ ID NO: 2962407 - DNA, 25 bp, Homo sapien
gagaggttcgggatccatgcacagc

SEQ ID NO: 2962408 - DNA, 25 bp, Homo sapien
gcacagcatgagggggaccggaggt

SEQ ID NO: 2962409 - DNA, 25 bp, Homo sapien
aagtgggtaaagtgggcatacagtg

SEQ ID NO: 2962410 - DNA, 25 bp, Homo sapien
gagtctcggagctctctaggacctg

SEQ ID NO: 2962411 - DNA, 25 bp, Homo sapien
ccaaccagatgagatggatgttcat

SEQ ID NO: 2962412 - DNA, 25 bp, Homo sapien
gggatcctgatccaaattccaggct

SEQ ID NO: 2962413 - DNA, 25 bp, Homo sapien
cataataattcaagacgggatcctg

SEQ ID NO: 2962414 - DNA, 25 bp, Homo sapien
ttatgtcttgtgaaaccggcaaata

SEQ ID NO: 2962415 - DNA, 25 bp, Homo sapien
atgtcttgtgaaaccggcaaatagt

SEQ ID NO: 2962416 - DNA, 25 bp, Homo sapien
aaattatgtcttgtgaaaccggcaa

SEQ ID NO: 2962417 - DNA, 25 bp, Homo sapien
aattatgtcttgtgaaaccggcaaa

SEQ ID NO: 2962418 - DNA, 25 bp, Homo sapien
catcaaatggaagcgtgcgggtcac

SEQ ID NO: 2962419 - DNA, 25 bp, Homo sapien
tccatcgtaagacacgggtgctcca

SEQ ID NO: 2962420 - DNA, 25 bp, Homo sapien
aaagcagtgactcttgagggtccaa

SEQ ID NO: 2962421 - DNA, 25 bp, Homo sapien
gccaaactgcacatgtagggtctca

SEQ ID NO: 2962422 - DNA, 25 bp, Homo sapien
tatttttctacctcggttgcttaca

SEQ ID NO: 2962423 - DNA, 25 bp, Homo sapien
catactaggacaagttcaccaaagc

SEQ ID NO: 2962424 - DNA, 25 bp, Homo sapien
cgtttgtgaggcaagcatactagga

SEQ ID NO: 2962425 - DNA, 25 bp, Homo sapien
gcacagatgaactatttacagagat

SEQ ID NO: 2962426 - DNA, 25 bp, Homo sapien
tctagctgagctcaaggacctgggc

SEQ ID NO: 2962427 - DNA, 25 bp, Homo sapien
caactggctaatggtaagctgggcc

SEQ ID NO: 2962428 - DNA, 25 bp, Homo sapien
tgagcacttttcatggccacagagc

SEQ ID NO: 2962429 - DNA, 25 bp, Homo sapien
tggctgacacattacaagggctccg

SEQ ID NO: 2962430 - DNA, 25 bp, Homo sapien
ttaaaatgtcaatgaaaagagacat

SEQ ID NO: 2962431 - DNA, 25 bp, Homo sapien
aaaatgtcaatgaaaagagacatac

SEQ ID NO: 2962432 - DNA, 25 bp, Homo sapien
taaaatgtcaatgaaaagagacata

SEQ ID NO: 2962433 - DNA, 25 bp, Homo sapien
caaacagagcgaactagaagcccac

SEQ ID NO: 2962434 - DNA, 25 bp, Homo sapien
catccaggcagatgcttggaggcct

SEQ ID NO: 2962435 - DNA, 25 bp, Homo sapien
tttaaatgatgtgccagaagccagc

SEQ ID NO: 2962436 - DNA, 25 bp, Homo sapien
gaggaagacatgcaccgtcaagggc

SEQ ID NO: 2962437 - DNA, 25 bp, Homo sapien
agatcatggcggagtggtcagcccc

SEQ ID NO: 2962438 - DNA, 25 bp, Homo sapien
ttggccgtgcatcgacacagtggct

SEQ ID NO: 2962439 - DNA, 25 bp, Homo sapien
acttgggacggcctcttgacagagc

SEQ ID NO: 2962440 - DNA, 25 bp, Homo sapien
ggtgattgcatacacatggagccag

SEQ ID NO: 2962441 - DNA, 25 bp, Homo sapien
gccactggtccataagccgctgctg

SEQ ID NO: 2962442 - DNA, 25 bp, Homo sapien
ccactggtccataagccgctgctgg

SEQ ID NO: 2962443 - DNA, 25 bp, Homo sapien
tgccactggtccataagccgctgct

SEQ ID NO: 2962444 - DNA, 25 bp, Homo sapien
gctgccactggtccataagccgctg

SEQ ID NO: 2962445 - DNA, 25 bp, Homo sapien
ggtcccctgagccctgctcacctca

SEQ ID NO: 2962446 - DNA, 25 bp, Homo sapien
ccctgagccctgctcacctcaggtc

SEQ ID NO: 2962447 - DNA, 25 bp, Homo sapien
ctggtggggtcccctgagccctgct

SEQ ID NO: 2962448 - DNA, 25 bp, Homo sapien
tcccctgagccctgctcacctcagg

SEQ ID NO: 2962449 - DNA, 25 bp, Homo sapien
gatgccagaaactgctgcaatcatt

SEQ ID NO: 2962450 - DNA, 25 bp, Homo sapien
gagaaggagggcgaagctaagagaa

SEQ ID NO: 2962451 - DNA, 25 bp, Homo sapien
ggcgaagctaagagaattgcagaaa

SEQ ID NO: 2962452 - DNA, 25 bp, Homo sapien
cagaaaaaggatccctgaacaagcc

SEQ ID NO: 2962453 - DNA, 25 bp, Homo sapien
tccaagcctgaacggaatgtgccct

SEQ ID NO: 2962454 - DNA, 25 bp, Homo sapien
tttaacttcgaaggccagggcatgg

SEQ ID NO: 2962455 - DNA, 25 bp, Homo sapien
aatgtgccctttaagccagatggga

SEQ ID NO: 2962456 - DNA, 25 bp, Homo sapien
gagtaatcaacaaggcaacctctcc

SEQ ID NO: 2962457 - DNA, 25 bp, Homo sapien
ggctcccaaggaccctttagtctga

SEQ ID NO: 2962458 - DNA, 25 bp, Homo sapien
agagctgtagagctgaaatggctcc

SEQ ID NO: 2962459 - DNA, 25 bp, Homo sapien
aagggatttccagctttggaaacag

SEQ ID NO: 2962460 - DNA, 25 bp, Homo sapien
tttccagctttggaaacagcagcaa

SEQ ID NO: 2962461 - DNA, 25 bp, Homo sapien
gccacaaagatgttatggagcttta

SEQ ID NO: 2962462 - DNA, 25 bp, Homo sapien
aaagatgttatggagctttacatcc

SEQ ID NO: 2962463 - DNA, 25 bp, Homo sapien
gttatggagctttacatccagcaag

SEQ ID NO: 2962464 - DNA, 25 bp, Homo sapien
cagccacaaagatgttatggagctt

SEQ ID NO: 2962465 - DNA, 25 bp, Homo sapien
agcctaatgtagtcttctcaatcat

SEQ ID NO: 2962466 - DNA, 25 bp, Homo sapien
ccctattagcaagaaactcctccag

SEQ ID NO: 2962467 - DNA, 25 bp, Homo sapien
catagtcgtaggactctgtctcccc

SEQ ID NO: 2962468 - DNA, 25 bp, Homo sapien
tctatgttcctagtcagagggcata

SEQ ID NO: 2962469 - DNA, 25 bp, Homo sapien
gacactgggtccacaatgccagttg

SEQ ID NO: 2962470 - DNA, 25 bp, Homo sapien
ggcttgggacaagccctgctctagg

SEQ ID NO: 2962471 - DNA, 25 bp, Homo sapien
gctcattgcggtgatcaggttcatt

SEQ ID NO: 2962472 - DNA, 25 bp, Homo sapien
gtttgggggctcattgcggtgatca

SEQ ID NO: 2962473 - DNA, 25 bp, Homo sapien
tgggggctcattgcggtgatcaggt

SEQ ID NO: 2962474 - DNA, 25 bp, Homo sapien
ctaagcgaacggtgcctttccccag

SEQ ID NO: 2962475 - DNA, 25 bp, Homo sapien
tccttctaagcgaacggtgcctttc

SEQ ID NO: 2962476 - DNA, 25 bp, Homo sapien
gtgatccttctaagcgaacggtgcc

SEQ ID NO: 2962477 - DNA, 25 bp, Homo sapien
tctgtggaagtcattctccagtcaa

SEQ ID NO: 2962478 - DNA, 25 bp, Homo sapien
gagtggacttgacacgcacaaatcc

SEQ ID NO: 2962479 - DNA, 25 bp, Homo sapien
tgacacgcacaaatccagagagtgg

SEQ ID NO: 2962480 - DNA, 25 bp, Homo sapien
cctttgctacagagagagtggactt

SEQ ID NO: 2962481 - DNA, 25 bp, Homo sapien
gaacagcaggctcaggatgtacctt

SEQ ID NO: 2962482 - DNA, 25 bp, Homo sapien
cgactgaaccaattcatagctaaac

SEQ ID NO: 2962483 - DNA, 25 bp, Homo sapien
gaaccaattcatagctaaaccatag

SEQ ID NO: 2962484 - DNA, 25 bp, Homo sapien
ccaattcatagctaaaccatagctg

SEQ ID NO: 2962485 - DNA, 25 bp, Homo sapien
ctgaaccaattcatagctaaaccat

SEQ ID NO: 2962486 - DNA, 25 bp, Homo sapien
taatgatggcggcagagagtttcct

SEQ ID NO: 2962487 - DNA, 25 bp, Homo sapien
gagtttgggcatcttgacataacag

SEQ ID NO: 2962488 - DNA, 25 bp, Homo sapien
gcccttcccattcataacactgaat

SEQ ID NO: 2962489 - DNA, 25 bp, Homo sapien
tcaatactgaacgtggtcggaggat

SEQ ID NO: 2962490 - DNA, 25 bp, Homo sapien
aagcgggcgcgccaaaattcggttg

SEQ ID NO: 2962491 - DNA, 25 bp, Homo sapien
tgccggggaagcgggcgcgccaaaa

SEQ ID NO: 2962492 - DNA, 25 bp, Homo sapien
gcgggcgcgccaaaattcggttgag

SEQ ID NO: 2962493 - DNA, 25 bp, Homo sapien
ctgccggggaagcgggcgcgccaaa

SEQ ID NO: 2962494 - DNA, 25 bp, Homo sapien
gtgggctggccgcacttatgtaatt

SEQ ID NO: 2962495 - DNA, 25 bp, Homo sapien
tggcagggccgtagagatcggcgac

SEQ ID NO: 2962496 - DNA, 25 bp, Homo sapien
tgtaattccccactccggagtcctg

SEQ ID NO: 2962497 - DNA, 25 bp, Homo sapien
agagatcggcgacaggtcctgggct

SEQ ID NO: 2962498 - DNA, 25 bp, Homo sapien
ccccgatgttgggctttcctggcac

SEQ ID NO: 2962499 - DNA, 25 bp, Homo sapien
tgcccccgatgttgggctttcctgg

SEQ ID NO: 2962500 - DNA, 25 bp, Homo sapien
tctgcccccgatgttgggctttcct

SEQ ID NO: 2962501 - DNA, 25 bp, Homo sapien
cctctgcccccgatgttgggctttc

SEQ ID NO: 2962502 - DNA, 25 bp, Homo sapien
tgtaaaggccgttgcaatcaaaggt

SEQ ID NO: 2962503 - DNA, 25 bp, Homo sapien
tttgtaaaggccgttgcaatcaaag

SEQ ID NO: 2962504 - DNA, 25 bp, Homo sapien
ccatttgtaaaggccgttgcaatca

SEQ ID NO: 2962505 - DNA, 25 bp, Homo sapien
taaaggccgttgcaatcaaaggtcc

SEQ ID NO: 2962506 - DNA, 25 bp, Homo sapien
ctcagagtgagatggcaacgaaagc

SEQ ID NO: 2962507 - DNA, 25 bp, Homo sapien
gagtgagatggcaacgaaagcacct

SEQ ID NO: 2962508 - DNA, 25 bp, Homo sapien
tcagagtgagatggcaacgaaagca

SEQ ID NO: 2962509 - DNA, 25 bp, Homo sapien
gtgagatggcaacgaaagcacctgc

SEQ ID NO: 2962510 - DNA, 25 bp, Homo sapien
agagcatcaaactgcctgggaccga

SEQ ID NO: 2962511 - DNA, 25 bp, Homo sapien
tcgatccgaagtgagccatctctgg

SEQ ID NO: 2962512 - DNA, 25 bp, Homo sapien
gagatgtagtcaaccctcgatccga

SEQ ID NO: 2962513 - DNA, 25 bp, Homo sapien
taaacagtgctctaacttgtcctgg

SEQ ID NO: 2962514 - DNA, 25 bp, Homo sapien
catcataagtatctttccccaaccg

SEQ ID NO: 2962515 - DNA, 25 bp, Homo sapien
tgctgttgccgacctattaccaata

SEQ ID NO: 2962516 - DNA, 25 bp, Homo sapien
tttaatgccatctattgagttgtac

SEQ ID NO: 2962517 - DNA, 25 bp, Homo sapien
tgagttgtacttctatagttgctgt

SEQ ID NO: 2962518 - DNA, 25 bp, Homo sapien
aaatgtcgcattcagtgtctcatac

SEQ ID NO: 2962519 - DNA, 25 bp, Homo sapien
catactggctgtgccttaagtacca

SEQ ID NO: 2962520 - DNA, 25 bp, Homo sapien
cattagtctactttgttagtaaaat

SEQ ID NO: 2962521 - DNA, 25 bp, Homo sapien
tctgtgaatgtctacattagtctac

SEQ ID NO: 2962522 - DNA, 25 bp, Homo sapien
tagcccacgctacttaagaggacac

SEQ ID NO: 2962523 - DNA, 25 bp, Homo sapien
tataaggaaggccacgagccaagtc

SEQ ID NO: 2962524 - DNA, 25 bp, Homo sapien
tgtttgaatcaagctaatgggcgac

SEQ ID NO: 2962525 - DNA, 25 bp, Homo sapien
ggtagtatggcaccccttcacagtg

SEQ ID NO: 2962526 - DNA, 25 bp, Homo sapien
gccatccacatagtaattttttaca

SEQ ID NO: 2962527 - DNA, 25 bp, Homo sapien
ctcatcagtttcatactaaagtata

SEQ ID NO: 2962528 - DNA, 25 bp, Homo sapien
tgagagactgccatccacatagtaa

SEQ ID NO: 2962529 - DNA, 25 bp, Homo sapien
aaaatactcactaccaaagttctca

SEQ ID NO: 2962530 - DNA, 25 bp, Homo sapien
gatttctggaccacagtagaggatg

SEQ ID NO: 2962531 - DNA, 25 bp, Homo sapien
acattgatttctggaccacagtaga

SEQ ID NO: 2962532 - DNA, 25 bp, Homo sapien
gacaaacacattgatttctggacca

SEQ ID NO: 2962533 - DNA, 25 bp, Homo sapien
tgtcagacaaacacattgatttctg

SEQ ID NO: 2962534 - DNA, 25 bp, Homo sapien
gctcttccatcttagtgctctcttg

SEQ ID NO: 2962535 - DNA, 25 bp, Homo sapien
tcttgccacttcataaaaatggtgc

SEQ ID NO: 2962536 - DNA, 25 bp, Homo sapien
gatttgatgatatcctctcccgccc

SEQ ID NO: 2962537 - DNA, 25 bp, Homo sapien
catgggttctgtgtaccttctgctg

SEQ ID NO: 2962538 - DNA, 25 bp, Homo sapien
tcagcagctatacaaccatgggcaa

SEQ ID NO: 2962539 - DNA, 25 bp, Homo sapien
tgacatttgtcaccaggcttgaacc

SEQ ID NO: 2962540 - DNA, 25 bp, Homo sapien
caggtaggcacctaggttagaagcc

SEQ ID NO: 2962541 - DNA, 25 bp, Homo sapien
ggcacactcaacactgacgctgaca

SEQ ID NO: 2962542 - DNA, 25 bp, Homo sapien
gaggggtggcgagggcagcaggaca

SEQ ID NO: 2962543 - DNA, 25 bp, Homo sapien
cagccaggctggctgatgcggccat

SEQ ID NO: 2962544 - DNA, 25 bp, Homo sapien
ctgtgggaggggtggcgagggcagc

SEQ ID NO: 2962545 - DNA, 25 bp, Homo sapien
gggaggggtggcgagggcagcagga

SEQ ID NO: 2962546 - DNA, 25 bp, Homo sapien
ttcagtgtccggtgagcacccgctt

SEQ ID NO: 2962547 - DNA, 25 bp, Homo sapien
tcagtccacagcaaagcatgcgggc

SEQ ID NO: 2962548 - DNA, 25 bp, Homo sapien
gcatgcgggcttcttaggtctcata

SEQ ID NO: 2962549 - DNA, 25 bp, Homo sapien
cacttcatgtgcacgtacacctgta

SEQ ID NO: 2962550 - DNA, 25 bp, Homo sapien
gtgctagcctcaggtggttctcagg

SEQ ID NO: 2962551 - DNA, 25 bp, Homo sapien
cagcgccatctgcttgacccggctg

SEQ ID NO: 2962552 - DNA, 25 bp, Homo sapien
tggccagcgccatctgcttgacccg

SEQ ID NO: 2962553 - DNA, 25 bp, Homo sapien
ggtgctagcctcaggtggttctcag

SEQ ID NO: 2962554 - DNA, 25 bp, Homo sapien
gagtctggctgtcacttgattcccc

SEQ ID NO: 2962555 - DNA, 25 bp, Homo sapien
cccagaattcggtcttgctagctcg

SEQ ID NO: 2962556 - DNA, 25 bp, Homo sapien
tgctagctcggttccctggagtctg

SEQ ID NO: 2962557 - DNA, 25 bp, Homo sapien
ttcggtcttgctagctcggttccct

SEQ ID NO: 2962558 - DNA, 25 bp, Homo sapien
gcatcagtccaggctaggatatcag

SEQ ID NO: 2962559 - DNA, 25 bp, Homo sapien
tcagtccaggctaggatatcagaga

SEQ ID NO: 2962560 - DNA, 25 bp, Homo sapien
ttgatgagcaaggtagatgtctatg

SEQ ID NO: 2962561 - DNA, 25 bp, Homo sapien
tgagcaaggtagatgtctatgttgg

SEQ ID NO: 2962562 - DNA, 25 bp, Homo sapien
ctgaggacctggcaatgggacagct

SEQ ID NO: 2962563 - DNA, 25 bp, Homo sapien
cattaagggtgggatgacggcctta

SEQ ID NO: 2962564 - DNA, 25 bp, Homo sapien
tgtacgttccgctttccccatcttc

SEQ ID NO: 2962565 - DNA, 25 bp, Homo sapien
ctcagggccagaggatgctctggat

SEQ ID NO: 2962566 - DNA, 25 bp, Homo sapien
caaatctcaaagaccagatggagct

SEQ ID NO: 2962567 - DNA, 25 bp, Homo sapien
agcaaatctcaaagaccagatggag

SEQ ID NO: 2962568 - DNA, 25 bp, Homo sapien
gcaaatctcaaagaccagatggagc

SEQ ID NO: 2962569 - DNA, 25 bp, Homo sapien
tagttcttgtgaaggcagactctat

SEQ ID NO: 2962570 - DNA, 25 bp, Homo sapien
ttaactagttcttgtgaaggcagac

SEQ ID NO: 2962571 - DNA, 25 bp, Homo sapien
taaggatctcaccaagggtttccac

SEQ ID NO: 2962572 - DNA, 25 bp, Homo sapien
ctcctttgtcgaagaaaataaggat

SEQ ID NO: 2962573 - DNA, 25 bp, Homo sapien
ctcacagtcctgatggccaaggaca

SEQ ID NO: 2962574 - DNA, 25 bp, Homo sapien
ggccaaggacagtggttgatcccat

SEQ ID NO: 2962575 - DNA, 25 bp, Homo sapien
cctggcaaggggtgctattcttttc

SEQ ID NO: 2962576 - DNA, 25 bp, Homo sapien
gtgctattcttttcctcacagtcct

SEQ ID NO: 2962577 - DNA, 25 bp, Homo sapien
agacgtgtgagaacctgaaacaggg

SEQ ID NO: 2962578 - DNA, 25 bp, Homo sapien
gcaatggccagggtgtagacgtgtg

SEQ ID NO: 2962579 - DNA, 25 bp, Homo sapien
tagacgtgtgagaacctgaaacagg

SEQ ID NO: 2962580 - DNA, 25 bp, Homo sapien
tggccagggtgtagacgtgtgagaa

SEQ ID NO: 2962581 - DNA, 25 bp, Homo sapien
ttgaatgtcccctccgaaacccatg

SEQ ID NO: 2962582 - DNA, 25 bp, Homo sapien
gcctttaggcagtttctttggaaga

SEQ ID NO: 2962583 - DNA, 25 bp, Homo sapien
ttattaagaatatgatatagtccag

SEQ ID NO: 2962584 - DNA, 25 bp, Homo sapien
tggccctttgaaggtaagtactgct

SEQ ID NO: 2962585 - DNA, 25 bp, Homo sapien
caaacatcagagacgtcagaacagc

SEQ ID NO: 2962586 - DNA, 25 bp, Homo sapien
tgcccgggatttgatagccacctgt

SEQ ID NO: 2962587 - DNA, 25 bp, Homo sapien
ggtgtcatcatgtcagcgggaaagc

SEQ ID NO: 2962588 - DNA, 25 bp, Homo sapien
ggtgagaaatccatgatccctggcc

SEQ ID NO: 2962589 - DNA, 25 bp, Homo sapien
tcagattatgacaaacggcgtgggt

SEQ ID NO: 2962590 - DNA, 25 bp, Homo sapien
aggtatttttagcaccgcggctcgg

SEQ ID NO: 2962591 - DNA, 25 bp, Homo sapien
taggacagcgccgtggatggtttcc

SEQ ID NO: 2962592 - DNA, 25 bp, Homo sapien
gagtccgattcttgcagacgcacgg

SEQ ID NO: 2962593 - DNA, 25 bp, Homo sapien
agggggcctgagcatcttgttgcct

SEQ ID NO: 2962594 - DNA, 25 bp, Homo sapien
ctggaggtggtgtgtctcgggaggg

SEQ ID NO: 2962595 - DNA, 25 bp, Homo sapien
cctgagcatcttgttgcctgctcat

SEQ ID NO: 2962596 - DNA, 25 bp, Homo sapien
gggcctgagcatcttgttgcctgct

SEQ ID NO: 2962597 - DNA, 25 bp, Homo sapien
tcacacaattgggagacccggaggg

SEQ ID NO: 2962598 - DNA, 25 bp, Homo sapien
ctgctgctgttgacactggcgggta

SEQ ID NO: 2962599 - DNA, 25 bp, Homo sapien
gaagcttggaaggtcggtctctcat

SEQ ID NO: 2962600 - DNA, 25 bp, Homo sapien
gaggtctttgcgctgctctgccctg

SEQ ID NO: 2962601 - DNA, 25 bp, Homo sapien
tagtccttgctaatatttactttga

SEQ ID NO: 2962602 - DNA, 25 bp, Homo sapien
atgatgccacctttgaagttctcca

SEQ ID NO: 2962603 - DNA, 25 bp, Homo sapien
gaaaatgatgccacctttgaagttc

SEQ ID NO: 2962604 - DNA, 25 bp, Homo sapien
aaatgatgccacctttgaagttctc

SEQ ID NO: 2962605 - DNA, 25 bp, Homo sapien
cagtggggcaaactcagctcattac

SEQ ID NO: 2962606 - DNA, 25 bp, Homo sapien
gggcaaactcagctcattacaatct

SEQ ID NO: 2962607 - DNA, 25 bp, Homo sapien
gtggggcaaactcagctcattacaa

SEQ ID NO: 2962608 - DNA, 25 bp, Homo sapien
tcctgagtagctcatgctggagtgc

SEQ ID NO: 2962609 - DNA, 25 bp, Homo sapien
tacttccagtggcataacctgagag

SEQ ID NO: 2962610 - DNA, 25 bp, Homo sapien
ctcttcagcctccggagggacgcac

SEQ ID NO: 2962611 - DNA, 25 bp, Homo sapien
tatacttccagtggcataacctgag

SEQ ID NO: 2962612 - DNA, 25 bp, Homo sapien
tccagtggcataacctgagagcttg

SEQ ID NO: 2962613 - DNA, 25 bp, Homo sapien
tatatggggcactgccttgtatggg

SEQ ID NO: 2962614 - DNA, 25 bp, Homo sapien
gtctcagtgattgggttggtatatg

SEQ ID NO: 2962615 - DNA, 25 bp, Homo sapien
cactgccttgtatgggatgtgtcat

SEQ ID NO: 2962616 - DNA, 25 bp, Homo sapien
aaatttcaaagtctcagtgattggg

SEQ ID NO: 2962617 - DNA, 25 bp, Homo sapien
gcatcgccttcctgctcaggcccat

SEQ ID NO: 2962618 - DNA, 25 bp, Homo sapien
ggcatcgccttcctgctcaggccca

SEQ ID NO: 2962619 - DNA, 25 bp, Homo sapien
aggcatcgccttcctgctcaggccc

SEQ ID NO: 2962620 - DNA, 25 bp, Homo sapien
tttaaaggatggctcaggcagagaa

SEQ ID NO: 2962621 - DNA, 25 bp, Homo sapien
gaaaggctcggaggatatacaccga

SEQ ID NO: 2962622 - DNA, 25 bp, Homo sapien
gagaagaaaggctcggaggatatac

SEQ ID NO: 2962623 - DNA, 25 bp, Homo sapien
cggaggatatacaccgagttgatgt

SEQ ID NO: 2962624 - DNA, 25 bp, Homo sapien
gttgaccaagtcagtttagaattcc

SEQ ID NO: 2962625 - DNA, 25 bp, Homo sapien
tgaccaagtcagtttagaattcctg

SEQ ID NO: 2962626 - DNA, 25 bp, Homo sapien
ttgaccaagtcagtttagaattcct

SEQ ID NO: 2962627 - DNA, 25 bp, Homo sapien
taattctacagggaactctggagct

SEQ ID NO: 2962628 - DNA, 25 bp, Homo sapien
tgaagaccagtcaaaggctcaactg

SEQ ID NO: 2962629 - DNA, 25 bp, Homo sapien
ccagagctgtcctactgtgagagag

SEQ ID NO: 2962630 - DNA, 25 bp, Homo sapien
gagtagctgccccacaatgtgctgg

SEQ ID NO: 2962631 - DNA, 25 bp, Homo sapien
gagtgaagtcttctaccgacatacg

SEQ ID NO: 2962632 - DNA, 25 bp, Homo sapien
gtattggtgtaatagatcatcagag

SEQ ID NO: 2962633 - DNA, 25 bp, Homo sapien
ccgacatacgggctggctcaaaggg

SEQ ID NO: 2962634 - DNA, 25 bp, Homo sapien
tgtaatagatcatcagagtgaagtc

SEQ ID NO: 2962635 - DNA, 25 bp, Homo sapien
tctccagtcaatgacacatctgcga

SEQ ID NO: 2962636 - DNA, 25 bp, Homo sapien
tccagtcaatgacacatctgcgaat

SEQ ID NO: 2962637 - DNA, 25 bp, Homo sapien
agtcaatgacacatctgcgaatttg

SEQ ID NO: 2962638 - DNA, 25 bp, Homo sapien
cttctccagtcaatgacacatctgc

SEQ ID NO: 2962639 - DNA, 25 bp, Homo sapien
gatcgcaggcctctgaaacatgcag

SEQ ID NO: 2962640 - DNA, 25 bp, Homo sapien
tagatggcgctggactctcatgctg

SEQ ID NO: 2962641 - DNA, 25 bp, Homo sapien
caggccacgggacaaatgacaaagg

SEQ ID NO: 2962642 - DNA, 25 bp, Homo sapien
tcggtttcagcaccactagatggcg

SEQ ID NO: 2962643 - DNA, 25 bp, Homo sapien
ctgcagcacgaaaaagaaaaggttg

SEQ ID NO: 2962644 - DNA, 25 bp, Homo sapien
tgattggatgagcccggcactgaag

SEQ ID NO: 2962645 - DNA, 25 bp, Homo sapien
ggatgagcccggcactgaagcagtt

SEQ ID NO: 2962646 - DNA, 25 bp, Homo sapien
cctgtcactcctagggtagcgctca

SEQ ID NO: 2962647 - DNA, 25 bp, Homo sapien
ctcaatgtggcaggcgggtctctga

SEQ ID NO: 2962648 - DNA, 25 bp, Homo sapien
tgatgtggtgctggtagtcaacgca

SEQ ID NO: 2962649 - DNA, 25 bp, Homo sapien
tcatttgtgaccaagcctgactcag

SEQ ID NO: 2962650 - DNA, 25 bp, Homo sapien
gcagttttcctgagtacatgggagt

SEQ ID NO: 2962651 - DNA, 25 bp, Homo sapien
actcagaatgggctggcagttttcc

SEQ ID NO: 2962652 - DNA, 25 bp, Homo sapien
gcagtggtgcataccctgccgcagt

SEQ ID NO: 2962653 - DNA, 25 bp, Homo sapien
ggtgcataccctgccgcagtcttaa

SEQ ID NO: 2962654 - DNA, 25 bp, Homo sapien
cgatggagtatcactttgtttccca

SEQ ID NO: 2962655 - DNA, 25 bp, Homo sapien
tttgcgatggagtatcactttgttt

SEQ ID NO: 2962656 - DNA, 25 bp, Homo sapien
gattatctctccacttgagaggcca

SEQ ID NO: 2962657 - DNA, 25 bp, Homo sapien
gacctgtcattgctgatacacaaag

SEQ ID NO: 2962658 - DNA, 25 bp, Homo sapien
cacatgttgtggaaccttggctagc

SEQ ID NO: 2962659 - DNA, 25 bp, Homo sapien
gacagttaacataggcctgcacaga

SEQ ID NO: 2962660 - DNA, 25 bp, Homo sapien
gaacttttatgttaggacattacta

SEQ ID NO: 2962661 - DNA, 25 bp, Homo sapien
ggttgtcacaaagctcagtatcatg

SEQ ID NO: 2962662 - DNA, 25 bp, Homo sapien
ctaaataaagaattccctagctgct

SEQ ID NO: 2962663 - DNA, 25 bp, Homo sapien
tgatctctaaggtattatgtttgcc

SEQ ID NO: 2962664 - DNA, 25 bp, Homo sapien
tcgagttccaaggaggaggtagccc

SEQ ID NO: 2962665 - DNA, 25 bp, Homo sapien
gggaaacacgagttgcagccagcat

SEQ ID NO: 2962666 - DNA, 25 bp, Homo sapien
taaacaacattaggctcagcctggg

SEQ ID NO: 2962667 - DNA, 25 bp, Homo sapien
tagagctggtgacctcaaatctcgg

SEQ ID NO: 2962668 - DNA, 25 bp, Homo sapien
tccactactggggatgatgctcttc

SEQ ID NO: 2962669 - DNA, 25 bp, Homo sapien
tgttccactactggggatgatgctc

SEQ ID NO: 2962670 - DNA, 25 bp, Homo sapien
tactggggatgatgctcttcctcat

SEQ ID NO: 2962671 - DNA, 25 bp, Homo sapien
caaagctgttccactactggggatg

SEQ ID NO: 2962672 - DNA, 25 bp, Homo sapien
ggcttgtaaagtggcacacctggga

SEQ ID NO: 2962673 - DNA, 25 bp, Homo sapien
gacagggtgacgctccacatgagct

SEQ ID NO: 2962674 - DNA, 25 bp, Homo sapien
gccatgtttcagctcagtgacctca

SEQ ID NO: 2962675 - DNA, 25 bp, Homo sapien
tctgcgtggtattcattgcctggga

SEQ ID NO: 2962676 - DNA, 25 bp, Homo sapien
ccgccgagcgtgaccaagtttggaa

SEQ ID NO: 2962677 - DNA, 25 bp, Homo sapien
tgggagtggcatccgatccttggcc

SEQ ID NO: 2962678 - DNA, 25 bp, Homo sapien
accttccggagagccgggaagcctg

SEQ ID NO: 2962679 - DNA, 25 bp, Homo sapien
ccaagatcacaagggcgtagcgaag

SEQ ID NO: 2962680 - DNA, 25 bp, Homo sapien
cctgacttggtcgacattgcttccc

SEQ ID NO: 2962681 - DNA, 25 bp, Homo sapien
ctgtcccctggaggaacacactgag

SEQ ID NO: 2962682 - DNA, 25 bp, Homo sapien
tatgatcggtgatctcccagcggag

SEQ ID NO: 2962683 - DNA, 25 bp, Homo sapien
gacggttttcctgaatggcctggca

SEQ ID NO: 2962684 - DNA, 25 bp, Homo sapien
tgctggcaattgggacctgtggctt

SEQ ID NO: 2962685 - DNA, 25 bp, Homo sapien
ggaaggtgctggcaattgggacctg

SEQ ID NO: 2962686 - DNA, 25 bp, Homo sapien
ggtgctggcaattgggacctgtggc

SEQ ID NO: 2962687 - DNA, 25 bp, Homo sapien
ctggcaattgggacctgtggcttcc

SEQ ID NO: 2962688 - DNA, 25 bp, Homo sapien
tgtggtcagagtgagaggataatct

SEQ ID NO: 2962689 - DNA, 25 bp, Homo sapien
agcagatcctggctacaattcacag

SEQ ID NO: 2962690 - DNA, 25 bp, Homo sapien
tatcttgggattctcaaatgactag

SEQ ID NO: 2962691 - DNA, 25 bp, Homo sapien
caaatgactagtatcagcagatcct

SEQ ID NO: 2962692 - DNA, 25 bp, Homo sapien
tcccgcaacgtcttaagctgttgag

SEQ ID NO: 2962693 - DNA, 25 bp, Homo sapien
gactttcccgcaacgtcttaagctg

SEQ ID NO: 2962694 - DNA, 25 bp, Homo sapien
cgcaacgtcttaagctgttgagtgc

SEQ ID NO: 2962695 - DNA, 25 bp, Homo sapien
acgtcttaagctgttgagtgctgtg

SEQ ID NO: 2962696 - DNA, 25 bp, Homo sapien
gaatcctgacctggttactcctggc

SEQ ID NO: 2962697 - DNA, 25 bp, Homo sapien
cagctctctgctatagggtttgtgc

SEQ ID NO: 2962698 - DNA, 25 bp, Homo sapien
ttgttgtgaggatggcatggcacct

SEQ ID NO: 2962699 - DNA, 25 bp, Homo sapien
acgcactcaacgcagtggcttcgct

SEQ ID NO: 2962700 - DNA, 25 bp, Homo sapien
gtggagcctggcaaggtgccctcct

SEQ ID NO: 2962701 - DNA, 25 bp, Homo sapien
cctggcaaggtgccctcctggcctg

SEQ ID NO: 2962702 - DNA, 25 bp, Homo sapien
gcctggcaaggtgccctcctggcct

SEQ ID NO: 2962703 - DNA, 25 bp, Homo sapien
ggcagtggagcctggcaaggtgccc

SEQ ID NO: 2962704 - DNA, 25 bp, Homo sapien
gaaatacaactcgaggagaacccag

SEQ ID NO: 2962705 - DNA, 25 bp, Homo sapien
aaatacaactcgaggagaacccaga

SEQ ID NO: 2962706 - DNA, 25 bp, Homo sapien
cagggaccagccggtctttctccag

SEQ ID NO: 2962707 - DNA, 25 bp, Homo sapien
agggaccagccggtctttctccagc

SEQ ID NO: 2962708 - DNA, 25 bp, Homo sapien
ccagggaccagccggtctttctcca

SEQ ID NO: 2962709 - DNA, 25 bp, Homo sapien
agccagggaccagccggtctttctc

SEQ ID NO: 2962710 - DNA, 25 bp, Homo sapien
cagagcaccttctgtaggcttctgc

SEQ ID NO: 2962711 - DNA, 25 bp, Homo sapien
gtgtgtgtagcggtctccagggcca

SEQ ID NO: 2962712 - DNA, 25 bp, Homo sapien
tgggctgcggttgggagggatcctc

SEQ ID NO: 2962713 - DNA, 25 bp, Homo sapien
taggcttctgccattcatgctgttg

SEQ ID NO: 2962714 - DNA, 25 bp, Homo sapien
ggttacacgagggtgtgactgcaac

SEQ ID NO: 2962715 - DNA, 25 bp, Homo sapien
catggttacacgagggtgtgactgc

SEQ ID NO: 2962716 - DNA, 25 bp, Homo sapien
actgtgtgtgcttgttggcaggcac

SEQ ID NO: 2962717 - DNA, 25 bp, Homo sapien
tgtgcttgttggcaggcaccagcac

SEQ ID NO: 2962718 - DNA, 25 bp, Homo sapien
tgtccggaaccccagatgtttgaag

SEQ ID NO: 2962719 - DNA, 25 bp, Homo sapien
gcagagggcctaagtgtccggaacc

SEQ ID NO: 2962720 - DNA, 25 bp, Homo sapien
tattaattaggaggtagtgtcttct

SEQ ID NO: 2962721 - DNA, 25 bp, Homo sapien
gttcctcagacatttaccgcctatt

SEQ ID NO: 2962722 - DNA, 25 bp, Homo sapien
ggtttgggtgcacctcaggaaattc

SEQ ID NO: 2962723 - DNA, 25 bp, Homo sapien
tggggtttgggtgcacctcaggaaa

SEQ ID NO: 2962724 - DNA, 25 bp, Homo sapien
ggatgatatttcctcgctagaaatc

SEQ ID NO: 2962725 - DNA, 25 bp, Homo sapien
gatgatatttcctcgctagaaatcc

SEQ ID NO: 2962726 - DNA, 25 bp, Homo sapien
agaaggatgatatttcctcgctaga

SEQ ID NO: 2962727 - DNA, 25 bp, Homo sapien
aaggatgatatttcctcgctagaaa

SEQ ID NO: 2962728 - DNA, 25 bp, Homo sapien
ctcgaagacccttaaatctctactt

SEQ ID NO: 2962729 - DNA, 25 bp, Homo sapien
cttggccttggccaaacacacccag

SEQ ID NO: 2962730 - DNA, 25 bp, Homo sapien
ccttaaatctctacttggccttggc

SEQ ID NO: 2962731 - DNA, 25 bp, Homo sapien
gaagacccttaaatctctacttggc

SEQ ID NO: 2962732 - DNA, 25 bp, Homo sapien
gattcaaacgggtgagttgcctggc

SEQ ID NO: 2962733 - DNA, 25 bp, Homo sapien
aaatgaaaccttcagcttgggagca

SEQ ID NO: 2962734 - DNA, 25 bp, Homo sapien
cagcttcgattctttggtgggacct

SEQ ID NO: 2962735 - DNA, 25 bp, Homo sapien
tcaggcatcacaaggccatcgggat

SEQ ID NO: 2962736 - DNA, 25 bp, Homo sapien
taagtgctcactgtggatttccgtc

SEQ ID NO: 2962737 - DNA, 25 bp, Homo sapien
cagacagtgcactccaggtgggatt

SEQ ID NO: 2962738 - DNA, 25 bp, Homo sapien
tccctattggatgggcctcaggcgc

SEQ ID NO: 2962739 - DNA, 25 bp, Homo sapien
caggttcccatgtcctccctattgg

SEQ ID NO: 2962740 - DNA, 25 bp, Homo sapien
gcatggcttagtgggtttgtcggtg

SEQ ID NO: 2962741 - DNA, 25 bp, Homo sapien
atggcttagtgggtttgtcggtgtg

SEQ ID NO: 2962742 - DNA, 25 bp, Homo sapien
ggtttgtcggtgtgggagcttaagc

SEQ ID NO: 2962743 - DNA, 25 bp, Homo sapien
atgtgcatggcttagtgggtttgtc

SEQ ID NO: 2962744 - DNA, 25 bp, Homo sapien
tgtttgaagaaaagcacagaaactt

SEQ ID NO: 2962745 - DNA, 25 bp, Homo sapien
ctgtttgaagaaaagcacagaaact

SEQ ID NO: 2962746 - DNA, 25 bp, Homo sapien
cagagtatgtggttttaggattgtt

SEQ ID NO: 2962747 - DNA, 25 bp, Homo sapien
ggtttagacaggtctggttctccat

SEQ ID NO: 2962748 - DNA, 25 bp, Homo sapien
aggattctcttctcggtcagtttca

SEQ ID NO: 2962749 - DNA, 25 bp, Homo sapien
tcaatgatactttcagagtatgtgg

SEQ ID NO: 2962750 - DNA, 25 bp, Homo sapien
catttgagcgccctttgacagcttc

SEQ ID NO: 2962751 - DNA, 25 bp, Homo sapien
ttatggagcgtgaaagtcaggagcc

SEQ ID NO: 2962752 - DNA, 25 bp, Homo sapien
tggctccatagaagtgggacactca

SEQ ID NO: 2962753 - DNA, 25 bp, Homo sapien
gctatgctgactattgttgacaccc

SEQ ID NO: 2962754 - DNA, 25 bp, Homo sapien
agtattggtgggtctctaacatttc

SEQ ID NO: 2962755 - DNA, 25 bp, Homo sapien
gagggatgaatacgtcactttttcc

SEQ ID NO: 2962756 - DNA, 25 bp, Homo sapien
tttgagggatgaatacgtcactttt

SEQ ID NO: 2962757 - DNA, 25 bp, Homo sapien
gggatgaatacgtcactttttccat

SEQ ID NO: 2962758 - DNA, 25 bp, Homo sapien
gaggcacctttggtgatggtgaact

SEQ ID NO: 2962759 - DNA, 25 bp, Homo sapien
catgcagaggcacctttggtgatgg

SEQ ID NO: 2962760 - DNA, 25 bp, Homo sapien
aggaggccatgcagaggcacctttg

SEQ ID NO: 2962761 - DNA, 25 bp, Homo sapien
gccatgcagaggcacctttggtgat

SEQ ID NO: 2962762 - DNA, 25 bp, Homo sapien
atctgtaaatgttttgatgtagtat

SEQ ID NO: 2962763 - DNA, 25 bp, Homo sapien
cgatctgtaaatgttttgatgtagt

SEQ ID NO: 2962764 - DNA, 25 bp, Homo sapien
gatctgtaaatgttttgatgtagta

SEQ ID NO: 2962765 - DNA, 25 bp, Homo sapien
atcattgtcattgtttgctgtcttg

SEQ ID NO: 2962766 - DNA, 25 bp, Homo sapien
gtcattgtttgctgtcttggagcat

SEQ ID NO: 2962767 - DNA, 25 bp, Homo sapien
ggcagcagcatcattgtcattgttt

SEQ ID NO: 2962768 - DNA, 25 bp, Homo sapien
tcaaatgttggcagcagcatcattg

SEQ ID NO: 2962769 - DNA, 25 bp, Homo sapien
acccagggccttggcggttcgtgct

SEQ ID NO: 2962770 - DNA, 25 bp, Homo sapien
tcagtctcctagggcgggcactagg

SEQ ID NO: 2962771 - DNA, 25 bp, Homo sapien
gtgctagtggtgagttccctccagg

SEQ ID NO: 2962772 - DNA, 25 bp, Homo sapien
agcttccggtcactgccactgtcac

SEQ ID NO: 2962773 - DNA, 25 bp, Homo sapien
agcagcaaacacgacggcaagaact

SEQ ID NO: 2962774 - DNA, 25 bp, Homo sapien
caaacacgacggcaagaacttttgc

SEQ ID NO: 2962775 - DNA, 25 bp, Homo sapien
cagcaaacacgacggcaagaacttt

SEQ ID NO: 2962776 - DNA, 25 bp, Homo sapien
gcaaacacgacggcaagaacttttg

SEQ ID NO: 2962777 - DNA, 25 bp, Homo sapien
tgaataatcccagggttcaaagagc

SEQ ID NO: 2962778 - DNA, 25 bp, Homo sapien
cagaacagttgtcacctttttggct

SEQ ID NO: 2962779 - DNA, 25 bp, Homo sapien
gaacagttgtcacctttttggctgg

SEQ ID NO: 2962780 - DNA, 25 bp, Homo sapien
gagcagactgcttctaaggtctttt

SEQ ID NO: 2962781 - DNA, 25 bp, Homo sapien
gaaacccgctgtccactttctgcag

SEQ ID NO: 2962782 - DNA, 25 bp, Homo sapien
ggctgggtgtgaaacccgctgtcca

SEQ ID NO: 2962783 - DNA, 25 bp, Homo sapien
tgggcccctgctggatcaagtgtga

SEQ ID NO: 2962784 - DNA, 25 bp, Homo sapien
tgaatatggtgccatctctgggatg

SEQ ID NO: 2962785 - DNA, 25 bp, Homo sapien
cagtcagcgtcttgtagcgagagga

SEQ ID NO: 2962786 - DNA, 25 bp, Homo sapien
ctgatccgcagtcagcgtcttgtag

SEQ ID NO: 2962787 - DNA, 25 bp, Homo sapien
cagcgtcttgtagcgagaggaatga

SEQ ID NO: 2962788 - DNA, 25 bp, Homo sapien
tccgcagtcagcgtcttgtagcgag

SEQ ID NO: 2962789 - DNA, 25 bp, Homo sapien
cgggccgtcgcgagtttgattcccg

SEQ ID NO: 2962790 - DNA, 25 bp, Homo sapien
cgcgagtttgattcccggggctgtc

SEQ ID NO: 2962791 - DNA, 25 bp, Homo sapien
ttctcgggacccgttgcccaggcgc

SEQ ID NO: 2962792 - DNA, 25 bp, Homo sapien
gagggccgggccgtcgcgagtttga

SEQ ID NO: 2962793 - DNA, 25 bp, Homo sapien
gccctgccggcagccgcgcagggac

SEQ ID NO: 2962794 - DNA, 25 bp, Homo sapien
ggcagccgcgcagggacagctgcat

SEQ ID NO: 2962795 - DNA, 25 bp, Homo sapien
ttgtggccctgccggcagccgcgca

SEQ ID NO: 2962796 - DNA, 25 bp, Homo sapien
tgccggcagccgcgcagggacagct

SEQ ID NO: 2962797 - DNA, 25 bp, Homo sapien
tgggagatggcaggtggtatctgtc

SEQ ID NO: 2962798 - DNA, 25 bp, Homo sapien
tatctgtcggtgtggacgagtgata

SEQ ID NO: 2962799 - DNA, 25 bp, Homo sapien
cccttgaagtgatcagggatgctgg

SEQ ID NO: 2962800 - DNA, 25 bp, Homo sapien
ctcagcagcccttgaagtgatcagg

SEQ ID NO: 2962801 - DNA, 25 bp, Homo sapien
aggtggccctctgtaggcggctggt

SEQ ID NO: 2962802 - DNA, 25 bp, Homo sapien
ctgtaggcggctggtgtgaggggct

SEQ ID NO: 2962803 - DNA, 25 bp, Homo sapien
tctgtaggcggctggtgtgaggggc

SEQ ID NO: 2962804 - DNA, 25 bp, Homo sapien
tggccctctgtaggcggctggtgtg

SEQ ID NO: 2962805 - DNA, 25 bp, Homo sapien
ttctcacagtagataatgccatatg

SEQ ID NO: 2962806 - DNA, 25 bp, Homo sapien
taatgccatatgctccagcgatctg

SEQ ID NO: 2962807 - DNA, 25 bp, Homo sapien
cagcgatctgagcttcatacagcca

SEQ ID NO: 2962808 - DNA, 25 bp, Homo sapien
tagataatgccatatgctccagcga

SEQ ID NO: 2962809 - DNA, 25 bp, Homo sapien
tcctgttttccccacggtccgatca

SEQ ID NO: 2962810 - DNA, 25 bp, Homo sapien
ctgttttccccacggtccgatcaga

SEQ ID NO: 2962811 - DNA, 25 bp, Homo sapien
ttttccccacggtccgatcagagct

SEQ ID NO: 2962812 - DNA, 25 bp, Homo sapien
gttttccccacggtccgatcagagc

SEQ ID NO: 2962813 - DNA, 25 bp, Homo sapien
ctatgtaagcagatgatgattttac

SEQ ID NO: 2962814 - DNA, 25 bp, Homo sapien
cctcctacggtgtgctcctgaatga

SEQ ID NO: 2962815 - DNA, 25 bp, Homo sapien
ggtgttgaaggcacgacagccactg

SEQ ID NO: 2962816 - DNA, 25 bp, Homo sapien
tgctctacgaaaaggcagagtacgt

SEQ ID NO: 2962817 - DNA, 25 bp, Homo sapien
tgttacgctctagggctcgctgctt

SEQ ID NO: 2962818 - DNA, 25 bp, Homo sapien
taattcacaattcagacagcccagg

SEQ ID NO: 2962819 - DNA, 25 bp, Homo sapien
gaaggactcgtgtagggaaagccca

SEQ ID NO: 2962820 - DNA, 25 bp, Homo sapien
tatgtgtggactactggaaggactc

SEQ ID NO: 2962821 - DNA, 25 bp, Homo sapien
tccacagtggtccaaggagcagtcc

SEQ ID NO: 2962822 - DNA, 25 bp, Homo sapien
cttgcatctgagacagacttcctac

SEQ ID NO: 2962823 - DNA, 25 bp, Homo sapien
gacaggtatctgtgtgtcattatac

SEQ ID NO: 2962824 - DNA, 25 bp, Homo sapien
tacatcagggacaggtatctgtgtg

SEQ ID NO: 2962825 - DNA, 25 bp, Homo sapien
gagacagacttcctacatcagggac

SEQ ID NO: 2962826 - DNA, 25 bp, Homo sapien
gaaaacacttgtatcagctttgtgg

SEQ ID NO: 2962827 - DNA, 25 bp, Homo sapien
caggactgactatcaaactggatga

SEQ ID NO: 2962828 - DNA, 25 bp, Homo sapien
tgcattccctgtagaaacccagcaa

SEQ ID NO: 2962829 - DNA, 25 bp, Homo sapien
cccagcaatgattatgcacgttgag

SEQ ID NO: 2962830 - DNA, 25 bp, Homo sapien
tccctatgggaaaggtgataccagc

SEQ ID NO: 2962831 - DNA, 25 bp, Homo sapien
taatttcaggcagcattccctatgg

SEQ ID NO: 2962832 - DNA, 25 bp, Homo sapien
tgtaaacactagcagaactcttctc

SEQ ID NO: 2962833 - DNA, 25 bp, Homo sapien
gctcagcatattaatcccgatggaa

SEQ ID NO: 2962834 - DNA, 25 bp, Homo sapien
tagccgcccctctcaatatagcaat

SEQ ID NO: 2962835 - DNA, 25 bp, Homo sapien
gagagcatgcctttcttgccccaag

SEQ ID NO: 2962836 - DNA, 25 bp, Homo sapien
tatagcaatgagacctgtagagagc

SEQ ID NO: 2962837 - DNA, 25 bp, Homo sapien
ccagtgaatatagcacaccctgtca

SEQ ID NO: 2962838 - DNA, 25 bp, Homo sapien
ggccagcgccagaccctggcgtcct

SEQ ID NO: 2962839 - DNA, 25 bp, Homo sapien
tggacaccgtgtctgagtcacggga

SEQ ID NO: 2962840 - DNA, 25 bp, Homo sapien
ctgagtcacgggagacggcccagct

SEQ ID NO: 2962841 - DNA, 25 bp, Homo sapien
caccgtgtctgagtcacgggagacg

SEQ ID NO: 2962842 - DNA, 25 bp, Homo sapien
aggcctccaggcagtatccaatggg

SEQ ID NO: 2962843 - DNA, 25 bp, Homo sapien
tatcttaggctgaccggttccctga

SEQ ID NO: 2962844 - DNA, 25 bp, Homo sapien
cctgatgtgttacctgcttctgcta

SEQ ID NO: 2962845 - DNA, 25 bp, Homo sapien
tgctactgatccaaactgcagaact

SEQ ID NO: 2962846 - DNA, 25 bp, Homo sapien
tagtctgtggaagctcacttaagga

SEQ ID NO: 2962847 - DNA, 25 bp, Homo sapien
ccacaggtgaccattgtgaggtaga

SEQ ID NO: 2962848 - DNA, 25 bp, Homo sapien
taggtgacaggttatacaacttgga

SEQ ID NO: 2962849 - DNA, 25 bp, Homo sapien
gactggaccccagtatatagtctgt

SEQ ID NO: 2962850 - DNA, 25 bp, Homo sapien
catctgttagcattgatttctggaa

SEQ ID NO: 2962851 - DNA, 25 bp, Homo sapien
gagccaccagatcggccctttaggc

SEQ ID NO: 2962852 - DNA, 25 bp, Homo sapien
caaagtttggtcttgctagtcatga

SEQ ID NO: 2962853 - DNA, 25 bp, Homo sapien
tatctaggccttgtgttgccatctg

SEQ ID NO: 2962854 - DNA, 25 bp, Homo sapien
gtaattctaacctcacattgaaatg

SEQ ID NO: 2962855 - DNA, 25 bp, Homo sapien
tgaatttgaagattagagaggatct

SEQ ID NO: 2962856 - DNA, 25 bp, Homo sapien
taagatgaccagacagctaaaagct

SEQ ID NO: 2962857 - DNA, 25 bp, Homo sapien
gagaggatctaatgtttacttaggt

SEQ ID NO: 2962858 - DNA, 25 bp, Homo sapien
caccccaatcggtagattttaatga

SEQ ID NO: 2962859 - DNA, 25 bp, Homo sapien
tgctcagcctgtagaacttttaacc

SEQ ID NO: 2962860 - DNA, 25 bp, Homo sapien
ccttgggtgctaatcatagttggaa

SEQ ID NO: 2962861 - DNA, 25 bp, Homo sapien
tgacagccccttggtactatttagg

SEQ ID NO: 2962862 - DNA, 25 bp, Homo sapien
tatttttgacgattggagcccttaa

SEQ ID NO: 2962863 - DNA, 25 bp, Homo sapien
gagcccttaagatgcacgatggaat

SEQ ID NO: 2962864 - DNA, 25 bp, Homo sapien
tggaaggattcagcacgagtagatg

SEQ ID NO: 2962865 - DNA, 25 bp, Homo sapien
gacctggagataaacgctggagcaa

SEQ ID NO: 2962866 - DNA, 25 bp, Homo sapien
tggatcccaatccttggagctggat

SEQ ID NO: 2962867 - DNA, 25 bp, Homo sapien
aaggtttggattggagagggctcac

SEQ ID NO: 2962868 - DNA, 25 bp, Homo sapien
tagggaggatgaattaccaggattc

SEQ ID NO: 2962869 - DNA, 25 bp, Homo sapien
caaatcataatgtggataggatagg

SEQ ID NO: 2962870 - DNA, 25 bp, Homo sapien
ttagacttaggtgggtagcaatgcc

SEQ ID NO: 2962871 - DNA, 25 bp, Homo sapien
ttgcaaccacgaaacctgtaatacg

SEQ ID NO: 2962872 - DNA, 25 bp, Homo sapien
tctgtgtgactgatagagcgttgct

SEQ ID NO: 2962873 - DNA, 25 bp, Homo sapien
gggaagaactggctaatttgtcaca

SEQ ID NO: 2962874 - DNA, 25 bp, Homo sapien
aactgttttgttcagaatgggctaa

SEQ ID NO: 2962875 - DNA, 25 bp, Homo sapien
ctttggattaaggattgtggagcac

SEQ ID NO: 2962876 - DNA, 25 bp, Homo sapien
ttgtgtaaatgtctatctgccctgg

SEQ ID NO: 2962877 - DNA, 25 bp, Homo sapien
cattcttgtaatatccccttgctcc

SEQ ID NO: 2962878 - DNA, 25 bp, Homo sapien
gagtcgcagttactccccaaggaga

SEQ ID NO: 2962879 - DNA, 25 bp, Homo sapien
ccgtagtcgtagcagaagccgtagc

SEQ ID NO: 2962880 - DNA, 25 bp, Homo sapien
gcagatctcgctctcgtacataaga

SEQ ID NO: 2962881 - DNA, 25 bp, Homo sapien
gaagatctcgatctcgaagccgtag

SEQ ID NO: 2962882 - DNA, 25 bp, Homo sapien
tccaaggccttaacatagagaacgg

SEQ ID NO: 2962883 - DNA, 25 bp, Homo sapien
tgggaaggcctgttctcgagtccgc

SEQ ID NO: 2962884 - DNA, 25 bp, Homo sapien
tgttctacaaatacggcgctatccg

SEQ ID NO: 2962885 - DNA, 25 bp, Homo sapien
ccttcgttgagttcgaggacccgcg

SEQ ID NO: 2962886 - DNA, 25 bp, Homo sapien
cacggacaggcgactaacaagagat

SEQ ID NO: 2962887 - DNA, 25 bp, Homo sapien
taggagtgctgacccgagctatgca

SEQ ID NO: 2962888 - DNA, 25 bp, Homo sapien
taagcagccacggtctattcgcagc

SEQ ID NO: 2962889 - DNA, 25 bp, Homo sapien
ttctgacgagaaggcggaacggtac

SEQ ID NO: 2962890 - DNA, 25 bp, Homo sapien
gtcctgaatagcaaccgcggtatct

SEQ ID NO: 2962891 - DNA, 25 bp, Homo sapien
aaaatgttatctcccaatgccgcag

SEQ ID NO: 2962892 - DNA, 25 bp, Homo sapien
aatgccgcaggcaaacaggatcaca

SEQ ID NO: 2962893 - DNA, 25 bp, Homo sapien
cagcctcccgcgtagagtggattac

SEQ ID NO: 2962894 - DNA, 25 bp, Homo sapien
taaaagtacctatgtgtattgtctc

SEQ ID NO: 2962895 - DNA, 25 bp, Homo sapien
tcacttcagttatcattgacttatg

SEQ ID NO: 2962896 - DNA, 25 bp, Homo sapien
cacttaatggaacaatgctagaaac

SEQ ID NO: 2962897 - DNA, 25 bp, Homo sapien
gctagaaacagtagatttgttgaaa

SEQ ID NO: 2962898 - DNA, 25 bp, Homo sapien
tcacccaaggttcatcataaatttg

SEQ ID NO: 2962899 - DNA, 25 bp, Homo sapien
ttttcacccaaggttcatcataaat

SEQ ID NO: 2962900 - DNA, 25 bp, Homo sapien
ttttttcacccaaggttcatcataa

SEQ ID NO: 2962901 - DNA, 25 bp, Homo sapien
cattttttcacccaaggttcatcat

SEQ ID NO: 2962902 - DNA, 25 bp, Homo sapien
ttgggtgtctgatagacaggcacac

SEQ ID NO: 2962903 - DNA, 25 bp, Homo sapien
tgcaagattgggtgtctgatagaca

SEQ ID NO: 2962904 - DNA, 25 bp, Homo sapien
gattgggtgtctgatagacaggcac

SEQ ID NO: 2962905 - DNA, 25 bp, Homo sapien
caagattgggtgtctgatagacagg

SEQ ID NO: 2962906 - DNA, 25 bp, Homo sapien
gcacttgtttaaaatctccatggaa

SEQ ID NO: 2962907 - DNA, 25 bp, Homo sapien
aactggtgccatgatctttgctctg

SEQ ID NO: 2962908 - DNA, 25 bp, Homo sapien
tgtgtgagccaaaccaattgagatg

SEQ ID NO: 2962909 - DNA, 25 bp, Homo sapien
gcagttttagtaacctttgagtgga

SEQ ID NO: 2962910 - DNA, 25 bp, Homo sapien
taagagagtcatgcaagatcacaca

SEQ ID NO: 2962911 - DNA, 25 bp, Homo sapien
tactgcagccttatctaacagaagc

SEQ ID NO: 2962912 - DNA, 25 bp, Homo sapien
tatattcagggcactcaacgactag

SEQ ID NO: 2962913 - DNA, 25 bp, Homo sapien
tagtacagtgcaaaacatgcttggt

SEQ ID NO: 2962914 - DNA, 25 bp, Homo sapien
catattctgcgatggcaaagcaggc

SEQ ID NO: 2962915 - DNA, 25 bp, Homo sapien
ccagcaggctgcgattgctcattgt

SEQ ID NO: 2962916 - DNA, 25 bp, Homo sapien
taattagcagcatattctgcgatgg

SEQ ID NO: 2962917 - DNA, 25 bp, Homo sapien
ctctaacgagtgctccaccgccagc

SEQ ID NO: 2962918 - DNA, 25 bp, Homo sapien
tacccagggacacaaacgctgcgga

SEQ ID NO: 2962919 - DNA, 25 bp, Homo sapien
tcaagtacccagggacacaaacgct

SEQ ID NO: 2962920 - DNA, 25 bp, Homo sapien
aagtacccagggacacaaacgctgc

SEQ ID NO: 2962921 - DNA, 25 bp, Homo sapien
agtacccagggacacaaacgctgcg

SEQ ID NO: 2962922 - DNA, 25 bp, Homo sapien
actgctgaaatccacctcaattctt

SEQ ID NO: 2962923 - DNA, 25 bp, Homo sapien
tgctgaaatccacctcaattctttg

SEQ ID NO: 2962924 - DNA, 25 bp, Homo sapien
gaactgctgaaatccacctcaattc

SEQ ID NO: 2962925 - DNA, 25 bp, Homo sapien
tagaactgctgaaatccacctcaat

SEQ ID NO: 2962926 - DNA, 25 bp, Homo sapien
tggtgccagtctcccctctcaagtc

SEQ ID NO: 2962927 - DNA, 25 bp, Homo sapien
gcaatgcagaccctggtgccagtct

SEQ ID NO: 2962928 - DNA, 25 bp, Homo sapien
cattgcaatgcagaccctggtgcca

SEQ ID NO: 2962929 - DNA, 25 bp, Homo sapien
cttgacactcccattgcaatgcaga

SEQ ID NO: 2962930 - DNA, 25 bp, Homo sapien
caagatctccaggaaattgtagaag

SEQ ID NO: 2962931 - DNA, 25 bp, Homo sapien
aagatctccaggaaattgtagaagg

SEQ ID NO: 2962932 - DNA, 25 bp, Homo sapien
tcaagatctccaggaaattgtagaa

SEQ ID NO: 2962933 - DNA, 25 bp, Homo sapien
gaagctgccggggatagctcccact

SEQ ID NO: 2962934 - DNA, 25 bp, Homo sapien
aagcattttggccatacagtaggga

SEQ ID NO: 2962935 - DNA, 25 bp, Homo sapien
cgagcctttattgggaaccaagcat

SEQ ID NO: 2962936 - DNA, 25 bp, Homo sapien
tacagtagggattaagaagctgccg

SEQ ID NO: 2962937 - DNA, 25 bp, Homo sapien
gaggctgaaggacctaaactcccag

SEQ ID NO: 2962938 - DNA, 25 bp, Homo sapien
tgaaggacctaaactcccagctggg

SEQ ID NO: 2962939 - DNA, 25 bp, Homo sapien
agctgggcccccagccggtatttgt

SEQ ID NO: 2962940 - DNA, 25 bp, Homo sapien
tgttctttgaggctgaaggacctaa

SEQ ID NO: 2962941 - DNA, 25 bp, Homo sapien
gcccgctccgcactggcgcctcaca

SEQ ID NO: 2962942 - DNA, 25 bp, Homo sapien
gcccgcccgctccgcactggcgcct

SEQ ID NO: 2962943 - DNA, 25 bp, Homo sapien
ccgctccgcactggcgcctcacagc

SEQ ID NO: 2962944 - DNA, 25 bp, Homo sapien
cttggagtttcgccggccgcccgcg

SEQ ID NO: 2962945 - DNA, 25 bp, Homo sapien
gggaggagcgatggcccgaggcaga

SEQ ID NO: 2962946 - DNA, 25 bp, Homo sapien
gaggagcgatggcccgaggcagagc

SEQ ID NO: 2962947 - DNA, 25 bp, Homo sapien
tggggaggagcgatggcccgaggca

SEQ ID NO: 2962948 - DNA, 25 bp, Homo sapien
ctggggaggagcgatggcccgaggc

SEQ ID NO: 2962949 - DNA, 25 bp, Homo sapien
ttcacggaggcgagtccgcactggg

SEQ ID NO: 2962950 - DNA, 25 bp, Homo sapien
cttcacggaggcgagtccgcactgg

SEQ ID NO: 2962951 - DNA, 25 bp, Homo sapien
tcacggaggcgagtccgcactgggc

SEQ ID NO: 2962952 - DNA, 25 bp, Homo sapien
cacggaggcgagtccgcactgggcc

SEQ ID NO: 2962953 - DNA, 25 bp, Homo sapien
cacgcagcgcagagagactcccggg

SEQ ID NO: 2962954 - DNA, 25 bp, Homo sapien
aggaaggacgccccagagggtggcg

SEQ ID NO: 2962955 - DNA, 25 bp, Homo sapien
gcgtcctcgctgcaggaaggacgcc

SEQ ID NO: 2962956 - DNA, 25 bp, Homo sapien
ggaacagcgccggagtgactgggcg

SEQ ID NO: 2962957 - DNA, 25 bp, Homo sapien
aagtgggccgtatccctccactatc

SEQ ID NO: 2962958 - DNA, 25 bp, Homo sapien
tcccatcctccagagcgctgcggtc

SEQ ID NO: 2962959 - DNA, 25 bp, Homo sapien
ctccagagcgctgcggtcccgaagg

SEQ ID NO: 2962960 - DNA, 25 bp, Homo sapien
tacttccctcttcgggctctccaag

SEQ ID NO: 2962961 - DNA, 25 bp, Homo sapien
caaaggagcaactttgttacagtaa

SEQ ID NO: 2962962 - DNA, 25 bp, Homo sapien
aaaggagcaactttgttacagtaat

SEQ ID NO: 2962963 - DNA, 25 bp, Homo sapien
cattaggagagggagcccctaagct

SEQ ID NO: 2962964 - DNA, 25 bp, Homo sapien
gaaaacacggatgtgaagcattagg

SEQ ID NO: 2962965 - DNA, 25 bp, Homo sapien
caccctgggaaatacagggccaata

SEQ ID NO: 2962966 - DNA, 25 bp, Homo sapien
cagagacattgttcccaccctggga

SEQ ID NO: 2962967 - DNA, 25 bp, Homo sapien
gcctgcgtggcgcagtcaacggcat

SEQ ID NO: 2962968 - DNA, 25 bp, Homo sapien
cgtggcgcagtcaacggcatcctgt

SEQ ID NO: 2962969 - DNA, 25 bp, Homo sapien
gcatcctgttgcatgtcctcagaca

SEQ ID NO: 2962970 - DNA, 25 bp, Homo sapien
tctgcgttcttgatcactgccttcc

SEQ ID NO: 2962971 - DNA, 25 bp, Homo sapien
agaaaggtaattagggtagctggag

SEQ ID NO: 2962972 - DNA, 25 bp, Homo sapien
ggtaattagggtagctggagaagga

SEQ ID NO: 2962973 - DNA, 25 bp, Homo sapien
gaaaggtaattagggtagctggaga

SEQ ID NO: 2962974 - DNA, 25 bp, Homo sapien
aaggtaattagggtagctggagaag

SEQ ID NO: 2962975 - DNA, 25 bp, Homo sapien
aaaatttcggcccacgatacaatgc

SEQ ID NO: 2962976 - DNA, 25 bp, Homo sapien
ctttgtctcgtgtgtgacgtagctg

SEQ ID NO: 2962977 - DNA, 25 bp, Homo sapien
tgtgacgtagctgccaaaatttcgg

SEQ ID NO: 2962978 - DNA, 25 bp, Homo sapien
caatgccaggtagggttatatttct

SEQ ID NO: 2962979 - DNA, 25 bp, Homo sapien
cttgaagaggaggattgcaacttga

SEQ ID NO: 2962980 - DNA, 25 bp, Homo sapien
ttgaagaggaggattgcaacttgac

SEQ ID NO: 2962981 - DNA, 25 bp, Homo sapien
gcaacgccgcctgcttgccatcgct

SEQ ID NO: 2962982 - DNA, 25 bp, Homo sapien
gtccatgcagtagcacagccattgg

SEQ ID NO: 2962983 - DNA, 25 bp, Homo sapien
ggctccagtgcaaaacagtcccagc

SEQ ID NO: 2962984 - DNA, 25 bp, Homo sapien
acatgaaatcgagtatacagtccat

SEQ ID NO: 2962985 - DNA, 25 bp, Homo sapien
tttcggccgcctagtctctatggtg

SEQ ID NO: 2962986 - DNA, 25 bp, Homo sapien
tctcagggcccctaaagaaggcatc

SEQ ID NO: 2962987 - DNA, 25 bp, Homo sapien
gagatttcctagtgcaatacaacca

SEQ ID NO: 2962988 - DNA, 25 bp, Homo sapien
cccaggcaactaaacagaaagaggt

SEQ ID NO: 2962989 - DNA, 25 bp, Homo sapien
tcagcagctcaaacggcaatgacca

SEQ ID NO: 2962990 - DNA, 25 bp, Homo sapien
tggcttcaccactgcaagactgacc

SEQ ID NO: 2962991 - DNA, 25 bp, Homo sapien
cagatggcagcatggtcatcctgtc

SEQ ID NO: 2962992 - DNA, 25 bp, Homo sapien
tacacgagagttttgaaggcgactc

SEQ ID NO: 2962993 - DNA, 25 bp, Homo sapien
taatgtccaaaagaggcgtggatgc

SEQ ID NO: 2962994 - DNA, 25 bp, Homo sapien
atgtccaaaagaggcgtggatgcag

SEQ ID NO: 2962995 - DNA, 25 bp, Homo sapien
cctttaatgtccaaaagaggcgtgg

SEQ ID NO: 2962996 - DNA, 25 bp, Homo sapien
ctttaatgtccaaaagaggcgtgga

SEQ ID NO: 2962997 - DNA, 25 bp, Homo sapien
cactgctgatttctcgagttgtgtg

SEQ ID NO: 2962998 - DNA, 25 bp, Homo sapien
ctccaagagaattgcagtcacacga

SEQ ID NO: 2962999 - DNA, 25 bp, Homo sapien
cttggcactgctgatttctcgagtt

SEQ ID NO: 2963000 - DNA, 25 bp, Homo sapien
tgcagtcacacgatggtggagtcag

SEQ ID NO: 2963001 - DNA, 25 bp, Homo sapien
cctggagacactcatccctgatgaa

SEQ ID NO: 2963002 - DNA, 25 bp, Homo sapien
tgtgtatgtcatagaagcctagaac

SEQ ID NO: 2963003 - DNA, 25 bp, Homo sapien
aaattactcacgacagctaaagcag

SEQ ID NO: 2963004 - DNA, 25 bp, Homo sapien
tcctaggcccaagcatacaagaact

SEQ ID NO: 2963005 - DNA, 25 bp, Homo sapien
aagccctgcaggattagtcttccag

SEQ ID NO: 2963006 - DNA, 25 bp, Homo sapien
gaagccctgcaggattagtcttcca

SEQ ID NO: 2963007 - DNA, 25 bp, Homo sapien
ggaagccctgcaggattagtcttcc

SEQ ID NO: 2963008 - DNA, 25 bp, Homo sapien
cacagtcccttcagtgacacatgct

SEQ ID NO: 2963009 - DNA, 25 bp, Homo sapien
tttccacagtcccttcagtgacaca

SEQ ID NO: 2963010 - DNA, 25 bp, Homo sapien
aataatggctgcattgttccgagag

SEQ ID NO: 2963011 - DNA, 25 bp, Homo sapien
gcattgttccgagagaattccacaa

SEQ ID NO: 2963012 - DNA, 25 bp, Homo sapien
tattgatgctcctatgggcacagtt

SEQ ID NO: 2963013 - DNA, 25 bp, Homo sapien
gatattgatgctcctatgggcacag

SEQ ID NO: 2963014 - DNA, 25 bp, Homo sapien
cagggatattgatgctcctatgggc

SEQ ID NO: 2963015 - DNA, 25 bp, Homo sapien
aggagcagggatattgatgctccta

SEQ ID NO: 2963016 - DNA, 25 bp, Homo sapien
gattcactactaagagatctgggcc

SEQ ID NO: 2963017 - DNA, 25 bp, Homo sapien
agtaatgccaccagctacatgggct

SEQ ID NO: 2963018 - DNA, 25 bp, Homo sapien
tcttgcttgaatacacctgggagtg

SEQ ID NO: 2963019 - DNA, 25 bp, Homo sapien
ggcgctctcaggtttcagcaacata

SEQ ID NO: 2963020 - DNA, 25 bp, Homo sapien
ctgtacacctttatctgggcaaagg

SEQ ID NO: 2963021 - DNA, 25 bp, Homo sapien
gaacctctatattggcacagtagca

SEQ ID NO: 2963022 - DNA, 25 bp, Homo sapien
acacctttatctgggcaaagggagg

SEQ ID NO: 2963023 - DNA, 25 bp, Homo sapien
tcttttatctttcttatgaacctct

SEQ ID NO: 2963024 - DNA, 25 bp, Homo sapien
gcagcttgtccacgttcatccagtg

SEQ ID NO: 2963025 - DNA, 25 bp, Homo sapien
gattctagatcttgttctgcctaca

SEQ ID NO: 2963026 - DNA, 25 bp, Homo sapien
gaagaaatcgaggatctgagagatc

SEQ ID NO: 2963027 - DNA, 25 bp, Homo sapien
aaagcccaaaacagcagtgtccagc

SEQ ID NO: 2963028 - DNA, 25 bp, Homo sapien
tatacccacacgttactcagctaga

SEQ ID NO: 2963029 - DNA, 25 bp, Homo sapien
cagggcaatccagagttcagtacag

SEQ ID NO: 2963030 - DNA, 25 bp, Homo sapien
tataaggtaggtcagtggtttccca

SEQ ID NO: 2963031 - DNA, 25 bp, Homo sapien
tcagtacagggctcagaacctagta

SEQ ID NO: 2963032 - DNA, 25 bp, Homo sapien
gaataatgtatcatgtgaatgtgtc

SEQ ID NO: 2963033 - DNA, 25 bp, Homo sapien
ggtatactatggtccacaggcccaa

SEQ ID NO: 2963034 - DNA, 25 bp, Homo sapien
tcatttagattaagggttggtatac

SEQ ID NO: 2963035 - DNA, 25 bp, Homo sapien
cattaactgcttcaaggaaggtaac

SEQ ID NO: 2963036 - DNA, 25 bp, Homo sapien
ctctggcggaactctgactgacaca

SEQ ID NO: 2963037 - DNA, 25 bp, Homo sapien
tacaggtgccaagttaacaagacat

SEQ ID NO: 2963038 - DNA, 25 bp, Homo sapien
caagctttcatcagacatggcccca

SEQ ID NO: 2963039 - DNA, 25 bp, Homo sapien
tgatccactccgttgaaagctgagg

SEQ ID NO: 2963040 - DNA, 25 bp, Homo sapien
cacatcatgtgaacagttgcagaag

SEQ ID NO: 2963041 - DNA, 25 bp, Homo sapien
taaaagtgaacaccagtcaaggact

SEQ ID NO: 2963042 - DNA, 25 bp, Homo sapien
gctgtgtcatgataggcagaagttt

SEQ ID NO: 2963043 - DNA, 25 bp, Homo sapien
tctcttatccccttgtcatctaaca

SEQ ID NO: 2963044 - DNA, 25 bp, Homo sapien
tatgtctggaatacgagagatccct

SEQ ID NO: 2963045 - DNA, 25 bp, Homo sapien
gttatgtctggaatacgagagatcc

SEQ ID NO: 2963046 - DNA, 25 bp, Homo sapien
ttatgtctggaatacgagagatccc

SEQ ID NO: 2963047 - DNA, 25 bp, Homo sapien
tgtctggaatacgagagatccctta

SEQ ID NO: 2963048 - DNA, 25 bp, Homo sapien
ccttgtggcaggttgattggactcc

SEQ ID NO: 2963049 - DNA, 25 bp, Homo sapien
gaaggtattcaggtgctcagcaaca

SEQ ID NO: 2963050 - DNA, 25 bp, Homo sapien
catggttccagggatcagtagcaga

SEQ ID NO: 2963051 - DNA, 25 bp, Homo sapien
caatgggcccgtgctcatggcttac

SEQ ID NO: 2963052 - DNA, 25 bp, Homo sapien
tgaggagtaactgagagtcccatac

SEQ ID NO: 2963053 - DNA, 25 bp, Homo sapien
gtaactgagagtcccatacattgct

SEQ ID NO: 2963054 - DNA, 25 bp, Homo sapien
ggtgtggctattctagaaaatagtt

SEQ ID NO: 2963055 - DNA, 25 bp, Homo sapien
tgcaaaatggtgtggctattctaga

SEQ ID NO: 2963056 - DNA, 25 bp, Homo sapien
tacatggcaaataatcacttgaaaa

SEQ ID NO: 2963057 - DNA, 25 bp, Homo sapien
gaaggagaatattgtacgttcccaa

SEQ ID NO: 2963058 - DNA, 25 bp, Homo sapien
gatgttcgagatgatgatatgctaa

SEQ ID NO: 2963059 - DNA, 25 bp, Homo sapien
tcaaagcattactatgtactccatg

SEQ ID NO: 2963060 - DNA, 25 bp, Homo sapien
tctaacaaaacgtgtgcagaacctg

SEQ ID NO: 2963061 - DNA, 25 bp, Homo sapien
tcaaatcaagatcccagcaagatat

SEQ ID NO: 2963062 - DNA, 25 bp, Homo sapien
gaagctatcaattgccaccaaactg

SEQ ID NO: 2963063 - DNA, 25 bp, Homo sapien
gcaatgcttagaaatcaaactcaga

SEQ ID NO: 2963064 - DNA, 25 bp, Homo sapien
aaagttaactgtcaaacaacatgcc

SEQ ID NO: 2963065 - DNA, 25 bp, Homo sapien
ctgtcaaacaacatgccacttcaca

SEQ ID NO: 2963066 - DNA, 25 bp, Homo sapien
tactttttataactagcagtgcagt

SEQ ID NO: 2963067 - DNA, 25 bp, Homo sapien
cattgtttcagtaagtgatgaatca

SEQ ID NO: 2963068 - DNA, 25 bp, Homo sapien
atatcttgtcttactagaaggtttt

SEQ ID NO: 2963069 - DNA, 25 bp, Homo sapien
tatatcttgtcttactagaaggttt

SEQ ID NO: 2963070 - DNA, 25 bp, Homo sapien
aacctgtgctctggctgacaggtgc

SEQ ID NO: 2963071 - DNA, 25 bp, Homo sapien
atgccccagcacagcatgtccaggg

SEQ ID NO: 2963072 - DNA, 25 bp, Homo sapien
tccagggagaacctgtgctctggct

SEQ ID NO: 2963073 - DNA, 25 bp, Homo sapien
atgtccagggagaacctgtgctctg

SEQ ID NO: 2963074 - DNA, 25 bp, Homo sapien
aggaacacgctagctggggacatag

SEQ ID NO: 2963075 - DNA, 25 bp, Homo sapien
ctgaggaacacgctagctggggaca

SEQ ID NO: 2963076 - DNA, 25 bp, Homo sapien
cccactgaggaacacgctagctggg

SEQ ID NO: 2963077 - DNA, 25 bp, Homo sapien
acccactgaggaacacgctagctgg

SEQ ID NO: 2963078 - DNA, 25 bp, Homo sapien
cttagcctttatgggcactctctcc

SEQ ID NO: 2963079 - DNA, 25 bp, Homo sapien
cactggtgcatacacacttagcctt

SEQ ID NO: 2963080 - DNA, 25 bp, Homo sapien
cacacttagcctttatgggcactct

SEQ ID NO: 2963081 - DNA, 25 bp, Homo sapien
acttctctgctaccccactggtgca

SEQ ID NO: 2963082 - DNA, 25 bp, Homo sapien
agggcccgtcaaggctggcagtgga

SEQ ID NO: 2963083 - DNA, 25 bp, Homo sapien
ctggcagtggacaccttgcaggtta

SEQ ID NO: 2963084 - DNA, 25 bp, Homo sapien
ctccagaagggcccgtcaaggctgg

SEQ ID NO: 2963085 - DNA, 25 bp, Homo sapien
agttcctccagaagggcccgtcaag

SEQ ID NO: 2963086 - DNA, 25 bp, Homo sapien
ctaggtctagggtggtttccttcat

SEQ ID NO: 2963087 - DNA, 25 bp, Homo sapien
ctttgcttagcctcatgcagaaatt

SEQ ID NO: 2963088 - DNA, 25 bp, Homo sapien
tcagctttacagtgtcttggccgtg

SEQ ID NO: 2963089 - DNA, 25 bp, Homo sapien
tcttggccgtgttctaggtctaggg

SEQ ID NO: 2963090 - DNA, 25 bp, Homo sapien
caaggcacctacactaaaaaagacg

SEQ ID NO: 2963091 - DNA, 25 bp, Homo sapien
tgtcacatatgttggcaggcctctg

SEQ ID NO: 2963092 - DNA, 25 bp, Homo sapien
taaatcatcgaaaagctcagctgcc

SEQ ID NO: 2963093 - DNA, 25 bp, Homo sapien
taaaaaatgatccagtacagctgtc

SEQ ID NO: 2963094 - DNA, 25 bp, Homo sapien
ctgtgtttccatccaagcttcagac

SEQ ID NO: 2963095 - DNA, 25 bp, Homo sapien
tgtttccatccaagcttcagactct

SEQ ID NO: 2963096 - DNA, 25 bp, Homo sapien
taactttgtctgtgtttccatccaa

SEQ ID NO: 2963097 - DNA, 25 bp, Homo sapien
tccaagcttcagactctttaaagat

SEQ ID NO: 2963098 - DNA, 25 bp, Homo sapien
tgcttttggtgtatcacattcattc

SEQ ID NO: 2963099 - DNA, 25 bp, Homo sapien
tcctgcttttggtgtatcacattca

SEQ ID NO: 2963100 - DNA, 25 bp, Homo sapien
gggtctcctgcttttggtgtatcac

SEQ ID NO: 2963101 - DNA, 25 bp, Homo sapien
gtctcctgcttttggtgtatcacat

SEQ ID NO: 2963102 - DNA, 25 bp, Homo sapien
taatccacactgtgcaacatagtac

SEQ ID NO: 2963103 - DNA, 25 bp, Homo sapien
tacatacataaacttcttcaacaac

SEQ ID NO: 2963104 - DNA, 25 bp, Homo sapien
cacactgtgcaacatagtacataca

SEQ ID NO: 2963105 - DNA, 25 bp, Homo sapien
tttaatccacactgtgcaacatagt

SEQ ID NO: 2963106 - DNA, 25 bp, Homo sapien
ggcttattgctgtgggcctccaagt

SEQ ID NO: 2963107 - DNA, 25 bp, Homo sapien
gcctccaagtgggttcttgcctcca

SEQ ID NO: 2963108 - DNA, 25 bp, Homo sapien
gtattatcaccaaggcatattcgtt

SEQ ID NO: 2963109 - DNA, 25 bp, Homo sapien
tcctatctggcttattgctgtgggc

SEQ ID NO: 2963110 - DNA, 25 bp, Homo sapien
atattacaagaatctgggtcttttt

SEQ ID NO: 2963111 - DNA, 25 bp, Homo sapien
gtcttttttcccttcggccatgctg

SEQ ID NO: 2963112 - DNA, 25 bp, Homo sapien
gtatattacaagaatctgggtcttt

SEQ ID NO: 2963113 - DNA, 25 bp, Homo sapien
cttttttcccttcggccatgctgtc

SEQ ID NO: 2963114 - DNA, 25 bp, Homo sapien
gagaaaccattgaaacaaacaaaca

SEQ ID NO: 2963115 - DNA, 25 bp, Homo sapien
acaaaaaaaatgaaaattcaatcat

SEQ ID NO: 2963116 - DNA, 25 bp, Homo sapien
ctacagagaaaccattgaaacaaac

SEQ ID NO: 2963117 - DNA, 25 bp, Homo sapien
cagagaaaccattgaaacaaacaaa

SEQ ID NO: 2963118 - DNA, 25 bp, Homo sapien
cattgatacctgtgtggtgttctgt

SEQ ID NO: 2963119 - DNA, 25 bp, Homo sapien
ctaagaggacaaacattgatacctg

SEQ ID NO: 2963120 - DNA, 25 bp, Homo sapien
ggtgttctgtggttccataggatct

SEQ ID NO: 2963121 - DNA, 25 bp, Homo sapien
tggttccataggatcttcccccacg

SEQ ID NO: 2963122 - DNA, 25 bp, Homo sapien
ggtaacatagactaacaggaacaga

SEQ ID NO: 2963123 - DNA, 25 bp, Homo sapien
ttcccacaatggtggtaacatagac

SEQ ID NO: 2963124 - DNA, 25 bp, Homo sapien
gataaggaggtttcccacaatggtg

SEQ ID NO: 2963125 - DNA, 25 bp, Homo sapien
caggaacagaaggaacaggaatttc

SEQ ID NO: 2963126 - DNA, 25 bp, Homo sapien
gaaccagatgataactagcagccca

SEQ ID NO: 2963127 - DNA, 25 bp, Homo sapien
catgcagccctggtaggagatcgtc

SEQ ID NO: 2963128 - DNA, 25 bp, Homo sapien
cgtcttggtctcatggaggaagtcc

SEQ ID NO: 2963129 - DNA, 25 bp, Homo sapien
tggagccggcagtcaaaagtcactg

SEQ ID NO: 2963130 - DNA, 25 bp, Homo sapien
tcccagagttaagatgaagcagttg

SEQ ID NO: 2963131 - DNA, 25 bp, Homo sapien
gagggagggcgagataactttctaa

SEQ ID NO: 2963132 - DNA, 25 bp, Homo sapien
tggacgaaaacagaagccatgcctt

SEQ ID NO: 2963133 - DNA, 25 bp, Homo sapien
tgtaactgtcccagagttaagatga

SEQ ID NO: 2963134 - DNA, 25 bp, Homo sapien
ctggcccgaccgccaccgctggccc

SEQ ID NO: 2963135 - DNA, 25 bp, Homo sapien
gctggagaccttgacgcggcgctcc

SEQ ID NO: 2963136 - DNA, 25 bp, Homo sapien
tggagaccttgacgcggcgctcctc

SEQ ID NO: 2963137 - DNA, 25 bp, Homo sapien
ggcaggctggagaccttgacgcggc

SEQ ID NO: 2963138 - DNA, 25 bp, Homo sapien
aggctggagaccttgacgcggcgct

SEQ ID NO: 2963139 - DNA, 25 bp, Homo sapien
ggaagaggcgcttttggccggcact

SEQ ID NO: 2963140 - DNA, 25 bp, Homo sapien
ttcttgtccgacacgagcgcatcca

SEQ ID NO: 2963141 - DNA, 25 bp, Homo sapien
aagaggcgcttttggccggcactgg

SEQ ID NO: 2963142 - DNA, 25 bp, Homo sapien
cggcttcttgtccgacacgagcgca

SEQ ID NO: 2963143 - DNA, 25 bp, Homo sapien
atccacgccgctccgtcttagggag

SEQ ID NO: 2963144 - DNA, 25 bp, Homo sapien
cacgccgctccgtcttagggagttt

SEQ ID NO: 2963145 - DNA, 25 bp, Homo sapien
catccacgccgctccgtcttaggga

SEQ ID NO: 2963146 - DNA, 25 bp, Homo sapien
ccacgccgctccgtcttagggagtt

SEQ ID NO: 2963147 - DNA, 25 bp, Homo sapien
aagtccgcaccctctgcaatggaga

SEQ ID NO: 2963148 - DNA, 25 bp, Homo sapien
gaggttcggagagctggagaagtcc

SEQ ID NO: 2963149 - DNA, 25 bp, Homo sapien
taaaggctgtgcgcggcttcggatt

SEQ ID NO: 2963150 - DNA, 25 bp, Homo sapien
ctgggacgtggtaaaggctgtgcgc

SEQ ID NO: 2963151 - DNA, 25 bp, Homo sapien
ggaagcacaggtctatggaacgggt

SEQ ID NO: 2963152 - DNA, 25 bp, Homo sapien
gaagcacaggtctatggaacgggta

SEQ ID NO: 2963153 - DNA, 25 bp, Homo sapien
aagcacaggtctatggaacgggtag

SEQ ID NO: 2963154 - DNA, 25 bp, Homo sapien
acaggtggtacatgccatatcccac

SEQ ID NO: 2963155 - DNA, 25 bp, Homo sapien
ggacaggtggtacatgccatatccc

SEQ ID NO: 2963156 - DNA, 25 bp, Homo sapien
taggacaggtggtacatgccatatc

SEQ ID NO: 2963157 - DNA, 25 bp, Homo sapien
ttaggacaggtggtacatgccatat

SEQ ID NO: 2963158 - DNA, 25 bp, Homo sapien
taagcagaagtcaatcatcccatca

SEQ ID NO: 2963159 - DNA, 25 bp, Homo sapien
gcactcagggtttgcagaacaggag

SEQ ID NO: 2963160 - DNA, 25 bp, Homo sapien
gagagataggaacaaatatggtagt

SEQ ID NO: 2963161 - DNA, 25 bp, Homo sapien
ctctttaagaaggtgacatatagga

SEQ ID NO: 2963162 - DNA, 25 bp, Homo sapien
gaccattatactaggtgctgtcttg

SEQ ID NO: 2963163 - DNA, 25 bp, Homo sapien
gaaccaaggttttaggcccatatga

SEQ ID NO: 2963164 - DNA, 25 bp, Homo sapien
tctggatcgtttacaagtgggtgct

SEQ ID NO: 2963165 - DNA, 25 bp, Homo sapien
gagcatccttatgtgtagaccatta

SEQ ID NO: 2963166 - DNA, 25 bp, Homo sapien
gacaaagtctgatacccacgtgagg

SEQ ID NO: 2963167 - DNA, 25 bp, Homo sapien
gatctgacccatgcagccctggtaa

SEQ ID NO: 2963168 - DNA, 25 bp, Homo sapien
ttagaaacaggaaacgctggagctc

SEQ ID NO: 2963169 - DNA, 25 bp, Homo sapien
ggacagccaggtttcggagcagaaa

SEQ ID NO: 2963170 - DNA, 25 bp, Homo sapien
tggacaatagagtggacaaagcctc

SEQ ID NO: 2963171 - DNA, 25 bp, Homo sapien
ctggacaatagagtggacaaagcct

SEQ ID NO: 2963172 - DNA, 25 bp, Homo sapien
caatagagtggacaaagcctcccac

SEQ ID NO: 2963173 - DNA, 25 bp, Homo sapien
gacaatagagtggacaaagcctccc

SEQ ID NO: 2963174 - DNA, 25 bp, Homo sapien
gcttggaacgaagatcatggaaacc

SEQ ID NO: 2963175 - DNA, 25 bp, Homo sapien
ggaagaaccagacgacatccagcag

SEQ ID NO: 2963176 - DNA, 25 bp, Homo sapien
catcaccaggatgaataagtaggac

SEQ ID NO: 2963177 - DNA, 25 bp, Homo sapien
tgtggccgatggacacaagcttgtc

SEQ ID NO: 2963178 - DNA, 25 bp, Homo sapien
caacacactatgaagagagcaaagg

SEQ ID NO: 2963179 - DNA, 25 bp, Homo sapien
gcaaaggtagtagctccctctccac

SEQ ID NO: 2963180 - DNA, 25 bp, Homo sapien
gggtggcttactcgaagtcatcagt

SEQ ID NO: 2963181 - DNA, 25 bp, Homo sapien
gagcttaagactccaaattctgtgc

SEQ ID NO: 2963182 - DNA, 25 bp, Homo sapien
ggaagtgagtgacatccacagcctg

SEQ ID NO: 2963183 - DNA, 25 bp, Homo sapien
tcaccagctgggaagtgagtgacat

SEQ ID NO: 2963184 - DNA, 25 bp, Homo sapien
tgcagcgaggcttcaccagctggga

SEQ ID NO: 2963185 - DNA, 25 bp, Homo sapien
cagcctgcacgggaggatcctctgc

SEQ ID NO: 2963186 - DNA, 25 bp, Homo sapien
ggctgggcgaggacgagtgtggcca

SEQ ID NO: 2963187 - DNA, 25 bp, Homo sapien
tgggcgaggacgagtgtggccagga

SEQ ID NO: 2963188 - DNA, 25 bp, Homo sapien
acagggctgggcgaggacgagtgtg

SEQ ID NO: 2963189 - DNA, 25 bp, Homo sapien
gggcgaggacgagtgtggccaggac

SEQ ID NO: 2963190 - DNA, 25 bp, Homo sapien
cagtctcgcaggaccgaggtctcca

SEQ ID NO: 2963191 - DNA, 25 bp, Homo sapien
accagcaacttggcctctgctatgc

SEQ ID NO: 2963192 - DNA, 25 bp, Homo sapien
tgggtccaattgtaggcagcatcca

SEQ ID NO: 2963193 - DNA, 25 bp, Homo sapien
tcttctgggtccaattgtaggcagc

SEQ ID NO: 2963194 - DNA, 25 bp, Homo sapien
ggagagagggtgcagacccacccag

SEQ ID NO: 2963195 - DNA, 25 bp, Homo sapien
agaggaggagtgagggctggagaga

SEQ ID NO: 2963196 - DNA, 25 bp, Homo sapien
agagagggtgcagacccacccagca

SEQ ID NO: 2963197 - DNA, 25 bp, Homo sapien
gggtgcagacccacccagcagagac

SEQ ID NO: 2963198 - DNA, 25 bp, Homo sapien
gctaccggttgtttgaagtaggaca

SEQ ID NO: 2963199 - DNA, 25 bp, Homo sapien
tgacattgaagggtccggaccgctg

SEQ ID NO: 2963200 - DNA, 25 bp, Homo sapien
tgcatataatctgcggcccgaacaa

SEQ ID NO: 2963201 - DNA, 25 bp, Homo sapien
tgtcctggtggctgctaccggttgt

SEQ ID NO: 2963202 - DNA, 25 bp, Homo sapien
agcaccccaaacctgtgcaccctgc

SEQ ID NO: 2963203 - DNA, 25 bp, Homo sapien
ccagcaccccaaacctgtgcaccct

SEQ ID NO: 2963204 - DNA, 25 bp, Homo sapien
cagggtaggcccagcgggctcagtg

SEQ ID NO: 2963205 - DNA, 25 bp, Homo sapien
ggccagggtaggcccagcgggctca

SEQ ID NO: 2963206 - DNA, 25 bp, Homo sapien
ccgcagctgtggttctgttagcaca

SEQ ID NO: 2963207 - DNA, 25 bp, Homo sapien
agccgcagctgtggttctgttagca

SEQ ID NO: 2963208 - DNA, 25 bp, Homo sapien
gccgcagctgtggttctgttagcac

SEQ ID NO: 2963209 - DNA, 25 bp, Homo sapien
cgcagctgtggttctgttagcacat

SEQ ID NO: 2963210 - DNA, 25 bp, Homo sapien
tgttgttgcaccgtccagtgatggt

SEQ ID NO: 2963211 - DNA, 25 bp, Homo sapien
tccagtgatggtgcggtacttgtcg

SEQ ID NO: 2963212 - DNA, 25 bp, Homo sapien
gctcggcctggtcccggagagcaca

SEQ ID NO: 2963213 - DNA, 25 bp, Homo sapien
acttgtcgctgcagcgctcggcctg

SEQ ID NO: 2963214 - DNA, 25 bp, Homo sapien
aaggggagcgacagcccatcctcat

SEQ ID NO: 2963215 - DNA, 25 bp, Homo sapien
cagcgagccagagcctggttggagg

SEQ ID NO: 2963216 - DNA, 25 bp, Homo sapien
gagaaggaagccattgcgcctcctg

SEQ ID NO: 2963217 - DNA, 25 bp, Homo sapien
tcatactcggcgggcagccagcgag

SEQ ID NO: 2963218 - DNA, 25 bp, Homo sapien
cagtcaacgcctgcagtgaaggcca

SEQ ID NO: 2963219 - DNA, 25 bp, Homo sapien
caggtcatggtcaatgaactggccc

SEQ ID NO: 2963220 - DNA, 25 bp, Homo sapien
caatctggttggagacagcccggac

SEQ ID NO: 2963221 - DNA, 25 bp, Homo sapien
cacggtcggaggtcagtctctcatt

SEQ ID NO: 2963222 - DNA, 25 bp, Homo sapien
gaagctggcaagagccgcaggaccc

SEQ ID NO: 2963223 - DNA, 25 bp, Homo sapien
tggcaagagccgcaggacccttgga

SEQ ID NO: 2963224 - DNA, 25 bp, Homo sapien
agagccgcaggacccttggactact

SEQ ID NO: 2963225 - DNA, 25 bp, Homo sapien
caagagccgcaggacccttggacta

SEQ ID NO: 2963226 - DNA, 25 bp, Homo sapien
gcagcgagagggagacctcactgcc

SEQ ID NO: 2963227 - DNA, 25 bp, Homo sapien
gatctggttgcggactctgttcttg

SEQ ID NO: 2963228 - DNA, 25 bp, Homo sapien
gtgccgagcggaagaaagggatgca

SEQ ID NO: 2963229 - DNA, 25 bp, Homo sapien
ccaggtagttggtccggttgcggag

SEQ ID NO: 2963230 - DNA, 25 bp, Homo sapien
tgcttcccagttgggaccccaggga

SEQ ID NO: 2963231 - DNA, 25 bp, Homo sapien
tgtttcctgggaagacaccaccttc

SEQ ID NO: 2963232 - DNA, 25 bp, Homo sapien
tactgaggtcccaaaccatgtacct

SEQ ID NO: 2963233 - DNA, 25 bp, Homo sapien
ttcaccacatcccaccattgcttcc

SEQ ID NO: 2963234 - DNA, 25 bp, Homo sapien
cagccggttgtgctctcgcataaag

SEQ ID NO: 2963235 - DNA, 25 bp, Homo sapien
cattccaccggggattcaggcgtct

SEQ ID NO: 2963236 - DNA, 25 bp, Homo sapien
gatcttccgagcctcattgtacagt

SEQ ID NO: 2963237 - DNA, 25 bp, Homo sapien
ttcaggcgtctcagctcggtggcca

SEQ ID NO: 2963238 - DNA, 25 bp, Homo sapien
cctgtagtgccccagggttctcctg

SEQ ID NO: 2963239 - DNA, 25 bp, Homo sapien
ggtactgactgtccaagcggaacat

SEQ ID NO: 2963240 - DNA, 25 bp, Homo sapien
cacccgtgggtccacattggagcag

SEQ ID NO: 2963241 - DNA, 25 bp, Homo sapien
ttcatacacgatccgccagctggca

SEQ ID NO: 2963242 - DNA, 25 bp, Homo sapien
cggagctcatccactaacatggcat

SEQ ID NO: 2963243 - DNA, 25 bp, Homo sapien
gcttcgttgcatgttgagagctgcc

SEQ ID NO: 2963244 - DNA, 25 bp, Homo sapien
cgaaacagccggtcccggagctcat

SEQ ID NO: 2963245 - DNA, 25 bp, Homo sapien
gcatcctgacggttcagcttggcag

SEQ ID NO: 2963246 - DNA, 25 bp, Homo sapien
tggtttttcagcacccggctaagct

SEQ ID NO: 2963247 - DNA, 25 bp, Homo sapien
aggaacttccttgccaagtcctggt

SEQ ID NO: 2963248 - DNA, 25 bp, Homo sapien
ggcaaaagaggctcagcgatggccc

SEQ ID NO: 2963249 - DNA, 25 bp, Homo sapien
gatgtcaatgttgtcaggtgttcca

SEQ ID NO: 2963250 - DNA, 25 bp, Homo sapien
ccccgagggtagatgttggctctga

SEQ ID NO: 2963251 - DNA, 25 bp, Homo sapien
tgtcccttgaaaccgtggtgatacc

SEQ ID NO: 2963252 - DNA, 25 bp, Homo sapien
aaattctgctcagggccttgcgctg

SEQ ID NO: 2963253 - DNA, 25 bp, Homo sapien
taattcgagacaaggaaattctgct

SEQ ID NO: 2963254 - DNA, 25 bp, Homo sapien
ccctcgccaggctgataggttcaac

SEQ ID NO: 2963255 - DNA, 25 bp, Homo sapien
tgtccctcgccaggctgataggttc

SEQ ID NO: 2963256 - DNA, 25 bp, Homo sapien
catgtccctcgccaggctgataggt

SEQ ID NO: 2963257 - DNA, 25 bp, Homo sapien
tcatgtccctcgccaggctgatagg

SEQ ID NO: 2963258 - DNA, 25 bp, Homo sapien
aaagttggagacttgggatagactc

SEQ ID NO: 2963259 - DNA, 25 bp, Homo sapien
ctgtagccagcagaagcgtcagcag

SEQ ID NO: 2963260 - DNA, 25 bp, Homo sapien
ggaaggtccattgctgataggagcc

SEQ ID NO: 2963261 - DNA, 25 bp, Homo sapien
tcccaaggcgggaaggtccattgct

SEQ ID NO: 2963262 - DNA, 25 bp, Homo sapien
cagtagaaagtgctgtaaaccctcc

SEQ ID NO: 2963263 - DNA, 25 bp, Homo sapien
gcctttgcacgtggcgctgattcat

SEQ ID NO: 2963264 - DNA, 25 bp, Homo sapien
ccgagtggtctcttagtcatggtga

SEQ ID NO: 2963265 - DNA, 25 bp, Homo sapien
tgcaagaccacatggcttggctccc

SEQ ID NO: 2963266 - DNA, 25 bp, Homo sapien
aagaaagagagatcagattgttact

SEQ ID NO: 2963267 - DNA, 25 bp, Homo sapien
gaaagaagtagacataggagactcc

SEQ ID NO: 2963268 - DNA, 25 bp, Homo sapien
gaagtagacataggagactccattt

SEQ ID NO: 2963269 - DNA, 25 bp, Homo sapien
gaaatgtggggaaaagaaagagaga

SEQ ID NO: 2963270 - DNA, 25 bp, Homo sapien
cacaactagtggctatggcacccag

SEQ ID NO: 2963271 - DNA, 25 bp, Homo sapien
tggcatgagattcccgagttcaggg

SEQ ID NO: 2963272 - DNA, 25 bp, Homo sapien
tatggtgagtcggtgttacacaact

SEQ ID NO: 2963273 - DNA, 25 bp, Homo sapien
gacgccagacgtgaggttacagcat

SEQ ID NO: 2963274 - DNA, 25 bp, Homo sapien
gagatgcaggaccaagaaacaggga

SEQ ID NO: 2963275 - DNA, 25 bp, Homo sapien
agcattcctgcacggggcagaattc

SEQ ID NO: 2963276 - DNA, 25 bp, Homo sapien
ggagatgcaggaccaagaaacaggg

SEQ ID NO: 2963277 - DNA, 25 bp, Homo sapien
tcttgcagcattcctgcacggggca

SEQ ID NO: 2963278 - DNA, 25 bp, Homo sapien
tcagagcggagtcggaaggaaatct

SEQ ID NO: 2963279 - DNA, 25 bp, Homo sapien
gcttgggcctacgagagtgagttca

SEQ ID NO: 2963280 - DNA, 25 bp, Homo sapien
tgctctctgttttccgggccactac

SEQ ID NO: 2963281 - DNA, 25 bp, Homo sapien
gcaacctacagtggacacaccaaga

SEQ ID NO: 2963282 - DNA, 25 bp, Homo sapien
tcccagggcggcatgagctgttgga

SEQ ID NO: 2963283 - DNA, 25 bp, Homo sapien
cactctggcttaagctgtccctggc

SEQ ID NO: 2963284 - DNA, 25 bp, Homo sapien
gattcatccactagttctaccccag

SEQ ID NO: 2963285 - DNA, 25 bp, Homo sapien
gaatggtgtcccagggcggcatgag

SEQ ID NO: 2963286 - DNA, 25 bp, Homo sapien
aatggcagggattggttgatgcaat

SEQ ID NO: 2963287 - DNA, 25 bp, Homo sapien
cactgactgtgggtgaagcaactcc

SEQ ID NO: 2963288 - DNA, 25 bp, Homo sapien
caatagcactgactgtgggtgaagc

SEQ ID NO: 2963289 - DNA, 25 bp, Homo sapien
gttgatgcaatagcactgactgtgg

SEQ ID NO: 2963290 - DNA, 25 bp, Homo sapien
gtcttttataccttccagcaagaat

SEQ ID NO: 2963291 - DNA, 25 bp, Homo sapien
gactccgggcagatacaccaggaaa

SEQ ID NO: 2963292 - DNA, 25 bp, Homo sapien
ttcacggcagccagggagttgctct

SEQ ID NO: 2963293 - DNA, 25 bp, Homo sapien
gagacgctgaggcttagcaggaaag

SEQ ID NO: 2963294 - DNA, 25 bp, Homo sapien
gtttgaaccacagaaagcagagaaa

SEQ ID NO: 2963295 - DNA, 25 bp, Homo sapien
agggtttgaaccacagaaagcagag

SEQ ID NO: 2963296 - DNA, 25 bp, Homo sapien
gggtttgaaccacagaaagcagaga

SEQ ID NO: 2963297 - DNA, 25 bp, Homo sapien
gagggtttgaaccacagaaagcaga

SEQ ID NO: 2963298 - DNA, 25 bp, Homo sapien
tgcagcctgaagcaagatgagggaa

SEQ ID NO: 2963299 - DNA, 25 bp, Homo sapien
ctcttgtggtagatgctgcagcctg

SEQ ID NO: 2963300 - DNA, 25 bp, Homo sapien
tggtagatgctgcagcctgaagcaa

SEQ ID NO: 2963301 - DNA, 25 bp, Homo sapien
gatgctgcagcctgaagcaagatga

SEQ ID NO: 2963302 - DNA, 25 bp, Homo sapien
gacaccactcctttgcgatgtcttc

SEQ ID NO: 2963303 - DNA, 25 bp, Homo sapien
cactcctttgcgatgtcttctgctt

SEQ ID NO: 2963304 - DNA, 25 bp, Homo sapien
gagcaggaagtagggtgtcagacac

SEQ ID NO: 2963305 - DNA, 25 bp, Homo sapien
tgtcagacaccactcctttgcgatg

SEQ ID NO: 2963306 - DNA, 25 bp, Homo sapien
tatcggagatggcagaggttctggt

SEQ ID NO: 2963307 - DNA, 25 bp, Homo sapien
gtatcggagatggcagaggttctgg

SEQ ID NO: 2963308 - DNA, 25 bp, Homo sapien
agtatcggagatggcagaggttctg

SEQ ID NO: 2963309 - DNA, 25 bp, Homo sapien
ttgttgacttggaccttggcctgac

SEQ ID NO: 2963310 - DNA, 25 bp, Homo sapien
tgttgacttggaccttggcctgact

SEQ ID NO: 2963311 - DNA, 25 bp, Homo sapien
gttgacttggaccttggcctgactc

SEQ ID NO: 2963312 - DNA, 25 bp, Homo sapien
tctcagagctcatggcggtcttcag

SEQ ID NO: 2963313 - DNA, 25 bp, Homo sapien
cgcgtccggcctttggcatgcttga

SEQ ID NO: 2963314 - DNA, 25 bp, Homo sapien
cattgcggatggctgtgcgcgtccg

SEQ ID NO: 2963315 - DNA, 25 bp, Homo sapien
catgcttgaggtattctgagagctg

SEQ ID NO: 2963316 - DNA, 25 bp, Homo sapien
ctgtgacattggtcaaggatgcctt

SEQ ID NO: 2963317 - DNA, 25 bp, Homo sapien
tgacattggtcaaggatgccttctg

SEQ ID NO: 2963318 - DNA, 25 bp, Homo sapien
agtctctttaaagactcctcccaca

SEQ ID NO: 2963319 - DNA, 25 bp, Homo sapien
tctgcctcagtctctttaaagactc

SEQ ID NO: 2963320 - DNA, 25 bp, Homo sapien
tttggagctttggaatttgcccaac

SEQ ID NO: 2963321 - DNA, 25 bp, Homo sapien
gctttggaatttgcccaactcctgg

SEQ ID NO: 2963322 - DNA, 25 bp, Homo sapien
agggagaacctgcagccttttcctc

SEQ ID NO: 2963323 - DNA, 25 bp, Homo sapien
aaaccccttcctcatgaccctctgt

SEQ ID NO: 2963324 - DNA, 25 bp, Homo sapien
acagtgaagtcaagtccaggctggg

SEQ ID NO: 2963325 - DNA, 25 bp, Homo sapien
agtgaagtcaagtccaggctgggat

SEQ ID NO: 2963326 - DNA, 25 bp, Homo sapien
agagacagtgaagtcaagtccaggc

SEQ ID NO: 2963327 - DNA, 25 bp, Homo sapien
ctccagagacagtgaagtcaagtcc

SEQ ID NO: 2963328 - DNA, 25 bp, Homo sapien
atctcaccacgggagcaggagcacc

SEQ ID NO: 2963329 - DNA, 25 bp, Homo sapien
gttattgcagtctcccgtaatggtg

SEQ ID NO: 2963330 - DNA, 25 bp, Homo sapien
gtaagggctgcacgggtcgcatctc

SEQ ID NO: 2963331 - DNA, 25 bp, Homo sapien
tctcccgtaatggtgcggtaagggc

SEQ ID NO: 2963332 - DNA, 25 bp, Homo sapien
acgatcctcgctgagcttcggcagg

SEQ ID NO: 2963333 - DNA, 25 bp, Homo sapien
cagcacgatcctcgctgagcttcgg

SEQ ID NO: 2963334 - DNA, 25 bp, Homo sapien
ctcgctgagcttcggcaggccggct

SEQ ID NO: 2963335 - DNA, 25 bp, Homo sapien
ctgaaaccagcacgatcctcgctga

SEQ ID NO: 2963336 - DNA, 25 bp, Homo sapien
cagccagcgcgccagagccctgttg

SEQ ID NO: 2963337 - DNA, 25 bp, Homo sapien
ttccccggcgtccagccgaagggca

SEQ ID NO: 2963338 - DNA, 25 bp, Homo sapien
agagggaagccgttgcgcgtcttcc

SEQ ID NO: 2963339 - DNA, 25 bp, Homo sapien
ggagagcccgtcctcgtactccgcg

SEQ ID NO: 2963340 - DNA, 25 bp, Homo sapien
tcctcattcagatagccaacaatct

SEQ ID NO: 2963341 - DNA, 25 bp, Homo sapien
ctcctcattcagatagccaacaatc

SEQ ID NO: 2963342 - DNA, 25 bp, Homo sapien
caatcttgttagatacctcccgggc

SEQ ID NO: 2963343 - DNA, 25 bp, Homo sapien
tagccaacaatcttgttagatacct

SEQ ID NO: 2963344 - DNA, 25 bp, Homo sapien
gcagttgtctccctggatacagtac

SEQ ID NO: 2963345 - DNA, 25 bp, Homo sapien
gctactccccagctcggtgtcaggg

SEQ ID NO: 2963346 - DNA, 25 bp, Homo sapien
tgaccccactgcatgaagagcaggg

SEQ ID NO: 2963347 - DNA, 25 bp, Homo sapien
cactgggctttggagtactcgctac

SEQ ID NO: 2963348 - DNA, 25 bp, Homo sapien
tctgagtggagttgaagtcatcctc

SEQ ID NO: 2963349 - DNA, 25 bp, Homo sapien
tcagatcattggcttcattccacag

SEQ ID NO: 2963350 - DNA, 25 bp, Homo sapien
cctaagaacttatacactggaaggg

SEQ ID NO: 2963351 - DNA, 25 bp, Homo sapien
tttataccacagcacatagcctcga

SEQ ID NO: 2963352 - DNA, 25 bp, Homo sapien
cagacgaacccagctcggaagaaag

SEQ ID NO: 2963353 - DNA, 25 bp, Homo sapien
ctgctctcgggccagggacttgtag

SEQ ID NO: 2963354 - DNA, 25 bp, Homo sapien
tggggcagacgaacccagctcggaa

SEQ ID NO: 2963355 - DNA, 25 bp, Homo sapien
acccagctcggaagaaaggcatgca

SEQ ID NO: 2963356 - DNA, 25 bp, Homo sapien
tagggtagtccatggtctgagacct

SEQ ID NO: 2963357 - DNA, 25 bp, Homo sapien
ttggcttcttgctgtcatagggcag

SEQ ID NO: 2963358 - DNA, 25 bp, Homo sapien
tcatagggcaggtagggtagtccat

SEQ ID NO: 2963359 - DNA, 25 bp, Homo sapien
gagacctcctggttgacagccatga

SEQ ID NO: 2963360 - DNA, 25 bp, Homo sapien
agccggttatgctcgcggagaaaga

SEQ ID NO: 2963361 - DNA, 25 bp, Homo sapien
ccagcagaatatgctctgaggctcg

SEQ ID NO: 2963362 - DNA, 25 bp, Homo sapien
cagaatatgctctgaggctcgagaa

SEQ ID NO: 2963363 - DNA, 25 bp, Homo sapien
gttctctggccagccggttatgctc

SEQ ID NO: 2963364 - DNA, 25 bp, Homo sapien
gaccatcctccaagtgttgaagaag

SEQ ID NO: 2963365 - DNA, 25 bp, Homo sapien
cacttctgcatgtggtcacctagca

SEQ ID NO: 2963366 - DNA, 25 bp, Homo sapien
atccaggcggaacatactagagggg

SEQ ID NO: 2963367 - DNA, 25 bp, Homo sapien
ctagcaaaatgggtaggtagtccct

SEQ ID NO: 2963368 - DNA, 25 bp, Homo sapien
aggccccgcaccagaggatcaattc

SEQ ID NO: 2963369 - DNA, 25 bp, Homo sapien
caggttgcccatggtcccggcaacg

SEQ ID NO: 2963370 - DNA, 25 bp, Homo sapien
tggaaaagcttgttgcgcagctctc

SEQ ID NO: 2963371 - DNA, 25 bp, Homo sapien
tgttgatggcagccaggtcaaagcc

SEQ ID NO: 2963372 - DNA, 25 bp, Homo sapien
actcctctagtgtctgcggctgtga

SEQ ID NO: 2963373 - DNA, 25 bp, Homo sapien
tgagaggtcacagaaggctctccag

SEQ ID NO: 2963374 - DNA, 25 bp, Homo sapien
gcaatggcccctatccagatgtcga

SEQ ID NO: 2963375 - DNA, 25 bp, Homo sapien
gctggaactgcttgcccaagaggca

SEQ ID NO: 2963376 - DNA, 25 bp, Homo sapien
caggaccttgggacacccctcttgg

SEQ ID NO: 2963377 - DNA, 25 bp, Homo sapien
gcaggaccttgggacacccctcttg

SEQ ID NO: 2963378 - DNA, 25 bp, Homo sapien
gaccttgggacacccctcttggaga

SEQ ID NO: 2963379 - DNA, 25 bp, Homo sapien
ccttgggacacccctcttggagaag

SEQ ID NO: 2963380 - DNA, 25 bp, Homo sapien
ttctgctcgttcgtgaagaccccag

SEQ ID NO: 2963381 - DNA, 25 bp, Homo sapien
tgctcgttcgtgaagaccccagggt

SEQ ID NO: 2963382 - DNA, 25 bp, Homo sapien
ctgtagagagtccttctgctcgttc

SEQ ID NO: 2963383 - DNA, 25 bp, Homo sapien
gagtccttctgctcgttcgtgaaga

SEQ ID NO: 2963384 - DNA, 25 bp, Homo sapien
ctgagcaatccacgaagtcataggg

SEQ ID NO: 2963385 - DNA, 25 bp, Homo sapien
tagctgttggcccagaatgggtccc

SEQ ID NO: 2963386 - DNA, 25 bp, Homo sapien
caggtccagcttgtcgatggctgag

SEQ ID NO: 2963387 - DNA, 25 bp, Homo sapien
tgatgcgggtgttgtcacagacaag

SEQ ID NO: 2963388 - DNA, 25 bp, Homo sapien
tatagagaggcccagctgcaaagaa

SEQ ID NO: 2963389 - DNA, 25 bp, Homo sapien
ctgggatatggagctctaagggacc

SEQ ID NO: 2963390 - DNA, 25 bp, Homo sapien
gggaacggtgtcacgcctagcatct

SEQ ID NO: 2963391 - DNA, 25 bp, Homo sapien
gacaggtaacatccagcaagctgga

SEQ ID NO: 2963392 - DNA, 25 bp, Homo sapien
acattctatatcatggaagagattg

SEQ ID NO: 2963393 - DNA, 25 bp, Homo sapien
gacattctatatcatggaagagatt

SEQ ID NO: 2963394 - DNA, 25 bp, Homo sapien
ccccaccttgaccttggtctccagg

SEQ ID NO: 2963395 - DNA, 25 bp, Homo sapien
cttgaccttggtctccaggggtgtg

SEQ ID NO: 2963396 - DNA, 25 bp, Homo sapien
agatagtttgactgaacccccacct

SEQ ID NO: 2963397 - DNA, 25 bp, Homo sapien
tgggagatagtttgactgaaccccc

SEQ ID NO: 2963398 - DNA, 25 bp, Homo sapien
ttctccgccgttacccgatccactc

SEQ ID NO: 2963399 - DNA, 25 bp, Homo sapien
tctgaggggtgagtgtgtctttgca

SEQ ID NO: 2963400 - DNA, 25 bp, Homo sapien
ccatccttccctgccggggcctgct

SEQ ID NO: 2963401 - DNA, 25 bp, Homo sapien
tcatacattccctgttcagagtggg

SEQ ID NO: 2963402 - DNA, 25 bp, Homo sapien
ccaggattgaacgtggggagcccca

SEQ ID NO: 2963403 - DNA, 25 bp, Homo sapien
tggcagcgcccccaggattgaacgt

SEQ ID NO: 2963404 - DNA, 25 bp, Homo sapien
cagcgcccccaggattgaacgtggg

SEQ ID NO: 2963405 - DNA, 25 bp, Homo sapien
cagaagcgagaaggtgtggggtttc

SEQ ID NO: 2963406 - DNA, 25 bp, Homo sapien
gggaggtgacatgtgagaagttggg

SEQ ID NO: 2963407 - DNA, 25 bp, Homo sapien
gctgcttctaagcagtccttgtcct

SEQ ID NO: 2963408 - DNA, 25 bp, Homo sapien
catgtgagaagttgggggcacccat

SEQ ID NO: 2963409 - DNA, 25 bp, Homo sapien
ggagggaggtgacatgtgagaagtt

SEQ ID NO: 2963410 - DNA, 25 bp, Homo sapien
gggcagcaaaggcataagtattaac

SEQ ID NO: 2963411 - DNA, 25 bp, Homo sapien
caaatgactagaatttgaactctgc

SEQ ID NO: 2963412 - DNA, 25 bp, Homo sapien
gactagaatttgaactctgcgatct

SEQ ID NO: 2963413 - DNA, 25 bp, Homo sapien
ggcataagtattaactaaccacaaa

SEQ ID NO: 2963414 - DNA, 25 bp, Homo sapien
gctgctggacaccagctttgccact

SEQ ID NO: 2963415 - DNA, 25 bp, Homo sapien
ggaacaaagaccaggtccctgagca

SEQ ID NO: 2963416 - DNA, 25 bp, Homo sapien
gctggaggtggagcatgaacaggct

SEQ ID NO: 2963417 - DNA, 25 bp, Homo sapien
tcggctcagcctacgggagaagcag

SEQ ID NO: 2963418 - DNA, 25 bp, Homo sapien
gcagagcaagctggagagcctggag

SEQ ID NO: 2963419 - DNA, 25 bp, Homo sapien
ggagagcctggagcaagtgctgaag

SEQ ID NO: 2963420 - DNA, 25 bp, Homo sapien
agcaagctggagagcctggagcaag

SEQ ID NO: 2963421 - DNA, 25 bp, Homo sapien
aagctggagagcctggagcaagtgc

SEQ ID NO: 2963422 - DNA, 25 bp, Homo sapien
ttgctgccttgcagcgggagtgcag

SEQ ID NO: 2963423 - DNA, 25 bp, Homo sapien
cttggagttgtgtcggaaggcccta

SEQ ID NO: 2963424 - DNA, 25 bp, Homo sapien
tgcgaggaggccctggtcacctctt

SEQ ID NO: 2963425 - DNA, 25 bp, Homo sapien
cctctggctaggtgagtgccccctt

SEQ ID NO: 2963426 - DNA, 25 bp, Homo sapien
agcctcctttgtgggtggggaagag

SEQ ID NO: 2963427 - DNA, 25 bp, Homo sapien
tccagcagccctggcgccttctgca

SEQ ID NO: 2963428 - DNA, 25 bp, Homo sapien
gcagcctcctttgtgggtggggaag

SEQ ID NO: 2963429 - DNA, 25 bp, Homo sapien
cagccctggcgccttctgcagcctc

SEQ ID NO: 2963430 - DNA, 25 bp, Homo sapien
gcttgcctaatgagtcccgggttca

SEQ ID NO: 2963431 - DNA, 25 bp, Homo sapien
gaacttccaggcaattcgggacaaa

SEQ ID NO: 2963432 - DNA, 25 bp, Homo sapien
tgcatatagactgactcctggctga

SEQ ID NO: 2963433 - DNA, 25 bp, Homo sapien
ggctctagggttcagtatcaccgct

SEQ ID NO: 2963434 - DNA, 25 bp, Homo sapien
tcatgcagtggcgtgcgtgttgacc

SEQ ID NO: 2963435 - DNA, 25 bp, Homo sapien
tgactcatagacacataatagcaca

SEQ ID NO: 2963436 - DNA, 25 bp, Homo sapien
tatatactctgacctaaacagcaac

SEQ ID NO: 2963437 - DNA, 25 bp, Homo sapien
cacacgcatgcgcataatggcatgc

SEQ ID NO: 2963438 - DNA, 25 bp, Homo sapien
taaggatccggaccttcactgctgc

SEQ ID NO: 2963439 - DNA, 25 bp, Homo sapien
gcctcaggtaaggatccggaccttc

SEQ ID NO: 2963440 - DNA, 25 bp, Homo sapien
ggctcctcagctcggggcctctagg

SEQ ID NO: 2963441 - DNA, 25 bp, Homo sapien
ctgcagcctcaggtaaggatccgga

SEQ ID NO: 2963442 - DNA, 25 bp, Homo sapien
gggccctgtcgaggagccctggtct

SEQ ID NO: 2963443 - DNA, 25 bp, Homo sapien
ggctcttgagccatcccttggagct

SEQ ID NO: 2963444 - DNA, 25 bp, Homo sapien
gagccctggtcttctggggtcaccc

SEQ ID NO: 2963445 - DNA, 25 bp, Homo sapien
ggtcaccctcaatgccctgagtcag

SEQ ID NO: 2963446 - DNA, 25 bp, Homo sapien
catggacgcccttcatgcatcagca

SEQ ID NO: 2963447 - DNA, 25 bp, Homo sapien
cccacaggtcccaaagagagcgtga

SEQ ID NO: 2963448 - DNA, 25 bp, Homo sapien
gagagcgtgaacacctagcctagtg

SEQ ID NO: 2963449 - DNA, 25 bp, Homo sapien
gggtgctgaggacaacagtctccat

SEQ ID NO: 2963450 - DNA, 25 bp, Homo sapien
agcccatggagaggcttggagaacg

SEQ ID NO: 2963451 - DNA, 25 bp, Homo sapien
cctcttgcttccagagccaagccca

SEQ ID NO: 2963452 - DNA, 25 bp, Homo sapien
cttgcttccagagccaagcccatgg

SEQ ID NO: 2963453 - DNA, 25 bp, Homo sapien
ccaaacccattcctcttgcttccag

SEQ ID NO: 2963454 - DNA, 25 bp, Homo sapien
cctgtttgtgagtggttaagtctgt

SEQ ID NO: 2963455 - DNA, 25 bp, Homo sapien
tggctctttgtaaggcaggttatct

SEQ ID NO: 2963456 - DNA, 25 bp, Homo sapien
cttcctgtttgtgagtggttaagtc

SEQ ID NO: 2963457 - DNA, 25 bp, Homo sapien
taaggcaggttatctgggctgccat

SEQ ID NO: 2963458 - DNA, 25 bp, Homo sapien
tctgggctcctgtgctcttggggac

SEQ ID NO: 2963459 - DNA, 25 bp, Homo sapien
gctgcttcctcctgcgaggtctctg

SEQ ID NO: 2963460 - DNA, 25 bp, Homo sapien
ggaacacagatactgctgcttcctc

SEQ ID NO: 2963461 - DNA, 25 bp, Homo sapien
gggctgggcaggatttggaacacag

SEQ ID NO: 2963462 - DNA, 25 bp, Homo sapien
ccagacaagataaggggagaattct

SEQ ID NO: 2963463 - DNA, 25 bp, Homo sapien
gaattctactagagccattcctagc

SEQ ID NO: 2963464 - DNA, 25 bp, Homo sapien
cctgccttctctgcattttgggagg

SEQ ID NO: 2963465 - DNA, 25 bp, Homo sapien
gaaatagatagctctttgccccttg

SEQ ID NO: 2963466 - DNA, 25 bp, Homo sapien
tcctgggatgtgaggaatcctgttg

SEQ ID NO: 2963467 - DNA, 25 bp, Homo sapien
cagcatgacgatcaagcgagattca

SEQ ID NO: 2963468 - DNA, 25 bp, Homo sapien
tgtttcatcaagttctctagctgcc

SEQ ID NO: 2963469 - DNA, 25 bp, Homo sapien
gatgaatccaagctggttcgcaggg

SEQ ID NO: 2963470 - DNA, 25 bp, Homo sapien
ctgctttttccaacggggttgtgag

SEQ ID NO: 2963471 - DNA, 25 bp, Homo sapien
gccctgggtcgctcccactgctttt

SEQ ID NO: 2963472 - DNA, 25 bp, Homo sapien
tctttggggactttgaattgagctc

SEQ ID NO: 2963473 - DNA, 25 bp, Homo sapien
agcctgggccagagggtccgccctg

SEQ ID NO: 2963474 - DNA, 25 bp, Homo sapien
tggccacccagttaggcccctctgc

SEQ ID NO: 2963475 - DNA, 25 bp, Homo sapien
ctggccacccagttaggcccctctg

SEQ ID NO: 2963476 - DNA, 25 bp, Homo sapien
gccacccagttaggcccctctgccc

SEQ ID NO: 2963477 - DNA, 25 bp, Homo sapien
ggccacccagttaggcccctctgcc

SEQ ID NO: 2963478 - DNA, 25 bp, Homo sapien
gttgagtcactttttaacggctcca

SEQ ID NO: 2963479 - DNA, 25 bp, Homo sapien
tcccccatttgactgcttaataggc

SEQ ID NO: 2963480 - DNA, 25 bp, Homo sapien
cccccatttgactgcttaataggct

SEQ ID NO: 2963481 - DNA, 25 bp, Homo sapien
cctcccccatttgactgcttaatag

SEQ ID NO: 2963482 - DNA, 25 bp, Homo sapien
gcaaatccatgcttgggagggagaa

SEQ ID NO: 2963483 - DNA, 25 bp, Homo sapien
tggggggttaactgtcacctcatcc

SEQ ID NO: 2963484 - DNA, 25 bp, Homo sapien
ctggaaggaagtgagcgctctgggg

SEQ ID NO: 2963485 - DNA, 25 bp, Homo sapien
cctgggggcttgagtagcagaaggc

SEQ ID NO: 2963486 - DNA, 25 bp, Homo sapien
tcttgtgttacagagtgagcgtgag

SEQ ID NO: 2963487 - DNA, 25 bp, Homo sapien
tgcaaactgagctcttgtgttacag

SEQ ID NO: 2963488 - DNA, 25 bp, Homo sapien
gcccattttgaaagcccctgtgtgc

SEQ ID NO: 2963489 - DNA, 25 bp, Homo sapien
tccaaaatggatccctcatcccctt

SEQ ID NO: 2963490 - DNA, 25 bp, Homo sapien
ctgccataagatcccaggaagcggg

SEQ ID NO: 2963491 - DNA, 25 bp, Homo sapien
tgtcccgatagggaacttgaagtcc

SEQ ID NO: 2963492 - DNA, 25 bp, Homo sapien
gcgggaactgagtgcagagaacact

SEQ ID NO: 2963493 - DNA, 25 bp, Homo sapien
tgctggtaccagcatgccagatcct

SEQ ID NO: 2963494 - DNA, 25 bp, Homo sapien
atgtgtggctgtcccccttccagtc

SEQ ID NO: 2963495 - DNA, 25 bp, Homo sapien
gtggctgtcccccttccagtcttgt

SEQ ID NO: 2963496 - DNA, 25 bp, Homo sapien
tgtggctgtcccccttccagtcttg

SEQ ID NO: 2963497 - DNA, 25 bp, Homo sapien
tcatgtgtggctgtcccccttccag

SEQ ID NO: 2963498 - DNA, 25 bp, Homo sapien
tagagtatctaacaatacaggtgcg

SEQ ID NO: 2963499 - DNA, 25 bp, Homo sapien
tcagctcctagagtatctaacaata

SEQ ID NO: 2963500 - DNA, 25 bp, Homo sapien
gctcctagagtatctaacaatacag

SEQ ID NO: 2963501 - DNA, 25 bp, Homo sapien
agtatctaacaatacaggtgcgcac

SEQ ID NO: 2963502 - DNA, 25 bp, Homo sapien
tccggccttttatcttgatcttgat

SEQ ID NO: 2963503 - DNA, 25 bp, Homo sapien
gccttttatcttgatcttgatgcta

SEQ ID NO: 2963504 - DNA, 25 bp, Homo sapien
tcagtgcctcaagtagcggggtcta

SEQ ID NO: 2963505 - DNA, 25 bp, Homo sapien
cctcagtgcctcaagtagcggggtc

SEQ ID NO: 2963506 - DNA, 25 bp, Homo sapien
gagcctcagctcaagaaatataatg

SEQ ID NO: 2963507 - DNA, 25 bp, Homo sapien
cataatcaagtagtggagcctcagc

SEQ ID NO: 2963508 - DNA, 25 bp, Homo sapien
catccttatttggtgatgaggagac

SEQ ID NO: 2963509 - DNA, 25 bp, Homo sapien
tttagccataatcaagtagtggagc

SEQ ID NO: 2963510 - DNA, 25 bp, Homo sapien
tgattgtagaaacgaagctatgtga

SEQ ID NO: 2963511 - DNA, 25 bp, Homo sapien
aatcctgttcgtatccccattttga

SEQ ID NO: 2963512 - DNA, 25 bp, Homo sapien
acatcccatttttcggccaaggtga

SEQ ID NO: 2963513 - DNA, 25 bp, Homo sapien
aaaaagagaatgattgcaccctgcc

SEQ ID NO: 2963514 - DNA, 25 bp, Homo sapien
ggccttgggcgaccattgagtccta

SEQ ID NO: 2963515 - DNA, 25 bp, Homo sapien
ccaaggactctaggtcaaatgtcaa

SEQ ID NO: 2963516 - DNA, 25 bp, Homo sapien
tataccttaggccagtctcaagcac

SEQ ID NO: 2963517 - DNA, 25 bp, Homo sapien
tcctatcggagggtgctgatccaga

SEQ ID NO: 2963518 - DNA, 25 bp, Homo sapien
ttcaggaatcgtgcgggagctgaaa

SEQ ID NO: 2963519 - DNA, 25 bp, Homo sapien
cctgcttcaggaatcgtgcgggagc

SEQ ID NO: 2963520 - DNA, 25 bp, Homo sapien
aatcgtgcgggagctgaaaagtcga

SEQ ID NO: 2963521 - DNA, 25 bp, Homo sapien
gaatcgtgcgggagctgaaaagtcg

SEQ ID NO: 2963522 - DNA, 25 bp, Homo sapien
ctggccaagcagacgattgataagt

SEQ ID NO: 2963523 - DNA, 25 bp, Homo sapien
taggaactccagtttgcttatagta

SEQ ID NO: 2963524 - DNA, 25 bp, Homo sapien
cagctgagtggcctatcttaccctt

SEQ ID NO: 2963525 - DNA, 25 bp, Homo sapien
tgataagtagtctaggaactccagt

SEQ ID NO: 2963526 - DNA, 25 bp, Homo sapien
gaacttttgtcagtcctagctttga

SEQ ID NO: 2963527 - DNA, 25 bp, Homo sapien
ggctggccggccaaggacataagaa

SEQ ID NO: 2963528 - DNA, 25 bp, Homo sapien
ctaaggatgtttgtgagctgagtga

SEQ ID NO: 2963529 - DNA, 25 bp, Homo sapien
taaagccgtctcattttctagggaa

SEQ ID NO: 2963530 - DNA, 25 bp, Homo sapien
actggtcttgaactgctgacctcgt

SEQ ID NO: 2963531 - DNA, 25 bp, Homo sapien
gactggtcttgaactgctgacctcg

SEQ ID NO: 2963532 - DNA, 25 bp, Homo sapien
tgcccggcccattttagccatttta

SEQ ID NO: 2963533 - DNA, 25 bp, Homo sapien
accatgcccggcccattttagccat

SEQ ID NO: 2963534 - DNA, 25 bp, Homo sapien
gttattttgggacatactagtgcta

SEQ ID NO: 2963535 - DNA, 25 bp, Homo sapien
tcactgcagcgtggaatgatcctct

SEQ ID NO: 2963536 - DNA, 25 bp, Homo sapien
actatccacgtgtagctactgagca

SEQ ID NO: 2963537 - DNA, 25 bp, Homo sapien
gtgctatgcatctaatacagtgacc

SEQ ID NO: 2963538 - DNA, 25 bp, Homo sapien
cgtaggatcgcggacaggtcttgca

SEQ ID NO: 2963539 - DNA, 25 bp, Homo sapien
tcctcagctcttagacgttcggtga

SEQ ID NO: 2963540 - DNA, 25 bp, Homo sapien
tgaacttacgttggagccgaaagac

SEQ ID NO: 2963541 - DNA, 25 bp, Homo sapien
gagtagtcggaaaggatgcctgacc

SEQ ID NO: 2963542 - DNA, 25 bp, Homo sapien
aagtggaaaccctatagcgctctcg

SEQ ID NO: 2963543 - DNA, 25 bp, Homo sapien
tataaattatcagccggaacgagca

SEQ ID NO: 2963544 - DNA, 25 bp, Homo sapien
taaaggaaccgtgtctaagcgctaa

SEQ ID NO: 2963545 - DNA, 25 bp, Homo sapien
cacaccggaagaggaagtctaagcg

SEQ ID NO: 2963546 - DNA, 25 bp, Homo sapien
tcactcagggtaacaacgtcatctc

SEQ ID NO: 2963547 - DNA, 25 bp, Homo sapien
ggctaggctccgattcatgaaagga

SEQ ID NO: 2963548 - DNA, 25 bp, Homo sapien
tatttatgttatcagaggctaggct

SEQ ID NO: 2963549 - DNA, 25 bp, Homo sapien
gaaagcatgactggattcttactgt

SEQ ID NO: 2963550 - DNA, 25 bp, Homo sapien
taagccgacaattacaataccgtgg

SEQ ID NO: 2963551 - DNA, 25 bp, Homo sapien
tatgaggagccttgtaagagctgca

SEQ ID NO: 2963552 - DNA, 25 bp, Homo sapien
gaaatgccggacagagcagcaagtg

SEQ ID NO: 2963553 - DNA, 25 bp, Homo sapien
gattgagtgcccacaaagtaacagg

SEQ ID NO: 2963554 - DNA, 25 bp, Homo sapien
gggacccctctgatattcatccatg

SEQ ID NO: 2963555 - DNA, 25 bp, Homo sapien
tgaaaaccaagatatccaagggacc

SEQ ID NO: 2963556 - DNA, 25 bp, Homo sapien
tgcagcttcccactactcagcatgg

SEQ ID NO: 2963557 - DNA, 25 bp, Homo sapien
tcctcatagagtagcacaaaagtcc

SEQ ID NO: 2963558 - DNA, 25 bp, Homo sapien
gagagcacattctgaacactcctcc

SEQ ID NO: 2963559 - DNA, 25 bp, Homo sapien
agagagcacattctgaacactcctc

SEQ ID NO: 2963560 - DNA, 25 bp, Homo sapien
taattcatgctgatcctctgacttt

SEQ ID NO: 2963561 - DNA, 25 bp, Homo sapien
tccccagcacctaattcatgctgat

SEQ ID NO: 2963562 - DNA, 25 bp, Homo sapien
taaggtggaatagctgaaccattgt

SEQ ID NO: 2963563 - DNA, 25 bp, Homo sapien
tctggataaggtggaatagctgaac

SEQ ID NO: 2963564 - DNA, 25 bp, Homo sapien
tgtgcctccatagattttcacaacc

SEQ ID NO: 2963565 - DNA, 25 bp, Homo sapien
gctgaaccattgtgcctccatagat

SEQ ID NO: 2963566 - DNA, 25 bp, Homo sapien
cagcaccatgtgccactttggagag

SEQ ID NO: 2963567 - DNA, 25 bp, Homo sapien
gccctggctgctgatggctaccctg

SEQ ID NO: 2963568 - DNA, 25 bp, Homo sapien
aggcaggctttggacgcacaggact

SEQ ID NO: 2963569 - DNA, 25 bp, Homo sapien
tctgaaacggaagcataaatgttct

SEQ ID NO: 2963570 - DNA, 25 bp, Homo sapien
tatggttgaagtgcattgctgcagc

SEQ ID NO: 2963571 - DNA, 25 bp, Homo sapien
cccctcagggaatttggatacatgt

SEQ ID NO: 2963572 - DNA, 25 bp, Homo sapien
tagagcctgtggttaatcgcctccc

SEQ ID NO: 2963573 - DNA, 25 bp, Homo sapien
taaacttgaccttggaacacagagg

SEQ ID NO: 2963574 - DNA, 25 bp, Homo sapien
tagcacagatctattctactcaaga

SEQ ID NO: 2963575 - DNA, 25 bp, Homo sapien
tagagagcgtgattgcagtcccagg

SEQ ID NO: 2963576 - DNA, 25 bp, Homo sapien
ttctgaaaggaagcactcggaatcc

SEQ ID NO: 2963577 - DNA, 25 bp, Homo sapien
tagaacaccaattacaaaccacagg

SEQ ID NO: 2963578 - DNA, 25 bp, Homo sapien
ggagggagtcagagctagaacacca

SEQ ID NO: 2963579 - DNA, 25 bp, Homo sapien
caaactgtgcagttgcgttgtgaca

SEQ ID NO: 2963580 - DNA, 25 bp, Homo sapien
catatttaggtcagcctagcggaac

SEQ ID NO: 2963581 - DNA, 25 bp, Homo sapien
gatacagtctccttggcctataatg

SEQ ID NO: 2963582 - DNA, 25 bp, Homo sapien
tgtatctgtctacttagcgtggctg

SEQ ID NO: 2963583 - DNA, 25 bp, Homo sapien
tatcctgaacacttgacaccttgag

SEQ ID NO: 2963584 - DNA, 25 bp, Homo sapien
tgctaacacaggagctacaccttga

SEQ ID NO: 2963585 - DNA, 25 bp, Homo sapien
gaaggcagtcgtctctgttacacag

SEQ ID NO: 2963586 - DNA, 25 bp, Homo sapien
tgctgatgttcggtcctggcaaaca

SEQ ID NO: 2963587 - DNA, 25 bp, Homo sapien
catttattcgttgggtacttgctgt

SEQ ID NO: 2963588 - DNA, 25 bp, Homo sapien
cctgggctataggatgaaaaacaag

SEQ ID NO: 2963589 - DNA, 25 bp, Homo sapien
taagtagtcaccaactgccatacac

SEQ ID NO: 2963590 - DNA, 25 bp, Homo sapien
ccccatggactatgaggatgatttt

SEQ ID NO: 2963591 - DNA, 25 bp, Homo sapien
gaaggcattggcatagaaggcagct

SEQ ID NO: 2963592 - DNA, 25 bp, Homo sapien
ccatatattgtattgcaagtgccca

SEQ ID NO: 2963593 - DNA, 25 bp, Homo sapien
aaggcagctgaaaccactgtagtgg

SEQ ID NO: 2963594 - DNA, 25 bp, Homo sapien
tcaggtatagtcctagctggaacag

SEQ ID NO: 2963595 - DNA, 25 bp, Homo sapien
tcccacccgctgaatccttgcttgg

SEQ ID NO: 2963596 - DNA, 25 bp, Homo sapien
ggatgtgggatgtggctagtaggct

SEQ ID NO: 2963597 - DNA, 25 bp, Homo sapien
tgcctctgcagggttccgtacctct

SEQ ID NO: 2963598 - DNA, 25 bp, Homo sapien
tgccagccttttctccttgactgtc

SEQ ID NO: 2963599 - DNA, 25 bp, Homo sapien
ctccggggacatgtgcgctggccca

SEQ ID NO: 2963600 - DNA, 25 bp, Homo sapien
agaccgcccgcgaccatgagcctga

SEQ ID NO: 2963601 - DNA, 25 bp, Homo sapien
ttagctgcttcgtaagtgcccaccc

SEQ ID NO: 2963602 - DNA, 25 bp, Homo sapien
ggacatgtgcgctggcccagaccgc

SEQ ID NO: 2963603 - DNA, 25 bp, Homo sapien
cccttctgcactcgtgcgggagggc

SEQ ID NO: 2963604 - DNA, 25 bp, Homo sapien
agctgggcccgctccattgtggaga

SEQ ID NO: 2963605 - DNA, 25 bp, Homo sapien
gccaccagcgccctagcctcttggc

SEQ ID NO: 2963606 - DNA, 25 bp, Homo sapien
ctcccttctgcactcgtgcgggagg

SEQ ID NO: 2963607 - DNA, 25 bp, Homo sapien
gtgggcggtcccgtagcccagattc

SEQ ID NO: 2963608 - DNA, 25 bp, Homo sapien
aagatgtgggcggtcccgtagccca

SEQ ID NO: 2963609 - DNA, 25 bp, Homo sapien
ggtcccgtagcccagattcctgaaa

SEQ ID NO: 2963610 - DNA, 25 bp, Homo sapien
gattcctgaaagctcctaaaggtcc

SEQ ID NO: 2963611 - DNA, 25 bp, Homo sapien
tcgtggctgacttcatgccctgcag

SEQ ID NO: 2963612 - DNA, 25 bp, Homo sapien
ttgctttctcctcatgtagctccca

SEQ ID NO: 2963613 - DNA, 25 bp, Homo sapien
tcattcctgtttcagaacttcgtgg

SEQ ID NO: 2963614 - DNA, 25 bp, Homo sapien
cctgcaggatcacttgttgctttct

SEQ ID NO: 2963615 - DNA, 25 bp, Homo sapien
ctttacagactaggaggccgcagct

SEQ ID NO: 2963616 - DNA, 25 bp, Homo sapien
tgacagctgcgaaaccaaaacggga

SEQ ID NO: 2963617 - DNA, 25 bp, Homo sapien
tattctggcgttgggaccggatgac

SEQ ID NO: 2963618 - DNA, 25 bp, Homo sapien
caaagatgggtgaggacattagccc

SEQ ID NO: 2963619 - DNA, 25 bp, Homo sapien
acacctcagggctaccaaggtcctg

SEQ ID NO: 2963620 - DNA, 25 bp, Homo sapien
ctgtggtgcatatttgggtcctgga

SEQ ID NO: 2963621 - DNA, 25 bp, Homo sapien
catcacacctcagggctaccaaggt

SEQ ID NO: 2963622 - DNA, 25 bp, Homo sapien
gataggtcaacaggtggttctgtcc

SEQ ID NO: 2963623 - DNA, 25 bp, Homo sapien
ttgcaggaccaagccctaaaggtgg

SEQ ID NO: 2963624 - DNA, 25 bp, Homo sapien
gatgaggacttcaaattgcaggacc

SEQ ID NO: 2963625 - DNA, 25 bp, Homo sapien
caagaaacgcaaagtgagggaagct

SEQ ID NO: 2963626 - DNA, 25 bp, Homo sapien
gcttctagaaaggatgtggtcccca

SEQ ID NO: 2963627 - DNA, 25 bp, Homo sapien
gattctcctgcctcggactcctgag

SEQ ID NO: 2963628 - DNA, 25 bp, Homo sapien
caacctctgcctcctgggttcaagt

SEQ ID NO: 2963629 - DNA, 25 bp, Homo sapien
ggagtggtatgatcttggctcactg

SEQ ID NO: 2963630 - DNA, 25 bp, Homo sapien
acagtctggctccatcacccaggct

SEQ ID NO: 2963631 - DNA, 25 bp, Homo sapien
cctcctagagagactgacagcagct

SEQ ID NO: 2963632 - DNA, 25 bp, Homo sapien
tcctagagagactgacagcagctct

SEQ ID NO: 2963633 - DNA, 25 bp, Homo sapien
tggcctcctagagagactgacagca

SEQ ID NO: 2963634 - DNA, 25 bp, Homo sapien
ggaaattaaactcactccagagtct

SEQ ID NO: 2963635 - DNA, 25 bp, Homo sapien
ttgtcaatagcctcttcctcactga

SEQ ID NO: 2963636 - DNA, 25 bp, Homo sapien
cactgatctgtaccgggaccggaaa

SEQ ID NO: 2963637 - DNA, 25 bp, Homo sapien
ctcactgatctgtaccgggaccgga

SEQ ID NO: 2963638 - DNA, 25 bp, Homo sapien
ctgatctgtaccgggaccggaaact

SEQ ID NO: 2963639 - DNA, 25 bp, Homo sapien
caagaggtattcttagagtgcatac

SEQ ID NO: 2963640 - DNA, 25 bp, Homo sapien
catacatgagtattggaggcccagg

SEQ ID NO: 2963641 - DNA, 25 bp, Homo sapien
ggaagcacgcaagaggtattcttag

SEQ ID NO: 2963642 - DNA, 25 bp, Homo sapien
gggctttgtatagtccaagcttgac

SEQ ID NO: 2963643 - DNA, 25 bp, Homo sapien
ttggctcagctgctgttaggggagc

SEQ ID NO: 2963644 - DNA, 25 bp, Homo sapien
tggctcagctgctgttaggggagca

SEQ ID NO: 2963645 - DNA, 25 bp, Homo sapien
tttggctcagctgctgttaggggag

SEQ ID NO: 2963646 - DNA, 25 bp, Homo sapien
cctgagaggcagaaatggccatgtc

SEQ ID NO: 2963647 - DNA, 25 bp, Homo sapien
cagccagaggaaggctgtcctgaga

SEQ ID NO: 2963648 - DNA, 25 bp, Homo sapien
ggcagaaatggccatgtcccctcac

SEQ ID NO: 2963649 - DNA, 25 bp, Homo sapien
tcagccagaggaaggctgtcctgag

SEQ ID NO: 2963650 - DNA, 25 bp, Homo sapien
ctgggtgaacagctggggatggggc

SEQ ID NO: 2963651 - DNA, 25 bp, Homo sapien
ctctgggtgaacagctggggatggg

SEQ ID NO: 2963652 - DNA, 25 bp, Homo sapien
tctgggtgaacagctggggatgggg

SEQ ID NO: 2963653 - DNA, 25 bp, Homo sapien
cctctgatctgggaatggttgacca

SEQ ID NO: 2963654 - DNA, 25 bp, Homo sapien
ggtgtccaaggcctctgattcctct

SEQ ID NO: 2963655 - DNA, 25 bp, Homo sapien
gaccatagagtctgttccagattcc

SEQ ID NO: 2963656 - DNA, 25 bp, Homo sapien
cctggcttgtggaaggcatcatgtt

SEQ ID NO: 2963657 - DNA, 25 bp, Homo sapien
ccaataaaacacttagcacggtgct

SEQ ID NO: 2963658 - DNA, 25 bp, Homo sapien
tgagaataatggctccctcttaggg

SEQ ID NO: 2963659 - DNA, 25 bp, Homo sapien
tagctgctgttgtttgggccacttg

SEQ ID NO: 2963660 - DNA, 25 bp, Homo sapien
tccactgggcatctttagtaaattt

SEQ ID NO: 2963661 - DNA, 25 bp, Homo sapien
tacctaggtacggacctgactcctc

SEQ ID NO: 2963662 - DNA, 25 bp, Homo sapien
gtacggacctgactcctcatggtgg

SEQ ID NO: 2963663 - DNA, 25 bp, Homo sapien
tgcctcctcggtccttacctaggta

SEQ ID NO: 2963664 - DNA, 25 bp, Homo sapien
taggtacggacctgactcctcatgg

SEQ ID NO: 2963665 - DNA, 25 bp, Homo sapien
cctagagcacggaagcagctgtgtc

SEQ ID NO: 2963666 - DNA, 25 bp, Homo sapien
gactactagtgagatcagatctcca

SEQ ID NO: 2963667 - DNA, 25 bp, Homo sapien
tgcagactatcagacagcccagaga

SEQ ID NO: 2963668 - DNA, 25 bp, Homo sapien
gatgaagcagtacaaactgagccca

SEQ ID NO: 2963669 - DNA, 25 bp, Homo sapien
tcaggacctggacactatgcagtac

SEQ ID NO: 2963670 - DNA, 25 bp, Homo sapien
caaggagtcagagttccccgtagga

SEQ ID NO: 2963671 - DNA, 25 bp, Homo sapien
gccaaggtagcggtttcagcacaga

SEQ ID NO: 2963672 - DNA, 25 bp, Homo sapien
ggacatgggtacgttcttgcctcaa

SEQ ID NO: 2963673 - DNA, 25 bp, Homo sapien
tttatgacatcaccagacagagagg

SEQ ID NO: 2963674 - DNA, 25 bp, Homo sapien
aaatccacagattcctttcaggtac

SEQ ID NO: 2963675 - DNA, 25 bp, Homo sapien
gaagaattgtggctgtacactagga

SEQ ID NO: 2963676 - DNA, 25 bp, Homo sapien
ccaaaggcttggtgatataactcca

SEQ ID NO: 2963677 - DNA, 25 bp, Homo sapien
ccttctctggatgagtcctgagaat

SEQ ID NO: 2963678 - DNA, 25 bp, Homo sapien
gaacacagcgtgtttggtttgatct

SEQ ID NO: 2963679 - DNA, 25 bp, Homo sapien
gaatttctagaatctcgggagagta

SEQ ID NO: 2963680 - DNA, 25 bp, Homo sapien
taaaactggggcgaacacagcgtgt

SEQ ID NO: 2963681 - DNA, 25 bp, Homo sapien
ggcaccgtcttagctcactacaacc

SEQ ID NO: 2963682 - DNA, 25 bp, Homo sapien
tggcaccgtcttagctcactacaac

SEQ ID NO: 2963683 - DNA, 25 bp, Homo sapien
aggtgtgcactaccacagtgcacac

SEQ ID NO: 2963684 - DNA, 25 bp, Homo sapien
tgtgcactaccacagtgcacactac

SEQ ID NO: 2963685 - DNA, 25 bp, Homo sapien
tttggccctctctgttagcagcaca

SEQ ID NO: 2963686 - DNA, 25 bp, Homo sapien
ggccctctctgttagcagcacattc

SEQ ID NO: 2963687 - DNA, 25 bp, Homo sapien
cgtttggccctctctgttagcagca

SEQ ID NO: 2963688 - DNA, 25 bp, Homo sapien
ctctctgttagcagcacattcaacc

SEQ ID NO: 2963689 - DNA, 25 bp, Homo sapien
agggcagcagttccagttctgtaag

SEQ ID NO: 2963690 - DNA, 25 bp, Homo sapien
agtgtcctggttgtaagctcctttc

SEQ ID NO: 2963691 - DNA, 25 bp, Homo sapien
cgtgctggatcagagtgacttgtca

SEQ ID NO: 2963692 - DNA, 25 bp, Homo sapien
gatcatagacggactcctggcctga

SEQ ID NO: 2963693 - DNA, 25 bp, Homo sapien
gactccaatttagacaaagttgctt

SEQ ID NO: 2963694 - DNA, 25 bp, Homo sapien
tgatagagtcagcataagaacagtt

SEQ ID NO: 2963695 - DNA, 25 bp, Homo sapien
actataaagtgaaattaatgccaac

SEQ ID NO: 2963696 - DNA, 25 bp, Homo sapien
cagtgtctaaatacacattaatgac

SEQ ID NO: 2963697 - DNA, 25 bp, Homo sapien
ttttcaggcagagcagttaccaacc

SEQ ID NO: 2963698 - DNA, 25 bp, Homo sapien
ccattcctttgaggcctgaggtcta

SEQ ID NO: 2963699 - DNA, 25 bp, Homo sapien
gaacagggaagtcagtggcacaaaa

SEQ ID NO: 2963700 - DNA, 25 bp, Homo sapien
tataaaaggctgtatgatggcctgg

SEQ ID NO: 2963701 - DNA, 25 bp, Homo sapien
acctggaatatcctctaagggccaa

SEQ ID NO: 2963702 - DNA, 25 bp, Homo sapien
taacacactctaggccatagcgcag

SEQ ID NO: 2963703 - DNA, 25 bp, Homo sapien
tgcacctcagcaggatctatatgcg

SEQ ID NO: 2963704 - DNA, 25 bp, Homo sapien
tatgcgtttccactgcagttacagc

SEQ ID NO: 2963705 - DNA, 25 bp, Homo sapien
caaatactgaccctggttttggcga

SEQ ID NO: 2963706 - DNA, 25 bp, Homo sapien
gggaagacagtatagccctatatct

SEQ ID NO: 2963707 - DNA, 25 bp, Homo sapien
tatattactgaaacaggtccctttg

SEQ ID NO: 2963708 - DNA, 25 bp, Homo sapien
cagagagtctatgctggaggaacct

SEQ ID NO: 2963709 - DNA, 25 bp, Homo sapien
taatgaggcccctatagaagctgtt

SEQ ID NO: 2963710 - DNA, 25 bp, Homo sapien
tgcctctgatacaggtcaagggtaa

SEQ ID NO: 2963711 - DNA, 25 bp, Homo sapien
cctgtccttgtagcctagtgtggaa

SEQ ID NO: 2963712 - DNA, 25 bp, Homo sapien
gggtggtctcctaactggcttccca

SEQ ID NO: 2963713 - DNA, 25 bp, Homo sapien
ggctcacctgctaaccccggagcag

SEQ ID NO: 2963714 - DNA, 25 bp, Homo sapien
ggagcagccaaactccgcacgccct

SEQ ID NO: 2963715 - DNA, 25 bp, Homo sapien
ctgctaaccccggagcagccaaact

SEQ ID NO: 2963716 - DNA, 25 bp, Homo sapien
cgcaggctcacctgctaaccccgga

SEQ ID NO: 2963717 - DNA, 25 bp, Homo sapien
ttcaaagcggaacgtcttcccgcgc

SEQ ID NO: 2963718 - DNA, 25 bp, Homo sapien
ccgctggagacagcgggaaactcac

SEQ ID NO: 2963719 - DNA, 25 bp, Homo sapien
taagctcggagggtttcacctctag

SEQ ID NO: 2963720 - DNA, 25 bp, Homo sapien
cacctctaggagttcctcagcagtc

SEQ ID NO: 2963721 - DNA, 25 bp, Homo sapien
tcagcagtctggaaccccgcagaca

SEQ ID NO: 2963722 - DNA, 25 bp, Homo sapien
cgctgacggcggccggtgtgcctca

SEQ ID NO: 2963723 - DNA, 25 bp, Homo sapien
agaacgaagactgaggcggcgctga

SEQ ID NO: 2963724 - DNA, 25 bp, Homo sapien
aacgaagactgaggcggcgctgacg

SEQ ID NO: 2963725 - DNA, 25 bp, Homo sapien
agagaacgaagactgaggcggcgct

SEQ ID NO: 2963726 - DNA, 25 bp, Homo sapien
cttgtaagtggagtcgaggagctct

SEQ ID NO: 2963727 - DNA, 25 bp, Homo sapien
cattcagacaacttgtaagtggagt

SEQ ID NO: 2963728 - DNA, 25 bp, Homo sapien
gaggaagcagaatctaacggagact

SEQ ID NO: 2963729 - DNA, 25 bp, Homo sapien
gaggagctctttcacgctgtaaaca

SEQ ID NO: 2963730 - DNA, 25 bp, Homo sapien
tataataatctacgtaagcgggttg

SEQ ID NO: 2963731 - DNA, 25 bp, Homo sapien
acccagttagcatgaaaagttacct

SEQ ID NO: 2963732 - DNA, 25 bp, Homo sapien
gttacctaagctccccaagatatca

SEQ ID NO: 2963733 - DNA, 25 bp, Homo sapien
aagcattcagcaggcattgccagag

SEQ ID NO: 2963734 - DNA, 25 bp, Homo sapien
cacgagacttattctttagaggcga

SEQ ID NO: 2963735 - DNA, 25 bp, Homo sapien
tgcgcgcggtatgacttaaacagtt

SEQ ID NO: 2963736 - DNA, 25 bp, Homo sapien
tcttcagtgaatagcacaggtccag

SEQ ID NO: 2963737 - DNA, 25 bp, Homo sapien
catgtcatagagagatgtgcacaac

SEQ ID NO: 2963738 - DNA, 25 bp, Homo sapien
aaagcttggtagaatatcaagacca

SEQ ID NO: 2963739 - DNA, 25 bp, Homo sapien
agtagtcaatagttgttagtgatca

SEQ ID NO: 2963740 - DNA, 25 bp, Homo sapien
agaccatctaaagtagtcaatagtt

SEQ ID NO: 2963741 - DNA, 25 bp, Homo sapien
tgttagtgatcattattattcaggg

SEQ ID NO: 2963742 - DNA, 25 bp, Homo sapien
tacctacaagtgtctcaggaagcag

SEQ ID NO: 2963743 - DNA, 25 bp, Homo sapien
taaagcatttctgagtacctacaag

SEQ ID NO: 2963744 - DNA, 25 bp, Homo sapien
aatttcacccatctgacagtgtggc

SEQ ID NO: 2963745 - DNA, 25 bp, Homo sapien
taatttttcagtttggccggacaca

SEQ ID NO: 2963746 - DNA, 25 bp, Homo sapien
acctggtgcaccacaaatttctgtt

SEQ ID NO: 2963747 - DNA, 25 bp, Homo sapien
ccccaagaatatcatctagtgctga

SEQ ID NO: 2963748 - DNA, 25 bp, Homo sapien
tagtgctgaacagaaggtgattatg

SEQ ID NO: 2963749 - DNA, 25 bp, Homo sapien
tgggtatgctcctgctcaagaagtt

SEQ ID NO: 2963750 - DNA, 25 bp, Homo sapien
tcttatttggtttcctgacgatagt

SEQ ID NO: 2963751 - DNA, 25 bp, Homo sapien
tcctgacgatagtacaaaatactac

SEQ ID NO: 2963752 - DNA, 25 bp, Homo sapien
aagagcacatatatatcttatttgg

SEQ ID NO: 2963753 - DNA, 25 bp, Homo sapien
catacacacttaaaattaagagcac

SEQ ID NO: 2963754 - DNA, 25 bp, Homo sapien
gaagggataatgaagtaacacaaat

SEQ ID NO: 2963755 - DNA, 25 bp, Homo sapien
aagggataatgaagtaacacaaata

SEQ ID NO: 2963756 - DNA, 25 bp, Homo sapien
tatcaaccataaaacttccctctgt

SEQ ID NO: 2963757 - DNA, 25 bp, Homo sapien
caaaacattctggtatctgcacatc

SEQ ID NO: 2963758 - DNA, 25 bp, Homo sapien
aatgcaggcagtagcaaggtctacc

SEQ ID NO: 2963759 - DNA, 25 bp, Homo sapien
gtttttctgctataagctgaaggtg

SEQ ID NO: 2963760 - DNA, 25 bp, Homo sapien
aactgtccagtaattaggcttcaca

SEQ ID NO: 2963761 - DNA, 25 bp, Homo sapien
aggtctcagatgggcacaaatgcaa

SEQ ID NO: 2963762 - DNA, 25 bp, Homo sapien
cacattccaaatggagtgttgctga

SEQ ID NO: 2963763 - DNA, 25 bp, Homo sapien
ttctcattttgtaacagtagtaaaa

SEQ ID NO: 2963764 - DNA, 25 bp, Homo sapien
ggcctcagacgtggttttcaaagct

SEQ ID NO: 2963765 - DNA, 25 bp, Homo sapien
actgcatccggcctcagacgtggtt

SEQ ID NO: 2963766 - DNA, 25 bp, Homo sapien
tccggcctcagacgtggttttcaaa

SEQ ID NO: 2963767 - DNA, 25 bp, Homo sapien
catccggcctcagacgtggttttca

SEQ ID NO: 2963768 - DNA, 25 bp, Homo sapien
gcatagtgcatgtaacaacacaggg

SEQ ID NO: 2963769 - DNA, 25 bp, Homo sapien
cctgtattcgcagctcccagctact

SEQ ID NO: 2963770 - DNA, 25 bp, Homo sapien
ttagggaagccgacgtaggaggatc

SEQ ID NO: 2963771 - DNA, 25 bp, Homo sapien
gggagtccagagattagtaactcaa

SEQ ID NO: 2963772 - DNA, 25 bp, Homo sapien
tctggaagaagataaacttgtgcca

SEQ ID NO: 2963773 - DNA, 25 bp, Homo sapien
agtgaaatcctccaaagcttttcgg

SEQ ID NO: 2963774 - DNA, 25 bp, Homo sapien
taactctgtgtagtcacgacagcga

SEQ ID NO: 2963775 - DNA, 25 bp, Homo sapien
cacgacagcgaaaataataaatatg

SEQ ID NO: 2963776 - DNA, 25 bp, Homo sapien
ttagataatatttagatgaagcctg

SEQ ID NO: 2963777 - DNA, 25 bp, Homo sapien
ttataacttgagtctcaccaatctc

SEQ ID NO: 2963778 - DNA, 25 bp, Homo sapien
ctcaccaatctctgatttagataat

SEQ ID NO: 2963779 - DNA, 25 bp, Homo sapien
ttgatgatggaaccggttaagacgt

SEQ ID NO: 2963780 - DNA, 25 bp, Homo sapien
cagagcagtagggtgattctgctac

SEQ ID NO: 2963781 - DNA, 25 bp, Homo sapien
agagcagtagggtgattctgctact

SEQ ID NO: 2963782 - DNA, 25 bp, Homo sapien
agcagtagggtgattctgctactgc

SEQ ID NO: 2963783 - DNA, 25 bp, Homo sapien
gagcagtagggtgattctgctactg

SEQ ID NO: 2963784 - DNA, 25 bp, Homo sapien
catgcccggctattctggtgaggat

SEQ ID NO: 2963785 - DNA, 25 bp, Homo sapien
gaaattggctatttatctcaggaga

SEQ ID NO: 2963786 - DNA, 25 bp, Homo sapien
aaaacttgtgagaaatgaaattggc

SEQ ID NO: 2963787 - DNA, 25 bp, Homo sapien
gaacaagttactggaaactgaagga

SEQ ID NO: 2963788 - DNA, 25 bp, Homo sapien
gcatataggaaaggaggtgtcaatt

SEQ ID NO: 2963789 - DNA, 25 bp, Homo sapien
tttactatatcatccccaatgcctg

SEQ ID NO: 2963790 - DNA, 25 bp, Homo sapien
gataatattagatttgttacgaaaa

SEQ ID NO: 2963791 - DNA, 25 bp, Homo sapien
caatgcctggaacagtaaatagcat

SEQ ID NO: 2963792 - DNA, 25 bp, Homo sapien
tgggctaggccatttaataaccgag

SEQ ID NO: 2963793 - DNA, 25 bp, Homo sapien
tgcaaggctgatcatttgctgggct

SEQ ID NO: 2963794 - DNA, 25 bp, Homo sapien
aagcaataccatccactatcactag

SEQ ID NO: 2963795 - DNA, 25 bp, Homo sapien
catgacgaaatggaaaagcaatacc

SEQ ID NO: 2963796 - DNA, 25 bp, Homo sapien
tcgcttgagcccaacctccgccttc

SEQ ID NO: 2963797 - DNA, 25 bp, Homo sapien
cgcttgagcccaacctccgccttct

SEQ ID NO: 2963798 - DNA, 25 bp, Homo sapien
atcgcttgagcccaacctccgcctt

SEQ ID NO: 2963799 - DNA, 25 bp, Homo sapien
taaagtaagagagggaaagtgtgtc

SEQ ID NO: 2963800 - DNA, 25 bp, Homo sapien
tataaagtaagagagggaaagtgtg

SEQ ID NO: 2963801 - DNA, 25 bp, Homo sapien
attataaagtaagagagggaaagtg

SEQ ID NO: 2963802 - DNA, 25 bp, Homo sapien
ataaagtaagagagggaaagtgtgt

SEQ ID NO: 2963803 - DNA, 25 bp, Homo sapien
aattatcaagtagaccagtctggcc

SEQ ID NO: 2963804 - DNA, 25 bp, Homo sapien
gaaaattatcaagtagaccagtctg

SEQ ID NO: 2963805 - DNA, 25 bp, Homo sapien
aaattatcaagtagaccagtctggc

SEQ ID NO: 2963806 - DNA, 25 bp, Homo sapien
aaaattatcaagtagaccagtctgg

SEQ ID NO: 2963807 - DNA, 25 bp, Homo sapien
ctaatgcaggaacaagcaaggcctg

SEQ ID NO: 2963808 - DNA, 25 bp, Homo sapien
ctttcatgaagcgtatagtactcaa

SEQ ID NO: 2963809 - DNA, 25 bp, Homo sapien
tatctaacggtactgtgcttagtgc

SEQ ID NO: 2963810 - DNA, 25 bp, Homo sapien
ggaacaatcagtatctaacggtact

SEQ ID NO: 2963811 - DNA, 25 bp, Homo sapien
gcttagtgctaagattaaccagtga

SEQ ID NO: 2963812 - DNA, 25 bp, Homo sapien
agaacgcctctgatcaaatataatc

SEQ ID NO: 2963813 - DNA, 25 bp, Homo sapien
ggttatacatttctcagaacgcctc

SEQ ID NO: 2963814 - DNA, 25 bp, Homo sapien
ggccttactgacttggttatacatt

SEQ ID NO: 2963815 - DNA, 25 bp, Homo sapien
taataactgtatatggccttactga

SEQ ID NO: 2963816 - DNA, 25 bp, Homo sapien
ttgtagcagcatgtccccaactttc

SEQ ID NO: 2963817 - DNA, 25 bp, Homo sapien
gaaagattagccgtattgtagcagc

SEQ ID NO: 2963818 - DNA, 25 bp, Homo sapien
ctttgctttcggtcccaatgaaaga

SEQ ID NO: 2963819 - DNA, 25 bp, Homo sapien
ggtcccaatgaaagattagccgtat

SEQ ID NO: 2963820 - DNA, 25 bp, Homo sapien
tcatccacaggactagctctaagaa

SEQ ID NO: 2963821 - DNA, 25 bp, Homo sapien
catgggtcactgtatatctcatcca

SEQ ID NO: 2963822 - DNA, 25 bp, Homo sapien
tctaggtgatatcagacaaggcaac

SEQ ID NO: 2963823 - DNA, 25 bp, Homo sapien
tactcatttcaggtgcatgcgcccc

SEQ ID NO: 2963824 - DNA, 25 bp, Homo sapien
aagatttcatgctgccatactttta

SEQ ID NO: 2963825 - DNA, 25 bp, Homo sapien
agatttcatgctgccatacttttaa

SEQ ID NO: 2963826 - DNA, 25 bp, Homo sapien
agattctcagagttataagggtcat

SEQ ID NO: 2963827 - DNA, 25 bp, Homo sapien
ttagcacaatgtaatgaaactgatc

SEQ ID NO: 2963828 - DNA, 25 bp, Homo sapien
gggtcatttacttacacaaaataga

SEQ ID NO: 2963829 - DNA, 25 bp, Homo sapien
tgtacctaatgccagtgaactatat

SEQ ID NO: 2963830 - DNA, 25 bp, Homo sapien
gatgaccaaactcattatttaaatg

SEQ ID NO: 2963831 - DNA, 25 bp, Homo sapien
ttaaaagttcagatgaccaaactca

SEQ ID NO: 2963832 - DNA, 25 bp, Homo sapien
aattaattaaaagttcagatgacca

SEQ ID NO: 2963833 - DNA, 25 bp, Homo sapien
tacaaacacatgaacttaattaatt

SEQ ID NO: 2963834 - DNA, 25 bp, Homo sapien
ctgggtgacttgtacaatgttgcca

SEQ ID NO: 2963835 - DNA, 25 bp, Homo sapien
tggctgggtgacttgtacaatgttg

SEQ ID NO: 2963836 - DNA, 25 bp, Homo sapien
gggtgacttgtacaatgttgccaac

SEQ ID NO: 2963837 - DNA, 25 bp, Homo sapien
gctgggtgacttgtacaatgttgcc

SEQ ID NO: 2963838 - DNA, 25 bp, Homo sapien
ttaccgcccatcaatatcaaaatcc

SEQ ID NO: 2963839 - DNA, 25 bp, Homo sapien
ctctctttagataattaccgcccat

SEQ ID NO: 2963840 - DNA, 25 bp, Homo sapien
taattaccgcccatcaatatcaaaa

SEQ ID NO: 2963841 - DNA, 25 bp, Homo sapien
tttagataattaccgcccatcaata

SEQ ID NO: 2963842 - DNA, 25 bp, Homo sapien
taagaaagctactttattctagggc

SEQ ID NO: 2963843 - DNA, 25 bp, Homo sapien
ctactttattctagggccaggcgca

SEQ ID NO: 2963844 - DNA, 25 bp, Homo sapien
tatgctttaagaacatttgaagact

SEQ ID NO: 2963845 - DNA, 25 bp, Homo sapien
gaacatttgaagactgatcttagaa

SEQ ID NO: 2963846 - DNA, 25 bp, Homo sapien
tgaacatgcagaagtaacaacagta

SEQ ID NO: 2963847 - DNA, 25 bp, Homo sapien
tgcaatgaacatgcagaagtaacaa

SEQ ID NO: 2963848 - DNA, 25 bp, Homo sapien
gaagtaacaacagtatctctaaatc

SEQ ID NO: 2963849 - DNA, 25 bp, Homo sapien
catgcagaagtaacaacagtatctc

SEQ ID NO: 2963850 - DNA, 25 bp, Homo sapien
tataattcttcctctgggtctcgtg

SEQ ID NO: 2963851 - DNA, 25 bp, Homo sapien
ataattcttcctctgggtctcgtga

SEQ ID NO: 2963852 - DNA, 25 bp, Homo sapien
ttataattcttcctctgggtctcgt

SEQ ID NO: 2963853 - DNA, 25 bp, Homo sapien
taattcttcctctgggtctcgtgac

SEQ ID NO: 2963854 - DNA, 25 bp, Homo sapien
ggtaacaagtccacttgtacacatt

SEQ ID NO: 2963855 - DNA, 25 bp, Homo sapien
taaggtaacaagtccacttgtacac

SEQ ID NO: 2963856 - DNA, 25 bp, Homo sapien
ttaaggtaacaagtccacttgtaca

SEQ ID NO: 2963857 - DNA, 25 bp, Homo sapien
aacaagtccacttgtacacattgat

SEQ ID NO: 2963858 - DNA, 25 bp, Homo sapien
tctagaatggatcataccgtgtttc

SEQ ID NO: 2963859 - DNA, 25 bp, Homo sapien
caaatggcttagattttaggattga

SEQ ID NO: 2963860 - DNA, 25 bp, Homo sapien
gcttatcaacctattctggaagaca

SEQ ID NO: 2963861 - DNA, 25 bp, Homo sapien
gtcaacataacaactagaattctag

SEQ ID NO: 2963862 - DNA, 25 bp, Homo sapien
gaaggcacctaaagacacaacttgg

SEQ ID NO: 2963863 - DNA, 25 bp, Homo sapien
cacaacttgggaatatctggtaacc

SEQ ID NO: 2963864 - DNA, 25 bp, Homo sapien
aaaaagctaaaagacactggacagg

SEQ ID NO: 2963865 - DNA, 25 bp, Homo sapien
gaatcagttgggcaatgggagataa

SEQ ID NO: 2963866 - DNA, 25 bp, Homo sapien
cagccttggcgttggagaactcagg

SEQ ID NO: 2963867 - DNA, 25 bp, Homo sapien
gagaactcaggtcgttcagtcgcca

SEQ ID NO: 2963868 - DNA, 25 bp, Homo sapien
caaacttccagccttggcgttggag

SEQ ID NO: 2963869 - DNA, 25 bp, Homo sapien
agtcgccaaagctttccgaaagtgc

SEQ ID NO: 2963870 - DNA, 25 bp, Homo sapien
cggcacgagcgatcagcactaggtt

SEQ ID NO: 2963871 - DNA, 25 bp, Homo sapien
ctggagagggctcccgcaggcgtgc

SEQ ID NO: 2963872 - DNA, 25 bp, Homo sapien
atcagcactaggttgcctggagagg

SEQ ID NO: 2963873 - DNA, 25 bp, Homo sapien
gagcgatcagcactaggttgcctgg

SEQ ID NO: 2963874 - DNA, 25 bp, Homo sapien
gagcctagggctccggcaagggcgg

SEQ ID NO: 2963875 - DNA, 25 bp, Homo sapien
atgccccagggcagaccgggaaagg

SEQ ID NO: 2963876 - DNA, 25 bp, Homo sapien
ttgagcctagggctccggcaagggc

SEQ ID NO: 2963877 - DNA, 25 bp, Homo sapien
gcttttgagcctagggctccggcaa

SEQ ID NO: 2963878 - DNA, 25 bp, Homo sapien
actcgcccaggaatagctccaggaa

SEQ ID NO: 2963879 - DNA, 25 bp, Homo sapien
ggtccgcgaaactcgcccaggaata

SEQ ID NO: 2963880 - DNA, 25 bp, Homo sapien
tcagcttctaccagttcaggttcgg

SEQ ID NO: 2963881 - DNA, 25 bp, Homo sapien
tcctcgcgggtgatgcgctctgaca

SEQ ID NO: 2963882 - DNA, 25 bp, Homo sapien
taaactaagagactaggcttccctg

SEQ ID NO: 2963883 - DNA, 25 bp, Homo sapien
tatggctctttcacccgaaggcttg

SEQ ID NO: 2963884 - DNA, 25 bp, Homo sapien
ttgcagttacgcaggaggcacctcg

SEQ ID NO: 2963885 - DNA, 25 bp, Homo sapien
tctagaaaggagtcgcgtctctgcc

SEQ ID NO: 2963886 - DNA, 25 bp, Homo sapien
aaattggagaaaggatgccacggtc

SEQ ID NO: 2963887 - DNA, 25 bp, Homo sapien
tcatatgtagtaagcgtgagagaac

SEQ ID NO: 2963888 - DNA, 25 bp, Homo sapien
tcacatgaaatcagtcgtcatacag

SEQ ID NO: 2963889 - DNA, 25 bp, Homo sapien
cataagctgtggaatttgcactccc

SEQ ID NO: 2963890 - DNA, 25 bp, Homo sapien
acaatctcagttcactataacctcc

SEQ ID NO: 2963891 - DNA, 25 bp, Homo sapien
taacctccacctcctgggctcaagc

SEQ ID NO: 2963892 - DNA, 25 bp, Homo sapien
aattctcctgcctcaacctcctgaa

SEQ ID NO: 2963893 - DNA, 25 bp, Homo sapien
gtggcacaatctcagttcactataa

SEQ ID NO: 2963894 - DNA, 25 bp, Homo sapien
gaaagacaagctttactttgagcca

SEQ ID NO: 2963895 - DNA, 25 bp, Homo sapien
gatacaatggtgagggttataatcc

SEQ ID NO: 2963896 - DNA, 25 bp, Homo sapien
tccaaaactatgttacagtatatgg

SEQ ID NO: 2963897 - DNA, 25 bp, Homo sapien
ggaataacgattttgcaatgatgat

SEQ ID NO: 2963898 - DNA, 25 bp, Homo sapien
gaataacagtatgtaaggtgctcag

SEQ ID NO: 2963899 - DNA, 25 bp, Homo sapien
gtatatcacttcacacatagtagag

SEQ ID NO: 2963900 - DNA, 25 bp, Homo sapien
tattgtacttgctggttaacttgcc

SEQ ID NO: 2963901 - DNA, 25 bp, Homo sapien
tatactgtacagaggcagcaagata

SEQ ID NO: 2963902 - DNA, 25 bp, Homo sapien
cagtatgcttctatctctccagaca

SEQ ID NO: 2963903 - DNA, 25 bp, Homo sapien
tcagtatgcttctatctctccagac

SEQ ID NO: 2963904 - DNA, 25 bp, Homo sapien
ccttgaaaggatctgttttagtact

SEQ ID NO: 2963905 - DNA, 25 bp, Homo sapien
tctccagacatgtccttgaaaggat

SEQ ID NO: 2963906 - DNA, 25 bp, Homo sapien
gtcaagggcatacaaatacctccag

SEQ ID NO: 2963907 - DNA, 25 bp, Homo sapien
gtatgtgaaactatacccgtagtga

SEQ ID NO: 2963908 - DNA, 25 bp, Homo sapien
tacctccagtcaccttgttaatctg

SEQ ID NO: 2963909 - DNA, 25 bp, Homo sapien
gaaagagtaccgttgtagcagactg

SEQ ID NO: 2963910 - DNA, 25 bp, Homo sapien
gactctgtttgcagatggcatgatc

SEQ ID NO: 2963911 - DNA, 25 bp, Homo sapien
cctaaagactccacaaaagaactgt

SEQ ID NO: 2963912 - DNA, 25 bp, Homo sapien
cccgagtagctaaagcaatctagag

SEQ ID NO: 2963913 - DNA, 25 bp, Homo sapien
tagtacaacaaaagatcccgagtag

SEQ ID NO: 2963914 - DNA, 25 bp, Homo sapien
accaagctaggttgcctccagtaca

SEQ ID NO: 2963915 - DNA, 25 bp, Homo sapien
ttgtgcataacaaacacccactgag

SEQ ID NO: 2963916 - DNA, 25 bp, Homo sapien
gctgctctgtgttccaatctgttgc

SEQ ID NO: 2963917 - DNA, 25 bp, Homo sapien
cactgagttggacttcctgacactg

SEQ ID NO: 2963918 - DNA, 25 bp, Homo sapien
gaggctagagaatcagactgaggct

SEQ ID NO: 2963919 - DNA, 25 bp, Homo sapien
ccaagattgcaccacagccagggca

SEQ ID NO: 2963920 - DNA, 25 bp, Homo sapien
tcagactgaggctgggcttgaaccc

SEQ ID NO: 2963921 - DNA, 25 bp, Homo sapien
ggctgaggctagagaatcagactga

SEQ ID NO: 2963922 - DNA, 25 bp, Homo sapien
gtgggaaggcccaacaatatgacag

SEQ ID NO: 2963923 - DNA, 25 bp, Homo sapien
aggcccaacaatatgacaggtaata

SEQ ID NO: 2963924 - DNA, 25 bp, Homo sapien
tacagtgggaaggcccaacaatatg

SEQ ID NO: 2963925 - DNA, 25 bp, Homo sapien
gcccaacaatatgacaggtaataaa

SEQ ID NO: 2963926 - DNA, 25 bp, Homo sapien
ggaccatactaatcttctctatcat

SEQ ID NO: 2963927 - DNA, 25 bp, Homo sapien
tttgagtgtgatccttgtgcaggga

SEQ ID NO: 2963928 - DNA, 25 bp, Homo sapien
atactaatcttctctatcattttta

SEQ ID NO: 2963929 - DNA, 25 bp, Homo sapien
taatcttctctatcatttttagtat

SEQ ID NO: 2963930 - DNA, 25 bp, Homo sapien
cttgtcctgtttgccagctacacca

SEQ ID NO: 2963931 - DNA, 25 bp, Homo sapien
tctgaaccaacttgcttcattagat

SEQ ID NO: 2963932 - DNA, 25 bp, Homo sapien
tcttgtcctgtttgccagctacacc

SEQ ID NO: 2963933 - DNA, 25 bp, Homo sapien
acaccatctgaaccaacttgcttca

SEQ ID NO: 2963934 - DNA, 25 bp, Homo sapien
gaattaattccctaagatgctctgc

SEQ ID NO: 2963935 - DNA, 25 bp, Homo sapien
aatcttggcagcaatcaccccagga

SEQ ID NO: 2963936 - DNA, 25 bp, Homo sapien
gacaatgaccagaccatacatgaag

SEQ ID NO: 2963937 - DNA, 25 bp, Homo sapien
ccaggacagcgaggatttgatcaat

SEQ ID NO: 2963938 - DNA, 25 bp, Homo sapien
tggactggcctaggaacctaccatt

SEQ ID NO: 2963939 - DNA, 25 bp, Homo sapien
tccatacaagtttcccaatcctgtg

SEQ ID NO: 2963940 - DNA, 25 bp, Homo sapien
ccatttgtgagctattaatcccaag

SEQ ID NO: 2963941 - DNA, 25 bp, Homo sapien
aatcccaagaatagtagtgcatttg

SEQ ID NO: 2963942 - DNA, 25 bp, Homo sapien
catgagctcactggagtaatttttt

SEQ ID NO: 2963943 - DNA, 25 bp, Homo sapien
ttcatgagctcactggagtaatttt

SEQ ID NO: 2963944 - DNA, 25 bp, Homo sapien
cattcatgagctcactggagtaatt

SEQ ID NO: 2963945 - DNA, 25 bp, Homo sapien
atcattcatgagctcactggagtaa

SEQ ID NO: 2963946 - DNA, 25 bp, Homo sapien
cacttttaagttacggagctggctt

SEQ ID NO: 2963947 - DNA, 25 bp, Homo sapien
taagttacggagctggcttctttcc

SEQ ID NO: 2963948 - DNA, 25 bp, Homo sapien
cttttaagttacggagctggcttct

SEQ ID NO: 2963949 - DNA, 25 bp, Homo sapien
tgcacttttaagttacggagctggc

SEQ ID NO: 2963950 - DNA, 25 bp, Homo sapien
atctttggcttgagattctttgcca

SEQ ID NO: 2963951 - DNA, 25 bp, Homo sapien
gtactcttcgatgacatctttggct

SEQ ID NO: 2963952 - DNA, 25 bp, Homo sapien
tcgatgacatctttggcttgagatt

SEQ ID NO: 2963953 - DNA, 25 bp, Homo sapien
tttgccatagtccttacctaccaca

SEQ ID NO: 2963954 - DNA, 25 bp, Homo sapien
ccaggttgggcaattcaaagtcaga

SEQ ID NO: 2963955 - DNA, 25 bp, Homo sapien
tatatcttgcccatacaaatttctg

SEQ ID NO: 2963956 - DNA, 25 bp, Homo sapien
caatatggatctatacatttctaat

SEQ ID NO: 2963957 - DNA, 25 bp, Homo sapien
gatgttatccaactaaacatgacaa

SEQ ID NO: 2963958 - DNA, 25 bp, Homo sapien
gtactactataccacttattctgtg

SEQ ID NO: 2963959 - DNA, 25 bp, Homo sapien
ctatctgcaagagggtagtggacat

SEQ ID NO: 2963960 - DNA, 25 bp, Homo sapien
gatagtacatgccaaccctgctaag

SEQ ID NO: 2963961 - DNA, 25 bp, Homo sapien
agcctctgatcacttatacattaag

SEQ ID NO: 2963962 - DNA, 25 bp, Homo sapien
tgcacctagccacatctactggatt

SEQ ID NO: 2963963 - DNA, 25 bp, Homo sapien
tatcccctctcaccaacctgtaact

SEQ ID NO: 2963964 - DNA, 25 bp, Homo sapien
tctcaccaacctgtaactgtctttc

SEQ ID NO: 2963965 - DNA, 25 bp, Homo sapien
atctactggattctatcccctctca

SEQ ID NO: 2963966 - DNA, 25 bp, Homo sapien
tatcttccccccatggtagaaggca

SEQ ID NO: 2963967 - DNA, 25 bp, Homo sapien
ttatcttccccccatggtagaaggc

SEQ ID NO: 2963968 - DNA, 25 bp, Homo sapien
agccaccatgacccatgccccgttt

SEQ ID NO: 2963969 - DNA, 25 bp, Homo sapien
gccaccatgacccatgccccgtttt

SEQ ID NO: 2963970 - DNA, 25 bp, Homo sapien
gaaacctatgactggttgtgatcag

SEQ ID NO: 2963971 - DNA, 25 bp, Homo sapien
gaaggaacaaagaaacctatgactg

SEQ ID NO: 2963972 - DNA, 25 bp, Homo sapien
caaagaaacctatgactggttgtga

SEQ ID NO: 2963973 - DNA, 25 bp, Homo sapien
gaacaaagaaacctatgactggttg

SEQ ID NO: 2963974 - DNA, 25 bp, Homo sapien
ccagataagaaatcttatctgccat

SEQ ID NO: 2963975 - DNA, 25 bp, Homo sapien
ttgccagataagaaatcttatctgc

SEQ ID NO: 2963976 - DNA, 25 bp, Homo sapien
gccagataagaaatcttatctgcca

SEQ ID NO: 2963977 - DNA, 25 bp, Homo sapien
gtgtagacaccagattagcataatg

SEQ ID NO: 2963978 - DNA, 25 bp, Homo sapien
gagctggttcatccctccctaagca

SEQ ID NO: 2963979 - DNA, 25 bp, Homo sapien
tcatccctccctaagcaacctgatg

SEQ ID NO: 2963980 - DNA, 25 bp, Homo sapien
tagcataatgcactataggccagaa

SEQ ID NO: 2963981 - DNA, 25 bp, Homo sapien
gaacttagatagaatggtcaggaat

SEQ ID NO: 2963982 - DNA, 25 bp, Homo sapien
gagaataataaagaggggtatgaac

SEQ ID NO: 2963983 - DNA, 25 bp, Homo sapien
cttagatagaatggtcaggaatgcc

SEQ ID NO: 2963984 - DNA, 25 bp, Homo sapien
gggtatgaacttagatagaatggtc

SEQ ID NO: 2963985 - DNA, 25 bp, Homo sapien
ctgcaagaaaaaagataaaaggcca

SEQ ID NO: 2963986 - DNA, 25 bp, Homo sapien
tgcaagaaaaaagataaaaggccat

SEQ ID NO: 2963987 - DNA, 25 bp, Homo sapien
tggctctggctaaagcagcagccaa

SEQ ID NO: 2963988 - DNA, 25 bp, Homo sapien
tttgggatataatgtgcagaaagat

SEQ ID NO: 2963989 - DNA, 25 bp, Homo sapien
gggatataatgtgcagaaagatcac

SEQ ID NO: 2963990 - DNA, 25 bp, Homo sapien
gatataatgtgcagaaagatcactc

SEQ ID NO: 2963991 - DNA, 25 bp, Homo sapien
acctcctgggttcaaccaattcact

SEQ ID NO: 2963992 - DNA, 25 bp, Homo sapien
tcagcctcccgaatagctaggacca

SEQ ID NO: 2963993 - DNA, 25 bp, Homo sapien
caggtgtgcaccactacaccggcta

SEQ ID NO: 2963994 - DNA, 25 bp, Homo sapien
cctgggttcaaccaattcacttgcc

SEQ ID NO: 2963995 - DNA, 25 bp, Homo sapien
ctatgtctaccacttcacctatgtc

SEQ ID NO: 2963996 - DNA, 25 bp, Homo sapien
cttcacctatgtctaccgcttcacc

SEQ ID NO: 2963997 - DNA, 25 bp, Homo sapien
gcttcacctatgtctaccgcttcac

SEQ ID NO: 2963998 - DNA, 25 bp, Homo sapien
tgtctaccgcttcacctatgtctac

SEQ ID NO: 2963999 - DNA, 25 bp, Homo sapien
gggggaagtctttcacccagctgca

SEQ ID NO: 2964000 - DNA, 25 bp, Homo sapien
cacccagctgcagcaaatctcgtgt

SEQ ID NO: 2964001 - DNA, 25 bp, Homo sapien
aatctcgtgtagtttgctgaagaca

SEQ ID NO: 2964002 - DNA, 25 bp, Homo sapien
gctgcagcaaatctcgtgtagtttg

SEQ ID NO: 2964003 - DNA, 25 bp, Homo sapien
ttttgatggcatggattgatgtctc

SEQ ID NO: 2964004 - DNA, 25 bp, Homo sapien
ggcatggattgatgtctcataataa

SEQ ID NO: 2964005 - DNA, 25 bp, Homo sapien
ctctaggttgaagagcatattaaag

SEQ ID NO: 2964006 - DNA, 25 bp, Homo sapien
gattgatgtctcataataaagctgg

SEQ ID NO: 2964007 - DNA, 25 bp, Homo sapien
tacctgggaggcaaggataagagac

SEQ ID NO: 2964008 - DNA, 25 bp, Homo sapien
aaagactaccttgcctccatggaag

SEQ ID NO: 2964009 - DNA, 25 bp, Homo sapien
gctgccaaggctcatatagatccaa

SEQ ID NO: 2964010 - DNA, 25 bp, Homo sapien
tcacatgaaataaactgcgtcagtc

SEQ ID NO: 2964011 - DNA, 25 bp, Homo sapien
aaaccgctcatcagtgacccggaag

SEQ ID NO: 2964012 - DNA, 25 bp, Homo sapien
tggaggcataaatagcagcatctac

SEQ ID NO: 2964013 - DNA, 25 bp, Homo sapien
gggaacatctcctggcggactaagt

SEQ ID NO: 2964014 - DNA, 25 bp, Homo sapien
cccatggccatcaaacactgcaaag

SEQ ID NO: 2964015 - DNA, 25 bp, Homo sapien
aaaggtctcttgtatccaatgagaa

SEQ ID NO: 2964016 - DNA, 25 bp, Homo sapien
ctaaattagaaccaatgcgtcaggg

SEQ ID NO: 2964017 - DNA, 25 bp, Homo sapien
ggtaaaaggtctcttgtatccaatg

SEQ ID NO: 2964018 - DNA, 25 bp, Homo sapien
ggtggtaaaaggtctcttgtatcca

SEQ ID NO: 2964019 - DNA, 25 bp, Homo sapien
aatttcactgcagtagctacgactg

SEQ ID NO: 2964020 - DNA, 25 bp, Homo sapien
aaagctcttggtcctactatacgaa

SEQ ID NO: 2964021 - DNA, 25 bp, Homo sapien
gacatccccatttgacatgagtcac

SEQ ID NO: 2964022 - DNA, 25 bp, Homo sapien
tcaccaccaaatgagcatgactttc

SEQ ID NO: 2964023 - DNA, 25 bp, Homo sapien
ctctgatgaaagtcaccactcctgt

SEQ ID NO: 2964024 - DNA, 25 bp, Homo sapien
acctgggaatcacccacccaggcca

SEQ ID NO: 2964025 - DNA, 25 bp, Homo sapien
ggtttgtgtggcttcattagttcaa

SEQ ID NO: 2964026 - DNA, 25 bp, Homo sapien
ttctcacaagcataacctgggaatc

SEQ ID NO: 2964027 - DNA, 25 bp, Homo sapien
caatagctctggaaaccgacagact

SEQ ID NO: 2964028 - DNA, 25 bp, Homo sapien
aaccagactacgcaacctccaaggg

SEQ ID NO: 2964029 - DNA, 25 bp, Homo sapien
attcaccctccaggcaccaaaccag

SEQ ID NO: 2964030 - DNA, 25 bp, Homo sapien
cctccaagggcctcaattctctgct

SEQ ID NO: 2964031 - DNA, 25 bp, Homo sapien
cggtgattttcagtcaagggtagca

SEQ ID NO: 2964032 - DNA, 25 bp, Homo sapien
gatagtatagtcctctggttcggtg

SEQ ID NO: 2964033 - DNA, 25 bp, Homo sapien
tgggtagtgggtcctgctaaaccta

SEQ ID NO: 2964034 - DNA, 25 bp, Homo sapien
tgggccacttcacagcttgctagca

SEQ ID NO: 2964035 - DNA, 25 bp, Homo sapien
tgtgagagtgcagcaaaagggtcct

SEQ ID NO: 2964036 - DNA, 25 bp, Homo sapien
cttgtgagagtgcagcaaaagggtc

SEQ ID NO: 2964037 - DNA, 25 bp, Homo sapien
agagtgcagcaaaagggtccttagc

SEQ ID NO: 2964038 - DNA, 25 bp, Homo sapien
tgagagtgcagcaaaagggtcctta

SEQ ID NO: 2964039 - DNA, 25 bp, Homo sapien
tagagaacagacaaaatgtatggcc

SEQ ID NO: 2964040 - DNA, 25 bp, Homo sapien
agagaacagacaaaatgtatggcca

SEQ ID NO: 2964041 - DNA, 25 bp, Homo sapien
ctagagaacagacaaaatgtatggc

SEQ ID NO: 2964042 - DNA, 25 bp, Homo sapien
gagaacagacaaaatgtatggccat

SEQ ID NO: 2964043 - DNA, 25 bp, Homo sapien
taagaacgtttatgaccaatgccat

SEQ ID NO: 2964044 - DNA, 25 bp, Homo sapien
tgctaagaacgtttatgaccaatgc

SEQ ID NO: 2964045 - DNA, 25 bp, Homo sapien
cttgcatgctaagaacgtttatgac

SEQ ID NO: 2964046 - DNA, 25 bp, Homo sapien
gcatgctaagaacgtttatgaccaa

SEQ ID NO: 2964047 - DNA, 25 bp, Homo sapien
tgaggtagtcttcggtcccatccag

SEQ ID NO: 2964048 - DNA, 25 bp, Homo sapien
agcacgttgatttgggaccctgggc

SEQ ID NO: 2964049 - DNA, 25 bp, Homo sapien
taatttgtgggcaaccatgctgctg

SEQ ID NO: 2964050 - DNA, 25 bp, Homo sapien
tgcctcatcagggttcacggtgtca

SEQ ID NO: 2964051 - DNA, 25 bp, Homo sapien
tctcaactggtagcaaaaactgggc

SEQ ID NO: 2964052 - DNA, 25 bp, Homo sapien
cagtaagtgaggacaggctagtgcc

SEQ ID NO: 2964053 - DNA, 25 bp, Homo sapien
aaagcagtgggaaactctccagcac

SEQ ID NO: 2964054 - DNA, 25 bp, Homo sapien
tatagctccaaggaagatctgggca

SEQ ID NO: 2964055 - DNA, 25 bp, Homo sapien
tggtgtcgagacacatcacagggac

SEQ ID NO: 2964056 - DNA, 25 bp, Homo sapien
cttgaaagcttccactagtgactga

SEQ ID NO: 2964057 - DNA, 25 bp, Homo sapien
tataaaccgcctcacaagtctgaga

SEQ ID NO: 2964058 - DNA, 25 bp, Homo sapien
tgtatctagtgacatgaaggatggt

SEQ ID NO: 2964059 - DNA, 25 bp, Homo sapien
taatgtgtaccaatagtctgctgcc

SEQ ID NO: 2964060 - DNA, 25 bp, Homo sapien
gaaggaagcacttgaaccacagcag

SEQ ID NO: 2964061 - DNA, 25 bp, Homo sapien
ggacacttcttagcgagagcactca

SEQ ID NO: 2964062 - DNA, 25 bp, Homo sapien
tcaccagtggcgttaagagagaaca

SEQ ID NO: 2964063 - DNA, 25 bp, Homo sapien
ggaattaatgggttacatggcaact

SEQ ID NO: 2964064 - DNA, 25 bp, Homo sapien
tttgaggaactaccagtgccagact

SEQ ID NO: 2964065 - DNA, 25 bp, Homo sapien
ggctgtactacatactgtttatcca

SEQ ID NO: 2964066 - DNA, 25 bp, Homo sapien
aacacagccctttcaaggttcattc

SEQ ID NO: 2964067 - DNA, 25 bp, Homo sapien
ccttttagtggagaaattggtcatc

SEQ ID NO: 2964068 - DNA, 25 bp, Homo sapien
cctctccctagaactccaaacccat

SEQ ID NO: 2964069 - DNA, 25 bp, Homo sapien
caccgcacccagactgttaatgcat

SEQ ID NO: 2964070 - DNA, 25 bp, Homo sapien
cgtaagtctagaacatttatctaag

SEQ ID NO: 2964071 - DNA, 25 bp, Homo sapien
tgtgttaaaacaatccaattgtact

SEQ ID NO: 2964072 - DNA, 25 bp, Homo sapien
tagtcactgttgtactaacgaatac

SEQ ID NO: 2964073 - DNA, 25 bp, Homo sapien
gtcactgttgtactaacgaatacta

SEQ ID NO: 2964074 - DNA, 25 bp, Homo sapien
ctgtagtcactgttgtactaacgaa

SEQ ID NO: 2964075 - DNA, 25 bp, Homo sapien
tggaaatactggaatgcatcctatt

SEQ ID NO: 2964076 - DNA, 25 bp, Homo sapien
acttaggatccttgactacatagtc

SEQ ID NO: 2964077 - DNA, 25 bp, Homo sapien
tacatagtcataagtgaaatcgatc

SEQ ID NO: 2964078 - DNA, 25 bp, Homo sapien
aactatatgttatttgctcctatgc

SEQ ID NO: 2964079 - DNA, 25 bp, Homo sapien
agccacaatggagaagaaaaggtca

SEQ ID NO: 2964080 - DNA, 25 bp, Homo sapien
gagggccaaataagaaagatcagca

SEQ ID NO: 2964081 - DNA, 25 bp, Homo sapien
tgtgcccagtattgttgtaggtgct

SEQ ID NO: 2964082 - DNA, 25 bp, Homo sapien
tagatatgcaaagcagtggtgtttc

SEQ ID NO: 2964083 - DNA, 25 bp, Homo sapien
tataatggagtggtctggcaagctc

SEQ ID NO: 2964084 - DNA, 25 bp, Homo sapien
tggccactccatagctttttaaggt

SEQ ID NO: 2964085 - DNA, 25 bp, Homo sapien
gagctccatcttccgtagtatagaa

SEQ ID NO: 2964086 - DNA, 25 bp, Homo sapien
aaggtgacgccatgttatctccgga

SEQ ID NO: 2964087 - DNA, 25 bp, Homo sapien
gtgcaattagttattatctccctgt

SEQ ID NO: 2964088 - DNA, 25 bp, Homo sapien
cctataccaatgatttttaagtgca

SEQ ID NO: 2964089 - DNA, 25 bp, Homo sapien
ttaagtgcaattagttattatctcc

SEQ ID NO: 2964090 - DNA, 25 bp, Homo sapien
ctgcctctggcctataccaatgatt

SEQ ID NO: 2964091 - DNA, 25 bp, Homo sapien
tgtttggtgagtaagatagagaaaa

SEQ ID NO: 2964092 - DNA, 25 bp, Homo sapien
gaagaggactggtttatatgtgttt

SEQ ID NO: 2964093 - DNA, 25 bp, Homo sapien
tacaagacactctagagatgaatat

SEQ ID NO: 2964094 - DNA, 25 bp, Homo sapien
gactggtttatatgtgtttggtgag

SEQ ID NO: 2964095 - DNA, 25 bp, Homo sapien
tctttggcgcgcaagtttgagagcc

SEQ ID NO: 2964096 - DNA, 25 bp, Homo sapien
gaagtctgcgctttccaccagtacg

SEQ ID NO: 2964097 - DNA, 25 bp, Homo sapien
ggtttctcaaagtgcgggccacaga

SEQ ID NO: 2964098 - DNA, 25 bp, Homo sapien
gaatacttaactacgggtgtggctc

SEQ ID NO: 2964099 - DNA, 25 bp, Homo sapien
acaaaagtaggttgatactatgcct

SEQ ID NO: 2964100 - DNA, 25 bp, Homo sapien
ggttgatactatgccttgtactgct

SEQ ID NO: 2964101 - DNA, 25 bp, Homo sapien
ggcatttctacatgtatacaaacta

SEQ ID NO: 2964102 - DNA, 25 bp, Homo sapien
tagaggtaatctgcaaataattgct

SEQ ID NO: 2964103 - DNA, 25 bp, Homo sapien
gaaaaaacggtagtatcatggagag

SEQ ID NO: 2964104 - DNA, 25 bp, Homo sapien
ttctcaagcctctttgtggatgact

SEQ ID NO: 2964105 - DNA, 25 bp, Homo sapien
tagaaagctcttgtcatgagatggc

SEQ ID NO: 2964106 - DNA, 25 bp, Homo sapien
ttttcttcagtgttcaggcaattag

SEQ ID NO: 2964107 - DNA, 25 bp, Homo sapien
gagtatctgtaaaggtcttcagttg

SEQ ID NO: 2964108 - DNA, 25 bp, Homo sapien
catctgagtatctgtaaaggtcttc

SEQ ID NO: 2964109 - DNA, 25 bp, Homo sapien
agtcatctgagtatctgtaaaggtc

SEQ ID NO: 2964110 - DNA, 25 bp, Homo sapien
atttcagtcatctgagtatctgtaa

SEQ ID NO: 2964111 - DNA, 25 bp, Homo sapien
tctatgggagtgtagtttgtactgt

SEQ ID NO: 2964112 - DNA, 25 bp, Homo sapien
gagccaccacgtgcgaccaatattt

SEQ ID NO: 2964113 - DNA, 25 bp, Homo sapien
catggaatgctagaattctatggga

SEQ ID NO: 2964114 - DNA, 25 bp, Homo sapien
ttgggaaaatttcacgaatgttcag

SEQ ID NO: 2964115 - DNA, 25 bp, Homo sapien
cttagaagcatttgaatttctgaca

SEQ ID NO: 2964116 - DNA, 25 bp, Homo sapien
aagcatttgaatttctgacagccat

SEQ ID NO: 2964117 - DNA, 25 bp, Homo sapien
gaagcatttgaatttctgacagcca

SEQ ID NO: 2964118 - DNA, 25 bp, Homo sapien
tagaagcatttgaatttctgacagc

SEQ ID NO: 2964119 - DNA, 25 bp, Homo sapien
catagctggttagtgatactaggac

SEQ ID NO: 2964120 - DNA, 25 bp, Homo sapien
cagagggaatttttagttgactagc

SEQ ID NO: 2964121 - DNA, 25 bp, Homo sapien
tgagggacttaacctagggacacat

SEQ ID NO: 2964122 - DNA, 25 bp, Homo sapien
ccatactaccatgttgtgttcagag

SEQ ID NO: 2964123 - DNA, 25 bp, Homo sapien
tacatatttggataggttctgtcaa

SEQ ID NO: 2964124 - DNA, 25 bp, Homo sapien
agttgttatggtttgtctaaatgag

SEQ ID NO: 2964125 - DNA, 25 bp, Homo sapien
tactgcattatgaaacacgtctgga

SEQ ID NO: 2964126 - DNA, 25 bp, Homo sapien
tgtactcccgggcttagataatcct

SEQ ID NO: 2964127 - DNA, 25 bp, Homo sapien
cttgcggcttaagcgccgccgcggt

SEQ ID NO: 2964128 - DNA, 25 bp, Homo sapien
aatggaggccctccgtgctagtacg

SEQ ID NO: 2964129 - DNA, 25 bp, Homo sapien
caatgagtgcgagatgttgagtgac

SEQ ID NO: 2964130 - DNA, 25 bp, Homo sapien
gagtgacagctgtccaatggaggcc

SEQ ID NO: 2964131 - DNA, 25 bp, Homo sapien
cacgattcgctcttcggatggtgta

SEQ ID NO: 2964132 - DNA, 25 bp, Homo sapien
tcagggagaggccaatcgtagacac

SEQ ID NO: 2964133 - DNA, 25 bp, Homo sapien
gaaggtgtgttacgtcccctctgct

SEQ ID NO: 2964134 - DNA, 25 bp, Homo sapien
tagacacggtctctgcacgattcgc

SEQ ID NO: 2964135 - DNA, 25 bp, Homo sapien
tagtcctagccactctgaagggtga

SEQ ID NO: 2964136 - DNA, 25 bp, Homo sapien
agggtgaggcgggaggctcacgtga

SEQ ID NO: 2964137 - DNA, 25 bp, Homo sapien
cctagccactctgaagggtgaggcg

SEQ ID NO: 2964138 - DNA, 25 bp, Homo sapien
ctatagtcctagccactctgaaggg

SEQ ID NO: 2964139 - DNA, 25 bp, Homo sapien
aagactgccgcagaaggacaggaca

SEQ ID NO: 2964140 - DNA, 25 bp, Homo sapien
agccagtgaagactgccgcagaagg

SEQ ID NO: 2964141 - DNA, 25 bp, Homo sapien
ccagtgaagactgccgcagaaggac

SEQ ID NO: 2964142 - DNA, 25 bp, Homo sapien
tgaagactgccgcagaaggacagga

SEQ ID NO: 2964143 - DNA, 25 bp, Homo sapien
cgtcttcgttgtttgaacttgggca

SEQ ID NO: 2964144 - DNA, 25 bp, Homo sapien
ttgaataatctttcggctttggctt

SEQ ID NO: 2964145 - DNA, 25 bp, Homo sapien
gaggtgtaattagcttggactgaaa

SEQ ID NO: 2964146 - DNA, 25 bp, Homo sapien
tcggctttggcttttagctttcgtc

SEQ ID NO: 2964147 - DNA, 25 bp, Homo sapien
atttgtgcagatcatctagaagaac

SEQ ID NO: 2964148 - DNA, 25 bp, Homo sapien
ccatttgtgcagatcatctagaaga

SEQ ID NO: 2964149 - DNA, 25 bp, Homo sapien
catttgtgcagatcatctagaagaa

SEQ ID NO: 2964150 - DNA, 25 bp, Homo sapien
tttgtgcagatcatctagaagaacc

SEQ ID NO: 2964151 - DNA, 25 bp, Homo sapien
cttgttccataaacttcggttccag

SEQ ID NO: 2964152 - DNA, 25 bp, Homo sapien
gacaacgaggcctccaaatgaaaca

SEQ ID NO: 2964153 - DNA, 25 bp, Homo sapien
ctgtacgggaagaaccactcccaga

SEQ ID NO: 2964154 - DNA, 25 bp, Homo sapien
agaaccactcccagatacccttgtt

SEQ ID NO: 2964155 - DNA, 25 bp, Homo sapien
tccctgagcggcaacctgatttctg

SEQ ID NO: 2964156 - DNA, 25 bp, Homo sapien
gccagaggtctctcctggtggtgtc

SEQ ID NO: 2964157 - DNA, 25 bp, Homo sapien
cagaggtctctcctggtggtgtccc

SEQ ID NO: 2964158 - DNA, 25 bp, Homo sapien
gtgtccctgagcggcaacctgattt

SEQ ID NO: 2964159 - DNA, 25 bp, Homo sapien
tggtgtggcttcaccgctctttcca

SEQ ID NO: 2964160 - DNA, 25 bp, Homo sapien
gtgtggcttcaccgctctttccaaa

SEQ ID NO: 2964161 - DNA, 25 bp, Homo sapien
gtggcttcaccgctctttccaaatg

SEQ ID NO: 2964162 - DNA, 25 bp, Homo sapien
ggtgtggcttcaccgctctttccaa

SEQ ID NO: 2964163 - DNA, 25 bp, Homo sapien
gcctgagcgtctttccaaagcacaa

SEQ ID NO: 2964164 - DNA, 25 bp, Homo sapien
gagcgtctttccaaagcacaacacc

SEQ ID NO: 2964165 - DNA, 25 bp, Homo sapien
tgagcgtctttccaaagcacaacac

SEQ ID NO: 2964166 - DNA, 25 bp, Homo sapien
gtctttccaaagcacaacaccctca

SEQ ID NO: 2964167 - DNA, 25 bp, Homo sapien
cttctcggatttgcatccgaccttc

SEQ ID NO: 2964168 - DNA, 25 bp, Homo sapien
gcttctcggatttgcatccgacctt

SEQ ID NO: 2964169 - DNA, 25 bp, Homo sapien
cctcttctcaggggagtctcagagc

SEQ ID NO: 2964170 - DNA, 25 bp, Homo sapien
tctcccttgcccagtgaaagtcatt

SEQ ID NO: 2964171 - DNA, 25 bp, Homo sapien
tcccttgcccagtgaaagtcattct

SEQ ID NO: 2964172 - DNA, 25 bp, Homo sapien
gcctcttctcaggggagtctcagag

SEQ ID NO: 2964173 - DNA, 25 bp, Homo sapien
tctgggtcctagcagagtccagaag

SEQ ID NO: 2964174 - DNA, 25 bp, Homo sapien
tgggtcctagcagagtccagaagaa

SEQ ID NO: 2964175 - DNA, 25 bp, Homo sapien
ggtcctagcagagtccagaagaagg

SEQ ID NO: 2964176 - DNA, 25 bp, Homo sapien
cttctgggtcctagcagagtccaga

SEQ ID NO: 2964177 - DNA, 25 bp, Homo sapien
tctggcaccagctgtatatagacca

SEQ ID NO: 2964178 - DNA, 25 bp, Homo sapien
tatatctattgaagaaataccgact

SEQ ID NO: 2964179 - DNA, 25 bp, Homo sapien
tatagaccatactctatttgtccaa

SEQ ID NO: 2964180 - DNA, 25 bp, Homo sapien
ttctgctttgagatatatctattga

SEQ ID NO: 2964181 - DNA, 25 bp, Homo sapien
taaagttctcggtggcagatacgag

SEQ ID NO: 2964182 - DNA, 25 bp, Homo sapien
ttacactgtaaagttctcggtggca

SEQ ID NO: 2964183 - DNA, 25 bp, Homo sapien
cactgtaaagttctcggtggcagat

SEQ ID NO: 2964184 - DNA, 25 bp, Homo sapien
ctcggtggcagatacgagatggaaa

SEQ ID NO: 2964185 - DNA, 25 bp, Homo sapien
tctccaggggtgatcagaacgcagg

SEQ ID NO: 2964186 - DNA, 25 bp, Homo sapien
agtctccaggggtgatcagaacgca

SEQ ID NO: 2964187 - DNA, 25 bp, Homo sapien
ctccaggggtgatcagaacgcaggc

SEQ ID NO: 2964188 - DNA, 25 bp, Homo sapien
atcagaacgcaggcaggcacatttg

SEQ ID NO: 2964189 - DNA, 25 bp, Homo sapien
tttagcgagactgggttttctgagc

SEQ ID NO: 2964190 - DNA, 25 bp, Homo sapien
ctgaagtgctttagcgagactgggt

SEQ ID NO: 2964191 - DNA, 25 bp, Homo sapien
agtgctttagcgagactgggttttc

SEQ ID NO: 2964192 - DNA, 25 bp, Homo sapien
agcgagactgggttttctgagcaac

SEQ ID NO: 2964193 - DNA, 25 bp, Homo sapien
gtccatctttttttaatggtccagc

SEQ ID NO: 2964194 - DNA, 25 bp, Homo sapien
agcagatctttaactgttatctgca

SEQ ID NO: 2964195 - DNA, 25 bp, Homo sapien
gcagatctttaactgttatctgcat

SEQ ID NO: 2964196 - DNA, 25 bp, Homo sapien
aactcgagtcgataacactttggag

SEQ ID NO: 2964197 - DNA, 25 bp, Homo sapien
ggattccgtgctttcggcgatggta

SEQ ID NO: 2964198 - DNA, 25 bp, Homo sapien
taggtttcagggtaacatgctgcaa

SEQ ID NO: 2964199 - DNA, 25 bp, Homo sapien
tcagagacggtaactagtggattcc

SEQ ID NO: 2964200 - DNA, 25 bp, Homo sapien
gtttccgcagatccatctgactttt

SEQ ID NO: 2964201 - DNA, 25 bp, Homo sapien
ttctaagcagtttccgcagatccat

SEQ ID NO: 2964202 - DNA, 25 bp, Homo sapien
gcagtttccgcagatccatctgact

SEQ ID NO: 2964203 - DNA, 25 bp, Homo sapien
aagcagtttccgcagatccatctga

SEQ ID NO: 2964204 - DNA, 25 bp, Homo sapien
catattttccttattggtaagaggg

SEQ ID NO: 2964205 - DNA, 25 bp, Homo sapien
cttaaggcctgcgtcatcactggag

SEQ ID NO: 2964206 - DNA, 25 bp, Homo sapien
tcatcactggagtcagtcctgttcc

SEQ ID NO: 2964207 - DNA, 25 bp, Homo sapien
ggcctgcgtcatcactggagtcagt

SEQ ID NO: 2964208 - DNA, 25 bp, Homo sapien
caagcaaaggaaccaatattctttt

SEQ ID NO: 2964209 - DNA, 25 bp, Homo sapien
attttcaagcaaaggaaccaatatt

SEQ ID NO: 2964210 - DNA, 25 bp, Homo sapien
caccaggccaaattattttcaagca

SEQ ID NO: 2964211 - DNA, 25 bp, Homo sapien
ttattttcaagcaaaggaaccaata

SEQ ID NO: 2964212 - DNA, 25 bp, Homo sapien
gtgaggcctcgtccctttgctcctg

SEQ ID NO: 2964213 - DNA, 25 bp, Homo sapien
tcttagagctaaacagaaaaagcaa

SEQ ID NO: 2964214 - DNA, 25 bp, Homo sapien
tatcgtttatccatttccagagttc

SEQ ID NO: 2964215 - DNA, 25 bp, Homo sapien
ctcctgcccttcacaattttgggta

SEQ ID NO: 2964216 - DNA, 25 bp, Homo sapien
caaagctgcttgtagaaagtggcag

SEQ ID NO: 2964217 - DNA, 25 bp, Homo sapien
ttgttcatcaaagctgcttgtagaa

SEQ ID NO: 2964218 - DNA, 25 bp, Homo sapien
tcatcaaagctgcttgtagaaagtg

SEQ ID NO: 2964219 - DNA, 25 bp, Homo sapien
atcaaagctgcttgtagaaagtggc

SEQ ID NO: 2964220 - DNA, 25 bp, Homo sapien
acccagctgggtgtttttatctgta

SEQ ID NO: 2964221 - DNA, 25 bp, Homo sapien
cccagctgggtgtttttatctgtat

SEQ ID NO: 2964222 - DNA, 25 bp, Homo sapien
ctgtatttgttatggatcatctcat

SEQ ID NO: 2964223 - DNA, 25 bp, Homo sapien
gtatttgttatggatcatctcatgg

SEQ ID NO: 2964224 - DNA, 25 bp, Homo sapien
tgggtctcaaaaacaggactgcctc

SEQ ID NO: 2964225 - DNA, 25 bp, Homo sapien
cagtgacctgctatggacttcagag

SEQ ID NO: 2964226 - DNA, 25 bp, Homo sapien
taacttggacacttagactacaggt

SEQ ID NO: 2964227 - DNA, 25 bp, Homo sapien
tcttaggtggtaaacactgtcccca

SEQ ID NO: 2964228 - DNA, 25 bp, Homo sapien
taaatatagatgtggatctctggcc

SEQ ID NO: 2964229 - DNA, 25 bp, Homo sapien
ggacacctgtttaattttcatccat

SEQ ID NO: 2964230 - DNA, 25 bp, Homo sapien
atgagtaaccgcacccggacacctg

SEQ ID NO: 2964231 - DNA, 25 bp, Homo sapien
tataaatatagatgtggatctctgg

SEQ ID NO: 2964232 - DNA, 25 bp, Homo sapien
taaaagatgcaaggtagaacacagt

SEQ ID NO: 2964233 - DNA, 25 bp, Homo sapien
tatcccacaagaatggtcaagtcat

SEQ ID NO: 2964234 - DNA, 25 bp, Homo sapien
tcagtctcaaagtaaacaccgggag

SEQ ID NO: 2964235 - DNA, 25 bp, Homo sapien
gcacttacagagttctcgaatggtt

SEQ ID NO: 2964236 - DNA, 25 bp, Homo sapien
gatgcaaggtagaacacattttaac

SEQ ID NO: 2964237 - DNA, 25 bp, Homo sapien
gtaaaagatgcaaggtagaacacat

SEQ ID NO: 2964238 - DNA, 25 bp, Homo sapien
aagatgcaaggtagaacacatttta

SEQ ID NO: 2964239 - DNA, 25 bp, Homo sapien
taaaagatgcaaggtagaacacatt

SEQ ID NO: 2964240 - DNA, 25 bp, Homo sapien
tctctagagtccttccggtccgtta

SEQ ID NO: 2964241 - DNA, 25 bp, Homo sapien
tgctttcccgtcacttgagttccgc

SEQ ID NO: 2964242 - DNA, 25 bp, Homo sapien
caattttgaaatccttcctccgctt

SEQ ID NO: 2964243 - DNA, 25 bp, Homo sapien
gcagagcgttctctagagtccttcc

SEQ ID NO: 2964244 - DNA, 25 bp, Homo sapien
tctcggaattcaggcgtagagccgt

SEQ ID NO: 2964245 - DNA, 25 bp, Homo sapien
tctgcatgaggtaaagagagtccac

SEQ ID NO: 2964246 - DNA, 25 bp, Homo sapien
cacgaaagcttggttggcaggcaca

SEQ ID NO: 2964247 - DNA, 25 bp, Homo sapien
attagaaggtctcgcaagctcacgg

SEQ ID NO: 2964248 - DNA, 25 bp, Homo sapien
catgctgccataggaattcccgaag

SEQ ID NO: 2964249 - DNA, 25 bp, Homo sapien
gactgtacactcgaagagcctgggc

SEQ ID NO: 2964250 - DNA, 25 bp, Homo sapien
gaaagttgttgtcggctgtgctgcc

SEQ ID NO: 2964251 - DNA, 25 bp, Homo sapien
cactgtgggccatgggtaaagcttt

SEQ ID NO: 2964252 - DNA, 25 bp, Homo sapien
gaaatttgtgcacacagtgttgatc

SEQ ID NO: 2964253 - DNA, 25 bp, Homo sapien
aatgagtgaaatttgtgcacacagt

SEQ ID NO: 2964254 - DNA, 25 bp, Homo sapien
tgcacacagtgttgatcagttaaac

SEQ ID NO: 2964255 - DNA, 25 bp, Homo sapien
tgatcagttaaactcctctcctcac

SEQ ID NO: 2964256 - DNA, 25 bp, Homo sapien
tcaatacatagtgaacagactatct

SEQ ID NO: 2964257 - DNA, 25 bp, Homo sapien
gagaaaacgtatagctgatgcacct

SEQ ID NO: 2964258 - DNA, 25 bp, Homo sapien
tgatgcacctaaatttctgtagggc

SEQ ID NO: 2964259 - DNA, 25 bp, Homo sapien
ttaccaattcactaggacgtatcct

SEQ ID NO: 2964260 - DNA, 25 bp, Homo sapien
caagcaccagtagatcgagctcggc

SEQ ID NO: 2964261 - DNA, 25 bp, Homo sapien
cgagctcggctattgtgatatagca

SEQ ID NO: 2964262 - DNA, 25 bp, Homo sapien
tatcaaagggatcatctcgaggtgc

SEQ ID NO: 2964263 - DNA, 25 bp, Homo sapien
tagcacaggcggatttctatcagcc

SEQ ID NO: 2964264 - DNA, 25 bp, Homo sapien
gatactcaactgtggatgcctgtcg

SEQ ID NO: 2964265 - DNA, 25 bp, Homo sapien
tctgcaaaggagcatcaggaaccac

SEQ ID NO: 2964266 - DNA, 25 bp, Homo sapien
tatcagcatccgaatctggaggagc

SEQ ID NO: 2964267 - DNA, 25 bp, Homo sapien
gaatagctttatttggagcaggcca

SEQ ID NO: 2964268 - DNA, 25 bp, Homo sapien
tttctgggtagaataccggacatgg

SEQ ID NO: 2964269 - DNA, 25 bp, Homo sapien
tctgggtagaataccggacatggtg

SEQ ID NO: 2964270 - DNA, 25 bp, Homo sapien
aacccaaaggccatcaggtggaagg

SEQ ID NO: 2964271 - DNA, 25 bp, Homo sapien
ccatcaggtggaagggtgatttctt

SEQ ID NO: 2964272 - DNA, 25 bp, Homo sapien
tgtgttactgccttaagaaccccac

SEQ ID NO: 2964273 - DNA, 25 bp, Homo sapien
ttattgtgttactgccttaagaacc

SEQ ID NO: 2964274 - DNA, 25 bp, Homo sapien
tactgccttaagaaccccacggagc

SEQ ID NO: 2964275 - DNA, 25 bp, Homo sapien
ctgccttaagaaccccacggagcac

SEQ ID NO: 2964276 - DNA, 25 bp, Homo sapien
aaaaccagctcaagtataggattga

SEQ ID NO: 2964277 - DNA, 25 bp, Homo sapien
tattagaaagttgtagtcacgttta

SEQ ID NO: 2964278 - DNA, 25 bp, Homo sapien
gaaagttgtagtcacgtttacaata

SEQ ID NO: 2964279 - DNA, 25 bp, Homo sapien
acaaaaaccagctcaagtataggat

SEQ ID NO: 2964280 - DNA, 25 bp, Homo sapien
tatggagagtaaaacagaaacgaga

SEQ ID NO: 2964281 - DNA, 25 bp, Homo sapien
tggagagtaaaacagaaacgagaaa

SEQ ID NO: 2964282 - DNA, 25 bp, Homo sapien
cagaaacgagaaaaaacaggtatca

SEQ ID NO: 2964283 - DNA, 25 bp, Homo sapien
agaaaaaacaggtatcatccatgta

SEQ ID NO: 2964284 - DNA, 25 bp, Homo sapien
aaatatctgagagatcggcccctgt

SEQ ID NO: 2964285 - DNA, 25 bp, Homo sapien
tgtggacggaccctcatgaagagaa

SEQ ID NO: 2964286 - DNA, 25 bp, Homo sapien
cagaaaagactattcacgggcagcc

SEQ ID NO: 2964287 - DNA, 25 bp, Homo sapien
ggaacctgcagagatcctggactga

SEQ ID NO: 2964288 - DNA, 25 bp, Homo sapien
gcacttgtcggtgccggcctactgc

SEQ ID NO: 2964289 - DNA, 25 bp, Homo sapien
gtgccactggtgcagcgcacttgtc

SEQ ID NO: 2964290 - DNA, 25 bp, Homo sapien
gcaacaaagaggctccgacgcgcag

SEQ ID NO: 2964291 - DNA, 25 bp, Homo sapien
cggctgctcgaggtcggctcgcccc

SEQ ID NO: 2964292 - DNA, 25 bp, Homo sapien
tgaactccgctgcggcagtagcaac

SEQ ID NO: 2964293 - DNA, 25 bp, Homo sapien
ctgaactccgctgcggcagtagcaa

SEQ ID NO: 2964294 - DNA, 25 bp, Homo sapien
ctcagtcaccgtgtgggaagtctcc

SEQ ID NO: 2964295 - DNA, 25 bp, Homo sapien
tcagtcaccgtgtgggaagtctccc

SEQ ID NO: 2964296 - DNA, 25 bp, Homo sapien
ggtcaccaagtatcctcctagcgta

SEQ ID NO: 2964297 - DNA, 25 bp, Homo sapien
caaggtcgggtatttaagcaacaag

SEQ ID NO: 2964298 - DNA, 25 bp, Homo sapien
tctttctctggtgcagcaaggtcgg

SEQ ID NO: 2964299 - DNA, 25 bp, Homo sapien
tccgcggtgagagatgtgtttactg

SEQ ID NO: 2964300 - DNA, 25 bp, Homo sapien
gtattctccaaattttctccagcac

SEQ ID NO: 2964301 - DNA, 25 bp, Homo sapien
tgtattctccaaattttctccagca

SEQ ID NO: 2964302 - DNA, 25 bp, Homo sapien
aggtgattaacctgcctcgccttgg

SEQ ID NO: 2964303 - DNA, 25 bp, Homo sapien
atcagatattttatagctgaatttc

SEQ ID NO: 2964304 - DNA, 25 bp, Homo sapien
gatattttatagctgaatttctgac

SEQ ID NO: 2964305 - DNA, 25 bp, Homo sapien
tatcagatattttatagctgaattt

SEQ ID NO: 2964306 - DNA, 25 bp, Homo sapien
attttatagctgaatttctgacaag

SEQ ID NO: 2964307 - DNA, 25 bp, Homo sapien
tgtgatatggcagtccaattctagc

SEQ ID NO: 2964308 - DNA, 25 bp, Homo sapien
cagagatgtttacattgaccccagt

SEQ ID NO: 2964309 - DNA, 25 bp, Homo sapien
tcatcatgtgacactacaacttgtt

SEQ ID NO: 2964310 - DNA, 25 bp, Homo sapien
catatcagttccgattttaaccgca

SEQ ID NO: 2964311 - DNA, 25 bp, Homo sapien
gaaatgagacatccagtttgccaag

SEQ ID NO: 2964312 - DNA, 25 bp, Homo sapien
gtttgccaaggtaaggtgggagctc

SEQ ID NO: 2964313 - DNA, 25 bp, Homo sapien
cagtttgccaaggtaaggtgggagc

SEQ ID NO: 2964314 - DNA, 25 bp, Homo sapien
tttgaaatgagacatccagtttgcc

SEQ ID NO: 2964315 - DNA, 25 bp, Homo sapien
atgcttctcaacacaaatgtttaag

SEQ ID NO: 2964316 - DNA, 25 bp, Homo sapien
tatgcttctcaacacaaatgtttaa

SEQ ID NO: 2964317 - DNA, 25 bp, Homo sapien
tgcttctcaacacaaatgtttaagc

SEQ ID NO: 2964318 - DNA, 25 bp, Homo sapien
catatgcttctcaacacaaatgttt

SEQ ID NO: 2964319 - DNA, 25 bp, Homo sapien
aattttcaagtattcagatttgtag

SEQ ID NO: 2964320 - DNA, 25 bp, Homo sapien
ttttcaagtattcagatttgtaggc

SEQ ID NO: 2964321 - DNA, 25 bp, Homo sapien
attttcaagtattcagatttgtagg

SEQ ID NO: 2964322 - DNA, 25 bp, Homo sapien
aatgtttcttgcaatcagtgttcag

SEQ ID NO: 2964323 - DNA, 25 bp, Homo sapien
cagaatgaatcacttaactctttgg

SEQ ID NO: 2964324 - DNA, 25 bp, Homo sapien
taagttgcggcaatattctagaatt

SEQ ID NO: 2964325 - DNA, 25 bp, Homo sapien
tgatggatgactaatataagttgcg

SEQ ID NO: 2964326 - DNA, 25 bp, Homo sapien
tattttccattctaacatctgaagt

SEQ ID NO: 2964327 - DNA, 25 bp, Homo sapien
ttaaaatatggagcagctaaaagac

SEQ ID NO: 2964328 - DNA, 25 bp, Homo sapien
ctaacaagttgggtcaagggacatg

SEQ ID NO: 2964329 - DNA, 25 bp, Homo sapien
taaatattatggaaccagaaaggat

SEQ ID NO: 2964330 - DNA, 25 bp, Homo sapien
cccacctcaagtctcttaaatagct

SEQ ID NO: 2964331 - DNA, 25 bp, Homo sapien
cacctcaagtctcttaaatagctga

SEQ ID NO: 2964332 - DNA, 25 bp, Homo sapien
ccacctcaagtctcttaaatagctg

SEQ ID NO: 2964333 - DNA, 25 bp, Homo sapien
gcctttttgtcacggtgtgggcaaa

SEQ ID NO: 2964334 - DNA, 25 bp, Homo sapien
tttcttcaggatggccacatgaccc

SEQ ID NO: 2964335 - DNA, 25 bp, Homo sapien
caagctgggccaatcagtgtctttc

SEQ ID NO: 2964336 - DNA, 25 bp, Homo sapien
tctttctccgggacttcacgcttga

SEQ ID NO: 2964337 - DNA, 25 bp, Homo sapien
cagcatgttttttacctacccaaca

SEQ ID NO: 2964338 - DNA, 25 bp, Homo sapien
ggcattatccagcatgttttttacc

SEQ ID NO: 2964339 - DNA, 25 bp, Homo sapien
tcctttggaaacctgtatttcacat

SEQ ID NO: 2964340 - DNA, 25 bp, Homo sapien
tggaaacctgtatttcacatctcac

SEQ ID NO: 2964341 - DNA, 25 bp, Homo sapien
gaattcggttatcttttccttcaca

SEQ ID NO: 2964342 - DNA, 25 bp, Homo sapien
cgatgttaatgggagtgttaggaaa

SEQ ID NO: 2964343 - DNA, 25 bp, Homo sapien
gttgttgactttgatatcgatgtta

SEQ ID NO: 2964344 - DNA, 25 bp, Homo sapien
ctcaaaaacttccttcagtaatgga

SEQ ID NO: 2964345 - DNA, 25 bp, Homo sapien
caatttcataattggcattacccca

SEQ ID NO: 2964346 - DNA, 25 bp, Homo sapien
tgttctcgattataccgcttcacca

SEQ ID NO: 2964347 - DNA, 25 bp, Homo sapien
cactgttaagtgttctcgattatac

SEQ ID NO: 2964348 - DNA, 25 bp, Homo sapien
tggcattaccccacactgttaagtg

SEQ ID NO: 2964349 - DNA, 25 bp, Homo sapien
tgtaaacaccattacactcagatca

SEQ ID NO: 2964350 - DNA, 25 bp, Homo sapien
ttaattgtaaacaccattacactca

SEQ ID NO: 2964351 - DNA, 25 bp, Homo sapien
aacaccattacactcagatcagcca

SEQ ID NO: 2964352 - DNA, 25 bp, Homo sapien
taattgtaaacaccattacactcag

SEQ ID NO: 2964353 - DNA, 25 bp, Homo sapien
ttcagtataatagaaggcattggga

SEQ ID NO: 2964354 - DNA, 25 bp, Homo sapien
caaaaaactgttctcgaatgggcac

SEQ ID NO: 2964355 - DNA, 25 bp, Homo sapien
gcaggacacgttgtagactgaagag

SEQ ID NO: 2964356 - DNA, 25 bp, Homo sapien
ctgaagagtataggaatatctgaat

SEQ ID NO: 2964357 - DNA, 25 bp, Homo sapien
gacttctggacatggtgtgtggttc

SEQ ID NO: 2964358 - DNA, 25 bp, Homo sapien
ttctggacatggtgtgtggttcttt

SEQ ID NO: 2964359 - DNA, 25 bp, Homo sapien
ggacatggtgtgtggttcttttagc

SEQ ID NO: 2964360 - DNA, 25 bp, Homo sapien
acttctggacatggtgtgtggttct

SEQ ID NO: 2964361 - DNA, 25 bp, Homo sapien
ttgaatgcctcgagcagttaggtgg

SEQ ID NO: 2964362 - DNA, 25 bp, Homo sapien
aatgcctcgagcagttaggtggtca

SEQ ID NO: 2964363 - DNA, 25 bp, Homo sapien
cctcgagcagttaggtggtcaaaca

SEQ ID NO: 2964364 - DNA, 25 bp, Homo sapien
cagttaggtggtcaaacaaagcttt

SEQ ID NO: 2964365 - DNA, 25 bp, Homo sapien
ttaaactggtgagctatgctgcttc

SEQ ID NO: 2964366 - DNA, 25 bp, Homo sapien
taaactggtgagctatgctgcttcc

SEQ ID NO: 2964367 - DNA, 25 bp, Homo sapien
gctgcttccaaaatgcatcattcca

SEQ ID NO: 2964368 - DNA, 25 bp, Homo sapien
ctgcttccaaaatgcatcattccag

SEQ ID NO: 2964369 - DNA, 25 bp, Homo sapien
tgctttattgctaagtgtaaggaag

SEQ ID NO: 2964370 - DNA, 25 bp, Homo sapien
gcatcagagtcaagggccaaactaa

SEQ ID NO: 2964371 - DNA, 25 bp, Homo sapien
gagtcaagggccaaactaagtcagt

SEQ ID NO: 2964372 - DNA, 25 bp, Homo sapien
agtgtaaggaagagcttaaggtcct

SEQ ID NO: 2964373 - DNA, 25 bp, Homo sapien
cagttgctcccaaatcaaaagctct

SEQ ID NO: 2964374 - DNA, 25 bp, Homo sapien
cttcatttaatacccaaatatacac

SEQ ID NO: 2964375 - DNA, 25 bp, Homo sapien
cctaagctttgttggatagtctgtc

SEQ ID NO: 2964376 - DNA, 25 bp, Homo sapien
ggatagtctgtcatcaccccagttg

SEQ ID NO: 2964377 - DNA, 25 bp, Homo sapien
cattctggaaatggcttagggaaat

SEQ ID NO: 2964378 - DNA, 25 bp, Homo sapien
tggcttagggaaatgatcatgaaat

SEQ ID NO: 2964379 - DNA, 25 bp, Homo sapien
aaatggcttagggaaatgatcatga

SEQ ID NO: 2964380 - DNA, 25 bp, Homo sapien
ctggaaatggcttagggaaatgatc

SEQ ID NO: 2964381 - DNA, 25 bp, Homo sapien
tatctttctaaacaatttacaaaca

SEQ ID NO: 2964382 - DNA, 25 bp, Homo sapien
tatagtttctacattctcatacagg

SEQ ID NO: 2964383 - DNA, 25 bp, Homo sapien
aaaacttacatctcataaccaatta

SEQ ID NO: 2964384 - DNA, 25 bp, Homo sapien
tctcatacaggcttaaaaatgaggt

SEQ ID NO: 2964385 - DNA, 25 bp, Homo sapien
gtatccaatagtctttgattccaga

SEQ ID NO: 2964386 - DNA, 25 bp, Homo sapien
gaacactgcatcatctacagaaatc

SEQ ID NO: 2964387 - DNA, 25 bp, Homo sapien
tcagcccaatgccaaatgtatccaa

SEQ ID NO: 2964388 - DNA, 25 bp, Homo sapien
gaattacttatgatagaacactgca

SEQ ID NO: 2964389 - DNA, 25 bp, Homo sapien
gaattgctacacacctgaaaaaggt

SEQ ID NO: 2964390 - DNA, 25 bp, Homo sapien
taggctcagttagtcagtgccaaaa

SEQ ID NO: 2964391 - DNA, 25 bp, Homo sapien
gacactaccaaatagctgcaatggc

SEQ ID NO: 2964392 - DNA, 25 bp, Homo sapien
aaaatggacatggtagaattgctac

SEQ ID NO: 2964393 - DNA, 25 bp, Homo sapien
aatgatatttatgtcatccagggac

SEQ ID NO: 2964394 - DNA, 25 bp, Homo sapien
gagtacagtcattcttcatagcagt

SEQ ID NO: 2964395 - DNA, 25 bp, Homo sapien
ataggagagtacagtcattcttcat

SEQ ID NO: 2964396 - DNA, 25 bp, Homo sapien
ggagagtacagtcattcttcatagc

SEQ ID NO: 2964397 - DNA, 25 bp, Homo sapien
gtgcgcagcggcgaagcgcggcccg

SEQ ID NO: 2964398 - DNA, 25 bp, Homo sapien
gctggggtgcgcagcggcgaagcgc

SEQ ID NO: 2964399 - DNA, 25 bp, Homo sapien
cagcgtggggcttggctccgctggg

SEQ ID NO: 2964400 - DNA, 25 bp, Homo sapien
tcgggctcccggcacgctcttaaag

SEQ ID NO: 2964401 - DNA, 25 bp, Homo sapien
cggaccccatggagtccgaacccat

SEQ ID NO: 2964402 - DNA, 25 bp, Homo sapien
cgagccacggaaactgacctgagaa

SEQ ID NO: 2964403 - DNA, 25 bp, Homo sapien
tgttaagccacaaaggaacgtgagg

SEQ ID NO: 2964404 - DNA, 25 bp, Homo sapien
taactgccgctggaactcaaaacag

SEQ ID NO: 2964405 - DNA, 25 bp, Homo sapien
gagatgggacgctcttgttaagcca

SEQ ID NO: 2964406 - DNA, 25 bp, Homo sapien
gagtatggagcttaactcatcattc

SEQ ID NO: 2964407 - DNA, 25 bp, Homo sapien
tatggagcttaactcatcattctaa

SEQ ID NO: 2964408 - DNA, 25 bp, Homo sapien
gtatggagcttaactcatcattcta

SEQ ID NO: 2964409 - DNA, 25 bp, Homo sapien
taagagtatggagcttaactcatca

SEQ ID NO: 2964410 - DNA, 25 bp, Homo sapien
gcagtgttaattaacacctgcgtca

SEQ ID NO: 2964411 - DNA, 25 bp, Homo sapien
caggcagtgttaattaacacctgcg

SEQ ID NO: 2964412 - DNA, 25 bp, Homo sapien
ggcagtgttaattaacacctgcgtc

SEQ ID NO: 2964413 - DNA, 25 bp, Homo sapien
cagtgttaattaacacctgcgtcat

SEQ ID NO: 2964414 - DNA, 25 bp, Homo sapien
cctcacgcagaggtctagggctagt

SEQ ID NO: 2964415 - DNA, 25 bp, Homo sapien
ggcagaagaaccctcacgcagaggt

SEQ ID NO: 2964416 - DNA, 25 bp, Homo sapien
gaagaaccctcacgcagaggtctag

SEQ ID NO: 2964417 - DNA, 25 bp, Homo sapien
cgcagaggtctagggctagttctca

SEQ ID NO: 2964418 - DNA, 25 bp, Homo sapien
cccacaggatgggtcgcacgggaaa

SEQ ID NO: 2964419 - DNA, 25 bp, Homo sapien
gcacgggaaacaccggaagacacag

SEQ ID NO: 2964420 - DNA, 25 bp, Homo sapien
gtttggcagcgggtgggtgtggcag

SEQ ID NO: 2964421 - DNA, 25 bp, Homo sapien
caggtaaaggccgtggtttggcagc

SEQ ID NO: 2964422 - DNA, 25 bp, Homo sapien
tgctgagtgtggggtgaactctggg

SEQ ID NO: 2964423 - DNA, 25 bp, Homo sapien
gctgagtgtggggtgaactctgggg

SEQ ID NO: 2964424 - DNA, 25 bp, Homo sapien
tgaatgcagctgtaggtccggtggc

SEQ ID NO: 2964425 - DNA, 25 bp, Homo sapien
tccggtggcaggagggcagatatgc

SEQ ID NO: 2964426 - DNA, 25 bp, Homo sapien
atatgcctggaaagtcttcgatctt

SEQ ID NO: 2964427 - DNA, 25 bp, Homo sapien
atcatgattggccaagtgagctctg

SEQ ID NO: 2964428 - DNA, 25 bp, Homo sapien
ttacaaggcccagatcaaagaacca

SEQ ID NO: 2964429 - DNA, 25 bp, Homo sapien
ttggcttccccagtagatacaggca

SEQ ID NO: 2964430 - DNA, 25 bp, Homo sapien
caaaaaacttcgtctcggtctgcgt

SEQ ID NO: 2964431 - DNA, 25 bp, Homo sapien
caagcaagctgagaacaaggctccc

SEQ ID NO: 2964432 - DNA, 25 bp, Homo sapien
tattcaggcgatgtggcttggttcc

SEQ ID NO: 2964433 - DNA, 25 bp, Homo sapien
tgtaaagcagatataggccatgccc

SEQ ID NO: 2964434 - DNA, 25 bp, Homo sapien
catttactgagctcttgccatgggt

SEQ ID NO: 2964435 - DNA, 25 bp, Homo sapien
gaacggacactcttggctaaggcac

SEQ ID NO: 2964436 - DNA, 25 bp, Homo sapien
gtgcagatttaccattccagaggcc

SEQ ID NO: 2964437 - DNA, 25 bp, Homo sapien
caagcttgattaccagtgtccctgc

SEQ ID NO: 2964438 - DNA, 25 bp, Homo sapien
tgctcaaacagaaacagagggatcc

SEQ ID NO: 2964439 - DNA, 25 bp, Homo sapien
ggatttctgactgggaacacaagct

SEQ ID NO: 2964440 - DNA, 25 bp, Homo sapien
gacctccagggaactactacaagtg

SEQ ID NO: 2964441 - DNA, 25 bp, Homo sapien
tcgttaaaatacagatccccagtgg

SEQ ID NO: 2964442 - DNA, 25 bp, Homo sapien
ttagtactggttacatcagaccggg

SEQ ID NO: 2964443 - DNA, 25 bp, Homo sapien
tcagaccgggacagggatactcgtt

SEQ ID NO: 2964444 - DNA, 25 bp, Homo sapien
tgaggcatgggaagtatgcctcgtc

SEQ ID NO: 2964445 - DNA, 25 bp, Homo sapien
catgggaagtatgcctcgtccagaa

SEQ ID NO: 2964446 - DNA, 25 bp, Homo sapien
aggcatgggaagtatgcctcgtcca

SEQ ID NO: 2964447 - DNA, 25 bp, Homo sapien
ggaagtatgcctcgtccagaaggat

SEQ ID NO: 2964448 - DNA, 25 bp, Homo sapien
aggataaacctctccagtctgtggc

SEQ ID NO: 2964449 - DNA, 25 bp, Homo sapien
gagcaggataaacctctccagtctg

SEQ ID NO: 2964450 - DNA, 25 bp, Homo sapien
gaaccaggagcaggataaacctctc

SEQ ID NO: 2964451 - DNA, 25 bp, Homo sapien
cagtctgtggcatggggttagaaca

SEQ ID NO: 2964452 - DNA, 25 bp, Homo sapien
tctccaaccatggttaggcctggtg

SEQ ID NO: 2964453 - DNA, 25 bp, Homo sapien
taactccttttaggcgtctcagtga

SEQ ID NO: 2964454 - DNA, 25 bp, Homo sapien
tgcagggaagggtcagatcagtcct

SEQ ID NO: 2964455 - DNA, 25 bp, Homo sapien
tgcccttggagtgtcgtctaaaccc

SEQ ID NO: 2964456 - DNA, 25 bp, Homo sapien
tctcctccttggcctttacaggagc

SEQ ID NO: 2964457 - DNA, 25 bp, Homo sapien
ctctcctccttggcctttacaggag

SEQ ID NO: 2964458 - DNA, 25 bp, Homo sapien
gtggccatagccactcaggttccct

SEQ ID NO: 2964459 - DNA, 25 bp, Homo sapien
tggcactcgggatcagctgtgtttt

SEQ ID NO: 2964460 - DNA, 25 bp, Homo sapien
tttccatcatgggttccattctggg

SEQ ID NO: 2964461 - DNA, 25 bp, Homo sapien
aggagcagtatctatgaacctctgt

SEQ ID NO: 2964462 - DNA, 25 bp, Homo sapien
tctgcttccattaacacgggccctg

SEQ ID NO: 2964463 - DNA, 25 bp, Homo sapien
gcaatctggcgtctgcttccattaa

SEQ ID NO: 2964464 - DNA, 25 bp, Homo sapien
agggcggcagggaacaggagaaaca

SEQ ID NO: 2964465 - DNA, 25 bp, Homo sapien
cagagcctgccatgcaatctggcgt

SEQ ID NO: 2964466 - DNA, 25 bp, Homo sapien
ctgagatcattaatccgcattggcg

SEQ ID NO: 2964467 - DNA, 25 bp, Homo sapien
cattaatccgcattggcgtttcctg

SEQ ID NO: 2964468 - DNA, 25 bp, Homo sapien
tccgcattggcgtttcctggtccca

SEQ ID NO: 2964469 - DNA, 25 bp, Homo sapien
attggcgtttcctggtcccacctga

SEQ ID NO: 2964470 - DNA, 25 bp, Homo sapien
gaagagggcggaattaacagagcca

SEQ ID NO: 2964471 - DNA, 25 bp, Homo sapien
tcgatctggcccaccggactgtttt

SEQ ID NO: 2964472 - DNA, 25 bp, Homo sapien
gagccacaaagctcgatctggccca

SEQ ID NO: 2964473 - DNA, 25 bp, Homo sapien
gagtactgagccagttaacggtccc

SEQ ID NO: 2964474 - DNA, 25 bp, Homo sapien
aagaggtatgctcgtccttgacttc

SEQ ID NO: 2964475 - DNA, 25 bp, Homo sapien
agaggtatgctcgtccttgacttcc

SEQ ID NO: 2964476 - DNA, 25 bp, Homo sapien
aaagaggtatgctcgtccttgactt

SEQ ID NO: 2964477 - DNA, 25 bp, Homo sapien
taaagaggtatgctcgtccttgact

SEQ ID NO: 2964478 - DNA, 25 bp, Homo sapien
tgggtagttagtgacacgcacatca

SEQ ID NO: 2964479 - DNA, 25 bp, Homo sapien
tagttagtgacacgcacatcaggca

SEQ ID NO: 2964480 - DNA, 25 bp, Homo sapien
agtgggtagttagtgacacgcacat

SEQ ID NO: 2964481 - DNA, 25 bp, Homo sapien
ggtagttagtgacacgcacatcagg

SEQ ID NO: 2964482 - DNA, 25 bp, Homo sapien
tgcagtcctgttagcaacactcgct

SEQ ID NO: 2964483 - DNA, 25 bp, Homo sapien
tagcaacactcgctcttctgcaggc

SEQ ID NO: 2964484 - DNA, 25 bp, Homo sapien
tgtctgcgactgcatgcagtcctgt

SEQ ID NO: 2964485 - DNA, 25 bp, Homo sapien
gttttgcagttttcacagtaaatgt

SEQ ID NO: 2964486 - DNA, 25 bp, Homo sapien
cactctgcggcaggtttgacaactc

SEQ ID NO: 2964487 - DNA, 25 bp, Homo sapien
catgagccatatgacaggacaggga

SEQ ID NO: 2964488 - DNA, 25 bp, Homo sapien
gaagccagaggcagttcatgagcca

SEQ ID NO: 2964489 - DNA, 25 bp, Homo sapien
tatcctcacaatgacagggagggca

SEQ ID NO: 2964490 - DNA, 25 bp, Homo sapien
gaataaggtccattgttccacggta

SEQ ID NO: 2964491 - DNA, 25 bp, Homo sapien
tgggctctcccagcgaataaacagg

SEQ ID NO: 2964492 - DNA, 25 bp, Homo sapien
gaacgtcatactaaccacctggcag

SEQ ID NO: 2964493 - DNA, 25 bp, Homo sapien
tactggtgctaacggaagtttgccc

SEQ ID NO: 2964494 - DNA, 25 bp, Homo sapien
ccattgtccttgatcatgtgtgcta

SEQ ID NO: 2964495 - DNA, 25 bp, Homo sapien
ttcaatgatgtatttgccttcttta

SEQ ID NO: 2964496 - DNA, 25 bp, Homo sapien
gtgctagttcaatgatgtatttgcc

SEQ ID NO: 2964497 - DNA, 25 bp, Homo sapien
tccttgatcatgtgtgctagttcaa

SEQ ID NO: 2964498 - DNA, 25 bp, Homo sapien
cagtcactctctcacgcttgggaag

SEQ ID NO: 2964499 - DNA, 25 bp, Homo sapien
acagcgatttagaggccggtcacca

SEQ ID NO: 2964500 - DNA, 25 bp, Homo sapien
ggcaaggcccctaaatggatggaac

SEQ ID NO: 2964501 - DNA, 25 bp, Homo sapien
tgaatggcgttcacgtggacactgg

SEQ ID NO: 2964502 - DNA, 25 bp, Homo sapien
cgccatgcggtcaaggatctgttcc

SEQ ID NO: 2964503 - DNA, 25 bp, Homo sapien
ctgccgccatgcggtcaaggatctg

SEQ ID NO: 2964504 - DNA, 25 bp, Homo sapien
ggctgccgccatgcggtcaaggatc

SEQ ID NO: 2964505 - DNA, 25 bp, Homo sapien
gccgccatgcggtcaaggatctgtt

SEQ ID NO: 2964506 - DNA, 25 bp, Homo sapien
tccttttagacaagtcaattatttc

SEQ ID NO: 2964507 - DNA, 25 bp, Homo sapien
caggagcggcgcaattttgttccta

SEQ ID NO: 2964508 - DNA, 25 bp, Homo sapien
gacaagtcaattatttcaagcctaa

SEQ ID NO: 2964509 - DNA, 25 bp, Homo sapien
ctgctctcctgacaagaggccatca

SEQ ID NO: 2964510 - DNA, 25 bp, Homo sapien
ccttatctacggtggctagaggcaa

SEQ ID NO: 2964511 - DNA, 25 bp, Homo sapien
gagtgaggcatcagagtcatcgcac

SEQ ID NO: 2964512 - DNA, 25 bp, Homo sapien
caaagatgatgattgcccagagact

SEQ ID NO: 2964513 - DNA, 25 bp, Homo sapien
gatatttggatggtaagcccattgc

SEQ ID NO: 2964514 - DNA, 25 bp, Homo sapien
ggttattactaagctcagagcctgg

SEQ ID NO: 2964515 - DNA, 25 bp, Homo sapien
gaaattgacgatcccacggaagcca

SEQ ID NO: 2964516 - DNA, 25 bp, Homo sapien
gaaagatgcaccgaacctgaactgg

SEQ ID NO: 2964517 - DNA, 25 bp, Homo sapien
gggcccgtgctttctacagtctaca

SEQ ID NO: 2964518 - DNA, 25 bp, Homo sapien
tctccacttccctaatcgaaggatg

SEQ ID NO: 2964519 - DNA, 25 bp, Homo sapien
ggtgatatcggaatttgggcagaac

SEQ ID NO: 2964520 - DNA, 25 bp, Homo sapien
gatatcggaatttgggcagaactcc

SEQ ID NO: 2964521 - DNA, 25 bp, Homo sapien
cctaatcgaaggatgcttggatggg

SEQ ID NO: 2964522 - DNA, 25 bp, Homo sapien
gaacaacttgatctcccagggctat

SEQ ID NO: 2964523 - DNA, 25 bp, Homo sapien
tgagaattacctaacacgcacacgt

SEQ ID NO: 2964524 - DNA, 25 bp, Homo sapien
caaggacgcgctctgaatggaaact

SEQ ID NO: 2964525 - DNA, 25 bp, Homo sapien
aaaagttgatttctaagcccacacg

SEQ ID NO: 2964526 - DNA, 25 bp, Homo sapien
aaatccatggcttctgtgccgggaa

SEQ ID NO: 2964527 - DNA, 25 bp, Homo sapien
catggcttctgtgccgggaagccag

SEQ ID NO: 2964528 - DNA, 25 bp, Homo sapien
cattgagaacttgggcctgtgagcc

SEQ ID NO: 2964529 - DNA, 25 bp, Homo sapien
aaaaaacgatttcattgagaacttg

SEQ ID NO: 2964530 - DNA, 25 bp, Homo sapien
gagtccaatgaaaatccataaagga

SEQ ID NO: 2964531 - DNA, 25 bp, Homo sapien
ttcttatgggaaggactatcaataa

SEQ ID NO: 2964532 - DNA, 25 bp, Homo sapien
taaacagccaggacaatcgctgagg

SEQ ID NO: 2964533 - DNA, 25 bp, Homo sapien
caatcgctgaggaaagagtccaatg

SEQ ID NO: 2964534 - DNA, 25 bp, Homo sapien
tagcatctccatagctcagctgtgg

SEQ ID NO: 2964535 - DNA, 25 bp, Homo sapien
gatagacaacccatgaacagagcga

SEQ ID NO: 2964536 - DNA, 25 bp, Homo sapien
gaaggctcactggatagtcaccgaa

SEQ ID NO: 2964537 - DNA, 25 bp, Homo sapien
gaacagtggcacattggtccccttg

SEQ ID NO: 2964538 - DNA, 25 bp, Homo sapien
tccaaggtggccaaggtcatatgac

SEQ ID NO: 2964539 - DNA, 25 bp, Homo sapien
ctactccaaggtggccaaggtcata

SEQ ID NO: 2964540 - DNA, 25 bp, Homo sapien
ctccaaggtggccaaggtcatatga

SEQ ID NO: 2964541 - DNA, 25 bp, Homo sapien
tactccaaggtggccaaggtcatat

SEQ ID NO: 2964542 - DNA, 25 bp, Homo sapien
ctgagactaatgtcccgggtcccga

SEQ ID NO: 2964543 - DNA, 25 bp, Homo sapien
tgagactaatgtcccgggtcccgag

SEQ ID NO: 2964544 - DNA, 25 bp, Homo sapien
gcctgagactaatgtcccgggtccc

SEQ ID NO: 2964545 - DNA, 25 bp, Homo sapien
cctgagactaatgtcccgggtcccg

SEQ ID NO: 2964546 - DNA, 25 bp, Homo sapien
taaagggtcatctctttcgcacaca

SEQ ID NO: 2964547 - DNA, 25 bp, Homo sapien
ctcaggaagaacactcagtcaggtt

SEQ ID NO: 2964548 - DNA, 25 bp, Homo sapien
tagcctatcctcgtgaactcaggaa

SEQ ID NO: 2964549 - DNA, 25 bp, Homo sapien
cagctgacagcttgtgggtatcgag

SEQ ID NO: 2964550 - DNA, 25 bp, Homo sapien
agaaaaactttatgcgcccgaggtg

SEQ ID NO: 2964551 - DNA, 25 bp, Homo sapien
tgtccccactcgagaaaacaggagg

SEQ ID NO: 2964552 - DNA, 25 bp, Homo sapien
ctggagccctgcgatacgtgattaa

SEQ ID NO: 2964553 - DNA, 25 bp, Homo sapien
tctgtaaaaactgagcacgcaaagc

SEQ ID NO: 2964554 - DNA, 25 bp, Homo sapien
gggtccagtggtcctgtgtgagggt

SEQ ID NO: 2964555 - DNA, 25 bp, Homo sapien
ttgcttcagcagaaagtaggtgcct

SEQ ID NO: 2964556 - DNA, 25 bp, Homo sapien
ggtcctggctgatgtggcgagccat

SEQ ID NO: 2964557 - DNA, 25 bp, Homo sapien
ggctttatgagcaattgcttcagca

SEQ ID NO: 2964558 - DNA, 25 bp, Homo sapien
ggattagcgtaaaattcaaggatga

SEQ ID NO: 2964559 - DNA, 25 bp, Homo sapien
gatgagtgcattttgctgtactgaa

SEQ ID NO: 2964560 - DNA, 25 bp, Homo sapien
atgatttttctagctgatgtccccc

SEQ ID NO: 2964561 - DNA, 25 bp, Homo sapien
tctttccataaacgtacactctcct

SEQ ID NO: 2964562 - DNA, 25 bp, Homo sapien
tcagcaggctttacatttgccatcg

SEQ ID NO: 2964563 - DNA, 25 bp, Homo sapien
ttgccatcgtactgggtcacactgt

SEQ ID NO: 2964564 - DNA, 25 bp, Homo sapien
gtcacactgtatactaggccttggg

SEQ ID NO: 2964565 - DNA, 25 bp, Homo sapien
tctgaaactagggagtagccttttg

SEQ ID NO: 2964566 - DNA, 25 bp, Homo sapien
tctctgtgaggacattgctcttcct

SEQ ID NO: 2964567 - DNA, 25 bp, Homo sapien
tgtcctgtcccctagcatgttctct

SEQ ID NO: 2964568 - DNA, 25 bp, Homo sapien
tgccccatgctcagcatccatcttt

SEQ ID NO: 2964569 - DNA, 25 bp, Homo sapien
gttctcttctctgtgaggacattgc

SEQ ID NO: 2964570 - DNA, 25 bp, Homo sapien
aagccaaagtgaggcgtctcctggc

SEQ ID NO: 2964571 - DNA, 25 bp, Homo sapien
ccaaagtgaggcgtctcctggctcc

SEQ ID NO: 2964572 - DNA, 25 bp, Homo sapien
aaagtgaggcgtctcctggctccat

SEQ ID NO: 2964573 - DNA, 25 bp, Homo sapien
ctgaagccaaagtgaggcgtctcct

SEQ ID NO: 2964574 - DNA, 25 bp, Homo sapien
tgtgcaggcccatgatgtaaacgtc

SEQ ID NO: 2964575 - DNA, 25 bp, Homo sapien
cagaaattccaaagagtggcacaat

SEQ ID NO: 2964576 - DNA, 25 bp, Homo sapien
taaacgtctgtggtatgagggccca

SEQ ID NO: 2964577 - DNA, 25 bp, Homo sapien
tggcacaatctggaccgtgacaggt

SEQ ID NO: 2964578 - DNA, 25 bp, Homo sapien
tgagaagacatacctcggcatcccc

SEQ ID NO: 2964579 - DNA, 25 bp, Homo sapien
agtttgagaagacatacctcggcat

SEQ ID NO: 2964580 - DNA, 25 bp, Homo sapien
catccaaacctccttctacggagat

SEQ ID NO: 2964581 - DNA, 25 bp, Homo sapien
tttgagaagacatacctcggcatcc

SEQ ID NO: 2964582 - DNA, 25 bp, Homo sapien
gaaatgccagaatgctcctgcctcg

SEQ ID NO: 2964583 - DNA, 25 bp, Homo sapien
tcctgcctcgaagaggttgactctg

SEQ ID NO: 2964584 - DNA, 25 bp, Homo sapien
aaagaaccgtggagatgccagccct

SEQ ID NO: 2964585 - DNA, 25 bp, Homo sapien
gaccccacggtccaggaatcatcaa

SEQ ID NO: 2964586 - DNA, 25 bp, Homo sapien
cttaaatggaggcaaggagggagcc

SEQ ID NO: 2964587 - DNA, 25 bp, Homo sapien
aggagggagccagtcctttcaccat

SEQ ID NO: 2964588 - DNA, 25 bp, Homo sapien
aggcaaggagggagccagtcctttc

SEQ ID NO: 2964589 - DNA, 25 bp, Homo sapien
ttaaatggaggcaaggagggagcca

SEQ ID NO: 2964590 - DNA, 25 bp, Homo sapien
gttggagacatgacccaaggctttg

SEQ ID NO: 2964591 - DNA, 25 bp, Homo sapien
gagcctgttggagacatgacccaag

SEQ ID NO: 2964592 - DNA, 25 bp, Homo sapien
cctgttggagacatgacccaaggct

SEQ ID NO: 2964593 - DNA, 25 bp, Homo sapien
ccgagcctgttggagacatgaccca

SEQ ID NO: 2964594 - DNA, 25 bp, Homo sapien
tctatgaggccgaacttcccactca

SEQ ID NO: 2964595 - DNA, 25 bp, Homo sapien
cttctatgaggccgaacttcccact

SEQ ID NO: 2964596 - DNA, 25 bp, Homo sapien
ggccttctatgaggccgaacttccc

SEQ ID NO: 2964597 - DNA, 25 bp, Homo sapien
aggggccttctatgaggccgaactt

SEQ ID NO: 2964598 - DNA, 25 bp, Homo sapien
gctaatttatcgtcctcatgaaccg

SEQ ID NO: 2964599 - DNA, 25 bp, Homo sapien
aatttatcgtcctcatgaaccgcac

SEQ ID NO: 2964600 - DNA, 25 bp, Homo sapien
ttgctaatttatcgtcctcatgaac

SEQ ID NO: 2964601 - DNA, 25 bp, Homo sapien
ctttgctaatttatcgtcctcatga

SEQ ID NO: 2964602 - DNA, 25 bp, Homo sapien
tcttcccacgccgactgtcagtttc

SEQ ID NO: 2964603 - DNA, 25 bp, Homo sapien
tttctggatgatctcagagccacac

SEQ ID NO: 2964604 - DNA, 25 bp, Homo sapien
ccacgccgactgtcagtttctttct

SEQ ID NO: 2964605 - DNA, 25 bp, Homo sapien
ctttctggatgatctcagagccaca

SEQ ID NO: 2964606 - DNA, 25 bp, Homo sapien
agacttggcggctcgatgacaggca

SEQ ID NO: 2964607 - DNA, 25 bp, Homo sapien
aaagagaggatgatataaggcacag

SEQ ID NO: 2964608 - DNA, 25 bp, Homo sapien
gagcttcccgatactcaacttcaga

SEQ ID NO: 2964609 - DNA, 25 bp, Homo sapien
gagaacgtggcttatatcatcagac

SEQ ID NO: 2964610 - DNA, 25 bp, Homo sapien
cagtgttggcagtacagtctaagga

SEQ ID NO: 2964611 - DNA, 25 bp, Homo sapien
cttaaacgggtcagccacagtgcat

SEQ ID NO: 2964612 - DNA, 25 bp, Homo sapien
tcctcctcaggaaactgcaactggt

SEQ ID NO: 2964613 - DNA, 25 bp, Homo sapien
cggaatatcccggttgtggccaaca

SEQ ID NO: 2964614 - DNA, 25 bp, Homo sapien
tacgtaacagctagcatgagtgact

SEQ ID NO: 2964615 - DNA, 25 bp, Homo sapien
actaaaagccaagggatatacaggc

SEQ ID NO: 2964616 - DNA, 25 bp, Homo sapien
aggaagattgtgaccagtagtggca

SEQ ID NO: 2964617 - DNA, 25 bp, Homo sapien
caaatgatgttatcaggaccactgc

SEQ ID NO: 2964618 - DNA, 25 bp, Homo sapien
gtaatcagcattgttcttcggcctc

SEQ ID NO: 2964619 - DNA, 25 bp, Homo sapien
cagcattgttcttcggcctccatct

SEQ ID NO: 2964620 - DNA, 25 bp, Homo sapien
tagcagaattgcttttgaagtgaac

SEQ ID NO: 2964621 - DNA, 25 bp, Homo sapien
aatcagcattgttcttcggcctcca

SEQ ID NO: 2964622 - DNA, 25 bp, Homo sapien
ttcatagaagttaaacggcatttcc

SEQ ID NO: 2964623 - DNA, 25 bp, Homo sapien
aaacctgatcctgcataataatcgc

SEQ ID NO: 2964624 - DNA, 25 bp, Homo sapien
ttctttgtgagcctttgcagaacat

SEQ ID NO: 2964625 - DNA, 25 bp, Homo sapien
actacttatccccacaattctttgt

SEQ ID NO: 2964626 - DNA, 25 bp, Homo sapien
cataaggttgttgggcccccagatt

SEQ ID NO: 2964627 - DNA, 25 bp, Homo sapien
gtcgcgacgacacctcttttcaacg

SEQ ID NO: 2964628 - DNA, 25 bp, Homo sapien
gatcccagagtgctgcgttcctcaa

SEQ ID NO: 2964629 - DNA, 25 bp, Homo sapien
cacttgacacgatgtaaccctctgc

SEQ ID NO: 2964630 - DNA, 25 bp, Homo sapien
tctgcccggagctggaaccatgatc

SEQ ID NO: 2964631 - DNA, 25 bp, Homo sapien
cttgtagcaaggggagggggagctg

SEQ ID NO: 2964632 - DNA, 25 bp, Homo sapien
cgaggacgcgccctgatgacgtaga

SEQ ID NO: 2964633 - DNA, 25 bp, Homo sapien
gaaagacgaggacgcgccctgatga

SEQ ID NO: 2964634 - DNA, 25 bp, Homo sapien
ccctgatgacgtagaggtgtttact

SEQ ID NO: 2964635 - DNA, 25 bp, Homo sapien
gaggtgtttacttccgcgcgtgcga

SEQ ID NO: 2964636 - DNA, 25 bp, Homo sapien
agacctggccccgagtggaggcgag

SEQ ID NO: 2964637 - DNA, 25 bp, Homo sapien
ccgagtggaggcgagcacgtccacc

SEQ ID NO: 2964638 - DNA, 25 bp, Homo sapien
tggccccgagtggaggcgagcacgt

SEQ ID NO: 2964639 - DNA, 25 bp, Homo sapien
agtggaggcgagcacgtccaccgat

SEQ ID NO: 2964640 - DNA, 25 bp, Homo sapien
tcctggaggtctcttgaccgctcac

SEQ ID NO: 2964641 - DNA, 25 bp, Homo sapien
ctctatcggcgatgcaaacagccga

SEQ ID NO: 2964642 - DNA, 25 bp, Homo sapien
aaacagccgagagccgctcttcctg

SEQ ID NO: 2964643 - DNA, 25 bp, Homo sapien
ccgcgactgcgggaaaccgggacat

SEQ ID NO: 2964644 - DNA, 25 bp, Homo sapien
gcaaagttcgcctcgggcttggaaa

SEQ ID NO: 2964645 - DNA, 25 bp, Homo sapien
gaaagccaggagaacgccacggctt

SEQ ID NO: 2964646 - DNA, 25 bp, Homo sapien
taaggcaaagtgctcattggacgca

SEQ ID NO: 2964647 - DNA, 25 bp, Homo sapien
aaggttttcgcctaacttgaatctg

SEQ ID NO: 2964648 - DNA, 25 bp, Homo sapien
gagcgactgatatcccagaaggcca

SEQ ID NO: 2964649 - DNA, 25 bp, Homo sapien
cagaaggccaagtggtgggtaacca

SEQ ID NO: 2964650 - DNA, 25 bp, Homo sapien
ttaggtccctgttcagagcgactga

SEQ ID NO: 2964651 - DNA, 25 bp, Homo sapien
gattcatggttcaagttaggtccct

SEQ ID NO: 2964652 - DNA, 25 bp, Homo sapien
attgtccctcacagcttgaataatc

SEQ ID NO: 2964653 - DNA, 25 bp, Homo sapien
tcctgggacgtgcatcctttctctt

SEQ ID NO: 2964654 - DNA, 25 bp, Homo sapien
agttggagtagttcctccctcctgg

SEQ ID NO: 2964655 - DNA, 25 bp, Homo sapien
tgtccctcacagcttgaataatctt

SEQ ID NO: 2964656 - DNA, 25 bp, Homo sapien
catatagatattttgggagttgagt

SEQ ID NO: 2964657 - DNA, 25 bp, Homo sapien
tcatatagatattttgggagttgag

SEQ ID NO: 2964658 - DNA, 25 bp, Homo sapien
gaacttggtatcctactttggatcc

SEQ ID NO: 2964659 - DNA, 25 bp, Homo sapien
tgcaatcatcaaaacgaacttggta

SEQ ID NO: 2964660 - DNA, 25 bp, Homo sapien
tacttttcgtggttgagttacacca

SEQ ID NO: 2964661 - DNA, 25 bp, Homo sapien
tactctctgagcaactgatatagca

SEQ ID NO: 2964662 - DNA, 25 bp, Homo sapien
agtaaacatccatcagtcatatatt

SEQ ID NO: 2964663 - DNA, 25 bp, Homo sapien
tcagtaaacatccatcagtcatata

SEQ ID NO: 2964664 - DNA, 25 bp, Homo sapien
aaacatccatcagtcatatatttga

SEQ ID NO: 2964665 - DNA, 25 bp, Homo sapien
taaacatccatcagtcatatatttg

SEQ ID NO: 2964666 - DNA, 25 bp, Homo sapien
ggataaagccttccaggtatatcaa

SEQ ID NO: 2964667 - DNA, 25 bp, Homo sapien
catagttgctgacattaccaccact

SEQ ID NO: 2964668 - DNA, 25 bp, Homo sapien
tcaaatattggacaatttccaaaga

SEQ ID NO: 2964669 - DNA, 25 bp, Homo sapien
tccaaagaatgcagagagcttggct

SEQ ID NO: 2964670 - DNA, 25 bp, Homo sapien
tcgtggaccaatcaaattgcagaat

SEQ ID NO: 2964671 - DNA, 25 bp, Homo sapien
aaccaagatgtctccagccatttca

SEQ ID NO: 2964672 - DNA, 25 bp, Homo sapien
aaaccaagatgtctccagccatttc

SEQ ID NO: 2964673 - DNA, 25 bp, Homo sapien
accaagatgtctccagccatttcat

SEQ ID NO: 2964674 - DNA, 25 bp, Homo sapien
cggcaatattaacaagccatcgagg

SEQ ID NO: 2964675 - DNA, 25 bp, Homo sapien
gttgtcattgatccataacacggca

SEQ ID NO: 2964676 - DNA, 25 bp, Homo sapien
cataatcataatcaacagactctgc

SEQ ID NO: 2964677 - DNA, 25 bp, Homo sapien
tggtatcttgaacatcataatcata

SEQ ID NO: 2964678 - DNA, 25 bp, Homo sapien
gaaatattggtggatatgacacatt

SEQ ID NO: 2964679 - DNA, 25 bp, Homo sapien
tattgtcaaagacgttgcagaaata

SEQ ID NO: 2964680 - DNA, 25 bp, Homo sapien
tgtcaaagacgttgcagaaatattg

SEQ ID NO: 2964681 - DNA, 25 bp, Homo sapien
gcagaaatattggtggatatgacac

SEQ ID NO: 2964682 - DNA, 25 bp, Homo sapien
tggggttgtgatttaactgcttcac

SEQ ID NO: 2964683 - DNA, 25 bp, Homo sapien
taatctggggttgtgatttaactgc

SEQ ID NO: 2964684 - DNA, 25 bp, Homo sapien
acctccaggatgtccaaccctaatc

SEQ ID NO: 2964685 - DNA, 25 bp, Homo sapien
ccaggatgtccaaccctaatctggg

SEQ ID NO: 2964686 - DNA, 25 bp, Homo sapien
tctttactatagatccgaaagcatt

SEQ ID NO: 2964687 - DNA, 25 bp, Homo sapien
tatagatccgaaagcattttcctga

SEQ ID NO: 2964688 - DNA, 25 bp, Homo sapien
ggccacttcgctgtaatgcctcgct

SEQ ID NO: 2964689 - DNA, 25 bp, Homo sapien
aagaagtcctgccagctcggccact

SEQ ID NO: 2964690 - DNA, 25 bp, Homo sapien
tacagatgtcaaactagttctctta

SEQ ID NO: 2964691 - DNA, 25 bp, Homo sapien
gtatggcaaggcactttaaggtcag

SEQ ID NO: 2964692 - DNA, 25 bp, Homo sapien
cttatgacatcgtgtatggcaaggc

SEQ ID NO: 2964693 - DNA, 25 bp, Homo sapien
taaggtcagaactacagatgtcaaa

SEQ ID NO: 2964694 - DNA, 25 bp, Homo sapien
taattcccctaccatgtatgataga

SEQ ID NO: 2964695 - DNA, 25 bp, Homo sapien
gcacccggcctacaatacatatttg

SEQ ID NO: 2964696 - DNA, 25 bp, Homo sapien
cattccaaggcaattaagaccaaaa

SEQ ID NO: 2964697 - DNA, 25 bp, Homo sapien
gatagtactttcctccattaattcc

SEQ ID NO: 2964698 - DNA, 25 bp, Homo sapien
gctgctctgctatcctttgtgaata

SEQ ID NO: 2964699 - DNA, 25 bp, Homo sapien
tctgtcgtctatgaatcctatacca

SEQ ID NO: 2964700 - DNA, 25 bp, Homo sapien
tcattcttggttagaggctgctctg

SEQ ID NO: 2964701 - DNA, 25 bp, Homo sapien
tggcaaattggctttccaagagtat

SEQ ID NO: 2964702 - DNA, 25 bp, Homo sapien
aagtctctcattaggtggatccaaa

SEQ ID NO: 2964703 - DNA, 25 bp, Homo sapien
aaataagtctctcattaggtggatc

SEQ ID NO: 2964704 - DNA, 25 bp, Homo sapien
cattaggtggatccaaatagggaaa

SEQ ID NO: 2964705 - DNA, 25 bp, Homo sapien
tctcattaggtggatccaaataggg

SEQ ID NO: 2964706 - DNA, 25 bp, Homo sapien
caaaggaaactccaccatagacaaa

SEQ ID NO: 2964707 - DNA, 25 bp, Homo sapien
tagacaaacccaatctggtgacatg

SEQ ID NO: 2964708 - DNA, 25 bp, Homo sapien
caacattgctgctattggaagtagt

SEQ ID NO: 2964709 - DNA, 25 bp, Homo sapien
ggtctaatgaagacgttttccacag

SEQ ID NO: 2964710 - DNA, 25 bp, Homo sapien
tggctgcagacaaggtatactgttc

SEQ ID NO: 2964711 - DNA, 25 bp, Homo sapien
taataaattaatctggacccgacac

SEQ ID NO: 2964712 - DNA, 25 bp, Homo sapien
atgaaaggaaattaacgccgggctg

SEQ ID NO: 2964713 - DNA, 25 bp, Homo sapien
tctctaaggatgcaagggctaaact

SEQ ID NO: 2964714 - DNA, 25 bp, Homo sapien
agctagatctagcagaggcacaatg

SEQ ID NO: 2964715 - DNA, 25 bp, Homo sapien
cagaggcacaatgttgcctgaatcc

SEQ ID NO: 2964716 - DNA, 25 bp, Homo sapien
gcatttactatagaatacgatgtga

SEQ ID NO: 2964717 - DNA, 25 bp, Homo sapien
ctatcacagctagatctagcagagg

SEQ ID NO: 2964718 - DNA, 25 bp, Homo sapien
ttagctgccaattctcgatgtctct

SEQ ID NO: 2964719 - DNA, 25 bp, Homo sapien
tgatttgcattgttcaaagatgaca

SEQ ID NO: 2964720 - DNA, 25 bp, Homo sapien
atttgcattgttcaaagatgacagc

SEQ ID NO: 2964721 - DNA, 25 bp, Homo sapien
gctgccaattctcgatgtctctgtt

SEQ ID NO: 2964722 - DNA, 25 bp, Homo sapien
tgagcttccacacgaaatgcagaaa

SEQ ID NO: 2964723 - DNA, 25 bp, Homo sapien
ttccacacgaaatgcagaaaataag

SEQ ID NO: 2964724 - DNA, 25 bp, Homo sapien
tctcgaagttgagcttccacacgaa

SEQ ID NO: 2964725 - DNA, 25 bp, Homo sapien
gcttcctgattagttctcgaagttg

SEQ ID NO: 2964726 - DNA, 25 bp, Homo sapien
aaagacatcttcgtagtacttcatg

SEQ ID NO: 2964727 - DNA, 25 bp, Homo sapien
catgtttagggccttcaaaggtctc

SEQ ID NO: 2964728 - DNA, 25 bp, Homo sapien
caaaggtctcttttgggaaatcact

SEQ ID NO: 2964729 - DNA, 25 bp, Homo sapien
tgaaatagcccgcacaaagacatct

SEQ ID NO: 2964730 - DNA, 25 bp, Homo sapien
tatgttcttctgacgtggcctcaac

SEQ ID NO: 2964731 - DNA, 25 bp, Homo sapien
gacttctcaagatcaccagcgctaa

SEQ ID NO: 2964732 - DNA, 25 bp, Homo sapien
taatctatgagctttgagagccagg

SEQ ID NO: 2964733 - DNA, 25 bp, Homo sapien
tggcagatggatgtcccaagtcaag

SEQ ID NO: 2964734 - DNA, 25 bp, Homo sapien
gaaggatgaatgtgaactgggcttc

SEQ ID NO: 2964735 - DNA, 25 bp, Homo sapien
tgtgcaaaacgttctcccaacagat

SEQ ID NO: 2964736 - DNA, 25 bp, Homo sapien
tccattgtgcaaaacgttctcccaa

SEQ ID NO: 2964737 - DNA, 25 bp, Homo sapien
tgggcttccacgaccatccattgtg

SEQ ID NO: 2964738 - DNA, 25 bp, Homo sapien
ttttaatgatggtaactcaataacc

SEQ ID NO: 2964739 - DNA, 25 bp, Homo sapien
cacaggccaaccaatacccttatag

SEQ ID NO: 2964740 - DNA, 25 bp, Homo sapien
tcttcttcaaacaggaggcacaggc

SEQ ID NO: 2964741 - DNA, 25 bp, Homo sapien
ccaaatagtccaaatccttctcaat

SEQ ID NO: 2964742 - DNA, 25 bp, Homo sapien
tgcattaaattcatgcaacttgggt

SEQ ID NO: 2964743 - DNA, 25 bp, Homo sapien
tcataacggattgggcatacaattc

SEQ ID NO: 2964744 - DNA, 25 bp, Homo sapien
aagtctcttacccattcataacgga

SEQ ID NO: 2964745 - DNA, 25 bp, Homo sapien
catacaattcttgcgtagactttgg

SEQ ID NO: 2964746 - DNA, 25 bp, Homo sapien
tgtatgtgagctgaaaaactttctg

SEQ ID NO: 2964747 - DNA, 25 bp, Homo sapien
ccaaccagggtcctaattatttcat

SEQ ID NO: 2964748 - DNA, 25 bp, Homo sapien
ccttggatatacaaacttagccagg

SEQ ID NO: 2964749 - DNA, 25 bp, Homo sapien
tactactgggaagcagtatggcata

SEQ ID NO: 2964750 - DNA, 25 bp, Homo sapien
cgagcccgtgcatcagatatggatt

SEQ ID NO: 2964751 - DNA, 25 bp, Homo sapien
tttctctcaaggaaacgagcccgtg

SEQ ID NO: 2964752 - DNA, 25 bp, Homo sapien
tgtttcctttcgtgtgtcactgtgg

SEQ ID NO: 2964753 - DNA, 25 bp, Homo sapien
tctttaagacgtctttcgatattcc

SEQ ID NO: 2964754 - DNA, 25 bp, Homo sapien
cagcgtttgataccagttaaggcca

SEQ ID NO: 2964755 - DNA, 25 bp, Homo sapien
gtagtgctgtctgaaataactggca

SEQ ID NO: 2964756 - DNA, 25 bp, Homo sapien
tgcttcaatgcaaatggagtacacg

SEQ ID NO: 2964757 - DNA, 25 bp, Homo sapien
cacttcctgaattggagggttcacc

SEQ ID NO: 2964758 - DNA, 25 bp, Homo sapien
tagtgttgtctgcttcgaaaatccc

SEQ ID NO: 2964759 - DNA, 25 bp, Homo sapien
agtgtgatactaactagcctcaagg

SEQ ID NO: 2964760 - DNA, 25 bp, Homo sapien
ttcaagaaagaatcctgccataggc

SEQ ID NO: 2964761 - DNA, 25 bp, Homo sapien
gaaataacagagtaggccaggtgga

SEQ ID NO: 2964762 - DNA, 25 bp, Homo sapien
ctgcccacaaggagcgtataatcta

SEQ ID NO: 2964763 - DNA, 25 bp, Homo sapien
tgacactaatagctttatttaacaa

SEQ ID NO: 2964764 - DNA, 25 bp, Homo sapien
cactatgctaggtgcatgaaagata

SEQ ID NO: 2964765 - DNA, 25 bp, Homo sapien
ccacaaggagcgtataatctagtga

SEQ ID NO: 2964766 - DNA, 25 bp, Homo sapien
tatctgtaggaatgagtgacactca

SEQ ID NO: 2964767 - DNA, 25 bp, Homo sapien
gcagacacgtacacaatggcacatg

SEQ ID NO: 2964768 - DNA, 25 bp, Homo sapien
tccatttatcggcaaggcacggtgc

SEQ ID NO: 2964769 - DNA, 25 bp, Homo sapien
tacagaatggacattgcaaaaccct

SEQ ID NO: 2964770 - DNA, 25 bp, Homo sapien
gcagcattcatataagcctacctta

SEQ ID NO: 2964771 - DNA, 25 bp, Homo sapien
ccaccaaccagtcaaatatgtagtc

SEQ ID NO: 2964772 - DNA, 25 bp, Homo sapien
cattatccacaagggatatattcca

SEQ ID NO: 2964773 - DNA, 25 bp, Homo sapien
tattccaagacctctacagaggatg

SEQ ID NO: 2964774 - DNA, 25 bp, Homo sapien
taaggagcagcctatcaaatgccag

SEQ ID NO: 2964775 - DNA, 25 bp, Homo sapien
aagtcactgactatcggcaaggctc

SEQ ID NO: 2964776 - DNA, 25 bp, Homo sapien
aggctccccgctccaaaatgaagaa

SEQ ID NO: 2964777 - DNA, 25 bp, Homo sapien
tattttttcatgcaagataaggagc

SEQ ID NO: 2964778 - DNA, 25 bp, Homo sapien
caacataggttcctgtaggttagca

SEQ ID NO: 2964779 - DNA, 25 bp, Homo sapien
tagccgtgtatttcggtgggaccac

SEQ ID NO: 2964780 - DNA, 25 bp, Homo sapien
aaagagatgaactattagccgtgta

SEQ ID NO: 2964781 - DNA, 25 bp, Homo sapien
gcaggaggatttttagccacatcaa

SEQ ID NO: 2964782 - DNA, 25 bp, Homo sapien
gacgtcacttccgtgggcgctttag

SEQ ID NO: 2964783 - DNA, 25 bp, Homo sapien
tcgttttaaggaaatgcggcgtctc

SEQ ID NO: 2964784 - DNA, 25 bp, Homo sapien
attttgccacatcatgcgactcggg

SEQ ID NO: 2964785 - DNA, 25 bp, Homo sapien
tctccgtgactcagggaaacggcct

SEQ ID NO: 2964786 - DNA, 25 bp, Homo sapien
gcagcgcagactccggaaacggctg

SEQ ID NO: 2964787 - DNA, 25 bp, Homo sapien
aactggcaggcagacgaaagagctc

SEQ ID NO: 2964788 - DNA, 25 bp, Homo sapien
ccaggagagccgcaatggcggaacc

SEQ ID NO: 2964789 - DNA, 25 bp, Homo sapien
tctccggggacgcaggaaactggca

SEQ ID NO: 2964790 - DNA, 25 bp, Homo sapien
cgggggttatggtctcctcctgtca

SEQ ID NO: 2964791 - DNA, 25 bp, Homo sapien
atgctcctgaaaacgaattggcaga

SEQ ID NO: 2964792 - DNA, 25 bp, Homo sapien
tgctcctgaaaacgaattggcagaa

SEQ ID NO: 2964793 - DNA, 25 bp, Homo sapien
agctccgatactgctcgggcccaga

SEQ ID NO: 2964794 - DNA, 25 bp, Homo sapien
ctccagctccgatactgctcgggcc

SEQ ID NO: 2964795 - DNA, 25 bp, Homo sapien
ctccacctaccccaatcaccgacaa

SEQ ID NO: 2964796 - DNA, 25 bp, Homo sapien
cgcccctccagctccgatactgctc

SEQ ID NO: 2964797 - DNA, 25 bp, Homo sapien
tacctgctactactcgagaagacta

SEQ ID NO: 2964798 - DNA, 25 bp, Homo sapien
tccttagggagtttgaccgcacaca

SEQ ID NO: 2964799 - DNA, 25 bp, Homo sapien
cagggctctgttcaattccatgcga

SEQ ID NO: 2964800 - DNA, 25 bp, Homo sapien
gggttaagagccacaacatccccag

SEQ ID NO: 2964801 - DNA, 25 bp, Homo sapien
tatttcacgataaacaaacgacagt

SEQ ID NO: 2964802 - DNA, 25 bp, Homo sapien
tccaataggaaacaggataaagtcc

SEQ ID NO: 2964803 - DNA, 25 bp, Homo sapien
acaaacgacagtactactagaatca

SEQ ID NO: 2964804 - DNA, 25 bp, Homo sapien
taaacaattgtggtacattttgcaa

SEQ ID NO: 2964805 - DNA, 25 bp, Homo sapien
gtgtgcatcactgaggaactccaga

SEQ ID NO: 2964806 - DNA, 25 bp, Homo sapien
gaactaatattcgagtgcctgtaag

SEQ ID NO: 2964807 - DNA, 25 bp, Homo sapien
cccagtttcaacctagggtcatgaa

SEQ ID NO: 2964808 - DNA, 25 bp, Homo sapien
gaaaaactgtcatccctgagacccc

SEQ ID NO: 2964809 - DNA, 25 bp, Homo sapien
tgggaagttgaggctgtggtaagcc

SEQ ID NO: 2964810 - DNA, 25 bp, Homo sapien
agcctgggaagttgaggctgtggta

SEQ ID NO: 2964811 - DNA, 25 bp, Homo sapien
tgagaggatggctggagcctgggaa

SEQ ID NO: 2964812 - DNA, 25 bp, Homo sapien
cctgggaagttgaggctgtggtaag

SEQ ID NO: 2964813 - DNA, 25 bp, Homo sapien
gcaaattagcagttgctagcggatg

SEQ ID NO: 2964814 - DNA, 25 bp, Homo sapien
tatgtgagttttatcgcaattgaaa

SEQ ID NO: 2964815 - DNA, 25 bp, Homo sapien
tacaggtgttggctgcacgacactg

SEQ ID NO: 2964816 - DNA, 25 bp, Homo sapien
gaatgtttgcaacaccactagtcac

SEQ ID NO: 2964817 - DNA, 25 bp, Homo sapien
gacaacaggcattcaaacaaaaact

SEQ ID NO: 2964818 - DNA, 25 bp, Homo sapien
ccatataggcccaaataaggtactt

SEQ ID NO: 2964819 - DNA, 25 bp, Homo sapien
ttctagtgggcatgtcaaatggtgc

SEQ ID NO: 2964820 - DNA, 25 bp, Homo sapien
tggaaaacggtttcgtggtctctca

SEQ ID NO: 2964821 - DNA, 25 bp, Homo sapien
gatacacaatataagggagggcagg

SEQ ID NO: 2964822 - DNA, 25 bp, Homo sapien
tacagggatgtatgcctagcacaga

SEQ ID NO: 2964823 - DNA, 25 bp, Homo sapien
gaaacggaaacaatctgaaacagga

SEQ ID NO: 2964824 - DNA, 25 bp, Homo sapien
tcagtatacgtaacaggtacacagc

SEQ ID NO: 2964825 - DNA, 25 bp, Homo sapien
tcacttcattgagcccttcctggaa

SEQ ID NO: 2964826 - DNA, 25 bp, Homo sapien
ccactgtagagttaataggtcaaca

SEQ ID NO: 2964827 - DNA, 25 bp, Homo sapien
caaggactttagaagtgttaccact

SEQ ID NO: 2964828 - DNA, 25 bp, Homo sapien
tcagtcgcggtgaaaaaagatgctg

SEQ ID NO: 2964829 - DNA, 25 bp, Homo sapien
aaggagtttgcttcctaatgaatca

SEQ ID NO: 2964830 - DNA, 25 bp, Homo sapien
taaggagtttgcttcctaatgaatc

SEQ ID NO: 2964831 - DNA, 25 bp, Homo sapien
ctaaggagtttgcttcctaatgaat

SEQ ID NO: 2964832 - DNA, 25 bp, Homo sapien
aggagtttgcttcctaatgaatcat

SEQ ID NO: 2964833 - DNA, 25 bp, Homo sapien
ctgggccaattcgctttgttcacat

SEQ ID NO: 2964834 - DNA, 25 bp, Homo sapien
tgggccaattcgctttgttcacatg

SEQ ID NO: 2964835 - DNA, 25 bp, Homo sapien
gggccaattcgctttgttcacatgc

SEQ ID NO: 2964836 - DNA, 25 bp, Homo sapien
gccaattcgctttgttcacatgctc

SEQ ID NO: 2964837 - DNA, 25 bp, Homo sapien
acatttagggacaatgaggaaaata

SEQ ID NO: 2964838 - DNA, 25 bp, Homo sapien
agtatgagctttcttggattctgat

SEQ ID NO: 2964839 - DNA, 25 bp, Homo sapien
aaatatgaatatggactggttttct

SEQ ID NO: 2964840 - DNA, 25 bp, Homo sapien
gctttcttggattctgatttaaacc

SEQ ID NO: 2964841 - DNA, 25 bp, Homo sapien
cactatggaactaagcatggataaa

SEQ ID NO: 2964842 - DNA, 25 bp, Homo sapien
gaagctggagatatcctattttaac

SEQ ID NO: 2964843 - DNA, 25 bp, Homo sapien
aatgccattagtgttgaagctggag

SEQ ID NO: 2964844 - DNA, 25 bp, Homo sapien
aacattctctataaacttgcaggta

SEQ ID NO: 2964845 - DNA, 25 bp, Homo sapien
cagggtactgaagccaatgtttgct

SEQ ID NO: 2964846 - DNA, 25 bp, Homo sapien
tactgaagccaatgtttgctgggtt

SEQ ID NO: 2964847 - DNA, 25 bp, Homo sapien
ggtactgaagccaatgtttgctggg

SEQ ID NO: 2964848 - DNA, 25 bp, Homo sapien
agtcagggtactgaagccaatgttt

SEQ ID NO: 2964849 - DNA, 25 bp, Homo sapien
tgctgaaattggtcttcgaattgga

SEQ ID NO: 2964850 - DNA, 25 bp, Homo sapien
cattcatatcaatgattaccacctg

SEQ ID NO: 2964851 - DNA, 25 bp, Homo sapien
attggtcttcgaattggattacttg

SEQ ID NO: 2964852 - DNA, 25 bp, Homo sapien
catgatggcgctgtctgctgaaatt

SEQ ID NO: 2964853 - DNA, 25 bp, Homo sapien
gagactctccttccatactccagtg

SEQ ID NO: 2964854 - DNA, 25 bp, Homo sapien
cctgcaaggctagaatggcgatcaa

SEQ ID NO: 2964855 - DNA, 25 bp, Homo sapien
tctgtacggtaattgataatctggc

SEQ ID NO: 2964856 - DNA, 25 bp, Homo sapien
tgtgcagatataccagtcagaagta

SEQ ID NO: 2964857 - DNA, 25 bp, Homo sapien
tcaaaaactctcagattcatcaagt

SEQ ID NO: 2964858 - DNA, 25 bp, Homo sapien
taacgtttgaagacccataaatcaa

SEQ ID NO: 2964859 - DNA, 25 bp, Homo sapien
tgtcatctttagcaggatttataat

SEQ ID NO: 2964860 - DNA, 25 bp, Homo sapien
tataaaggatcaaagagaataacgt

SEQ ID NO: 2964861 - DNA, 25 bp, Homo sapien
tgcatagctcccaccacacgatttt

SEQ ID NO: 2964862 - DNA, 25 bp, Homo sapien
agcttggccccgaactgcaaaacaa

SEQ ID NO: 2964863 - DNA, 25 bp, Homo sapien
caatgggctgagacactttcctatc

SEQ ID NO: 2964864 - DNA, 25 bp, Homo sapien
taaactgtgcaaagctagctgcatg

SEQ ID NO: 2964865 - DNA, 25 bp, Homo sapien
ttaagtcaccacaaatgtgaatact

SEQ ID NO: 2964866 - DNA, 25 bp, Homo sapien
cttaggaagggagaaggctattttg

SEQ ID NO: 2964867 - DNA, 25 bp, Homo sapien
attagatgactaattcatagcagaa

SEQ ID NO: 2964868 - DNA, 25 bp, Homo sapien
ttttagacaagtatcactagatgca

SEQ ID NO: 2964869 - DNA, 25 bp, Homo sapien
cctgtaggtggtgtgccaacttcaa

SEQ ID NO: 2964870 - DNA, 25 bp, Homo sapien
ctgtaggtggtgtgccaacttcaat

SEQ ID NO: 2964871 - DNA, 25 bp, Homo sapien
agggctggttccctgtaggtggtgt

SEQ ID NO: 2964872 - DNA, 25 bp, Homo sapien
gtaggtggtgtgccaacttcaataa

SEQ ID NO: 2964873 - DNA, 25 bp, Homo sapien
gcattgcaacaggaaaatcattttg

SEQ ID NO: 2964874 - DNA, 25 bp, Homo sapien
aatcattttgtgcttctggaggaaa

SEQ ID NO: 2964875 - DNA, 25 bp, Homo sapien
ggaggaaagaagacatccactgcct

SEQ ID NO: 2964876 - DNA, 25 bp, Homo sapien
ctgcattgcaacaggaaaatcattt

SEQ ID NO: 2964877 - DNA, 25 bp, Homo sapien
gattaatattgctttcatgtctgcg

SEQ ID NO: 2964878 - DNA, 25 bp, Homo sapien
gaagccaatgctcatctgctattcc

SEQ ID NO: 2964879 - DNA, 25 bp, Homo sapien
tactttgcctatgctatagaaatgg

SEQ ID NO: 2964880 - DNA, 25 bp, Homo sapien
tggctttaatggacaggctgactct

SEQ ID NO: 2964881 - DNA, 25 bp, Homo sapien
ttttagagatggtaaaattccagaa

SEQ ID NO: 2964882 - DNA, 25 bp, Homo sapien
tttagagatggtaaaattccagaac

SEQ ID NO: 2964883 - DNA, 25 bp, Homo sapien
ctattcatgtagatgcaggtaccag

SEQ ID NO: 2964884 - DNA, 25 bp, Homo sapien
tagaggtggatataaccatacttgg

SEQ ID NO: 2964885 - DNA, 25 bp, Homo sapien
ccagtctcaagatcatagaggtgga

SEQ ID NO: 2964886 - DNA, 25 bp, Homo sapien
tgtggcttcatgaggtgcagtaaca

SEQ ID NO: 2964887 - DNA, 25 bp, Homo sapien
tggggagtaatttctcaaaaggaca

SEQ ID NO: 2964888 - DNA, 25 bp, Homo sapien
gttcccaactcatcaggttatctta

SEQ ID NO: 2964889 - DNA, 25 bp, Homo sapien
ctcatcaggttatcttattttattg

SEQ ID NO: 2964890 - DNA, 25 bp, Homo sapien
tttaatcttggggagtaatttctca

SEQ ID NO: 2964891 - DNA, 25 bp, Homo sapien
tgcttttgtcccagacactgactgg

SEQ ID NO: 2964892 - DNA, 25 bp, Homo sapien
tctaggagtacagagcaaaagcacc

SEQ ID NO: 2964893 - DNA, 25 bp, Homo sapien
ggatgcactccctttccctagagga

SEQ ID NO: 2964894 - DNA, 25 bp, Homo sapien
tagtgactgcaacagcttagcgagc

SEQ ID NO: 2964895 - DNA, 25 bp, Homo sapien
tagataggtaacagtctgccctgcc

SEQ ID NO: 2964896 - DNA, 25 bp, Homo sapien
gcttgccccaaaagctgaactactg

SEQ ID NO: 2964897 - DNA, 25 bp, Homo sapien
ccagtgcagaactagtcatatgccc

SEQ ID NO: 2964898 - DNA, 25 bp, Homo sapien
gaactactgtcaactgccatagaga

SEQ ID NO: 2964899 - DNA, 25 bp, Homo sapien
caggattttgtagaacattggtgat

SEQ ID NO: 2964900 - DNA, 25 bp, Homo sapien
tcagcaccggctaagttattacgta

SEQ ID NO: 2964901 - DNA, 25 bp, Homo sapien
tgctgcctccgagtaatttccctgg

SEQ ID NO: 2964902 - DNA, 25 bp, Homo sapien
aagagcattaaatttccgggcaaag

SEQ ID NO: 2964903 - DNA, 25 bp, Homo sapien
cactgtctttcatacccctggttca

SEQ ID NO: 2964904 - DNA, 25 bp, Homo sapien
tatagctaagtattatcccaagttc

SEQ ID NO: 2964905 - DNA, 25 bp, Homo sapien
tgtaaggtgttaattcagtccacca

SEQ ID NO: 2964906 - DNA, 25 bp, Homo sapien
gacagctctacccactataaaattg

SEQ ID NO: 2964907 - DNA, 25 bp, Homo sapien
ccgacggatagtgtctggagtacga

SEQ ID NO: 2964908 - DNA, 25 bp, Homo sapien
ctctggaaccgacggatagtgtctg

SEQ ID NO: 2964909 - DNA, 25 bp, Homo sapien
tagtgtctggagtacgaagaattcc

SEQ ID NO: 2964910 - DNA, 25 bp, Homo sapien
ctgggacactctggaaccgacggat

SEQ ID NO: 2964911 - DNA, 25 bp, Homo sapien
gattcgtatttgttgagctgtccct

SEQ ID NO: 2964912 - DNA, 25 bp, Homo sapien
ggcctacaaagctctaaggattcgt

SEQ ID NO: 2964913 - DNA, 25 bp, Homo sapien
gctgttttcgcccttgctgaagtac

SEQ ID NO: 2964914 - DNA, 25 bp, Homo sapien
tgaagtacaggcctacaaagctcta

SEQ ID NO: 2964915 - DNA, 25 bp, Homo sapien
taagtgccaatgtagggtccacaga

SEQ ID NO: 2964916 - DNA, 25 bp, Homo sapien
cacagatttcacaagatcacccagt

SEQ ID NO: 2964917 - DNA, 25 bp, Homo sapien
caatcttttggacttgacctgtttc

SEQ ID NO: 2964918 - DNA, 25 bp, Homo sapien
gacgttagcccttaggtacacacta

SEQ ID NO: 2964919 - DNA, 25 bp, Homo sapien
caaagacttaaacgctgctcctaag

SEQ ID NO: 2964920 - DNA, 25 bp, Homo sapien
aaacaaagacttaaacgctgctcct

SEQ ID NO: 2964921 - DNA, 25 bp, Homo sapien
gacttaaacgctgctcctaagtttc

SEQ ID NO: 2964922 - DNA, 25 bp, Homo sapien
taaacgctgctcctaagtttcaatt

SEQ ID NO: 2964923 - DNA, 25 bp, Homo sapien
caagaggctcttcatcttgaactaa

SEQ ID NO: 2964924 - DNA, 25 bp, Homo sapien
cttgaactaacatttgggcaaactg

SEQ ID NO: 2964925 - DNA, 25 bp, Homo sapien
tgtccctgatctggactgattcgca

SEQ ID NO: 2964926 - DNA, 25 bp, Homo sapien
atatccaatctggagtgtatccaac

SEQ ID NO: 2964927 - DNA, 25 bp, Homo sapien
tgaggcgcatgcataaggttcatct

SEQ ID NO: 2964928 - DNA, 25 bp, Homo sapien
ctgtaaaggaccttcagatgggcga

SEQ ID NO: 2964929 - DNA, 25 bp, Homo sapien
gattgtattccataaagacatctac

SEQ ID NO: 2964930 - DNA, 25 bp, Homo sapien
tcatctcaagtaaccgcgtctgtaa

SEQ ID NO: 2964931 - DNA, 25 bp, Homo sapien
tgagcccggtcataatgtgtgaaca

SEQ ID NO: 2964932 - DNA, 25 bp, Homo sapien
gaaccactgcacgttttatatcata

SEQ ID NO: 2964933 - DNA, 25 bp, Homo sapien
tgaaatgttctaatgcacgctgcag

SEQ ID NO: 2964934 - DNA, 25 bp, Homo sapien
cacagttgagcaatatgagcccggt

SEQ ID NO: 2964935 - DNA, 25 bp, Homo sapien
tctgcagattctgacggatgttggc

SEQ ID NO: 2964936 - DNA, 25 bp, Homo sapien
gcatggctctgagacattctaggga

SEQ ID NO: 2964937 - DNA, 25 bp, Homo sapien
tatttagaagccacctgaacacaaa

SEQ ID NO: 2964938 - DNA, 25 bp, Homo sapien
ctagggagtcttctactgataagga

SEQ ID NO: 2964939 - DNA, 25 bp, Homo sapien
acctcctaagtagctagaactacag

SEQ ID NO: 2964940 - DNA, 25 bp, Homo sapien
cctaagtagctagaactacagatgc

SEQ ID NO: 2964941 - DNA, 25 bp, Homo sapien
ctcctaagtagctagaactacagat

SEQ ID NO: 2964942 - DNA, 25 bp, Homo sapien
tagctagaactacagatgcatgcca

SEQ ID NO: 2964943 - DNA, 25 bp, Homo sapien
tgcccagtcttgcaagctgcctgaa

SEQ ID NO: 2964944 - DNA, 25 bp, Homo sapien
cgtagcagttgctttctctacagat

SEQ ID NO: 2964945 - DNA, 25 bp, Homo sapien
catctgggtcctggctaaagttaac

SEQ ID NO: 2964946 - DNA, 25 bp, Homo sapien
taagaaaattcttgactcgctcagg

SEQ ID NO: 2964947 - DNA, 25 bp, Homo sapien
taatccagcacacaacttaagaatg

SEQ ID NO: 2964948 - DNA, 25 bp, Homo sapien
ttgaactatgaccaaacccttgtag

SEQ ID NO: 2964949 - DNA, 25 bp, Homo sapien
ccttgtagaactgctaacctggaat

SEQ ID NO: 2964950 - DNA, 25 bp, Homo sapien
tgctaacaacttcacatttagggaa

SEQ ID NO: 2964951 - DNA, 25 bp, Homo sapien
taaatagagcaccaaatcatggaca

SEQ ID NO: 2964952 - DNA, 25 bp, Homo sapien
atcatggacaaagtcaaatcgatca

SEQ ID NO: 2964953 - DNA, 25 bp, Homo sapien
taagtggtagctgatctgttagttt

SEQ ID NO: 2964954 - DNA, 25 bp, Homo sapien
caaatcgatcacacacaatgataag

SEQ ID NO: 2964955 - DNA, 25 bp, Homo sapien
gagtctacatggatacctcagggtc

SEQ ID NO: 2964956 - DNA, 25 bp, Homo sapien
gcagaccactcttattgagcacaga

SEQ ID NO: 2964957 - DNA, 25 bp, Homo sapien
tatcaagttagtaaggccctaggcc

SEQ ID NO: 2964958 - DNA, 25 bp, Homo sapien
cctgagtcggcttgctagggaagca

SEQ ID NO: 2964959 - DNA, 25 bp, Homo sapien
gtaatcctccaataactacaggaag

SEQ ID NO: 2964960 - DNA, 25 bp, Homo sapien
gaacagtcaacatcaagtaatcctc

SEQ ID NO: 2964961 - DNA, 25 bp, Homo sapien
tcagcaacaagctcatcagtagaga

SEQ ID NO: 2964962 - DNA, 25 bp, Homo sapien
ctacaggaagtcgacttggattcac

SEQ ID NO: 2964963 - DNA, 25 bp, Homo sapien
caacaacgcgactgtcatagtaggg

SEQ ID NO: 2964964 - DNA, 25 bp, Homo sapien
gaattctggcctctagccaaggcag

SEQ ID NO: 2964965 - DNA, 25 bp, Homo sapien
tggccacgttcataagcaacacagg

SEQ ID NO: 2964966 - DNA, 25 bp, Homo sapien
taataagttccagatcacattggcc

SEQ ID NO: 2964967 - DNA, 25 bp, Homo sapien
caattctggatcctttcgacgtacc

SEQ ID NO: 2964968 - DNA, 25 bp, Homo sapien
cctgtaaggattgctttccagcagc

SEQ ID NO: 2964969 - DNA, 25 bp, Homo sapien
aagacttttgaagagggaattctca

SEQ ID NO: 2964970 - DNA, 25 bp, Homo sapien
taccaggtagcgagaaagacttttg

SEQ ID NO: 2964971 - DNA, 25 bp, Homo sapien
cttagaagtgcttcctaggaaagga

SEQ ID NO: 2964972 - DNA, 25 bp, Homo sapien
tagccttcaacctattcgtttccaa

SEQ ID NO: 2964973 - DNA, 25 bp, Homo sapien
gatataacactgatgcacttggtct

SEQ ID NO: 2964974 - DNA, 25 bp, Homo sapien
tttaaactatgatgaaccaagagag

SEQ ID NO: 2964975 - DNA, 25 bp, Homo sapien
tcctgagtctcagacaaagctgttt

SEQ ID NO: 2964976 - DNA, 25 bp, Homo sapien
tcaatgagttcattaggaaggtctg

SEQ ID NO: 2964977 - DNA, 25 bp, Homo sapien
tctgcagtcatgaaagcctttacag

SEQ ID NO: 2964978 - DNA, 25 bp, Homo sapien
gaaagcctttacagttactgacact

SEQ ID NO: 2964979 - DNA, 25 bp, Homo sapien
tatactccataacacgtgtacggtc

SEQ ID NO: 2964980 - DNA, 25 bp, Homo sapien
tgtacggtcagccttaattgcagtg

SEQ ID NO: 2964981 - DNA, 25 bp, Homo sapien
ttatccaggcggttaatatactcca

SEQ ID NO: 2964982 - DNA, 25 bp, Homo sapien
tcaaacagctcattgctgatggcga

SEQ ID NO: 2964983 - DNA, 25 bp, Homo sapien
gaccgcaggttcattgcaacgttca

SEQ ID NO: 2964984 - DNA, 25 bp, Homo sapien
gcctgaacaacttccatgtaggagg

SEQ ID NO: 2964985 - DNA, 25 bp, Homo sapien
tgcccgatccaagtttccaatatgc

SEQ ID NO: 2964986 - DNA, 25 bp, Homo sapien
ttgcaagttgactccagaccgcagg

SEQ ID NO: 2964987 - DNA, 25 bp, Homo sapien
aattcttctaactctgcaaggcggt

SEQ ID NO: 2964988 - DNA, 25 bp, Homo sapien
tatcagttctgtctccacataggac

SEQ ID NO: 2964989 - DNA, 25 bp, Homo sapien
tacgggccatctgcaagtacttcac

SEQ ID NO: 2964990 - DNA, 25 bp, Homo sapien
taggactctcgagccttcttacggg

SEQ ID NO: 2964991 - DNA, 25 bp, Homo sapien
caacagctgcctgatattcacccag

SEQ ID NO: 2964992 - DNA, 25 bp, Homo sapien
tttttcatcataacaacggtcacca

SEQ ID NO: 2964993 - DNA, 25 bp, Homo sapien
accagggtagatgccaaacgtccaa

SEQ ID NO: 2964994 - DNA, 25 bp, Homo sapien
catgttcgagtactgttagctttcc

SEQ ID NO: 2964995 - DNA, 25 bp, Homo sapien
caacaatatgaagtccacacatctg

SEQ ID NO: 2964996 - DNA, 25 bp, Homo sapien
ctgatagtagttgataagttcttct

SEQ ID NO: 2964997 - DNA, 25 bp, Homo sapien
catctgagcaagacggaattctttc

SEQ ID NO: 2964998 - DNA, 25 bp, Homo sapien
ttcccatctacacaggcgaagcaga

SEQ ID NO: 2964999 - DNA, 25 bp, Homo sapien
tgggaatattcactctagaccagaa

SEQ ID NO: 2965000 - DNA, 25 bp, Homo sapien
tgcttccaacatggtgatcagctct

SEQ ID NO: 2965001 - DNA, 25 bp, Homo sapien
tctgaggcttaaatttagagtatag

SEQ ID NO: 2965002 - DNA, 25 bp, Homo sapien
aacattcccatgtgagctcgctcaa

SEQ ID NO: 2965003 - DNA, 25 bp, Homo sapien
aattatggcattatcatattcttca

SEQ ID NO: 2965004 - DNA, 25 bp, Homo sapien
ggtaattatggcattatcatattct

SEQ ID NO: 2965005 - DNA, 25 bp, Homo sapien
cttgtcatacaaaaacaccagttct

SEQ ID NO: 2965006 - DNA, 25 bp, Homo sapien
tggtaattatggcattatcatattc

SEQ ID NO: 2965007 - DNA, 25 bp, Homo sapien
atgatatctttgaattgcccttctt

SEQ ID NO: 2965008 - DNA, 25 bp, Homo sapien
tctgtagtatagttccacattggca

SEQ ID NO: 2965009 - DNA, 25 bp, Homo sapien
aattctaagtagaactgtattgctc

SEQ ID NO: 2965010 - DNA, 25 bp, Homo sapien
ggagacagcaccatcagcaaatcat

SEQ ID NO: 2965011 - DNA, 25 bp, Homo sapien
taattgactgcacgagtgtgatcca

SEQ ID NO: 2965012 - DNA, 25 bp, Homo sapien
gaactgaacgcaaatacggtttcac

SEQ ID NO: 2965013 - DNA, 25 bp, Homo sapien
gattgttcaatgattcattcacaga

SEQ ID NO: 2965014 - DNA, 25 bp, Homo sapien
gtttcaccagtggtagctgtttaac

SEQ ID NO: 2965015 - DNA, 25 bp, Homo sapien
cagatttgttgttatggttctgaac

SEQ ID NO: 2965016 - DNA, 25 bp, Homo sapien
gaattagttaagtggtcaaagacat

SEQ ID NO: 2965017 - DNA, 25 bp, Homo sapien
gactctacctacaatctagatgtta

SEQ ID NO: 2965018 - DNA, 25 bp, Homo sapien
tacagatctgcatgcgctgagcctc

SEQ ID NO: 2965019 - DNA, 25 bp, Homo sapien
tttagatcctaggtatgcaagcacc

SEQ ID NO: 2965020 - DNA, 25 bp, Homo sapien
tccagcgattgttgcctttgaagag

SEQ ID NO: 2965021 - DNA, 25 bp, Homo sapien
tctgtttccagcgattgttgccttt

SEQ ID NO: 2965022 - DNA, 25 bp, Homo sapien
gctgagcaagcgagatattgtcaaa

SEQ ID NO: 2965023 - DNA, 25 bp, Homo sapien
caattctcctgaactcaatgagttc

SEQ ID NO: 2965024 - DNA, 25 bp, Homo sapien
tttgaccttaacataagagagcccc

SEQ ID NO: 2965025 - DNA, 25 bp, Homo sapien
gagagcccctagaatcaagaaatcc

SEQ ID NO: 2965026 - DNA, 25 bp, Homo sapien
cattagaccccacatactgaactag

SEQ ID NO: 2965027 - DNA, 25 bp, Homo sapien
tgccttaaagtcagctctcatattc

SEQ ID NO: 2965028 - DNA, 25 bp, Homo sapien
gacctggatgaaatagggcatggca

SEQ ID NO: 2965029 - DNA, 25 bp, Homo sapien
cgtaacaggtaaacagacaagctcc

SEQ ID NO: 2965030 - DNA, 25 bp, Homo sapien
gcaggagttcttcagccaattcagt

SEQ ID NO: 2965031 - DNA, 25 bp, Homo sapien
gcagtttctaggacgacatctggcc

SEQ ID NO: 2965032 - DNA, 25 bp, Homo sapien
cagctacatttgagttccccttcca

SEQ ID NO: 2965033 - DNA, 25 bp, Homo sapien
aatacactgagggtaaacagctaca

SEQ ID NO: 2965034 - DNA, 25 bp, Homo sapien
tatgatcgactaaatgacttacttc

SEQ ID NO: 2965035 - DNA, 25 bp, Homo sapien
taaaagggaatctacaatactagtc

SEQ ID NO: 2965036 - DNA, 25 bp, Homo sapien
ccttagacttagtcctccagactta

SEQ ID NO: 2965037 - DNA, 25 bp, Homo sapien
aacatcatgcaaattccttagactt

SEQ ID NO: 2965038 - DNA, 25 bp, Homo sapien
tgcaaattccttagacttagtcctc

SEQ ID NO: 2965039 - DNA, 25 bp, Homo sapien
tagacttagtcctccagacttaaag

SEQ ID NO: 2965040 - DNA, 25 bp, Homo sapien
gaggaaagtctcttcggaagcagct

SEQ ID NO: 2965041 - DNA, 25 bp, Homo sapien
cagcaaaaaattagtaagaatcaag

SEQ ID NO: 2965042 - DNA, 25 bp, Homo sapien
gcagctagtatctctcgtatctact

SEQ ID NO: 2965043 - DNA, 25 bp, Homo sapien
tctcttcggaagcagctagtatctc

SEQ ID NO: 2965044 - DNA, 25 bp, Homo sapien
caggtttgccctaagttccagtggt

SEQ ID NO: 2965045 - DNA, 25 bp, Homo sapien
gcaagcttggctctcatgattaaaa

SEQ ID NO: 2965046 - DNA, 25 bp, Homo sapien
gaatttgacatccttggacaagcca

SEQ ID NO: 2965047 - DNA, 25 bp, Homo sapien
caaattttaggtagcttcagaggta

SEQ ID NO: 2965048 - DNA, 25 bp, Homo sapien
gtaagcatgtcaatgaattcagttc

SEQ ID NO: 2965049 - DNA, 25 bp, Homo sapien
tccatctgtactactgaaaattcac

SEQ ID NO: 2965050 - DNA, 25 bp, Homo sapien
attcagttccatctgtactactgaa

SEQ ID NO: 2965051 - DNA, 25 bp, Homo sapien
gcttttccacaaagactgcaatgtg

SEQ ID NO: 2965052 - DNA, 25 bp, Homo sapien
tatgctagctactcttcaaagtgga

SEQ ID NO: 2965053 - DNA, 25 bp, Homo sapien
aatgttcatacttcagtccaggtgg

SEQ ID NO: 2965054 - DNA, 25 bp, Homo sapien
agaagtgacattacaaccctgggac

SEQ ID NO: 2965055 - DNA, 25 bp, Homo sapien
gaagtttaagattcaagtggctcca

SEQ ID NO: 2965056 - DNA, 25 bp, Homo sapien
attctgaagcatctaatttatccac

SEQ ID NO: 2965057 - DNA, 25 bp, Homo sapien
gattctgaagcatctaatttatcca

SEQ ID NO: 2965058 - DNA, 25 bp, Homo sapien
ggcacagtctctaagtaattaaata

SEQ ID NO: 2965059 - DNA, 25 bp, Homo sapien
cactttagaagcttgttgtattcta

SEQ ID NO: 2965060 - DNA, 25 bp, Homo sapien
ctttagaagcttgttgtattctatt

SEQ ID NO: 2965061 - DNA, 25 bp, Homo sapien
tgcactttagaagcttgttgtattc

SEQ ID NO: 2965062 - DNA, 25 bp, Homo sapien
catgacctgtagagaacttggctta

SEQ ID NO: 2965063 - DNA, 25 bp, Homo sapien
gatcaagatttctcctacacaaagg

SEQ ID NO: 2965064 - DNA, 25 bp, Homo sapien
gtggttaacaaccaaagctgtcttc

SEQ ID NO: 2965065 - DNA, 25 bp, Homo sapien
tagagagcgaaaacaagtaacacct

SEQ ID NO: 2965066 - DNA, 25 bp, Homo sapien
ggagggacggcaacactgggtcctg

SEQ ID NO: 2965067 - DNA, 25 bp, Homo sapien
tgctgtcagcatcaactggggctga

SEQ ID NO: 2965068 - DNA, 25 bp, Homo sapien
ggtggtgcggtataaccataaccaa

SEQ ID NO: 2965069 - DNA, 25 bp, Homo sapien
gtggtgcggtataaccataaccaaa

SEQ ID NO: 2965070 - DNA, 25 bp, Homo sapien
aaagccaggctgtggctgtccatac

SEQ ID NO: 2965071 - DNA, 25 bp, Homo sapien
cccaaagccaggctgtggctgtcca

SEQ ID NO: 2965072 - DNA, 25 bp, Homo sapien
atgctgtacccaaagccaggctgtg

SEQ ID NO: 2965073 - DNA, 25 bp, Homo sapien
tgctgtacccaaagccaggctgtgg

SEQ ID NO: 2965074 - DNA, 25 bp, Homo sapien
aaataggtgactacaggatcagcgc

SEQ ID NO: 2965075 - DNA, 25 bp, Homo sapien
tgcaaatcaggttcttcacaacaga

SEQ ID NO: 2965076 - DNA, 25 bp, Homo sapien
ggtaaagacgatgtttcagtacgaa

SEQ ID NO: 2965077 - DNA, 25 bp, Homo sapien
aaaggttacaagaacacgttgcctg

SEQ ID NO: 2965078 - DNA, 25 bp, Homo sapien
tctttgctcctgaatggaatggtcc

SEQ ID NO: 2965079 - DNA, 25 bp, Homo sapien
taatctgggaagcactgcaatccag

SEQ ID NO: 2965080 - DNA, 25 bp, Homo sapien
taagggcacctgttacatatgaagt

SEQ ID NO: 2965081 - DNA, 25 bp, Homo sapien
caggatacagcacaacataagggca

SEQ ID NO: 2965082 - DNA, 25 bp, Homo sapien
cctcggtgtcacttggttaaaatat

SEQ ID NO: 2965083 - DNA, 25 bp, Homo sapien
tgttaatgaactacaggaatgcaca

SEQ ID NO: 2965084 - DNA, 25 bp, Homo sapien
taagccactatagtagtgactctgg

SEQ ID NO: 2965085 - DNA, 25 bp, Homo sapien
tgaaatgcttcgataaaaacctcgg

SEQ ID NO: 2965086 - DNA, 25 bp, Homo sapien
atttgggcacctttataattcatga

SEQ ID NO: 2965087 - DNA, 25 bp, Homo sapien
ggcacctttataattcatgatgaga

SEQ ID NO: 2965088 - DNA, 25 bp, Homo sapien
tttataattcatgatgagaaagagc

SEQ ID NO: 2965089 - DNA, 25 bp, Homo sapien
tataattcatgatgagaaagagcat

SEQ ID NO: 2965090 - DNA, 25 bp, Homo sapien
tcagtgctaagtgcatgattctggc

SEQ ID NO: 2965091 - DNA, 25 bp, Homo sapien
tagtggcattcccaacaggatggca

SEQ ID NO: 2965092 - DNA, 25 bp, Homo sapien
cacaggcatatgacagcacaggaga

SEQ ID NO: 2965093 - DNA, 25 bp, Homo sapien
tgtcatggcatatctactaaaagga

SEQ ID NO: 2965094 - DNA, 25 bp, Homo sapien
gaccccggctgctccggatctcagg

SEQ ID NO: 2965095 - DNA, 25 bp, Homo sapien
tgctccttacggactctcacacccg

SEQ ID NO: 2965096 - DNA, 25 bp, Homo sapien
gccgctgggctccagacaaccggaa

SEQ ID NO: 2965097 - DNA, 25 bp, Homo sapien
agacaaccggaacccgctcacgtca

SEQ ID NO: 2965098 - DNA, 25 bp, Homo sapien
aatgtccgggtgaccaaccatgaga

SEQ ID NO: 2965099 - DNA, 25 bp, Homo sapien
caatgcctaagtgggagagctccgg

SEQ ID NO: 2965100 - DNA, 25 bp, Homo sapien
tagcaaggcttccaagtacgcggag

SEQ ID NO: 2965101 - DNA, 25 bp, Homo sapien
gacatcccgggactaagaggttctc

SEQ ID NO: 2965102 - DNA, 25 bp, Homo sapien
tggtcaggctgttatcaaatgcctt

SEQ ID NO: 2965103 - DNA, 25 bp, Homo sapien
ggtcaggctgttatcaaatgcctta

SEQ ID NO: 2965104 - DNA, 25 bp, Homo sapien
ctgagtccaggagcttgaggttgca

SEQ ID NO: 2965105 - DNA, 25 bp, Homo sapien
gtgagctatgattgtggcactgcac

SEQ ID NO: 2965106 - DNA, 25 bp, Homo sapien
cagtgagctatgattgtggcactgc

SEQ ID NO: 2965107 - DNA, 25 bp, Homo sapien
tgcagtgagctatgattgtggcact

SEQ ID NO: 2965108 - DNA, 25 bp, Homo sapien
tgagagaattcaccaatcccactac

SEQ ID NO: 2965109 - DNA, 25 bp, Homo sapien
ggcatgaaccatatccagccctgtt

SEQ ID NO: 2965110 - DNA, 25 bp, Homo sapien
gaaccatatccagccctgttacatt

SEQ ID NO: 2965111 - DNA, 25 bp, Homo sapien
tcccactactattaagcctactaaa

SEQ ID NO: 2965112 - DNA, 25 bp, Homo sapien
ctaatacagcaaaataaaatccagc

SEQ ID NO: 2965113 - DNA, 25 bp, Homo sapien
ataaaatccagcaatacattacaaa

SEQ ID NO: 2965114 - DNA, 25 bp, Homo sapien
agcaaaataaaatccagcaatacat

SEQ ID NO: 2965115 - DNA, 25 bp, Homo sapien
aaataaaatccagcaatacattaca

SEQ ID NO: 2965116 - DNA, 25 bp, Homo sapien
tcatagatcagtaactcttgaggag

SEQ ID NO: 2965117 - DNA, 25 bp, Homo sapien
ttcatagatcagtaactcttgagga

SEQ ID NO: 2965118 - DNA, 25 bp, Homo sapien
ttgttcattgctacacgtctctggt

SEQ ID NO: 2965119 - DNA, 25 bp, Homo sapien
tttccattatgatgttccttgttca

SEQ ID NO: 2965120 - DNA, 25 bp, Homo sapien
tatgatgttccttgttcattgctac

SEQ ID NO: 2965121 - DNA, 25 bp, Homo sapien
ttgctacacgtctctggtcacaatt

SEQ ID NO: 2965122 - DNA, 25 bp, Homo sapien
ttacaaggatttccagagaaaaata

SEQ ID NO: 2965123 - DNA, 25 bp, Homo sapien
ctgcaaggtaatgagcggctgtctc

SEQ ID NO: 2965124 - DNA, 25 bp, Homo sapien
tgcaaggtaatgagcggctgtctcc

SEQ ID NO: 2965125 - DNA, 25 bp, Homo sapien
tttgaggtccattccttcaagatta

SEQ ID NO: 2965126 - DNA, 25 bp, Homo sapien
cctatggtaatattctaaaggtaat

SEQ ID NO: 2965127 - DNA, 25 bp, Homo sapien
ccattttgatggagtagagggcaga

SEQ ID NO: 2965128 - DNA, 25 bp, Homo sapien
gaaagtaagagattactgaggattt

SEQ ID NO: 2965129 - DNA, 25 bp, Homo sapien
aatgaggtgtatgtaaaaggtagtg

SEQ ID NO: 2965130 - DNA, 25 bp, Homo sapien
cctggcctaaaatgtttataataat

SEQ ID NO: 2965131 - DNA, 25 bp, Homo sapien
cgcctggcctaaaatgtttataata

SEQ ID NO: 2965132 - DNA, 25 bp, Homo sapien
tgttttaccttctttatggagttgc

SEQ ID NO: 2965133 - DNA, 25 bp, Homo sapien
accttctttatggagttgccctaag

SEQ ID NO: 2965134 - DNA, 25 bp, Homo sapien
caccacaatgctttgacgatgccat

SEQ ID NO: 2965135 - DNA, 25 bp, Homo sapien
gacaccacaatgctttgacgatgcc

SEQ ID NO: 2965136 - DNA, 25 bp, Homo sapien
aaagacaccacaatgctttgacgat

SEQ ID NO: 2965137 - DNA, 25 bp, Homo sapien
cacaatgctttgacgatgccataat

SEQ ID NO: 2965138 - DNA, 25 bp, Homo sapien
gttgatgcactccttcaacataata

SEQ ID NO: 2965139 - DNA, 25 bp, Homo sapien
ctgttgatgcactccttcaacataa

SEQ ID NO: 2965140 - DNA, 25 bp, Homo sapien
gatgcactccttcaacataatacgt

SEQ ID NO: 2965141 - DNA, 25 bp, Homo sapien
tgcactccttcaacataatacgtag

SEQ ID NO: 2965142 - DNA, 25 bp, Homo sapien
gttaacaaagcatcctattttccca

SEQ ID NO: 2965143 - DNA, 25 bp, Homo sapien
aatgttgtacatgtagactacaggc

SEQ ID NO: 2965144 - DNA, 25 bp, Homo sapien
gactacaggcaaatgaacctgtctt

SEQ ID NO: 2965145 - DNA, 25 bp, Homo sapien
ataccattctagagtcatttcagtg

SEQ ID NO: 2965146 - DNA, 25 bp, Homo sapien
tccagtaggcatacaaaagaaactg

SEQ ID NO: 2965147 - DNA, 25 bp, Homo sapien
ctgttccaagcccaacagaagacaa

SEQ ID NO: 2965148 - DNA, 25 bp, Homo sapien
gacaaaattcctaagcctatccagt

SEQ ID NO: 2965149 - DNA, 25 bp, Homo sapien
gaaactgtttctctatacgttgcac

SEQ ID NO: 2965150 - DNA, 25 bp, Homo sapien
ctcagcatcctgagtatgtgggact

SEQ ID NO: 2965151 - DNA, 25 bp, Homo sapien
gtggcgccatctccactcactggaa

SEQ ID NO: 2965152 - DNA, 25 bp, Homo sapien
cagcatcctgagtatgtgggactac

SEQ ID NO: 2965153 - DNA, 25 bp, Homo sapien
ggcgccatctccactcactggaagc

SEQ ID NO: 2965154 - DNA, 25 bp, Homo sapien
cacctcccaggttcacatcactctc

SEQ ID NO: 2965155 - DNA, 25 bp, Homo sapien
acctcccaggttcacatcactctcc

SEQ ID NO: 2965156 - DNA, 25 bp, Homo sapien
ccatgcctggactttatttcttttt

SEQ ID NO: 2965157 - DNA, 25 bp, Homo sapien
cctggtctcaagcagggatccttcc

SEQ ID NO: 2965158 - DNA, 25 bp, Homo sapien
tggtctcaagcagggatccttcctt

SEQ ID NO: 2965159 - DNA, 25 bp, Homo sapien
gtctcaagcagggatccttccttgg

SEQ ID NO: 2965160 - DNA, 25 bp, Homo sapien
aatgttagctgcctatcagtcagga

SEQ ID NO: 2965161 - DNA, 25 bp, Homo sapien
gatcactaatcagcaagaaaatggc

SEQ ID NO: 2965162 - DNA, 25 bp, Homo sapien
tagcttggctcttgggaggcctaag

SEQ ID NO: 2965163 - DNA, 25 bp, Homo sapien
gatgctcacagagactaccacctag

SEQ ID NO: 2965164 - DNA, 25 bp, Homo sapien
taagtgaggattatgttaagcctgg

SEQ ID NO: 2965165 - DNA, 25 bp, Homo sapien
cacatttccctaagtgaggattatg

SEQ ID NO: 2965166 - DNA, 25 bp, Homo sapien
gaatgtcacatttccctaagtgagg

SEQ ID NO: 2965167 - DNA, 25 bp, Homo sapien
atgagaatgtcacatttccctaagt

SEQ ID NO: 2965168 - DNA, 25 bp, Homo sapien
tgtctcttccggtgtactactgtca

SEQ ID NO: 2965169 - DNA, 25 bp, Homo sapien
tagctctctcattaaggctcccagg

SEQ ID NO: 2965170 - DNA, 25 bp, Homo sapien
gggttaacaaactacaaactgcaga

SEQ ID NO: 2965171 - DNA, 25 bp, Homo sapien
tgggtgaaccaaatacacagatgtc

SEQ ID NO: 2965172 - DNA, 25 bp, Homo sapien
gatgttacagcttctaataaaacct

SEQ ID NO: 2965173 - DNA, 25 bp, Homo sapien
tctacaatgtaactgaatagttccc

SEQ ID NO: 2965174 - DNA, 25 bp, Homo sapien
gggcacgtatctcacaattttcttt

SEQ ID NO: 2965175 - DNA, 25 bp, Homo sapien
taaaacctgatctattctacaatgt

SEQ ID NO: 2965176 - DNA, 25 bp, Homo sapien
taactacattaattgcaaatggacc

SEQ ID NO: 2965177 - DNA, 25 bp, Homo sapien
taattgcaaatggaccaaatgtata

SEQ ID NO: 2965178 - DNA, 25 bp, Homo sapien
tcacactggattagtacacgctgtc

SEQ ID NO: 2965179 - DNA, 25 bp, Homo sapien
ggtagacttaaacccaatcatattg

SEQ ID NO: 2965180 - DNA, 25 bp, Homo sapien
tctcacggcggatgaagtaacggat

SEQ ID NO: 2965181 - DNA, 25 bp, Homo sapien
gagcagcaggttccaactcttgtgg

SEQ ID NO: 2965182 - DNA, 25 bp, Homo sapien
tgtctgtagacacattccatgcctg

SEQ ID NO: 2965183 - DNA, 25 bp, Homo sapien
tgaagaaaccatacattgactctgg

SEQ ID NO: 2965184 - DNA, 25 bp, Homo sapien
taatctgatcaggatagggtggttc

SEQ ID NO: 2965185 - DNA, 25 bp, Homo sapien
atgtaactgaggctatatgtggacc

SEQ ID NO: 2965186 - DNA, 25 bp, Homo sapien
gcaggcttcaatcctaacttttgag

SEQ ID NO: 2965187 - DNA, 25 bp, Homo sapien
taactgaattgcattcataagcagc

SEQ ID NO: 2965188 - DNA, 25 bp, Homo sapien
taggtagctggttactgactgaatc

SEQ ID NO: 2965189 - DNA, 25 bp, Homo sapien
gactgaatcatttactgacaaggaa

SEQ ID NO: 2965190 - DNA, 25 bp, Homo sapien
tcatgaataggagatgctctaaaag

SEQ ID NO: 2965191 - DNA, 25 bp, Homo sapien
taaggtacacacactatcaagatgg

SEQ ID NO: 2965192 - DNA, 25 bp, Homo sapien
tattgacattcctatactacatgga

SEQ ID NO: 2965193 - DNA, 25 bp, Homo sapien
tataacgagacagttacaaagaagg

SEQ ID NO: 2965194 - DNA, 25 bp, Homo sapien
aagactgtccttgtaaatgttgaga

SEQ ID NO: 2965195 - DNA, 25 bp, Homo sapien
aatttaaacataacttagtgtgtgc

SEQ ID NO: 2965196 - DNA, 25 bp, Homo sapien
ggaggcagctctccgattgctgtac

SEQ ID NO: 2965197 - DNA, 25 bp, Homo sapien
ttcagcacctgagaggcgagctgct

SEQ ID NO: 2965198 - DNA, 25 bp, Homo sapien
ctgagaggcgagctgctctggccat

SEQ ID NO: 2965199 - DNA, 25 bp, Homo sapien
gctctccgattgctgtaccgatacc

SEQ ID NO: 2965200 - DNA, 25 bp, Homo sapien
tctattttctatccccactgttctt

SEQ ID NO: 2965201 - DNA, 25 bp, Homo sapien
gttctattttctatccccactgttc

SEQ ID NO: 2965202 - DNA, 25 bp, Homo sapien
gtgttctattttctatccccactgt

SEQ ID NO: 2965203 - DNA, 25 bp, Homo sapien
cttaatagcctctttaggaagaagt

SEQ ID NO: 2965204 - DNA, 25 bp, Homo sapien
tcattaatctgactgaggcaaaggc

SEQ ID NO: 2965205 - DNA, 25 bp, Homo sapien
cattaatctgactgaggcaaaggca

SEQ ID NO: 2965206 - DNA, 25 bp, Homo sapien
agcagaactgccagaagaggctggc

SEQ ID NO: 2965207 - DNA, 25 bp, Homo sapien
gaactgccagaagaggctggcatag

SEQ ID NO: 2965208 - DNA, 25 bp, Homo sapien
actgccagaagaggctggcataggt

SEQ ID NO: 2965209 - DNA, 25 bp, Homo sapien
tcagcagaactgccagaagaggctg

SEQ ID NO: 2965210 - DNA, 25 bp, Homo sapien
gattattaccccaacagtagataga

SEQ ID NO: 2965211 - DNA, 25 bp, Homo sapien
gcattctggtttccacgactcaaag

SEQ ID NO: 2965212 - DNA, 25 bp, Homo sapien
taactaatcagggacataagagatg

SEQ ID NO: 2965213 - DNA, 25 bp, Homo sapien
tagccaaacctcataaccaacagaa

SEQ ID NO: 2965214 - DNA, 25 bp, Homo sapien
tatgatactgtgaaaaaggaacttg

SEQ ID NO: 2965215 - DNA, 25 bp, Homo sapien
gaatacagtgattattaccctacac

SEQ ID NO: 2965216 - DNA, 25 bp, Homo sapien
tgccaagccatagcaagaaactctc

SEQ ID NO: 2965217 - DNA, 25 bp, Homo sapien
gaaaagactaaagggcactcaccaa

SEQ ID NO: 2965218 - DNA, 25 bp, Homo sapien
gaataaacaagtcacaagaatcttc

SEQ ID NO: 2965219 - DNA, 25 bp, Homo sapien
ggttatacagcttatagaataaaca

SEQ ID NO: 2965220 - DNA, 25 bp, Homo sapien
ttactcaatgtgaattaaaatttgc

SEQ ID NO: 2965221 - DNA, 25 bp, Homo sapien
aaaagttgttttactcaatgtgaat

SEQ ID NO: 2965222 - DNA, 25 bp, Homo sapien
tttctgtggaactcctgacgcaaca

SEQ ID NO: 2965223 - DNA, 25 bp, Homo sapien
tgacgcaacacaaaccataacagtt

SEQ ID NO: 2965224 - DNA, 25 bp, Homo sapien
tttgcaaacaagcaagagatcctgc

SEQ ID NO: 2965225 - DNA, 25 bp, Homo sapien
tgcaaaccctctagagtccacgctg

SEQ ID NO: 2965226 - DNA, 25 bp, Homo sapien
ctcactaaaatgtacgcctcccggg

SEQ ID NO: 2965227 - DNA, 25 bp, Homo sapien
tggactgcattaacctcgtattttc

SEQ ID NO: 2965228 - DNA, 25 bp, Homo sapien
ttttttccctgctaatgactggact

SEQ ID NO: 2965229 - DNA, 25 bp, Homo sapien
gggactaccggagctctccaacatg

SEQ ID NO: 2965230 - DNA, 25 bp, Homo sapien
gagccatggcgcccggcccaaaagg

SEQ ID NO: 2965231 - DNA, 25 bp, Homo sapien
agccatggcgcccggcccaaaaggg

SEQ ID NO: 2965232 - DNA, 25 bp, Homo sapien
tgagccatggcgcccggcccaaaag

SEQ ID NO: 2965233 - DNA, 25 bp, Homo sapien
gaaggatggatgaaacctacaaagc

SEQ ID NO: 2965234 - DNA, 25 bp, Homo sapien
ctaaataggacagtcaggaaaggct

SEQ ID NO: 2965235 - DNA, 25 bp, Homo sapien
ggtcatgctgacaatctatgagaag

SEQ ID NO: 2965236 - DNA, 25 bp, Homo sapien
tcagagaaaaggtgatccaaaacat

SEQ ID NO: 2965237 - DNA, 25 bp, Homo sapien
tccaaagatgagaacatagtgattc

SEQ ID NO: 2965238 - DNA, 25 bp, Homo sapien
tcattccgtatatgtttaaaaagtg

SEQ ID NO: 2965239 - DNA, 25 bp, Homo sapien
atgtgcaaggtaataaagaatccaa

SEQ ID NO: 2965240 - DNA, 25 bp, Homo sapien
gaataaacctgataactactatgtg

SEQ ID NO: 2965241 - DNA, 25 bp, Homo sapien
ggagctatcaactatttctgggtca

SEQ ID NO: 2965242 - DNA, 25 bp, Homo sapien
gttacgtgagaactgatcaacacaa

SEQ ID NO: 2965243 - DNA, 25 bp, Homo sapien
taccaaatttacatgggcaggttgc

SEQ ID NO: 2965244 - DNA, 25 bp, Homo sapien
tcattgatctagaggcagctgtgac

SEQ ID NO: 2965245 - DNA, 25 bp, Homo sapien
cacacaccgcaacgcccggatgatt

SEQ ID NO: 2965246 - DNA, 25 bp, Homo sapien
gcacacaccgcaacgcccggatgat

SEQ ID NO: 2965247 - DNA, 25 bp, Homo sapien
acacaccgcaacgcccggatgattt

SEQ ID NO: 2965248 - DNA, 25 bp, Homo sapien
ttactggcttgagccggtgcgccag

SEQ ID NO: 2965249 - DNA, 25 bp, Homo sapien
tacttaagactacagaagaaccaga

SEQ ID NO: 2965250 - DNA, 25 bp, Homo sapien
ggaagagtatctttgcttaacggca

SEQ ID NO: 2965251 - DNA, 25 bp, Homo sapien
caaagaggaataacacgtaaggagc

SEQ ID NO: 2965252 - DNA, 25 bp, Homo sapien
taaaccaagtgactaagattgtgcc

SEQ ID NO: 2965253 - DNA, 25 bp, Homo sapien
accaccccaggcctcagatttaata

SEQ ID NO: 2965254 - DNA, 25 bp, Homo sapien
tataatttgccagacttcatgaata

SEQ ID NO: 2965255 - DNA, 25 bp, Homo sapien
gttatgtggcaataagtaagcattc

SEQ ID NO: 2965256 - DNA, 25 bp, Homo sapien
tgccgatcactagccagaagatgga

SEQ ID NO: 2965257 - DNA, 25 bp, Homo sapien
tcatgaatacatctctgccgatcac

SEQ ID NO: 2965258 - DNA, 25 bp, Homo sapien
tttctgtactagtttttgaactgcc

SEQ ID NO: 2965259 - DNA, 25 bp, Homo sapien
tgccagtttggcccgggaggcaaag

SEQ ID NO: 2965260 - DNA, 25 bp, Homo sapien
ctgccagtttggcccgggaggcaaa

SEQ ID NO: 2965261 - DNA, 25 bp, Homo sapien
actttctgtactagtttttgaactg

SEQ ID NO: 2965262 - DNA, 25 bp, Homo sapien
tagggttgcaccaaagaaggtccaa

SEQ ID NO: 2965263 - DNA, 25 bp, Homo sapien
cagccagatcaaataaaggatttgg

SEQ ID NO: 2965264 - DNA, 25 bp, Homo sapien
tattgcttttccaattagggttgca

SEQ ID NO: 2965265 - DNA, 25 bp, Homo sapien
ccagaaagtgtccacacgttattcc

SEQ ID NO: 2965266 - DNA, 25 bp, Homo sapien
gcagtgaatcagggggtataattac

SEQ ID NO: 2965267 - DNA, 25 bp, Homo sapien
cattgtcttgtaatgggttcatcat

SEQ ID NO: 2965268 - DNA, 25 bp, Homo sapien
attgtcttgtaatgggttcatcatc

SEQ ID NO: 2965269 - DNA, 25 bp, Homo sapien
ttgtcttgtaatgggttcatcatca

SEQ ID NO: 2965270 - DNA, 25 bp, Homo sapien
tggctttgaggactagcagattctc

SEQ ID NO: 2965271 - DNA, 25 bp, Homo sapien
aaaggatattggtaacatgggagga

SEQ ID NO: 2965272 - DNA, 25 bp, Homo sapien
gattttgttaagagtggctttgagg

SEQ ID NO: 2965273 - DNA, 25 bp, Homo sapien
ctgaccacaacccacatctcctcgc

SEQ ID NO: 2965274 - DNA, 25 bp, Homo sapien
agaggtattaacatagaaactttgg

SEQ ID NO: 2965275 - DNA, 25 bp, Homo sapien
tagaagcagccgaagttttcctgtt

SEQ ID NO: 2965276 - DNA, 25 bp, Homo sapien
cacacttgtaattatcatggaatca

SEQ ID NO: 2965277 - DNA, 25 bp, Homo sapien
tggaatcatacaagggcagagaact

SEQ ID NO: 2965278 - DNA, 25 bp, Homo sapien
ctagcactgtaatattaaaaaacct

SEQ ID NO: 2965279 - DNA, 25 bp, Homo sapien
aaaacctgtgttcgttgattgaaca

SEQ ID NO: 2965280 - DNA, 25 bp, Homo sapien
gcatctggccagtattaaatcttaa

SEQ ID NO: 2965281 - DNA, 25 bp, Homo sapien
tcttaaccatagtaactagcactgt

SEQ ID NO: 2965282 - DNA, 25 bp, Homo sapien
ccacatagatacagggaaagagctt

SEQ ID NO: 2965283 - DNA, 25 bp, Homo sapien
ttgtctgccatgagataactactgc

SEQ ID NO: 2965284 - DNA, 25 bp, Homo sapien
tggttggattctagggccttaggca

SEQ ID NO: 2965285 - DNA, 25 bp, Homo sapien
tcactatgatacgatggaacacagc

SEQ ID NO: 2965286 - DNA, 25 bp, Homo sapien
tccactatgtgcttgctgaatgtta

SEQ ID NO: 2965287 - DNA, 25 bp, Homo sapien
tgctccactatgtgcttgctgaatg

SEQ ID NO: 2965288 - DNA, 25 bp, Homo sapien
gctccactatgtgcttgctgaatgt

SEQ ID NO: 2965289 - DNA, 25 bp, Homo sapien
cactatgtgcttgctgaatgttatt

SEQ ID NO: 2965290 - DNA, 25 bp, Homo sapien
ctgtgtatctggcatctagtttggc

SEQ ID NO: 2965291 - DNA, 25 bp, Homo sapien
ggtggggctacagattcaaacccca

SEQ ID NO: 2965292 - DNA, 25 bp, Homo sapien
taaagcaccattaaactgcaatgat

SEQ ID NO: 2965293 - DNA, 25 bp, Homo sapien
agcattgtactaaagcaccattaaa

SEQ ID NO: 2965294 - DNA, 25 bp, Homo sapien
ggaactacaggcgagtggcactgca

SEQ ID NO: 2965295 - DNA, 25 bp, Homo sapien
tagctggggccacagtagctaattt

SEQ ID NO: 2965296 - DNA, 25 bp, Homo sapien
agtgacagatctgcactggtttgaa

SEQ ID NO: 2965297 - DNA, 25 bp, Homo sapien
acaggtgtgagtgggcctggtggca

SEQ ID NO: 2965298 - DNA, 25 bp, Homo sapien
ggaggttgcagtgcgccattgtcct

SEQ ID NO: 2965299 - DNA, 25 bp, Homo sapien
tggaggttgcagtgcgccattgtcc

SEQ ID NO: 2965300 - DNA, 25 bp, Homo sapien
gttgcagtgcgccattgtcctccag

SEQ ID NO: 2965301 - DNA, 25 bp, Homo sapien
aggttgcagtgcgccattgtcctcc

SEQ ID NO: 2965302 - DNA, 25 bp, Homo sapien
aaggaaatgacttatgcttgtgtca

SEQ ID NO: 2965303 - DNA, 25 bp, Homo sapien
ttatcaccactagttcctgtaagaa

SEQ ID NO: 2965304 - DNA, 25 bp, Homo sapien
gaaatgacttatgcttgtgtcatcc

SEQ ID NO: 2965305 - DNA, 25 bp, Homo sapien
ctcagaagtcccacatttatcacca

SEQ ID NO: 2965306 - DNA, 25 bp, Homo sapien
gctgtaaatcagaaaccgcttccag

SEQ ID NO: 2965307 - DNA, 25 bp, Homo sapien
cgcttccagcaaaagagttagtcct

SEQ ID NO: 2965308 - DNA, 25 bp, Homo sapien
cacctggactcaaaaggcagggatt

SEQ ID NO: 2965309 - DNA, 25 bp, Homo sapien
tactgtactctggtatggcacaaag

SEQ ID NO: 2965310 - DNA, 25 bp, Homo sapien
cagtagcccaaagaaaaagacacat

SEQ ID NO: 2965311 - DNA, 25 bp, Homo sapien
gcagggtacagtagcccaaagaaaa

SEQ ID NO: 2965312 - DNA, 25 bp, Homo sapien
ctggaagcagggtacagtagcccaa

SEQ ID NO: 2965313 - DNA, 25 bp, Homo sapien
gaagcagggtacagtagcccaaaga

SEQ ID NO: 2965314 - DNA, 25 bp, Homo sapien
cccatttcgcttttgtggtgaagct

SEQ ID NO: 2965315 - DNA, 25 bp, Homo sapien
gaagcttctgccgttgagcctccag

SEQ ID NO: 2965316 - DNA, 25 bp, Homo sapien
agatggacctatgccggggacagca

SEQ ID NO: 2965317 - DNA, 25 bp, Homo sapien
cagagatggacctatgccggggaca

SEQ ID NO: 2965318 - DNA, 25 bp, Homo sapien
tgaggttagctcttctactaggacc

SEQ ID NO: 2965319 - DNA, 25 bp, Homo sapien
tccataagaagagtgcaaggccatt

SEQ ID NO: 2965320 - DNA, 25 bp, Homo sapien
tcccagtagagcatacacagacgct

SEQ ID NO: 2965321 - DNA, 25 bp, Homo sapien
tcatgtttggtcaactgagggcagc

SEQ ID NO: 2965322 - DNA, 25 bp, Homo sapien
gatagataggatgaagtaacacacc

SEQ ID NO: 2965323 - DNA, 25 bp, Homo sapien
caacttttcaaacatccaggacaac

SEQ ID NO: 2965324 - DNA, 25 bp, Homo sapien
cctctgagttcaaccgctgctggat

SEQ ID NO: 2965325 - DNA, 25 bp, Homo sapien
gctggattcgtttggcataactttg

SEQ ID NO: 2965326 - DNA, 25 bp, Homo sapien
catttagcagtatgcagcagcccag

SEQ ID NO: 2965327 - DNA, 25 bp, Homo sapien
tgcatcgagggtggataccttacct

SEQ ID NO: 2965328 - DNA, 25 bp, Homo sapien
caaaacatgccttggtagtggctct

SEQ ID NO: 2965329 - DNA, 25 bp, Homo sapien
tccccagagggtgtgcaatgcatca

SEQ ID NO: 2965330 - DNA, 25 bp, Homo sapien
tgttaagatcgaaccccaattctat

SEQ ID NO: 2965331 - DNA, 25 bp, Homo sapien
ttctattctgacataatgctcataa

SEQ ID NO: 2965332 - DNA, 25 bp, Homo sapien
cccaggcatttctggcctgttaaga

SEQ ID NO: 2965333 - DNA, 25 bp, Homo sapien
gtcacgatggtaggcaaaacaagca

SEQ ID NO: 2965334 - DNA, 25 bp, Homo sapien
tgtcagacagcccatcgactggtgt

SEQ ID NO: 2965335 - DNA, 25 bp, Homo sapien
tggtgttgccatgagattcaacagt

SEQ ID NO: 2965336 - DNA, 25 bp, Homo sapien
gacagcccatcgactggtgttgcca

SEQ ID NO: 2965337 - DNA, 25 bp, Homo sapien
cccatcgactggtgttgccatgaga

SEQ ID NO: 2965338 - DNA, 25 bp, Homo sapien
tatggatggtcagatgaaagatacc

SEQ ID NO: 2965339 - DNA, 25 bp, Homo sapien
tggatggtcagatgaaagataccaa

SEQ ID NO: 2965340 - DNA, 25 bp, Homo sapien
atggatggtcagatgaaagatacca

SEQ ID NO: 2965341 - DNA, 25 bp, Homo sapien
gaaaggaaggcacgaacagctgaaa

SEQ ID NO: 2965342 - DNA, 25 bp, Homo sapien
cagctggaatccagcaggaacctct

SEQ ID NO: 2965343 - DNA, 25 bp, Homo sapien
tctgagcatgccacagctgaacact

SEQ ID NO: 2965344 - DNA, 25 bp, Homo sapien
tggtctcccatcagctggaattaag

SEQ ID NO: 2965345 - DNA, 25 bp, Homo sapien
cacacaacatggtgaggagccaaag

SEQ ID NO: 2965346 - DNA, 25 bp, Homo sapien
ttttccccgctggaaacagactgga

SEQ ID NO: 2965347 - DNA, 25 bp, Homo sapien
caggcttctgcactactgccaagag

SEQ ID NO: 2965348 - DNA, 25 bp, Homo sapien
ccaagaggagtgaacttgagctgct

SEQ ID NO: 2965349 - DNA, 25 bp, Homo sapien
cccgtctctgcctgccagtgttggg

SEQ ID NO: 2965350 - DNA, 25 bp, Homo sapien
tccgcccgtctctgcctgccagtgt

SEQ ID NO: 2965351 - DNA, 25 bp, Homo sapien
cacgcccggccggtatgcagttgtt

SEQ ID NO: 2965352 - DNA, 25 bp, Homo sapien
cgcccggccggtatgcagttgtttt

SEQ ID NO: 2965353 - DNA, 25 bp, Homo sapien
caagtaaattgtttattgttattgt

SEQ ID NO: 2965354 - DNA, 25 bp, Homo sapien
gttttgctcttgttgtccagactgg

SEQ ID NO: 2965355 - DNA, 25 bp, Homo sapien
gttattgtcatttttgagacagttt

SEQ ID NO: 2965356 - DNA, 25 bp, Homo sapien
agtaaattgtttattgttattgtca

SEQ ID NO: 2965357 - DNA, 25 bp, Homo sapien
tttagacgataacgtaactctttca

SEQ ID NO: 2965358 - DNA, 25 bp, Homo sapien
catttacactcattgttctctccct

SEQ ID NO: 2965359 - DNA, 25 bp, Homo sapien
tctcaacccagatgttccaaagttt

SEQ ID NO: 2965360 - DNA, 25 bp, Homo sapien
tatctcaacccagatgttccaaagt

SEQ ID NO: 2965361 - DNA, 25 bp, Homo sapien
agggagatgttgtcaaatgctacag

SEQ ID NO: 2965362 - DNA, 25 bp, Homo sapien
cagggcaagtttccactctaagcag

SEQ ID NO: 2965363 - DNA, 25 bp, Homo sapien
ctgtaacagggcaagtttccactct

SEQ ID NO: 2965364 - DNA, 25 bp, Homo sapien
aaagcatgaaccaaactttcacagc

SEQ ID NO: 2965365 - DNA, 25 bp, Homo sapien
ccttaaggcatttctggactaaaat

SEQ ID NO: 2965366 - DNA, 25 bp, Homo sapien
gagcaggttgttgccagttactgta

SEQ ID NO: 2965367 - DNA, 25 bp, Homo sapien
caaaatttggaatcgaagaagagga

SEQ ID NO: 2965368 - DNA, 25 bp, Homo sapien
gacagtttcacgtcattagagcagg

SEQ ID NO: 2965369 - DNA, 25 bp, Homo sapien
tgtccttgcgcccagcggcaccact

SEQ ID NO: 2965370 - DNA, 25 bp, Homo sapien
catgtcattggttatgcgggaggct

SEQ ID NO: 2965371 - DNA, 25 bp, Homo sapien
gcggcaccactttctgggatgccct

SEQ ID NO: 2965372 - DNA, 25 bp, Homo sapien
taggataggaccctgagagcatgtc

SEQ ID NO: 2965373 - DNA, 25 bp, Homo sapien
cacacatgttatacttcttgagggc

SEQ ID NO: 2965374 - DNA, 25 bp, Homo sapien
ggcagtggcctgtccttttggcgtc

SEQ ID NO: 2965375 - DNA, 25 bp, Homo sapien
gggcagtggcctgtccttttggcgt

SEQ ID NO: 2965376 - DNA, 25 bp, Homo sapien
catgttatacttcttgagggcagtg

SEQ ID NO: 2965377 - DNA, 25 bp, Homo sapien
ctataccatggatccctctcatgca

SEQ ID NO: 2965378 - DNA, 25 bp, Homo sapien
ccatggatccctctcatgcagggag

SEQ ID NO: 2965379 - DNA, 25 bp, Homo sapien
tataccatggatccctctcatgcag

SEQ ID NO: 2965380 - DNA, 25 bp, Homo sapien
taccatggatccctctcatgcaggg

SEQ ID NO: 2965381 - DNA, 25 bp, Homo sapien
tggtatacatgtctagctgccagtg

SEQ ID NO: 2965382 - DNA, 25 bp, Homo sapien
ctggtatacatgtctagctgccagt

SEQ ID NO: 2965383 - DNA, 25 bp, Homo sapien
ggtatacatgtctagctgccagtgc

SEQ ID NO: 2965384 - DNA, 25 bp, Homo sapien
gtatacatgtctagctgccagtgca

SEQ ID NO: 2965385 - DNA, 25 bp, Homo sapien
tgaagccgaacagctgcatacacat

SEQ ID NO: 2965386 - DNA, 25 bp, Homo sapien
ctagtagtgaaccaccgactcaggt

SEQ ID NO: 2965387 - DNA, 25 bp, Homo sapien
agagccatgaagccgaacagctgca

SEQ ID NO: 2965388 - DNA, 25 bp, Homo sapien
tagtagtgaaccaccgactcaggtt

SEQ ID NO: 2965389 - DNA, 25 bp, Homo sapien
cacagcactgagttttattagggat

SEQ ID NO: 2965390 - DNA, 25 bp, Homo sapien
tggaaaagtcctgatgcctagggct

SEQ ID NO: 2965391 - DNA, 25 bp, Homo sapien
gcctagggctcactttgagagattc

SEQ ID NO: 2965392 - DNA, 25 bp, Homo sapien
caatgtaatgtccatatctggcaga

SEQ ID NO: 2965393 - DNA, 25 bp, Homo sapien
tgtcatgctgcaaactaacttacca

SEQ ID NO: 2965394 - DNA, 25 bp, Homo sapien
ttctggaaacaactgggcatatggg

SEQ ID NO: 2965395 - DNA, 25 bp, Homo sapien
agttatcaatcaaatgctgtcaaag

SEQ ID NO: 2965396 - DNA, 25 bp, Homo sapien
aacatgcatgcttctgtcaaaaaca

SEQ ID NO: 2965397 - DNA, 25 bp, Homo sapien
tctagttccaattgcccgggctgtt

SEQ ID NO: 2965398 - DNA, 25 bp, Homo sapien
cgtctgcgcctaggccttagactgg

SEQ ID NO: 2965399 - DNA, 25 bp, Homo sapien
gtgcgtctgcgcctaggccttagac

SEQ ID NO: 2965400 - DNA, 25 bp, Homo sapien
cttaggctcagtgcgtctgcgccta

SEQ ID NO: 2965401 - DNA, 25 bp, Homo sapien
ctcagtgcgtctgcgcctaggcctt

SEQ ID NO: 2965402 - DNA, 25 bp, Homo sapien
cccggacccgccgcagccaccacag

SEQ ID NO: 2965403 - DNA, 25 bp, Homo sapien
acagccgctgccgccatcaccggct

SEQ ID NO: 2965404 - DNA, 25 bp, Homo sapien
gggcccggacccgccgcagccacca

SEQ ID NO: 2965405 - DNA, 25 bp, Homo sapien
accacagccgctgccgccatcaccg

SEQ ID NO: 2965406 - DNA, 25 bp, Homo sapien
tccctgtctcggaagtccggggctg

SEQ ID NO: 2965407 - DNA, 25 bp, Homo sapien
agccgtcccgcctccttcgtcgcct

SEQ ID NO: 2965408 - DNA, 25 bp, Homo sapien
cgtcccgcctccttcgtcgcctcat

SEQ ID NO: 2965409 - DNA, 25 bp, Homo sapien
tcagcttccctgtctcggaagtccg

SEQ ID NO: 2965410 - DNA, 25 bp, Homo sapien
ggtctatgtcaaacactcctgccat

SEQ ID NO: 2965411 - DNA, 25 bp, Homo sapien
gctcatcctcagagcccgcgtcctc

SEQ ID NO: 2965412 - DNA, 25 bp, Homo sapien
tggctggtccaggtctatgtcaaac

SEQ ID NO: 2965413 - DNA, 25 bp, Homo sapien
ctcagagcccgcgtcctctggctgg

SEQ ID NO: 2965414 - DNA, 25 bp, Homo sapien
gaggaatcgaccacgcgcccgttct

SEQ ID NO: 2965415 - DNA, 25 bp, Homo sapien
tcttcagatcgctcggggctgcgct

SEQ ID NO: 2965416 - DNA, 25 bp, Homo sapien
cacactcaagtccaacagctcgagg

SEQ ID NO: 2965417 - DNA, 25 bp, Homo sapien
aacagctcgaggaatcgaccacgcg

SEQ ID NO: 2965418 - DNA, 25 bp, Homo sapien
acagcagcggcagtgctactcccga

SEQ ID NO: 2965419 - DNA, 25 bp, Homo sapien
cttgctcccgaaataaaactcctgg

SEQ ID NO: 2965420 - DNA, 25 bp, Homo sapien
agattggaagatgcagcagagcccc

SEQ ID NO: 2965421 - DNA, 25 bp, Homo sapien
taaaactcctggtggctgtaacagc

SEQ ID NO: 2965422 - DNA, 25 bp, Homo sapien
cttgaggcacctcttagaaaaaata

SEQ ID NO: 2965423 - DNA, 25 bp, Homo sapien
caaaagccctggaacacctactgtt

SEQ ID NO: 2965424 - DNA, 25 bp, Homo sapien
aatcttccattatccatcttgaggc

SEQ ID NO: 2965425 - DNA, 25 bp, Homo sapien
tacttgcttgtacccagcaggacaa

SEQ ID NO: 2965426 - DNA, 25 bp, Homo sapien
tagctaattgcttaatacgccagga

SEQ ID NO: 2965427 - DNA, 25 bp, Homo sapien
tacagcacctcgagtttaactgcaa

SEQ ID NO: 2965428 - DNA, 25 bp, Homo sapien
cagagtgagtatggccaaaggaatc

SEQ ID NO: 2965429 - DNA, 25 bp, Homo sapien
gaaaggcacatctctctaaacggga

SEQ ID NO: 2965430 - DNA, 25 bp, Homo sapien
taagatggagtctcggccaggcgcg

SEQ ID NO: 2965431 - DNA, 25 bp, Homo sapien
tcctaggctcatgcgctccatctgc

SEQ ID NO: 2965432 - DNA, 25 bp, Homo sapien
ggctcatgcgctccatctgccttgg

SEQ ID NO: 2965433 - DNA, 25 bp, Homo sapien
taggctcatgcgctccatctgcctt

SEQ ID NO: 2965434 - DNA, 25 bp, Homo sapien
aaattggtcacggattcaactgaat

SEQ ID NO: 2965435 - DNA, 25 bp, Homo sapien
gaaatgcaagggaccaccaggcacg

SEQ ID NO: 2965436 - DNA, 25 bp, Homo sapien
caagctgatcctaaatttcatatag

SEQ ID NO: 2965437 - DNA, 25 bp, Homo sapien
cggattcaactgaatcctatcaaaa

SEQ ID NO: 2965438 - DNA, 25 bp, Homo sapien
tatggtccaactcccccatggtcca

SEQ ID NO: 2965439 - DNA, 25 bp, Homo sapien
ttcatatggtccaactcccccatgg

SEQ ID NO: 2965440 - DNA, 25 bp, Homo sapien
tcatatggtccaactcccccatggt

SEQ ID NO: 2965441 - DNA, 25 bp, Homo sapien
agttcatatggtccaactcccccat

SEQ ID NO: 2965442 - DNA, 25 bp, Homo sapien
gctcaaaacattctggtctgatttt

SEQ ID NO: 2965443 - DNA, 25 bp, Homo sapien
caagtacccgaagtagctcaaaaca

SEQ ID NO: 2965444 - DNA, 25 bp, Homo sapien
tagctcaaaacattctggtctgatt

SEQ ID NO: 2965445 - DNA, 25 bp, Homo sapien
ttaccaagtacccgaagtagctcaa

SEQ ID NO: 2965446 - DNA, 25 bp, Homo sapien
tttttaagcaccttcatggcaaata

SEQ ID NO: 2965447 - DNA, 25 bp, Homo sapien
ctttttaagcaccttcatggcaaat

SEQ ID NO: 2965448 - DNA, 25 bp, Homo sapien
taaacgactgggaatcagaatgcca

SEQ ID NO: 2965449 - DNA, 25 bp, Homo sapien
aaaataggccatgtgtaaacgactg

SEQ ID NO: 2965450 - DNA, 25 bp, Homo sapien
gtcaaagcaacacacatcactataa

SEQ ID NO: 2965451 - DNA, 25 bp, Homo sapien
gtgtcaccgcactcctgtctaggtg

SEQ ID NO: 2965452 - DNA, 25 bp, Homo sapien
gtggggtaagatcaaacctaagtgc

SEQ ID NO: 2965453 - DNA, 25 bp, Homo sapien
agcaatggtccatgatgtagcagag

SEQ ID NO: 2965454 - DNA, 25 bp, Homo sapien
gggataaagcaatggtccatgatgt

SEQ ID NO: 2965455 - DNA, 25 bp, Homo sapien
cagagtggggataaagcaatggtcc

SEQ ID NO: 2965456 - DNA, 25 bp, Homo sapien
gacagaatacgtctgggaaatctac

SEQ ID NO: 2965457 - DNA, 25 bp, Homo sapien
cacatctagtagcagtagggagtat

SEQ ID NO: 2965458 - DNA, 25 bp, Homo sapien
gaaatggaacgtctgggcaaaggaa

SEQ ID NO: 2965459 - DNA, 25 bp, Homo sapien
tgggtgaaatgaacacacctttggc

SEQ ID NO: 2965460 - DNA, 25 bp, Homo sapien
tgtatgagctgtatctttagcattt

SEQ ID NO: 2965461 - DNA, 25 bp, Homo sapien
ttttgtatgagctgtatctttagca

SEQ ID NO: 2965462 - DNA, 25 bp, Homo sapien
gtatgagctgtatctttagcatttc

SEQ ID NO: 2965463 - DNA, 25 bp, Homo sapien
tttgtatgagctgtatctttagcat

SEQ ID NO: 2965464 - DNA, 25 bp, Homo sapien
aatattccctctctttctaactgca

SEQ ID NO: 2965465 - DNA, 25 bp, Homo sapien
cagtgtcttccataaatattccctc

SEQ ID NO: 2965466 - DNA, 25 bp, Homo sapien
gtgtcttccataaatattccctctc

SEQ ID NO: 2965467 - DNA, 25 bp, Homo sapien
cataaatattccctctctttctaac

SEQ ID NO: 2965468 - DNA, 25 bp, Homo sapien
ggtgtgaagagcgttccactcaagc

SEQ ID NO: 2965469 - DNA, 25 bp, Homo sapien
ctgttaggaacaactggtgtgaaga

SEQ ID NO: 2965470 - DNA, 25 bp, Homo sapien
aaagaaagccgcaatgagaatggtt

SEQ ID NO: 2965471 - DNA, 25 bp, Homo sapien
caatgagaatggttctgttaggaac

SEQ ID NO: 2965472 - DNA, 25 bp, Homo sapien
cttcatccctaaggctcttaaatgc

SEQ ID NO: 2965473 - DNA, 25 bp, Homo sapien
agtttcacagccagcacgaccacaa

SEQ ID NO: 2965474 - DNA, 25 bp, Homo sapien
caaaaaagggcacttcatccctaag

SEQ ID NO: 2965475 - DNA, 25 bp, Homo sapien
acagcctccaacacggctcagtgag

SEQ ID NO: 2965476 - DNA, 25 bp, Homo sapien
caaaagaataaagggctgaatcaac

SEQ ID NO: 2965477 - DNA, 25 bp, Homo sapien
gtctggattcgaaaagcacaaggca

SEQ ID NO: 2965478 - DNA, 25 bp, Homo sapien
gcacaaggcactgcaatactggctg

SEQ ID NO: 2965479 - DNA, 25 bp, Homo sapien
gcactgcaatactggctgcataaca

SEQ ID NO: 2965480 - DNA, 25 bp, Homo sapien
cagccagcccacaactataaactgt

SEQ ID NO: 2965481 - DNA, 25 bp, Homo sapien
gccagcccacaactataaactgtgt

SEQ ID NO: 2965482 - DNA, 25 bp, Homo sapien
gcccacaactataaactgtgtgaca

SEQ ID NO: 2965483 - DNA, 25 bp, Homo sapien
acaactataaactgtgtgacaccca

SEQ ID NO: 2965484 - DNA, 25 bp, Homo sapien
attaaaaagagtgtaatctatccaa

SEQ ID NO: 2965485 - DNA, 25 bp, Homo sapien
aattaaaaagagtgtaatctatcca

SEQ ID NO: 2965486 - DNA, 25 bp, Homo sapien
ttaaaaagagtgtaatctatccaaa

SEQ ID NO: 2965487 - DNA, 25 bp, Homo sapien
taagcatgatattctccggcttcag

SEQ ID NO: 2965488 - DNA, 25 bp, Homo sapien
caggtctctgtagatgatccccttt

SEQ ID NO: 2965489 - DNA, 25 bp, Homo sapien
tgtagatgatccccttttgatgtaa

SEQ ID NO: 2965490 - DNA, 25 bp, Homo sapien
cttggtgattaagcatgatattctc

SEQ ID NO: 2965491 - DNA, 25 bp, Homo sapien
ggctttgaaaatggccacgacctat

SEQ ID NO: 2965492 - DNA, 25 bp, Homo sapien
tctcaccaagcgtaattacctaaag

SEQ ID NO: 2965493 - DNA, 25 bp, Homo sapien
tcagcaagtactatgatgccatgaa

SEQ ID NO: 2965494 - DNA, 25 bp, Homo sapien
ctaaaaaaggcagttgagcgactat

SEQ ID NO: 2965495 - DNA, 25 bp, Homo sapien
gtgactgttccatcatgaatagatt

SEQ ID NO: 2965496 - DNA, 25 bp, Homo sapien
gactgttccatcatgaatagattct

SEQ ID NO: 2965497 - DNA, 25 bp, Homo sapien
catacattaatgctcccaaactcca

SEQ ID NO: 2965498 - DNA, 25 bp, Homo sapien
tgtcatacattaatgctcccaaact

SEQ ID NO: 2965499 - DNA, 25 bp, Homo sapien
catgtcatacattaatgctcccaaa

SEQ ID NO: 2965500 - DNA, 25 bp, Homo sapien
gtcatacattaatgctcccaaactc

SEQ ID NO: 2965501 - DNA, 25 bp, Homo sapien
tgtttcggaaagtatgggatcccat

SEQ ID NO: 2965502 - DNA, 25 bp, Homo sapien
cactggtaacatgttcagaaagcac

SEQ ID NO: 2965503 - DNA, 25 bp, Homo sapien
ggtctcttgctatagtgactcagca

SEQ ID NO: 2965504 - DNA, 25 bp, Homo sapien
gcacagaccaataatacatgcagct

SEQ ID NO: 2965505 - DNA, 25 bp, Homo sapien
cagaaatgtatgctgtgaaatgggc

SEQ ID NO: 2965506 - DNA, 25 bp, Homo sapien
tttttaagcaacaggacagaggaag

SEQ ID NO: 2965507 - DNA, 25 bp, Homo sapien
ccggcagacgtgcagtttttaagca

SEQ ID NO: 2965508 - DNA, 25 bp, Homo sapien
tgaaatgggctaactgctaaagacc

SEQ ID NO: 2965509 - DNA, 25 bp, Homo sapien
ggcttcttgtgtgaggtagggaggc

SEQ ID NO: 2965510 - DNA, 25 bp, Homo sapien
cttgtgtgaggtagggaggcaaatt

SEQ ID NO: 2965511 - DNA, 25 bp, Homo sapien
tcttgtgtgaggtagggaggcaaat

SEQ ID NO: 2965512 - DNA, 25 bp, Homo sapien
ttcttgtgtgaggtagggaggcaaa

SEQ ID NO: 2965513 - DNA, 25 bp, Homo sapien
tgtcagtgaccatttaagaacctta

SEQ ID NO: 2965514 - DNA, 25 bp, Homo sapien
gtcagtgaccatttaagaaccttac

SEQ ID NO: 2965515 - DNA, 25 bp, Homo sapien
tagtcattgaatcttgtagtgtcag

SEQ ID NO: 2965516 - DNA, 25 bp, Homo sapien
tagttaaatcctagtcattgaatct

SEQ ID NO: 2965517 - DNA, 25 bp, Homo sapien
aaatatagtttattggccaggcaca

SEQ ID NO: 2965518 - DNA, 25 bp, Homo sapien
ctactttggcttgagaaaatatagt

SEQ ID NO: 2965519 - DNA, 25 bp, Homo sapien
ctacttaatattgtttaagggtctg

SEQ ID NO: 2965520 - DNA, 25 bp, Homo sapien
tattgtttaagggtctgtaatccca

SEQ ID NO: 2965521 - DNA, 25 bp, Homo sapien
cccagacgagaagcagcatttcttt

SEQ ID NO: 2965522 - DNA, 25 bp, Homo sapien
aggaccagctcccagacgagaagca

SEQ ID NO: 2965523 - DNA, 25 bp, Homo sapien
ttgaacttctccagcgtccccagga

SEQ ID NO: 2965524 - DNA, 25 bp, Homo sapien
gctcccagacgagaagcagcatttc

SEQ ID NO: 2965525 - DNA, 25 bp, Homo sapien
tacaagtcacaaaataagctaaact

SEQ ID NO: 2965526 - DNA, 25 bp, Homo sapien
taaaactagcattatcttccccaca

SEQ ID NO: 2965527 - DNA, 25 bp, Homo sapien
caaaacaccaaagatgccaatccct

SEQ ID NO: 2965528 - DNA, 25 bp, Homo sapien
gctaaacttataagcaactacatat

SEQ ID NO: 2965529 - DNA, 25 bp, Homo sapien
tcccagttaatgtgtctaaagaatg

SEQ ID NO: 2965530 - DNA, 25 bp, Homo sapien
ttcccagttaatgtgtctaaagaat

SEQ ID NO: 2965531 - DNA, 25 bp, Homo sapien
cccagttaatgtgtctaaagaatgg

SEQ ID NO: 2965532 - DNA, 25 bp, Homo sapien
tgaaggtacctatagcattccctcc

SEQ ID NO: 2965533 - DNA, 25 bp, Homo sapien
ggctgcagtagacagagattatacc

SEQ ID NO: 2965534 - DNA, 25 bp, Homo sapien
taccttgggtaactaactgatcaaa

SEQ ID NO: 2965535 - DNA, 25 bp, Homo sapien
taggcctattaacgcttagctgtag

SEQ ID NO: 2965536 - DNA, 25 bp, Homo sapien
aaatatctggttagactcttgggcc

SEQ ID NO: 2965537 - DNA, 25 bp, Homo sapien
tctcgtacaacaccagaccatgtgg

SEQ ID NO: 2965538 - DNA, 25 bp, Homo sapien
actgtgaacctgcactccctggagg

SEQ ID NO: 2965539 - DNA, 25 bp, Homo sapien
tcagaaaccaacatgaagatgcacc

SEQ ID NO: 2965540 - DNA, 25 bp, Homo sapien
gtctgacgtgtaaacttggaatcaa

SEQ ID NO: 2965541 - DNA, 25 bp, Homo sapien
aaactgacttacatcctcttcagat

SEQ ID NO: 2965542 - DNA, 25 bp, Homo sapien
tcgacaggtgtctgacgtgtaaact

SEQ ID NO: 2965543 - DNA, 25 bp, Homo sapien
catctgggctgtcgacaggtgtctg

SEQ ID NO: 2965544 - DNA, 25 bp, Homo sapien
gaatggcattttgtcatgtatctca

SEQ ID NO: 2965545 - DNA, 25 bp, Homo sapien
ctgaaagacagtaacagtggactac

SEQ ID NO: 2965546 - DNA, 25 bp, Homo sapien
tacacaatgatgcacacctaaaacc

SEQ ID NO: 2965547 - DNA, 25 bp, Homo sapien
ttcagtctgacatacctacacaatg

SEQ ID NO: 2965548 - DNA, 25 bp, Homo sapien
tcgtgggctgccaataaatcttcga

SEQ ID NO: 2965549 - DNA, 25 bp, Homo sapien
caataaatcttcgaggtgatcggat

SEQ ID NO: 2965550 - DNA, 25 bp, Homo sapien
ctgacaggtgttcgtgggctgccaa

SEQ ID NO: 2965551 - DNA, 25 bp, Homo sapien
cgaggtgatcggatttttggttcaa

SEQ ID NO: 2965552 - DNA, 25 bp, Homo sapien
catagattcatacgcaggtgctctg

SEQ ID NO: 2965553 - DNA, 25 bp, Homo sapien
ctggccgtttggagatcatgggaaa

SEQ ID NO: 2965554 - DNA, 25 bp, Homo sapien
tccacaggtgtctgaggatttgctg

SEQ ID NO: 2965555 - DNA, 25 bp, Homo sapien
ccagagttcggctgtcgtattggaa

SEQ ID NO: 2965556 - DNA, 25 bp, Homo sapien
ttgataaggttgagaagatgtcgcg

SEQ ID NO: 2965557 - DNA, 25 bp, Homo sapien
tactgtcagtttcgagtcatcaaca

SEQ ID NO: 2965558 - DNA, 25 bp, Homo sapien
taattgatgtgcctaagagttcagc

SEQ ID NO: 2965559 - DNA, 25 bp, Homo sapien
tgagtcgtttcaccttgcaggatgc

SEQ ID NO: 2965560 - DNA, 25 bp, Homo sapien
agacaggtattgcagctgggttact

SEQ ID NO: 2965561 - DNA, 25 bp, Homo sapien
acagacaggtattgcagctgggtta

SEQ ID NO: 2965562 - DNA, 25 bp, Homo sapien
ccaatccctcaaacgagccacagct

SEQ ID NO: 2965563 - DNA, 25 bp, Homo sapien
atccctcaaacgagccacagctgtg

SEQ ID NO: 2965564 - DNA, 25 bp, Homo sapien
cctcaccttgccgaccacagtatgt

SEQ ID NO: 2965565 - DNA, 25 bp, Homo sapien
tcccctggatatccctatctccctc

SEQ ID NO: 2965566 - DNA, 25 bp, Homo sapien
caccttgccgaccacagtatgtatt

SEQ ID NO: 2965567 - DNA, 25 bp, Homo sapien
ggatatccctatctccctcaccttg

SEQ ID NO: 2965568 - DNA, 25 bp, Homo sapien
aggaaggtagacagcagaaacagta

SEQ ID NO: 2965569 - DNA, 25 bp, Homo sapien
taacctgtaaatcatttatgtagat

SEQ ID NO: 2965570 - DNA, 25 bp, Homo sapien
aaatataaggaaggtagacagcaga

SEQ ID NO: 2965571 - DNA, 25 bp, Homo sapien
tcaaaaacatagtgtcctgttaaca

SEQ ID NO: 2965572 - DNA, 25 bp, Homo sapien
cagaaaagttgcagtgtttgccact

SEQ ID NO: 2965573 - DNA, 25 bp, Homo sapien
ttgactttgcacactcagactgaag

SEQ ID NO: 2965574 - DNA, 25 bp, Homo sapien
tattaatcagcaacagaccacaggt

SEQ ID NO: 2965575 - DNA, 25 bp, Homo sapien
gcttggatcctatggctcaaaaagg

SEQ ID NO: 2965576 - DNA, 25 bp, Homo sapien
tactgatagatgcaaagcgaacttg

SEQ ID NO: 2965577 - DNA, 25 bp, Homo sapien
tcatagcactcctaataaggcagct

SEQ ID NO: 2965578 - DNA, 25 bp, Homo sapien
tgttattccggataatccactgaga

SEQ ID NO: 2965579 - DNA, 25 bp, Homo sapien
gaaaagcagaacaggtgttaccctc

SEQ ID NO: 2965580 - DNA, 25 bp, Homo sapien
gtatactaattccttcctatcttta

SEQ ID NO: 2965581 - DNA, 25 bp, Homo sapien
gatacgtatactaattccttcctat

SEQ ID NO: 2965582 - DNA, 25 bp, Homo sapien
tttatacacctgatacgtatactaa

SEQ ID NO: 2965583 - DNA, 25 bp, Homo sapien
tacacctgatacgtatactaattcc

SEQ ID NO: 2965584 - DNA, 25 bp, Homo sapien
catttgttactggattgtggccctt

SEQ ID NO: 2965585 - DNA, 25 bp, Homo sapien
tagtaactcaaagaccttaagcagt

SEQ ID NO: 2965586 - DNA, 25 bp, Homo sapien
taaatggatggtacagccagaacac

SEQ ID NO: 2965587 - DNA, 25 bp, Homo sapien
tagtggctctaccaatcatactgct

SEQ ID NO: 2965588 - DNA, 25 bp, Homo sapien
agtcttgggatactgctggctttac

SEQ ID NO: 2965589 - DNA, 25 bp, Homo sapien
tttggtaacgtaactagatggagtc

SEQ ID NO: 2965590 - DNA, 25 bp, Homo sapien
tatcttaatccagcggtcctcaggt

SEQ ID NO: 2965591 - DNA, 25 bp, Homo sapien
gggagtcgaccttcacatagcgtgg

SEQ ID NO: 2965592 - DNA, 25 bp, Homo sapien
aagaaagtggttccaaatatatgtc

SEQ ID NO: 2965593 - DNA, 25 bp, Homo sapien
tgaactcagggtagaggttaaggca

SEQ ID NO: 2965594 - DNA, 25 bp, Homo sapien
taagaaagtggttccaaatatatgt

SEQ ID NO: 2965595 - DNA, 25 bp, Homo sapien
aatatatgtcatgaactcagggtag

SEQ ID NO: 2965596 - DNA, 25 bp, Homo sapien
aatgacagtagctgataagtctcca

SEQ ID NO: 2965597 - DNA, 25 bp, Homo sapien
ggaggtggagccagtatccctcaga

SEQ ID NO: 2965598 - DNA, 25 bp, Homo sapien
catttcattgggttgaggaaggaac

SEQ ID NO: 2965599 - DNA, 25 bp, Homo sapien
gatgggcaaatctgggatatagttt

SEQ ID NO: 2965600 - DNA, 25 bp, Homo sapien
gagaataggcactcgaggctcggac

SEQ ID NO: 2965601 - DNA, 25 bp, Homo sapien
agctcgcttgttctcgctgccaaaa

SEQ ID NO: 2965602 - DNA, 25 bp, Homo sapien
tttgcggttgatggccccgactgaa

SEQ ID NO: 2965603 - DNA, 25 bp, Homo sapien
gaactctgccctcggagattccgga

SEQ ID NO: 2965604 - DNA, 25 bp, Homo sapien
cctcaaaacgcccaggatctcggag

SEQ ID NO: 2965605 - DNA, 25 bp, Homo sapien
acaactaggtcaggcgtcaagctcg

SEQ ID NO: 2965606 - DNA, 25 bp, Homo sapien
ttcacgattgtgaggaaaggtcagc

SEQ ID NO: 2965607 - DNA, 25 bp, Homo sapien
gggttctgacaaggcctgatcctca

SEQ ID NO: 2965608 - DNA, 25 bp, Homo sapien
gaaaattcactatagtctggagcct

SEQ ID NO: 2965609 - DNA, 25 bp, Homo sapien
gagcctggctctcacccttactgaa

SEQ ID NO: 2965610 - DNA, 25 bp, Homo sapien
gctctcacccttactgaaccagaaa

SEQ ID NO: 2965611 - DNA, 25 bp, Homo sapien
catatctcctcggaaaattcactat

SEQ ID NO: 2965612 - DNA, 25 bp, Homo sapien
gcttgtggccatatatctctctgct

SEQ ID NO: 2965613 - DNA, 25 bp, Homo sapien
aaggacacttgggatggtattcagg

SEQ ID NO: 2965614 - DNA, 25 bp, Homo sapien
tgtgtctctattgcctcttttgcct

SEQ ID NO: 2965615 - DNA, 25 bp, Homo sapien
acttgggatggtattcaggacccac

SEQ ID NO: 2965616 - DNA, 25 bp, Homo sapien
ttttgtcttgagcatttagacatta

SEQ ID NO: 2965617 - DNA, 25 bp, Homo sapien
aaaagaacttgcagatttagcgtca

SEQ ID NO: 2965618 - DNA, 25 bp, Homo sapien
taaaagaacttgcagatttagcgtc

SEQ ID NO: 2965619 - DNA, 25 bp, Homo sapien
tgagcatttagacattatttccgtg

SEQ ID NO: 2965620 - DNA, 25 bp, Homo sapien
ggcattacagcgaagtggccgagct

SEQ ID NO: 2965621 - DNA, 25 bp, Homo sapien
cagattagggttggacatcctggag

SEQ ID NO: 2965622 - DNA, 25 bp, Homo sapien
tccttttgtaggagcgaggcattac

SEQ ID NO: 2965623 - DNA, 25 bp, Homo sapien
ttttggaaccagtgtatgcctgacc

SEQ ID NO: 2965624 - DNA, 25 bp, Homo sapien
tgccgtgttatggatcaatgacaac

SEQ ID NO: 2965625 - DNA, 25 bp, Homo sapien
cttttttgagagtcgtggatatccc

SEQ ID NO: 2965626 - DNA, 25 bp, Homo sapien
gaaccagcattccttgacagtagtg

SEQ ID NO: 2965627 - DNA, 25 bp, Homo sapien
tgttcaagataccatcctcgatggc

SEQ ID NO: 2965628 - DNA, 25 bp, Homo sapien
agcatggtttctcaaagctacaggg

SEQ ID NO: 2965629 - DNA, 25 bp, Homo sapien
ttgctctcttctcccgtagcacaaa

SEQ ID NO: 2965630 - DNA, 25 bp, Homo sapien
ctcttctcccgtagcacaaaactgg

SEQ ID NO: 2965631 - DNA, 25 bp, Homo sapien
tagcatggtttctcaaagctacagg

SEQ ID NO: 2965632 - DNA, 25 bp, Homo sapien
gcccgctggagggagctggcatcca

SEQ ID NO: 2965633 - DNA, 25 bp, Homo sapien
ctgaagtacaggaaagctgggctga

SEQ ID NO: 2965634 - DNA, 25 bp, Homo sapien
caggaaagctgggctgaactctcct

SEQ ID NO: 2965635 - DNA, 25 bp, Homo sapien
ccgctggagggagctggcatccaca

SEQ ID NO: 2965636 - DNA, 25 bp, Homo sapien
tgatagggcacagaaggacccagga

SEQ ID NO: 2965637 - DNA, 25 bp, Homo sapien
aagggtctgggggatgcaggacgtt

SEQ ID NO: 2965638 - DNA, 25 bp, Homo sapien
ctagggggtgatagggcacagaagg

SEQ ID NO: 2965639 - DNA, 25 bp, Homo sapien
acagaaggacccaggaaagggtctg

SEQ ID NO: 2965640 - DNA, 25 bp, Homo sapien
ttcgggaacggagactgctctggta

SEQ ID NO: 2965641 - DNA, 25 bp, Homo sapien
gctgtatgaacaagttcaggctgag

SEQ ID NO: 2965642 - DNA, 25 bp, Homo sapien
aacggagactgctctggtaacggag

SEQ ID NO: 2965643 - DNA, 25 bp, Homo sapien
aatgctgtccgcgttcgctgtatga

SEQ ID NO: 2965644 - DNA, 25 bp, Homo sapien
tggttcccaggagtccggaactgcc

SEQ ID NO: 2965645 - DNA, 25 bp, Homo sapien
tgctggttcccaggagtccggaact

SEQ ID NO: 2965646 - DNA, 25 bp, Homo sapien
aggtcccccatcctcagctgggtgg

SEQ ID NO: 2965647 - DNA, 25 bp, Homo sapien
gtcccccatcctcagctgggtgggc

SEQ ID NO: 2965648 - DNA, 25 bp, Homo sapien
ccaaggtgggactgacggatgacca

SEQ ID NO: 2965649 - DNA, 25 bp, Homo sapien
gactgacggatgaccaggtcagccg

SEQ ID NO: 2965650 - DNA, 25 bp, Homo sapien
caggtcagccgggtcactgaaaaca

SEQ ID NO: 2965651 - DNA, 25 bp, Homo sapien
cactgaaaacactcttgggtcctca

SEQ ID NO: 2965652 - DNA, 25 bp, Homo sapien
tagagctgattgctcatacacaaag

SEQ ID NO: 2965653 - DNA, 25 bp, Homo sapien
tacagtcaatgagttttccttggtg

SEQ ID NO: 2965654 - DNA, 25 bp, Homo sapien
gggattttcagacttatacagtcaa

SEQ ID NO: 2965655 - DNA, 25 bp, Homo sapien
cacaaaggtagaccggtgggcaggg

SEQ ID NO: 2965656 - DNA, 25 bp, Homo sapien
tccaggcttctagaagcatctgggc

SEQ ID NO: 2965657 - DNA, 25 bp, Homo sapien
gcctccacttggaaagttctcagtt

SEQ ID NO: 2965658 - DNA, 25 bp, Homo sapien
ctctgcggcctccacttggaaagtt

SEQ ID NO: 2965659 - DNA, 25 bp, Homo sapien
caggcttctagaagcatctgggcca

SEQ ID NO: 2965660 - DNA, 25 bp, Homo sapien
gagatcggctttcactgcactgagc

SEQ ID NO: 2965661 - DNA, 25 bp, Homo sapien
ctgagccacaacgtgggcatggact

SEQ ID NO: 2965662 - DNA, 25 bp, Homo sapien
gtgagatcggctttcactgcactga

SEQ ID NO: 2965663 - DNA, 25 bp, Homo sapien
tgagatcggctttcactgcactgag

SEQ ID NO: 2965664 - DNA, 25 bp, Homo sapien
aggaggaccagccggccacctgctg

SEQ ID NO: 2965665 - DNA, 25 bp, Homo sapien
cttggttccgccgttatgatttcag

SEQ ID NO: 2965666 - DNA, 25 bp, Homo sapien
ttccgccgttatgatttcagacaga

SEQ ID NO: 2965667 - DNA, 25 bp, Homo sapien
tgggtccgtgccatatcccaggagg

SEQ ID NO: 2965668 - DNA, 25 bp, Homo sapien
caccagcccggttcccatggcccat

SEQ ID NO: 2965669 - DNA, 25 bp, Homo sapien
gcaggaagccgccagccagtctgaa

SEQ ID NO: 2965670 - DNA, 25 bp, Homo sapien
aggaagccgccagccagtctgaacc

SEQ ID NO: 2965671 - DNA, 25 bp, Homo sapien
acgaaggtgtgtggcaggaagccgc

SEQ ID NO: 2965672 - DNA, 25 bp, Homo sapien
ctgggacgaaggtgtgtggcaggaa

SEQ ID NO: 2965673 - DNA, 25 bp, Homo sapien
gactgggggccgtatcccaggccca

SEQ ID NO: 2965674 - DNA, 25 bp, Homo sapien
gttctgactgggggccgtatcccag

SEQ ID NO: 2965675 - DNA, 25 bp, Homo sapien
tgactgggggccgtatcccaggccc

SEQ ID NO: 2965676 - DNA, 25 bp, Homo sapien
tctgactgggggccgtatcccaggc

SEQ ID NO: 2965677 - DNA, 25 bp, Homo sapien
tcctcttcaccttttcttcctcctc

SEQ ID NO: 2965678 - DNA, 25 bp, Homo sapien
ctgggccttcctcttcaccttttct

SEQ ID NO: 2965679 - DNA, 25 bp, Homo sapien
tcttcaccttttcttcctcctcttc

SEQ ID NO: 2965680 - DNA, 25 bp, Homo sapien
tcaccttttcttcctcctcttcctc

SEQ ID NO: 2965681 - DNA, 25 bp, Homo sapien
actgtgctcaagcatcttagggcct

SEQ ID NO: 2965682 - DNA, 25 bp, Homo sapien
cactgtgctcaagcatcttagggcc

SEQ ID NO: 2965683 - DNA, 25 bp, Homo sapien
acactgtgctcaagcatcttagggc

SEQ ID NO: 2965684 - DNA, 25 bp, Homo sapien
gagtgtggtgagcacttccctgtcc

SEQ ID NO: 2965685 - DNA, 25 bp, Homo sapien
gctgtgaccattcccaggtaactcc

SEQ ID NO: 2965686 - DNA, 25 bp, Homo sapien
acgaagacgtccaggtgtggcccgt

SEQ ID NO: 2965687 - DNA, 25 bp, Homo sapien
cacatgacccagatgaaagtcgaga

SEQ ID NO: 2965688 - DNA, 25 bp, Homo sapien
agcccaaatggcgggaccgtccagg

SEQ ID NO: 2965689 - DNA, 25 bp, Homo sapien
ccccagggtaaaggccgcatgttgg

SEQ ID NO: 2965690 - DNA, 25 bp, Homo sapien
gcatgtggtagccacgtcactaccc

SEQ ID NO: 2965691 - DNA, 25 bp, Homo sapien
ggaaggctctgatttcacgatgggc

SEQ ID NO: 2965692 - DNA, 25 bp, Homo sapien
aaagtcaggcttgccctttttgcac

SEQ ID NO: 2965693 - DNA, 25 bp, Homo sapien
tggtggcctgaaagtcaggcttgcc

SEQ ID NO: 2965694 - DNA, 25 bp, Homo sapien
ctgtggtggcctgaaagtcaggctt

SEQ ID NO: 2965695 - DNA, 25 bp, Homo sapien
cctgaaagtcaggcttgcccttttt

SEQ ID NO: 2965696 - DNA, 25 bp, Homo sapien
ccactaccaggagatgaccaggaag

SEQ ID NO: 2965697 - DNA, 25 bp, Homo sapien
cccactaccaggagatgaccaggaa

SEQ ID NO: 2965698 - DNA, 25 bp, Homo sapien
cactaccaggagatgaccaggaagc

SEQ ID NO: 2965699 - DNA, 25 bp, Homo sapien
ggtgcccacgaatgggccgaccaag

SEQ ID NO: 2965700 - DNA, 25 bp, Homo sapien
cgaccaagcccaggtggcagcatct

SEQ ID NO: 2965701 - DNA, 25 bp, Homo sapien
catcggtgcccacgaatgggccgac

SEQ ID NO: 2965702 - DNA, 25 bp, Homo sapien
ctgccatcggtgcccacgaatgggc

SEQ ID NO: 2965703 - DNA, 25 bp, Homo sapien
agagggcatctcatcctccccgtgg

SEQ ID NO: 2965704 - DNA, 25 bp, Homo sapien
gcagggtaagtgaacagctgccccg

SEQ ID NO: 2965705 - DNA, 25 bp, Homo sapien
cctggccaggtgatcacagctttca

SEQ ID NO: 2965706 - DNA, 25 bp, Homo sapien
aaagcccaaatcagacgcctctcat

SEQ ID NO: 2965707 - DNA, 25 bp, Homo sapien
tcagccctcccagctgatgtccttc

SEQ ID NO: 2965708 - DNA, 25 bp, Homo sapien
tcccagctgatgtccttccatggtg

SEQ ID NO: 2965709 - DNA, 25 bp, Homo sapien
ccctcccagctgatgtccttccatg

SEQ ID NO: 2965710 - DNA, 25 bp, Homo sapien
ccagctgatgtccttccatggtgac

SEQ ID NO: 2965711 - DNA, 25 bp, Homo sapien
ggacaaggtgctgaagtgcctgatg

SEQ ID NO: 2965712 - DNA, 25 bp, Homo sapien
aggtgctgaagtgcctgatggactt

SEQ ID NO: 2965713 - DNA, 25 bp, Homo sapien
aaggtgctgaagtgcctgatggact

SEQ ID NO: 2965714 - DNA, 25 bp, Homo sapien
taggaagtaggatgtcagctcactg

SEQ ID NO: 2965715 - DNA, 25 bp, Homo sapien
ataggaagtaggatgtcagctcact

SEQ ID NO: 2965716 - DNA, 25 bp, Homo sapien
gaaccgctggtgtaaatgcttcaag

SEQ ID NO: 2965717 - DNA, 25 bp, Homo sapien
tggtccaaggagttttaagcattct

SEQ ID NO: 2965718 - DNA, 25 bp, Homo sapien
tggtctcaggtagcaaaaaggttgg

SEQ ID NO: 2965719 - DNA, 25 bp, Homo sapien
ttcaaacgctaataaaaatgggtgc

SEQ ID NO: 2965720 - DNA, 25 bp, Homo sapien
tagcctttggcgttcggctggtcct

SEQ ID NO: 2965721 - DNA, 25 bp, Homo sapien
tcctagcctttggcgttcggctggt

SEQ ID NO: 2965722 - DNA, 25 bp, Homo sapien
gcctttggcgttcggctggtcctct

SEQ ID NO: 2965723 - DNA, 25 bp, Homo sapien
tttggcgttcggctggtcctctggc

SEQ ID NO: 2965724 - DNA, 25 bp, Homo sapien
tctggagatgggttgcacacagtgt

SEQ ID NO: 2965725 - DNA, 25 bp, Homo sapien
aaggaagcagaaaggcggttgccag

SEQ ID NO: 2965726 - DNA, 25 bp, Homo sapien
tccagtttcaattttgcaggatgaa

SEQ ID NO: 2965727 - DNA, 25 bp, Homo sapien
gttgcacacagtgtgaaggtagaag

SEQ ID NO: 2965728 - DNA, 25 bp, Homo sapien
ccttctgacccctggactgtgatgg

SEQ ID NO: 2965729 - DNA, 25 bp, Homo sapien
cggagtgatgcctgctctgtccttc

SEQ ID NO: 2965730 - DNA, 25 bp, Homo sapien
acctctgtaccccaagacacccgtg

SEQ ID NO: 2965731 - DNA, 25 bp, Homo sapien
cactgccacactgggacggagtgat

SEQ ID NO: 2965732 - DNA, 25 bp, Homo sapien
tctttgggccaccagaagttttggc

SEQ ID NO: 2965733 - DNA, 25 bp, Homo sapien
gggtcctgtctcttgacacatttca

SEQ ID NO: 2965734 - DNA, 25 bp, Homo sapien
tattcttacaattcgtatacatttg

SEQ ID NO: 2965735 - DNA, 25 bp, Homo sapien
tatacatttgtttgttgtagctcaa

SEQ ID NO: 2965736 - DNA, 25 bp, Homo sapien
cagagctccgggggatcggggggct

SEQ ID NO: 2965737 - DNA, 25 bp, Homo sapien
cctccagacacagggagtgagggtg

SEQ ID NO: 2965738 - DNA, 25 bp, Homo sapien
ccccacacctccagacacagggagt

SEQ ID NO: 2965739 - DNA, 25 bp, Homo sapien
acacctccagacacagggagtgagg

SEQ ID NO: 2965740 - DNA, 25 bp, Homo sapien
cagacacagggagtgagggtggcat

SEQ ID NO: 2965741 - DNA, 25 bp, Homo sapien
ggcttcaggtcccgggtagagaaca

SEQ ID NO: 2965742 - DNA, 25 bp, Homo sapien
gggaaatcgggggatggagctgcca

SEQ ID NO: 2965743 - DNA, 25 bp, Homo sapien
gcttcaggtcccgggtagagaacag

SEQ ID NO: 2965744 - DNA, 25 bp, Homo sapien
cttcaggtcccgggtagagaacagc

SEQ ID NO: 2965745 - DNA, 25 bp, Homo sapien
tcctggccgcaggtgcagcttgaca

SEQ ID NO: 2965746 - DNA, 25 bp, Homo sapien
ggtctgccagcccattgtggtccat

SEQ ID NO: 2965747 - DNA, 25 bp, Homo sapien
cagcttgacacaggggtctgccagc

SEQ ID NO: 2965748 - DNA, 25 bp, Homo sapien
gctcctggccgcaggtgcagcttga

SEQ ID NO: 2965749 - DNA, 25 bp, Homo sapien
tacacatttaggtccccaagtcaac

SEQ ID NO: 2965750 - DNA, 25 bp, Homo sapien
catttaggtccccaagtcaactcag

SEQ ID NO: 2965751 - DNA, 25 bp, Homo sapien
taggtccccaagtcaactcagactc

SEQ ID NO: 2965752 - DNA, 25 bp, Homo sapien
ccaggcatacacatttaggtcccca

SEQ ID NO: 2965753 - DNA, 25 bp, Homo sapien
ctgcagcataaggacacccaggcct

SEQ ID NO: 2965754 - DNA, 25 bp, Homo sapien
cctggtgcggggagccatttcttcc

SEQ ID NO: 2965755 - DNA, 25 bp, Homo sapien
ccagagaaggcgcaatgttcccttc

SEQ ID NO: 2965756 - DNA, 25 bp, Homo sapien
tggggcactgccgtgtctcctacag

SEQ ID NO: 2965757 - DNA, 25 bp, Homo sapien
tcactgagctcccgcattgggcaca

SEQ ID NO: 2965758 - DNA, 25 bp, Homo sapien
tggttacactcactcttggctctca

SEQ ID NO: 2965759 - DNA, 25 bp, Homo sapien
tgagctcccgcattgggcacacttc

SEQ ID NO: 2965760 - DNA, 25 bp, Homo sapien
ccgcattgggcacacttccctggtt

SEQ ID NO: 2965761 - DNA, 25 bp, Homo sapien
tcttgtggatcacgagtgatcctgt

SEQ ID NO: 2965762 - DNA, 25 bp, Homo sapien
gatcctgtagtaagtgagggttttg

SEQ ID NO: 2965763 - DNA, 25 bp, Homo sapien
ggatcacgagtgatcctgtagtaag

SEQ ID NO: 2965764 - DNA, 25 bp, Homo sapien
cagggtcttgtggatcacgagtgat

SEQ ID NO: 2965765 - DNA, 25 bp, Homo sapien
cagaattaagactgcaagcacagca

SEQ ID NO: 2965766 - DNA, 25 bp, Homo sapien
aaatacacgtgtaaaggcaggtgtc

SEQ ID NO: 2965767 - DNA, 25 bp, Homo sapien
gcaaagacacccatattgaatgttc

SEQ ID NO: 2965768 - DNA, 25 bp, Homo sapien
gcatttttctactgagcaccaacga

SEQ ID NO: 2965769 - DNA, 25 bp, Homo sapien
tactttctagatgtcgaaggcggca

SEQ ID NO: 2965770 - DNA, 25 bp, Homo sapien
ttttagaagagatcctggccgtttg

SEQ ID NO: 2965771 - DNA, 25 bp, Homo sapien
ggcactcccagggttaacaaatcag

SEQ ID NO: 2965772 - DNA, 25 bp, Homo sapien
gtgaagatcccaccatactttctag

SEQ ID NO: 2965773 - DNA, 25 bp, Homo sapien
ctcaagaaggagtggccggcgaaaa

SEQ ID NO: 2965774 - DNA, 25 bp, Homo sapien
ggcgaaaaatctccaagccaatttc

SEQ ID NO: 2965775 - DNA, 25 bp, Homo sapien
tcagggctcaagaaggagtggccgg

SEQ ID NO: 2965776 - DNA, 25 bp, Homo sapien
ggagtggccggcgaaaaatctccaa

SEQ ID NO: 2965777 - DNA, 25 bp, Homo sapien
gaactagcggtttctgctactgcca

SEQ ID NO: 2965778 - DNA, 25 bp, Homo sapien
tagaagggtgccttagaactagcgg

SEQ ID NO: 2965779 - DNA, 25 bp, Homo sapien
tgtccaggaacaaactctgggagga

SEQ ID NO: 2965780 - DNA, 25 bp, Homo sapien
tctagtacggaacagagtaccttca

SEQ ID NO: 2965781 - DNA, 25 bp, Homo sapien
catccgatgcagaatctaacaaagg

SEQ ID NO: 2965782 - DNA, 25 bp, Homo sapien
gcaggagtgctactgtctaaactca

SEQ ID NO: 2965783 - DNA, 25 bp, Homo sapien
taaactcaagccaatgcagggtgcc

SEQ ID NO: 2965784 - DNA, 25 bp, Homo sapien
cactgaggttccagatcatccgatg

SEQ ID NO: 2965785 - DNA, 25 bp, Homo sapien
taatgtagaaggacccagggtacac

SEQ ID NO: 2965786 - DNA, 25 bp, Homo sapien
caactggcctggtgtaggagtctta

SEQ ID NO: 2965787 - DNA, 25 bp, Homo sapien
acacagggtgggtggctattctcca

SEQ ID NO: 2965788 - DNA, 25 bp, Homo sapien
cagctcagcgggtggaaggtataaa

SEQ ID NO: 2965789 - DNA, 25 bp, Homo sapien
gttaccatcatctggatacgagctg

SEQ ID NO: 2965790 - DNA, 25 bp, Homo sapien
cactgctgatgaacaaaaggaaggg

SEQ ID NO: 2965791 - DNA, 25 bp, Homo sapien
catctggatacgagctgaagcacag

SEQ ID NO: 2965792 - DNA, 25 bp, Homo sapien
ctcactgctgatgaacaaaaggaag

SEQ ID NO: 2965793 - DNA, 25 bp, Homo sapien
aaatgagactcagaaaggtttaagt

SEQ ID NO: 2965794 - DNA, 25 bp, Homo sapien
tcgtcagggaaagcttcgactgcaa

SEQ ID NO: 2965795 - DNA, 25 bp, Homo sapien
ttgctttttagtcgtcagggaaagc

SEQ ID NO: 2965796 - DNA, 25 bp, Homo sapien
gattgtttacaaaagatatgctagt

SEQ ID NO: 2965797 - DNA, 25 bp, Homo sapien
aagcttcgactgcaaaaatggtatg

SEQ ID NO: 2965798 - DNA, 25 bp, Homo sapien
aacgtagctgctggccatgttcaca

SEQ ID NO: 2965799 - DNA, 25 bp, Homo sapien
tggccatgttcacaaatgaaatgtg

SEQ ID NO: 2965800 - DNA, 25 bp, Homo sapien
gaaattgtaattactttggtcttca

SEQ ID NO: 2965801 - DNA, 25 bp, Homo sapien
gtatgaacgtagctgctggccatgt

SEQ ID NO: 2965802 - DNA, 25 bp, Homo sapien
aagtccagctagagcaagcaacttc

SEQ ID NO: 2965803 - DNA, 25 bp, Homo sapien
catcctgagtcacgctcacggccaa

SEQ ID NO: 2965804 - DNA, 25 bp, Homo sapien
tgcaaagtccagctagagcaagcaa

SEQ ID NO: 2965805 - DNA, 25 bp, Homo sapien
catctttgcatatcttgtgtcctgg

SEQ ID NO: 2965806 - DNA, 25 bp, Homo sapien
tacaccaaaacccacactttccaca

SEQ ID NO: 2965807 - DNA, 25 bp, Homo sapien
tctacaccaaaacccacactttcca

SEQ ID NO: 2965808 - DNA, 25 bp, Homo sapien
catggtgatgaaaagtgctcaaatc

SEQ ID NO: 2965809 - DNA, 25 bp, Homo sapien
gccagaggaccagccgaacgccaaa

SEQ ID NO: 2965810 - DNA, 25 bp, Homo sapien
ccagccgaacgccaaaggctaggag

SEQ ID NO: 2965811 - DNA, 25 bp, Homo sapien
cttcggaagcctaacgatccagcac

SEQ ID NO: 2965812 - DNA, 25 bp, Homo sapien
gaagcctaacgatccagcacaggtc

SEQ ID NO: 2965813 - DNA, 25 bp, Homo sapien
ccgcgaccacgacaaggatggcgac

SEQ ID NO: 2965814 - DNA, 25 bp, Homo sapien
gcgaccacgacaaggatggcgacca

SEQ ID NO: 2965815 - DNA, 25 bp, Homo sapien
accacgacaaggatggcgaccatct

SEQ ID NO: 2965816 - DNA, 25 bp, Homo sapien
cgaccacgacaaggatggcgaccat

SEQ ID NO: 2965817 - DNA, 25 bp, Homo sapien
gaccgtttgcatccaggagcatgtg

SEQ ID NO: 2965818 - DNA, 25 bp, Homo sapien
atgtggccatcgacgtgtgccccgg

SEQ ID NO: 2965819 - DNA, 25 bp, Homo sapien
gggaaaaggcgaccgtttgcatcca

SEQ ID NO: 2965820 - DNA, 25 bp, Homo sapien
gagcatgtggccatcgacgtgtgcc

SEQ ID NO: 2965821 - DNA, 25 bp, Homo sapien
tcgcgctggccttcgcggaggcccc

SEQ ID NO: 2965822 - DNA, 25 bp, Homo sapien
catgccgggcctgctgagccgcccc

SEQ ID NO: 2965823 - DNA, 25 bp, Homo sapien
ggcggcgaggcgctgcctgtatgac

SEQ ID NO: 2965824 - DNA, 25 bp, Homo sapien
gccccgccgcgccatgccgggcctg

SEQ ID NO: 2965825 - DNA, 25 bp, Homo sapien
agtgagtgtgcgatccgtgggtccc

SEQ ID NO: 2965826 - DNA, 25 bp, Homo sapien
cgcttgtcccgagggagtgcgcgca

SEQ ID NO: 2965827 - DNA, 25 bp, Homo sapien
agagcgaacggagccccgcatgtgc

SEQ ID NO: 2965828 - DNA, 25 bp, Homo sapien
gatgcttccactacgtgtctgcaca

SEQ ID NO: 2965829 - DNA, 25 bp, Homo sapien
ggatttgtttagtgacccgatgatg

SEQ ID NO: 2965830 - DNA, 25 bp, Homo sapien
ctgtccaagcagcagcgattcccaa

SEQ ID NO: 2965831 - DNA, 25 bp, Homo sapien
tttgtttagtgacccgatgatgtgg

SEQ ID NO: 2965832 - DNA, 25 bp, Homo sapien
agcgattcccaaccgagttctgttt

SEQ ID NO: 2965833 - DNA, 25 bp, Homo sapien
acctttttgctacctgagaccagtt

SEQ ID NO: 2965834 - DNA, 25 bp, Homo sapien
agcatttacaccagcggttcccaac

SEQ ID NO: 2965835 - DNA, 25 bp, Homo sapien
tgtaaaccttaagctgcttaactat

SEQ ID NO: 2965836 - DNA, 25 bp, Homo sapien
gatgatgtggagatgattcaagccc

SEQ ID NO: 2965837 - DNA, 25 bp, Homo sapien
taaatctgttcaaaggatagcagtc

SEQ ID NO: 2965838 - DNA, 25 bp, Homo sapien
gatagcagtcactcactttagccga

SEQ ID NO: 2965839 - DNA, 25 bp, Homo sapien
tatgggtgacagcatagtgaccttg

SEQ ID NO: 2965840 - DNA, 25 bp, Homo sapien
tcttgaactcccaatgctcagctaa

SEQ ID NO: 2965841 - DNA, 25 bp, Homo sapien
ccatcaacaaacgaatgggtagaga

SEQ ID NO: 2965842 - DNA, 25 bp, Homo sapien
agacaggcagtaacacatgttggtg

SEQ ID NO: 2965843 - DNA, 25 bp, Homo sapien
ggaaccctcatataccattgatgga

SEQ ID NO: 2965844 - DNA, 25 bp, Homo sapien
ggcagtaacacatgttggtgaggtt

SEQ ID NO: 2965845 - DNA, 25 bp, Homo sapien
tgcaagagccctcgtttatggagct

SEQ ID NO: 2965846 - DNA, 25 bp, Homo sapien
agatggattacttgcttgctgaagc

SEQ ID NO: 2965847 - DNA, 25 bp, Homo sapien
ttgttgaacgatcgctggttacggc

SEQ ID NO: 2965848 - DNA, 25 bp, Homo sapien
caagactcctaagaattgttgaacg

SEQ ID NO: 2965849 - DNA, 25 bp, Homo sapien
tgagctagactcaggcagggggctt

SEQ ID NO: 2965850 - DNA, 25 bp, Homo sapien
tcaataagatgacaacaaagcagag

SEQ ID NO: 2965851 - DNA, 25 bp, Homo sapien
ctgtgggtccacttcaataagatga

SEQ ID NO: 2965852 - DNA, 25 bp, Homo sapien
taagatgacaacaaagcagagctca

SEQ ID NO: 2965853 - DNA, 25 bp, Homo sapien
atgaaaacagggtccctctcggttg

SEQ ID NO: 2965854 - DNA, 25 bp, Homo sapien
ggtccctctcggttgtcctgtctgg

SEQ ID NO: 2965855 - DNA, 25 bp, Homo sapien
aacagggtccctctcggttgtcctg

SEQ ID NO: 2965856 - DNA, 25 bp, Homo sapien
gcagtatgaaaacagggtccctctc

SEQ ID NO: 2965857 - DNA, 25 bp, Homo sapien
gaaacgattgcagctcttcccggaa

SEQ ID NO: 2965858 - DNA, 25 bp, Homo sapien
gtaagctttccagccacggtgctgg

SEQ ID NO: 2965859 - DNA, 25 bp, Homo sapien
caatgcaaacctgaaactactcctg

SEQ ID NO: 2965860 - DNA, 25 bp, Homo sapien
aatggaggtcccgtgtttctgagag

SEQ ID NO: 2965861 - DNA, 25 bp, Homo sapien
gaggcccttctcaggcgaccagact

SEQ ID NO: 2965862 - DNA, 25 bp, Homo sapien
taaggctccccgcagtcttctgtgt

SEQ ID NO: 2965863 - DNA, 25 bp, Homo sapien
tgtgtcgtccagtacgcagttgaaa

SEQ ID NO: 2965864 - DNA, 25 bp, Homo sapien
agttgaaatcgttctccaacctggc

SEQ ID NO: 2965865 - DNA, 25 bp, Homo sapien
gataagtcgattggtcgtccctgcc

SEQ ID NO: 2965866 - DNA, 25 bp, Homo sapien
ctcgaagaaacccaaaggcgtcgtg

SEQ ID NO: 2965867 - DNA, 25 bp, Homo sapien
gattggctccggcttgggaagcggc

SEQ ID NO: 2965868 - DNA, 25 bp, Homo sapien
tgcgtgcgagtagcgctcgaagaaa

SEQ ID NO: 2965869 - DNA, 25 bp, Homo sapien
tggagccctcctgattttgtctgtt

SEQ ID NO: 2965870 - DNA, 25 bp, Homo sapien
gctccttgcggatgtgaccaaagct

SEQ ID NO: 2965871 - DNA, 25 bp, Homo sapien
tctgtttatctggtagggcctgctg

SEQ ID NO: 2965872 - DNA, 25 bp, Homo sapien
cttcagcttgtatatctgggcttca

SEQ ID NO: 2965873 - DNA, 25 bp, Homo sapien
ttaacaatcttccttctctgtccca

SEQ ID NO: 2965874 - DNA, 25 bp, Homo sapien
taacaatcttccttctctgtcccac

SEQ ID NO: 2965875 - DNA, 25 bp, Homo sapien
accagcctggcgggacacaaggcga

SEQ ID NO: 2965876 - DNA, 25 bp, Homo sapien
gcctggcgggacacaaggcgagccc

SEQ ID NO: 2965877 - DNA, 25 bp, Homo sapien
cagcctggcgggacacaaggcgagc

SEQ ID NO: 2965878 - DNA, 25 bp, Homo sapien
ctggaccagcctggcgggacacaag

SEQ ID NO: 2965879 - DNA, 25 bp, Homo sapien
gaattccagtgtagacaccgtcgcg

SEQ ID NO: 2965880 - DNA, 25 bp, Homo sapien
gcgctcagcagaagaccaaaccttg

SEQ ID NO: 2965881 - DNA, 25 bp, Homo sapien
aaggcaaaataacggcacctggagg

SEQ ID NO: 2965882 - DNA, 25 bp, Homo sapien
cgggcgaaggctggcgattcatcca

SEQ ID NO: 2965883 - DNA, 25 bp, Homo sapien
ctgcagccgaggtcgcagccaggct

SEQ ID NO: 2965884 - DNA, 25 bp, Homo sapien
caggcgacgatccatgagggttgtt

SEQ ID NO: 2965885 - DNA, 25 bp, Homo sapien
tcgaatcctgagtggaggctgtagc

SEQ ID NO: 2965886 - DNA, 25 bp, Homo sapien
ttgttggaccagtgcggacgcgtct

SEQ ID NO: 2965887 - DNA, 25 bp, Homo sapien
acgcgtcttggagttcgggtcgaat

SEQ ID NO: 2965888 - DNA, 25 bp, Homo sapien
gcttcgcaggtagtagcgttggcac

SEQ ID NO: 2965889 - DNA, 25 bp, Homo sapien
ctttgtgaaagatgtgcgggaggaa

SEQ ID NO: 2965890 - DNA, 25 bp, Homo sapien
tcaaagaagggcatattcactttgt

SEQ ID NO: 2965891 - DNA, 25 bp, Homo sapien
aaagatgtgcgggaggaattccagg

SEQ ID NO: 2965892 - DNA, 25 bp, Homo sapien
gctttccctcggcttttagaatctc

SEQ ID NO: 2965893 - DNA, 25 bp, Homo sapien
ttagaatctcaacccccttgtggtc

SEQ ID NO: 2965894 - DNA, 25 bp, Homo sapien
cactctagacctgtcctatgaattg

SEQ ID NO: 2965895 - DNA, 25 bp, Homo sapien
ggtcatccaagctttccaaaaagga

SEQ ID NO: 2965896 - DNA, 25 bp, Homo sapien
tgagcacagcgtttcggcctcccga

SEQ ID NO: 2965897 - DNA, 25 bp, Homo sapien
ctgaattgggcgctggctgcacact

SEQ ID NO: 2965898 - DNA, 25 bp, Homo sapien
tctgacagctaggtcagcggcgcga

SEQ ID NO: 2965899 - DNA, 25 bp, Homo sapien
agcctgccaactcctcgtggcgatg

SEQ ID NO: 2965900 - DNA, 25 bp, Homo sapien
agagtcctctgagccgggggtcgcg

SEQ ID NO: 2965901 - DNA, 25 bp, Homo sapien
aagagtcctctgagccgggggtcgc

SEQ ID NO: 2965902 - DNA, 25 bp, Homo sapien
gtcctctgagccgggggtcgcgcac

SEQ ID NO: 2965903 - DNA, 25 bp, Homo sapien
gccgcgggtgcagcgatcctgccgg

SEQ ID NO: 2965904 - DNA, 25 bp, Homo sapien
ggccgatggccgcgccgcggagagg

SEQ ID NO: 2965905 - DNA, 25 bp, Homo sapien
ctgcactggccgatggccgcgccgc

SEQ ID NO: 2965906 - DNA, 25 bp, Homo sapien
actggccgatggccgcgccgcggag

SEQ ID NO: 2965907 - DNA, 25 bp, Homo sapien
gcactggccgatggccgcgccgcgg

SEQ ID NO: 2965908 - DNA, 25 bp, Homo sapien
cgcccgcggggggatcctctgcagg

SEQ ID NO: 2965909 - DNA, 25 bp, Homo sapien
gtcgcccgcggggggatcctctgca

SEQ ID NO: 2965910 - DNA, 25 bp, Homo sapien
cggtcgcccgcggggggatcctctg

SEQ ID NO: 2965911 - DNA, 25 bp, Homo sapien
gcacggaggggaccgccgaggggca

SEQ ID NO: 2965912 - DNA, 25 bp, Homo sapien
ggaagcgcggcttccaggaccctgc

SEQ ID NO: 2965913 - DNA, 25 bp, Homo sapien
tgagtcccagcgggacggacggaaa

SEQ ID NO: 2965914 - DNA, 25 bp, Homo sapien
aggaccctgccagaccgcccttgct

SEQ ID NO: 2965915 - DNA, 25 bp, Homo sapien
ttgctctggccgcggggcagtcacc

SEQ ID NO: 2965916 - DNA, 25 bp, Homo sapien
gcagccaggaaaacataatggtggt

SEQ ID NO: 2965917 - DNA, 25 bp, Homo sapien
ccaggaaaacataatggtggtgagg

SEQ ID NO: 2965918 - DNA, 25 bp, Homo sapien
gaaaacataatggtggtgaggtcaa

SEQ ID NO: 2965919 - DNA, 25 bp, Homo sapien
gcagcagccaggaaaacataatggt

SEQ ID NO: 2965920 - DNA, 25 bp, Homo sapien
cttggctgaacgcacttgtaactac

SEQ ID NO: 2965921 - DNA, 25 bp, Homo sapien
cactgtcttaatcatggagactttt

SEQ ID NO: 2965922 - DNA, 25 bp, Homo sapien
actgtcttaatcatggagacttttg

SEQ ID NO: 2965923 - DNA, 25 bp, Homo sapien
tgtcttaatcatggagacttttgac

SEQ ID NO: 2965924 - DNA, 25 bp, Homo sapien
ctgtcttaatcatggagacttttga

SEQ ID NO: 2965925 - DNA, 25 bp, Homo sapien
gcagtggccactcgccaccccagca

SEQ ID NO: 2965926 - DNA, 25 bp, Homo sapien
ggcagtggccactcgccaccccagc

SEQ ID NO: 2965927 - DNA, 25 bp, Homo sapien
tggccactcgccaccccagcagtgg

SEQ ID NO: 2965928 - DNA, 25 bp, Homo sapien
ccctgctggcatcgcctttttcaga

SEQ ID NO: 2965929 - DNA, 25 bp, Homo sapien
ccctgggagttgctgcacctgaacc

SEQ ID NO: 2965930 - DNA, 25 bp, Homo sapien
tgggagttgctgcacctgaaccacc

SEQ ID NO: 2965931 - DNA, 25 bp, Homo sapien
ttccctgctggcatcgcctttttca

SEQ ID NO: 2965932 - DNA, 25 bp, Homo sapien
aggactcggcttgaacctcgtagca

SEQ ID NO: 2965933 - DNA, 25 bp, Homo sapien
tagttggaggactcggcttgaacct

SEQ ID NO: 2965934 - DNA, 25 bp, Homo sapien
tcggcttgaacctcgtagcaccagt

SEQ ID NO: 2965935 - DNA, 25 bp, Homo sapien
tgaacctcgtagcaccagtgtgact

SEQ ID NO: 2965936 - DNA, 25 bp, Homo sapien
agagcagtcccctggactggctgta

SEQ ID NO: 2965937 - DNA, 25 bp, Homo sapien
aagagcagtcccctggactggctgt

SEQ ID NO: 2965938 - DNA, 25 bp, Homo sapien
gagcagtcccctggactggctgtac

SEQ ID NO: 2965939 - DNA, 25 bp, Homo sapien
caaagagcagtcccctggactggct

SEQ ID NO: 2965940 - DNA, 25 bp, Homo sapien
tcttatcgtagccagagaagaagaa

SEQ ID NO: 2965941 - DNA, 25 bp, Homo sapien
cagtccacgtttgcttcttatcgta

SEQ ID NO: 2965942 - DNA, 25 bp, Homo sapien
cgttattttggacagtccacgtttg

SEQ ID NO: 2965943 - DNA, 25 bp, Homo sapien
cagagaagaagaagcgtcccagttt

SEQ ID NO: 2965944 - DNA, 25 bp, Homo sapien
tggtctgacaaaagtaacgaaaaca

SEQ ID NO: 2965945 - DNA, 25 bp, Homo sapien
atactagagtgctctctcctcctgg

SEQ ID NO: 2965946 - DNA, 25 bp, Homo sapien
gaacacgccgagctgttccatgcct

SEQ ID NO: 2965947 - DNA, 25 bp, Homo sapien
ctggcagtcctctgaacacgccgag

SEQ ID NO: 2965948 - DNA, 25 bp, Homo sapien
aaagtgctccccatcgaggctgtgc

SEQ ID NO: 2965949 - DNA, 25 bp, Homo sapien
tatatggcaagtcggaccagtgcag

SEQ ID NO: 2965950 - DNA, 25 bp, Homo sapien
gtgctccgagcccttatatggcaag

SEQ ID NO: 2965951 - DNA, 25 bp, Homo sapien
cggaccagtgcaggtgcaactgttt

SEQ ID NO: 2965952 - DNA, 25 bp, Homo sapien
caccagaaaggccagcaccgcaatt

SEQ ID NO: 2965953 - DNA, 25 bp, Homo sapien
cagcaccgcaatttcgtcttcaggg

SEQ ID NO: 2965954 - DNA, 25 bp, Homo sapien
gaaaggccagcaccgcaatttcgtc

SEQ ID NO: 2965955 - DNA, 25 bp, Homo sapien
cgcaatttcgtcttcagggtcctgg

SEQ ID NO: 2965956 - DNA, 25 bp, Homo sapien
ggaagggtcttgagaaagtctgcag

SEQ ID NO: 2965957 - DNA, 25 bp, Homo sapien
agggaagggtcttgagaaagtctgc

SEQ ID NO: 2965958 - DNA, 25 bp, Homo sapien
gaagggtcttgagaaagtctgcagg

SEQ ID NO: 2965959 - DNA, 25 bp, Homo sapien
aagggtcttgagaaagtctgcaggg

SEQ ID NO: 2965960 - DNA, 25 bp, Homo sapien
gggatattagacagtgcctccacca

SEQ ID NO: 2965961 - DNA, 25 bp, Homo sapien
cagtggctggaagccctcgttcacc

SEQ ID NO: 2965962 - DNA, 25 bp, Homo sapien
tggaagccctcgttcacctgggttc

SEQ ID NO: 2965963 - DNA, 25 bp, Homo sapien
ttggggatattagacagtgcctcca

SEQ ID NO: 2965964 - DNA, 25 bp, Homo sapien
gaacacagtccagacgaccttctca

SEQ ID NO: 2965965 - DNA, 25 bp, Homo sapien
tgagcccaggtagcggaagtagtgc

SEQ ID NO: 2965966 - DNA, 25 bp, Homo sapien
ttctcatcgcaggtcggtgtggtga

SEQ ID NO: 2965967 - DNA, 25 bp, Homo sapien
gctgaatgggctcccggaacacagt

SEQ ID NO: 2965968 - DNA, 25 bp, Homo sapien
ccaggcagtgggagcccatgccctg

SEQ ID NO: 2965969 - DNA, 25 bp, Homo sapien
agggcagacagagggataatttctg

SEQ ID NO: 2965970 - DNA, 25 bp, Homo sapien
cctgagggacctctgagggcagaca

SEQ ID NO: 2965971 - DNA, 25 bp, Homo sapien
tgggctccccacctgtatcctgagg

SEQ ID NO: 2965972 - DNA, 25 bp, Homo sapien
gcctcgttcatgatagaaaccccag

SEQ ID NO: 2965973 - DNA, 25 bp, Homo sapien
gaacccctggctctcaaggtggtcg

SEQ ID NO: 2965974 - DNA, 25 bp, Homo sapien
caaacttgagcatgcgttagcatca

SEQ ID NO: 2965975 - DNA, 25 bp, Homo sapien
tcctgggagccctcattaggaaaga

SEQ ID NO: 2965976 - DNA, 25 bp, Homo sapien
tgtctgttccttgtcgtagtacagc

SEQ ID NO: 2965977 - DNA, 25 bp, Homo sapien
tgctcactgtctgttccttgtcgta

SEQ ID NO: 2965978 - DNA, 25 bp, Homo sapien
gcctgacattgtccttcatgctcac

SEQ ID NO: 2965979 - DNA, 25 bp, Homo sapien
tgtccttcatgctcactgtctgttc

SEQ ID NO: 2965980 - DNA, 25 bp, Homo sapien
aggcaggccagcatggggcccagca

SEQ ID NO: 2965981 - DNA, 25 bp, Homo sapien
agggcccagggcagcggccgacccg

SEQ ID NO: 2965982 - DNA, 25 bp, Homo sapien
gcaggcaggccagcatggggcccag

SEQ ID NO: 2965983 - DNA, 25 bp, Homo sapien
cagcaggcaggccagcatggggccc

SEQ ID NO: 2965984 - DNA, 25 bp, Homo sapien
ggaccggaagcctggaacttggaga

SEQ ID NO: 2965985 - DNA, 25 bp, Homo sapien
gaaggctaaggaccggaagcctgga

SEQ ID NO: 2965986 - DNA, 25 bp, Homo sapien
gtccatattttaatcatgcctaaag

SEQ ID NO: 2965987 - DNA, 25 bp, Homo sapien
atatgtccatattttaatcatgcct

SEQ ID NO: 2965988 - DNA, 25 bp, Homo sapien
tattttaatcatgcctaaagtccca

SEQ ID NO: 2965989 - DNA, 25 bp, Homo sapien
catattttaatcatgcctaaagtcc

SEQ ID NO: 2965990 - DNA, 25 bp, Homo sapien
cgcagctcttctccaaaggaagccc

SEQ ID NO: 2965991 - DNA, 25 bp, Homo sapien
cagctgacacttggaacaacctgag

SEQ ID NO: 2965992 - DNA, 25 bp, Homo sapien
aggccttgccgcagctgacacttgg

SEQ ID NO: 2965993 - DNA, 25 bp, Homo sapien
agggctctgcggaaggaactgactc

SEQ ID NO: 2965994 - DNA, 25 bp, Homo sapien
cctctgttccctggacatccatagg

SEQ ID NO: 2965995 - DNA, 25 bp, Homo sapien
gggagtgcccggagcagtcagcctg

SEQ ID NO: 2965996 - DNA, 25 bp, Homo sapien
tgttccctggacatccatagggagc

SEQ ID NO: 2965997 - DNA, 25 bp, Homo sapien
tctgttccctggacatccataggga

SEQ ID NO: 2965998 - DNA, 25 bp, Homo sapien
ctcatttggtctgctagaaatcatg

SEQ ID NO: 2965999 - DNA, 25 bp, Homo sapien
aaggccattttgctactcagtatac

SEQ ID NO: 2966000 - DNA, 25 bp, Homo sapien
cacacagtgctccagtagggtctga

SEQ ID NO: 2966001 - DNA, 25 bp, Homo sapien
ctaagcattcagaaagccaagcaca

SEQ ID NO: 2966002 - DNA, 25 bp, Homo sapien
aagacaaattcttcagcctccctct

SEQ ID NO: 2966003 - DNA, 25 bp, Homo sapien
aggtgagcggcaagctgtatttaga

SEQ ID NO: 2966004 - DNA, 25 bp, Homo sapien
ggctacagaccagtaccatctgtgg

SEQ ID NO: 2966005 - DNA, 25 bp, Homo sapien
gttggcaaccactgatgtagagtgt

SEQ ID NO: 2966006 - DNA, 25 bp, Homo sapien
ctatgtagaggcctttatgaaacca

SEQ ID NO: 2966007 - DNA, 25 bp, Homo sapien
ctggaggcagtacccactgcgcagt

SEQ ID NO: 2966008 - DNA, 25 bp, Homo sapien
cctttgtggactctagaagagcaac

SEQ ID NO: 2966009 - DNA, 25 bp, Homo sapien
tgcgcagtcacgtggctgtgccaca

SEQ ID NO: 2966010 - DNA, 25 bp, Homo sapien
taaaagacatactagaagaagaatt

SEQ ID NO: 2966011 - DNA, 25 bp, Homo sapien
cctgctagagaattattagcaccat

SEQ ID NO: 2966012 - DNA, 25 bp, Homo sapien
tgagcatggatcatcactgttgcca

SEQ ID NO: 2966013 - DNA, 25 bp, Homo sapien
gttggcaaacccaccatcaaattat

SEQ ID NO: 2966014 - DNA, 25 bp, Homo sapien
gcaaagtggtgtgccctgtagtctc

SEQ ID NO: 2966015 - DNA, 25 bp, Homo sapien
tagtaattatagcaaagcattggcc

SEQ ID NO: 2966016 - DNA, 25 bp, Homo sapien
agactggggaggaagatcatttgaa

SEQ ID NO: 2966017 - DNA, 25 bp, Homo sapien
tggcccctgtctaccaaactttgtc

SEQ ID NO: 2966018 - DNA, 25 bp, Homo sapien
aagcagtggtaacagacaaggaaca

SEQ ID NO: 2966019 - DNA, 25 bp, Homo sapien
agtgaagcagtggtaacagacaagg

SEQ ID NO: 2966020 - DNA, 25 bp, Homo sapien
tgaagcagtggtaacagacaaggaa

SEQ ID NO: 2966021 - DNA, 25 bp, Homo sapien
aaagtgaagcagtggtaacagacaa

SEQ ID NO: 2966022 - DNA, 25 bp, Homo sapien
gatcattttggttctactgtcttgt

SEQ ID NO: 2966023 - DNA, 25 bp, Homo sapien
atcattttggttctactgtcttgtc

SEQ ID NO: 2966024 - DNA, 25 bp, Homo sapien
gaaaagctgtgagaagcttgatatt

SEQ ID NO: 2966025 - DNA, 25 bp, Homo sapien
gctgtgagaagcttgatattatctt

SEQ ID NO: 2966026 - DNA, 25 bp, Homo sapien
tgcccagctgtaaataggatatttt

SEQ ID NO: 2966027 - DNA, 25 bp, Homo sapien
atgcccagctgtaaataggatattt

SEQ ID NO: 2966028 - DNA, 25 bp, Homo sapien
ggctgtagggaactatgatcgtgtc

SEQ ID NO: 2966029 - DNA, 25 bp, Homo sapien
aatccaagatagagattgaaaataa

SEQ ID NO: 2966030 - DNA, 25 bp, Homo sapien
catagcccagcctcattgtattcac

SEQ ID NO: 2966031 - DNA, 25 bp, Homo sapien
tgtatacacagcttactattctgcc

SEQ ID NO: 2966032 - DNA, 25 bp, Homo sapien
aaatttcccggcatttgtacatagc

SEQ ID NO: 2966033 - DNA, 25 bp, Homo sapien
ttggcataactctttcctctccagt

SEQ ID NO: 2966034 - DNA, 25 bp, Homo sapien
cacacagtgttggagtttggagaga

SEQ ID NO: 2966035 - DNA, 25 bp, Homo sapien
tagtcctctccaagcagtctagcag

SEQ ID NO: 2966036 - DNA, 25 bp, Homo sapien
tctacgttgtgactgaaatgcctgc

SEQ ID NO: 2966037 - DNA, 25 bp, Homo sapien
tgtatgtgctcccagaaaactctct

SEQ ID NO: 2966038 - DNA, 25 bp, Homo sapien
gaggtgtgtatgttaccctcactga

SEQ ID NO: 2966039 - DNA, 25 bp, Homo sapien
gctggagtcacacattgtaagtaat

SEQ ID NO: 2966040 - DNA, 25 bp, Homo sapien
actttctaccaaactctggctggag

SEQ ID NO: 2966041 - DNA, 25 bp, Homo sapien
gcaccatcgtggcttacggcagtct

SEQ ID NO: 2966042 - DNA, 25 bp, Homo sapien
cttgtggaacaggaatcagtaggtt

SEQ ID NO: 2966043 - DNA, 25 bp, Homo sapien
cagtcaagtgagcagcctctgtaaa

SEQ ID NO: 2966044 - DNA, 25 bp, Homo sapien
ggagaccactaacttgttgatagct

SEQ ID NO: 2966045 - DNA, 25 bp, Homo sapien
tggtgaatgagctgcaactgttttc

SEQ ID NO: 2966046 - DNA, 25 bp, Homo sapien
aaagagtggcaccttattcattacc

SEQ ID NO: 2966047 - DNA, 25 bp, Homo sapien
tttcccctgctaaatgtgaaaggga

SEQ ID NO: 2966048 - DNA, 25 bp, Homo sapien
tcttagttgcttagtgtccgtctgt

SEQ ID NO: 2966049 - DNA, 25 bp, Homo sapien
caaaagcattcataagccctgcata

SEQ ID NO: 2966050 - DNA, 25 bp, Homo sapien
ccaagagacgaggagacctgaaggt

SEQ ID NO: 2966051 - DNA, 25 bp, Homo sapien
gccccagagtgctgtgcatattgta

SEQ ID NO: 2966052 - DNA, 25 bp, Homo sapien
caaaagccgtattagattccggagt

SEQ ID NO: 2966053 - DNA, 25 bp, Homo sapien
gggcctgcatatttaccagatagtc

SEQ ID NO: 2966054 - DNA, 25 bp, Homo sapien
gacaggaatcgagttatactatatg

SEQ ID NO: 2966055 - DNA, 25 bp, Homo sapien
tggagtgcgaccttgggatcactgc

SEQ ID NO: 2966056 - DNA, 25 bp, Homo sapien
tgtcaggataggtgcagtgcctaat

SEQ ID NO: 2966057 - DNA, 25 bp, Homo sapien
gacgatgtctgtcgcttcccaggct

SEQ ID NO: 2966058 - DNA, 25 bp, Homo sapien
aggagccgccggggcagaagccgca

SEQ ID NO: 2966059 - DNA, 25 bp, Homo sapien
ggcggtggcggcgaccgggaggagc

SEQ ID NO: 2966060 - DNA, 25 bp, Homo sapien
gtgatccggcatggaggcggtggcg

SEQ ID NO: 2966061 - DNA, 25 bp, Homo sapien
cggtggcggcgaccgggaggagccg

SEQ ID NO: 2966062 - DNA, 25 bp, Homo sapien
gaggataagccttttgcacagcgct

SEQ ID NO: 2966063 - DNA, 25 bp, Homo sapien
cagtcaaagacgtccctaaggttgg

SEQ ID NO: 2966064 - DNA, 25 bp, Homo sapien
ggcagatccacttcgttaacaaggt

SEQ ID NO: 2966065 - DNA, 25 bp, Homo sapien
cagcgctttccagagaatgtgtaca

SEQ ID NO: 2966066 - DNA, 25 bp, Homo sapien
tagctctacttttcaggcccaagtg

SEQ ID NO: 2966067 - DNA, 25 bp, Homo sapien
gattttttgagatggctagtaattt

SEQ ID NO: 2966068 - DNA, 25 bp, Homo sapien
ctgcctggcctgccaaaacaatttt

SEQ ID NO: 2966069 - DNA, 25 bp, Homo sapien
ttttgagatggctagtaatttaatt

SEQ ID NO: 2966070 - DNA, 25 bp, Homo sapien
ttcgcctgccttcgcgacagtgcgg

SEQ ID NO: 2966071 - DNA, 25 bp, Homo sapien
cttccttcgtgtcctctgggcccgg

SEQ ID NO: 2966072 - DNA, 25 bp, Homo sapien
cagcggccacctcgggcacaggaga

SEQ ID NO: 2966073 - DNA, 25 bp, Homo sapien
acagtgcggtgggaccgccgtcggc

SEQ ID NO: 2966074 - DNA, 25 bp, Homo sapien
gcgagccctccagggacccgaggcc

SEQ ID NO: 2966075 - DNA, 25 bp, Homo sapien
cgcgagccctccagggacccgaggc

SEQ ID NO: 2966076 - DNA, 25 bp, Homo sapien
cgagccctccagggacccgaggccg

SEQ ID NO: 2966077 - DNA, 25 bp, Homo sapien
ccgcgagccctccagggacccgagg

SEQ ID NO: 2966078 - DNA, 25 bp, Homo sapien
tcgagcgaagactttggcagagcgc

SEQ ID NO: 2966079 - DNA, 25 bp, Homo sapien
gctccccgagaggaaagcacagttt

SEQ ID NO: 2966080 - DNA, 25 bp, Homo sapien
gaactcattttcctgcacgtgtgcc

SEQ ID NO: 2966081 - DNA, 25 bp, Homo sapien
gacaccacctggtaaggctgttgaa

SEQ ID NO: 2966082 - DNA, 25 bp, Homo sapien
agaactcggagcaaagccacggcaa

SEQ ID NO: 2966083 - DNA, 25 bp, Homo sapien
tcctcattcttaggggtggctgcag

SEQ ID NO: 2966084 - DNA, 25 bp, Homo sapien
agtgggcggtttggctccagaactc

SEQ ID NO: 2966085 - DNA, 25 bp, Homo sapien
tgtgacctagccgtctcagggagtg

SEQ ID NO: 2966086 - DNA, 25 bp, Homo sapien
ctcagcaggtgtgccggtaggctcc

SEQ ID NO: 2966087 - DNA, 25 bp, Homo sapien
cagcaggtgtgccggtaggctccag

SEQ ID NO: 2966088 - DNA, 25 bp, Homo sapien
tcagcaggtgtgccggtaggctcca

SEQ ID NO: 2966089 - DNA, 25 bp, Homo sapien
catggcgcatgagcgagtctctagc

SEQ ID NO: 2966090 - DNA, 25 bp, Homo sapien
ggcccttggcatggcgcatgagcga

SEQ ID NO: 2966091 - DNA, 25 bp, Homo sapien
cttggcatggcgcatgagcgagtct

SEQ ID NO: 2966092 - DNA, 25 bp, Homo sapien
catgagcgagtctctagcagggctg

SEQ ID NO: 2966093 - DNA, 25 bp, Homo sapien
gggttccaggctggctctttactca

SEQ ID NO: 2966094 - DNA, 25 bp, Homo sapien
ggacagggttccaggctggctcttt

SEQ ID NO: 2966095 - DNA, 25 bp, Homo sapien
cagggttccaggctggctctttact

SEQ ID NO: 2966096 - DNA, 25 bp, Homo sapien
gacagggttccaggctggctcttta

SEQ ID NO: 2966097 - DNA, 25 bp, Homo sapien
ggcaggtgcaactttcgcaggaact

SEQ ID NO: 2966098 - DNA, 25 bp, Homo sapien
ggtcccctaggaccacaaggctctg

SEQ ID NO: 2966099 - DNA, 25 bp, Homo sapien
aggaacttcttcagcggtcttaggt

SEQ ID NO: 2966100 - DNA, 25 bp, Homo sapien
tctccagtgtttgatttcccaggct

SEQ ID NO: 2966101 - DNA, 25 bp, Homo sapien
tgtaaagtcggcgaagctgctttgc

SEQ ID NO: 2966102 - DNA, 25 bp, Homo sapien
ggtgtacttgtaaagtcggcgaagc

SEQ ID NO: 2966103 - DNA, 25 bp, Homo sapien
agtcggcgaagctgctttgcttcca

SEQ ID NO: 2966104 - DNA, 25 bp, Homo sapien
tgctcttggtgtacttgtaaagtcg

SEQ ID NO: 2966105 - DNA, 25 bp, Homo sapien
ggtcggccagcaaggacctctccgg

SEQ ID NO: 2966106 - DNA, 25 bp, Homo sapien
cggcgcatccgaggcgcagaatgtc

SEQ ID NO: 2966107 - DNA, 25 bp, Homo sapien
tgccgctgatgttgctgtgcagccc

SEQ ID NO: 2966108 - DNA, 25 bp, Homo sapien
agcttgggcagactgtcttcccggt

SEQ ID NO: 2966109 - DNA, 25 bp, Homo sapien
ttgacatggtcctgggatcttggct

SEQ ID NO: 2966110 - DNA, 25 bp, Homo sapien
tcctgggatcttggctgcccaggca

SEQ ID NO: 2966111 - DNA, 25 bp, Homo sapien
ctttcttgacatggtcctgggatct

SEQ ID NO: 2966112 - DNA, 25 bp, Homo sapien
tcttgacatggtcctgggatcttgg

SEQ ID NO: 2966113 - DNA, 25 bp, Homo sapien
tctggggcttcctttatcctcttcc

SEQ ID NO: 2966114 - DNA, 25 bp, Homo sapien
tcctcttgagttttggtttttgaga

SEQ ID NO: 2966115 - DNA, 25 bp, Homo sapien
acggttcagtctctggagtttctgg

SEQ ID NO: 2966116 - DNA, 25 bp, Homo sapien
ttacggttcagtctctggagtttct

SEQ ID NO: 2966117 - DNA, 25 bp, Homo sapien
ttattcctaattaagacctgagaat

SEQ ID NO: 2966118 - DNA, 25 bp, Homo sapien
tattcctaattaagacctgagaatc

SEQ ID NO: 2966119 - DNA, 25 bp, Homo sapien
gagccaggacaagcgggccctttgt

SEQ ID NO: 2966120 - DNA, 25 bp, Homo sapien
tgagagccaggacaagcgggccctt

SEQ ID NO: 2966121 - DNA, 25 bp, Homo sapien
aagacggttcttcattgtgtcagga

SEQ ID NO: 2966122 - DNA, 25 bp, Homo sapien
gaaaacttggtttgtggtgcacagt

SEQ ID NO: 2966123 - DNA, 25 bp, Homo sapien
ccattgcaggtaccgtttgtgtaac

SEQ ID NO: 2966124 - DNA, 25 bp, Homo sapien
cgtgaaaatccccactaatagtgcc

SEQ ID NO: 2966125 - DNA, 25 bp, Homo sapien
gtttcagtgcactaaagtacagctc

SEQ ID NO: 2966126 - DNA, 25 bp, Homo sapien
tatagcaaccagaattccttatgcc

SEQ ID NO: 2966127 - DNA, 25 bp, Homo sapien
tggtttctaactaaaactatatcac

SEQ ID NO: 2966128 - DNA, 25 bp, Homo sapien
agtagtatttgggtgctattctggc

SEQ ID NO: 2966129 - DNA, 25 bp, Homo sapien
tcagataaaggcacaatcgtaaagc

SEQ ID NO: 2966130 - DNA, 25 bp, Homo sapien
caggaatgttgactgctgtataagc

SEQ ID NO: 2966131 - DNA, 25 bp, Homo sapien
tctgcactttaaagccaaggagaaa

SEQ ID NO: 2966132 - DNA, 25 bp, Homo sapien
tccaaatttccatcagtaggcatag

SEQ ID NO: 2966133 - DNA, 25 bp, Homo sapien
tagaggcctcattacacagtcacga

SEQ ID NO: 2966134 - DNA, 25 bp, Homo sapien
caacgctctgggcacttggttcacg

SEQ ID NO: 2966135 - DNA, 25 bp, Homo sapien
tagggctatgagttccaacgctctg

SEQ ID NO: 2966136 - DNA, 25 bp, Homo sapien
gaactgccttttagacacgtagatg

SEQ ID NO: 2966137 - DNA, 25 bp, Homo sapien
aaaggtggttaccagggcctgactg

SEQ ID NO: 2966138 - DNA, 25 bp, Homo sapien
tgcacatgctgtaaaacagtttgcc

SEQ ID NO: 2966139 - DNA, 25 bp, Homo sapien
caaatgtccactgaccgatgaatga

SEQ ID NO: 2966140 - DNA, 25 bp, Homo sapien
tacacctagatatattccccaaaga

SEQ ID NO: 2966141 - DNA, 25 bp, Homo sapien
gcatcattgtacgactcccatatca

SEQ ID NO: 2966142 - DNA, 25 bp, Homo sapien
caagagcatcattgtacgactccca

SEQ ID NO: 2966143 - DNA, 25 bp, Homo sapien
ttcaagagcatcattgtacgactcc

SEQ ID NO: 2966144 - DNA, 25 bp, Homo sapien
gagcatcattgtacgactcccatat

SEQ ID NO: 2966145 - DNA, 25 bp, Homo sapien
atgggatggcggccgggcggagacg

SEQ ID NO: 2966146 - DNA, 25 bp, Homo sapien
tcctagatgtgatggcggctgggaa

SEQ ID NO: 2966147 - DNA, 25 bp, Homo sapien
ctagatgggatggcggccgggcgga

SEQ ID NO: 2966148 - DNA, 25 bp, Homo sapien
cttcctagatgtgatggcggctggg

SEQ ID NO: 2966149 - DNA, 25 bp, Homo sapien
tgcatcttggcatccgctgcttggc

SEQ ID NO: 2966150 - DNA, 25 bp, Homo sapien
cactggtctctgaacccggataagt

SEQ ID NO: 2966151 - DNA, 25 bp, Homo sapien
ggcagagccgcatgaacagctatga

SEQ ID NO: 2966152 - DNA, 25 bp, Homo sapien
ccggataagtttccgggcagagccg

SEQ ID NO: 2966153 - DNA, 25 bp, Homo sapien
atctcatcccatggaatgcaggcca

SEQ ID NO: 2966154 - DNA, 25 bp, Homo sapien
tcatcccatggaatgcaggccatac

SEQ ID NO: 2966155 - DNA, 25 bp, Homo sapien
tctcatcccatggaatgcaggccat

SEQ ID NO: 2966156 - DNA, 25 bp, Homo sapien
ctcatcccatggaatgcaggccata

SEQ ID NO: 2966157 - DNA, 25 bp, Homo sapien
tgtgaacactcatgggagctcaggc

SEQ ID NO: 2966158 - DNA, 25 bp, Homo sapien
ggcctgatctctacttttatagaga

SEQ ID NO: 2966159 - DNA, 25 bp, Homo sapien
tcaggcctgatctctacttttatag

SEQ ID NO: 2966160 - DNA, 25 bp, Homo sapien
ggtttgggaacttctgtgcatgcat

SEQ ID NO: 2966161 - DNA, 25 bp, Homo sapien
ttgaacaagatgcacacaggtactc

SEQ ID NO: 2966162 - DNA, 25 bp, Homo sapien
gcacttgtccatgggtctagcaggt

SEQ ID NO: 2966163 - DNA, 25 bp, Homo sapien
tgtatggaactattcagcacagctg

SEQ ID NO: 2966164 - DNA, 25 bp, Homo sapien
agcaggttcctgtggcactgaagaa

SEQ ID NO: 2966165 - DNA, 25 bp, Homo sapien
gcagaaaacgaaagctaaggctgtc

SEQ ID NO: 2966166 - DNA, 25 bp, Homo sapien
gaagtttccagtcactcgcttctgg

SEQ ID NO: 2966167 - DNA, 25 bp, Homo sapien
cttaaggctctgtagcaagcagaaa

SEQ ID NO: 2966168 - DNA, 25 bp, Homo sapien
gaagtatgaaggcatgccttctcac

SEQ ID NO: 2966169 - DNA, 25 bp, Homo sapien
tagccaggactaaatccagaggaag

SEQ ID NO: 2966170 - DNA, 25 bp, Homo sapien
ccagaggaagggctgacatcagaac

SEQ ID NO: 2966171 - DNA, 25 bp, Homo sapien
taaagaactttcctagcaggccagg

SEQ ID NO: 2966172 - DNA, 25 bp, Homo sapien
gcaggccaggtgttatagctctcac

SEQ ID NO: 2966173 - DNA, 25 bp, Homo sapien
tcaagtctctcaagtctacgtgtcc

SEQ ID NO: 2966174 - DNA, 25 bp, Homo sapien
gactagaactgctcgaaacactggg

SEQ ID NO: 2966175 - DNA, 25 bp, Homo sapien
tgagcacttaccatggactagaact

SEQ ID NO: 2966176 - DNA, 25 bp, Homo sapien
tgagaaagcagaggtcttaaaaccc

SEQ ID NO: 2966177 - DNA, 25 bp, Homo sapien
ggacagggacttgtcaggaaacaag

SEQ ID NO: 2966178 - DNA, 25 bp, Homo sapien
ctccacatgcaagggcccgtgaggg

SEQ ID NO: 2966179 - DNA, 25 bp, Homo sapien
gcaacagaatatgtgcctcattttc

SEQ ID NO: 2966180 - DNA, 25 bp, Homo sapien
gggctcagttgcaacagaatatgtg

SEQ ID NO: 2966181 - DNA, 25 bp, Homo sapien
cccgtgaggggagtcaactgaattc

SEQ ID NO: 2966182 - DNA, 25 bp, Homo sapien
tagtcagtatagtacccaatgggta

SEQ ID NO: 2966183 - DNA, 25 bp, Homo sapien
gtgtcattgcgctcatctttatgcc

SEQ ID NO: 2966184 - DNA, 25 bp, Homo sapien
cccctttagtacctagtgtcattgc

SEQ ID NO: 2966185 - DNA, 25 bp, Homo sapien
tagtggcctacagctctacccatgt

SEQ ID NO: 2966186 - DNA, 25 bp, Homo sapien
ctattgtcatccactgatttgttca

SEQ ID NO: 2966187 - DNA, 25 bp, Homo sapien
cctccgggttgtcggcagttgttga

SEQ ID NO: 2966188 - DNA, 25 bp, Homo sapien
tcagtccagcgttcttaatgcggcc

SEQ ID NO: 2966189 - DNA, 25 bp, Homo sapien
tgtgtaggcttttggctcagtccag

SEQ ID NO: 2966190 - DNA, 25 bp, Homo sapien
agttgttgatcctttcccgagcggc

SEQ ID NO: 2966191 - DNA, 25 bp, Homo sapien
tgtctggacttgtccgcgagagctg

SEQ ID NO: 2966192 - DNA, 25 bp, Homo sapien
ttatcttcgacgacgccgagaaggg

SEQ ID NO: 2966193 - DNA, 25 bp, Homo sapien
ggccaactattgtttatcttcgacg

SEQ ID NO: 2966194 - DNA, 25 bp, Homo sapien
gcgggagacacactaggcgctcgcc

SEQ ID NO: 2966195 - DNA, 25 bp, Homo sapien
ctcccagcgagtacagccccgccat

SEQ ID NO: 2966196 - DNA, 25 bp, Homo sapien
cctcccgccctggtcggagaagacg

SEQ ID NO: 2966197 - DNA, 25 bp, Homo sapien
tcccgccctggtcggagaagacgct

SEQ ID NO: 2966198 - DNA, 25 bp, Homo sapien
ctcccgccctggtcggagaagacgc

SEQ ID NO: 2966199 - DNA, 25 bp, Homo sapien
ccgccctggtcggagaagacgctca

SEQ ID NO: 2966200 - DNA, 25 bp, Homo sapien
tttcttcagccgtcggttcgggctc

SEQ ID NO: 2966201 - DNA, 25 bp, Homo sapien
aggcaacggctgagacagcgaccgc

SEQ ID NO: 2966202 - DNA, 25 bp, Homo sapien
gatttgagtaacgtcctccatgtac

SEQ ID NO: 2966203 - DNA, 25 bp, Homo sapien
ggttcgggctccacaacgatttgag

SEQ ID NO: 2966204 - DNA, 25 bp, Homo sapien
agcctctcgggctgccaccgctggg

SEQ ID NO: 2966205 - DNA, 25 bp, Homo sapien
gtccgggagagggtcgcgagcctct

SEQ ID NO: 2966206 - DNA, 25 bp, Homo sapien
ccggcgtccgggagagggtcgcgag

SEQ ID NO: 2966207 - DNA, 25 bp, Homo sapien
gggtcgcgagcctctcgggctgcca

SEQ ID NO: 2966208 - DNA, 25 bp, Homo sapien
ccttagccggctcggacgaggtgaa

SEQ ID NO: 2966209 - DNA, 25 bp, Homo sapien
catggcaaggtgacaagcgagaaag

SEQ ID NO: 2966210 - DNA, 25 bp, Homo sapien
gaggtgaaacccttctgcttcttga

SEQ ID NO: 2966211 - DNA, 25 bp, Homo sapien
ggatggcagcgcaaaccttagccgg

SEQ ID NO: 2966212 - DNA, 25 bp, Homo sapien
ggggctggtgccataaaagccctga

SEQ ID NO: 2966213 - DNA, 25 bp, Homo sapien
ccacgcggggctggtgccataaaag

SEQ ID NO: 2966214 - DNA, 25 bp, Homo sapien
tatactttggttgcgctctgggtgc

SEQ ID NO: 2966215 - DNA, 25 bp, Homo sapien
tcagtgtatactttggttgcgctct

SEQ ID NO: 2966216 - DNA, 25 bp, Homo sapien
cctctggttgccaccaaagtgaagc

SEQ ID NO: 2966217 - DNA, 25 bp, Homo sapien
tggttgccaccaaagtgaagcaggg

SEQ ID NO: 2966218 - DNA, 25 bp, Homo sapien
ctggttgccaccaaagtgaagcagg

SEQ ID NO: 2966219 - DNA, 25 bp, Homo sapien
tctggttgccaccaaagtgaagcag

SEQ ID NO: 2966220 - DNA, 25 bp, Homo sapien
gacaaagtcatccttcgggtcatcc

SEQ ID NO: 2966221 - DNA, 25 bp, Homo sapien
cctgatgtgctaggaagacccgtca

SEQ ID NO: 2966222 - DNA, 25 bp, Homo sapien
tcacctacgtgagctacatacatct

SEQ ID NO: 2966223 - DNA, 25 bp, Homo sapien
atgccccgaatgatgaccacactgg

SEQ ID NO: 2966224 - DNA, 25 bp, Homo sapien
aaacaataactggaaaggtttgcag

SEQ ID NO: 2966225 - DNA, 25 bp, Homo sapien
aacattggattctactcaacttgcc

SEQ ID NO: 2966226 - DNA, 25 bp, Homo sapien
caaagtgttctactctggaactcca

SEQ ID NO: 2966227 - DNA, 25 bp, Homo sapien
cttacacattgaaacgctaagttca

SEQ ID NO: 2966228 - DNA, 25 bp, Homo sapien
taaaatgtataacacccggagtgaa

SEQ ID NO: 2966229 - DNA, 25 bp, Homo sapien
caccaggtgataacagtatgtcagt

SEQ ID NO: 2966230 - DNA, 25 bp, Homo sapien
cagaggactcttacggtgatgaaac

SEQ ID NO: 2966231 - DNA, 25 bp, Homo sapien
gagaggctgcatgactggatattat

SEQ ID NO: 2966232 - DNA, 25 bp, Homo sapien
gaatctggtcaataactgtgctcct

SEQ ID NO: 2966233 - DNA, 25 bp, Homo sapien
aactacacgattcaccccagacttg

SEQ ID NO: 2966234 - DNA, 25 bp, Homo sapien
ccttctaacaggtccattgtgagtg

SEQ ID NO: 2966235 - DNA, 25 bp, Homo sapien
gagtcgaggtcgtttccaaactaca

SEQ ID NO: 2966236 - DNA, 25 bp, Homo sapien
gaagaaatcatagctccacaaatca

SEQ ID NO: 2966237 - DNA, 25 bp, Homo sapien
aatatacttgtgcttctgagggtca

SEQ ID NO: 2966238 - DNA, 25 bp, Homo sapien
tcctggcacattgagatggcatctt

SEQ ID NO: 2966239 - DNA, 25 bp, Homo sapien
ggacacttgtgtctggttcaggtga

SEQ ID NO: 2966240 - DNA, 25 bp, Homo sapien
tggcacaagattgtccatgctcacc

SEQ ID NO: 2966241 - DNA, 25 bp, Homo sapien
tttggcacaagattgtccatgctca

SEQ ID NO: 2966242 - DNA, 25 bp, Homo sapien
ttggcacaagattgtccatgctcac

SEQ ID NO: 2966243 - DNA, 25 bp, Homo sapien
caggttcaggtataactcatcttca

SEQ ID NO: 2966244 - DNA, 25 bp, Homo sapien
cagcggcccaatgctcgattcacaa

SEQ ID NO: 2966245 - DNA, 25 bp, Homo sapien
gggaaggagtcatcacacaggtttc

SEQ ID NO: 2966246 - DNA, 25 bp, Homo sapien
tatggcactagtgttatctgctcgg

SEQ ID NO: 2966247 - DNA, 25 bp, Homo sapien
ttgaatcgagttcaaatccaaaatc

SEQ ID NO: 2966248 - DNA, 25 bp, Homo sapien
ctttcttgaatcgagttcaaatcca

SEQ ID NO: 2966249 - DNA, 25 bp, Homo sapien
tcttgaatcgagttcaaatccaaaa

SEQ ID NO: 2966250 - DNA, 25 bp, Homo sapien
cactttcttgaatcgagttcaaatc

SEQ ID NO: 2966251 - DNA, 25 bp, Homo sapien
ttttattagtgctgtacacatggct

SEQ ID NO: 2966252 - DNA, 25 bp, Homo sapien
tttattagtgctgtacacatggctg

SEQ ID NO: 2966253 - DNA, 25 bp, Homo sapien
gtattgatgtaaagatggctctctg

SEQ ID NO: 2966254 - DNA, 25 bp, Homo sapien
gctggcattcagattagtattgatg

SEQ ID NO: 2966255 - DNA, 25 bp, Homo sapien
gcttcagagatcaactttctcctcc

SEQ ID NO: 2966256 - DNA, 25 bp, Homo sapien
gttcactgcttcagagatcaacttt

SEQ ID NO: 2966257 - DNA, 25 bp, Homo sapien
aaaagttcactgcttcagagatcaa

SEQ ID NO: 2966258 - DNA, 25 bp, Homo sapien
actgcttcagagatcaactttctcc

SEQ ID NO: 2966259 - DNA, 25 bp, Homo sapien
gaaggcattgctacgaaccagggca

SEQ ID NO: 2966260 - DNA, 25 bp, Homo sapien
tctgcgtcgcatggtgagtttaaca

SEQ ID NO: 2966261 - DNA, 25 bp, Homo sapien
ggctgagcaccactacttcgactta

SEQ ID NO: 2966262 - DNA, 25 bp, Homo sapien
catttggccaggagttgacatcttc

SEQ ID NO: 2966263 - DNA, 25 bp, Homo sapien
aaagccctcttatatcctaagtttg

SEQ ID NO: 2966264 - DNA, 25 bp, Homo sapien
gccaggataaaactgctgaattcca

SEQ ID NO: 2966265 - DNA, 25 bp, Homo sapien
tacaagcaagtacaaggccaggata

SEQ ID NO: 2966266 - DNA, 25 bp, Homo sapien
aaaaagttcaacatcggcaccaaat

SEQ ID NO: 2966267 - DNA, 25 bp, Homo sapien
taaaagacacttggctctaagaaac

SEQ ID NO: 2966268 - DNA, 25 bp, Homo sapien
taattgggacaagactaactgtagc

SEQ ID NO: 2966269 - DNA, 25 bp, Homo sapien
gcatggctcaacacttctatgaaaa

SEQ ID NO: 2966270 - DNA, 25 bp, Homo sapien
taagtgaaacacaggtcactatgaa

SEQ ID NO: 2966271 - DNA, 25 bp, Homo sapien
agaaaaatgctactgatgtaagaga

SEQ ID NO: 2966272 - DNA, 25 bp, Homo sapien
gcatatctgatgactaaggttttag

SEQ ID NO: 2966273 - DNA, 25 bp, Homo sapien
tgttgggaattagcagcaccatctg

SEQ ID NO: 2966274 - DNA, 25 bp, Homo sapien
ctttaagacctaataatgccattgg

SEQ ID NO: 2966275 - DNA, 25 bp, Homo sapien
caccttcgaaagattgtagccctgg

SEQ ID NO: 2966276 - DNA, 25 bp, Homo sapien
gaagcagatcttctagccccaatga

SEQ ID NO: 2966277 - DNA, 25 bp, Homo sapien
aataatggcatagttggctgggcac

SEQ ID NO: 2966278 - DNA, 25 bp, Homo sapien
tcatgccttgtgtaggagtctccca

SEQ ID NO: 2966279 - DNA, 25 bp, Homo sapien
ccagcccttggcgatgtgtttacct

SEQ ID NO: 2966280 - DNA, 25 bp, Homo sapien
ttccaagctcggagcacgtggacat

SEQ ID NO: 2966281 - DNA, 25 bp, Homo sapien
gaattctcgcgacagctggttccaa

SEQ ID NO: 2966282 - DNA, 25 bp, Homo sapien
catggcagctgccaatcacttttag

SEQ ID NO: 2966283 - DNA, 25 bp, Homo sapien
ccgccggttaacgctagtctccagc

SEQ ID NO: 2966284 - DNA, 25 bp, Homo sapien
cccgccggttaacgctagtctccag

SEQ ID NO: 2966285 - DNA, 25 bp, Homo sapien
cgccggttaacgctagtctccagct

SEQ ID NO: 2966286 - DNA, 25 bp, Homo sapien
aggctcaagcaattctcctgcctca

SEQ ID NO: 2966287 - DNA, 25 bp, Homo sapien
gcgagcgccaccatgccgagctaaa

SEQ ID NO: 2966288 - DNA, 25 bp, Homo sapien
cctcccaggctcaagcaattctcct

SEQ ID NO: 2966289 - DNA, 25 bp, Homo sapien
cgatctctgctcatggcaatctccg

SEQ ID NO: 2966290 - DNA, 25 bp, Homo sapien
caccagtacaacgactgggtcttct

SEQ ID NO: 2966291 - DNA, 25 bp, Homo sapien
agcctgggggcgaaccacaactcca

SEQ ID NO: 2966292 - DNA, 25 bp, Homo sapien
agtacaacgactgggtcttcttggg

SEQ ID NO: 2966293 - DNA, 25 bp, Homo sapien
aactccaccagtacaacgactgggt

SEQ ID NO: 2966294 - DNA, 25 bp, Homo sapien
ctaaatgttagtattctgagtaatc

SEQ ID NO: 2966295 - DNA, 25 bp, Homo sapien
tattcatcccataaagccaacagtt

SEQ ID NO: 2966296 - DNA, 25 bp, Homo sapien
tcttcagctattgggtttatctgaa

SEQ ID NO: 2966297 - DNA, 25 bp, Homo sapien
caaaagtaaccactgttcataaaga

SEQ ID NO: 2966298 - DNA, 25 bp, Homo sapien
atccactaatttgttaaacctggag

SEQ ID NO: 2966299 - DNA, 25 bp, Homo sapien
acaactcctgacccactaaactgat

SEQ ID NO: 2966300 - DNA, 25 bp, Homo sapien
cttcaggatttagcatagtgctctt

SEQ ID NO: 2966301 - DNA, 25 bp, Homo sapien
gctcttcacgtactctgtaaatgtg

SEQ ID NO: 2966302 - DNA, 25 bp, Homo sapien
tgtcagccttcaagtatacatatct

SEQ ID NO: 2966303 - DNA, 25 bp, Homo sapien
gcatgagggtctcaggatgttgttc

SEQ ID NO: 2966304 - DNA, 25 bp, Homo sapien
catgagggtctcaggatgttgttca

SEQ ID NO: 2966305 - DNA, 25 bp, Homo sapien
caagtatacatatctttggccaggc

SEQ ID NO: 2966306 - DNA, 25 bp, Homo sapien
agtcacaacactttccatgtaggac

SEQ ID NO: 2966307 - DNA, 25 bp, Homo sapien
gaaaagtcacaacactttccatgta

SEQ ID NO: 2966308 - DNA, 25 bp, Homo sapien
aaagtcacaacactttccatgtagg

SEQ ID NO: 2966309 - DNA, 25 bp, Homo sapien
gcagaaaagtcacaacactttccat

SEQ ID NO: 2966310 - DNA, 25 bp, Homo sapien
gatttctgagtgatatgcagaacaa

SEQ ID NO: 2966311 - DNA, 25 bp, Homo sapien
ctttcagtgtattgggattcttgaa

SEQ ID NO: 2966312 - DNA, 25 bp, Homo sapien
tcagcttagcagacttattcctttg

SEQ ID NO: 2966313 - DNA, 25 bp, Homo sapien
gacttattcctttgcgacatttgat

SEQ ID NO: 2966314 - DNA, 25 bp, Homo sapien
ctagacccaacctatcagctgcttc

SEQ ID NO: 2966315 - DNA, 25 bp, Homo sapien
agacccaacctatcagctgcttcct

SEQ ID NO: 2966316 - DNA, 25 bp, Homo sapien
tagacccaacctatcagctgcttcc

SEQ ID NO: 2966317 - DNA, 25 bp, Homo sapien
gacccaacctatcagctgcttcctg

SEQ ID NO: 2966318 - DNA, 25 bp, Homo sapien
taagtgctaggtgtttgtggcaatt

SEQ ID NO: 2966319 - DNA, 25 bp, Homo sapien
gtttgtggcaattatactggtgtga

SEQ ID NO: 2966320 - DNA, 25 bp, Homo sapien
tatactggtgtgagtattactgtac

SEQ ID NO: 2966321 - DNA, 25 bp, Homo sapien
ctttaactattaagtgctaggtgtt

SEQ ID NO: 2966322 - DNA, 25 bp, Homo sapien
ctgttagaggtgttccactgtaagc

SEQ ID NO: 2966323 - DNA, 25 bp, Homo sapien
tgagaaaggatatctctctgtcgcc

SEQ ID NO: 2966324 - DNA, 25 bp, Homo sapien
gggaaattggctgttatgtctcttt

SEQ ID NO: 2966325 - DNA, 25 bp, Homo sapien
tctcctaaggtcagataacaactta

SEQ ID NO: 2966326 - DNA, 25 bp, Homo sapien
agcgattctccttgggaaattggct

SEQ ID NO: 2966327 - DNA, 25 bp, Homo sapien
gctgttcactgatgcagtttcacta

SEQ ID NO: 2966328 - DNA, 25 bp, Homo sapien
tggctgttcactgatgcagtttcac

SEQ ID NO: 2966329 - DNA, 25 bp, Homo sapien
ttcactgatgcagtttcactactca

SEQ ID NO: 2966330 - DNA, 25 bp, Homo sapien
taactgtttctgaactgggctggtt

SEQ ID NO: 2966331 - DNA, 25 bp, Homo sapien
cctttgcaaagatcctgaggcatga

SEQ ID NO: 2966332 - DNA, 25 bp, Homo sapien
ggcatgaaaagttctgtggctttaa

SEQ ID NO: 2966333 - DNA, 25 bp, Homo sapien
gaggcatgaaaagttctgtggcttt

SEQ ID NO: 2966334 - DNA, 25 bp, Homo sapien
gagggtcccctttgcaaagatcctg

SEQ ID NO: 2966335 - DNA, 25 bp, Homo sapien
acactctaaaaggtaaataatgata

SEQ ID NO: 2966336 - DNA, 25 bp, Homo sapien
tacactctaaaaggtaaataatgat

SEQ ID NO: 2966337 - DNA, 25 bp, Homo sapien
tcctgggctctagcgcatctcctgc

SEQ ID NO: 2966338 - DNA, 25 bp, Homo sapien
ccacctcctgggctctagcgcatct

SEQ ID NO: 2966339 - DNA, 25 bp, Homo sapien
acctcctgggctctagcgcatctcc

SEQ ID NO: 2966340 - DNA, 25 bp, Homo sapien
ctcctgggctctagcgcatctcctg

SEQ ID NO: 2966341 - DNA, 25 bp, Homo sapien
gcattagaattaagtaacaaagaag

SEQ ID NO: 2966342 - DNA, 25 bp, Homo sapien
tagaattaagtaacaaagaagcaaa

SEQ ID NO: 2966343 - DNA, 25 bp, Homo sapien
cattagaattaagtaacaaagaagc

SEQ ID NO: 2966344 - DNA, 25 bp, Homo sapien
ctgcattagaattaagtaacaaaga

SEQ ID NO: 2966345 - DNA, 25 bp, Homo sapien
caatcataatcaacaaaggcggttc

SEQ ID NO: 2966346 - DNA, 25 bp, Homo sapien
cataatcaacaaaggcggttcattc

SEQ ID NO: 2966347 - DNA, 25 bp, Homo sapien
aaggcggttcattcccagtactatg

SEQ ID NO: 2966348 - DNA, 25 bp, Homo sapien
tcaacaaaggcggttcattcccagt

SEQ ID NO: 2966349 - DNA, 25 bp, Homo sapien
ttaaaacctcacagaagatatcaac

SEQ ID NO: 2966350 - DNA, 25 bp, Homo sapien
gaagatatcaacacatccgcaacag

SEQ ID NO: 2966351 - DNA, 25 bp, Homo sapien
cacatccgcaacagaatggccaaaa

SEQ ID NO: 2966352 - DNA, 25 bp, Homo sapien
tcacagaagatatcaacacatccgc

SEQ ID NO: 2966353 - DNA, 25 bp, Homo sapien
aatattattcagcatctgaataagc

SEQ ID NO: 2966354 - DNA, 25 bp, Homo sapien
gacatgaaagaaccttatatgcata

SEQ ID NO: 2966355 - DNA, 25 bp, Homo sapien
ttattcagcatctgaataagctatc

SEQ ID NO: 2966356 - DNA, 25 bp, Homo sapien
aataaaaaggtatctgtcataaaca

SEQ ID NO: 2966357 - DNA, 25 bp, Homo sapien
cagtttggaggcacaataaggagaa

SEQ ID NO: 2966358 - DNA, 25 bp, Homo sapien
caaccatagaaaatagctttcgcat

SEQ ID NO: 2966359 - DNA, 25 bp, Homo sapien
gtttggaggcacaataaggagaaca

SEQ ID NO: 2966360 - DNA, 25 bp, Homo sapien
ttccaaccatagaaaatagctttcg

SEQ ID NO: 2966361 - DNA, 25 bp, Homo sapien
agagctcttgtgcttcaccactgat

SEQ ID NO: 2966362 - DNA, 25 bp, Homo sapien
agaagagctcttgtgcttcaccact

SEQ ID NO: 2966363 - DNA, 25 bp, Homo sapien
gaagagctcttgtgcttcaccactg

SEQ ID NO: 2966364 - DNA, 25 bp, Homo sapien
aagagctcttgtgcttcaccactga

SEQ ID NO: 2966365 - DNA, 25 bp, Homo sapien
tgctctacagctgtaaaatggtgtc

SEQ ID NO: 2966366 - DNA, 25 bp, Homo sapien
accctttttaggtagcgcttgtgct

SEQ ID NO: 2966367 - DNA, 25 bp, Homo sapien
ccttgcaggctgtagctagatagaa

SEQ ID NO: 2966368 - DNA, 25 bp, Homo sapien
agcgttcccatcccaggcccatgct

SEQ ID NO: 2966369 - DNA, 25 bp, Homo sapien
agagataggtttttaccgtgttgcc

SEQ ID NO: 2966370 - DNA, 25 bp, Homo sapien
gccagccagcgttcccatcccaggc

SEQ ID NO: 2966371 - DNA, 25 bp, Homo sapien
acagcaggcacttggtaaaccctag

SEQ ID NO: 2966372 - DNA, 25 bp, Homo sapien
cctggcttctcttggggaaaacaat

SEQ ID NO: 2966373 - DNA, 25 bp, Homo sapien
cgcgcccagccttacacactttttt

SEQ ID NO: 2966374 - DNA, 25 bp, Homo sapien
tgtagctagatagaatgaggtgagc

SEQ ID NO: 2966375 - DNA, 25 bp, Homo sapien
ccctagaatgcgttgtgtacccttt

SEQ ID NO: 2966376 - DNA, 25 bp, Homo sapien
aagattctagccgctcgaattgggc

SEQ ID NO: 2966377 - DNA, 25 bp, Homo sapien
attctagccgctcgaattgggccat

SEQ ID NO: 2966378 - DNA, 25 bp, Homo sapien
aggcaagattctagccgctcgaatt

SEQ ID NO: 2966379 - DNA, 25 bp, Homo sapien
ggcaagattctagccgctcgaattg

SEQ ID NO: 2966380 - DNA, 25 bp, Homo sapien
tcctatgggagcatgcactactgac

SEQ ID NO: 2966381 - DNA, 25 bp, Homo sapien
gaacaagaagggttagaaggacata

SEQ ID NO: 2966382 - DNA, 25 bp, Homo sapien
agaacattaagtcctatgggagcat

SEQ ID NO: 2966383 - DNA, 25 bp, Homo sapien
caagaagggttagaaggacataagt

SEQ ID NO: 2966384 - DNA, 25 bp, Homo sapien
caagtctctggcataaaattgcatc

SEQ ID NO: 2966385 - DNA, 25 bp, Homo sapien
tactgacataattttatccgtggta

SEQ ID NO: 2966386 - DNA, 25 bp, Homo sapien
ataaacagttgtctcttggtatctg

SEQ ID NO: 2966387 - DNA, 25 bp, Homo sapien
cacattctaccaatatgtccaagta

SEQ ID NO: 2966388 - DNA, 25 bp, Homo sapien
tggaccctctgattaagtctgatgc

SEQ ID NO: 2966389 - DNA, 25 bp, Homo sapien
accctggaccctctgattaagtctg

SEQ ID NO: 2966390 - DNA, 25 bp, Homo sapien
cctggaccctctgattaagtctgat

SEQ ID NO: 2966391 - DNA, 25 bp, Homo sapien
gaaccctggaccctctgattaagtc

SEQ ID NO: 2966392 - DNA, 25 bp, Homo sapien
ttttttcagcaaagttatcacattt

SEQ ID NO: 2966393 - DNA, 25 bp, Homo sapien
cttttttcagcaaagttatcacatt

SEQ ID NO: 2966394 - DNA, 25 bp, Homo sapien
taattcatgcacactgatctctccc

SEQ ID NO: 2966395 - DNA, 25 bp, Homo sapien
attaattcatgcacactgatctctc

SEQ ID NO: 2966396 - DNA, 25 bp, Homo sapien
ttcccattccttaagatctaaccta

SEQ ID NO: 2966397 - DNA, 25 bp, Homo sapien
gatctaacctatgctgctccttctc

SEQ ID NO: 2966398 - DNA, 25 bp, Homo sapien
cacagcaggtaaggtactagtcctc

SEQ ID NO: 2966399 - DNA, 25 bp, Homo sapien
tgggcagccaactactcaacagagg

SEQ ID NO: 2966400 - DNA, 25 bp, Homo sapien
gaggattcactcaaataccccaggt

SEQ ID NO: 2966401 - DNA, 25 bp, Homo sapien
tctgcatatgcatgaagcctcagct

SEQ ID NO: 2966402 - DNA, 25 bp, Homo sapien
tcagtcctgccagaccccccgccat

SEQ ID NO: 2966403 - DNA, 25 bp, Homo sapien
ttctggtttccggtctccacgctcc

SEQ ID NO: 2966404 - DNA, 25 bp, Homo sapien
agcttctggtttccggtctccacgc

SEQ ID NO: 2966405 - DNA, 25 bp, Homo sapien
tggtttccggtctccacgctccttg

SEQ ID NO: 2966406 - DNA, 25 bp, Homo sapien
ggtcttgaagtaatggctccagtct

SEQ ID NO: 2966407 - DNA, 25 bp, Homo sapien
agtatttgggaagatctgagccctc

SEQ ID NO: 2966408 - DNA, 25 bp, Homo sapien
ccctcaggtcctcgatggtcttgaa

SEQ ID NO: 2966409 - DNA, 25 bp, Homo sapien
tgaagtaatggctccagtctctgac

SEQ ID NO: 2966410 - DNA, 25 bp, Homo sapien
actgttgatttgcagaacgatgcag

SEQ ID NO: 2966411 - DNA, 25 bp, Homo sapien
cacaggcactgttgatttgcagaac

SEQ ID NO: 2966412 - DNA, 25 bp, Homo sapien
agcagcaacacaggcactgttgatt

SEQ ID NO: 2966413 - DNA, 25 bp, Homo sapien
tcagcagcaacacaggcactgttga

SEQ ID NO: 2966414 - DNA, 25 bp, Homo sapien
cagagcccatggatgtccctctcca

SEQ ID NO: 2966415 - DNA, 25 bp, Homo sapien
tgcagagcccatggatgtccctctc

SEQ ID NO: 2966416 - DNA, 25 bp, Homo sapien
cttcctcttcgaggtttttcttcag

SEQ ID NO: 2966417 - DNA, 25 bp, Homo sapien
ctcttcgaggtttttcttcaggaag

SEQ ID NO: 2966418 - DNA, 25 bp, Homo sapien
ttggttcttctgagccagttcgtca

SEQ ID NO: 2966419 - DNA, 25 bp, Homo sapien
cctcttggttcttctgagccagttc

SEQ ID NO: 2966420 - DNA, 25 bp, Homo sapien
tggttcttctgagccagttcgtcat

SEQ ID NO: 2966421 - DNA, 25 bp, Homo sapien
tcttggttcttctgagccagttcgt

SEQ ID NO: 2966422 - DNA, 25 bp, Homo sapien
catgagaatcaacgcagcagctcca

SEQ ID NO: 2966423 - DNA, 25 bp, Homo sapien
atgagaatcaacgcagcagctccaa

SEQ ID NO: 2966424 - DNA, 25 bp, Homo sapien
gcagcaggatccagtctacaggatc

SEQ ID NO: 2966425 - DNA, 25 bp, Homo sapien
agcaggatccagtctacaggatctg

SEQ ID NO: 2966426 - DNA, 25 bp, Homo sapien
cagcaggatccagtctacaggatct

SEQ ID NO: 2966427 - DNA, 25 bp, Homo sapien
catccactatcctgggagaggtggt

SEQ ID NO: 2966428 - DNA, 25 bp, Homo sapien
atccactatcctgggagaggtggtc

SEQ ID NO: 2966429 - DNA, 25 bp, Homo sapien
ggctccccaaagggtacactgcttc

SEQ ID NO: 2966430 - DNA, 25 bp, Homo sapien
ctggctccccaaagggtacactgct

SEQ ID NO: 2966431 - DNA, 25 bp, Homo sapien
caaagggtacactgcttctgctggc

SEQ ID NO: 2966432 - DNA, 25 bp, Homo sapien
tcctggctccccaaagggtacactg

SEQ ID NO: 2966433 - DNA, 25 bp, Homo sapien
cggtatacctaagatgtaaagctct

SEQ ID NO: 2966434 - DNA, 25 bp, Homo sapien
gcagctgtcagcataaacggtatac

SEQ ID NO: 2966435 - DNA, 25 bp, Homo sapien
gctctttctttgagcagtaaagaca

SEQ ID NO: 2966436 - DNA, 25 bp, Homo sapien
taaaaacgtctctatgccagtgcgg

SEQ ID NO: 2966437 - DNA, 25 bp, Homo sapien
ggccaatctgtagcacaagcaccag

SEQ ID NO: 2966438 - DNA, 25 bp, Homo sapien
cagtactcggttaggcaatgaagac

SEQ ID NO: 2966439 - DNA, 25 bp, Homo sapien
ggtacagccctatttctcgaacagt

SEQ ID NO: 2966440 - DNA, 25 bp, Homo sapien
gaaagtaaagacctctagatgcagt

SEQ ID NO: 2966441 - DNA, 25 bp, Homo sapien
cctgaagcaccactttgattccagc

SEQ ID NO: 2966442 - DNA, 25 bp, Homo sapien
ggcctgaagcaccactttgattcca

SEQ ID NO: 2966443 - DNA, 25 bp, Homo sapien
gcctgaagcaccactttgattccag

SEQ ID NO: 2966444 - DNA, 25 bp, Homo sapien
ctggtggcggggaggacgtgtgcca

SEQ ID NO: 2966445 - DNA, 25 bp, Homo sapien
tggcggggaggacgtgtgccaggtg

SEQ ID NO: 2966446 - DNA, 25 bp, Homo sapien
cggggaggacgtgtgccaggtgcct

SEQ ID NO: 2966447 - DNA, 25 bp, Homo sapien
ggtggcggggaggacgtgtgccagg

SEQ ID NO: 2966448 - DNA, 25 bp, Homo sapien
tttttgcaggagcaagtttagctga

SEQ ID NO: 2966449 - DNA, 25 bp, Homo sapien
agtttagctgacaaccgcggcgatc

SEQ ID NO: 2966450 - DNA, 25 bp, Homo sapien
cttccatttttgcaggagcaagttt

SEQ ID NO: 2966451 - DNA, 25 bp, Homo sapien
ttcgcttccatttttgcaggagcaa

SEQ ID NO: 2966452 - DNA, 25 bp, Homo sapien
ttattcaccccgtgaagaacatgta

SEQ ID NO: 2966453 - DNA, 25 bp, Homo sapien
acatgtagagctttacagatggtgg

SEQ ID NO: 2966454 - DNA, 25 bp, Homo sapien
tgaagaacatgtagagctttacaga

SEQ ID NO: 2966455 - DNA, 25 bp, Homo sapien
tgggtagaaattattcaccccgtga

SEQ ID NO: 2966456 - DNA, 25 bp, Homo sapien
acaatgaattcacatggacacaagg

SEQ ID NO: 2966457 - DNA, 25 bp, Homo sapien
atacagaatgctctcacttctaagt

SEQ ID NO: 2966458 - DNA, 25 bp, Homo sapien
tacagaatgctctcacttctaagtg

SEQ ID NO: 2966459 - DNA, 25 bp, Homo sapien
tccacacaacagtacggtgggcttg

SEQ ID NO: 2966460 - DNA, 25 bp, Homo sapien
cacacaacagtacggtgggcttgtg

SEQ ID NO: 2966461 - DNA, 25 bp, Homo sapien
cgaagtgaatacagatccacacaac

SEQ ID NO: 2966462 - DNA, 25 bp, Homo sapien
ctccccagtacgaagtgaatacaga

SEQ ID NO: 2966463 - DNA, 25 bp, Homo sapien
ggagatcataaataggtgtcttaaa

SEQ ID NO: 2966464 - DNA, 25 bp, Homo sapien
agatcataaataggtgtcttaaatt

SEQ ID NO: 2966465 - DNA, 25 bp, Homo sapien
tggagatcataaataggtgtcttaa

SEQ ID NO: 2966466 - DNA, 25 bp, Homo sapien
aatggagatcataaataggtgtctt

SEQ ID NO: 2966467 - DNA, 25 bp, Homo sapien
tttctcctgcaagactacgacaagg

SEQ ID NO: 2966468 - DNA, 25 bp, Homo sapien
ttctcctgcaagactacgacaagga

SEQ ID NO: 2966469 - DNA, 25 bp, Homo sapien
aaagaatttcttcgtgaaagtacag

SEQ ID NO: 2966470 - DNA, 25 bp, Homo sapien
ttttctcctgcaagactacgacaag

SEQ ID NO: 2966471 - DNA, 25 bp, Homo sapien
gacagagaagcactacattttcaga

SEQ ID NO: 2966472 - DNA, 25 bp, Homo sapien
cattttcagacatactgttatcaca

SEQ ID NO: 2966473 - DNA, 25 bp, Homo sapien
ttccaactcagacctataaagatct

SEQ ID NO: 2966474 - DNA, 25 bp, Homo sapien
gatctgtactgatcctatataaata

SEQ ID NO: 2966475 - DNA, 25 bp, Homo sapien
tattggatgcgttccattaacagtc

SEQ ID NO: 2966476 - DNA, 25 bp, Homo sapien
tatatccaaatacaaaggtgtctcc

SEQ ID NO: 2966477 - DNA, 25 bp, Homo sapien
tgctcaaggcgactttttctttata

SEQ ID NO: 2966478 - DNA, 25 bp, Homo sapien
catacacgggttttggatttccaca

SEQ ID NO: 2966479 - DNA, 25 bp, Homo sapien
gaggggcgcccgccattgcccaggc

SEQ ID NO: 2966480 - DNA, 25 bp, Homo sapien
gctgggggaggggcgcccgccattg

SEQ ID NO: 2966481 - DNA, 25 bp, Homo sapien
ggagtctcgctgattgccagcacag

SEQ ID NO: 2966482 - DNA, 25 bp, Homo sapien
cagtctgagatcaaactgcaaggcg

SEQ ID NO: 2966483 - DNA, 25 bp, Homo sapien
attgcgcttttcagaccggcttaaa

SEQ ID NO: 2966484 - DNA, 25 bp, Homo sapien
cggcgcaccacgagactatatccca

SEQ ID NO: 2966485 - DNA, 25 bp, Homo sapien
cgaatattgcgcttttcagaccggc

SEQ ID NO: 2966486 - DNA, 25 bp, Homo sapien
cgcaccacgagactatatcccacac

SEQ ID NO: 2966487 - DNA, 25 bp, Homo sapien
ggctcccaagagcaataggattcat

SEQ ID NO: 2966488 - DNA, 25 bp, Homo sapien
aagccagcggctcccaagagcaata

SEQ ID NO: 2966489 - DNA, 25 bp, Homo sapien
gcataagcaagccagcggctcccaa

SEQ ID NO: 2966490 - DNA, 25 bp, Homo sapien
cagcggctcccaagagcaataggat

SEQ ID NO: 2966491 - DNA, 25 bp, Homo sapien
cctggtggtcccctactcctatgag

SEQ ID NO: 2966492 - DNA, 25 bp, Homo sapien
gtgcaatattcataggtgcaatccc

SEQ ID NO: 2966493 - DNA, 25 bp, Homo sapien
gtggtcccctactcctatgaggtca

SEQ ID NO: 2966494 - DNA, 25 bp, Homo sapien
gagtgcaatattcataggtgcaatc

SEQ ID NO: 2966495 - DNA, 25 bp, Homo sapien
tggcagtataagactgaatgttgtc

SEQ ID NO: 2966496 - DNA, 25 bp, Homo sapien
cagcactaatgactgtggcagtata

SEQ ID NO: 2966497 - DNA, 25 bp, Homo sapien
cacgggactgatgacatcgaatcaa

SEQ ID NO: 2966498 - DNA, 25 bp, Homo sapien
ctccaccacgggactgatgacatcg

SEQ ID NO: 2966499 - DNA, 25 bp, Homo sapien
gtatgacttcacatcagtatttgga

SEQ ID NO: 2966500 - DNA, 25 bp, Homo sapien
aaatgtatgacttcacatcagtatt

SEQ ID NO: 2966501 - DNA, 25 bp, Homo sapien
atgtatgacttcacatcagtatttg

SEQ ID NO: 2966502 - DNA, 25 bp, Homo sapien
tatgacttcacatcagtatttggat

SEQ ID NO: 2966503 - DNA, 25 bp, Homo sapien
caataactgtgatgatgcctgggac

SEQ ID NO: 2966504 - DNA, 25 bp, Homo sapien
aaggactccgccgtgaattactgtg

SEQ ID NO: 2966505 - DNA, 25 bp, Homo sapien
ctggccctctccaacggtttcggtg

SEQ ID NO: 2966506 - DNA, 25 bp, Homo sapien
gagtcaccactttccctaccattgt

SEQ ID NO: 2966507 - DNA, 25 bp, Homo sapien
attcctccaaataggtatggtcctg

SEQ ID NO: 2966508 - DNA, 25 bp, Homo sapien
caaataggtatggtcctgcctttaa

SEQ ID NO: 2966509 - DNA, 25 bp, Homo sapien
ctccaaataggtatggtcctgcctt

SEQ ID NO: 2966510 - DNA, 25 bp, Homo sapien
taggtatggtcctgcctttaaaaca

SEQ ID NO: 2966511 - DNA, 25 bp, Homo sapien
tctcactgataaccgagcttgaagc

SEQ ID NO: 2966512 - DNA, 25 bp, Homo sapien
agacaaatggaggtaaatattttct

SEQ ID NO: 2966513 - DNA, 25 bp, Homo sapien
aataaagacaaatggaggtaaatat

SEQ ID NO: 2966514 - DNA, 25 bp, Homo sapien
attttctcactgataaccgagcttg

SEQ ID NO: 2966515 - DNA, 25 bp, Homo sapien
gggaagtgggccacaatgccatcac

SEQ ID NO: 2966516 - DNA, 25 bp, Homo sapien
agggaagtgggccacaatgccatca

SEQ ID NO: 2966517 - DNA, 25 bp, Homo sapien
cccaaatgaggtgccaagccacaaa

SEQ ID NO: 2966518 - DNA, 25 bp, Homo sapien
gccccaaatgaggtgccaagccaca

SEQ ID NO: 2966519 - DNA, 25 bp, Homo sapien
atgaggtgccaagccacaaaaagca

SEQ ID NO: 2966520 - DNA, 25 bp, Homo sapien
aggtgccaagccacaaaaagcattt

SEQ ID NO: 2966521 - DNA, 25 bp, Homo sapien
gtgtctgttgtgactagaagcattc

SEQ ID NO: 2966522 - DNA, 25 bp, Homo sapien
tggccaagggtgtctgttgtgacta

SEQ ID NO: 2966523 - DNA, 25 bp, Homo sapien
tcatggccaagggtgtctgttgtga

SEQ ID NO: 2966524 - DNA, 25 bp, Homo sapien
ccaagggtgtctgttgtgactagaa

SEQ ID NO: 2966525 - DNA, 25 bp, Homo sapien
ctcccctgtgaagagtatacagatg

SEQ ID NO: 2966526 - DNA, 25 bp, Homo sapien
ctgtgaagagtatacagatggtgga

SEQ ID NO: 2966527 - DNA, 25 bp, Homo sapien
gaagagtatacagatggtggacagc

SEQ ID NO: 2966528 - DNA, 25 bp, Homo sapien
tctcccctgtgaagagtatacagat

SEQ ID NO: 2966529 - DNA, 25 bp, Homo sapien
ctttggatcttctggtatttgaata

SEQ ID NO: 2966530 - DNA, 25 bp, Homo sapien
ttggatcttctggtatttgaatatc

SEQ ID NO: 2966531 - DNA, 25 bp, Homo sapien
tcctttggatcttctggtatttgaa

SEQ ID NO: 2966532 - DNA, 25 bp, Homo sapien
ttcctttggatcttctggtatttga

SEQ ID NO: 2966533 - DNA, 25 bp, Homo sapien
tgacttttctgaatagatcaggggt

SEQ ID NO: 2966534 - DNA, 25 bp, Homo sapien
gacttttctgaatagatcaggggtc

SEQ ID NO: 2966535 - DNA, 25 bp, Homo sapien
ccagcgacagtcatggctgaagcag

SEQ ID NO: 2966536 - DNA, 25 bp, Homo sapien
acaacccagcgacagtcatggctga

SEQ ID NO: 2966537 - DNA, 25 bp, Homo sapien
aacccagcgacagtcatggctgaag

SEQ ID NO: 2966538 - DNA, 25 bp, Homo sapien
cgacagtcatggctgaagcagatgt

SEQ ID NO: 2966539 - DNA, 25 bp, Homo sapien
tagacctggaacagggctacagcga

SEQ ID NO: 2966540 - DNA, 25 bp, Homo sapien
ttctggaaacggctcatgcgattca

SEQ ID NO: 2966541 - DNA, 25 bp, Homo sapien
cagcgacctccttgcttagacgtca

SEQ ID NO: 2966542 - DNA, 25 bp, Homo sapien
tatgtgtacgaacacaaggctggcc

SEQ ID NO: 2966543 - DNA, 25 bp, Homo sapien
cacagaagaattaagctaggctcct

SEQ ID NO: 2966544 - DNA, 25 bp, Homo sapien
acctgatattcttcgacaaagtcga

SEQ ID NO: 2966545 - DNA, 25 bp, Homo sapien
aaaagggtcatttagacatgaacag

SEQ ID NO: 2966546 - DNA, 25 bp, Homo sapien
agaaactggctaactatatacacac

SEQ ID NO: 2966547 - DNA, 25 bp, Homo sapien
agagagccgagggttgccagggttg

SEQ ID NO: 2966548 - DNA, 25 bp, Homo sapien
ccgagggttgccagggttgttgttg

SEQ ID NO: 2966549 - DNA, 25 bp, Homo sapien
aaaattgttataggagtcttggctg

SEQ ID NO: 2966550 - DNA, 25 bp, Homo sapien
gtaaaattgttataggagtcttggc

SEQ ID NO: 2966551 - DNA, 25 bp, Homo sapien
gttcgtttggtgatggtccccaatg

SEQ ID NO: 2966552 - DNA, 25 bp, Homo sapien
cattggctgcttgatttgtgcaaga

SEQ ID NO: 2966553 - DNA, 25 bp, Homo sapien
tcattggctgcttgatttgtgcaag

SEQ ID NO: 2966554 - DNA, 25 bp, Homo sapien
cgtttggtgatggtccccaatgtca

SEQ ID NO: 2966555 - DNA, 25 bp, Homo sapien
ttattggtgccttaagatgtctgat

SEQ ID NO: 2966556 - DNA, 25 bp, Homo sapien
tattggtgccttaagatgtctgatt

SEQ ID NO: 2966557 - DNA, 25 bp, Homo sapien
aaattattggtgccttaagatgtct

SEQ ID NO: 2966558 - DNA, 25 bp, Homo sapien
attattggtgccttaagatgtctga

SEQ ID NO: 2966559 - DNA, 25 bp, Homo sapien
aacctacttctacagggtgcatctg

SEQ ID NO: 2966560 - DNA, 25 bp, Homo sapien
cacactggcaaataggtgcagaacc

SEQ ID NO: 2966561 - DNA, 25 bp, Homo sapien
gaaatgaataaacatggccgggtgc

SEQ ID NO: 2966562 - DNA, 25 bp, Homo sapien
tgaagcttcctaataaccacctaaa

SEQ ID NO: 2966563 - DNA, 25 bp, Homo sapien
acaccccgctccaaagagataaggc

SEQ ID NO: 2966564 - DNA, 25 bp, Homo sapien
aaacaccccgctccaaagagataag

SEQ ID NO: 2966565 - DNA, 25 bp, Homo sapien
aacaccccgctccaaagagataagg

SEQ ID NO: 2966566 - DNA, 25 bp, Homo sapien
gaagatagcagccacacaaaattct

SEQ ID NO: 2966567 - DNA, 25 bp, Homo sapien
aaaccatgacctggatgttccgaag

SEQ ID NO: 2966568 - DNA, 25 bp, Homo sapien
aaattctccgcccatcgatttgctg

SEQ ID NO: 2966569 - DNA, 25 bp, Homo sapien
tcttttcagacctgcattatttgca

SEQ ID NO: 2966570 - DNA, 25 bp, Homo sapien
gggtcgcggctccatcatgtgttcc

SEQ ID NO: 2966571 - DNA, 25 bp, Homo sapien
cactaatcttgggtgcagtgctgag

SEQ ID NO: 2966572 - DNA, 25 bp, Homo sapien
tccagctggctcgaggcgatgtcat

SEQ ID NO: 2966573 - DNA, 25 bp, Homo sapien
tgtgttccactaaggtgccatagca

SEQ ID NO: 2966574 - DNA, 25 bp, Homo sapien
actgataatactgtactgcatctgc

SEQ ID NO: 2966575 - DNA, 25 bp, Homo sapien
actgcatctgcagcgaggagcagag

SEQ ID NO: 2966576 - DNA, 25 bp, Homo sapien
tgcattaaacggtggctgcaattca

SEQ ID NO: 2966577 - DNA, 25 bp, Homo sapien
tggtttgcattaaacggtggctgca

SEQ ID NO: 2966578 - DNA, 25 bp, Homo sapien
gcttactactgccaacagtggtggt

SEQ ID NO: 2966579 - DNA, 25 bp, Homo sapien
ggcagctaaaatcaagcagagtgta

SEQ ID NO: 2966580 - DNA, 25 bp, Homo sapien
tgttctgagcattagacaaaggtgt

SEQ ID NO: 2966581 - DNA, 25 bp, Homo sapien
taatgtcaataaggtcaatcactgg

SEQ ID NO: 2966582 - DNA, 25 bp, Homo sapien
tgtacatgatgcaaccacggatgac

SEQ ID NO: 2966583 - DNA, 25 bp, Homo sapien
tatttaaaggtgtacatgatgcaac

SEQ ID NO: 2966584 - DNA, 25 bp, Homo sapien
gcaaccacggatgacatgctagcat

SEQ ID NO: 2966585 - DNA, 25 bp, Homo sapien
ggtttcatatttaaaggtgtacatg

SEQ ID NO: 2966586 - DNA, 25 bp, Homo sapien
tgttcttgactccatctacaatggc

SEQ ID NO: 2966587 - DNA, 25 bp, Homo sapien
tattcagtctagcatctacactaag

SEQ ID NO: 2966588 - DNA, 25 bp, Homo sapien
aaaggctctaatgtagtattcagtc

SEQ ID NO: 2966589 - DNA, 25 bp, Homo sapien
cacagttgaatagcaaaggctctaa

SEQ ID NO: 2966590 - DNA, 25 bp, Homo sapien
gagatcccacatggtacaagagtag

SEQ ID NO: 2966591 - DNA, 25 bp, Homo sapien
tagtccagacaactgacaggagctg

SEQ ID NO: 2966592 - DNA, 25 bp, Homo sapien
catagtgtgtctgtacagccaggtc

SEQ ID NO: 2966593 - DNA, 25 bp, Homo sapien
gatgctgcagagacctatatgaacc

SEQ ID NO: 2966594 - DNA, 25 bp, Homo sapien
ctgtctccagagtcgcagtgtcttc

SEQ ID NO: 2966595 - DNA, 25 bp, Homo sapien
tctccagagtcgcagtgtcttcggc

SEQ ID NO: 2966596 - DNA, 25 bp, Homo sapien
agagtcgcagtgtcttcggctgccg

SEQ ID NO: 2966597 - DNA, 25 bp, Homo sapien
tgacgtgcggatcttcttctttttg

SEQ ID NO: 2966598 - DNA, 25 bp, Homo sapien
tttgttggcaacatccaaagcatcg

SEQ ID NO: 2966599 - DNA, 25 bp, Homo sapien
ttgttggcaacatccaaagcatcgt

SEQ ID NO: 2966600 - DNA, 25 bp, Homo sapien
ttggcaacatccaaagcatcgtaac

SEQ ID NO: 2966601 - DNA, 25 bp, Homo sapien
tgttggcaacatccaaagcatcgta

SEQ ID NO: 2966602 - DNA, 25 bp, Homo sapien
tatatatatattcagaattaggcag

SEQ ID NO: 2966603 - DNA, 25 bp, Homo sapien
atatattcagaattaggcagctgga

SEQ ID NO: 2966604 - DNA, 25 bp, Homo sapien
tatatattcagaattaggcagctgg

SEQ ID NO: 2966605 - DNA, 25 bp, Homo sapien
tatatatattcagaattaggcagct

SEQ ID NO: 2966606 - DNA, 25 bp, Homo sapien
tgtccactatggtcagaagctaaac

SEQ ID NO: 2966607 - DNA, 25 bp, Homo sapien
gacccatgtcgagtaatgggcccag

SEQ ID NO: 2966608 - DNA, 25 bp, Homo sapien
taaactgtcgtaagacccatgtcga

SEQ ID NO: 2966609 - DNA, 25 bp, Homo sapien
catcttcctgtccactatggtcaga

SEQ ID NO: 2966610 - DNA, 25 bp, Homo sapien
tttgaactggaactgtggacccatc

SEQ ID NO: 2966611 - DNA, 25 bp, Homo sapien
gctgtggcgtgtcactcggaccatg

SEQ ID NO: 2966612 - DNA, 25 bp, Homo sapien
tgagactgttgagatcaagatcatc

SEQ ID NO: 2966613 - DNA, 25 bp, Homo sapien
gaccatgagactgcaacacagatga

SEQ ID NO: 2966614 - DNA, 25 bp, Homo sapien
agaagcgagttagaattatcttaat

SEQ ID NO: 2966615 - DNA, 25 bp, Homo sapien
ttaaaagaagcgagttagaattatc

SEQ ID NO: 2966616 - DNA, 25 bp, Homo sapien
aaagaagcgagttagaattatctta

SEQ ID NO: 2966617 - DNA, 25 bp, Homo sapien
taaaagaagcgagttagaattatct

SEQ ID NO: 2966618 - DNA, 25 bp, Homo sapien
taacagaaatttataaacctgctgc

SEQ ID NO: 2966619 - DNA, 25 bp, Homo sapien
aatttataaacctgctgctcagtat

SEQ ID NO: 2966620 - DNA, 25 bp, Homo sapien
gctgctcagtataaaggtttctaaa

SEQ ID NO: 2966621 - DNA, 25 bp, Homo sapien
taaattacaaatgcaattaacagaa

SEQ ID NO: 2966622 - DNA, 25 bp, Homo sapien
caatttctgaggagctaatcgagtg

SEQ ID NO: 2966623 - DNA, 25 bp, Homo sapien
tgagagtcaacactatgcctgcctg

SEQ ID NO: 2966624 - DNA, 25 bp, Homo sapien
tgtttcccattttggttaggcggca

SEQ ID NO: 2966625 - DNA, 25 bp, Homo sapien
aaagagaggctttgcatactcagca

SEQ ID NO: 2966626 - DNA, 25 bp, Homo sapien
aatcaggaatgctggagtagcacaa

SEQ ID NO: 2966627 - DNA, 25 bp, Homo sapien
cttgctacaaatgaccttaaatcag

SEQ ID NO: 2966628 - DNA, 25 bp, Homo sapien
gctacaaatgaccttaaatcaggaa

SEQ ID NO: 2966629 - DNA, 25 bp, Homo sapien
taaatcaggaatgctggagtagcac

SEQ ID NO: 2966630 - DNA, 25 bp, Homo sapien
gctgacggggtcagagcggactggc

SEQ ID NO: 2966631 - DNA, 25 bp, Homo sapien
gacggggtcagagcggactggctgg

SEQ ID NO: 2966632 - DNA, 25 bp, Homo sapien
ggggtcagagcggactggctggatc

SEQ ID NO: 2966633 - DNA, 25 bp, Homo sapien
ctgacggggtcagagcggactggct

SEQ ID NO: 2966634 - DNA, 25 bp, Homo sapien
gaggcagcatcaatcactgtggaaa

SEQ ID NO: 2966635 - DNA, 25 bp, Homo sapien
tccccttcgatcagagactggacgg

SEQ ID NO: 2966636 - DNA, 25 bp, Homo sapien
gtggaaactccccttcgatcagaga

SEQ ID NO: 2966637 - DNA, 25 bp, Homo sapien
agactggacgggatgaccctggcat

SEQ ID NO: 2966638 - DNA, 25 bp, Homo sapien
gccgggaagcaatgatagcgactct

SEQ ID NO: 2966639 - DNA, 25 bp, Homo sapien
aaaatgaaggcatagccctagatgg

SEQ ID NO: 2966640 - DNA, 25 bp, Homo sapien
gatatctcattcagtgccgggaagc

SEQ ID NO: 2966641 - DNA, 25 bp, Homo sapien
gatgcaaggtacaatccactaacca

SEQ ID NO: 2966642 - DNA, 25 bp, Homo sapien
taatacagggcaatgaagaccaaca

SEQ ID NO: 2966643 - DNA, 25 bp, Homo sapien
ggtgccacactggtcgtatctccaa

SEQ ID NO: 2966644 - DNA, 25 bp, Homo sapien
tactgccacaaggttagacagagca

SEQ ID NO: 2966645 - DNA, 25 bp, Homo sapien
tcataatcagaggtgcacttcccgg

SEQ ID NO: 2966646 - DNA, 25 bp, Homo sapien
cgtgctatagttatcatcaaaatgt

SEQ ID NO: 2966647 - DNA, 25 bp, Homo sapien
cattgaaacttatcaaggagaaatt

SEQ ID NO: 2966648 - DNA, 25 bp, Homo sapien
tatataagatgtgtaagacttctac

SEQ ID NO: 2966649 - DNA, 25 bp, Homo sapien
caggctgggatacaagtttattata

SEQ ID NO: 2966650 - DNA, 25 bp, Homo sapien
gcaaggcagttttccaatgtgctgt

SEQ ID NO: 2966651 - DNA, 25 bp, Homo sapien
gagtggaaaactgggctggtgcaag

SEQ ID NO: 2966652 - DNA, 25 bp, Homo sapien
tgagtggaaaactgggctggtgcaa

SEQ ID NO: 2966653 - DNA, 25 bp, Homo sapien
ctgagtggaaaactgggctggtgca

SEQ ID NO: 2966654 - DNA, 25 bp, Homo sapien
caacacttaaagcaagaggtataag

SEQ ID NO: 2966655 - DNA, 25 bp, Homo sapien
tataagaattctgtgggtttaggcc

SEQ ID NO: 2966656 - DNA, 25 bp, Homo sapien
ttcctctagtgtcagcatagtagtc

SEQ ID NO: 2966657 - DNA, 25 bp, Homo sapien
tttttcctctagtgtcagcatagta

SEQ ID NO: 2966658 - DNA, 25 bp, Homo sapien
cacatttggtcatggtaggtgattc

SEQ ID NO: 2966659 - DNA, 25 bp, Homo sapien
catgttttcttcgtggaccaacaaa

SEQ ID NO: 2966660 - DNA, 25 bp, Homo sapien
gaagtgttgtgtctagagactccca

SEQ ID NO: 2966661 - DNA, 25 bp, Homo sapien
ggcttccgcatcacttaactgtcag

SEQ ID NO: 2966662 - DNA, 25 bp, Homo sapien
caatattcattagggttaatctgcc

SEQ ID NO: 2966663 - DNA, 25 bp, Homo sapien
aagccaatattcattagggttaatc

SEQ ID NO: 2966664 - DNA, 25 bp, Homo sapien
ggttaatctgcctactaaatgaata

SEQ ID NO: 2966665 - DNA, 25 bp, Homo sapien
cattagggttaatctgcctactaaa

SEQ ID NO: 2966666 - DNA, 25 bp, Homo sapien
tggatcttctgtattcggtcagagg

SEQ ID NO: 2966667 - DNA, 25 bp, Homo sapien
ctgtattcggtcagaggttatagaa

SEQ ID NO: 2966668 - DNA, 25 bp, Homo sapien
gatcttctgtattcggtcagaggtt

SEQ ID NO: 2966669 - DNA, 25 bp, Homo sapien
cttctgtattcggtcagaggttata

SEQ ID NO: 2966670 - DNA, 25 bp, Homo sapien
ggtctggctcaactttcaaaactag

SEQ ID NO: 2966671 - DNA, 25 bp, Homo sapien
caaaactagtggttcaacttctgca

SEQ ID NO: 2966672 - DNA, 25 bp, Homo sapien
gaaatcatttcgtctccataagtgc

SEQ ID NO: 2966673 - DNA, 25 bp, Homo sapien
cataatccttgggtgggccaattta

SEQ ID NO: 2966674 - DNA, 25 bp, Homo sapien
ttcagtccaaggatacatttcccag

SEQ ID NO: 2966675 - DNA, 25 bp, Homo sapien
tgcctgtgacgaagggtgtataacc

SEQ ID NO: 2966676 - DNA, 25 bp, Homo sapien
tgggcgttctactacccgcttggaa

SEQ ID NO: 2966677 - DNA, 25 bp, Homo sapien
tcccctagtcgtgaaagagttaaga

SEQ ID NO: 2966678 - DNA, 25 bp, Homo sapien
ctttcttactccataccctcaggtg

SEQ ID NO: 2966679 - DNA, 25 bp, Homo sapien
cataccctcaggtggctagcctagt

SEQ ID NO: 2966680 - DNA, 25 bp, Homo sapien
gtggctagcctagtgctacatggcc

SEQ ID NO: 2966681 - DNA, 25 bp, Homo sapien
agtgctacatggcctaggctacaca

SEQ ID NO: 2966682 - DNA, 25 bp, Homo sapien
tcctgacaaatacccacccaccagc

SEQ ID NO: 2966683 - DNA, 25 bp, Homo sapien
cctgacaaatacccacccaccagca

SEQ ID NO: 2966684 - DNA, 25 bp, Homo sapien
gaaaatcaagactggctgctgtaaa

SEQ ID NO: 2966685 - DNA, 25 bp, Homo sapien
cagaccatctcagacgtattctcat

SEQ ID NO: 2966686 - DNA, 25 bp, Homo sapien
ttctatgtttacagagccaaaagga

SEQ ID NO: 2966687 - DNA, 25 bp, Homo sapien
aaaaggatgccgaaggccctggaag

SEQ ID NO: 2966688 - DNA, 25 bp, Homo sapien
ggtaaggagcttcttctcattgacg

SEQ ID NO: 2966689 - DNA, 25 bp, Homo sapien
ttgacggggataggggagtggactc

SEQ ID NO: 2966690 - DNA, 25 bp, Homo sapien
tcttctcattgacggggatagggga

SEQ ID NO: 2966691 - DNA, 25 bp, Homo sapien
ctggtaaggagcttcttctcattga

SEQ ID NO: 2966692 - DNA, 25 bp, Homo sapien
tttgcacggaattctactagcctgg

SEQ ID NO: 2966693 - DNA, 25 bp, Homo sapien
aacagtatgccagtatttcagactg

SEQ ID NO: 2966694 - DNA, 25 bp, Homo sapien
cagggaagtaatgtcaaatggttga

SEQ ID NO: 2966695 - DNA, 25 bp, Homo sapien
cagttgcaggccaatgaaagtcaca

SEQ ID NO: 2966696 - DNA, 25 bp, Homo sapien
tgtttcaatcctgctgccagaatac

SEQ ID NO: 2966697 - DNA, 25 bp, Homo sapien
caaattggtccagtatgtgtatgtc

SEQ ID NO: 2966698 - DNA, 25 bp, Homo sapien
ccttgacagttggatcttccacagc

SEQ ID NO: 2966699 - DNA, 25 bp, Homo sapien
gattgtgataaccacttaacagggt

SEQ ID NO: 2966700 - DNA, 25 bp, Homo sapien
tgccctacatatgaatgtaaaggcc

SEQ ID NO: 2966701 - DNA, 25 bp, Homo sapien
ccagtaggtgtaagttcttagggca

SEQ ID NO: 2966702 - DNA, 25 bp, Homo sapien
tatgaccatttatgaaccagtaggt

SEQ ID NO: 2966703 - DNA, 25 bp, Homo sapien
aattgtttcaatatttaagcaacca

SEQ ID NO: 2966704 - DNA, 25 bp, Homo sapien
aatctaaaacgtgggtgattcaact

SEQ ID NO: 2966705 - DNA, 25 bp, Homo sapien
agctcataatctaaaacgtgggtga

SEQ ID NO: 2966706 - DNA, 25 bp, Homo sapien
taatctaaaacgtgggtgattcaac

SEQ ID NO: 2966707 - DNA, 25 bp, Homo sapien
tcataatctaaaacgtgggtgattc

SEQ ID NO: 2966708 - DNA, 25 bp, Homo sapien
atggttggaaatgcctctctccgtc

SEQ ID NO: 2966709 - DNA, 25 bp, Homo sapien
agtctgtgtactcagtagagtgtga

SEQ ID NO: 2966710 - DNA, 25 bp, Homo sapien
gaaatgcctctctccgtctgttttt

SEQ ID NO: 2966711 - DNA, 25 bp, Homo sapien
ctgcacagatcagcaagatggttgg

SEQ ID NO: 2966712 - DNA, 25 bp, Homo sapien
ctctgcagttgtacagtcttgttaa

SEQ ID NO: 2966713 - DNA, 25 bp, Homo sapien
ctgatattcatctaagtctctgcag

SEQ ID NO: 2966714 - DNA, 25 bp, Homo sapien
taggatcctaaaagtagctaagggc

SEQ ID NO: 2966715 - DNA, 25 bp, Homo sapien
ggaacattcacgtttgcaggaggag

SEQ ID NO: 2966716 - DNA, 25 bp, Homo sapien
tcagtctgcctactgagaggtgaag

SEQ ID NO: 2966717 - DNA, 25 bp, Homo sapien
cactgccaaggtccacggtcttgaa

SEQ ID NO: 2966718 - DNA, 25 bp, Homo sapien
gacttttaagctggctagtgtcaga

SEQ ID NO: 2966719 - DNA, 25 bp, Homo sapien
tacatgatacaaggattctaacggc

SEQ ID NO: 2966720 - DNA, 25 bp, Homo sapien
gataaaagtgcacacatcgctgtgt

SEQ ID NO: 2966721 - DNA, 25 bp, Homo sapien
ggcagtgcgacaaatatctaaagga

SEQ ID NO: 2966722 - DNA, 25 bp, Homo sapien
taaatacagtgttttcgttggccca

SEQ ID NO: 2966723 - DNA, 25 bp, Homo sapien
gagccttccacgatgcctgacatgt

SEQ ID NO: 2966724 - DNA, 25 bp, Homo sapien
catgctctggcaggaagaaacttaa

SEQ ID NO: 2966725 - DNA, 25 bp, Homo sapien
tcacataagtgacccaggcaagagc

SEQ ID NO: 2966726 - DNA, 25 bp, Homo sapien
caagggcctatcaggttgaacagga

SEQ ID NO: 2966727 - DNA, 25 bp, Homo sapien
tgccaggctgacataatgaagctag

SEQ ID NO: 2966728 - DNA, 25 bp, Homo sapien
cattctcgcttgtatgactgtcgcc

SEQ ID NO: 2966729 - DNA, 25 bp, Homo sapien
tattgacaaatagagaggttcgctc

SEQ ID NO: 2966730 - DNA, 25 bp, Homo sapien
gcataccgagtaaattatttgctga

SEQ ID NO: 2966731 - DNA, 25 bp, Homo sapien
tgctgataggtgaatctcagcaaat

SEQ ID NO: 2966732 - DNA, 25 bp, Homo sapien
tcctttgaatgcctggtgagcttgt

SEQ ID NO: 2966733 - DNA, 25 bp, Homo sapien
gcgtttgtttgtggtgcataccgag

SEQ ID NO: 2966734 - DNA, 25 bp, Homo sapien
tgctggcgagcctctccactgaaat

SEQ ID NO: 2966735 - DNA, 25 bp, Homo sapien
cattcaatagagtttgcagcttgct

SEQ ID NO: 2966736 - DNA, 25 bp, Homo sapien
gagaaacagtgtccgtttgtggcca

SEQ ID NO: 2966737 - DNA, 25 bp, Homo sapien
tgtggccagcgataatactttccat

SEQ ID NO: 2966738 - DNA, 25 bp, Homo sapien
tcacctgaaatcatctcacaagttt

SEQ ID NO: 2966739 - DNA, 25 bp, Homo sapien
aagatgttcacctgaaatcatctca

SEQ ID NO: 2966740 - DNA, 25 bp, Homo sapien
tgttcacctgaaatcatctcacaag

SEQ ID NO: 2966741 - DNA, 25 bp, Homo sapien
tttagaaagatgttcacctgaaatc

SEQ ID NO: 2966742 - DNA, 25 bp, Homo sapien
atgaaacctttaaataaagactctg

SEQ ID NO: 2966743 - DNA, 25 bp, Homo sapien
ttgggtagatggaatattactactt

SEQ ID NO: 2966744 - DNA, 25 bp, Homo sapien
gaatattactacttcttaatctaca

SEQ ID NO: 2966745 - DNA, 25 bp, Homo sapien
ataaaggactctgaaatgaaacctt

SEQ ID NO: 2966746 - DNA, 25 bp, Homo sapien
tcaagcactctgcttctttaacagc

SEQ ID NO: 2966747 - DNA, 25 bp, Homo sapien
gtcaagcactctgcttctttaacag

SEQ ID NO: 2966748 - DNA, 25 bp, Homo sapien
cttgatctctcaagcatatcataca

SEQ ID NO: 2966749 - DNA, 25 bp, Homo sapien
cagccctgcataagctccagcgaat

SEQ ID NO: 2966750 - DNA, 25 bp, Homo sapien
cttgggtagtttcccatgtgctcag

SEQ ID NO: 2966751 - DNA, 25 bp, Homo sapien
tgttccctctgatctttttaagtgg

SEQ ID NO: 2966752 - DNA, 25 bp, Homo sapien
ctgcataagctccagcgaatgttcc

SEQ ID NO: 2966753 - DNA, 25 bp, Homo sapien
cacacaggagatatcagttcattaa

SEQ ID NO: 2966754 - DNA, 25 bp, Homo sapien
ccacggccacaagaacaaagtgctg

SEQ ID NO: 2966755 - DNA, 25 bp, Homo sapien
tctacattcgacaacatggatgagt

SEQ ID NO: 2966756 - DNA, 25 bp, Homo sapien
caaagtgctgacatagtccacaaca

SEQ ID NO: 2966757 - DNA, 25 bp, Homo sapien
tggctttcagcctatcaacaattgt

SEQ ID NO: 2966758 - DNA, 25 bp, Homo sapien
ctgaccctgggtaatgtaaatttct

SEQ ID NO: 2966759 - DNA, 25 bp, Homo sapien
gctttcagcctatcaacaattgtat

SEQ ID NO: 2966760 - DNA, 25 bp, Homo sapien
ttcttcacaacatattgccttttga

SEQ ID NO: 2966761 - DNA, 25 bp, Homo sapien
tgttgaaaaccggcttttccacata

SEQ ID NO: 2966762 - DNA, 25 bp, Homo sapien
cttttcctgtgtaacacttaagctg

SEQ ID NO: 2966763 - DNA, 25 bp, Homo sapien
cctgtgtaacacttaagctggtact

SEQ ID NO: 2966764 - DNA, 25 bp, Homo sapien
tgtaacacttaagctggtactttaa

SEQ ID NO: 2966765 - DNA, 25 bp, Homo sapien
tactgctaatgacaagtgacacgcc

SEQ ID NO: 2966766 - DNA, 25 bp, Homo sapien
ggtgaaattgttactgctaatgaca

SEQ ID NO: 2966767 - DNA, 25 bp, Homo sapien
aagtgacacgccctttatactgcca

SEQ ID NO: 2966768 - DNA, 25 bp, Homo sapien
cgccctttatactgccaatgagcaa

SEQ ID NO: 2966769 - DNA, 25 bp, Homo sapien
gaagatgaatgttaaagacaggaac

SEQ ID NO: 2966770 - DNA, 25 bp, Homo sapien
aaaaaccttagctgctaatcttagg

SEQ ID NO: 2966771 - DNA, 25 bp, Homo sapien
tagctgcatttgtacactggaagat

SEQ ID NO: 2966772 - DNA, 25 bp, Homo sapien
aatcttaggttaatagcaaatgacc

SEQ ID NO: 2966773 - DNA, 25 bp, Homo sapien
ttcaaagatgactgatgaaactaca

SEQ ID NO: 2966774 - DNA, 25 bp, Homo sapien
gatgactgatgaaactacatcataa

SEQ ID NO: 2966775 - DNA, 25 bp, Homo sapien
gactgatgaaactacatcataatag

SEQ ID NO: 2966776 - DNA, 25 bp, Homo sapien
gatgaaactacatcataataggtaa

SEQ ID NO: 2966777 - DNA, 25 bp, Homo sapien
taatatcttatgacttgcctgctag

SEQ ID NO: 2966778 - DNA, 25 bp, Homo sapien
aaaatgcaagtctgacgctgtcact

SEQ ID NO: 2966779 - DNA, 25 bp, Homo sapien
tttatatgatggcaaggtcaacctc

SEQ ID NO: 2966780 - DNA, 25 bp, Homo sapien
caacagtttaagtggtctccctgac

SEQ ID NO: 2966781 - DNA, 25 bp, Homo sapien
tatgactcctgttggcactgcactt

SEQ ID NO: 2966782 - DNA, 25 bp, Homo sapien
tctcataggtgcatcaaggtcaaat

SEQ ID NO: 2966783 - DNA, 25 bp, Homo sapien
gaatgacactgctgattgaagctca

SEQ ID NO: 2966784 - DNA, 25 bp, Homo sapien
taattagcatagacagaaacctggg

SEQ ID NO: 2966785 - DNA, 25 bp, Homo sapien
caaaagcatgacagtggtaaactgc

SEQ ID NO: 2966786 - DNA, 25 bp, Homo sapien
tatattactccattgccttctggca

SEQ ID NO: 2966787 - DNA, 25 bp, Homo sapien
cagtgccccgcagtgtccttaaatt

SEQ ID NO: 2966788 - DNA, 25 bp, Homo sapien
taattgccagcgaacaactccacat

SEQ ID NO: 2966789 - DNA, 25 bp, Homo sapien
aaatgaccctgatagagttagcacg

SEQ ID NO: 2966790 - DNA, 25 bp, Homo sapien
tgaccctgttcttgtcccggctggg

SEQ ID NO: 2966791 - DNA, 25 bp, Homo sapien
ggttttcatttttagcggccacaga

SEQ ID NO: 2966792 - DNA, 25 bp, Homo sapien
ataaatgattgccatatcctttgcc

SEQ ID NO: 2966793 - DNA, 25 bp, Homo sapien
tcatttctaattcgaatcggaagtc

SEQ ID NO: 2966794 - DNA, 25 bp, Homo sapien
gaagtctatgtggagcagtctggct

SEQ ID NO: 2966795 - DNA, 25 bp, Homo sapien
ttcgaatcggaagtctatgtggagc

SEQ ID NO: 2966796 - DNA, 25 bp, Homo sapien
ggagcagtctggctagccccagtct

SEQ ID NO: 2966797 - DNA, 25 bp, Homo sapien
tatattagatgtgcaataacgatgt

SEQ ID NO: 2966798 - DNA, 25 bp, Homo sapien
ataaaattctgggagtgagccaaca

SEQ ID NO: 2966799 - DNA, 25 bp, Homo sapien
ggacataaatctgagaccggttctt

SEQ ID NO: 2966800 - DNA, 25 bp, Homo sapien
tttgggagatgtaaacaggacataa

SEQ ID NO: 2966801 - DNA, 25 bp, Homo sapien
tacctgatcctatgggtgtggcaaa

SEQ ID NO: 2966802 - DNA, 25 bp, Homo sapien
gattattaggctcaaacaggttaac

SEQ ID NO: 2966803 - DNA, 25 bp, Homo sapien
cagccaaacagctgaggatacctca

SEQ ID NO: 2966804 - DNA, 25 bp, Homo sapien
ctaatataataagagagccagccaa

SEQ ID NO: 2966805 - DNA, 25 bp, Homo sapien
gaggacactcgtatactgaaaacat

SEQ ID NO: 2966806 - DNA, 25 bp, Homo sapien
gattgagcttttggtctcggggaca

SEQ ID NO: 2966807 - DNA, 25 bp, Homo sapien
actgtcccaactgagtgccaaggag

SEQ ID NO: 2966808 - DNA, 25 bp, Homo sapien
ggacaaggctgaaagttccagctgg

SEQ ID NO: 2966809 - DNA, 25 bp, Homo sapien
cagaatttggagaacactgcagaca

SEQ ID NO: 2966810 - DNA, 25 bp, Homo sapien
cacgatgaacgcagaatgcctgagg

SEQ ID NO: 2966811 - DNA, 25 bp, Homo sapien
tataaagaaagtgaccctccgcact

SEQ ID NO: 2966812 - DNA, 25 bp, Homo sapien
tttgccaggattatgactcacccca

SEQ ID NO: 2966813 - DNA, 25 bp, Homo sapien
tacccaaaggatctgagctacacaa

SEQ ID NO: 2966814 - DNA, 25 bp, Homo sapien
tctcttagcaacaaaaccactctac

SEQ ID NO: 2966815 - DNA, 25 bp, Homo sapien
caaatggaacatgagaccatatgtt

SEQ ID NO: 2966816 - DNA, 25 bp, Homo sapien
tttgaaccaaccagaggtataattc

SEQ ID NO: 2966817 - DNA, 25 bp, Homo sapien
tttcaaagagctactcatccaaggg

SEQ ID NO: 2966818 - DNA, 25 bp, Homo sapien
taaggaagcacaaccccttggtggc

SEQ ID NO: 2966819 - DNA, 25 bp, Homo sapien
aactcaaaagggctcaaattgggca

SEQ ID NO: 2966820 - DNA, 25 bp, Homo sapien
caacagctcttaggtggagcaacac

SEQ ID NO: 2966821 - DNA, 25 bp, Homo sapien
tattgctagctactggttaccacct

SEQ ID NO: 2966822 - DNA, 25 bp, Homo sapien
ttttcttgagggtaaaccaatgcag

SEQ ID NO: 2966823 - DNA, 25 bp, Homo sapien
cactggcttgtggacctgttaattc

SEQ ID NO: 2966824 - DNA, 25 bp, Homo sapien
tgctccagtgatcaaaagagatcct

SEQ ID NO: 2966825 - DNA, 25 bp, Homo sapien
caaagagaattccaggtggagtgga

SEQ ID NO: 2966826 - DNA, 25 bp, Homo sapien
gtcattgtattacctcactgaacta

SEQ ID NO: 2966827 - DNA, 25 bp, Homo sapien
taagtcattagttgagaattcggct

SEQ ID NO: 2966828 - DNA, 25 bp, Homo sapien
gaattcggctactttgttgaatctg

SEQ ID NO: 2966829 - DNA, 25 bp, Homo sapien
ttctatccaaaagcgagcacatgat

SEQ ID NO: 2966830 - DNA, 25 bp, Homo sapien
gcacatgatatttagcagacatcct

SEQ ID NO: 2966831 - DNA, 25 bp, Homo sapien
tgatcactacaactgggttccagct

SEQ ID NO: 2966832 - DNA, 25 bp, Homo sapien
gctctgctgcttggttgacaacttc

SEQ ID NO: 2966833 - DNA, 25 bp, Homo sapien
ttaccatagtatgacacagagacac

SEQ ID NO: 2966834 - DNA, 25 bp, Homo sapien
catgggcatagcttgagggtgcccc

SEQ ID NO: 2966835 - DNA, 25 bp, Homo sapien
ttttgatgtgtctatagtcgccttc

SEQ ID NO: 2966836 - DNA, 25 bp, Homo sapien
tgaaagctggtgacaattaccatag

SEQ ID NO: 2966837 - DNA, 25 bp, Homo sapien
ttaattgccattgtgtatcagcctg

SEQ ID NO: 2966838 - DNA, 25 bp, Homo sapien
tatcagcctgtccttcaattgaagc

SEQ ID NO: 2966839 - DNA, 25 bp, Homo sapien
gatcttctagataactggctggagc

SEQ ID NO: 2966840 - DNA, 25 bp, Homo sapien
tggttggttttatctgccatccaga

SEQ ID NO: 2966841 - DNA, 25 bp, Homo sapien
tacttttagcatgatctagatctta

SEQ ID NO: 2966842 - DNA, 25 bp, Homo sapien
tatcaactccagaataagttgcacc

SEQ ID NO: 2966843 - DNA, 25 bp, Homo sapien
gatctagatcttaacagttgcatgt

SEQ ID NO: 2966844 - DNA, 25 bp, Homo sapien
gaataagttgcaccttaagacattt

SEQ ID NO: 2966845 - DNA, 25 bp, Homo sapien
gattctttaccttggataacaagag

SEQ ID NO: 2966846 - DNA, 25 bp, Homo sapien
tttggattctttaccttggataaca

SEQ ID NO: 2966847 - DNA, 25 bp, Homo sapien
taccttggataacaagagccatttc

SEQ ID NO: 2966848 - DNA, 25 bp, Homo sapien
tctttaccttggataacaagagcca

SEQ ID NO: 2966849 - DNA, 25 bp, Homo sapien
caaggctgactggtagaagataggc

SEQ ID NO: 2966850 - DNA, 25 bp, Homo sapien
gaggagggctacactctatgcctag

SEQ ID NO: 2966851 - DNA, 25 bp, Homo sapien
tgcctagcaacattaaccaaacgtg

SEQ ID NO: 2966852 - DNA, 25 bp, Homo sapien
ggtctaggcatcacaggcgggtctt

SEQ ID NO: 2966853 - DNA, 25 bp, Homo sapien
cactgtatggaacgttcactgtagc

SEQ ID NO: 2966854 - DNA, 25 bp, Homo sapien
ggatctcgaagaggtatctccactt

SEQ ID NO: 2966855 - DNA, 25 bp, Homo sapien
taaatgtgtatagcagtagggcgca

SEQ ID NO: 2966856 - DNA, 25 bp, Homo sapien
cagggaactgtgctacatgaaggaa

SEQ ID NO: 2966857 - DNA, 25 bp, Homo sapien
ctgttcttgttttagtgagttggtt

SEQ ID NO: 2966858 - DNA, 25 bp, Homo sapien
ggcagtttccccatcctgttcttgt

SEQ ID NO: 2966859 - DNA, 25 bp, Homo sapien
gcagtttccccatcctgttcttgtt

SEQ ID NO: 2966860 - DNA, 25 bp, Homo sapien
atcctgttcttgttttagtgagttg

SEQ ID NO: 2966861 - DNA, 25 bp, Homo sapien
tgaagaagccgttgtttataaatct

SEQ ID NO: 2966862 - DNA, 25 bp, Homo sapien
aagccgttgtttataaatcttctca

SEQ ID NO: 2966863 - DNA, 25 bp, Homo sapien
tatgaagaagccgttgtttataaat

SEQ ID NO: 2966864 - DNA, 25 bp, Homo sapien
aagtgtatgaagaagccgttgttta

SEQ ID NO: 2966865 - DNA, 25 bp, Homo sapien
gaatcaggccttgagttaacagact

SEQ ID NO: 2966866 - DNA, 25 bp, Homo sapien
gacaaatactgtctgggacaccagg

SEQ ID NO: 2966867 - DNA, 25 bp, Homo sapien
tgtaagactggctcacaggaaatga

SEQ ID NO: 2966868 - DNA, 25 bp, Homo sapien
aacatatcagtcatcaacccagagg

SEQ ID NO: 2966869 - DNA, 25 bp, Homo sapien
ctaggccgtaggccaagttcctggg

SEQ ID NO: 2966870 - DNA, 25 bp, Homo sapien
cctaggccgtaggccaagttcctgg

SEQ ID NO: 2966871 - DNA, 25 bp, Homo sapien
taggccgtaggccaagttcctggga

SEQ ID NO: 2966872 - DNA, 25 bp, Homo sapien
gcctaggccgtaggccaagttcctg

SEQ ID NO: 2966873 - DNA, 25 bp, Homo sapien
gactttatgaagcactggcccagag

SEQ ID NO: 2966874 - DNA, 25 bp, Homo sapien
tactaccatagagctcatacgccat

SEQ ID NO: 2966875 - DNA, 25 bp, Homo sapien
tccaatcctgggtctgaccttctac

SEQ ID NO: 2966876 - DNA, 25 bp, Homo sapien
cagaggcatccgagattcatcttcc

SEQ ID NO: 2966877 - DNA, 25 bp, Homo sapien
catgtcagagttgtttaagcattct

SEQ ID NO: 2966878 - DNA, 25 bp, Homo sapien
gtgagccttgtattaagcaaagaaa

SEQ ID NO: 2966879 - DNA, 25 bp, Homo sapien
aaatcagtgagccttgtattaagca

SEQ ID NO: 2966880 - DNA, 25 bp, Homo sapien
gtgcatgtcagagttgtttaagcat

SEQ ID NO: 2966881 - DNA, 25 bp, Homo sapien
gagaaaacttaactctcggatagag

SEQ ID NO: 2966882 - DNA, 25 bp, Homo sapien
gaaacttcaataagtcattgtgctc

SEQ ID NO: 2966883 - DNA, 25 bp, Homo sapien
tggatggagaattggttccaatctc

SEQ ID NO: 2966884 - DNA, 25 bp, Homo sapien
ggttccaatctctggtagttccaaa

SEQ ID NO: 2966885 - DNA, 25 bp, Homo sapien
tgtcgggtgacctggagatgaggag

SEQ ID NO: 2966886 - DNA, 25 bp, Homo sapien
tcgggtgacctggagatgaggagtt

SEQ ID NO: 2966887 - DNA, 25 bp, Homo sapien
aggagttatgcttgagatcttttct

SEQ ID NO: 2966888 - DNA, 25 bp, Homo sapien
cttgtcgggtgacctggagatgagg

SEQ ID NO: 2966889 - DNA, 25 bp, Homo sapien
cactgaacatctaaacaaactgcca

SEQ ID NO: 2966890 - DNA, 25 bp, Homo sapien
actgccaggactttaccacaaataa

SEQ ID NO: 2966891 - DNA, 25 bp, Homo sapien
aacaaactgccaggactttaccaca

SEQ ID NO: 2966892 - DNA, 25 bp, Homo sapien
caaactgccaggactttaccacaaa

SEQ ID NO: 2966893 - DNA, 25 bp, Homo sapien
taaccctgggtcactatctggctga

SEQ ID NO: 2966894 - DNA, 25 bp, Homo sapien
tggctgaatttcagtgttctcaaat

SEQ ID NO: 2966895 - DNA, 25 bp, Homo sapien
actggaaccctgaccataaccctgg

SEQ ID NO: 2966896 - DNA, 25 bp, Homo sapien
tgtgctattaaagtcagagctggac

SEQ ID NO: 2966897 - DNA, 25 bp, Homo sapien
caaccatcaatttgtacactagaaa

SEQ ID NO: 2966898 - DNA, 25 bp, Homo sapien
acaataaggttcaaccaattcctgt

SEQ ID NO: 2966899 - DNA, 25 bp, Homo sapien
tgatttaccattttagcttttgaaa

SEQ ID NO: 2966900 - DNA, 25 bp, Homo sapien
ggagatggtcacatcaaacaccaca

SEQ ID NO: 2966901 - DNA, 25 bp, Homo sapien
cccggccaacacaagtgatttttat

SEQ ID NO: 2966902 - DNA, 25 bp, Homo sapien
tttatatactgatagtatatcctac

SEQ ID NO: 2966903 - DNA, 25 bp, Homo sapien
tatactgatagtatatcctacaacc

SEQ ID NO: 2966904 - DNA, 25 bp, Homo sapien
tactgatagtatatcctacaacctt

SEQ ID NO: 2966905 - DNA, 25 bp, Homo sapien
agtggaggctttcctaagcagagac

SEQ ID NO: 2966906 - DNA, 25 bp, Homo sapien
tgagagctcttctgaggattccttc

SEQ ID NO: 2966907 - DNA, 25 bp, Homo sapien
ctttcctaagcagagaccctgagag

SEQ ID NO: 2966908 - DNA, 25 bp, Homo sapien
ttctctacctttgcaacaactggca

SEQ ID NO: 2966909 - DNA, 25 bp, Homo sapien
gctttcagaagcctacagacaggag

SEQ ID NO: 2966910 - DNA, 25 bp, Homo sapien
cgaggttagcatcagtcagtaggca

SEQ ID NO: 2966911 - DNA, 25 bp, Homo sapien
cagtcagtaggcatggtcccaacag

SEQ ID NO: 2966912 - DNA, 25 bp, Homo sapien
ggacagaagagaccccgaggttagc

SEQ ID NO: 2966913 - DNA, 25 bp, Homo sapien
tagttctcaagtgatacttttcatt

SEQ ID NO: 2966914 - DNA, 25 bp, Homo sapien
ttagcagggactctgccgtgcactg

SEQ ID NO: 2966915 - DNA, 25 bp, Homo sapien
agcagggactctgccgtgcactgtt

SEQ ID NO: 2966916 - DNA, 25 bp, Homo sapien
agttctcaagtgatacttttcattt

SEQ ID NO: 2966917 - DNA, 25 bp, Homo sapien
cagagtggtttcacatggcagtaat

SEQ ID NO: 2966918 - DNA, 25 bp, Homo sapien
ttcacatggcagtaatgtacgtgga

SEQ ID NO: 2966919 - DNA, 25 bp, Homo sapien
tggcagtaatgtacgtggaggtaaa

SEQ ID NO: 2966920 - DNA, 25 bp, Homo sapien
taatgtacgtggaggtaaacagcca

SEQ ID NO: 2966921 - DNA, 25 bp, Homo sapien
caattctgttgaagtaatgggcatt

SEQ ID NO: 2966922 - DNA, 25 bp, Homo sapien
aattctgttgaagtaatgggcattt

SEQ ID NO: 2966923 - DNA, 25 bp, Homo sapien
ccagctattttaagagctgctactt

SEQ ID NO: 2966924 - DNA, 25 bp, Homo sapien
gctattttaagagctgctactttaa

SEQ ID NO: 2966925 - DNA, 25 bp, Homo sapien
cagctattttaagagctgctacttt

SEQ ID NO: 2966926 - DNA, 25 bp, Homo sapien
ttccagctattttaagagctgctac

SEQ ID NO: 2966927 - DNA, 25 bp, Homo sapien
catggacatcccaacacgacagttt

SEQ ID NO: 2966928 - DNA, 25 bp, Homo sapien
cagaaatttcaaacggcaaccatgg

SEQ ID NO: 2966929 - DNA, 25 bp, Homo sapien
ccacaggaaaggagttcccctggca

SEQ ID NO: 2966930 - DNA, 25 bp, Homo sapien
tgaacaaaggaaccctcatcaggaa

SEQ ID NO: 2966931 - DNA, 25 bp, Homo sapien
tcctagatttccgatttcaccctct

SEQ ID NO: 2966932 - DNA, 25 bp, Homo sapien
agtgaacacgaacacctgtactttt

SEQ ID NO: 2966933 - DNA, 25 bp, Homo sapien
cacctgtacttttcctagatttccg

SEQ ID NO: 2966934 - DNA, 25 bp, Homo sapien
tagatttccgatttcaccctctcca

SEQ ID NO: 2966935 - DNA, 25 bp, Homo sapien
ttaataaactgatttgtcaaaactg

SEQ ID NO: 2966936 - DNA, 25 bp, Homo sapien
gcagccacatattttcatgcacgtg

SEQ ID NO: 2966937 - DNA, 25 bp, Homo sapien
aaactgtcagaatcaagggagatca

SEQ ID NO: 2966938 - DNA, 25 bp, Homo sapien
tatacacgtatctgtgagcagccac

SEQ ID NO: 2966939 - DNA, 25 bp, Homo sapien
gaaatctggtacttaagcacaatgg

SEQ ID NO: 2966940 - DNA, 25 bp, Homo sapien
ggtcaaagctctacgaaaacatcct

SEQ ID NO: 2966941 - DNA, 25 bp, Homo sapien
tgtcacctgagtaatgccttctggg

SEQ ID NO: 2966942 - DNA, 25 bp, Homo sapien
catccttagggtctcgggacagtga

SEQ ID NO: 2966943 - DNA, 25 bp, Homo sapien
tgttgtcggacaggcctttcccttc

SEQ ID NO: 2966944 - DNA, 25 bp, Homo sapien
tcagaggtcctgttgtcggacaggc

SEQ ID NO: 2966945 - DNA, 25 bp, Homo sapien
tcctgttgtcggacaggcctttccc

SEQ ID NO: 2966946 - DNA, 25 bp, Homo sapien
gaggtcctgttgtcggacaggcctt

SEQ ID NO: 2966947 - DNA, 25 bp, Homo sapien
acaagggctgaagtgcttcgggtcc

SEQ ID NO: 2966948 - DNA, 25 bp, Homo sapien
acaggacaagggctgaagtgcttcg

SEQ ID NO: 2966949 - DNA, 25 bp, Homo sapien
cagcacacaggacaagggctgaagt

SEQ ID NO: 2966950 - DNA, 25 bp, Homo sapien
agggctgaagtgcttcgggtccatc

SEQ ID NO: 2966951 - DNA, 25 bp, Homo sapien
gttccaggccgctgctgtatcccca

SEQ ID NO: 2966952 - DNA, 25 bp, Homo sapien
ggatgtttctctggccgttcagaag

SEQ ID NO: 2966953 - DNA, 25 bp, Homo sapien
atgtttctctggccgttcagaagtt

SEQ ID NO: 2966954 - DNA, 25 bp, Homo sapien
cagaagttccaggccgctgctgtat

SEQ ID NO: 2966955 - DNA, 25 bp, Homo sapien
gggctggtcactccccactgtaccc

SEQ ID NO: 2966956 - DNA, 25 bp, Homo sapien
ctcttgtcaccctgtactgcctcct

SEQ ID NO: 2966957 - DNA, 25 bp, Homo sapien
aacaggccactacttttccacagca

SEQ ID NO: 2966958 - DNA, 25 bp, Homo sapien
tcaacccataaacaggccactactt

SEQ ID NO: 2966959 - DNA, 25 bp, Homo sapien
gcagctgttccgcaatcccaaagac

SEQ ID NO: 2966960 - DNA, 25 bp, Homo sapien
tggccggaaagtcctcctccagatg

SEQ ID NO: 2966961 - DNA, 25 bp, Homo sapien
agctggacccgagtccaagctctgt

SEQ ID NO: 2966962 - DNA, 25 bp, Homo sapien
tgctgtacctcttcagcgagcagga

SEQ ID NO: 2966963 - DNA, 25 bp, Homo sapien
gaaataaatcccctacattgtctgg

SEQ ID NO: 2966964 - DNA, 25 bp, Homo sapien
acatcaagccagctgttttaggcaa

SEQ ID NO: 2966965 - DNA, 25 bp, Homo sapien
tgtagctgtaaggttgtcccaggca

SEQ ID NO: 2966966 - DNA, 25 bp, Homo sapien
agcccagctttttggaacccttcag

SEQ ID NO: 2966967 - DNA, 25 bp, Homo sapien
tattggtccagaatatcaggttagc

SEQ ID NO: 2966968 - DNA, 25 bp, Homo sapien
aaccagcgacgctgtgcaacctctt

SEQ ID NO: 2966969 - DNA, 25 bp, Homo sapien
aggcgaaagcaatggcaccgctgcc

SEQ ID NO: 2966970 - DNA, 25 bp, Homo sapien
gctctaggaagcctgaggcgaaagc

SEQ ID NO: 2966971 - DNA, 25 bp, Homo sapien
ctttgccattaaccagcgacgctgt

SEQ ID NO: 2966972 - DNA, 25 bp, Homo sapien
ctctgagtctgcctagcagcgaaga

SEQ ID NO: 2966973 - DNA, 25 bp, Homo sapien
gcctagcagcgaagaggaaagctgt

SEQ ID NO: 2966974 - DNA, 25 bp, Homo sapien
gtctgcctagcagcgaagaggaaag

SEQ ID NO: 2966975 - DNA, 25 bp, Homo sapien
tgagtctgcctagcagcgaagagga

SEQ ID NO: 2966976 - DNA, 25 bp, Homo sapien
aactgtctggttctcccggcttgac

SEQ ID NO: 2966977 - DNA, 25 bp, Homo sapien
caatgaagccctccatgttgccatg

SEQ ID NO: 2966978 - DNA, 25 bp, Homo sapien
cccaaacaccaggaactgtctggtt

SEQ ID NO: 2966979 - DNA, 25 bp, Homo sapien
agctgcattttcctggtccaggccc

SEQ ID NO: 2966980 - DNA, 25 bp, Homo sapien
cctcccaagcaggtacaggcgcccg

SEQ ID NO: 2966981 - DNA, 25 bp, Homo sapien
agcctcccaagcaggtacaggcgcc

SEQ ID NO: 2966982 - DNA, 25 bp, Homo sapien
gcctcccaagcaggtacaggcgccc

SEQ ID NO: 2966983 - DNA, 25 bp, Homo sapien
tcccaagcaggtacaggcgcccgcc

SEQ ID NO: 2966984 - DNA, 25 bp, Homo sapien
ttgaggtcatcagccactcaccatt

SEQ ID NO: 2966985 - DNA, 25 bp, Homo sapien
gcccgacatcaaatggcctcttctt

SEQ ID NO: 2966986 - DNA, 25 bp, Homo sapien
atcagccactcaccattgctgcttt

SEQ ID NO: 2966987 - DNA, 25 bp, Homo sapien
caaatggcctcttcttgaggtcatc

SEQ ID NO: 2966988 - DNA, 25 bp, Homo sapien
tcctggggactaggcaccacggtga

SEQ ID NO: 2966989 - DNA, 25 bp, Homo sapien
gccactgacctcctggggactaggc

SEQ ID NO: 2966990 - DNA, 25 bp, Homo sapien
gacctcctggggactaggcaccacg

SEQ ID NO: 2966991 - DNA, 25 bp, Homo sapien
cactgacctcctggggactaggcac

SEQ ID NO: 2966992 - DNA, 25 bp, Homo sapien
atgagctatcattttcctccaggaa

SEQ ID NO: 2966993 - DNA, 25 bp, Homo sapien
ctcttagaagtcttcgaaggttaga

SEQ ID NO: 2966994 - DNA, 25 bp, Homo sapien
ttctcctctagcagctcaaactttt

SEQ ID NO: 2966995 - DNA, 25 bp, Homo sapien
actcttagaagtcttcgaaggttag

SEQ ID NO: 2966996 - DNA, 25 bp, Homo sapien
tttctcctctagcagctcaaacttt

SEQ ID NO: 2966997 - DNA, 25 bp, Homo sapien
tggtgtccaatccatctttttatca

SEQ ID NO: 2966998 - DNA, 25 bp, Homo sapien
gtgctgaagacccatagatctgact

SEQ ID NO: 2966999 - DNA, 25 bp, Homo sapien
acatcttcaaatccactggaaatgt

SEQ ID NO: 2967000 - DNA, 25 bp, Homo sapien
catagatctgactgtagatttaaca

SEQ ID NO: 2967001 - DNA, 25 bp, Homo sapien
cccagagaggccctttgggaggtgg

SEQ ID NO: 2967002 - DNA, 25 bp, Homo sapien
ccagagaggccctttgggaggtggt

SEQ ID NO: 2967003 - DNA, 25 bp, Homo sapien
cgcccagagaggccctttgggaggt

SEQ ID NO: 2967004 - DNA, 25 bp, Homo sapien
cagagaggccctttgggaggtggtt

SEQ ID NO: 2967005 - DNA, 25 bp, Homo sapien
aagcgacaggggcatctggctgctt

SEQ ID NO: 2967006 - DNA, 25 bp, Homo sapien
tcctgtgccaaataaagcgacaggg

SEQ ID NO: 2967007 - DNA, 25 bp, Homo sapien
tcctcctgtgccaaataaagcgaca

SEQ ID NO: 2967008 - DNA, 25 bp, Homo sapien
gacctcctcctgtgccaaataaagc

SEQ ID NO: 2967009 - DNA, 25 bp, Homo sapien
cagaaataggtgtgagtggggtcca

SEQ ID NO: 2967010 - DNA, 25 bp, Homo sapien
aaggtccagaaataggtgtgagtgg

SEQ ID NO: 2967011 - DNA, 25 bp, Homo sapien
aaagcaccttgctggggtctatgag

SEQ ID NO: 2967012 - DNA, 25 bp, Homo sapien
caccttgctggggtctatgagaaag

SEQ ID NO: 2967013 - DNA, 25 bp, Homo sapien
cagggagctgggagtttagcgaggc

SEQ ID NO: 2967014 - DNA, 25 bp, Homo sapien
ttagcgaggccttgatccagagcag

SEQ ID NO: 2967015 - DNA, 25 bp, Homo sapien
ttacagatcatcaatccggtcctgg

SEQ ID NO: 2967016 - DNA, 25 bp, Homo sapien
tggacttgccaaggtaaatagtaaa

SEQ ID NO: 2967017 - DNA, 25 bp, Homo sapien
caagatacgtgaacctgcaactgcc

SEQ ID NO: 2967018 - DNA, 25 bp, Homo sapien
tatttacaacggaagcagcactgac

SEQ ID NO: 2967019 - DNA, 25 bp, Homo sapien
tccactcgggtgaggcgatttaaat

SEQ ID NO: 2967020 - DNA, 25 bp, Homo sapien
actgacctgggagaacactgaatca

SEQ ID NO: 2967021 - DNA, 25 bp, Homo sapien
ttcttcattggcttttgggtgtgac

SEQ ID NO: 2967022 - DNA, 25 bp, Homo sapien
cctttcttcattggcttttgggtgt

SEQ ID NO: 2967023 - DNA, 25 bp, Homo sapien
ccctttcttcattggcttttgggtg

SEQ ID NO: 2967024 - DNA, 25 bp, Homo sapien
tttcttcattggcttttgggtgtga

SEQ ID NO: 2967025 - DNA, 25 bp, Homo sapien
ctgccccagcgaggaaggagagagg

SEQ ID NO: 2967026 - DNA, 25 bp, Homo sapien
gatgtgctcggcgttgggaggtcct

SEQ ID NO: 2967027 - DNA, 25 bp, Homo sapien
ggagagaggatgtgctcggcgttgg

SEQ ID NO: 2967028 - DNA, 25 bp, Homo sapien
tgtaagcatctgccccagcgaggaa

SEQ ID NO: 2967029 - DNA, 25 bp, Homo sapien
aactctacccaagcccacatccagc

SEQ ID NO: 2967030 - DNA, 25 bp, Homo sapien
gtcctgctgggatgcaggtacctaa

SEQ ID NO: 2967031 - DNA, 25 bp, Homo sapien
gatgcaggtacctaacaaagcactg

SEQ ID NO: 2967032 - DNA, 25 bp, Homo sapien
tgctgggatgcaggtacctaacaaa

SEQ ID NO: 2967033 - DNA, 25 bp, Homo sapien
caaagagggtttgcatattccgcct

SEQ ID NO: 2967034 - DNA, 25 bp, Homo sapien
ccgcctccttatgggtatcagtgaa

SEQ ID NO: 2967035 - DNA, 25 bp, Homo sapien
cctctcttagactcagctgcatgct

SEQ ID NO: 2967036 - DNA, 25 bp, Homo sapien
gattgggggctagccggcatcctta

SEQ ID NO: 2967037 - DNA, 25 bp, Homo sapien
cgcctacgggtaaagagattccgag

SEQ ID NO: 2967038 - DNA, 25 bp, Homo sapien
gattccgaggctgtggctcgagtgt

SEQ ID NO: 2967039 - DNA, 25 bp, Homo sapien
cgaggccaaccaggatgttattcat

SEQ ID NO: 2967040 - DNA, 25 bp, Homo sapien
cattgtgtgccaagtgtggcgccta

SEQ ID NO: 2967041 - DNA, 25 bp, Homo sapien
gatcacacagggtgagcaacgaggc

SEQ ID NO: 2967042 - DNA, 25 bp, Homo sapien
acacctgaaacagagggctgcctgg

SEQ ID NO: 2967043 - DNA, 25 bp, Homo sapien
caacgaggcgtagacgtcttaacaa

SEQ ID NO: 2967044 - DNA, 25 bp, Homo sapien
gttcggagcctgttccacacctgaa

SEQ ID NO: 2967045 - DNA, 25 bp, Homo sapien
ccagggtggttgtgcgaccttctgt

SEQ ID NO: 2967046 - DNA, 25 bp, Homo sapien
tcgtctcacagggacttctctgact

SEQ ID NO: 2967047 - DNA, 25 bp, Homo sapien
tgagtggccttgctacagtctggcc

SEQ ID NO: 2967048 - DNA, 25 bp, Homo sapien
aacaaactggcatgctgcagaagca

SEQ ID NO: 2967049 - DNA, 25 bp, Homo sapien
tccttttggttgtgggatcacagca

SEQ ID NO: 2967050 - DNA, 25 bp, Homo sapien
aatgacttgcctcagtcaccttagt

SEQ ID NO: 2967051 - DNA, 25 bp, Homo sapien
caaggctcagggtggttcaatgact

SEQ ID NO: 2967052 - DNA, 25 bp, Homo sapien
gacagatgctgtcaactccatttca

SEQ ID NO: 2967053 - DNA, 25 bp, Homo sapien
ttccccactcaagggcggtggaaga

SEQ ID NO: 2967054 - DNA, 25 bp, Homo sapien
ctggatgttccccactcaagggcgg

SEQ ID NO: 2967055 - DNA, 25 bp, Homo sapien
gatggtttccatcaggccttgaggc

SEQ ID NO: 2967056 - DNA, 25 bp, Homo sapien
gtgggcagaggaccttgcaccttgc

SEQ ID NO: 2967057 - DNA, 25 bp, Homo sapien
gagaagagcaggctaagcagcagca

SEQ ID NO: 2967058 - DNA, 25 bp, Homo sapien
ctgagaagagcaggctaagcagcag

SEQ ID NO: 2967059 - DNA, 25 bp, Homo sapien
tgagaagagcaggctaagcagcagc

SEQ ID NO: 2967060 - DNA, 25 bp, Homo sapien
tcccatcctgactgggggcaaggta

SEQ ID NO: 2967061 - DNA, 25 bp, Homo sapien
ggcaaggtacattacagaatcccga

SEQ ID NO: 2967062 - DNA, 25 bp, Homo sapien
tcccaggtccttgcactgaagctgt

SEQ ID NO: 2967063 - DNA, 25 bp, Homo sapien
taccagattttcaggtgcagggtcc

SEQ ID NO: 2967064 - DNA, 25 bp, Homo sapien
cagctggcggaggtgtctggaggcc

SEQ ID NO: 2967065 - DNA, 25 bp, Homo sapien
gcacactggctctgatctggagcca

SEQ ID NO: 2967066 - DNA, 25 bp, Homo sapien
cgtttcctcagagtgcgaactctct

SEQ ID NO: 2967067 - DNA, 25 bp, Homo sapien
tatttgttcctctaaggccctggga

SEQ ID NO: 2967068 - DNA, 25 bp, Homo sapien
gatgtgaaacccaatatacacacag

SEQ ID NO: 2967069 - DNA, 25 bp, Homo sapien
cacagacacgagtggcttgtcctct

SEQ ID NO: 2967070 - DNA, 25 bp, Homo sapien
agacacgagtggcttgtcctcttgg

SEQ ID NO: 2967071 - DNA, 25 bp, Homo sapien
ttcagatgtgaaacccaatatacac

SEQ ID NO: 2967072 - DNA, 25 bp, Homo sapien
gctggctgcatgcaatgttgactca

SEQ ID NO: 2967073 - DNA, 25 bp, Homo sapien
ggctggctgcatgcaatgttgactc

SEQ ID NO: 2967074 - DNA, 25 bp, Homo sapien
ctggctgcatgcaatgttgactcat

SEQ ID NO: 2967075 - DNA, 25 bp, Homo sapien
tgctgcgatgcctcctctgtcaagt

SEQ ID NO: 2967076 - DNA, 25 bp, Homo sapien
tctgtcaagtcctgtgctcggtcct

SEQ ID NO: 2967077 - DNA, 25 bp, Homo sapien
ttgctgcgatgcctcctctgtcaag

SEQ ID NO: 2967078 - DNA, 25 bp, Homo sapien
tgtgctcggtcctgactcagccggg

SEQ ID NO: 2967079 - DNA, 25 bp, Homo sapien
ttacatagcaagggcctttggtggg

SEQ ID NO: 2967080 - DNA, 25 bp, Homo sapien
ggagtgaaagcgtatggtgagtatg

SEQ ID NO: 2967081 - DNA, 25 bp, Homo sapien
gagtgaaagcgtatggtgagtatgt

SEQ ID NO: 2967082 - DNA, 25 bp, Homo sapien
gtggggagtgaaagcgtatggtgag

SEQ ID NO: 2967083 - DNA, 25 bp, Homo sapien
caatgccaccggtaaggctgactgg

SEQ ID NO: 2967084 - DNA, 25 bp, Homo sapien
attagaggattaccccagggctctg

SEQ ID NO: 2967085 - DNA, 25 bp, Homo sapien
tttgtaagctacacaggcccattca

SEQ ID NO: 2967086 - DNA, 25 bp, Homo sapien
ctatgaaaggctaagagagtgactg

SEQ ID NO: 2967087 - DNA, 25 bp, Homo sapien
catatgttaagcagaagacctgggt

SEQ ID NO: 2967088 - DNA, 25 bp, Homo sapien
actgcaatgggtagaatggtgttcc

SEQ ID NO: 2967089 - DNA, 25 bp, Homo sapien
tgaggtatcctagggtaaaagctac

SEQ ID NO: 2967090 - DNA, 25 bp, Homo sapien
tactttctcactgcatgacgttgga

SEQ ID NO: 2967091 - DNA, 25 bp, Homo sapien
ttccacacctcgtagcctctttgct

SEQ ID NO: 2967092 - DNA, 25 bp, Homo sapien
cttccacacctcgtagcctctttgc

SEQ ID NO: 2967093 - DNA, 25 bp, Homo sapien
ccttccacacctcgtagcctctttg

SEQ ID NO: 2967094 - DNA, 25 bp, Homo sapien
gatgcacagccagtccttctagctc

SEQ ID NO: 2967095 - DNA, 25 bp, Homo sapien
tgcacagccagtccttctagctcct

SEQ ID NO: 2967096 - DNA, 25 bp, Homo sapien
tgcatgatgcacagccagtccttct

SEQ ID NO: 2967097 - DNA, 25 bp, Homo sapien
atgatgcacagccagtccttctagc

SEQ ID NO: 2967098 - DNA, 25 bp, Homo sapien
aggactgctgacatccactaagctt

SEQ ID NO: 2967099 - DNA, 25 bp, Homo sapien
ggactgctgacatccactaagcttc

SEQ ID NO: 2967100 - DNA, 25 bp, Homo sapien
ttagtaaacactccgacagccggtg

SEQ ID NO: 2967101 - DNA, 25 bp, Homo sapien
ggtcctgcctctgataatggccaca

SEQ ID NO: 2967102 - DNA, 25 bp, Homo sapien
gccacagcattgaggtgataaccgt

SEQ ID NO: 2967103 - DNA, 25 bp, Homo sapien
tgtgtggcaagggtcactactggct

SEQ ID NO: 2967104 - DNA, 25 bp, Homo sapien
gggagtggtgccttacacctgcaat

SEQ ID NO: 2967105 - DNA, 25 bp, Homo sapien
tagctcatgccgctgagagagtgca

SEQ ID NO: 2967106 - DNA, 25 bp, Homo sapien
gacttccgtgacactgaggctggtg

SEQ ID NO: 2967107 - DNA, 25 bp, Homo sapien
ctgggtagcgcaggagaaatagctc

SEQ ID NO: 2967108 - DNA, 25 bp, Homo sapien
gtaggatggaagcacgccgccaaca

SEQ ID NO: 2967109 - DNA, 25 bp, Homo sapien
aggatggaagcacgccgccaacaga

SEQ ID NO: 2967110 - DNA, 25 bp, Homo sapien
tcctgtaggatggaagcacgccgcc

SEQ ID NO: 2967111 - DNA, 25 bp, Homo sapien
ctgtaggatggaagcacgccgccaa

SEQ ID NO: 2967112 - DNA, 25 bp, Homo sapien
ctcccacccgctcctctccataccc

SEQ ID NO: 2967113 - DNA, 25 bp, Homo sapien
gctcctctccatacccagggtccat

SEQ ID NO: 2967114 - DNA, 25 bp, Homo sapien
cacccgctcctctccatacccaggg

SEQ ID NO: 2967115 - DNA, 25 bp, Homo sapien
ccgctcctctccatacccagggtcc

SEQ ID NO: 2967116 - DNA, 25 bp, Homo sapien
ctgtggcacacacgggacatctgac

SEQ ID NO: 2967117 - DNA, 25 bp, Homo sapien
cacacgggacatctgacgttgagtc

SEQ ID NO: 2967118 - DNA, 25 bp, Homo sapien
tggcacacacgggacatctgacgtt

SEQ ID NO: 2967119 - DNA, 25 bp, Homo sapien
gggacatctgacgttgagtccacac

SEQ ID NO: 2967120 - DNA, 25 bp, Homo sapien
gcagcccgaagccctcaggccagct

SEQ ID NO: 2967121 - DNA, 25 bp, Homo sapien
atgtgccgcagcccgaagccctcag

SEQ ID NO: 2967122 - DNA, 25 bp, Homo sapien
gtgccgcagcccgaagccctcaggc

SEQ ID NO: 2967123 - DNA, 25 bp, Homo sapien
gccgcagcccgaagccctcaggcca

SEQ ID NO: 2967124 - DNA, 25 bp, Homo sapien
acgtcccggctaggtgactcggcca

SEQ ID NO: 2967125 - DNA, 25 bp, Homo sapien
gatcccacgacgtcccggctaggtg

SEQ ID NO: 2967126 - DNA, 25 bp, Homo sapien
ctcggccatggcgtcggcaagtcgc

SEQ ID NO: 2967127 - DNA, 25 bp, Homo sapien
tcggccatggcgtcggcaagtcgct

SEQ ID NO: 2967128 - DNA, 25 bp, Homo sapien
ggctagaagtctgatgacaccttta

SEQ ID NO: 2967129 - DNA, 25 bp, Homo sapien
gctagaagtctgatgacacctttac

SEQ ID NO: 2967130 - DNA, 25 bp, Homo sapien
tcaggctagaagtctgatgacacct

SEQ ID NO: 2967131 - DNA, 25 bp, Homo sapien
caggctagaagtctgatgacacctt

SEQ ID NO: 2967132 - DNA, 25 bp, Homo sapien
tcttgctggtcctgatcagcgcctg

SEQ ID NO: 2967133 - DNA, 25 bp, Homo sapien
gccagagtcagctgcacccaacaga

SEQ ID NO: 2967134 - DNA, 25 bp, Homo sapien
gatgtcagacatttcaagccctgcc

SEQ ID NO: 2967135 - DNA, 25 bp, Homo sapien
agtgacagagtcttgagaggactca

SEQ ID NO: 2967136 - DNA, 25 bp, Homo sapien
ggggtaaataccagtttgcctgata

SEQ ID NO: 2967137 - DNA, 25 bp, Homo sapien
aaataccagtttgcctgatagagtg

SEQ ID NO: 2967138 - DNA, 25 bp, Homo sapien
ggtaaataccagtttgcctgataga

SEQ ID NO: 2967139 - DNA, 25 bp, Homo sapien
taaataccagtttgcctgatagagt

SEQ ID NO: 2967140 - DNA, 25 bp, Homo sapien
tctttgagggtaggaaacttgtctc

SEQ ID NO: 2967141 - DNA, 25 bp, Homo sapien
tctggggctttaatctctttgaggg

SEQ ID NO: 2967142 - DNA, 25 bp, Homo sapien
gttcagtattgtggcctcctctggg

SEQ ID NO: 2967143 - DNA, 25 bp, Homo sapien
cgttcagtattgtggcctcctctgg

SEQ ID NO: 2967144 - DNA, 25 bp, Homo sapien
cacagaggtcgcactggcacttcct

SEQ ID NO: 2967145 - DNA, 25 bp, Homo sapien
gactctgaagggtcacagaggtcgc

SEQ ID NO: 2967146 - DNA, 25 bp, Homo sapien
tgtgcctatccacagtaattcctgc

SEQ ID NO: 2967147 - DNA, 25 bp, Homo sapien
tatccacagtaattcctgctttcat

SEQ ID NO: 2967148 - DNA, 25 bp, Homo sapien
gtttttactgctacgtcaagggctg

SEQ ID NO: 2967149 - DNA, 25 bp, Homo sapien
tttactgctacgtcaagggctgtgt

SEQ ID NO: 2967150 - DNA, 25 bp, Homo sapien
ccacgtgtctctcaggggggaaggt

SEQ ID NO: 2967151 - DNA, 25 bp, Homo sapien
cacgtgtctctcaggggggaaggtt

SEQ ID NO: 2967152 - DNA, 25 bp, Homo sapien
ccgtctaacagacaaggcccagagt

SEQ ID NO: 2967153 - DNA, 25 bp, Homo sapien
gactgtttgccacttctggcctgga

SEQ ID NO: 2967154 - DNA, 25 bp, Homo sapien
gagatggtggaggaatccgtctaac

SEQ ID NO: 2967155 - DNA, 25 bp, Homo sapien
gactgcggcaaggaggcgcccctct

SEQ ID NO: 2967156 - DNA, 25 bp, Homo sapien
tgcttgagggttacgattctggagt

SEQ ID NO: 2967157 - DNA, 25 bp, Homo sapien
ggagaccccggcttgctttgtagct

SEQ ID NO: 2967158 - DNA, 25 bp, Homo sapien
gatgtgagggtgtcataataccctg

SEQ ID NO: 2967159 - DNA, 25 bp, Homo sapien
tgtagctcctcacagtaggaagtgc

SEQ ID NO: 2967160 - DNA, 25 bp, Homo sapien
ggcttgcagccgagcaagacagtgt

SEQ ID NO: 2967161 - DNA, 25 bp, Homo sapien
gcttgcagccgagcaagacagtgtg

SEQ ID NO: 2967162 - DNA, 25 bp, Homo sapien
gggcttgcagccgagcaagacagtg

SEQ ID NO: 2967163 - DNA, 25 bp, Homo sapien
gcgggcttgcagccgagcaagacag

SEQ ID NO: 2967164 - DNA, 25 bp, Homo sapien
ctggagaggtggtggcccaggcaga

SEQ ID NO: 2967165 - DNA, 25 bp, Homo sapien
tggagaggtggtggcccaggcagac

SEQ ID NO: 2967166 - DNA, 25 bp, Homo sapien
gagaggtggtggcccaggcagacat

SEQ ID NO: 2967167 - DNA, 25 bp, Homo sapien
ggagaggtggtggcccaggcagaca

SEQ ID NO: 2967168 - DNA, 25 bp, Homo sapien
tctcattaggaggtcgggcattttc

SEQ ID NO: 2967169 - DNA, 25 bp, Homo sapien
gagaccagcgggtcacgtgactgct

SEQ ID NO: 2967170 - DNA, 25 bp, Homo sapien
gggtctgccccaagcgatcaacttg

SEQ ID NO: 2967171 - DNA, 25 bp, Homo sapien
tcctgaatgggcagtgaggtacgta

SEQ ID NO: 2967172 - DNA, 25 bp, Homo sapien
cacttccgtcaccacaaaaggagca

SEQ ID NO: 2967173 - DNA, 25 bp, Homo sapien
gggcagctctggcacttccgtcacc

SEQ ID NO: 2967174 - DNA, 25 bp, Homo sapien
aaaaggagcagcgtccacggctctg

SEQ ID NO: 2967175 - DNA, 25 bp, Homo sapien
gctgcccactgaagggattggcaga

SEQ ID NO: 2967176 - DNA, 25 bp, Homo sapien
aggccctgcgaaaagctcctctggc

SEQ ID NO: 2967177 - DNA, 25 bp, Homo sapien
aagtgggggcattgagccctagtct

SEQ ID NO: 2967178 - DNA, 25 bp, Homo sapien
gggcattgagccctagtctcaggga

SEQ ID NO: 2967179 - DNA, 25 bp, Homo sapien
caatcaaaggccctgcgaaaagctc

SEQ ID NO: 2967180 - DNA, 25 bp, Homo sapien
ggaaatgggcctgttacccgcagct

SEQ ID NO: 2967181 - DNA, 25 bp, Homo sapien
caagtgaaggatgagacagccggat

SEQ ID NO: 2967182 - DNA, 25 bp, Homo sapien
taaaagagcttgttctccaggcccc

SEQ ID NO: 2967183 - DNA, 25 bp, Homo sapien
gaagacgaagcaaccactagctctg

SEQ ID NO: 2967184 - DNA, 25 bp, Homo sapien
tgagcagctgtcctgcggttgaggt

SEQ ID NO: 2967185 - DNA, 25 bp, Homo sapien
ctgccagggcccgaaagagagtgct

SEQ ID NO: 2967186 - DNA, 25 bp, Homo sapien
aacctgccagggcccgaaagagagt

SEQ ID NO: 2967187 - DNA, 25 bp, Homo sapien
tcctgcggttgaggtggacctgttg

SEQ ID NO: 2967188 - DNA, 25 bp, Homo sapien
agtttgcagtcaaggaggacagtga

SEQ ID NO: 2967189 - DNA, 25 bp, Homo sapien
gggtcccagagatggatctgctgtg

SEQ ID NO: 2967190 - DNA, 25 bp, Homo sapien
gagaggagtcacaggttcaacatga

SEQ ID NO: 2967191 - DNA, 25 bp, Homo sapien
ggacctacggcccatgcagtgccag

SEQ ID NO: 2967192 - DNA, 25 bp, Homo sapien
ttttggaaaagatatggacaacgat

SEQ ID NO: 2967193 - DNA, 25 bp, Homo sapien
aagcattgaggaatctttttggaaa

SEQ ID NO: 2967194 - DNA, 25 bp, Homo sapien
caacgattgagaagtacactgatct

SEQ ID NO: 2967195 - DNA, 25 bp, Homo sapien
tatggacaacgattgagaagtacac

SEQ ID NO: 2967196 - DNA, 25 bp, Homo sapien
atcccgaacgcatgctttgttactg

SEQ ID NO: 2967197 - DNA, 25 bp, Homo sapien
actgttgggttgctcacggacgctg

SEQ ID NO: 2967198 - DNA, 25 bp, Homo sapien
ctccatcccgaacgcatgctttgtt

SEQ ID NO: 2967199 - DNA, 25 bp, Homo sapien
gctttgttactgttgggttgctcac

SEQ ID NO: 2967200 - DNA, 25 bp, Homo sapien
catctaattcagctgtgggccgctc

SEQ ID NO: 2967201 - DNA, 25 bp, Homo sapien
gagcctgccccaagccaagatatgt

SEQ ID NO: 2967202 - DNA, 25 bp, Homo sapien
gcctggaaaatcatgggtgccctaa

SEQ ID NO: 2967203 - DNA, 25 bp, Homo sapien
tggtaaagccaagagtagaccctgg

SEQ ID NO: 2967204 - DNA, 25 bp, Homo sapien
tgctccaatgaagagagggtccctg

SEQ ID NO: 2967205 - DNA, 25 bp, Homo sapien
tccaatgaagagagggtccctgtct

SEQ ID NO: 2967206 - DNA, 25 bp, Homo sapien
tgagaggggcctgctccaatgaaga

SEQ ID NO: 2967207 - DNA, 25 bp, Homo sapien
ctgggaggggatgcctggtttgaga

SEQ ID NO: 2967208 - DNA, 25 bp, Homo sapien
ccctgcctgtgcctagagcttctgc

SEQ ID NO: 2967209 - DNA, 25 bp, Homo sapien
taggacacgggagggcttgcagcat

SEQ ID NO: 2967210 - DNA, 25 bp, Homo sapien
ctgcctgtgcctagagcttctgcct

SEQ ID NO: 2967211 - DNA, 25 bp, Homo sapien
gcaggcggggagaagctaggacacg

SEQ ID NO: 2967212 - DNA, 25 bp, Homo sapien
caccctgacgatgtgtgtggactac

SEQ ID NO: 2967213 - DNA, 25 bp, Homo sapien
acgatgtgtgtggactacacagctc

SEQ ID NO: 2967214 - DNA, 25 bp, Homo sapien
cttcatgagcccgtacccacgcctg

SEQ ID NO: 2967215 - DNA, 25 bp, Homo sapien
gaagcacggccaccctgacgatgtg

SEQ ID NO: 2967216 - DNA, 25 bp, Homo sapien
ggcagctcaggtcacaggaaggctc

SEQ ID NO: 2967217 - DNA, 25 bp, Homo sapien
caggtcacaggaaggctcagccagg

SEQ ID NO: 2967218 - DNA, 25 bp, Homo sapien
tgtgtccttccgcagggggatcccc

SEQ ID NO: 2967219 - DNA, 25 bp, Homo sapien
ttccgcagggggatccccgcctgct

SEQ ID NO: 2967220 - DNA, 25 bp, Homo sapien
ccttgaggcaccattctgggttcac

SEQ ID NO: 2967221 - DNA, 25 bp, Homo sapien
cctgccttgaggcaccattctgggt

SEQ ID NO: 2967222 - DNA, 25 bp, Homo sapien
tgcctgccttgaggcaccattctgg

SEQ ID NO: 2967223 - DNA, 25 bp, Homo sapien
tgccttgaggcaccattctgggttc

SEQ ID NO: 2967224 - DNA, 25 bp, Homo sapien
ctgcaagacacaggagagggccagg

SEQ ID NO: 2967225 - DNA, 25 bp, Homo sapien
tgcaagacacaggagagggccaggc

SEQ ID NO: 2967226 - DNA, 25 bp, Homo sapien
gccatcaaagtttcttggtatgctg

SEQ ID NO: 2967227 - DNA, 25 bp, Homo sapien
ggcagcggagatcggtagccatcaa

SEQ ID NO: 2967228 - DNA, 25 bp, Homo sapien
tgttactcagagtctcgatgcttcc

SEQ ID NO: 2967229 - DNA, 25 bp, Homo sapien
tcgatgcttccctctcgctgaagtt

SEQ ID NO: 2967230 - DNA, 25 bp, Homo sapien
aggtgcttggagaagggtctcttct

SEQ ID NO: 2967231 - DNA, 25 bp, Homo sapien
acagcctccaccgacaggtgtggca

SEQ ID NO: 2967232 - DNA, 25 bp, Homo sapien
acagggaccgagcttctacagtctc

SEQ ID NO: 2967233 - DNA, 25 bp, Homo sapien
tgtggcagagggcaagtgcgctgag

SEQ ID NO: 2967234 - DNA, 25 bp, Homo sapien
ccaatgcaggatgtcatatgcaaac

SEQ ID NO: 2967235 - DNA, 25 bp, Homo sapien
aaagcggatccaatgcaggatgtca

SEQ ID NO: 2967236 - DNA, 25 bp, Homo sapien
aaaaaatacaaaagcggatccaatg

SEQ ID NO: 2967237 - DNA, 25 bp, Homo sapien
aatacaaaagcggatccaatgcagg

SEQ ID NO: 2967238 - DNA, 25 bp, Homo sapien
caactgcagcgtgatttattggaca

SEQ ID NO: 2967239 - DNA, 25 bp, Homo sapien
tgtccactcagggtcaaaatggcca

SEQ ID NO: 2967240 - DNA, 25 bp, Homo sapien
caagacgtgcacttttcaacagggc

SEQ ID NO: 2967241 - DNA, 25 bp, Homo sapien
tggccaggtggacgatcaactctgt

SEQ ID NO: 2967242 - DNA, 25 bp, Homo sapien
ccaggtctggctggacagttgcacg

SEQ ID NO: 2967243 - DNA, 25 bp, Homo sapien
gggaagtcctgtttgtgaactcaac

SEQ ID NO: 2967244 - DNA, 25 bp, Homo sapien
tgtgaactcaacgtttccacggctt

SEQ ID NO: 2967245 - DNA, 25 bp, Homo sapien
gcacgggaagtcctgtttgtgaact

SEQ ID NO: 2967246 - DNA, 25 bp, Homo sapien
ctttttgattgaaacatggctgtag

SEQ ID NO: 2967247 - DNA, 25 bp, Homo sapien
agcatgcacaggtagcctggtagca

SEQ ID NO: 2967248 - DNA, 25 bp, Homo sapien
tcctccttgtccctttttgattgaa

SEQ ID NO: 2967249 - DNA, 25 bp, Homo sapien
catgcacaggtagcctggtagcact

SEQ ID NO: 2967250 - DNA, 25 bp, Homo sapien
gttccctgaatggttgagagagccc

SEQ ID NO: 2967251 - DNA, 25 bp, Homo sapien
tgaatggttgagagagcccctggca

SEQ ID NO: 2967252 - DNA, 25 bp, Homo sapien
tgccacatccacgtgtcctggggtg

SEQ ID NO: 2967253 - DNA, 25 bp, Homo sapien
gtggtttcagaggggctcatgcttc

SEQ ID NO: 2967254 - DNA, 25 bp, Homo sapien
taaccagattgtcctgcaagctcag

SEQ ID NO: 2967255 - DNA, 25 bp, Homo sapien
tgattacaggctatggcaggctcca

SEQ ID NO: 2967256 - DNA, 25 bp, Homo sapien
tgataacctgagctccagtggcagc

SEQ ID NO: 2967257 - DNA, 25 bp, Homo sapien
tgatgccaccattaggtctgctggg

SEQ ID NO: 2967258 - DNA, 25 bp, Homo sapien
taaagctgcccgttgaccaggtagt

SEQ ID NO: 2967259 - DNA, 25 bp, Homo sapien
cgagagaatcggtaggtcacatgga

SEQ ID NO: 2967260 - DNA, 25 bp, Homo sapien
catcaaattgagaggaagtccgtag

SEQ ID NO: 2967261 - DNA, 25 bp, Homo sapien
tgaccaggtagtgccgagagaatcg

SEQ ID NO: 2967262 - DNA, 25 bp, Homo sapien
gaaaccatatacacttccagactgg

SEQ ID NO: 2967263 - DNA, 25 bp, Homo sapien
tgctccttcagttgccacgctggct

SEQ ID NO: 2967264 - DNA, 25 bp, Homo sapien
cagactggtggctgcctagcctggc

SEQ ID NO: 2967265 - DNA, 25 bp, Homo sapien
tcatctcagacagtactcttgctcc

SEQ ID NO: 2967266 - DNA, 25 bp, Homo sapien
tgtccctttgcctctagagcctcca

SEQ ID NO: 2967267 - DNA, 25 bp, Homo sapien
agttctaggtctgcagtgggagggc

SEQ ID NO: 2967268 - DNA, 25 bp, Homo sapien
gagacatacaggatgcactgtccct

SEQ ID NO: 2967269 - DNA, 25 bp, Homo sapien
tcctacagcaaggtgatcctgagat

SEQ ID NO: 2967270 - DNA, 25 bp, Homo sapien
gaaccatgggtttgccttgtggacc

SEQ ID NO: 2967271 - DNA, 25 bp, Homo sapien
cttctgctctgtcgcgccttcggaa

SEQ ID NO: 2967272 - DNA, 25 bp, Homo sapien
gcctgcttctgctctgtcgcgcctt

SEQ ID NO: 2967273 - DNA, 25 bp, Homo sapien
ccctcgaaccatgggtttgccttgt

SEQ ID NO: 2967274 - DNA, 25 bp, Homo sapien
caggctctgggttcgcgttcggaaa

SEQ ID NO: 2967275 - DNA, 25 bp, Homo sapien
gtgacggcgtgccacaatccgggct

SEQ ID NO: 2967276 - DNA, 25 bp, Homo sapien
ttcggaaacgctttcgcagggagcg

SEQ ID NO: 2967277 - DNA, 25 bp, Homo sapien
gattccccggagcagcacggtgacg

SEQ ID NO: 2967278 - DNA, 25 bp, Homo sapien
agaagtcaggtgcacgtctgtgcac

SEQ ID NO: 2967279 - DNA, 25 bp, Homo sapien
tgcatggaggcgagatcgtggttat

SEQ ID NO: 2967280 - DNA, 25 bp, Homo sapien
tgtacgcttgagacacctggtccgc

SEQ ID NO: 2967281 - DNA, 25 bp, Homo sapien
caccgtcgtgcgttggatgtgcatg

SEQ ID NO: 2967282 - DNA, 25 bp, Homo sapien
cagccagcccggtttagcggccgga

SEQ ID NO: 2967283 - DNA, 25 bp, Homo sapien
tgacaggcgcgcagtctctctggag

SEQ ID NO: 2967284 - DNA, 25 bp, Homo sapien
ccgtccacttaaacaaattgccgct

SEQ ID NO: 2967285 - DNA, 25 bp, Homo sapien
cgtcccaattatcccgcgcagggtg

SEQ ID NO: 2967286 - DNA, 25 bp, Homo sapien
cctcggtggcagacgaatgtgccca

SEQ ID NO: 2967287 - DNA, 25 bp, Homo sapien
tgcagactggcttaagccctcggtg

SEQ ID NO: 2967288 - DNA, 25 bp, Homo sapien
acagagtcgcttcccatcacggctt

SEQ ID NO: 2967289 - DNA, 25 bp, Homo sapien
cgatcactgcctggacgtgaggagt

SEQ ID NO: 2967290 - DNA, 25 bp, Homo sapien
gagtctgtagcgacccccagccaaa

SEQ ID NO: 2967291 - DNA, 25 bp, Homo sapien
gtcccgcgatcaccctgaggtcctg

SEQ ID NO: 2967292 - DNA, 25 bp, Homo sapien
tgaagagtctgtagcgacccccagc

SEQ ID NO: 2967293 - DNA, 25 bp, Homo sapien
ctttccggggctctgtccgggccag

SEQ ID NO: 2967294 - DNA, 25 bp, Homo sapien
tggctaggtcgcacctctcttagta

SEQ ID NO: 2967295 - DNA, 25 bp, Homo sapien
tctctggccagaacgaatctttgac

SEQ ID NO: 2967296 - DNA, 25 bp, Homo sapien
tccacgacctcgttcttggctaggt

SEQ ID NO: 2967297 - DNA, 25 bp, Homo sapien
tcatcaccgcatatgtgagcgccgc

SEQ ID NO: 2967298 - DNA, 25 bp, Homo sapien
ctcctggcagtgcggattcgggacc

SEQ ID NO: 2967299 - DNA, 25 bp, Homo sapien
cggtcgcagggcacttcgttgttga

SEQ ID NO: 2967300 - DNA, 25 bp, Homo sapien
agtatggcctctgcgaccgttatcc

SEQ ID NO: 2967301 - DNA, 25 bp, Homo sapien
tttgaaggccggatctctcctggca

SEQ ID NO: 2967302 - DNA, 25 bp, Homo sapien
gctcgggcgcgaacactcaggctga

SEQ ID NO: 2967303 - DNA, 25 bp, Homo sapien
tcgggcgcgaacactcaggctgatt

SEQ ID NO: 2967304 - DNA, 25 bp, Homo sapien
ctgcttccaatcgggctcgggcgcg

SEQ ID NO: 2967305 - DNA, 25 bp, Homo sapien
ttccaatcgggctcgggcgcgaaca

SEQ ID NO: 2967306 - DNA, 25 bp, Homo sapien
gttttctgtcttccggcagcctcag

SEQ ID NO: 2967307 - DNA, 25 bp, Homo sapien
tgtcgggccccgtgtggtgccctct

SEQ ID NO: 2967308 - DNA, 25 bp, Homo sapien
tgcgagcacctgtgattgaagcccc

SEQ ID NO: 2967309 - DNA, 25 bp, Homo sapien
ccctctgtgcgcagcgagagctata

SEQ ID NO: 2967310 - DNA, 25 bp, Homo sapien
tttcgctgagcacagggcggcaccg

SEQ ID NO: 2967311 - DNA, 25 bp, Homo sapien
tcgccctatccggtaccggagacga

SEQ ID NO: 2967312 - DNA, 25 bp, Homo sapien
tctcttcgccctgccaaccactttt

SEQ ID NO: 2967313 - DNA, 25 bp, Homo sapien
gaaataccggcttcctctcttcgcc

SEQ ID NO: 2967314 - DNA, 25 bp, Homo sapien
gcattgacacgaccccgagcggaga

SEQ ID NO: 2967315 - DNA, 25 bp, Homo sapien
caagtgcaaagcattgacacgaccc

SEQ ID NO: 2967316 - DNA, 25 bp, Homo sapien
cctgcgccccggaaagagacagcag

SEQ ID NO: 2967317 - DNA, 25 bp, Homo sapien
gtgcaaagcattgacacgaccccga

SEQ ID NO: 2967318 - DNA, 25 bp, Homo sapien
cggacgacccgggtggcgggcgcag

SEQ ID NO: 2967319 - DNA, 25 bp, Homo sapien
agcgccggctctctcatcgggacat

SEQ ID NO: 2967320 - DNA, 25 bp, Homo sapien
cacgcgcgactggttagatcttgtc

SEQ ID NO: 2967321 - DNA, 25 bp, Homo sapien
gggaccacgcgcgactggttagatc

SEQ ID NO: 2967322 - DNA, 25 bp, Homo sapien
gcggacatggggaagtcggcgggcc

SEQ ID NO: 2967323 - DNA, 25 bp, Homo sapien
tgcgccgccgccagaaaggcggaca

SEQ ID NO: 2967324 - DNA, 25 bp, Homo sapien
tggcgcgtggaacgggtggtaagcc

SEQ ID NO: 2967325 - DNA, 25 bp, Homo sapien
cgccgccgccagaaaggcggacatg

SEQ ID NO: 2967326 - DNA, 25 bp, Homo sapien
ttgagggagcgcagatgcgcggcgg

SEQ ID NO: 2967327 - DNA, 25 bp, Homo sapien
gcgggcccagtgccgagacgtgcag

SEQ ID NO: 2967328 - DNA, 25 bp, Homo sapien
ccagtgccgagacgtgcagccccgc

SEQ ID NO: 2967329 - DNA, 25 bp, Homo sapien
cttgagggagcgcagatgcgcggcg

SEQ ID NO: 2967330 - DNA, 25 bp, Homo sapien
cggacttggtgatgaccatctccgt

SEQ ID NO: 2967331 - DNA, 25 bp, Homo sapien
ctcccggacttggtgatgaccatct

SEQ ID NO: 2967332 - DNA, 25 bp, Homo sapien
atgaccatctccgtgcctagcttgt

SEQ ID NO: 2967333 - DNA, 25 bp, Homo sapien
ccatctccgtgcctagcttgtggaa

SEQ ID NO: 2967334 - DNA, 25 bp, Homo sapien
cggatgcccgcggtggagaaagggc

SEQ ID NO: 2967335 - DNA, 25 bp, Homo sapien
cctggattctcggtggctgagtcga

SEQ ID NO: 2967336 - DNA, 25 bp, Homo sapien
tgaggcggagggctcggctgacccg

SEQ ID NO: 2967337 - DNA, 25 bp, Homo sapien
ggcggcggatgcgtccagggctcgg

SEQ ID NO: 2967338 - DNA, 25 bp, Homo sapien
aacttatagcggcaatcgtcagcgg

SEQ ID NO: 2967339 - DNA, 25 bp, Homo sapien
cgtttgggcatctcagggtcggcct

SEQ ID NO: 2967340 - DNA, 25 bp, Homo sapien
tcgtcagcggctacaatgtccatca

SEQ ID NO: 2967341 - DNA, 25 bp, Homo sapien
catccagcgcgagttgtggaactta

SEQ ID NO: 2967342 - DNA, 25 bp, Homo sapien
cccgttcgctggggccttgctcagg

SEQ ID NO: 2967343 - DNA, 25 bp, Homo sapien
ccccgttcgctggggccttgctcag

SEQ ID NO: 2967344 - DNA, 25 bp, Homo sapien
gttcgctggggccttgctcaggcat

SEQ ID NO: 2967345 - DNA, 25 bp, Homo sapien
ccgttcgctggggccttgctcaggc

SEQ ID NO: 2967346 - DNA, 25 bp, Homo sapien
gcttcaggatgtcgttggctcgcac

SEQ ID NO: 2967347 - DNA, 25 bp, Homo sapien
tgaagtcggtctccgggaacacgta

SEQ ID NO: 2967348 - DNA, 25 bp, Homo sapien
cggaaggtgctgtaaggcagcttca

SEQ ID NO: 2967349 - DNA, 25 bp, Homo sapien
cactatgtggaagcgcggctggtac

SEQ ID NO: 2967350 - DNA, 25 bp, Homo sapien
actgggccccgggttctgagcatcg

SEQ ID NO: 2967351 - DNA, 25 bp, Homo sapien
tgtaaaaatgtcagcgcgggcccgg

SEQ ID NO: 2967352 - DNA, 25 bp, Homo sapien
cccagagcagtagccaggagtgctt

SEQ ID NO: 2967353 - DNA, 25 bp, Homo sapien
gcccggagtctcagctaattgttaa

SEQ ID NO: 2967354 - DNA, 25 bp, Homo sapien
gccgcaagcagaaaaagccctttga

SEQ ID NO: 2967355 - DNA, 25 bp, Homo sapien
tctgccccactagaacaagggtgga

SEQ ID NO: 2967356 - DNA, 25 bp, Homo sapien
attggaaggtaattctctaagcgcc

SEQ ID NO: 2967357 - DNA, 25 bp, Homo sapien
ttcactcgacagtggcgcacaaggg

SEQ ID NO: 2967358 - DNA, 25 bp, Homo sapien
ggcttgcgcaagttaaacgactccg

SEQ ID NO: 2967359 - DNA, 25 bp, Homo sapien
gaggaattatccctagacaggccta

SEQ ID NO: 2967360 - DNA, 25 bp, Homo sapien
cagttcacacgcaaggctgcaggta

SEQ ID NO: 2967361 - DNA, 25 bp, Homo sapien
caggcgcgaacagagactgcagttc

SEQ ID NO: 2967362 - DNA, 25 bp, Homo sapien
ttccagcgtggtcggtggcaccccg

SEQ ID NO: 2967363 - DNA, 25 bp, Homo sapien
tgctggccgcagagggaagacccgg

SEQ ID NO: 2967364 - DNA, 25 bp, Homo sapien
ggcgctaagtcaggccgtggctctt

SEQ ID NO: 2967365 - DNA, 25 bp, Homo sapien
tggcaccccgaggtcagcgggtgct

SEQ ID NO: 2967366 - DNA, 25 bp, Homo sapien
aaacgggttgttgtcgatcttcagc

SEQ ID NO: 2967367 - DNA, 25 bp, Homo sapien
ttgttgtcgatcttcagctgtgtga

SEQ ID NO: 2967368 - DNA, 25 bp, Homo sapien
cttggcaaacgggttgttgtcgatc

SEQ ID NO: 2967369 - DNA, 25 bp, Homo sapien
gggttgttgtcgatcttcagctgtg

SEQ ID NO: 2967370 - DNA, 25 bp, Homo sapien
tgcagtgctcctcgtacaagcgtag

SEQ ID NO: 2967371 - DNA, 25 bp, Homo sapien
gtagagacggcagcgtcagctgctt

SEQ ID NO: 2967372 - DNA, 25 bp, Homo sapien
catcgcgctcgggtttgcagtgctc

SEQ ID NO: 2967373 - DNA, 25 bp, Homo sapien
ggtcgcacgacgaggcgtctgactc

SEQ ID NO: 2967374 - DNA, 25 bp, Homo sapien
gggacgcactgtctgtctgcaccac

SEQ ID NO: 2967375 - DNA, 25 bp, Homo sapien
aggccagtaggtgacccatgcccat

SEQ ID NO: 2967376 - DNA, 25 bp, Homo sapien
aaccgctcaggctccgggtcgctgt

SEQ ID NO: 2967377 - DNA, 25 bp, Homo sapien
caaagaactgctgcccgtgcaagtg

SEQ ID NO: 2967378 - DNA, 25 bp, Homo sapien
ctccgctggcctcgccgccagctcc

SEQ ID NO: 2967379 - DNA, 25 bp, Homo sapien
ctcaggccctccgctggcctcgccg

SEQ ID NO: 2967380 - DNA, 25 bp, Homo sapien
aggccctccgctggcctcgccgcca

SEQ ID NO: 2967381 - DNA, 25 bp, Homo sapien
ccctccgctggcctcgccgccagct

SEQ ID NO: 2967382 - DNA, 25 bp, Homo sapien
aaactcatttcagaatcgcctgcct

SEQ ID NO: 2967383 - DNA, 25 bp, Homo sapien
tgacttcctcatgacctctgtgatg

SEQ ID NO: 2967384 - DNA, 25 bp, Homo sapien
tcaaacactccacacaccctaacac

SEQ ID NO: 2967385 - DNA, 25 bp, Homo sapien
aatcaggggtgcagattaaacctct

SEQ ID NO: 2967386 - DNA, 25 bp, Homo sapien
cctaccaacggatgcctcccaggtg

SEQ ID NO: 2967387 - DNA, 25 bp, Homo sapien
gctgcactggcctgggaatgtaacc

SEQ ID NO: 2967388 - DNA, 25 bp, Homo sapien
ctggtattctcacccgggtcatgca

SEQ ID NO: 2967389 - DNA, 25 bp, Homo sapien
gggaatgtaaccaccagcagcccta

SEQ ID NO: 2967390 - DNA, 25 bp, Homo sapien
tcaggtcctactgggcatttcagac

SEQ ID NO: 2967391 - DNA, 25 bp, Homo sapien
cctgagaaaataccccctcctgaga

SEQ ID NO: 2967392 - DNA, 25 bp, Homo sapien
aaggagggaggcttcagttctcttg

SEQ ID NO: 2967393 - DNA, 25 bp, Homo sapien
ggggctgatgattgcactgggctcc

SEQ ID NO: 2967394 - DNA, 25 bp, Homo sapien
gggctgatgattgcactgggctccc

SEQ ID NO: 2967395 - DNA, 25 bp, Homo sapien
ctttgagataatggcttactcccca

SEQ ID NO: 2967396 - DNA, 25 bp, Homo sapien
ttgagataatggcttactccccaga

SEQ ID NO: 2967397 - DNA, 25 bp, Homo sapien
tgagataatggcttactccccagag

SEQ ID NO: 2967398 - DNA, 25 bp, Homo sapien
tttgagataatggcttactccccag

SEQ ID NO: 2967399 - DNA, 25 bp, Homo sapien
caagcaccttcctgagttcatgagg

SEQ ID NO: 2967400 - DNA, 25 bp, Homo sapien
ctggacaagcaccttcctgagttca

SEQ ID NO: 2967401 - DNA, 25 bp, Homo sapien
gacaagcaccttcctgagttcatga

SEQ ID NO: 2967402 - DNA, 25 bp, Homo sapien
ggacaagcaccttcctgagttcatg

SEQ ID NO: 2967403 - DNA, 25 bp, Homo sapien
gacgagggttagacatcttgcctga

SEQ ID NO: 2967404 - DNA, 25 bp, Homo sapien
aggtgactgccctagcacgggtgaa

SEQ ID NO: 2967405 - DNA, 25 bp, Homo sapien
aaaggcctgccatcaagttctgtgc

SEQ ID NO: 2967406 - DNA, 25 bp, Homo sapien
gagatcgcttcaggctaccatgcaa

SEQ ID NO: 2967407 - DNA, 25 bp, Homo sapien
ctgctgctgccatgtaggtgtaggg

SEQ ID NO: 2967408 - DNA, 25 bp, Homo sapien
gctgctgctgccatgtaggtgtagg

SEQ ID NO: 2967409 - DNA, 25 bp, Homo sapien
tgcagcactagtggcgggcaaagcc

SEQ ID NO: 2967410 - DNA, 25 bp, Homo sapien
cgggcaaagccgaggcggctgcggc

SEQ ID NO: 2967411 - DNA, 25 bp, Homo sapien
ggctgtttccaccagcggccttgga

SEQ ID NO: 2967412 - DNA, 25 bp, Homo sapien
ccttggccgagccactgggcgacag

SEQ ID NO: 2967413 - DNA, 25 bp, Homo sapien
gggcccctactttgcggagagccag

SEQ ID NO: 2967414 - DNA, 25 bp, Homo sapien
tctgcagttcattggccgcctcctt

SEQ ID NO: 2967415 - DNA, 25 bp, Homo sapien
ctggggagagggctcgctggctctc

SEQ ID NO: 2967416 - DNA, 25 bp, Homo sapien
gggagagggctcgctggctctccag

SEQ ID NO: 2967417 - DNA, 25 bp, Homo sapien
tggggagagggctcgctggctctcc

SEQ ID NO: 2967418 - DNA, 25 bp, Homo sapien
gagagggctcgctggctctccagcc

SEQ ID NO: 2967419 - DNA, 25 bp, Homo sapien
tgcgtggcaggggagcagctgggca

SEQ ID NO: 2967420 - DNA, 25 bp, Homo sapien
ctgcgtggcaggggagcagctgggc

SEQ ID NO: 2967421 - DNA, 25 bp, Homo sapien
gtggcaggggagcagctgggcagcc

SEQ ID NO: 2967422 - DNA, 25 bp, Homo sapien
ggcaggggagcagctgggcagcccc

SEQ ID NO: 2967423 - DNA, 25 bp, Homo sapien
ctgtacacgtcccaagcagcagggg

SEQ ID NO: 2967424 - DNA, 25 bp, Homo sapien
gtacacgtcccaagcagcaggggca

SEQ ID NO: 2967425 - DNA, 25 bp, Homo sapien
tgtacacgtcccaagcagcaggggc

SEQ ID NO: 2967426 - DNA, 25 bp, Homo sapien
ctcctttatttaaataaatactcat

SEQ ID NO: 2967427 - DNA, 25 bp, Homo sapien
gcagcccacttttctcctttattta

SEQ ID NO: 2967428 - DNA, 25 bp, Homo sapien
tttatttaaataaatactcattctg

SEQ ID NO: 2967429 - DNA, 25 bp, Homo sapien
tatttaaataaatactcattctgtg

SEQ ID NO: 2967430 - DNA, 25 bp, Homo sapien
ccagacgaggctctattccggctgc

SEQ ID NO: 2967431 - DNA, 25 bp, Homo sapien
ggaagaccagagacaccttcggatg

SEQ ID NO: 2967432 - DNA, 25 bp, Homo sapien
cttcggatgccaccttgacgctgga

SEQ ID NO: 2967433 - DNA, 25 bp, Homo sapien
ctggagcggatctggacctagccca

SEQ ID NO: 2967434 - DNA, 25 bp, Homo sapien
gcagaagtgccactccctccgttga

SEQ ID NO: 2967435 - DNA, 25 bp, Homo sapien
cctcaacccagttttatcacgcggt

SEQ ID NO: 2967436 - DNA, 25 bp, Homo sapien
ttttatcacgcggtctaggcccaag

SEQ ID NO: 2967437 - DNA, 25 bp, Homo sapien
acttcagtcgtaactggttccagca

SEQ ID NO: 2967438 - DNA, 25 bp, Homo sapien
aatctctaaatatatgtacacagca

SEQ ID NO: 2967439 - DNA, 25 bp, Homo sapien
tctaaatatatgtacacagcaatgt

SEQ ID NO: 2967440 - DNA, 25 bp, Homo sapien
atgtacacagcaatgtacacctttg

SEQ ID NO: 2967441 - DNA, 25 bp, Homo sapien
aatatagatgctcacgtaaaatgaa

SEQ ID NO: 2967442 - DNA, 25 bp, Homo sapien
ctcccgcagccaagggcccccccag

SEQ ID NO: 2967443 - DNA, 25 bp, Homo sapien
tcccgcagccaagggcccccccagc

SEQ ID NO: 2967444 - DNA, 25 bp, Homo sapien
tctcccgcagccaagggccccccca

SEQ ID NO: 2967445 - DNA, 25 bp, Homo sapien
ttctcgctccggagcgaaaagtgaa

SEQ ID NO: 2967446 - DNA, 25 bp, Homo sapien
tttgtcgtttcgttctcgctccgga

SEQ ID NO: 2967447 - DNA, 25 bp, Homo sapien
tgcgtttttgtcgtttcgttctcgc

SEQ ID NO: 2967448 - DNA, 25 bp, Homo sapien
tcgctccggagcgaaaagtgaaaac

SEQ ID NO: 2967449 - DNA, 25 bp, Homo sapien
tctctcgctccttgcaaatgtatcg

SEQ ID NO: 2967450 - DNA, 25 bp, Homo sapien
ttgggatacgttctactgcaacctc

SEQ ID NO: 2967451 - DNA, 25 bp, Homo sapien
tccagccgcattcggcgtggcctgg

SEQ ID NO: 2967452 - DNA, 25 bp, Homo sapien
ccacaaaggcgtcctgggagtctgg

SEQ ID NO: 2967453 - DNA, 25 bp, Homo sapien
ggcggcttagccgctaggggtctct

SEQ ID NO: 2967454 - DNA, 25 bp, Homo sapien
gggtctctcggagcccctgcactca

SEQ ID NO: 2967455 - DNA, 25 bp, Homo sapien
cgctaggggtctctcggagcccctg

SEQ ID NO: 2967456 - DNA, 25 bp, Homo sapien
ctaggggtctctcggagcccctgca

SEQ ID NO: 2967457 - DNA, 25 bp, Homo sapien
cttgagggctcggaagattccgatt

SEQ ID NO: 2967458 - DNA, 25 bp, Homo sapien
gctcggaagattccgattaacccga

SEQ ID NO: 2967459 - DNA, 25 bp, Homo sapien
gaagattccgattaacccgagagga

SEQ ID NO: 2967460 - DNA, 25 bp, Homo sapien
gaggaagggcttgagggctcggaag

SEQ ID NO: 2967461 - DNA, 25 bp, Homo sapien
aggagcaccccacgcaggagttcgc

SEQ ID NO: 2967462 - DNA, 25 bp, Homo sapien
accccacgcaggagttcgcggtcag

SEQ ID NO: 2967463 - DNA, 25 bp, Homo sapien
cttgagcgtgagagtcccggggaga

SEQ ID NO: 2967464 - DNA, 25 bp, Homo sapien
ccacgcaggagttcgcggtcagctg

SEQ ID NO: 2967465 - DNA, 25 bp, Homo sapien
actggattttgggtccttcccagag

SEQ ID NO: 2967466 - DNA, 25 bp, Homo sapien
gaggctgtccctcaaggggccgtcc

SEQ ID NO: 2967467 - DNA, 25 bp, Homo sapien
caggctcggggtataaatccagggc

SEQ ID NO: 2967468 - DNA, 25 bp, Homo sapien
aatccagggctcgtagaggctgtcc

SEQ ID NO: 2967469 - DNA, 25 bp, Homo sapien
acccggctctgcctgtgtcggtggc

SEQ ID NO: 2967470 - DNA, 25 bp, Homo sapien
tctcgtggacctgtgaggagttgcc

SEQ ID NO: 2967471 - DNA, 25 bp, Homo sapien
gagcccaaaaggaagtccaagtgca

SEQ ID NO: 2967472 - DNA, 25 bp, Homo sapien
cgtcagcgctggaaatcggtgcttc

SEQ ID NO: 2967473 - DNA, 25 bp, Homo sapien
tccaagggcgagattctcaggctga

SEQ ID NO: 2967474 - DNA, 25 bp, Homo sapien
aggcaggaacttaggtgagcagctc

SEQ ID NO: 2967475 - DNA, 25 bp, Homo sapien
acttcccgcagagagaacgcgaggg

SEQ ID NO: 2967476 - DNA, 25 bp, Homo sapien
cgtaagtcctcaccgtcgagtgggc

SEQ ID NO: 2967477 - DNA, 25 bp, Homo sapien
cttctctgaagcagttgaggctggg

SEQ ID NO: 2967478 - DNA, 25 bp, Homo sapien
gaggcagccgggacttagaatgtaa

SEQ ID NO: 2967479 - DNA, 25 bp, Homo sapien
ggtcaactggccattcgcagatcaa

SEQ ID NO: 2967480 - DNA, 25 bp, Homo sapien
aggttcctcaagcattaaatgggaa

SEQ ID NO: 2967481 - DNA, 25 bp, Homo sapien
tcttctaccagatcattggctccct

SEQ ID NO: 2967482 - DNA, 25 bp, Homo sapien
tgcactgccgtgtcttctcttggga

SEQ ID NO: 2967483 - DNA, 25 bp, Homo sapien
ctcttgggaagggatatattccttg

SEQ ID NO: 2967484 - DNA, 25 bp, Homo sapien
atattccttgaatgtctctatcttc

SEQ ID NO: 2967485 - DNA, 25 bp, Homo sapien
aggactgtgatcctcactcctggca

SEQ ID NO: 2967486 - DNA, 25 bp, Homo sapien
caggactgtgatcctcactcctggc

SEQ ID NO: 2967487 - DNA, 25 bp, Homo sapien
tcttcaaaggtagtcatctccctgc

SEQ ID NO: 2967488 - DNA, 25 bp, Homo sapien
cttcaaaggtagtcatctccctgca

SEQ ID NO: 2967489 - DNA, 25 bp, Homo sapien
ctcttcaaaggtagtcatctccctg

SEQ ID NO: 2967490 - DNA, 25 bp, Homo sapien
ttcaaaggtagtcatctccctgcat

SEQ ID NO: 2967491 - DNA, 25 bp, Homo sapien
cattgtccatggtattactactact

SEQ ID NO: 2967492 - DNA, 25 bp, Homo sapien
tgaaaaagattagactcattcattg

SEQ ID NO: 2967493 - DNA, 25 bp, Homo sapien
ctttagagtaaaatgtcctcattgg

SEQ ID NO: 2967494 - DNA, 25 bp, Homo sapien
gtcctcattggaaagaatctggtaa

SEQ ID NO: 2967495 - DNA, 25 bp, Homo sapien
attagtgtctgtctgtcggttggga

SEQ ID NO: 2967496 - DNA, 25 bp, Homo sapien
cagtccgtcgccaggggattagtgt

SEQ ID NO: 2967497 - DNA, 25 bp, Homo sapien
ttgtcccggcccagacaagggcctc

SEQ ID NO: 2967498 - DNA, 25 bp, Homo sapien
tgtctgtcggttgggacagcctcag

SEQ ID NO: 2967499 - DNA, 25 bp, Homo sapien
ttccattatcgaggaagacgcccca

SEQ ID NO: 2967500 - DNA, 25 bp, Homo sapien
gccgtctggagtttcctcgttctca

SEQ ID NO: 2967501 - DNA, 25 bp, Homo sapien
ctattgatttcctccaaggtagttg

SEQ ID NO: 2967502 - DNA, 25 bp, Homo sapien
ttcccgtcttcttgccgggcaggta

SEQ ID NO: 2967503 - DNA, 25 bp, Homo sapien
catcccatgtcaccaaggccttctt

SEQ ID NO: 2967504 - DNA, 25 bp, Homo sapien
tgccgtcccaagaagcgtgtcctgg

SEQ ID NO: 2967505 - DNA, 25 bp, Homo sapien
tcttttccaattgccgtcccaagaa

SEQ ID NO: 2967506 - DNA, 25 bp, Homo sapien
ccaagaagcgtgtcctggagcttcc

SEQ ID NO: 2967507 - DNA, 25 bp, Homo sapien
tcacagggcccttctagcagtctgt

SEQ ID NO: 2967508 - DNA, 25 bp, Homo sapien
cacagggcccttctagcagtctgta

SEQ ID NO: 2967509 - DNA, 25 bp, Homo sapien
acagggcccttctagcagtctgtac

SEQ ID NO: 2967510 - DNA, 25 bp, Homo sapien
cctgtcaggcagaaccagaaacttc

SEQ ID NO: 2967511 - DNA, 25 bp, Homo sapien
gtagaaggaactgaggactgggctg

SEQ ID NO: 2967512 - DNA, 25 bp, Homo sapien
aggtagaaggaactgaggactgggc

SEQ ID NO: 2967513 - DNA, 25 bp, Homo sapien
tctcctgtcaggcagaaccagaaac

SEQ ID NO: 2967514 - DNA, 25 bp, Homo sapien
gaggcagcagggaattgatctgtcc

SEQ ID NO: 2967515 - DNA, 25 bp, Homo sapien
tgtcccctgtagctttattgtcctc

SEQ ID NO: 2967516 - DNA, 25 bp, Homo sapien
tcccattcagattagcaagctcagg

SEQ ID NO: 2967517 - DNA, 25 bp, Homo sapien
caagtcttggttccagattcctcag

SEQ ID NO: 2967518 - DNA, 25 bp, Homo sapien
gccagcggcccgaggtcccctgcag

SEQ ID NO: 2967519 - DNA, 25 bp, Homo sapien
cctaattgcggtgccgcatgcggag

SEQ ID NO: 2967520 - DNA, 25 bp, Homo sapien
tgccgcatgcggaggcgccagcggc

SEQ ID NO: 2967521 - DNA, 25 bp, Homo sapien
tgcaggttcgggtccgaggagcgcg

SEQ ID NO: 2967522 - DNA, 25 bp, Homo sapien
atatctacacggattttcgctccag

SEQ ID NO: 2967523 - DNA, 25 bp, Homo sapien
tctacacggattttcgctccagtac

SEQ ID NO: 2967524 - DNA, 25 bp, Homo sapien
tacacggattttcgctccagtaccg

SEQ ID NO: 2967525 - DNA, 25 bp, Homo sapien
cacggattttcgctccagtaccggg

SEQ ID NO: 2967526 - DNA, 25 bp, Homo sapien
gatggggtctgttgctttcagctgc

SEQ ID NO: 2967527 - DNA, 25 bp, Homo sapien
gggtgcggcccgcaacctccgctgc

SEQ ID NO: 2967528 - DNA, 25 bp, Homo sapien
catagcggtccgctctcgtccttca

SEQ ID NO: 2967529 - DNA, 25 bp, Homo sapien
ttcacatccactcctccgcgggtgc

SEQ ID NO: 2967530 - DNA, 25 bp, Homo sapien
ctgggcgctccagcggagctttctg

SEQ ID NO: 2967531 - DNA, 25 bp, Homo sapien
cttcttgaggcggaatgccccgcct

SEQ ID NO: 2967532 - DNA, 25 bp, Homo sapien
ctcccggagcatccccgggctcagg

SEQ ID NO: 2967533 - DNA, 25 bp, Homo sapien
ctgtaggtctgacggcccttcttga

SEQ ID NO: 2967534 - DNA, 25 bp, Homo sapien
cctgctcttccccatcctgctggac

SEQ ID NO: 2967535 - DNA, 25 bp, Homo sapien
tccctgctcttccccatcctgctgg

SEQ ID NO: 2967536 - DNA, 25 bp, Homo sapien
ccctgctcttccccatcctgctgga

SEQ ID NO: 2967537 - DNA, 25 bp, Homo sapien
ctccctgctcttccccatcctgctg

SEQ ID NO: 2967538 - DNA, 25 bp, Homo sapien
tctgctttgggcctaaagacccaca

SEQ ID NO: 2967539 - DNA, 25 bp, Homo sapien
ttcgaacctacaggctcactcaggc

SEQ ID NO: 2967540 - DNA, 25 bp, Homo sapien
tcaggcacactttagcgccacaggg

SEQ ID NO: 2967541 - DNA, 25 bp, Homo sapien
agttcgaacctacaggctcactcag

SEQ ID NO: 2967542 - DNA, 25 bp, Homo sapien
ctgtgggcccaggacagccaggaca

SEQ ID NO: 2967543 - DNA, 25 bp, Homo sapien
tgggcccaggacagccaggacacct

SEQ ID NO: 2967544 - DNA, 25 bp, Homo sapien
tgtgggcccaggacagccaggacac

SEQ ID NO: 2967545 - DNA, 25 bp, Homo sapien
gggcccaggacagccaggacacctc

SEQ ID NO: 2967546 - DNA, 25 bp, Homo sapien
gagggtctgcggcagttcaatgtct

SEQ ID NO: 2967547 - DNA, 25 bp, Homo sapien
ccccgagtccctcactcctactgag

SEQ ID NO: 2967548 - DNA, 25 bp, Homo sapien
tcctactgagctccggtggagcctg

SEQ ID NO: 2967549 - DNA, 25 bp, Homo sapien
ggagggaccgccctctcggcattgc

SEQ ID NO: 2967550 - DNA, 25 bp, Homo sapien
tgcggggcgcggaggcagccctgga

SEQ ID NO: 2967551 - DNA, 25 bp, Homo sapien
ctctccagccgattccgggacttcg

SEQ ID NO: 2967552 - DNA, 25 bp, Homo sapien
ctccagccgattccgggacttcgtg

SEQ ID NO: 2967553 - DNA, 25 bp, Homo sapien
ccctctccagccgattccgggactt

SEQ ID NO: 2967554 - DNA, 25 bp, Homo sapien
cacaacgagtcactcgcccaggtcc

SEQ ID NO: 2967555 - DNA, 25 bp, Homo sapien
cgggcacagcacacaacgagtcact

SEQ ID NO: 2967556 - DNA, 25 bp, Homo sapien
ggcacagcacacaacgagtcactcg

SEQ ID NO: 2967557 - DNA, 25 bp, Homo sapien
ctgcgggcacagcacacaacgagtc

SEQ ID NO: 2967558 - DNA, 25 bp, Homo sapien
agcgcggctccgctgaggcccggcg

SEQ ID NO: 2967559 - DNA, 25 bp, Homo sapien
tcgctctcggacaggcccttatcct

SEQ ID NO: 2967560 - DNA, 25 bp, Homo sapien
tccgctgaggcccggcgctgccagc

SEQ ID NO: 2967561 - DNA, 25 bp, Homo sapien
ctgcgctggcctctccgagcgctgg

SEQ ID NO: 2967562 - DNA, 25 bp, Homo sapien
ggctcaaagtggagaaggacccaaa

SEQ ID NO: 2967563 - DNA, 25 bp, Homo sapien
catgtccagtggagaacgaacgggc

SEQ ID NO: 2967564 - DNA, 25 bp, Homo sapien
gcagaccgtcctgaatgcagccagg

SEQ ID NO: 2967565 - DNA, 25 bp, Homo sapien
acaatcggacggaaagacggacaca

SEQ ID NO: 2967566 - DNA, 25 bp, Homo sapien
aggcggcatcccgtgcgctgtgatc

SEQ ID NO: 2967567 - DNA, 25 bp, Homo sapien
gtgcacacagatccccaggcggcat

SEQ ID NO: 2967568 - DNA, 25 bp, Homo sapien
gcgcgcctgcagatagtgcacacag

SEQ ID NO: 2967569 - DNA, 25 bp, Homo sapien
gtgatcgtccgattatcactgtgaa

SEQ ID NO: 2967570 - DNA, 25 bp, Homo sapien
ccaggcccagggctccacgcggagc

SEQ ID NO: 2967571 - DNA, 25 bp, Homo sapien
gagggagagaaacttgtgtctgcca

SEQ ID NO: 2967572 - DNA, 25 bp, Homo sapien
gccaggcccagggctccacgcggag

SEQ ID NO: 2967573 - DNA, 25 bp, Homo sapien
gagagaaacttgtgtctgccaggcc

SEQ ID NO: 2967574 - DNA, 25 bp, Homo sapien
cggtgcccgcctcgtggaacttctt

SEQ ID NO: 2967575 - DNA, 25 bp, Homo sapien
atcatctcggtgcccgcctcgtgga

SEQ ID NO: 2967576 - DNA, 25 bp, Homo sapien
gccagccttagtgatgatcatctcg

SEQ ID NO: 2967577 - DNA, 25 bp, Homo sapien
atctcggtgcccgcctcgtggaact

SEQ ID NO: 2967578 - DNA, 25 bp, Homo sapien
ccatccccggaagtaaatctcccag

SEQ ID NO: 2967579 - DNA, 25 bp, Homo sapien
cggaagtaaatctcccagcgctgac

SEQ ID NO: 2967580 - DNA, 25 bp, Homo sapien
atccccggaagtaaatctcccagcg

SEQ ID NO: 2967581 - DNA, 25 bp, Homo sapien
cccggaagtaaatctcccagcgctg

SEQ ID NO: 2967582 - DNA, 25 bp, Homo sapien
tgctgagggaacacgcaagttctag

SEQ ID NO: 2967583 - DNA, 25 bp, Homo sapien
aattcaaggcgcttactctcagccc

SEQ ID NO: 2967584 - DNA, 25 bp, Homo sapien
caagttctagctgcgctgcgagagc

SEQ ID NO: 2967585 - DNA, 25 bp, Homo sapien
caaagcggtggccaaattcaaggcg

SEQ ID NO: 2967586 - DNA, 25 bp, Homo sapien
tggaagctgatcgtaggccagattc

SEQ ID NO: 2967587 - DNA, 25 bp, Homo sapien
agctgatcgtaggccagattcctga

SEQ ID NO: 2967588 - DNA, 25 bp, Homo sapien
ctggaagctgatcgtaggccagatt

SEQ ID NO: 2967589 - DNA, 25 bp, Homo sapien
gaagctgatcgtaggccagattcct

SEQ ID NO: 2967590 - DNA, 25 bp, Homo sapien
cagcttgtttcctgtcatcattcca

SEQ ID NO: 2967591 - DNA, 25 bp, Homo sapien
tgtttcctgtcatcattccaggtgg

SEQ ID NO: 2967592 - DNA, 25 bp, Homo sapien
gcaggccaccattttgtaactgcca

SEQ ID NO: 2967593 - DNA, 25 bp, Homo sapien
gccaggagcgaagggctcactgcca

SEQ ID NO: 2967594 - DNA, 25 bp, Homo sapien
cctctataagctggcgggccctaag

SEQ ID NO: 2967595 - DNA, 25 bp, Homo sapien
gaggtggagggttcacttccttgcc

SEQ ID NO: 2967596 - DNA, 25 bp, Homo sapien
agcccaggcgaggaccccgaccgag

SEQ ID NO: 2967597 - DNA, 25 bp, Homo sapien
gggcttccagaaaggatcaaggcct

SEQ ID NO: 2967598 - DNA, 25 bp, Homo sapien
tcagcaggatatacttggtcttggg

SEQ ID NO: 2967599 - DNA, 25 bp, Homo sapien
tcttggggttcatgcctgtgacttt

SEQ ID NO: 2967600 - DNA, 25 bp, Homo sapien
cagggacaatgtcaatcagcaggat

SEQ ID NO: 2967601 - DNA, 25 bp, Homo sapien
cacagaacttgtagcgatggtcatc

SEQ ID NO: 2967602 - DNA, 25 bp, Homo sapien
ccctggtggagcctcacttcgtctg

SEQ ID NO: 2967603 - DNA, 25 bp, Homo sapien
gtggagcctcacttcgtctggatgg

SEQ ID NO: 2967604 - DNA, 25 bp, Homo sapien
cctcacttcgtctggatggctggag

SEQ ID NO: 2967605 - DNA, 25 bp, Homo sapien
gccccttgccaaagggtcccatcca

SEQ ID NO: 2967606 - DNA, 25 bp, Homo sapien
cgggtggacatacagccttcctggc

SEQ ID NO: 2967607 - DNA, 25 bp, Homo sapien
aggagaatccgggtggacatacagc

SEQ ID NO: 2967608 - DNA, 25 bp, Homo sapien
aatccgggtggacatacagccttcc

SEQ ID NO: 2967609 - DNA, 25 bp, Homo sapien
catacagccttcctggcatggctgg

SEQ ID NO: 2967610 - DNA, 25 bp, Homo sapien
ggtggttgtttgtcagcttcagctt

SEQ ID NO: 2967611 - DNA, 25 bp, Homo sapien
gaaggagaccagctgccgcatccag

SEQ ID NO: 2967612 - DNA, 25 bp, Homo sapien
gaccagctgccgcatccagtgggct

SEQ ID NO: 2967613 - DNA, 25 bp, Homo sapien
ccaggtggttgtttgtcagcttcag

SEQ ID NO: 2967614 - DNA, 25 bp, Homo sapien
tggcagatagtaccaggtccccaga

SEQ ID NO: 2967615 - DNA, 25 bp, Homo sapien
tttttgtggactttccagggccaga

SEQ ID NO: 2967616 - DNA, 25 bp, Homo sapien
cagacttctgtttgccacacacttg

SEQ ID NO: 2967617 - DNA, 25 bp, Homo sapien
cagaaaccacgggcagtctcgaggg

SEQ ID NO: 2967618 - DNA, 25 bp, Homo sapien
caggctgtgaaaagctactgctggg

SEQ ID NO: 2967619 - DNA, 25 bp, Homo sapien
gagagctactgaagaggttagccag

SEQ ID NO: 2967620 - DNA, 25 bp, Homo sapien
acttcctaaagaaggcgcagctttc

SEQ ID NO: 2967621 - DNA, 25 bp, Homo sapien
tactgaagaggttagccaggctgtg

SEQ ID NO: 2967622 - DNA, 25 bp, Homo sapien
ccagcatcacaagcccatcaagcag

SEQ ID NO: 2967623 - DNA, 25 bp, Homo sapien
atcatcaaggcaagggaagcgccag

SEQ ID NO: 2967624 - DNA, 25 bp, Homo sapien
atcacaagcccatcaagcagcctca

SEQ ID NO: 2967625 - DNA, 25 bp, Homo sapien
aggcaggcacggcagatgcagccag

SEQ ID NO: 2967626 - DNA, 25 bp, Homo sapien
cagggctgttgtagccaataaactg

SEQ ID NO: 2967627 - DNA, 25 bp, Homo sapien
gctgttgtagccaataaactgcaag

SEQ ID NO: 2967628 - DNA, 25 bp, Homo sapien
aaactgcaagtactgggtaagtgtg

SEQ ID NO: 2967629 - DNA, 25 bp, Homo sapien
aactgcaagtactgggtaagtgtgg

SEQ ID NO: 2967630 - DNA, 25 bp, Homo sapien
caaatgggttgctgtgccctgatat

SEQ ID NO: 2967631 - DNA, 25 bp, Homo sapien
tcttcaagggttctctaaataggtg

SEQ ID NO: 2967632 - DNA, 25 bp, Homo sapien
taggtgaagataccgcagcgagagc

SEQ ID NO: 2967633 - DNA, 25 bp, Homo sapien
tgatatgtctctccacagcccttgt

SEQ ID NO: 2967634 - DNA, 25 bp, Homo sapien
tccttcatccttcaatgggagctca

SEQ ID NO: 2967635 - DNA, 25 bp, Homo sapien
ccaatacaacgtggcttttccccag

SEQ ID NO: 2967636 - DNA, 25 bp, Homo sapien
ctgaaaacgtagaagtggttgtgca

SEQ ID NO: 2967637 - DNA, 25 bp, Homo sapien
tgagaagccaagaagggtgactcct

SEQ ID NO: 2967638 - DNA, 25 bp, Homo sapien
gtggctggagaaagtcccttgaggc

SEQ ID NO: 2967639 - DNA, 25 bp, Homo sapien
tgagggctgccaataggaggcagct

SEQ ID NO: 2967640 - DNA, 25 bp, Homo sapien
tgggataccgtgaggatccccaaga

SEQ ID NO: 2967641 - DNA, 25 bp, Homo sapien
gctgctcaagctcctgggataccgt

SEQ ID NO: 2967642 - DNA, 25 bp, Homo sapien
gaaacctgcaaagagggaagctgcc

SEQ ID NO: 2967643 - DNA, 25 bp, Homo sapien
ggaaacctgcaaagagggaagctgc

SEQ ID NO: 2967644 - DNA, 25 bp, Homo sapien
ccttcacgaggcaagtacataactc

SEQ ID NO: 2967645 - DNA, 25 bp, Homo sapien
cacgaggcaagtacataactcccaa

SEQ ID NO: 2967646 - DNA, 25 bp, Homo sapien
ctccagaccttcacgaggcaagtac

SEQ ID NO: 2967647 - DNA, 25 bp, Homo sapien
cagaccttcacgaggcaagtacata

SEQ ID NO: 2967648 - DNA, 25 bp, Homo sapien
tacttgtgcatagagttgaggatga

SEQ ID NO: 2967649 - DNA, 25 bp, Homo sapien
gccttaacgatgtggagccgcggct

SEQ ID NO: 2967650 - DNA, 25 bp, Homo sapien
tttggagccgaaagcattgttctca

SEQ ID NO: 2967651 - DNA, 25 bp, Homo sapien
aacacgtgggtgcagaaagcagtgt

SEQ ID NO: 2967652 - DNA, 25 bp, Homo sapien
gtgtgcatactgtggaaagcagacg

SEQ ID NO: 2967653 - DNA, 25 bp, Homo sapien
gcagacgggcggcagagcacggctg

SEQ ID NO: 2967654 - DNA, 25 bp, Homo sapien
agacgggcggcagagcacggctgtc

SEQ ID NO: 2967655 - DNA, 25 bp, Homo sapien
tgcatactgtggaaagcagacgggc

SEQ ID NO: 2967656 - DNA, 25 bp, Homo sapien
ctctgcagtcgggccacacgcaggt

SEQ ID NO: 2967657 - DNA, 25 bp, Homo sapien
cttggcaaaagggttgttctcaatt

SEQ ID NO: 2967658 - DNA, 25 bp, Homo sapien
ctgccccggaatcccttggcaaaag

SEQ ID NO: 2967659 - DNA, 25 bp, Homo sapien
ccttggcaaaagggttgttctcaat

SEQ ID NO: 2967660 - DNA, 25 bp, Homo sapien
agtgaagatacatcgagggtcacag

SEQ ID NO: 2967661 - DNA, 25 bp, Homo sapien
acagaggccacgtgcctgaatccca

SEQ ID NO: 2967662 - DNA, 25 bp, Homo sapien
tgaagatacatcgagggtcacagag

SEQ ID NO: 2967663 - DNA, 25 bp, Homo sapien
aggccacgtgcctgaatcccatctg

SEQ ID NO: 2967664 - DNA, 25 bp, Homo sapien
tgagtgtgccccgttctcgtgctgg

SEQ ID NO: 2967665 - DNA, 25 bp, Homo sapien
cagtgatagaagaggcttgagtccc

SEQ ID NO: 2967666 - DNA, 25 bp, Homo sapien
tcaggcagtgatagaagaggcttga

SEQ ID NO: 2967667 - DNA, 25 bp, Homo sapien
tgcctcatgatgcttttggaaatca

SEQ ID NO: 2967668 - DNA, 25 bp, Homo sapien
gaagtccacatgttacagctcagcg

SEQ ID NO: 2967669 - DNA, 25 bp, Homo sapien
ggtgtacggcgacactgaagtccac

SEQ ID NO: 2967670 - DNA, 25 bp, Homo sapien
tcgcttgcaaggtaagtccaggtgg

SEQ ID NO: 2967671 - DNA, 25 bp, Homo sapien
cgggccctgaacctgagtacataca

SEQ ID NO: 2967672 - DNA, 25 bp, Homo sapien
gcagcatttagatgtggcgagggtg

SEQ ID NO: 2967673 - DNA, 25 bp, Homo sapien
tctcttgggaatgaggcgctgggcc

SEQ ID NO: 2967674 - DNA, 25 bp, Homo sapien
actgtaaggaagattctcgggacaa

SEQ ID NO: 2967675 - DNA, 25 bp, Homo sapien
gagagtagagaaactcattggcagc

SEQ ID NO: 2967676 - DNA, 25 bp, Homo sapien
ttcctgtgtttcttggtagagtgca

SEQ ID NO: 2967677 - DNA, 25 bp, Homo sapien
gtgcaggccacccacagaggttaat

SEQ ID NO: 2967678 - DNA, 25 bp, Homo sapien
tttcttggtagagtgcaggccaccc

SEQ ID NO: 2967679 - DNA, 25 bp, Homo sapien
caggccacccacagaggttaatact

SEQ ID NO: 2967680 - DNA, 25 bp, Homo sapien
tcagataacaatagacccaggtcct

SEQ ID NO: 2967681 - DNA, 25 bp, Homo sapien
tacacattgtggcttagctgagccc

SEQ ID NO: 2967682 - DNA, 25 bp, Homo sapien
aatgtctaggccactcactgagcag

SEQ ID NO: 2967683 - DNA, 25 bp, Homo sapien
cccacgggcatgtcaagagatgtca

SEQ ID NO: 2967684 - DNA, 25 bp, Homo sapien
ctttctcgctccagaagcgtagatt

SEQ ID NO: 2967685 - DNA, 25 bp, Homo sapien
cgctccagaagcgtagattttctga

SEQ ID NO: 2967686 - DNA, 25 bp, Homo sapien
atttctgttggcctttctcgctcca

SEQ ID NO: 2967687 - DNA, 25 bp, Homo sapien
cagaagcgtagattttctgagagca

SEQ ID NO: 2967688 - DNA, 25 bp, Homo sapien
ggtattcaatgctaaaacgcagggc

SEQ ID NO: 2967689 - DNA, 25 bp, Homo sapien
ccaagtttgatggagagttcacccc

SEQ ID NO: 2967690 - DNA, 25 bp, Homo sapien
cctgcatttgtgagagagagcgata

SEQ ID NO: 2967691 - DNA, 25 bp, Homo sapien
tgaggactttgtgagcgccacactg

SEQ ID NO: 2967692 - DNA, 25 bp, Homo sapien
gctcatgcccctgactgctccagga

SEQ ID NO: 2967693 - DNA, 25 bp, Homo sapien
tgatggtggtgatgagctcatgccc

SEQ ID NO: 2967694 - DNA, 25 bp, Homo sapien
ggaagccccccgcactgactcaaac

SEQ ID NO: 2967695 - DNA, 25 bp, Homo sapien
ccccgcactgactcaaacctgctct

SEQ ID NO: 2967696 - DNA, 25 bp, Homo sapien
caggaagaagtccagccagagagca

SEQ ID NO: 2967697 - DNA, 25 bp, Homo sapien
ggtgtgcgccagcagctaagggagg

SEQ ID NO: 2967698 - DNA, 25 bp, Homo sapien
agaatcccaaggtgtgcgccagcag

SEQ ID NO: 2967699 - DNA, 25 bp, Homo sapien
tgcaggaagaagtccagccagagag

SEQ ID NO: 2967700 - DNA, 25 bp, Homo sapien
ttaccaggtcttcttgtcaggagtg

SEQ ID NO: 2967701 - DNA, 25 bp, Homo sapien
aggtcttcttgtcaggagtgtggcc

SEQ ID NO: 2967702 - DNA, 25 bp, Homo sapien
attaccaggtcttcttgtcaggagt

SEQ ID NO: 2967703 - DNA, 25 bp, Homo sapien
accaggtcttcttgtcaggagtgtg

SEQ ID NO: 2967704 - DNA, 25 bp, Homo sapien
ttgccgggggatggcatggaaatct

SEQ ID NO: 2967705 - DNA, 25 bp, Homo sapien
caggaacagccaggtttcactgcag

SEQ ID NO: 2967706 - DNA, 25 bp, Homo sapien
ggaacagccaggtttcactgcagga

SEQ ID NO: 2967707 - DNA, 25 bp, Homo sapien
ggatggcatggaaatctcttggctg

SEQ ID NO: 2967708 - DNA, 25 bp, Homo sapien
cttgacaggatgtccctgattggtt

SEQ ID NO: 2967709 - DNA, 25 bp, Homo sapien
gattggttccgtatgccttggagac

SEQ ID NO: 2967710 - DNA, 25 bp, Homo sapien
cgggatggccagtgcaagttcatca

SEQ ID NO: 2967711 - DNA, 25 bp, Homo sapien
gactggttcccattactcgggatgg

SEQ ID NO: 2967712 - DNA, 25 bp, Homo sapien
ggtcctccctaatcagctgcgacag

SEQ ID NO: 2967713 - DNA, 25 bp, Homo sapien
gaaattgaattgattacccggccgc

SEQ ID NO: 2967714 - DNA, 25 bp, Homo sapien
gctcgggttgcccatcgaaattgaa

SEQ ID NO: 2967715 - DNA, 25 bp, Homo sapien
gatgggctcgcattgaaagctccag

SEQ ID NO: 2967716 - DNA, 25 bp, Homo sapien
tggacccacccttgacttcaaaatg

SEQ ID NO: 2967717 - DNA, 25 bp, Homo sapien
cagaggtttggacccacccttgact

SEQ ID NO: 2967718 - DNA, 25 bp, Homo sapien
cacccttgacttcaaaatggccctt

SEQ ID NO: 2967719 - DNA, 25 bp, Homo sapien
ttgccatctgttctcaagcctcttc

SEQ ID NO: 2967720 - DNA, 25 bp, Homo sapien
cagaaaaccatcactccgtgaatga

SEQ ID NO: 2967721 - DNA, 25 bp, Homo sapien
gaaaaccatcactccgtgaatgaca

SEQ ID NO: 2967722 - DNA, 25 bp, Homo sapien
agaaaaccatcactccgtgaatgac

SEQ ID NO: 2967723 - DNA, 25 bp, Homo sapien
aaaaccatcactccgtgaatgacag

SEQ ID NO: 2967724 - DNA, 25 bp, Homo sapien
ttctcattgagtggcctcgcatctg

SEQ ID NO: 2967725 - DNA, 25 bp, Homo sapien
gagctgaaagcaaggtcgccaatga

SEQ ID NO: 2967726 - DNA, 25 bp, Homo sapien
aggcagcagtcttctcattgagtgg

SEQ ID NO: 2967727 - DNA, 25 bp, Homo sapien
agtacaagattcaggccacgcagag

SEQ ID NO: 2967728 - DNA, 25 bp, Homo sapien
tgcccctaggaagcaacaggcctct

SEQ ID NO: 2967729 - DNA, 25 bp, Homo sapien
tggcctgtagcagtgccctgcttcc

SEQ ID NO: 2967730 - DNA, 25 bp, Homo sapien
gggatggcctgtagcagtgccctgc

SEQ ID NO: 2967731 - DNA, 25 bp, Homo sapien
tgggggatggcctgtagcagtgccc

SEQ ID NO: 2967732 - DNA, 25 bp, Homo sapien
cttcaggcaggctgacgagtggctc

SEQ ID NO: 2967733 - DNA, 25 bp, Homo sapien
tgctcaatagcttatcttcaggcag

SEQ ID NO: 2967734 - DNA, 25 bp, Homo sapien
ctgctgtctgatggcccgtgcaggt

SEQ ID NO: 2967735 - DNA, 25 bp, Homo sapien
acccgatgccggaggtttatattag

SEQ ID NO: 2967736 - DNA, 25 bp, Homo sapien
gtggctcttgctgggatgagcattt

SEQ ID NO: 2967737 - DNA, 25 bp, Homo sapien
ctcttgctgggatgagcatttctcc

SEQ ID NO: 2967738 - DNA, 25 bp, Homo sapien
ggctcttgctgggatgagcatttct

SEQ ID NO: 2967739 - DNA, 25 bp, Homo sapien
tcttgctgggatgagcatttctcct

SEQ ID NO: 2967740 - DNA, 25 bp, Homo sapien
caattccaaagagccctacttggga

SEQ ID NO: 2967741 - DNA, 25 bp, Homo sapien
ccctctggccattggcctccccgtt

SEQ ID NO: 2967742 - DNA, 25 bp, Homo sapien
ttttcgatcagctcccaattccaaa

SEQ ID NO: 2967743 - DNA, 25 bp, Homo sapien
ccctacttgggactgtcctgcctgg

SEQ ID NO: 2967744 - DNA, 25 bp, Homo sapien
cgtagatctggactttggcgtctgg

SEQ ID NO: 2967745 - DNA, 25 bp, Homo sapien
tagatctggactttggcgtctggta

SEQ ID NO: 2967746 - DNA, 25 bp, Homo sapien
cacgtagatctggactttggcgtct

SEQ ID NO: 2967747 - DNA, 25 bp, Homo sapien
ctggactttggcgtctggtaaagga

SEQ ID NO: 2967748 - DNA, 25 bp, Homo sapien
ggaattccccagcgtcactctcctg

SEQ ID NO: 2967749 - DNA, 25 bp, Homo sapien
aattccccagcgtcactctcctgcc

SEQ ID NO: 2967750 - DNA, 25 bp, Homo sapien
attccccagcgtcactctcctgccg

SEQ ID NO: 2967751 - DNA, 25 bp, Homo sapien
gaattccccagcgtcactctcctgc

SEQ ID NO: 2967752 - DNA, 25 bp, Homo sapien
tccttgaatgctgtcctgtgtcctg

SEQ ID NO: 2967753 - DNA, 25 bp, Homo sapien
tgtgtcctggatgagccccaaaccc

SEQ ID NO: 2967754 - DNA, 25 bp, Homo sapien
tcttttctaagtgtccttgaatgct

SEQ ID NO: 2967755 - DNA, 25 bp, Homo sapien
ctgctggaggcacattcttttctaa

SEQ ID NO: 2967756 - DNA, 25 bp, Homo sapien
caattagcgaccttgccatacagag

SEQ ID NO: 2967757 - DNA, 25 bp, Homo sapien
ccatttggccaggatcacgtcccaa

SEQ ID NO: 2967758 - DNA, 25 bp, Homo sapien
caggatatttgaggtccagggaacc

SEQ ID NO: 2967759 - DNA, 25 bp, Homo sapien
ttgaatctctcttgccatttggcca

SEQ ID NO: 2967760 - DNA, 25 bp, Homo sapien
tttcggccagcaggaaagataaaat

SEQ ID NO: 2967761 - DNA, 25 bp, Homo sapien
ttcggaaaatattttcggccagcag

SEQ ID NO: 2967762 - DNA, 25 bp, Homo sapien
ggtggagctctatttgtcttaggaa

SEQ ID NO: 2967763 - DNA, 25 bp, Homo sapien
ctgcacacaaagtgcaggcatgggc

SEQ ID NO: 2967764 - DNA, 25 bp, Homo sapien
gctgccttcaaagccaaggcggcca

SEQ ID NO: 2967765 - DNA, 25 bp, Homo sapien
caggacaggctttattgatgctgcc

SEQ ID NO: 2967766 - DNA, 25 bp, Homo sapien
gcccactcttatggaaactgcatcc

SEQ ID NO: 2967767 - DNA, 25 bp, Homo sapien
agccatgttcccactacaggcctgg

SEQ ID NO: 2967768 - DNA, 25 bp, Homo sapien
cagtctgcttgatctgcaagaagtt

SEQ ID NO: 2967769 - DNA, 25 bp, Homo sapien
gcttgatctgcaagaagttcaaaga

SEQ ID NO: 2967770 - DNA, 25 bp, Homo sapien
tctgcaagaagttcaaagagcctca

SEQ ID NO: 2967771 - DNA, 25 bp, Homo sapien
tctgcttgatctgcaagaagttcaa

SEQ ID NO: 2967772 - DNA, 25 bp, Homo sapien
accagtaaagcttccccaggctgga

SEQ ID NO: 2967773 - DNA, 25 bp, Homo sapien
gatgggcttatatctgagctgtgtt

SEQ ID NO: 2967774 - DNA, 25 bp, Homo sapien
ctggccagcagtccaaggcagcacc

SEQ ID NO: 2967775 - DNA, 25 bp, Homo sapien
ctgaccctgaacatctgcagatggg

SEQ ID NO: 2967776 - DNA, 25 bp, Homo sapien
gggcactcggaaggtttgaggccag

SEQ ID NO: 2967777 - DNA, 25 bp, Homo sapien
tcggaaggtttgaggccaggaggtc

SEQ ID NO: 2967778 - DNA, 25 bp, Homo sapien
tcaggggcactcggaaggtttgagg

SEQ ID NO: 2967779 - DNA, 25 bp, Homo sapien
ctcggaaggtttgaggccaggaggt

SEQ ID NO: 2967780 - DNA, 25 bp, Homo sapien
agaaggaacatagccccaagcagtg

SEQ ID NO: 2967781 - DNA, 25 bp, Homo sapien
aaggaacatagccccaagcagtgcc

SEQ ID NO: 2967782 - DNA, 25 bp, Homo sapien
ggaacatagccccaagcagtgcctt

SEQ ID NO: 2967783 - DNA, 25 bp, Homo sapien
ctagaaggaacatagccccaagcag

SEQ ID NO: 2967784 - DNA, 25 bp, Homo sapien
gcagtcatagaagggttcacaggaa

SEQ ID NO: 2967785 - DNA, 25 bp, Homo sapien
tctgcagtcatagaagggttcacag

SEQ ID NO: 2967786 - DNA, 25 bp, Homo sapien
tccattctgcagtcatagaagggtt

SEQ ID NO: 2967787 - DNA, 25 bp, Homo sapien
tggttccattctgcagtcatagaag

SEQ ID NO: 2967788 - DNA, 25 bp, Homo sapien
atgtcctaaggcttccctgagaccc

SEQ ID NO: 2967789 - DNA, 25 bp, Homo sapien
aggcttccctgagacccaggtttct

SEQ ID NO: 2967790 - DNA, 25 bp, Homo sapien
catgtcctaaggcttccctgagacc

SEQ ID NO: 2967791 - DNA, 25 bp, Homo sapien
tccctgagacccaggtttctctggc

SEQ ID NO: 2967792 - DNA, 25 bp, Homo sapien
cacactgttagttgcagggagagta

SEQ ID NO: 2967793 - DNA, 25 bp, Homo sapien
gagagtaaatgaagtcatgtctgga

SEQ ID NO: 2967794 - DNA, 25 bp, Homo sapien
taacatctgatgtgactctaacatc

SEQ ID NO: 2967795 - DNA, 25 bp, Homo sapien
taatatatagagaatagctctgctc

SEQ ID NO: 2967796 - DNA, 25 bp, Homo sapien
ctctttggcgttgtaatatccctgc

SEQ ID NO: 2967797 - DNA, 25 bp, Homo sapien
tgctttcatgggatgacaaatgttg

SEQ ID NO: 2967798 - DNA, 25 bp, Homo sapien
tgttctttcggccaaatatgtagct

SEQ ID NO: 2967799 - DNA, 25 bp, Homo sapien
ctttcggccaaatatgtagctgatc

SEQ ID NO: 2967800 - DNA, 25 bp, Homo sapien
taccacgtcccattagggtgagagt

SEQ ID NO: 2967801 - DNA, 25 bp, Homo sapien
aaattctagcttcatatcttcccag

SEQ ID NO: 2967802 - DNA, 25 bp, Homo sapien
gtgagagtcacatcagcccatagga

SEQ ID NO: 2967803 - DNA, 25 bp, Homo sapien
tggcagtaacttctcgtaagtagaa

SEQ ID NO: 2967804 - DNA, 25 bp, Homo sapien
taacacatggaatagagccaaagcg

SEQ ID NO: 2967805 - DNA, 25 bp, Homo sapien
aacacatggaatagagccaaagcga

SEQ ID NO: 2967806 - DNA, 25 bp, Homo sapien
cgctttctcttgttgccagctttca

SEQ ID NO: 2967807 - DNA, 25 bp, Homo sapien
gatgtaggccttctttatatttggg

SEQ ID NO: 2967808 - DNA, 25 bp, Homo sapien
ccaaatgcacaatgctgccatgttg

SEQ ID NO: 2967809 - DNA, 25 bp, Homo sapien
aggcacaggagctgatgaattttct

SEQ ID NO: 2967810 - DNA, 25 bp, Homo sapien
gcctatgaatgactgtgccacagct

SEQ ID NO: 2967811 - DNA, 25 bp, Homo sapien
gccctctgaagtgagttcgtagcat

SEQ ID NO: 2967812 - DNA, 25 bp, Homo sapien
atgactgtgccacagcttcacccaa

SEQ ID NO: 2967813 - DNA, 25 bp, Homo sapien
acccaactgccctctgaagtgagtt

SEQ ID NO: 2967814 - DNA, 25 bp, Homo sapien
caccatgtgtagtaaaacagggact

SEQ ID NO: 2967815 - DNA, 25 bp, Homo sapien
agagataacacgacttcaccatgtg

SEQ ID NO: 2967816 - DNA, 25 bp, Homo sapien
ggtgtggtctgatcaagcaaatcaa

SEQ ID NO: 2967817 - DNA, 25 bp, Homo sapien
gaatgagggattacagcccctcgtg

SEQ ID NO: 2967818 - DNA, 25 bp, Homo sapien
cctgagatctagtcaggaaaggctc

SEQ ID NO: 2967819 - DNA, 25 bp, Homo sapien
tctagtcaggaaaggctcatcttca

SEQ ID NO: 2967820 - DNA, 25 bp, Homo sapien
tgtcttcctgagatctagtcaggaa

SEQ ID NO: 2967821 - DNA, 25 bp, Homo sapien
gagatctagtcaggaaaggctcatc

SEQ ID NO: 2967822 - DNA, 25 bp, Homo sapien
aatggcaggcacgttcttgaaggaa

SEQ ID NO: 2967823 - DNA, 25 bp, Homo sapien
ttcttgaaggaaggcaccaagcttc

SEQ ID NO: 2967824 - DNA, 25 bp, Homo sapien
caagcttccctatggagaatttttc

SEQ ID NO: 2967825 - DNA, 25 bp, Homo sapien
tcagatgatcttccccgtggaaact

SEQ ID NO: 2967826 - DNA, 25 bp, Homo sapien
gattgaagaacaggattccacccag

SEQ ID NO: 2967827 - DNA, 25 bp, Homo sapien
tacaagagccctgcttcggatgcct

SEQ ID NO: 2967828 - DNA, 25 bp, Homo sapien
caagcacaactagcagctgcggaga

SEQ ID NO: 2967829 - DNA, 25 bp, Homo sapien
cacggaaggctatgtccaaactggg

SEQ ID NO: 2967830 - DNA, 25 bp, Homo sapien
gatataattgcatctgagagcccca

SEQ ID NO: 2967831 - DNA, 25 bp, Homo sapien
agaaaaggcactcccagctagctga

SEQ ID NO: 2967832 - DNA, 25 bp, Homo sapien
ggaaaatgccgtctagacttaagag

SEQ ID NO: 2967833 - DNA, 25 bp, Homo sapien
gcaaggacaaggtatctcgatttat

SEQ ID NO: 2967834 - DNA, 25 bp, Homo sapien
tcctttgtataaatgtctccggttg

SEQ ID NO: 2967835 - DNA, 25 bp, Homo sapien
tgtataaatgtctccggttgcctca

SEQ ID NO: 2967836 - DNA, 25 bp, Homo sapien
atgtctccggttgcctcatgccctt

SEQ ID NO: 2967837 - DNA, 25 bp, Homo sapien
taaatgtctccggttgcctcatgcc

SEQ ID NO: 2967838 - DNA, 25 bp, Homo sapien
gcaggctcagctttgtataggatga

SEQ ID NO: 2967839 - DNA, 25 bp, Homo sapien
tctgtttccgataatgactctccaa

SEQ ID NO: 2967840 - DNA, 25 bp, Homo sapien
tttccatggcgtacaagtccagatt

SEQ ID NO: 2967841 - DNA, 25 bp, Homo sapien
ccagattgatgctttggcaggctca

SEQ ID NO: 2967842 - DNA, 25 bp, Homo sapien
gagcacctggcacattgcaagttat

SEQ ID NO: 2967843 - DNA, 25 bp, Homo sapien
cctttatagagtaggatgtaggcca

SEQ ID NO: 2967844 - DNA, 25 bp, Homo sapien
gactgaccaagatgatattccaaga

SEQ ID NO: 2967845 - DNA, 25 bp, Homo sapien
tattccaagaagtaaactactggcc

SEQ ID NO: 2967846 - DNA, 25 bp, Homo sapien
tctgtaaaatgcagcggttagtact

SEQ ID NO: 2967847 - DNA, 25 bp, Homo sapien
aagagacttgggctctacacctggc

SEQ ID NO: 2967848 - DNA, 25 bp, Homo sapien
taaaccacagatagggatagtaggg

SEQ ID NO: 2967849 - DNA, 25 bp, Homo sapien
tacctggtagaagacaagagacttg

SEQ ID NO: 2967850 - DNA, 25 bp, Homo sapien
taaaagccattgacagaatcagcaa

SEQ ID NO: 2967851 - DNA, 25 bp, Homo sapien
cattaactctagcaaaaaatgggag

SEQ ID NO: 2967852 - DNA, 25 bp, Homo sapien
ttctatgtggccagtattacctgat

SEQ ID NO: 2967853 - DNA, 25 bp, Homo sapien
cctcatgatcaaatggcttcactgg

SEQ ID NO: 2967854 - DNA, 25 bp, Homo sapien
tattgtctgaataatgaccggtttc

SEQ ID NO: 2967855 - DNA, 25 bp, Homo sapien
aattgtcttattaaccaccttgttg

SEQ ID NO: 2967856 - DNA, 25 bp, Homo sapien
tatttcttactatgctgtctcagac

SEQ ID NO: 2967857 - DNA, 25 bp, Homo sapien
tccatgtagataaccatattgtctg

SEQ ID NO: 2967858 - DNA, 25 bp, Homo sapien
gctaataagaaggtgtagtttttga

SEQ ID NO: 2967859 - DNA, 25 bp, Homo sapien
ctggccagaccgcttcacttgtaaa

SEQ ID NO: 2967860 - DNA, 25 bp, Homo sapien
ttcactagtaaatagtcacatctca

SEQ ID NO: 2967861 - DNA, 25 bp, Homo sapien
caggcacgcgccacctgtatttttg

SEQ ID NO: 2967862 - DNA, 25 bp, Homo sapien
gcttcccaagcttatggtgctggtg

SEQ ID NO: 2967863 - DNA, 25 bp, Homo sapien
taggcctccattctagagcttctga

SEQ ID NO: 2967864 - DNA, 25 bp, Homo sapien
caagaagtgcacattcctaggcctc

SEQ ID NO: 2967865 - DNA, 25 bp, Homo sapien
gagcttctgatctagtacctgggat

SEQ ID NO: 2967866 - DNA, 25 bp, Homo sapien
ccttattcgacaggctcaagggctg

SEQ ID NO: 2967867 - DNA, 25 bp, Homo sapien
gaagctctaggccatatgttcatga

SEQ ID NO: 2967868 - DNA, 25 bp, Homo sapien
gatagctgccatgcaaagaaagccc

SEQ ID NO: 2967869 - DNA, 25 bp, Homo sapien
tgtagggcacttttgcacatggctt

SEQ ID NO: 2967870 - DNA, 25 bp, Homo sapien
caagctccacttcctgagttcatgc

SEQ ID NO: 2967871 - DNA, 25 bp, Homo sapien
aagctccacttcctgagttcatgcc

SEQ ID NO: 2967872 - DNA, 25 bp, Homo sapien
gcaagctccacttcctgagttcatg

SEQ ID NO: 2967873 - DNA, 25 bp, Homo sapien
cgacttttacccacgctgctgctag

SEQ ID NO: 2967874 - DNA, 25 bp, Homo sapien
cataggatagtgttgtggcctccag

SEQ ID NO: 2967875 - DNA, 25 bp, Homo sapien
cagagaagtgcgctaatgagacgcg

SEQ ID NO: 2967876 - DNA, 25 bp, Homo sapien
tgctgctagtcggtcggccttgaga

SEQ ID NO: 2967877 - DNA, 25 bp, Homo sapien
ccgcctctaggacgcggagtccgtg

SEQ ID NO: 2967878 - DNA, 25 bp, Homo sapien
gactcgaggcacaactagggtttgg

SEQ ID NO: 2967879 - DNA, 25 bp, Homo sapien
agttcttggtgtccgagtcgactcg

SEQ ID NO: 2967880 - DNA, 25 bp, Homo sapien
catcggaccgcgctctcgatttctg

SEQ ID NO: 2967881 - DNA, 25 bp, Homo sapien
cggttctgcctttgtgtggtgcccc

SEQ ID NO: 2967882 - DNA, 25 bp, Homo sapien
gcctttgtgtggtgcccccatcctt

SEQ ID NO: 2967883 - DNA, 25 bp, Homo sapien
acagtcccggttctgcctttgtgtg

SEQ ID NO: 2967884 - DNA, 25 bp, Homo sapien
ctacagtcccggttctgcctttgtg

SEQ ID NO: 2967885 - DNA, 25 bp, Homo sapien
gagaattcctgaatccccgtgcatt

SEQ ID NO: 2967886 - DNA, 25 bp, Homo sapien
cactcagttctgaacggattccaga

SEQ ID NO: 2967887 - DNA, 25 bp, Homo sapien
gcctctctaaggttctatgggtccc

SEQ ID NO: 2967888 - DNA, 25 bp, Homo sapien
tcttttctgagtgatcagacttcct

SEQ ID NO: 2967889 - DNA, 25 bp, Homo sapien
aatagcttggtcactttatgaaggg

SEQ ID NO: 2967890 - DNA, 25 bp, Homo sapien
gatttgggacctaaaatactcctca

SEQ ID NO: 2967891 - DNA, 25 bp, Homo sapien
ggacatgtcagcatcaaccctctca

SEQ ID NO: 2967892 - DNA, 25 bp, Homo sapien
caaacactattgctgccgaatgcca

SEQ ID NO: 2967893 - DNA, 25 bp, Homo sapien
tgcaagccattgagttatcaggact

SEQ ID NO: 2967894 - DNA, 25 bp, Homo sapien
tactcaattgtcagtatggcacaga

SEQ ID NO: 2967895 - DNA, 25 bp, Homo sapien
ccagtgagaaacatctagccatacc

SEQ ID NO: 2967896 - DNA, 25 bp, Homo sapien
ggccagaaggccaccaagtgtactt

SEQ ID NO: 2967897 - DNA, 25 bp, Homo sapien
tgtgtgcgcgcaatcaaactgtggt

SEQ ID NO: 2967898 - DNA, 25 bp, Homo sapien
tggagatgtcagtcccaaacaccag

SEQ ID NO: 2967899 - DNA, 25 bp, Homo sapien
ggcatatgccaaggaggttctcacc

SEQ ID NO: 2967900 - DNA, 25 bp, Homo sapien
cacagctcagattaaggtagggcat

SEQ ID NO: 2967901 - DNA, 25 bp, Homo sapien
gacttcaggtgttgccatatctact

SEQ ID NO: 2967902 - DNA, 25 bp, Homo sapien
tgcagcgagcagcactatgacagtg

SEQ ID NO: 2967903 - DNA, 25 bp, Homo sapien
caacttgaatagtggagtatcatca

SEQ ID NO: 2967904 - DNA, 25 bp, Homo sapien
ggaaatgctaatactccatctgcca

SEQ ID NO: 2967905 - DNA, 25 bp, Homo sapien
aagtgcagtgttacgctatcatggc

SEQ ID NO: 2967906 - DNA, 25 bp, Homo sapien
cctgtgacctcctaagctcgagcag

SEQ ID NO: 2967907 - DNA, 25 bp, Homo sapien
tcgagcagtctgactgcctcagtct

SEQ ID NO: 2967908 - DNA, 25 bp, Homo sapien
ctgaagtgcagtgttacgctatcat

SEQ ID NO: 2967909 - DNA, 25 bp, Homo sapien
cagcaatagcatctgatgcagaaca

SEQ ID NO: 2967910 - DNA, 25 bp, Homo sapien
aaaaccagtgtctttcagcaatagc

SEQ ID NO: 2967911 - DNA, 25 bp, Homo sapien
cagtacaccaaagggtcactgttga

SEQ ID NO: 2967912 - DNA, 25 bp, Homo sapien
tgtagcactgcatatagtaacactc

SEQ ID NO: 2967913 - DNA, 25 bp, Homo sapien
aactgtcatacctcatctggaagaa

SEQ ID NO: 2967914 - DNA, 25 bp, Homo sapien
catggctgtacctgatctttttgca

SEQ ID NO: 2967915 - DNA, 25 bp, Homo sapien
aactttccgtctgtagcttatctgc

SEQ ID NO: 2967916 - DNA, 25 bp, Homo sapien
aataatataatgctttgggccttgc

SEQ ID NO: 2967917 - DNA, 25 bp, Homo sapien
caaaaggacaagaatgcatcagtag

SEQ ID NO: 2967918 - DNA, 25 bp, Homo sapien
gacttcatagaaaattacggtagga

SEQ ID NO: 2967919 - DNA, 25 bp, Homo sapien
gggattgctgataacccagttagag

SEQ ID NO: 2967920 - DNA, 25 bp, Homo sapien
catcaggcggttgggatcatgtctg

SEQ ID NO: 2967921 - DNA, 25 bp, Homo sapien
catagtgtagaaaagtagcgtgcag

SEQ ID NO: 2967922 - DNA, 25 bp, Homo sapien
tgtttgggtgaatgaaatggcccta

SEQ ID NO: 2967923 - DNA, 25 bp, Homo sapien
catgctttgcctattccttgtcacc

SEQ ID NO: 2967924 - DNA, 25 bp, Homo sapien
ccttcaatagtgagtttttgtgggc

SEQ ID NO: 2967925 - DNA, 25 bp, Homo sapien
agattgtatgcagtctcttgcctcc

SEQ ID NO: 2967926 - DNA, 25 bp, Homo sapien
tgtagtataagtctaagccagcctc

SEQ ID NO: 2967927 - DNA, 25 bp, Homo sapien
tgtctcctgatttagctacaccagc

SEQ ID NO: 2967928 - DNA, 25 bp, Homo sapien
gctcttggcctgagattactagtct

SEQ ID NO: 2967929 - DNA, 25 bp, Homo sapien
tagtcacatatgcagtagtggaaag

SEQ ID NO: 2967930 - DNA, 25 bp, Homo sapien
actagtcacatatgcagtagtggaa

SEQ ID NO: 2967931 - DNA, 25 bp, Homo sapien
ctagtcacatatgcagtagtggaaa

SEQ ID NO: 2967932 - DNA, 25 bp, Homo sapien
agtcacatatgcagtagtggaaaga

SEQ ID NO: 2967933 - DNA, 25 bp, Homo sapien
tactcaggacttaggagtacaccac

SEQ ID NO: 2967934 - DNA, 25 bp, Homo sapien
tagaccgatatgtctcctacacatg

SEQ ID NO: 2967935 - DNA, 25 bp, Homo sapien
tcatacagctatcaagtgttggagc

SEQ ID NO: 2967936 - DNA, 25 bp, Homo sapien
gattatggacccctatagaccgata

SEQ ID NO: 2967937 - DNA, 25 bp, Homo sapien
aatagatacataagtgccgtggtgg

SEQ ID NO: 2967938 - DNA, 25 bp, Homo sapien
aattgaaaatataggctcacacctg

SEQ ID NO: 2967939 - DNA, 25 bp, Homo sapien
tgaaaaactcttaaaaggctattga

SEQ ID NO: 2967940 - DNA, 25 bp, Homo sapien
ctgcacccggctttctttatgaaaa

SEQ ID NO: 2967941 - DNA, 25 bp, Homo sapien
aatatgtatggcaaggcccaacttc

SEQ ID NO: 2967942 - DNA, 25 bp, Homo sapien
ttggcggcgagatcaaagacctgga

SEQ ID NO: 2967943 - DNA, 25 bp, Homo sapien
gaagaagaccccattttgagcagtt

SEQ ID NO: 2967944 - DNA, 25 bp, Homo sapien
gagcagttttagtcgctgccttaag

SEQ ID NO: 2967945 - DNA, 25 bp, Homo sapien
ttctctctctggtcggaggcggcgg

SEQ ID NO: 2967946 - DNA, 25 bp, Homo sapien
gctgctgtgagggacgatgagtgcc

SEQ ID NO: 2967947 - DNA, 25 bp, Homo sapien
gagtgcctccttcgtgccgaacggg

SEQ ID NO: 2967948 - DNA, 25 bp, Homo sapien
taatggcggatggtgggttgtggcg

SEQ ID NO: 2967949 - DNA, 25 bp, Homo sapien
tatttttcttgtggtaggggcacac

SEQ ID NO: 2967950 - DNA, 25 bp, Homo sapien
ttgggctctgccgtctcggacttga

SEQ ID NO: 2967951 - DNA, 25 bp, Homo sapien
ctgccgtctcggacttgattttgat

SEQ ID NO: 2967952 - DNA, 25 bp, Homo sapien
ctctccgcccgggagaaccgtcctg

SEQ ID NO: 2967953 - DNA, 25 bp, Homo sapien
gcttctctcccggttctcgcccttc

SEQ ID NO: 2967954 - DNA, 25 bp, Homo sapien
tgaggagactctgggcttaaggaca

SEQ ID NO: 2967955 - DNA, 25 bp, Homo sapien
ctgaggagactctgggcttaaggac

SEQ ID NO: 2967956 - DNA, 25 bp, Homo sapien
gccgctgaggagactctgggcttaa

SEQ ID NO: 2967957 - DNA, 25 bp, Homo sapien
ctccgccgctgaggagactctgggc

SEQ ID NO: 2967958 - DNA, 25 bp, Homo sapien
tgtggccgccattaaagcgaaggga

SEQ ID NO: 2967959 - DNA, 25 bp, Homo sapien
aggaacgacacgaagacagagccag

SEQ ID NO: 2967960 - DNA, 25 bp, Homo sapien
ccagagaatggtctgagcccgcaga

SEQ ID NO: 2967961 - DNA, 25 bp, Homo sapien
tcaaggcggccaatgggtgagcaga

SEQ ID NO: 2967962 - DNA, 25 bp, Homo sapien
ccctcgctcacttctctctccccct

SEQ ID NO: 2967963 - DNA, 25 bp, Homo sapien
tgggctcttcaccaccacagatgaa

SEQ ID NO: 2967964 - DNA, 25 bp, Homo sapien
aatttccccgcaaagagagggccag

SEQ ID NO: 2967965 - DNA, 25 bp, Homo sapien
cagcggcctcgcgaaataaatgaga

SEQ ID NO: 2967966 - DNA, 25 bp, Homo sapien
caaatccagaggtttgcacctgcac

SEQ ID NO: 2967967 - DNA, 25 bp, Homo sapien
tgctggcactcggttataaaggatg

SEQ ID NO: 2967968 - DNA, 25 bp, Homo sapien
gagcgcttacctcattggatctggg

SEQ ID NO: 2967969 - DNA, 25 bp, Homo sapien
agcggaacaaagatctgaggagttt

SEQ ID NO: 2967970 - DNA, 25 bp, Homo sapien
gatgccaaccttagttgatttgagc

SEQ ID NO: 2967971 - DNA, 25 bp, Homo sapien
tgaatcacaatatggagcatcaggg

SEQ ID NO: 2967972 - DNA, 25 bp, Homo sapien
ctggaggctaagtggtagtttgtaa

SEQ ID NO: 2967973 - DNA, 25 bp, Homo sapien
ctctagaccttgcagatttttcaga

SEQ ID NO: 2967974 - DNA, 25 bp, Homo sapien
gtggtagtttgtaagccagtgcctc

SEQ ID NO: 2967975 - DNA, 25 bp, Homo sapien
tctgcctggaactttttagcaggag

SEQ ID NO: 2967976 - DNA, 25 bp, Homo sapien
gcaggaggagcacgttcaaagaact

SEQ ID NO: 2967977 - DNA, 25 bp, Homo sapien
gaaaaatcgtctgctcagtaagaaa

SEQ ID NO: 2967978 - DNA, 25 bp, Homo sapien
tcaaagaactacacttgtctcctct

SEQ ID NO: 2967979 - DNA, 25 bp, Homo sapien
tgacatgacacagaacctatagcta

SEQ ID NO: 2967980 - DNA, 25 bp, Homo sapien
tccagccacggcagtgacatgacac

SEQ ID NO: 2967981 - DNA, 25 bp, Homo sapien
cagccacggcagtgacatgacacag

SEQ ID NO: 2967982 - DNA, 25 bp, Homo sapien
catgacacagaacctatagctaact

SEQ ID NO: 2967983 - DNA, 25 bp, Homo sapien
tgtgacttgggtctgcataaaccac

SEQ ID NO: 2967984 - DNA, 25 bp, Homo sapien
tggattcctgcttcggcgttccagg

SEQ ID NO: 2967985 - DNA, 25 bp, Homo sapien
tccaatttgctggtccatgttctgt

SEQ ID NO: 2967986 - DNA, 25 bp, Homo sapien
taaaccacaataaccacaagcaact

SEQ ID NO: 2967987 - DNA, 25 bp, Homo sapien
ttccaaatctggataaagttgtagg

SEQ ID NO: 2967988 - DNA, 25 bp, Homo sapien
caaatctggataaagttgtaggctc

SEQ ID NO: 2967989 - DNA, 25 bp, Homo sapien
tctggataaagttgtaggctccttg

SEQ ID NO: 2967990 - DNA, 25 bp, Homo sapien
gataaagttgtaggctccttgaagt

SEQ ID NO: 2967991 - DNA, 25 bp, Homo sapien
tgagtgggcaatgggccacatgacc

SEQ ID NO: 2967992 - DNA, 25 bp, Homo sapien
gagtgggcaatgggccacatgacca

SEQ ID NO: 2967993 - DNA, 25 bp, Homo sapien
agtgggcaatgggccacatgaccat

SEQ ID NO: 2967994 - DNA, 25 bp, Homo sapien
tggcctttccgacttttatgcttat

SEQ ID NO: 2967995 - DNA, 25 bp, Homo sapien
tccgacttttatgcttattgtttcc

SEQ ID NO: 2967996 - DNA, 25 bp, Homo sapien
cctttccgacttttatgcttattgt

SEQ ID NO: 2967997 - DNA, 25 bp, Homo sapien
gtactggcctttccgacttttatgc

SEQ ID NO: 2967998 - DNA, 25 bp, Homo sapien
taaccggttgtgatcaattagttgt

SEQ ID NO: 2967999 - DNA, 25 bp, Homo sapien
taaacaccactgcactcagaccagc

SEQ ID NO: 2968000 - DNA, 25 bp, Homo sapien
aaggctgatcaattgaagcagtggg

SEQ ID NO: 2968001 - DNA, 25 bp, Homo sapien
agtggagaaggaacaaagaaatctg

SEQ ID NO: 2968002 - DNA, 25 bp, Homo sapien
gcaatgaaataaatggacgtgattc

SEQ ID NO: 2968003 - DNA, 25 bp, Homo sapien
gacgtgattctgtaccaagaagtaa

SEQ ID NO: 2968004 - DNA, 25 bp, Homo sapien
agaaaggtaatagacttttggattg

SEQ ID NO: 2968005 - DNA, 25 bp, Homo sapien
gcagagtgataaagatcagcaatga

SEQ ID NO: 2968006 - DNA, 25 bp, Homo sapien
tacaggagatgttctcggggacccg

SEQ ID NO: 2968007 - DNA, 25 bp, Homo sapien
tacgccaggtcttcaagagtctaca

SEQ ID NO: 2968008 - DNA, 25 bp, Homo sapien
tatctcgtacgccaggtcttcaaga

SEQ ID NO: 2968009 - DNA, 25 bp, Homo sapien
tcttcaagagtctacaggagatgtt

SEQ ID NO: 2968010 - DNA, 25 bp, Homo sapien
attgagaagcgcctccgggagctga

SEQ ID NO: 2968011 - DNA, 25 bp, Homo sapien
cctgcagattgagaagcgcctccgg

SEQ ID NO: 2968012 - DNA, 25 bp, Homo sapien
tgcagattgagaagcgcctccggga

SEQ ID NO: 2968013 - DNA, 25 bp, Homo sapien
agattgagaagcgcctccgggagct

SEQ ID NO: 2968014 - DNA, 25 bp, Homo sapien
cctggcagacgctggcctgctgtat

SEQ ID NO: 2968015 - DNA, 25 bp, Homo sapien
tggatgacatcttggactccgcgga

SEQ ID NO: 2968016 - DNA, 25 bp, Homo sapien
cctgctgtatggaggtggcgaacac

SEQ ID NO: 2968017 - DNA, 25 bp, Homo sapien
atcaggacggctcttgcaacggcct

SEQ ID NO: 2968018 - DNA, 25 bp, Homo sapien
aggagcaagaccaagaccgcaggaa

SEQ ID NO: 2968019 - DNA, 25 bp, Homo sapien
ggagcaagaccaagaccgcaggaag

SEQ ID NO: 2968020 - DNA, 25 bp, Homo sapien
gagcaagaccaagaccgcaggaagg

SEQ ID NO: 2968021 - DNA, 25 bp, Homo sapien
ccaggagcaagaccaagaccgcagg

SEQ ID NO: 2968022 - DNA, 25 bp, Homo sapien
aacccactactgtgaagatttattc

SEQ ID NO: 2968023 - DNA, 25 bp, Homo sapien
cactgggcctgttcaaaagacttaa

SEQ ID NO: 2968024 - DNA, 25 bp, Homo sapien
ggttttgactaacccactactgtga

SEQ ID NO: 2968025 - DNA, 25 bp, Homo sapien
tttttatgaagaccaacttagctat

SEQ ID NO: 2968026 - DNA, 25 bp, Homo sapien
ctgaggtgcacaacccagatattcc

SEQ ID NO: 2968027 - DNA, 25 bp, Homo sapien
gctgaggtgcacaacccagatattc

SEQ ID NO: 2968028 - DNA, 25 bp, Homo sapien
tgctgaggtgcacaacccagatatt

SEQ ID NO: 2968029 - DNA, 25 bp, Homo sapien
tgaggtgcacaacccagatattcct

SEQ ID NO: 2968030 - DNA, 25 bp, Homo sapien
cacgtaatagggtgtcctgcctcag

SEQ ID NO: 2968031 - DNA, 25 bp, Homo sapien
tcaaggtattttgccaccaaaatct

SEQ ID NO: 2968032 - DNA, 25 bp, Homo sapien
aaaatctctgctctggcgtcccctg

SEQ ID NO: 2968033 - DNA, 25 bp, Homo sapien
cagctgacacaacaggagagctctt

SEQ ID NO: 2968034 - DNA, 25 bp, Homo sapien
gaacatgcggtaacacctcattctt

SEQ ID NO: 2968035 - DNA, 25 bp, Homo sapien
catgcggtaacacctcattcttgag

SEQ ID NO: 2968036 - DNA, 25 bp, Homo sapien
tgagaacatgcggtaacacctcatt

SEQ ID NO: 2968037 - DNA, 25 bp, Homo sapien
gagaacatgcggtaacacctcattc

SEQ ID NO: 2968038 - DNA, 25 bp, Homo sapien
gtttattacaaacctgcagtagcca

SEQ ID NO: 2968039 - DNA, 25 bp, Homo sapien
gcacattgtctggtgttgtacgaaa

SEQ ID NO: 2968040 - DNA, 25 bp, Homo sapien
tggactaggcacactgaagctttgt

SEQ ID NO: 2968041 - DNA, 25 bp, Homo sapien
aacagggatttagccagtggactag

SEQ ID NO: 2968042 - DNA, 25 bp, Homo sapien
tgctaggcttgctgcaacaaagtac

SEQ ID NO: 2968043 - DNA, 25 bp, Homo sapien
cattagtttgctaggcttgctgcaa

SEQ ID NO: 2968044 - DNA, 25 bp, Homo sapien
ttggtttcttcgacaactgtgagaa

SEQ ID NO: 2968045 - DNA, 25 bp, Homo sapien
agatcacgttgttagagttggtttc

SEQ ID NO: 2968046 - DNA, 25 bp, Homo sapien
ggttcaagcaaatctctgcctccac

SEQ ID NO: 2968047 - DNA, 25 bp, Homo sapien
tccacctcctgagtagctgggatta

SEQ ID NO: 2968048 - DNA, 25 bp, Homo sapien
tagtagacacaggatttcatcatct

SEQ ID NO: 2968049 - DNA, 25 bp, Homo sapien
agacacaggatttcatcatcttggc

SEQ ID NO: 2968050 - DNA, 25 bp, Homo sapien
tagggtgacagcaaagactcgaaga

SEQ ID NO: 2968051 - DNA, 25 bp, Homo sapien
ctgatagggtgacagcaaagactcg

SEQ ID NO: 2968052 - DNA, 25 bp, Homo sapien
ggtgacagcaaagactcgaagaggt

SEQ ID NO: 2968053 - DNA, 25 bp, Homo sapien
acagcaaagactcgaagaggtgcct

SEQ ID NO: 2968054 - DNA, 25 bp, Homo sapien
gagcagactggggttaacggtcagc

SEQ ID NO: 2968055 - DNA, 25 bp, Homo sapien
gtggagcagactggggttaacggtc

SEQ ID NO: 2968056 - DNA, 25 bp, Homo sapien
cagactggggttaacggtcagcagc

SEQ ID NO: 2968057 - DNA, 25 bp, Homo sapien
agcagactggggttaacggtcagca

SEQ ID NO: 2968058 - DNA, 25 bp, Homo sapien
cccagatcccaacatggccacaggc

SEQ ID NO: 2968059 - DNA, 25 bp, Homo sapien
gcctggaattgcctctgtgatgcct

SEQ ID NO: 2968060 - DNA, 25 bp, Homo sapien
cacttggctgccttcgtggctggaa

SEQ ID NO: 2968061 - DNA, 25 bp, Homo sapien
gggatgcagagtggaaagttcacca

SEQ ID NO: 2968062 - DNA, 25 bp, Homo sapien
ttcagactctagattctgctgagat

SEQ ID NO: 2968063 - DNA, 25 bp, Homo sapien
gatttcagactctagattctgctga

SEQ ID NO: 2968064 - DNA, 25 bp, Homo sapien
ggatttcagactctagattctgctg

SEQ ID NO: 2968065 - DNA, 25 bp, Homo sapien
tttcagactctagattctgctgaga

SEQ ID NO: 2968066 - DNA, 25 bp, Homo sapien
tagggggtggtagggcccaggagca

SEQ ID NO: 2968067 - DNA, 25 bp, Homo sapien
ccaggagcacccaggaaagggtctc

SEQ ID NO: 2968068 - DNA, 25 bp, Homo sapien
aggagcacccaggaaagggtctcgg

SEQ ID NO: 2968069 - DNA, 25 bp, Homo sapien
aagggtctcggggatgcagaacatc

SEQ ID NO: 2968070 - DNA, 25 bp, Homo sapien
gacagggggatgacctgaggtctgg

SEQ ID NO: 2968071 - DNA, 25 bp, Homo sapien
acagggggatgacctgaggtctgga

SEQ ID NO: 2968072 - DNA, 25 bp, Homo sapien
cagacagggggatgacctgaggtct

SEQ ID NO: 2968073 - DNA, 25 bp, Homo sapien
agacagggggatgacctgaggtctg

SEQ ID NO: 2968074 - DNA, 25 bp, Homo sapien
gcatgtagaagtataggctgagctg

SEQ ID NO: 2968075 - DNA, 25 bp, Homo sapien
ccagcacgttcaggaacggagacta

SEQ ID NO: 2968076 - DNA, 25 bp, Homo sapien
tgtagaagtataggctgagctgcct

SEQ ID NO: 2968077 - DNA, 25 bp, Homo sapien
ggttctctgcatgtagaagtatagg

SEQ ID NO: 2968078 - DNA, 25 bp, Homo sapien
gtcccccatcctcagctgggtgggc

SEQ ID NO: 2968079 - DNA, 25 bp, Homo sapien
gcaggtcccccatcctcagctgggt

SEQ ID NO: 2968080 - DNA, 25 bp, Homo sapien
ggttcccaggagtccggaactgcca

SEQ ID NO: 2968081 - DNA, 25 bp, Homo sapien
aggtcccccatcctcagctgggtgg

SEQ ID NO: 2968082 - DNA, 25 bp, Homo sapien
gaggaacctgactgttagacctggg

SEQ ID NO: 2968083 - DNA, 25 bp, Homo sapien
caacgccattgttaatgcacagagg

SEQ ID NO: 2968084 - DNA, 25 bp, Homo sapien
tgagtgacgcagaaccaggccttgc

SEQ ID NO: 2968085 - DNA, 25 bp, Homo sapien
cagcgtcccgcaaagcagacgtcaa

SEQ ID NO: 2968086 - DNA, 25 bp, Homo sapien
tagagctgattgctcatacacaaag

SEQ ID NO: 2968087 - DNA, 25 bp, Homo sapien
gggattttcagacttatacagtcaa

SEQ ID NO: 2968088 - DNA, 25 bp, Homo sapien
tacagtcaatgagttttccttggtg

SEQ ID NO: 2968089 - DNA, 25 bp, Homo sapien
cacaaaggtagaccggtgggcaggg

SEQ ID NO: 2968090 - DNA, 25 bp, Homo sapien
tccaggcttctagaagcatctgggc

SEQ ID NO: 2968091 - DNA, 25 bp, Homo sapien
ctctgcggcctccacttggaaagtt

SEQ ID NO: 2968092 - DNA, 25 bp, Homo sapien
gcctccacttggaaagttctcagtt

SEQ ID NO: 2968093 - DNA, 25 bp, Homo sapien
caggcttctagaagcatctgggcca

SEQ ID NO: 2968094 - DNA, 25 bp, Homo sapien
cactgattccgaccagggcaccccc

SEQ ID NO: 2968095 - DNA, 25 bp, Homo sapien
actgattccgaccagggcaccccct

SEQ ID NO: 2968096 - DNA, 25 bp, Homo sapien
gagatcggctttcactgcactgagc

SEQ ID NO: 2968097 - DNA, 25 bp, Homo sapien
ctgagccacaacgtgggcatggact

SEQ ID NO: 2968098 - DNA, 25 bp, Homo sapien
gtgagatcggctttcactgcactga

SEQ ID NO: 2968099 - DNA, 25 bp, Homo sapien
tgagatcggctttcactgcactgag

SEQ ID NO: 2968100 - DNA, 25 bp, Homo sapien
cttggttccgccgttatgatttcag

SEQ ID NO: 2968101 - DNA, 25 bp, Homo sapien
tgggtccgtgccatatcccaggagg

SEQ ID NO: 2968102 - DNA, 25 bp, Homo sapien
aggaggaccagccggccacctgctg

SEQ ID NO: 2968103 - DNA, 25 bp, Homo sapien
ttccgccgttatgatttcagacaga

SEQ ID NO: 2968104 - DNA, 25 bp, Homo sapien
caccagcccggttcccatggcccat

SEQ ID NO: 2968105 - DNA, 25 bp, Homo sapien
gcaggaagccgccagccagtctgaa

SEQ ID NO: 2968106 - DNA, 25 bp, Homo sapien
ctgggacgaaggtgtgtggcaggaa

SEQ ID NO: 2968107 - DNA, 25 bp, Homo sapien
acgaaggtgtgtggcaggaagccgc

SEQ ID NO: 2968108 - DNA, 25 bp, Homo sapien
aggaagccgccagccagtctgaacc

SEQ ID NO: 2968109 - DNA, 25 bp, Homo sapien
gttctgactgggggccgtatcccag

SEQ ID NO: 2968110 - DNA, 25 bp, Homo sapien
gactgggggccgtatcccaggccca

SEQ ID NO: 2968111 - DNA, 25 bp, Homo sapien
tctgactgggggccgtatcccaggc

SEQ ID NO: 2968112 - DNA, 25 bp, Homo sapien
tgactgggggccgtatcccaggccc

SEQ ID NO: 2968113 - DNA, 25 bp, Homo sapien
caagcgttcagccagaagtgggaac

SEQ ID NO: 2968114 - DNA, 25 bp, Homo sapien
agggccagagccaagcgttcagcca

SEQ ID NO: 2968115 - DNA, 25 bp, Homo sapien
caatcacccactgcggagaggggtc

SEQ ID NO: 2968116 - DNA, 25 bp, Homo sapien
aagtgggaacggtcagtcctggcat

SEQ ID NO: 2968117 - DNA, 25 bp, Homo sapien
ctgggccttcctcttcaccttttct

SEQ ID NO: 2968118 - DNA, 25 bp, Homo sapien
tcttcaccttttcttcctcctcttc

SEQ ID NO: 2968119 - DNA, 25 bp, Homo sapien
tcaccttttcttcctcctcttcctc

SEQ ID NO: 2968120 - DNA, 25 bp, Homo sapien
tcctcttcaccttttcttcctcctc

SEQ ID NO: 2968121 - DNA, 25 bp, Homo sapien
cactgtgctcaagcatcttagggcc

SEQ ID NO: 2968122 - DNA, 25 bp, Homo sapien
acactgtgctcaagcatcttagggc

SEQ ID NO: 2968123 - DNA, 25 bp, Homo sapien
actgtgctcaagcatcttagggcct

SEQ ID NO: 2968124 - DNA, 25 bp, Homo sapien
aggcgttcatgccgataacaaaatc

SEQ ID NO: 2968125 - DNA, 25 bp, Homo sapien
ggcgttcatgccgataacaaaatcg

SEQ ID NO: 2968126 - DNA, 25 bp, Homo sapien
gcgttcatgccgataacaaaatcgc

SEQ ID NO: 2968127 - DNA, 25 bp, Homo sapien
cgttcatgccgataacaaaatcgcc

SEQ ID NO: 2968128 - DNA, 25 bp, Homo sapien
agcgcaaagggcagcgtgtccaccg

SEQ ID NO: 2968129 - DNA, 25 bp, Homo sapien
cagctcccgcagagcagcgcaaagg

SEQ ID NO: 2968130 - DNA, 25 bp, Homo sapien
tccaccgggagtgtgggaaggtgac

SEQ ID NO: 2968131 - DNA, 25 bp, Homo sapien
ggagctctggacaccgcccagtgtt

SEQ ID NO: 2968132 - DNA, 25 bp, Homo sapien
ggacgtcgggttctccatgggctgg

SEQ ID NO: 2968133 - DNA, 25 bp, Homo sapien
ccatgggctgggagttggtttcctt

SEQ ID NO: 2968134 - DNA, 25 bp, Homo sapien
ctgggacgtcgggttctccatgggc

SEQ ID NO: 2968135 - DNA, 25 bp, Homo sapien
catgggctgggagttggtttccttt

SEQ ID NO: 2968136 - DNA, 25 bp, Homo sapien
agcccaaatggcgggaccgtccagg

SEQ ID NO: 2968137 - DNA, 25 bp, Homo sapien
ccccagggtaaaggccgcatgttgg

SEQ ID NO: 2968138 - DNA, 25 bp, Homo sapien
ggaaggctctgatttcacgatgggc

SEQ ID NO: 2968139 - DNA, 25 bp, Homo sapien
gcatgtggtagccacgtcactaccc

SEQ ID NO: 2968140 - DNA, 25 bp, Homo sapien
gcagggtaagtgaacagctgccccg

SEQ ID NO: 2968141 - DNA, 25 bp, Homo sapien
gatcacagcttttagccaaggcacc

SEQ ID NO: 2968142 - DNA, 25 bp, Homo sapien
tccttgtgtcgccagcttgttggga

SEQ ID NO: 2968143 - DNA, 25 bp, Homo sapien
aaagcccaaatcagacgcctctcat

SEQ ID NO: 2968144 - DNA, 25 bp, Homo sapien
tcagccctcccagctgatgtccttc

SEQ ID NO: 2968145 - DNA, 25 bp, Homo sapien
tcccagctgatgtccttccatggtg

SEQ ID NO: 2968146 - DNA, 25 bp, Homo sapien
ccctcccagctgatgtccttccatg

SEQ ID NO: 2968147 - DNA, 25 bp, Homo sapien
ccagctgatgtccttccatggtgac

SEQ ID NO: 2968148 - DNA, 25 bp, Homo sapien
gtgcctgatggacttggctcttgtc

SEQ ID NO: 2968149 - DNA, 25 bp, Homo sapien
ggacaaggtgctgaagtgcctgatg

SEQ ID NO: 2968150 - DNA, 25 bp, Homo sapien
aaggtgctgaagtgcctgatggact

SEQ ID NO: 2968151 - DNA, 25 bp, Homo sapien
gatggacttggctcttgtcatgaaa

SEQ ID NO: 2968152 - DNA, 25 bp, Homo sapien
ggtaggatgtgagctcaccgctggc

SEQ ID NO: 2968153 - DNA, 25 bp, Homo sapien
aggaggtaggatgtgagctcaccgc

SEQ ID NO: 2968154 - DNA, 25 bp, Homo sapien
ataggaggtaggatgtgagctcacc

SEQ ID NO: 2968155 - DNA, 25 bp, Homo sapien
gaggtaggatgtgagctcaccgctg

SEQ ID NO: 2968156 - DNA, 25 bp, Homo sapien
acaggcagactcggcacaggcagac

SEQ ID NO: 2968157 - DNA, 25 bp, Homo sapien
caggcagactcggcacaggcagact

SEQ ID NO: 2968158 - DNA, 25 bp, Homo sapien
cacaggcagactcggcacaggcaga

SEQ ID NO: 2968159 - DNA, 25 bp, Homo sapien
aggcagactcggcacaggcagactc

SEQ ID NO: 2968160 - DNA, 25 bp, Homo sapien
gttgctcgaagtctggtgccactgt

SEQ ID NO: 2968161 - DNA, 25 bp, Homo sapien
tgctcgaagtctggtgccactgtat

SEQ ID NO: 2968162 - DNA, 25 bp, Homo sapien
tcgaagtctggtgccactgtattga

SEQ ID NO: 2968163 - DNA, 25 bp, Homo sapien
aagtctggtgccactgtattgatac

SEQ ID NO: 2968164 - DNA, 25 bp, Homo sapien
cagaagtaaatccagtttaactctt

SEQ ID NO: 2968165 - DNA, 25 bp, Homo sapien
cattcagaagtaaatccagtttaac

SEQ ID NO: 2968166 - DNA, 25 bp, Homo sapien
ttcagaagtaaatccagtttaactc

SEQ ID NO: 2968167 - DNA, 25 bp, Homo sapien
ttcattcagaagtaaatccagttta

SEQ ID NO: 2968168 - DNA, 25 bp, Homo sapien
ttgcagtcttaaccctatgtttttc

SEQ ID NO: 2968169 - DNA, 25 bp, Homo sapien
cagtcttaaccctatgtttttcaga

SEQ ID NO: 2968170 - DNA, 25 bp, Homo sapien
gcagtcttaaccctatgtttttcag

SEQ ID NO: 2968171 - DNA, 25 bp, Homo sapien
tgcagtcttaaccctatgtttttca

SEQ ID NO: 2968172 - DNA, 25 bp, Homo sapien
tcagcaacttacatttatacaactt

SEQ ID NO: 2968173 - DNA, 25 bp, Homo sapien
gagagaccttgttccattcagcaac

SEQ ID NO: 2968174 - DNA, 25 bp, Homo sapien
ttacatttatacaactttccagcag

SEQ ID NO: 2968175 - DNA, 25 bp, Homo sapien
ctttgagagaccttgttccattcag

SEQ ID NO: 2968176 - DNA, 25 bp, Homo sapien
gatcttggtattcctcttcctcaag

SEQ ID NO: 2968177 - DNA, 25 bp, Homo sapien
tcaaagcccgtatgttctatgaagg

SEQ ID NO: 2968178 - DNA, 25 bp, Homo sapien
tcttcctcaagctcaaagcccgtat

SEQ ID NO: 2968179 - DNA, 25 bp, Homo sapien
gaagggttctagcttatcaacacta

SEQ ID NO: 2968180 - DNA, 25 bp, Homo sapien
gtaaaaagatatccttcatccatca

SEQ ID NO: 2968181 - DNA, 25 bp, Homo sapien
ctgtaaaaagatatccttcatccat

SEQ ID NO: 2968182 - DNA, 25 bp, Homo sapien
aaaaagatatccttcatccatcatc

SEQ ID NO: 2968183 - DNA, 25 bp, Homo sapien
tccatcatcacattcacattaactc

SEQ ID NO: 2968184 - DNA, 25 bp, Homo sapien
tctttgtggtttagccttttctgga

SEQ ID NO: 2968185 - DNA, 25 bp, Homo sapien
tcaatacactcttgtctcagcacaa

SEQ ID NO: 2968186 - DNA, 25 bp, Homo sapien
agtccagtggcttttatgaatgttc

SEQ ID NO: 2968187 - DNA, 25 bp, Homo sapien
tgccatacttcctacagaaagtcca

SEQ ID NO: 2968188 - DNA, 25 bp, Homo sapien
caggttcctagtatcaaccttttca

SEQ ID NO: 2968189 - DNA, 25 bp, Homo sapien
tattcagcagttgcatttctttatc

SEQ ID NO: 2968190 - DNA, 25 bp, Homo sapien
catcaactggaagattattcagcag

SEQ ID NO: 2968191 - DNA, 25 bp, Homo sapien
gagctttatccccatattttccaga

SEQ ID NO: 2968192 - DNA, 25 bp, Homo sapien
ttcaagacctctcaattctttcatc

SEQ ID NO: 2968193 - DNA, 25 bp, Homo sapien
catcaagtggtaggtggtcattcag

SEQ ID NO: 2968194 - DNA, 25 bp, Homo sapien
tctccttgagatcaattcctatgct

SEQ ID NO: 2968195 - DNA, 25 bp, Homo sapien
agaaagtttccttcttatctgaaga

SEQ ID NO: 2968196 - DNA, 25 bp, Homo sapien
cagtgtccggatttctttctccttg

SEQ ID NO: 2968197 - DNA, 25 bp, Homo sapien
catcacattcaaatcaatcttccca

SEQ ID NO: 2968198 - DNA, 25 bp, Homo sapien
ttcacatccccagcatgaatctgct

SEQ ID NO: 2968199 - DNA, 25 bp, Homo sapien
ttttcacatccccagcatgaatctg

SEQ ID NO: 2968200 - DNA, 25 bp, Homo sapien
tttgtgctccttatttgtgatctct

SEQ ID NO: 2968201 - DNA, 25 bp, Homo sapien
gtgatctctattcccatgttttcca

SEQ ID NO: 2968202 - DNA, 25 bp, Homo sapien
cacaccatccaataattctttctta

SEQ ID NO: 2968203 - DNA, 25 bp, Homo sapien
tcacaccatccaataattctttctt

SEQ ID NO: 2968204 - DNA, 25 bp, Homo sapien
tgtgagtcttcaggtcgttgatttc

SEQ ID NO: 2968205 - DNA, 25 bp, Homo sapien
gtctgaacccagtgttttgtagaac

SEQ ID NO: 2968206 - DNA, 25 bp, Homo sapien
cagtcactggcatgtgagtcttcag

SEQ ID NO: 2968207 - DNA, 25 bp, Homo sapien
ttcttttgcttcgagtctgaaccca

SEQ ID NO: 2968208 - DNA, 25 bp, Homo sapien
tatattatttagaagagtttccaga

SEQ ID NO: 2968209 - DNA, 25 bp, Homo sapien
ttccagattactgacattgactttt

SEQ ID NO: 2968210 - DNA, 25 bp, Homo sapien
ctctttcccaacttcgatttctata

SEQ ID NO: 2968211 - DNA, 25 bp, Homo sapien
caacttcgatttctatattatttag

SEQ ID NO: 2968212 - DNA, 25 bp, Homo sapien
aaaagcttttgcttcatccatcacc

SEQ ID NO: 2968213 - DNA, 25 bp, Homo sapien
ctgtaaaagcttttgcttcatccat

SEQ ID NO: 2968214 - DNA, 25 bp, Homo sapien
ccacattcacatcaaccatttcatt

SEQ ID NO: 2968215 - DNA, 25 bp, Homo sapien
atcaccacattcacatcaaccattt

SEQ ID NO: 2968216 - DNA, 25 bp, Homo sapien
cattccccagattactgacattaac

SEQ ID NO: 2968217 - DNA, 25 bp, Homo sapien
cagctcattccccagattactgaca

SEQ ID NO: 2968218 - DNA, 25 bp, Homo sapien
cagtgagtacgagccccattttcct

SEQ ID NO: 2968219 - DNA, 25 bp, Homo sapien
cctcatcagtgagtacgagccccat

SEQ ID NO: 2968220 - DNA, 25 bp, Homo sapien
cctcagttggtagttgggtaatgag

SEQ ID NO: 2968221 - DNA, 25 bp, Homo sapien
ttggtagttgggtaatgagttcctc

SEQ ID NO: 2968222 - DNA, 25 bp, Homo sapien
gtagttgggtaatgagttcctcaag

SEQ ID NO: 2968223 - DNA, 25 bp, Homo sapien
cagttggtagttgggtaatgagttc

SEQ ID NO: 2968224 - DNA, 25 bp, Homo sapien
ctgacagcatccattaagtcattca

SEQ ID NO: 2968225 - DNA, 25 bp, Homo sapien
atccattaagtcattcaggtcaact

SEQ ID NO: 2968226 - DNA, 25 bp, Homo sapien
ccttgatgtaactgacagcatccat

SEQ ID NO: 2968227 - DNA, 25 bp, Homo sapien
taagtcattcaggtcaactgctgtc

SEQ ID NO: 2968228 - DNA, 25 bp, Homo sapien
ctttccattatagcttgcaactcac

SEQ ID NO: 2968229 - DNA, 25 bp, Homo sapien
ccctccattattgaattaacattaa

SEQ ID NO: 2968230 - DNA, 25 bp, Homo sapien
cctccattattgaattaacattaat

SEQ ID NO: 2968231 - DNA, 25 bp, Homo sapien
ctccattattgaattaacattaatc

SEQ ID NO: 2968232 - DNA, 25 bp, Homo sapien
tccattattgaattaacattaatct

SEQ ID NO: 2968233 - DNA, 25 bp, Homo sapien
tttcaacttatgcagagtcaccatt

SEQ ID NO: 2968234 - DNA, 25 bp, Homo sapien
gttttcaacttatgcagagtcacca

SEQ ID NO: 2968235 - DNA, 25 bp, Homo sapien
tcaacttatgcagagtcaccattcc

SEQ ID NO: 2968236 - DNA, 25 bp, Homo sapien
cagttttcaacttatgcagagtcac

SEQ ID NO: 2968237 - DNA, 25 bp, Homo sapien
agccgtgctacctaccacttctggg

SEQ ID NO: 2968238 - DNA, 25 bp, Homo sapien
cgtgctacctaccacttctgggctt

SEQ ID NO: 2968239 - DNA, 25 bp, Homo sapien
taagccgtgctacctaccacttctg

SEQ ID NO: 2968240 - DNA, 25 bp, Homo sapien
cttttaagccgtgctacctaccact

SEQ ID NO: 2968241 - DNA, 25 bp, Homo sapien
tgtatttgatagttcactgacaaga

SEQ ID NO: 2968242 - DNA, 25 bp, Homo sapien
agagtgtatttgatagttcactgac

SEQ ID NO: 2968243 - DNA, 25 bp, Homo sapien
aaactaggttgctgacttaggaata

SEQ ID NO: 2968244 - DNA, 25 bp, Homo sapien
tttgatagttcactgacaagaaaac

SEQ ID NO: 2968245 - DNA, 25 bp, Homo sapien
tgagaaacagggcttatggaccaga

SEQ ID NO: 2968246 - DNA, 25 bp, Homo sapien
acagggcttatggaccagaagctgg

SEQ ID NO: 2968247 - DNA, 25 bp, Homo sapien
gaaacagggcttatggaccagaagc

SEQ ID NO: 2968248 - DNA, 25 bp, Homo sapien
gagaaacagggcttatggaccagaa

SEQ ID NO: 2968249 - DNA, 25 bp, Homo sapien
agcaggagggaggtgaccgagcgca

SEQ ID NO: 2968250 - DNA, 25 bp, Homo sapien
ctgagggaggtgctgcccccgaggg

SEQ ID NO: 2968251 - DNA, 25 bp, Homo sapien
cccccgagggcagccagcaggaggg

SEQ ID NO: 2968252 - DNA, 25 bp, Homo sapien
gccagcaggagggaggtgaccgagc

SEQ ID NO: 2968253 - DNA, 25 bp, Homo sapien
aataccctgggcaatgacatcttca

SEQ ID NO: 2968254 - DNA, 25 bp, Homo sapien
tgataacctcgttgagccggtcgtc

SEQ ID NO: 2968255 - DNA, 25 bp, Homo sapien
tggcaaccttgccaataccctgggc

SEQ ID NO: 2968256 - DNA, 25 bp, Homo sapien
gcctacgctgtccaggatcctcttg

SEQ ID NO: 2968257 - DNA, 25 bp, Homo sapien
cagcctggggcagcagagacagcca

SEQ ID NO: 2968258 - DNA, 25 bp, Homo sapien
cacagcctggggcagcagagacagc

SEQ ID NO: 2968259 - DNA, 25 bp, Homo sapien
ctggggcagcagagacagccacagc

SEQ ID NO: 2968260 - DNA, 25 bp, Homo sapien
cagcagcaggagctgcacagcctgg

SEQ ID NO: 2968261 - DNA, 25 bp, Homo sapien
tgtcatcgtctgactctttggacac

SEQ ID NO: 2968262 - DNA, 25 bp, Homo sapien
catgtcatcgtctgactctttggac

SEQ ID NO: 2968263 - DNA, 25 bp, Homo sapien
cccatgtcatcgtctgactctttgg

SEQ ID NO: 2968264 - DNA, 25 bp, Homo sapien
tcatcgtctgactctttggacacct

SEQ ID NO: 2968265 - DNA, 25 bp, Homo sapien
ctagtagtaagtagattttcccagg

SEQ ID NO: 2968266 - DNA, 25 bp, Homo sapien
gttagaggattcagcttaagttttg

SEQ ID NO: 2968267 - DNA, 25 bp, Homo sapien
acttttgttagaggattcagcttaa

SEQ ID NO: 2968268 - DNA, 25 bp, Homo sapien
cttttgttagaggattcagcttaag

SEQ ID NO: 2968269 - DNA, 25 bp, Homo sapien
tttgttagaggattcagcttaagtt

SEQ ID NO: 2968270 - DNA, 25 bp, Homo sapien
tttgtgaagcacttagcttcttttc

SEQ ID NO: 2968271 - DNA, 25 bp, Homo sapien
aattggcattgaagagatcctggta

SEQ ID NO: 2968272 - DNA, 25 bp, Homo sapien
aagagatcctggtaagtctctatcc

SEQ ID NO: 2968273 - DNA, 25 bp, Homo sapien
tgttgtaattggcattgaagagatc

SEQ ID NO: 2968274 - DNA, 25 bp, Homo sapien
gccagttttgtccttgtagaagaag

SEQ ID NO: 2968275 - DNA, 25 bp, Homo sapien
aattcattatagacatcatgcttgg

SEQ ID NO: 2968276 - DNA, 25 bp, Homo sapien
cagcttagctacagtgcacatcagt

SEQ ID NO: 2968277 - DNA, 25 bp, Homo sapien
tgcttggtcagattcattcccagct

SEQ ID NO: 2968278 - DNA, 25 bp, Homo sapien
agattcttatctgttagaaccttga

SEQ ID NO: 2968279 - DNA, 25 bp, Homo sapien
tatctgttagaaccttgataaagtc

SEQ ID NO: 2968280 - DNA, 25 bp, Homo sapien
gattcttatctgttagaaccttgat

SEQ ID NO: 2968281 - DNA, 25 bp, Homo sapien
tgttagaaccttgataaagtctgag

SEQ ID NO: 2968282 - DNA, 25 bp, Homo sapien
gaagtctctagaagccttgatagga

SEQ ID NO: 2968283 - DNA, 25 bp, Homo sapien
ctattatagactttctgggtagggc

SEQ ID NO: 2968284 - DNA, 25 bp, Homo sapien
caaatctaaacaggtctccttttct

SEQ ID NO: 2968285 - DNA, 25 bp, Homo sapien
acaataggattcctgggttgccagc

SEQ ID NO: 2968286 - DNA, 25 bp, Homo sapien
tgtggagcttcctagccacacgaag

SEQ ID NO: 2968287 - DNA, 25 bp, Homo sapien
ttcctagccacacgaagtccatgac

SEQ ID NO: 2968288 - DNA, 25 bp, Homo sapien
aagtccatgacgcttgcccatcctg

SEQ ID NO: 2968289 - DNA, 25 bp, Homo sapien
acgaagtccatgacgcttgcccatc

SEQ ID NO: 2968290 - DNA, 25 bp, Homo sapien
agggctgtgcccaaatgggctttct

SEQ ID NO: 2968291 - DNA, 25 bp, Homo sapien
tcagggctgtgcccaaatgggcttt

SEQ ID NO: 2968292 - DNA, 25 bp, Homo sapien
ctgtgcccaaatgggctttcttgta

SEQ ID NO: 2968293 - DNA, 25 bp, Homo sapien
ggctgtgcccaaatgggctttcttg

SEQ ID NO: 2968294 - DNA, 25 bp, Homo sapien
tctcatgcaaccctcaaaagggttg

SEQ ID NO: 2968295 - DNA, 25 bp, Homo sapien
acctctcatgcaaccctcaaaaggg

SEQ ID NO: 2968296 - DNA, 25 bp, Homo sapien
aagcacctctcatgcaaccctcaaa

SEQ ID NO: 2968297 - DNA, 25 bp, Homo sapien
catgcaaccctcaaaagggttggcc

SEQ ID NO: 2968298 - DNA, 25 bp, Homo sapien
caagaactttatcgtttttctcaat

SEQ ID NO: 2968299 - DNA, 25 bp, Homo sapien
gtctttccttcgtgcctttgtatag

SEQ ID NO: 2968300 - DNA, 25 bp, Homo sapien
ccttcgtgcctttgtatagggccaa

SEQ ID NO: 2968301 - DNA, 25 bp, Homo sapien
aagagagacattgggcactttgaca

SEQ ID NO: 2968302 - DNA, 25 bp, Homo sapien
gccaaaagagagacattgggcactt

SEQ ID NO: 2968303 - DNA, 25 bp, Homo sapien
cctgggccagtatgctggaattttc

SEQ ID NO: 2968304 - DNA, 25 bp, Homo sapien
agtgtagggactccacaacattcct

SEQ ID NO: 2968305 - DNA, 25 bp, Homo sapien
tgtagggactccacaacattcctgg

SEQ ID NO: 2968306 - DNA, 25 bp, Homo sapien
cacaacattcctgggccagtatgct

SEQ ID NO: 2968307 - DNA, 25 bp, Homo sapien
ttaagtgtcctttttccatagccca

SEQ ID NO: 2968308 - DNA, 25 bp, Homo sapien
gcttaagtgtcctttttccatagcc

SEQ ID NO: 2968309 - DNA, 25 bp, Homo sapien
taagtgtcctttttccatagcccat

SEQ ID NO: 2968310 - DNA, 25 bp, Homo sapien
ctggcttaagtgtcctttttccata

SEQ ID NO: 2968311 - DNA, 25 bp, Homo sapien
cttgagcttggaggtgtgcatatgt

SEQ ID NO: 2968312 - DNA, 25 bp, Homo sapien
gcttgagcttggaggtgtgcatatg

SEQ ID NO: 2968313 - DNA, 25 bp, Homo sapien
gcaatccgggcagcattagcaaagg

SEQ ID NO: 2968314 - DNA, 25 bp, Homo sapien
ttgcaatccgggcagcattagcaaa

SEQ ID NO: 2968315 - DNA, 25 bp, Homo sapien
tttcattattgcaatccgggcagca

SEQ ID NO: 2968316 - DNA, 25 bp, Homo sapien
cattattgcaatccgggcagcatta

SEQ ID NO: 2968317 - DNA, 25 bp, Homo sapien
aatgcaaaggctcctttattcttag

SEQ ID NO: 2968318 - DNA, 25 bp, Homo sapien
gcaaaggctcctttattcttagcat

SEQ ID NO: 2968319 - DNA, 25 bp, Homo sapien
aaagaaatgcaaaggctcctttatt

SEQ ID NO: 2968320 - DNA, 25 bp, Homo sapien
caatggaaagatgggtatttttgaa

SEQ ID NO: 2968321 - DNA, 25 bp, Homo sapien
aggcagggtccatagactttatatt

SEQ ID NO: 2968322 - DNA, 25 bp, Homo sapien
ctgaggcagggtccatagactttat

SEQ ID NO: 2968323 - DNA, 25 bp, Homo sapien
gggtccatagactttatatttgctg

SEQ ID NO: 2968324 - DNA, 25 bp, Homo sapien
ggtccatagactttatatttgctgc

SEQ ID NO: 2968325 - DNA, 25 bp, Homo sapien
tgatcaatggtgaagatgttatttg

SEQ ID NO: 2968326 - DNA, 25 bp, Homo sapien
tgtttaatagcagttgcatcggcca

SEQ ID NO: 2968327 - DNA, 25 bp, Homo sapien
gccactgtacaagtctgctttttct

SEQ ID NO: 2968328 - DNA, 25 bp, Homo sapien
tagcagttgcatcggccactgtaca

SEQ ID NO: 2968329 - DNA, 25 bp, Homo sapien
tataggtatcagtagctctcttcac

SEQ ID NO: 2968330 - DNA, 25 bp, Homo sapien
aatcccctcggatcttctgccagag

SEQ ID NO: 2968331 - DNA, 25 bp, Homo sapien
gtaattcttggcaaacattccagga

SEQ ID NO: 2968332 - DNA, 25 bp, Homo sapien
tcttttcggtgttcaagggcaattc

SEQ ID NO: 2968333 - DNA, 25 bp, Homo sapien
tttttactggtcagaatccaaaaga

SEQ ID NO: 2968334 - DNA, 25 bp, Homo sapien
ggtcagaatccaaaagatgtcaaaa

SEQ ID NO: 2968335 - DNA, 25 bp, Homo sapien
ctaagaatgtacttagacaaaagca

SEQ ID NO: 2968336 - DNA, 25 bp, Homo sapien
gcttctaagaatgtacttagacaaa

SEQ ID NO: 2968337 - DNA, 25 bp, Homo sapien
gctgcctcttatcggcgaggactgc

SEQ ID NO: 2968338 - DNA, 25 bp, Homo sapien
caggtgcaccttcagggtaggagcc

SEQ ID NO: 2968339 - DNA, 25 bp, Homo sapien
ttcagggtaggagccggccatgaca

SEQ ID NO: 2968340 - DNA, 25 bp, Homo sapien
ctgctgcctcttatcggcgaggact

SEQ ID NO: 2968341 - DNA, 25 bp, Homo sapien
gatctctcaggaaccggcttccgaa

SEQ ID NO: 2968342 - DNA, 25 bp, Homo sapien
gcgcgccggatctctcaggaaccgg

SEQ ID NO: 2968343 - DNA, 25 bp, Homo sapien
agacgcgcgccggatctctcaggaa

SEQ ID NO: 2968344 - DNA, 25 bp, Homo sapien
aggcattgtggtggaagacgcgcgc

SEQ ID NO: 2968345 - DNA, 25 bp, Homo sapien
cagcttgactcgtggccggcggtca

SEQ ID NO: 2968346 - DNA, 25 bp, Homo sapien
cttggagagtgcctcgggtagggca

SEQ ID NO: 2968347 - DNA, 25 bp, Homo sapien
agtcgctggcctaggagtttctctc

SEQ ID NO: 2968348 - DNA, 25 bp, Homo sapien
gtgcctcgggtagggcagcttgact

SEQ ID NO: 2968349 - DNA, 25 bp, Homo sapien
gagaaaatcaaacgggcagcttagg

SEQ ID NO: 2968350 - DNA, 25 bp, Homo sapien
tgagaaaatcaaacgggcagcttag

SEQ ID NO: 2968351 - DNA, 25 bp, Homo sapien
ctgagaaaatcaaacgggcagctta

SEQ ID NO: 2968352 - DNA, 25 bp, Homo sapien
ccgctggatactgttctcctggact

SEQ ID NO: 2968353 - DNA, 25 bp, Homo sapien
gccgcggcttgctcttccgaccact

SEQ ID NO: 2968354 - DNA, 25 bp, Homo sapien
ctggcacacccgctggatactgttc

SEQ ID NO: 2968355 - DNA, 25 bp, Homo sapien
tgctcttccgaccactccacattgt

SEQ ID NO: 2968356 - DNA, 25 bp, Homo sapien
gatgatcgcgtgaccacacagttgt

SEQ ID NO: 2968357 - DNA, 25 bp, Homo sapien
cattggctagccatatcaacgtgga

SEQ ID NO: 2968358 - DNA, 25 bp, Homo sapien
aagtacaggttctaagatgatcgcg

SEQ ID NO: 2968359 - DNA, 25 bp, Homo sapien
gaaatcatccacctctcaagcaggg

SEQ ID NO: 2968360 - DNA, 25 bp, Homo sapien
tattaaaccaggtccatcctcattg

SEQ ID NO: 2968361 - DNA, 25 bp, Homo sapien
ttgattttggctaggtgccagctca

SEQ ID NO: 2968362 - DNA, 25 bp, Homo sapien
cattccagtatttgtgggcattgat

SEQ ID NO: 2968363 - DNA, 25 bp, Homo sapien
gctcagggaattcggtaaaaagcca

SEQ ID NO: 2968364 - DNA, 25 bp, Homo sapien
tgagttacattctcctccacaggaa

SEQ ID NO: 2968365 - DNA, 25 bp, Homo sapien
tttgaagaacacttgtgctgttctt

SEQ ID NO: 2968366 - DNA, 25 bp, Homo sapien
tgttttatgttcaaggctctttgaa

SEQ ID NO: 2968367 - DNA, 25 bp, Homo sapien
ttctcctccacaggaagtgtctgtg

SEQ ID NO: 2968368 - DNA, 25 bp, Homo sapien
ctccagtattcggtaggtggctgag

SEQ ID NO: 2968369 - DNA, 25 bp, Homo sapien
aatataatagcttcacatatcccac

SEQ ID NO: 2968370 - DNA, 25 bp, Homo sapien
tataatagcttcacatatcccacta

SEQ ID NO: 2968371 - DNA, 25 bp, Homo sapien
atcccactaccaagacaataaaagg

SEQ ID NO: 2968372 - DNA, 25 bp, Homo sapien
acatatcccactaccaagacaataa

SEQ ID NO: 2968373 - DNA, 25 bp, Homo sapien
cagaactttccagagttaattccct

SEQ ID NO: 2968374 - DNA, 25 bp, Homo sapien
cagaaatgaactattaatcacagaa

SEQ ID NO: 2968375 - DNA, 25 bp, Homo sapien
tgtagtgaccagagctaaacagtac

SEQ ID NO: 2968376 - DNA, 25 bp, Homo sapien
ctgtattagggaaggtgtagtgacc

SEQ ID NO: 2968377 - DNA, 25 bp, Homo sapien
agactgtgtttcccacaccacagcc

SEQ ID NO: 2968378 - DNA, 25 bp, Homo sapien
ttgaattatatccttttggaggctc

SEQ ID NO: 2968379 - DNA, 25 bp, Homo sapien
tgaattatatccttttggaggctct

SEQ ID NO: 2968380 - DNA, 25 bp, Homo sapien
ttttgaattatatccttttggaggc

SEQ ID NO: 2968381 - DNA, 25 bp, Homo sapien
tttgaattatatccttttggaggct

SEQ ID NO: 2968382 - DNA, 25 bp, Homo sapien
gaccagttctatagctgtggaagaa

SEQ ID NO: 2968383 - DNA, 25 bp, Homo sapien
gcaataaacaaagagtcctgggtca

SEQ ID NO: 2968384 - DNA, 25 bp, Homo sapien
acagcaataaacaaagagtcctggg

SEQ ID NO: 2968385 - DNA, 25 bp, Homo sapien
ctggaccagttctatagctgtggaa

SEQ ID NO: 2968386 - DNA, 25 bp, Homo sapien
gagtcaccgcaccagcatgcaatcg

SEQ ID NO: 2968387 - DNA, 25 bp, Homo sapien
atttcattagtttatgcaattgtgt

SEQ ID NO: 2968388 - DNA, 25 bp, Homo sapien
ccagcatgcaatcgtatttcattag

SEQ ID NO: 2968389 - DNA, 25 bp, Homo sapien
acaagtgtaagctatcattcgagac

SEQ ID NO: 2968390 - DNA, 25 bp, Homo sapien
gggcactgggtaactcttctcttca

SEQ ID NO: 2968391 - DNA, 25 bp, Homo sapien
caaaggcaaaacaccgagaaggatc

SEQ ID NO: 2968392 - DNA, 25 bp, Homo sapien
tgctgaaagaacaaatatgagaatg

SEQ ID NO: 2968393 - DNA, 25 bp, Homo sapien
atcacacaggtcgtgaacaaaggca

SEQ ID NO: 2968394 - DNA, 25 bp, Homo sapien
gtaatctcgcagaagcatcatcccg

SEQ ID NO: 2968395 - DNA, 25 bp, Homo sapien
gcagaagcatcatcccgccaggttt

SEQ ID NO: 2968396 - DNA, 25 bp, Homo sapien
taatctcgcagaagcatcatcccgc

SEQ ID NO: 2968397 - DNA, 25 bp, Homo sapien
ctcgcagaagcatcatcccgccagg

SEQ ID NO: 2968398 - DNA, 25 bp, Homo sapien
gtgtgaagaagtaaactctggttcc

SEQ ID NO: 2968399 - DNA, 25 bp, Homo sapien
tgtgaagaagtaaactctggttcca

SEQ ID NO: 2968400 - DNA, 25 bp, Homo sapien
tgaagaagtaaactctggttccatc

SEQ ID NO: 2968401 - DNA, 25 bp, Homo sapien
tgtgtgaagaagtaaactctggttc

SEQ ID NO: 2968402 - DNA, 25 bp, Homo sapien
cagtggtgaaaagcgtgtccagttc

SEQ ID NO: 2968403 - DNA, 25 bp, Homo sapien
ccagcagtggtgaaaagcgtgtcca

SEQ ID NO: 2968404 - DNA, 25 bp, Homo sapien
ccagtccagcagtggtgaaaagcgt

SEQ ID NO: 2968405 - DNA, 25 bp, Homo sapien
caaacccggtacattgtcagttgct

SEQ ID NO: 2968406 - DNA, 25 bp, Homo sapien
cagaaggggcttgcagtatttgcac

SEQ ID NO: 2968407 - DNA, 25 bp, Homo sapien
gaaggggcttgcagtatttgcactg

SEQ ID NO: 2968408 - DNA, 25 bp, Homo sapien
ggggcttgcagtatttgcactgaat

SEQ ID NO: 2968409 - DNA, 25 bp, Homo sapien
gacagaaggggcttgcagtatttgc

SEQ ID NO: 2968410 - DNA, 25 bp, Homo sapien
aaagcccggaaacacaatgggcttg

SEQ ID NO: 2968411 - DNA, 25 bp, Homo sapien
acacaatgggcttgcatcgtgttgg

SEQ ID NO: 2968412 - DNA, 25 bp, Homo sapien
cggaaacacaatgggcttgcatcgt

SEQ ID NO: 2968413 - DNA, 25 bp, Homo sapien
aatgggcttgcatcgtgttggcagc

SEQ ID NO: 2968414 - DNA, 25 bp, Homo sapien
ttgatgctctctgtagggtcatttt

SEQ ID NO: 2968415 - DNA, 25 bp, Homo sapien
gatgctctctgtagggtcatttttt

SEQ ID NO: 2968416 - DNA, 25 bp, Homo sapien
tgatgctctctgtagggtcattttt

SEQ ID NO: 2968417 - DNA, 25 bp, Homo sapien
gccacgcctggtcgaaaagtcctta

SEQ ID NO: 2968418 - DNA, 25 bp, Homo sapien
caaggtgaaagctaggcatctttgt

SEQ ID NO: 2968419 - DNA, 25 bp, Homo sapien
atcctataactgcatggatcaagag

SEQ ID NO: 2968420 - DNA, 25 bp, Homo sapien
aaatggactattcttgcagtattcc

SEQ ID NO: 2968421 - DNA, 25 bp, Homo sapien
ccgtgccaggtctgtattgttagca

SEQ ID NO: 2968422 - DNA, 25 bp, Homo sapien
aaatgattctctagagccaccctcc

SEQ ID NO: 2968423 - DNA, 25 bp, Homo sapien
caccgtgccaggtctgtattgttag

SEQ ID NO: 2968424 - DNA, 25 bp, Homo sapien
ccaggtctgtattgttagcagtgat

SEQ ID NO: 2968425 - DNA, 25 bp, Homo sapien
taaatgaaataccatcccagtgatt

SEQ ID NO: 2968426 - DNA, 25 bp, Homo sapien
aaatgaaataccatcccagtgattc

SEQ ID NO: 2968427 - DNA, 25 bp, Homo sapien
aatgaaataccatcccagtgattca

SEQ ID NO: 2968428 - DNA, 25 bp, Homo sapien
caatcaacttctgatctaaattcag

SEQ ID NO: 2968429 - DNA, 25 bp, Homo sapien
gggcatctcggaacgggacggcttg

SEQ ID NO: 2968430 - DNA, 25 bp, Homo sapien
tctgggctcagctgtattctgaaca

SEQ ID NO: 2968431 - DNA, 25 bp, Homo sapien
acgggacggcttgacagaaacctct

SEQ ID NO: 2968432 - DNA, 25 bp, Homo sapien
gattggcatgtctagaaggcctgct

SEQ ID NO: 2968433 - DNA, 25 bp, Homo sapien
cctgagggtataggattggcatgtc

SEQ ID NO: 2968434 - DNA, 25 bp, Homo sapien
acgactgttagacgggcaaggcctg

SEQ ID NO: 2968435 - DNA, 25 bp, Homo sapien
tcagggaacgactgttagacgggca

SEQ ID NO: 2968436 - DNA, 25 bp, Homo sapien
tgactggctcagctcaggacacatg

SEQ ID NO: 2968437 - DNA, 25 bp, Homo sapien
gcctggagcgggctgtcctctccat

SEQ ID NO: 2968438 - DNA, 25 bp, Homo sapien
tcagctcaggacacatgcatggcct

SEQ ID NO: 2968439 - DNA, 25 bp, Homo sapien
tcctctccatctggggtccggggca

SEQ ID NO: 2968440 - DNA, 25 bp, Homo sapien
ggagacatgacctgctcagaggaga

SEQ ID NO: 2968441 - DNA, 25 bp, Homo sapien
gagacatgacctgctcagaggagac

SEQ ID NO: 2968442 - DNA, 25 bp, Homo sapien
aggagacatgacctgctcagaggag

SEQ ID NO: 2968443 - DNA, 25 bp, Homo sapien
caggagacatgacctgctcagagga

SEQ ID NO: 2968444 - DNA, 25 bp, Homo sapien
cttataattttccgcggatgctgcc

SEQ ID NO: 2968445 - DNA, 25 bp, Homo sapien
ttttccgcggatgctgccttgatca

SEQ ID NO: 2968446 - DNA, 25 bp, Homo sapien
cgcggatgctgccttgatcagatgt

SEQ ID NO: 2968447 - DNA, 25 bp, Homo sapien
taattttccgcggatgctgccttga

SEQ ID NO: 2968448 - DNA, 25 bp, Homo sapien
tcaacctccgatgaaaaacacggcc

SEQ ID NO: 2968449 - DNA, 25 bp, Homo sapien
agggacaaaaggtgccctgggatca

SEQ ID NO: 2968450 - DNA, 25 bp, Homo sapien
ggaggttccatttcaacctccgatg

SEQ ID NO: 2968451 - DNA, 25 bp, Homo sapien
tgccctgggatcaaagccgagcccc

SEQ ID NO: 2968452 - DNA, 25 bp, Homo sapien
tgggggccactcgggtgcggcgcgg

SEQ ID NO: 2968453 - DNA, 25 bp, Homo sapien
gggccactcgggtgcggcgcggagg

SEQ ID NO: 2968454 - DNA, 25 bp, Homo sapien
ggggccactcgggtgcggcgcggag

SEQ ID NO: 2968455 - DNA, 25 bp, Homo sapien
gctgggggccactcgggtgcggcgc

SEQ ID NO: 2968456 - DNA, 25 bp, Homo sapien
gtacagagccaggcgcccgacgcgg

SEQ ID NO: 2968457 - DNA, 25 bp, Homo sapien
ctcgcgtacagagccaggcgcccga

SEQ ID NO: 2968458 - DNA, 25 bp, Homo sapien
cgcgtacagagccaggcgcccgacg

SEQ ID NO: 2968459 - DNA, 25 bp, Homo sapien
gcgtacagagccaggcgcccgacgc

SEQ ID NO: 2968460 - DNA, 25 bp, Homo sapien
ggcacgaaggccgcagatccccggg

SEQ ID NO: 2968461 - DNA, 25 bp, Homo sapien
ggggggcacgaaggccgcagatccc

SEQ ID NO: 2968462 - DNA, 25 bp, Homo sapien
gggcacgaaggccgcagatccccgg

SEQ ID NO: 2968463 - DNA, 25 bp, Homo sapien
gggggcacgaaggccgcagatcccc

SEQ ID NO: 2968464 - DNA, 25 bp, Homo sapien
ctaacacctactccagtaaacctgg

SEQ ID NO: 2968465 - DNA, 25 bp, Homo sapien
taacacctactccagtaaacctggc

SEQ ID NO: 2968466 - DNA, 25 bp, Homo sapien
actaacacctactccagtaaacctg

SEQ ID NO: 2968467 - DNA, 25 bp, Homo sapien
aaagtatacttgaatacagccatca

SEQ ID NO: 2968468 - DNA, 25 bp, Homo sapien
atacttgaatacagccatcacgaac

SEQ ID NO: 2968469 - DNA, 25 bp, Homo sapien
agtatacttgaatacagccatcacg

SEQ ID NO: 2968470 - DNA, 25 bp, Homo sapien
caaaagtatacttgaatacagccat

SEQ ID NO: 2968471 - DNA, 25 bp, Homo sapien
gctttctgagcaatacacaatgaac

SEQ ID NO: 2968472 - DNA, 25 bp, Homo sapien
tctgctttctgagcaatacacaatg

SEQ ID NO: 2968473 - DNA, 25 bp, Homo sapien
caatctacagtaatcttaattctgc

SEQ ID NO: 2968474 - DNA, 25 bp, Homo sapien
cacccagccaatctacagtaatctt

SEQ ID NO: 2968475 - DNA, 25 bp, Homo sapien
ttgattatttcccattcttctgttt

SEQ ID NO: 2968476 - DNA, 25 bp, Homo sapien
tgtttcctaattttccaactcttga

SEQ ID NO: 2968477 - DNA, 25 bp, Homo sapien
ccattcttctgttttgcaatgtatt

SEQ ID NO: 2968478 - DNA, 25 bp, Homo sapien
ttcctaattttccaactcttgatta

SEQ ID NO: 2968479 - DNA, 25 bp, Homo sapien
ttgttatatccgatgtactctcctt

SEQ ID NO: 2968480 - DNA, 25 bp, Homo sapien
tttgttatatccgatgtactctcct

SEQ ID NO: 2968481 - DNA, 25 bp, Homo sapien
cttttgttatatccgatgtactctc

SEQ ID NO: 2968482 - DNA, 25 bp, Homo sapien
ttttgttatatccgatgtactctcc

SEQ ID NO: 2968483 - DNA, 25 bp, Homo sapien
cctgcagctgcagagatgttgatgc

SEQ ID NO: 2968484 - DNA, 25 bp, Homo sapien
gttgatgcctaagaagaactggatt

SEQ ID NO: 2968485 - DNA, 25 bp, Homo sapien
tgcagctgcagagatgttgatgcct

SEQ ID NO: 2968486 - DNA, 25 bp, Homo sapien
tgcctaagaagaactggattgccat

SEQ ID NO: 2968487 - DNA, 25 bp, Homo sapien
tggaagactcactattaagtggtcc

SEQ ID NO: 2968488 - DNA, 25 bp, Homo sapien
cacaagctctggttggaagactcac

SEQ ID NO: 2968489 - DNA, 25 bp, Homo sapien
ttggaagactcactattaagtggtc

SEQ ID NO: 2968490 - DNA, 25 bp, Homo sapien
gttggaagactcactattaagtggt

SEQ ID NO: 2968491 - DNA, 25 bp, Homo sapien
cttggctagtttcatatggttcagc

SEQ ID NO: 2968492 - DNA, 25 bp, Homo sapien
ttcttttccgatttcgctggtcatt

SEQ ID NO: 2968493 - DNA, 25 bp, Homo sapien
tttccgatttcgctggtcattctgc

SEQ ID NO: 2968494 - DNA, 25 bp, Homo sapien
agcttttcttttccgatttcgctgg

SEQ ID NO: 2968495 - DNA, 25 bp, Homo sapien
ttatgtcccctaggagtgcctttcc

SEQ ID NO: 2968496 - DNA, 25 bp, Homo sapien
aatcactaattttatgtcccctagg

SEQ ID NO: 2968497 - DNA, 25 bp, Homo sapien
attttatgtcccctaggagtgcctt

SEQ ID NO: 2968498 - DNA, 25 bp, Homo sapien
ctaattttatgtcccctaggagtgc

SEQ ID NO: 2968499 - DNA, 25 bp, Homo sapien
ggaaaaaccgatatgaataattcaa

SEQ ID NO: 2968500 - DNA, 25 bp, Homo sapien
tggccaacagggaaaaaccgatatg

SEQ ID NO: 2968501 - DNA, 25 bp, Homo sapien
cagggaaaaaccgatatgaataatt

SEQ ID NO: 2968502 - DNA, 25 bp, Homo sapien
ccaacagggaaaaaccgatatgaat

SEQ ID NO: 2968503 - DNA, 25 bp, Homo sapien
taagggattggataaggaatgttgc

SEQ ID NO: 2968504 - DNA, 25 bp, Homo sapien
gtaagggattggataaggaatgttg

SEQ ID NO: 2968505 - DNA, 25 bp, Homo sapien
tatcatacagatacagaagcagaca

SEQ ID NO: 2968506 - DNA, 25 bp, Homo sapien
gcagacagattgaccagtggcacag

SEQ ID NO: 2968507 - DNA, 25 bp, Homo sapien
tagtggtcatctaggttctctctca

SEQ ID NO: 2968508 - DNA, 25 bp, Homo sapien
cagggaaacttgaccggatagtgaa

SEQ ID NO: 2968509 - DNA, 25 bp, Homo sapien
gaaacacacaaatgacatgagaaag

SEQ ID NO: 2968510 - DNA, 25 bp, Homo sapien
aacacacaaatgacatgagaaagat

SEQ ID NO: 2968511 - DNA, 25 bp, Homo sapien
cacacaaatgacatgagaaagataa

SEQ ID NO: 2968512 - DNA, 25 bp, Homo sapien
tggaaaacagtaaagaaacacacaa

SEQ ID NO: 2968513 - DNA, 25 bp, Homo sapien
caagccgaggttttgctagcatcac

SEQ ID NO: 2968514 - DNA, 25 bp, Homo sapien
tgcagcactgccatctaaaccatag

SEQ ID NO: 2968515 - DNA, 25 bp, Homo sapien
tcactgacatgagggttggcagagc

SEQ ID NO: 2968516 - DNA, 25 bp, Homo sapien
tttgctagcatcactgacatgaggg

SEQ ID NO: 2968517 - DNA, 25 bp, Homo sapien
atatgaattaacttaggctttgtac

SEQ ID NO: 2968518 - DNA, 25 bp, Homo sapien
tatgaattaacttaggctttgtact

SEQ ID NO: 2968519 - DNA, 25 bp, Homo sapien
ctcatcaaggagcactagggcaatg

SEQ ID NO: 2968520 - DNA, 25 bp, Homo sapien
agcactagggcaatggaaaggatat

SEQ ID NO: 2968521 - DNA, 25 bp, Homo sapien
gtatgctataatgctatgattgcac

SEQ ID NO: 2968522 - DNA, 25 bp, Homo sapien
tatgctataatgctatgattgcacc

SEQ ID NO: 2968523 - DNA, 25 bp, Homo sapien
tactgttaaaaaggcaatacttctc

SEQ ID NO: 2968524 - DNA, 25 bp, Homo sapien
tgcaacagatcccaaacagccaata

SEQ ID NO: 2968525 - DNA, 25 bp, Homo sapien
gatctacggattcaacacaattgct

SEQ ID NO: 2968526 - DNA, 25 bp, Homo sapien
tacagttattcagacagtgtggtcc

SEQ ID NO: 2968527 - DNA, 25 bp, Homo sapien
caaggatgtcccagaaaaactggat

SEQ ID NO: 2968528 - DNA, 25 bp, Homo sapien
agacaaggatgtcccagaaaaactg

SEQ ID NO: 2968529 - DNA, 25 bp, Homo sapien
aagctgaggtgagtgaatcacaaga

SEQ ID NO: 2968530 - DNA, 25 bp, Homo sapien
tgaggtgagtgaatcacaagatcag

SEQ ID NO: 2968531 - DNA, 25 bp, Homo sapien
gcctgtgagcaaactagcacttcct

SEQ ID NO: 2968532 - DNA, 25 bp, Homo sapien
gatttcattgaaggctcacaacagc

SEQ ID NO: 2968533 - DNA, 25 bp, Homo sapien
tactccctatgtctaagcactgtgc

SEQ ID NO: 2968534 - DNA, 25 bp, Homo sapien
gctaggtgctaggtacacatggtaa

SEQ ID NO: 2968535 - DNA, 25 bp, Homo sapien
taatactgtcacttgctgactgggc

SEQ ID NO: 2968536 - DNA, 25 bp, Homo sapien
gaacacacagcggtctaaaatccag

SEQ ID NO: 2968537 - DNA, 25 bp, Homo sapien
gcatgtaaaggactgtgaaccacta

SEQ ID NO: 2968538 - DNA, 25 bp, Homo sapien
gactgggcattctaaggcattttaa

SEQ ID NO: 2968539 - DNA, 25 bp, Homo sapien
cgtagatgagggactgttttgctga

SEQ ID NO: 2968540 - DNA, 25 bp, Homo sapien
tggagatctgtttttgggagctgca

SEQ ID NO: 2968541 - DNA, 25 bp, Homo sapien
ctgtctgtgctggatggagatctgt

SEQ ID NO: 2968542 - DNA, 25 bp, Homo sapien
gctctgtgttgccagatcccgtaga

SEQ ID NO: 2968543 - DNA, 25 bp, Homo sapien
cactcttctcattacctttctcggg

SEQ ID NO: 2968544 - DNA, 25 bp, Homo sapien
tggcctagaatcacatggcttaaga

SEQ ID NO: 2968545 - DNA, 25 bp, Homo sapien
aaagcacttgctcacacaaatggcc

SEQ ID NO: 2968546 - DNA, 25 bp, Homo sapien
taggattagtctcaacatgttatat

SEQ ID NO: 2968547 - DNA, 25 bp, Homo sapien
tcttaataaatcatctattcttccc

SEQ ID NO: 2968548 - DNA, 25 bp, Homo sapien
tcttctctaagtcagaattcttact

SEQ ID NO: 2968549 - DNA, 25 bp, Homo sapien
taaatcatctattcttccctccttc

SEQ ID NO: 2968550 - DNA, 25 bp, Homo sapien
tctagtgcagatattttttctattg

SEQ ID NO: 2968551 - DNA, 25 bp, Homo sapien
gaagaaaggggcaatcatattaaaa

SEQ ID NO: 2968552 - DNA, 25 bp, Homo sapien
agctaagagtcaagaagaaaccaat

SEQ ID NO: 2968553 - DNA, 25 bp, Homo sapien
taaaatcaaaattcacacgagctgc

SEQ ID NO: 2968554 - DNA, 25 bp, Homo sapien
tataaagagggataaaagcatagtt

SEQ ID NO: 2968555 - DNA, 25 bp, Homo sapien
tggaaaacccagtctactcataagg

SEQ ID NO: 2968556 - DNA, 25 bp, Homo sapien
tctaagtttttgtggcttctgacac

SEQ ID NO: 2968557 - DNA, 25 bp, Homo sapien
gacactaatgtcttcgaggagttca

SEQ ID NO: 2968558 - DNA, 25 bp, Homo sapien
aaaagcagctggctagtagctccca

SEQ ID NO: 2968559 - DNA, 25 bp, Homo sapien
atcaatctgccgtctcaaatcacag

SEQ ID NO: 2968560 - DNA, 25 bp, Homo sapien
tgctcattgtcacacatctatttaa

SEQ ID NO: 2968561 - DNA, 25 bp, Homo sapien
gttcatcaatctgccgtctcaaatc

SEQ ID NO: 2968562 - DNA, 25 bp, Homo sapien
ctgttcatcaatctgccgtctcaaa

SEQ ID NO: 2968563 - DNA, 25 bp, Homo sapien
acacaatgacacacattgagtatct

SEQ ID NO: 2968564 - DNA, 25 bp, Homo sapien
tatcttgggatacagagtttagacc

SEQ ID NO: 2968565 - DNA, 25 bp, Homo sapien
cagagtttagaccaacattattcac

SEQ ID NO: 2968566 - DNA, 25 bp, Homo sapien
gtcaaatcatgttcctaaaaagctc

SEQ ID NO: 2968567 - DNA, 25 bp, Homo sapien
atgaggctccgtgtcggacagtagt

SEQ ID NO: 2968568 - DNA, 25 bp, Homo sapien
ctgttcagtaaatgaggctccgtgt

SEQ ID NO: 2968569 - DNA, 25 bp, Homo sapien
tgaggctccgtgtcggacagtagta

SEQ ID NO: 2968570 - DNA, 25 bp, Homo sapien
tacagatttccagaccctcgtgggc

SEQ ID NO: 2968571 - DNA, 25 bp, Homo sapien
ggtaaaacagtgctatccacctaca

SEQ ID NO: 2968572 - DNA, 25 bp, Homo sapien
cctctgatctggtggctctatagca

SEQ ID NO: 2968573 - DNA, 25 bp, Homo sapien
tccacctacagtgaagagtcctact

SEQ ID NO: 2968574 - DNA, 25 bp, Homo sapien
ccaatatgaccggtatccttatgag

SEQ ID NO: 2968575 - DNA, 25 bp, Homo sapien
aatcaatcttctgcaccattatggg

SEQ ID NO: 2968576 - DNA, 25 bp, Homo sapien
catactggacatgataggaccttaa

SEQ ID NO: 2968577 - DNA, 25 bp, Homo sapien
tgttaaagtcgttagtacctcagga

SEQ ID NO: 2968578 - DNA, 25 bp, Homo sapien
accttaactgaacatgaatttccca

SEQ ID NO: 2968579 - DNA, 25 bp, Homo sapien
ccaattccccacaagggacaactat

SEQ ID NO: 2968580 - DNA, 25 bp, Homo sapien
caattccccacaagggacaactata

SEQ ID NO: 2968581 - DNA, 25 bp, Homo sapien
catggcaggaggtttccgctttgct

SEQ ID NO: 2968582 - DNA, 25 bp, Homo sapien
tcttccctctgtgaatttatccttt

SEQ ID NO: 2968583 - DNA, 25 bp, Homo sapien
gctttgctaacattttccgttgtct

SEQ ID NO: 2968584 - DNA, 25 bp, Homo sapien
tgacccatggcaggaggtttccgct

SEQ ID NO: 2968585 - DNA, 25 bp, Homo sapien
aacgaacatcaaggaagagacttcc

SEQ ID NO: 2968586 - DNA, 25 bp, Homo sapien
gaaggcaggcatttgtgcttagaat

SEQ ID NO: 2968587 - DNA, 25 bp, Homo sapien
gatgcacttctaggatgccacagac

SEQ ID NO: 2968588 - DNA, 25 bp, Homo sapien
tatctgcagctatctttggacttga

SEQ ID NO: 2968589 - DNA, 25 bp, Homo sapien
ggggctgtatcctttagctctgtat

SEQ ID NO: 2968590 - DNA, 25 bp, Homo sapien
gtaaactgtgggctcctaaggctgg

SEQ ID NO: 2968591 - DNA, 25 bp, Homo sapien
agtaaactgtgggctcctaaggctg

SEQ ID NO: 2968592 - DNA, 25 bp, Homo sapien
gctggggctgtatcctttagctctg

SEQ ID NO: 2968593 - DNA, 25 bp, Homo sapien
tttccaagttcattatgcacatttt

SEQ ID NO: 2968594 - DNA, 25 bp, Homo sapien
aattattagtttattcgtctgttca

SEQ ID NO: 2968595 - DNA, 25 bp, Homo sapien
tgcacatttttatcgctatacttaa

SEQ ID NO: 2968596 - DNA, 25 bp, Homo sapien
tagtttattcgtctgttcatctcac

SEQ ID NO: 2968597 - DNA, 25 bp, Homo sapien
taattagcctggacaatctttcaaa

SEQ ID NO: 2968598 - DNA, 25 bp, Homo sapien
tcaaataatactagagggaaagtcc

SEQ ID NO: 2968599 - DNA, 25 bp, Homo sapien
ttcaaataatactagagggaaagtc

SEQ ID NO: 2968600 - DNA, 25 bp, Homo sapien
aaaacattggtcagattaattagcc

SEQ ID NO: 2968601 - DNA, 25 bp, Homo sapien
ttcatggtattctgctaacgttaac

SEQ ID NO: 2968602 - DNA, 25 bp, Homo sapien
gacctaatctgagtttgaagatttc

SEQ ID NO: 2968603 - DNA, 25 bp, Homo sapien
tgttcatggtattctgctaacgtta

SEQ ID NO: 2968604 - DNA, 25 bp, Homo sapien
ctttttaagatgacctaatctgagt

SEQ ID NO: 2968605 - DNA, 25 bp, Homo sapien
agttccctgatatgtagatttctaa

SEQ ID NO: 2968606 - DNA, 25 bp, Homo sapien
ctttttagttccctgatatgtagat

SEQ ID NO: 2968607 - DNA, 25 bp, Homo sapien
cctttctagtctctccagctctgcc

SEQ ID NO: 2968608 - DNA, 25 bp, Homo sapien
ccctgatatgtagatttctaaccct

SEQ ID NO: 2968609 - DNA, 25 bp, Homo sapien
catttagcgttggatgatctttaaa

SEQ ID NO: 2968610 - DNA, 25 bp, Homo sapien
cctctacccaaaagatgtaacaaca

SEQ ID NO: 2968611 - DNA, 25 bp, Homo sapien
cttgtaaacttcactgaaacctcct

SEQ ID NO: 2968612 - DNA, 25 bp, Homo sapien
aatatctgtcatttagcgttggatg

SEQ ID NO: 2968613 - DNA, 25 bp, Homo sapien
gaagcactctaagccaggacactct

SEQ ID NO: 2968614 - DNA, 25 bp, Homo sapien
tgatgtcagtcgcacaacactgtag

SEQ ID NO: 2968615 - DNA, 25 bp, Homo sapien
caaaaccagtagagtagtgcactaa

SEQ ID NO: 2968616 - DNA, 25 bp, Homo sapien
tgaaagggacagctatgcaacaaag

SEQ ID NO: 2968617 - DNA, 25 bp, Homo sapien
caaaatattgggttagaggcagtag

SEQ ID NO: 2968618 - DNA, 25 bp, Homo sapien
atcatgaataccattatggcttcac

SEQ ID NO: 2968619 - DNA, 25 bp, Homo sapien
aacattaaataagccgggcgcgatg

SEQ ID NO: 2968620 - DNA, 25 bp, Homo sapien
tggcttcacagtagaaaaccatttc

SEQ ID NO: 2968621 - DNA, 25 bp, Homo sapien
tgacactgggactttacaagcttca

SEQ ID NO: 2968622 - DNA, 25 bp, Homo sapien
catacttatatcagtgttgcaagca

SEQ ID NO: 2968623 - DNA, 25 bp, Homo sapien
cactggcaccaagggatttagaaca

SEQ ID NO: 2968624 - DNA, 25 bp, Homo sapien
tgggacccgtctgccttaggttgtc

SEQ ID NO: 2968625 - DNA, 25 bp, Homo sapien
ggtgaattttcacagctacgtatct

SEQ ID NO: 2968626 - DNA, 25 bp, Homo sapien
tttcacagctacgtatctttgctct

SEQ ID NO: 2968627 - DNA, 25 bp, Homo sapien
gaattttcacagctacgtatctttg

SEQ ID NO: 2968628 - DNA, 25 bp, Homo sapien
aattttcacagctacgtatctttgc

SEQ ID NO: 2968629 - DNA, 25 bp, Homo sapien
tgactgaagtagcagaaacagccca

SEQ ID NO: 2968630 - DNA, 25 bp, Homo sapien
acagagaggctgaacaagtcaaaca

SEQ ID NO: 2968631 - DNA, 25 bp, Homo sapien
gaaggctgccactagtactattcta

SEQ ID NO: 2968632 - DNA, 25 bp, Homo sapien
tgtgaccgggaggagaacatagcac

SEQ ID NO: 2968633 - DNA, 25 bp, Homo sapien
agccctgttgctcttaatgtagcag

SEQ ID NO: 2968634 - DNA, 25 bp, Homo sapien
gcagggtgccacaggtcatcccttc

SEQ ID NO: 2968635 - DNA, 25 bp, Homo sapien
agggtgccacaggtcatcccttctc

SEQ ID NO: 2968636 - DNA, 25 bp, Homo sapien
tgttgctcttaatgtagcaggaacc

SEQ ID NO: 2968637 - DNA, 25 bp, Homo sapien
atttgataaaataagcgtgctgctg

SEQ ID NO: 2968638 - DNA, 25 bp, Homo sapien
ttgataaaataagcgtgctgctgtt

SEQ ID NO: 2968639 - DNA, 25 bp, Homo sapien
tttgataaaataagcgtgctgctgt

SEQ ID NO: 2968640 - DNA, 25 bp, Homo sapien
catttgataaaataagcgtgctgct

SEQ ID NO: 2968641 - DNA, 25 bp, Homo sapien
ggttaatcgctatgtccaaataatc

SEQ ID NO: 2968642 - DNA, 25 bp, Homo sapien
ctcctacacggagcttctgcaactg

SEQ ID NO: 2968643 - DNA, 25 bp, Homo sapien
ggtggcacctgattaagagggttaa

SEQ ID NO: 2968644 - DNA, 25 bp, Homo sapien
ccaaataatctcctacacggagctt

SEQ ID NO: 2968645 - DNA, 25 bp, Homo sapien
agtgagaccctatctcaaaaagaat

SEQ ID NO: 2968646 - DNA, 25 bp, Homo sapien
actttggcgggctgaagtgggaaga

SEQ ID NO: 2968647 - DNA, 25 bp, Homo sapien
ttgcttgagcccaggagttaaagac

SEQ ID NO: 2968648 - DNA, 25 bp, Homo sapien
cagcctgggcaacatagtgagaccc

SEQ ID NO: 2968649 - DNA, 25 bp, Homo sapien
gatccagctctttatgaatccggta

SEQ ID NO: 2968650 - DNA, 25 bp, Homo sapien
gaatccggtattccctacatgcatg

SEQ ID NO: 2968651 - DNA, 25 bp, Homo sapien
aagtaatcatacagcttaactattc

SEQ ID NO: 2968652 - DNA, 25 bp, Homo sapien
cagcttaactattctgggatgatcc

SEQ ID NO: 2968653 - DNA, 25 bp, Homo sapien
gattccatgcatatgagggtccaga

SEQ ID NO: 2968654 - DNA, 25 bp, Homo sapien
attccatgcatatgagggtccagaa

SEQ ID NO: 2968655 - DNA, 25 bp, Homo sapien
ttccatgcatatgagggtccagaat

SEQ ID NO: 2968656 - DNA, 25 bp, Homo sapien
catagtgtatgatgggaggttttat

SEQ ID NO: 2968657 - DNA, 25 bp, Homo sapien
gtcatagtgtatgatgggaggtttt

SEQ ID NO: 2968658 - DNA, 25 bp, Homo sapien
ctggtttgaggtcatagtgtatgat

SEQ ID NO: 2968659 - DNA, 25 bp, Homo sapien
tttgaggtcatagtgtatgatggga

SEQ ID NO: 2968660 - DNA, 25 bp, Homo sapien
tatcatcatccatgatcttcgaaag

SEQ ID NO: 2968661 - DNA, 25 bp, Homo sapien
catcatccatgatcttcgaaagacc

SEQ ID NO: 2968662 - DNA, 25 bp, Homo sapien
tcatcatccatgatcttcgaaagac

SEQ ID NO: 2968663 - DNA, 25 bp, Homo sapien
atcatcatccatgatcttcgaaaga

SEQ ID NO: 2968664 - DNA, 25 bp, Homo sapien
gattgtacatgtctggcaaatccct

SEQ ID NO: 2968665 - DNA, 25 bp, Homo sapien
aaaagacctgtcacttgattgtaca

SEQ ID NO: 2968666 - DNA, 25 bp, Homo sapien
gaataggagttgttgaactcatcca

SEQ ID NO: 2968667 - DNA, 25 bp, Homo sapien
tgacttttttatggcagtggcagga

SEQ ID NO: 2968668 - DNA, 25 bp, Homo sapien
gagatctttggtggttctttcccaa

SEQ ID NO: 2968669 - DNA, 25 bp, Homo sapien
ttgagatctttggtggttctttccc

SEQ ID NO: 2968670 - DNA, 25 bp, Homo sapien
cacaaaacactctggtggtaaatac

SEQ ID NO: 2968671 - DNA, 25 bp, Homo sapien
gaccacacatcaactttatttgaga

SEQ ID NO: 2968672 - DNA, 25 bp, Homo sapien
agacactgatagaagatcacaccca

SEQ ID NO: 2968673 - DNA, 25 bp, Homo sapien
gacactgatagaagatcacacccac

SEQ ID NO: 2968674 - DNA, 25 bp, Homo sapien
tcattaggtgccctagggttgagga

SEQ ID NO: 2968675 - DNA, 25 bp, Homo sapien
caatagactaatccataccaaggca

SEQ ID NO: 2968676 - DNA, 25 bp, Homo sapien
tgtgtgccacccaagaaagagatca

SEQ ID NO: 2968677 - DNA, 25 bp, Homo sapien
aacagccccgcagaactcattaggt

SEQ ID NO: 2968678 - DNA, 25 bp, Homo sapien
gattctggggatattttgagttttg

SEQ ID NO: 2968679 - DNA, 25 bp, Homo sapien
ccccaggttcttgggaagattgtat

SEQ ID NO: 2968680 - DNA, 25 bp, Homo sapien
caggttcttgggaagattgtatact

SEQ ID NO: 2968681 - DNA, 25 bp, Homo sapien
ggctggcgataaagattctggggat

SEQ ID NO: 2968682 - DNA, 25 bp, Homo sapien
ttctcttgtaggatgtcttgctgag

SEQ ID NO: 2968683 - DNA, 25 bp, Homo sapien
attctcttgtaggatgtcttgctga

SEQ ID NO: 2968684 - DNA, 25 bp, Homo sapien
cagagttcactgctacatattcgat

SEQ ID NO: 2968685 - DNA, 25 bp, Homo sapien
tctgtggacctgcaaaaagctcatt

SEQ ID NO: 2968686 - DNA, 25 bp, Homo sapien
tactttcccctgcagatctaacggc

SEQ ID NO: 2968687 - DNA, 25 bp, Homo sapien
tctaacggctcctgcaaatcatggc

SEQ ID NO: 2968688 - DNA, 25 bp, Homo sapien
cagaggcagatagtcttggcacccc

SEQ ID NO: 2968689 - DNA, 25 bp, Homo sapien
aagggctgagccattactgaaggga

SEQ ID NO: 2968690 - DNA, 25 bp, Homo sapien
taaggctctctatcggctgccaggg

SEQ ID NO: 2968691 - DNA, 25 bp, Homo sapien
gatgggaacgatctaacttcacggt

SEQ ID NO: 2968692 - DNA, 25 bp, Homo sapien
gatgtgaggcaacaagtagggatca

SEQ ID NO: 2968693 - DNA, 25 bp, Homo sapien
ctttcggtaggccaagcatcgtcga

SEQ ID NO: 2968694 - DNA, 25 bp, Homo sapien
caacaagtagggatcacaggccagc

SEQ ID NO: 2968695 - DNA, 25 bp, Homo sapien
ccagctgctggacatcaatgcggtc

SEQ ID NO: 2968696 - DNA, 25 bp, Homo sapien
gaactgttattggacgccccagagg

SEQ ID NO: 2968697 - DNA, 25 bp, Homo sapien
agaactgttattggacgccccagag

SEQ ID NO: 2968698 - DNA, 25 bp, Homo sapien
aactgttattggacgccccagaggt

SEQ ID NO: 2968699 - DNA, 25 bp, Homo sapien
gattcgctatgttccaaacccgctg

SEQ ID NO: 2968700 - DNA, 25 bp, Homo sapien
aaacccgctgctgaacgccatttgt

SEQ ID NO: 2968701 - DNA, 25 bp, Homo sapien
acagtttgtggccttggagtcagtc

SEQ ID NO: 2968702 - DNA, 25 bp, Homo sapien
gacactggactagcccagtctgtat

SEQ ID NO: 2968703 - DNA, 25 bp, Homo sapien
gcaattgcaaacaggagaccagacg

SEQ ID NO: 2968704 - DNA, 25 bp, Homo sapien
ggaatgaacattgccacgtacttgc

SEQ ID NO: 2968705 - DNA, 25 bp, Homo sapien
gagaaagctgcatctgattggaatg

SEQ ID NO: 2968706 - DNA, 25 bp, Homo sapien
cactaactctagtgcctttaacggg

SEQ ID NO: 2968707 - DNA, 25 bp, Homo sapien
gctgatcaagttttaataacgtggt

SEQ ID NO: 2968708 - DNA, 25 bp, Homo sapien
ttagcaagcacacaaagactatggg

SEQ ID NO: 2968709 - DNA, 25 bp, Homo sapien
gcctacctttggcatagcttcatag

SEQ ID NO: 2968710 - DNA, 25 bp, Homo sapien
taggaactactgatccctggagtgt

SEQ ID NO: 2968711 - DNA, 25 bp, Homo sapien
gtttgctgccaaaagatctaacaga

SEQ ID NO: 2968712 - DNA, 25 bp, Homo sapien
cacacacccacaaaattcagaggct

SEQ ID NO: 2968713 - DNA, 25 bp, Homo sapien
caggcccggcctgaaatatctattt

SEQ ID NO: 2968714 - DNA, 25 bp, Homo sapien
gagctagacaaagtgtgtgtgtaca

SEQ ID NO: 2968715 - DNA, 25 bp, Homo sapien
tcgacctgtgagaccctttgcttag

SEQ ID NO: 2968716 - DNA, 25 bp, Homo sapien
cagtaacattccaagctggcgacca

SEQ ID NO: 2968717 - DNA, 25 bp, Homo sapien
taagatcgcctgatactgaggagac

SEQ ID NO: 2968718 - DNA, 25 bp, Homo sapien
tccatgcctcggaagaaggtcttgc

SEQ ID NO: 2968719 - DNA, 25 bp, Homo sapien
ctgcactgaggatgaggccgagcca

SEQ ID NO: 2968720 - DNA, 25 bp, Homo sapien
ctctgagccacagctgtagttgggc

SEQ ID NO: 2968721 - DNA, 25 bp, Homo sapien
tgtccctgcactgaggatgaggccg

SEQ ID NO: 2968722 - DNA, 25 bp, Homo sapien
aaaccgcaatgcctctgagcctgtc

SEQ ID NO: 2968723 - DNA, 25 bp, Homo sapien
tcaggcaatccactccaagtccatc

SEQ ID NO: 2968724 - DNA, 25 bp, Homo sapien
ctcgtctacaccaccaaggatccta

SEQ ID NO: 2968725 - DNA, 25 bp, Homo sapien
ggctggcccaagtgggtctcaccct

SEQ ID NO: 2968726 - DNA, 25 bp, Homo sapien
gtccatctggctacaccctcgtcta

SEQ ID NO: 2968727 - DNA, 25 bp, Homo sapien
gggccggttccctactgcataaaga

SEQ ID NO: 2968728 - DNA, 25 bp, Homo sapien
tcctgtgcaggctcagttgtcaaca

SEQ ID NO: 2968729 - DNA, 25 bp, Homo sapien
ctccctgtggagaatccgggccggt

SEQ ID NO: 2968730 - DNA, 25 bp, Homo sapien
gagcagcatgggactttcgaggaac

SEQ ID NO: 2968731 - DNA, 25 bp, Homo sapien
gggtcagaaatgctcactcgtctct

SEQ ID NO: 2968732 - DNA, 25 bp, Homo sapien
tagccaccctttggttagcagccag

SEQ ID NO: 2968733 - DNA, 25 bp, Homo sapien
cagtccagtggtaatagagcctcga

SEQ ID NO: 2968734 - DNA, 25 bp, Homo sapien
tgcactccacggctagcttcagcag

SEQ ID NO: 2968735 - DNA, 25 bp, Homo sapien
tcagtgttcccggtgcaggagtgta

SEQ ID NO: 2968736 - DNA, 25 bp, Homo sapien
tggacgtctcagaagaccggcatca

SEQ ID NO: 2968737 - DNA, 25 bp, Homo sapien
accaactggactgctggccggtagc

SEQ ID NO: 2968738 - DNA, 25 bp, Homo sapien
tgtgcggagcgcaacaattcttgca

SEQ ID NO: 2968739 - DNA, 25 bp, Homo sapien
tggccaccagggcgaagattggggg

SEQ ID NO: 2968740 - DNA, 25 bp, Homo sapien
gccaccagggcgaagattgggggag

SEQ ID NO: 2968741 - DNA, 25 bp, Homo sapien
ggccaccagggcgaagattggggga

SEQ ID NO: 2968742 - DNA, 25 bp, Homo sapien
ccaccagggcgaagattgggggagg

SEQ ID NO: 2968743 - DNA, 25 bp, Homo sapien
tgggctgtgatgaccgcccgcaagg

SEQ ID NO: 2968744 - DNA, 25 bp, Homo sapien
aacgcgctgtggcagccccgaggct

SEQ ID NO: 2968745 - DNA, 25 bp, Homo sapien
ggaccgagggcgcacaggcgcaacg

SEQ ID NO: 2968746 - DNA, 25 bp, Homo sapien
cctccgggtcgggacgaagtgatgc

SEQ ID NO: 2968747 - DNA, 25 bp, Homo sapien
cgcagcaggtgacgaggccagggcg

SEQ ID NO: 2968748 - DNA, 25 bp, Homo sapien
gcgccgggacggccgaggtgcaggc

SEQ ID NO: 2968749 - DNA, 25 bp, Homo sapien
cgaggtgcaggcacccgaggagcag

SEQ ID NO: 2968750 - DNA, 25 bp, Homo sapien
cgaggagcaggacgcagcgcagcag

SEQ ID NO: 2968751 - DNA, 25 bp, Homo sapien
ctgtcccacattcaatgccaggtgg

SEQ ID NO: 2968752 - DNA, 25 bp, Homo sapien
ccaggtgggcccagaattgccccgg

SEQ ID NO: 2968753 - DNA, 25 bp, Homo sapien
catctggcagatatgtgtcttgtgc

SEQ ID NO: 2968754 - DNA, 25 bp, Homo sapien
ggtctccggttggtgtgaatgtggg

SEQ ID NO: 2968755 - DNA, 25 bp, Homo sapien
agggcaggggcaagcgcactctgtg

SEQ ID NO: 2968756 - DNA, 25 bp, Homo sapien
gctgccagctcttcgggcaaggaat

SEQ ID NO: 2968757 - DNA, 25 bp, Homo sapien
gctcttcgggcaaggaattcggccc

SEQ ID NO: 2968758 - DNA, 25 bp, Homo sapien
caaggaattcggcccagaggctctg

SEQ ID NO: 2968759 - DNA, 25 bp, Homo sapien
gaccaatgtaaatgatcagacccct

SEQ ID NO: 2968760 - DNA, 25 bp, Homo sapien
gcaaactgcatgctccagaaatgcg

SEQ ID NO: 2968761 - DNA, 25 bp, Homo sapien
aacttgcacatgaagggttgagcgt

SEQ ID NO: 2968762 - DNA, 25 bp, Homo sapien
tatggcaactaacaaagaggactcc

SEQ ID NO: 2968763 - DNA, 25 bp, Homo sapien
gcaatgccgataaaagacaacaagg

SEQ ID NO: 2968764 - DNA, 25 bp, Homo sapien
gacaaatggagaaatcctaacacgg

SEQ ID NO: 2968765 - DNA, 25 bp, Homo sapien
cctaacacggactgcatatgagaaa

SEQ ID NO: 2968766 - DNA, 25 bp, Homo sapien
tccaggaacgagtaaacaatcagac

SEQ ID NO: 2968767 - DNA, 25 bp, Homo sapien
tcacaagcaaaagatgcccgctgcc

SEQ ID NO: 2968768 - DNA, 25 bp, Homo sapien
tgatcacaagcaaaagatgcccgct

SEQ ID NO: 2968769 - DNA, 25 bp, Homo sapien
cacaagcaaaagatgcccgctgcca

SEQ ID NO: 2968770 - DNA, 25 bp, Homo sapien
gatcacaagcaaaagatgcccgctg

SEQ ID NO: 2968771 - DNA, 25 bp, Homo sapien
ttcaggtctgagcaaggagtctggt

SEQ ID NO: 2968772 - DNA, 25 bp, Homo sapien
tgggtgccttcagaggcatgaagtt

SEQ ID NO: 2968773 - DNA, 25 bp, Homo sapien
tgaagttgacgtaggtcaagcacct

SEQ ID NO: 2968774 - DNA, 25 bp, Homo sapien
cctgactgggatccacatccgactt

SEQ ID NO: 2968775 - DNA, 25 bp, Homo sapien
gggattggctgcctcacttccgcaa

SEQ ID NO: 2968776 - DNA, 25 bp, Homo sapien
tcacttccgcaagcctcgatttggg

SEQ ID NO: 2968777 - DNA, 25 bp, Homo sapien
gattggctgcctcacttccgcaagc

SEQ ID NO: 2968778 - DNA, 25 bp, Homo sapien
caagcctcgatttgggaaggacacg

SEQ ID NO: 2968779 - DNA, 25 bp, Homo sapien
gccaaaataaacagcccaagagcca

SEQ ID NO: 2968780 - DNA, 25 bp, Homo sapien
gacaaatgcccggtctgcgtggccg

SEQ ID NO: 2968781 - DNA, 25 bp, Homo sapien
tttctgggccaacgatccaacctca

SEQ ID NO: 2968782 - DNA, 25 bp, Homo sapien
tccagtcgcggcaggaagtggcttt

SEQ ID NO: 2968783 - DNA, 25 bp, Homo sapien
ggcagggaggctggtattgcaagcc

SEQ ID NO: 2968784 - DNA, 25 bp, Homo sapien
ttgcaagccggggtgactctgacct

SEQ ID NO: 2968785 - DNA, 25 bp, Homo sapien
caagccggggtgactctgacctgcc

SEQ ID NO: 2968786 - DNA, 25 bp, Homo sapien
caggttgaatagccggtttcgggag

SEQ ID NO: 2968787 - DNA, 25 bp, Homo sapien
gccagcctgtgcccaggcactgcat

SEQ ID NO: 2968788 - DNA, 25 bp, Homo sapien
gcccagggaggccgtggtgttggtg

SEQ ID NO: 2968789 - DNA, 25 bp, Homo sapien
aggccgtggtgttggtgcctggcca

SEQ ID NO: 2968790 - DNA, 25 bp, Homo sapien
tgcctggccagcctgtgcccaggca

SEQ ID NO: 2968791 - DNA, 25 bp, Homo sapien
tggtcaccacgctcaagggtgccag

SEQ ID NO: 2968792 - DNA, 25 bp, Homo sapien
tacgacaatgccagcgaagattcag

SEQ ID NO: 2968793 - DNA, 25 bp, Homo sapien
gctggtcacccagtgtacgacaatg

SEQ ID NO: 2968794 - DNA, 25 bp, Homo sapien
gaagattcagtgcttcccggtcaca

SEQ ID NO: 2968795 - DNA, 25 bp, Homo sapien
gggactatgatgggcatgctccacc

SEQ ID NO: 2968796 - DNA, 25 bp, Homo sapien
gctgggactatgatgggcatgctcc

SEQ ID NO: 2968797 - DNA, 25 bp, Homo sapien
gactatgatgggcatgctccaccac

SEQ ID NO: 2968798 - DNA, 25 bp, Homo sapien
agctgggactatgatgggcatgctc

SEQ ID NO: 2968799 - DNA, 25 bp, Homo sapien
cgtctttgccgtagtcctgggtggt

SEQ ID NO: 2968800 - DNA, 25 bp, Homo sapien
tggtgcagccgtggaaccactggtt

SEQ ID NO: 2968801 - DNA, 25 bp, Homo sapien
gtgcacggctttccgtgggagtttc

SEQ ID NO: 2968802 - DNA, 25 bp, Homo sapien
ctttccgtgggagtttccctggatg

SEQ ID NO: 2968803 - DNA, 25 bp, Homo sapien
tccctccaggaacactgcccccgcc

SEQ ID NO: 2968804 - DNA, 25 bp, Homo sapien
cagcctccctccaggaacactgccc

SEQ ID NO: 2968805 - DNA, 25 bp, Homo sapien
ccccggggcccctcagcaccagcct

SEQ ID NO: 2968806 - DNA, 25 bp, Homo sapien
tccaggaacactgcccccgccccca

SEQ ID NO: 2968807 - DNA, 25 bp, Homo sapien
ctgccaccacgacagccctctcctt

SEQ ID NO: 2968808 - DNA, 25 bp, Homo sapien
gcgtggactggaagttaaactggta

SEQ ID NO: 2968809 - DNA, 25 bp, Homo sapien
tgtcccagaaggtctcgcagtcgtt

SEQ ID NO: 2968810 - DNA, 25 bp, Homo sapien
cgttgatgtaggtctgctcgtggat

SEQ ID NO: 2968811 - DNA, 25 bp, Homo sapien
tccctccacgacagcgtggactgga

SEQ ID NO: 2968812 - DNA, 25 bp, Homo sapien
ggcgagttgtccgaccactgccagc

SEQ ID NO: 2968813 - DNA, 25 bp, Homo sapien
agcctccgctcgtgtccaagtcatt

SEQ ID NO: 2968814 - DNA, 25 bp, Homo sapien
cactctcccagttgaggtacttgag

SEQ ID NO: 2968815 - DNA, 25 bp, Homo sapien
tcattcaagccgatccacagggtgg

SEQ ID NO: 2968816 - DNA, 25 bp, Homo sapien
gtgcggatcactccacagttctcct

SEQ ID NO: 2968817 - DNA, 25 bp, Homo sapien
agtcacggttctgccagccgcccga

SEQ ID NO: 2968818 - DNA, 25 bp, Homo sapien
tgggctcggccgtggcgttgggctt

SEQ ID NO: 2968819 - DNA, 25 bp, Homo sapien
cagccgcccgaggactcagtgcgga

SEQ ID NO: 2968820 - DNA, 25 bp, Homo sapien
acttagactcaatttgaaaggccca

SEQ ID NO: 2968821 - DNA, 25 bp, Homo sapien
tccctagtagacaggcgtgcatcac

SEQ ID NO: 2968822 - DNA, 25 bp, Homo sapien
tcaccaccccttaaagctgcagtgt

SEQ ID NO: 2968823 - DNA, 25 bp, Homo sapien
gtagttctaggcctccacacctttg

SEQ ID NO: 2968824 - DNA, 25 bp, Homo sapien
gacgggcaaccgagaacattaggag

SEQ ID NO: 2968825 - DNA, 25 bp, Homo sapien
gaaacgggaccttgagccactaatg

SEQ ID NO: 2968826 - DNA, 25 bp, Homo sapien
cattaggaggtgctcaaagtcacta

SEQ ID NO: 2968827 - DNA, 25 bp, Homo sapien
tcaataaacgatgggtagaaaggac

SEQ ID NO: 2968828 - DNA, 25 bp, Homo sapien
ccaccgccccgtagacatgccttct

SEQ ID NO: 2968829 - DNA, 25 bp, Homo sapien
tgcaggcggtagcagtggccctgga

SEQ ID NO: 2968830 - DNA, 25 bp, Homo sapien
ccagctccgccatgctgtggatgct

SEQ ID NO: 2968831 - DNA, 25 bp, Homo sapien
actcctgccagctgcgcttctcggc

SEQ ID NO: 2968832 - DNA, 25 bp, Homo sapien
aaggctcccgtcagaccactcaaaa

SEQ ID NO: 2968833 - DNA, 25 bp, Homo sapien
tgtcccggaagttgttgggctcaaa

SEQ ID NO: 2968834 - DNA, 25 bp, Homo sapien
cagtttcaaatcgttgaggccgatc

SEQ ID NO: 2968835 - DNA, 25 bp, Homo sapien
agtcctccagactgtcccggaagtt

SEQ ID NO: 2968836 - DNA, 25 bp, Homo sapien
gagtgcagccctgcttgcaaagtat

SEQ ID NO: 2968837 - DNA, 25 bp, Homo sapien
ctgcacataatgtgggttctgatgc

SEQ ID NO: 2968838 - DNA, 25 bp, Homo sapien
tgcagccctgcttgcaaagtatctg

SEQ ID NO: 2968839 - DNA, 25 bp, Homo sapien
cagagtgcagccctgcttgcaaagt

SEQ ID NO: 2968840 - DNA, 25 bp, Homo sapien
ttgagatgacaggaccctggactgg

SEQ ID NO: 2968841 - DNA, 25 bp, Homo sapien
cacatctaagcccaaaccatggcaa

SEQ ID NO: 2968842 - DNA, 25 bp, Homo sapien
tggcaaattgtcataaaacccaaca

SEQ ID NO: 2968843 - DNA, 25 bp, Homo sapien
ttcacttacaccacatctaagccca

SEQ ID NO: 2968844 - DNA, 25 bp, Homo sapien
ctgccttcttgcagatggatggcaa

SEQ ID NO: 2968845 - DNA, 25 bp, Homo sapien
gatggcaaggactggttacagggac

SEQ ID NO: 2968846 - DNA, 25 bp, Homo sapien
agggactgtcgttccagcggccttc

SEQ ID NO: 2968847 - DNA, 25 bp, Homo sapien
tggttacagggactgtcgttccagc

SEQ ID NO: 2968848 - DNA, 25 bp, Homo sapien
ttagtgtttcctgctcattttctgg

SEQ ID NO: 2968849 - DNA, 25 bp, Homo sapien
tagtgtttcctgctcattttctggg

SEQ ID NO: 2968850 - DNA, 25 bp, Homo sapien
tgttagtgtttcctgctcattttct

SEQ ID NO: 2968851 - DNA, 25 bp, Homo sapien
gcctgttagtgtttcctgctcattt

SEQ ID NO: 2968852 - DNA, 25 bp, Homo sapien
ccacagactccgcagctgggctctg

SEQ ID NO: 2968853 - DNA, 25 bp, Homo sapien
ctgtccttgccagtccacagactcc

SEQ ID NO: 2968854 - DNA, 25 bp, Homo sapien
gtccacagactccgcagctgggctc

SEQ ID NO: 2968855 - DNA, 25 bp, Homo sapien
ctcttcgcagccatgacacagcccc

SEQ ID NO: 2968856 - DNA, 25 bp, Homo sapien
ccggctcgggaagatgaatggccct

SEQ ID NO: 2968857 - DNA, 25 bp, Homo sapien
cccagcgtggctgattggcaggcca

SEQ ID NO: 2968858 - DNA, 25 bp, Homo sapien
gcctggcaaagctggagtcggcgca

SEQ ID NO: 2968859 - DNA, 25 bp, Homo sapien
cacagtggggaaattactgttggct

SEQ ID NO: 2968860 - DNA, 25 bp, Homo sapien
ctcgtttctccacattccccctcca

SEQ ID NO: 2968861 - DNA, 25 bp, Homo sapien
tcgtttctccacattccccctccac

SEQ ID NO: 2968862 - DNA, 25 bp, Homo sapien
gatgactctccaccctcacccataa

SEQ ID NO: 2968863 - DNA, 25 bp, Homo sapien
tgtagggaagatgactctccaccct

SEQ ID NO: 2968864 - DNA, 25 bp, Homo sapien
ctgtagggaagatgactctccaccc

SEQ ID NO: 2968865 - DNA, 25 bp, Homo sapien
gactctccaccctcacccataaatc

SEQ ID NO: 2968866 - DNA, 25 bp, Homo sapien
gctcaagagtggacagaagaggggt

SEQ ID NO: 2968867 - DNA, 25 bp, Homo sapien
ctggctcaagagtggacagaagagg

SEQ ID NO: 2968868 - DNA, 25 bp, Homo sapien
tggctcaagagtggacagaagaggg

SEQ ID NO: 2968869 - DNA, 25 bp, Homo sapien
tcaagagtggacagaagaggggtgt

SEQ ID NO: 2968870 - DNA, 25 bp, Homo sapien
tgagagccatggtcagtgcacaggc

SEQ ID NO: 2968871 - DNA, 25 bp, Homo sapien
gctgagagccatggtcagtgcacag

SEQ ID NO: 2968872 - DNA, 25 bp, Homo sapien
ctgagagccatggtcagtgcacagg

SEQ ID NO: 2968873 - DNA, 25 bp, Homo sapien
agagccatggtcagtgcacaggcgc

SEQ ID NO: 2968874 - DNA, 25 bp, Homo sapien
cccggttccagtgggtgtacatgac

SEQ ID NO: 2968875 - DNA, 25 bp, Homo sapien
tggtcccggttccagtgggtgtaca

SEQ ID NO: 2968876 - DNA, 25 bp, Homo sapien
tcgccctcccagttgtagatgaggc

SEQ ID NO: 2968877 - DNA, 25 bp, Homo sapien
tgcagggccgtccagaagtactcgc

SEQ ID NO: 2968878 - DNA, 25 bp, Homo sapien
tcctcgcttcaccaaggcaagtcaa

SEQ ID NO: 2968879 - DNA, 25 bp, Homo sapien
ttcaccaaggcaagtcaaataaggg

SEQ ID NO: 2968880 - DNA, 25 bp, Homo sapien
gcttcaccaaggcaagtcaaataag

SEQ ID NO: 2968881 - DNA, 25 bp, Homo sapien
tcgcttcaccaaggcaagtcaaata

SEQ ID NO: 2968882 - DNA, 25 bp, Homo sapien
ggcgtgggatctggccccggcagct

SEQ ID NO: 2968883 - DNA, 25 bp, Homo sapien
ctctgccggcagatgtagcgggccc

SEQ ID NO: 2968884 - DNA, 25 bp, Homo sapien
caataccggagtttggtgtccgagg

SEQ ID NO: 2968885 - DNA, 25 bp, Homo sapien
cttatagcaataccggagtttggtg

SEQ ID NO: 2968886 - DNA, 25 bp, Homo sapien
ttgagcatgttggccacaaagtgct

SEQ ID NO: 2968887 - DNA, 25 bp, Homo sapien
ggccacaaagtgctcctcctcgtag

SEQ ID NO: 2968888 - DNA, 25 bp, Homo sapien
gttgagcatgttggccacaaagtgc

SEQ ID NO: 2968889 - DNA, 25 bp, Homo sapien
gccgtcgctccagcgccaactctga

SEQ ID NO: 2968890 - DNA, 25 bp, Homo sapien
ctctgggatcccgacggttcaggcc

SEQ ID NO: 2968891 - DNA, 25 bp, Homo sapien
ctgctcgtggatctcgggttctgat

SEQ ID NO: 2968892 - DNA, 25 bp, Homo sapien
gttcaggccgatccagaaccagtgc

SEQ ID NO: 2968893 - DNA, 25 bp, Homo sapien
cttgcagatccagtccagctgtgtg

SEQ ID NO: 2968894 - DNA, 25 bp, Homo sapien
agcaccgcacagcctcggatgtcgt

SEQ ID NO: 2968895 - DNA, 25 bp, Homo sapien
ccagctgtgtgtcgcactgcatggc

SEQ ID NO: 2968896 - DNA, 25 bp, Homo sapien
tgccggctccggtcgaaattgtggt

SEQ ID NO: 2968897 - DNA, 25 bp, Homo sapien
gtcccccagcgccactccggccaac

SEQ ID NO: 2968898 - DNA, 25 bp, Homo sapien
tcccgcgtcccccagcgccactccg

SEQ ID NO: 2968899 - DNA, 25 bp, Homo sapien
catcccgcgtcccccagcgccactc

SEQ ID NO: 2968900 - DNA, 25 bp, Homo sapien
ccgcgtcccccagcgccactccggc

SEQ ID NO: 2968901 - DNA, 25 bp, Homo sapien
ctgtcgtcgggctcccgcacgtccg

SEQ ID NO: 2968902 - DNA, 25 bp, Homo sapien
tgtcgtcgggctcccgcacgtccgt

SEQ ID NO: 2968903 - DNA, 25 bp, Homo sapien
gctgtcgtcgggctcccgcacgtcc

SEQ ID NO: 2968904 - DNA, 25 bp, Homo sapien
tcgtcgggctcccgcacgtccgtac

SEQ ID NO: 2968905 - DNA, 25 bp, Homo sapien
cccacgcgatgggtagcgggatggg

SEQ ID NO: 2968906 - DNA, 25 bp, Homo sapien
ctctcccacgcgatgggtagcggga

SEQ ID NO: 2968907 - DNA, 25 bp, Homo sapien
cccagagttgacgccctctcccacg

SEQ ID NO: 2968908 - DNA, 25 bp, Homo sapien
cacgcgatgggtagcgggatgggct

SEQ ID NO: 2968909 - DNA, 25 bp, Homo sapien
tgcaggcacaccggacccaggcagg

SEQ ID NO: 2968910 - DNA, 25 bp, Homo sapien
cacaccggacccaggcaggcaccgt

SEQ ID NO: 2968911 - DNA, 25 bp, Homo sapien
caggcacaccggacccaggcaggca

SEQ ID NO: 2968912 - DNA, 25 bp, Homo sapien
aggcacaccggacccaggcaggcac

SEQ ID NO: 2968913 - DNA, 25 bp, Homo sapien
caggagcagcgcgggcgtgggagcg

SEQ ID NO: 2968914 - DNA, 25 bp, Homo sapien
aggagcagcgcgggcgtgggagcgg

SEQ ID NO: 2968915 - DNA, 25 bp, Homo sapien
agcagcgcgggcgtgggagcggcgg

SEQ ID NO: 2968916 - DNA, 25 bp, Homo sapien
ctgcaggagcagcgcgggcgtggga

SEQ ID NO: 2968917 - DNA, 25 bp, Homo sapien
tggaagcgcagccattcccgtcggc

SEQ ID NO: 2968918 - DNA, 25 bp, Homo sapien
ctggaagcgcagccattcccgtcgg

SEQ ID NO: 2968919 - DNA, 25 bp, Homo sapien
cacgtggagtggtgctcaaagaact

SEQ ID NO: 2968920 - DNA, 25 bp, Homo sapien
accacgtgcagatgcgctgcgcctg

SEQ ID NO: 2968921 - DNA, 25 bp, Homo sapien
gcctggctgtgcaccgaggtcagct

SEQ ID NO: 2968922 - DNA, 25 bp, Homo sapien
caggaagtctagctccgcctggctg

SEQ ID NO: 2968923 - DNA, 25 bp, Homo sapien
tcagaggtgtgcaggccgatccacc

SEQ ID NO: 2968924 - DNA, 25 bp, Homo sapien
gcccatcgctctcagaggtgtgcag

SEQ ID NO: 2968925 - DNA, 25 bp, Homo sapien
ggtgtgcaggccgatccaccagtgc

SEQ ID NO: 2968926 - DNA, 25 bp, Homo sapien
ctgaagcgcccatcgctctcagagg

SEQ ID NO: 2968927 - DNA, 25 bp, Homo sapien
gatgcagcaatgaaggccgcaggaa

SEQ ID NO: 2968928 - DNA, 25 bp, Homo sapien
gctcagggcagtcaaagacccaagg

SEQ ID NO: 2968929 - DNA, 25 bp, Homo sapien
tgcctctagataaggccccagctgt

SEQ ID NO: 2968930 - DNA, 25 bp, Homo sapien
ccccagtacatggtaagtaggcacc

SEQ ID NO: 2968931 - DNA, 25 bp, Homo sapien
gctggctgtcatgtacacgcacttc

SEQ ID NO: 2968932 - DNA, 25 bp, Homo sapien
ttgtccttgccgacaggccgaggtt

SEQ ID NO: 2968933 - DNA, 25 bp, Homo sapien
agtttataatggaaccatctgtcca

SEQ ID NO: 2968934 - DNA, 25 bp, Homo sapien
caggccgaggtttgcctggtgccca

SEQ ID NO: 2968935 - DNA, 25 bp, Homo sapien
ggcctgtgtccagctccgaattcaa

SEQ ID NO: 2968936 - DNA, 25 bp, Homo sapien
gagacaggtccacccctcgctgagt

SEQ ID NO: 2968937 - DNA, 25 bp, Homo sapien
ccgaattcaagtcttctggaccatg

SEQ ID NO: 2968938 - DNA, 25 bp, Homo sapien
gtgtccagctccgaattcaagtctt

SEQ ID NO: 2968939 - DNA, 25 bp, Homo sapien
tgctgcgcttgcagatgtagggcaa

SEQ ID NO: 2968940 - DNA, 25 bp, Homo sapien
ggctgcgtttctttggtgacgttgc

SEQ ID NO: 2968941 - DNA, 25 bp, Homo sapien
ttggtgacgttgctgcgcttgcaga

SEQ ID NO: 2968942 - DNA, 25 bp, Homo sapien
cgtttctttggtgacgttgctgcgc

SEQ ID NO: 2968943 - DNA, 25 bp, Homo sapien
gattggaaggtgctactacagtgag

SEQ ID NO: 2968944 - DNA, 25 bp, Homo sapien
tggacaaccttgcttcccggaggat

SEQ ID NO: 2968945 - DNA, 25 bp, Homo sapien
gcaatcactgatctagaacactcac

SEQ ID NO: 2968946 - DNA, 25 bp, Homo sapien
tctagaacactcaccaaattatttg

SEQ ID NO: 2968947 - DNA, 25 bp, Homo sapien
ttactaataggagttcattatcaaa

SEQ ID NO: 2968948 - DNA, 25 bp, Homo sapien
ttgttttactaataggagttcatta

SEQ ID NO: 2968949 - DNA, 25 bp, Homo sapien
gttttactaataggagttcattatc

SEQ ID NO: 2968950 - DNA, 25 bp, Homo sapien
ttttactaataggagttcattatca

SEQ ID NO: 2968951 - DNA, 25 bp, Homo sapien
aaaatatggacccttcaggaatttg

SEQ ID NO: 2968952 - DNA, 25 bp, Homo sapien
ttcactttttgtacatgtgctgcca

SEQ ID NO: 2968953 - DNA, 25 bp, Homo sapien
tgtttcactttttgtacatgtgctg

SEQ ID NO: 2968954 - DNA, 25 bp, Homo sapien
aggaatttgcatagcatccttgtgc

SEQ ID NO: 2968955 - DNA, 25 bp, Homo sapien
tcacaggagaactgtgcctctgacc

SEQ ID NO: 2968956 - DNA, 25 bp, Homo sapien
ggagaactgtgcctctgaccacttc

SEQ ID NO: 2968957 - DNA, 25 bp, Homo sapien
gagaactgtgcctctgaccacttca

SEQ ID NO: 2968958 - DNA, 25 bp, Homo sapien
cttgctctaaggggtttgtgatggt

SEQ ID NO: 2968959 - DNA, 25 bp, Homo sapien
cccaggtgcccagttggcatacatc

SEQ ID NO: 2968960 - DNA, 25 bp, Homo sapien
aggccaatccaaaggtcaaaggtca

SEQ ID NO: 2968961 - DNA, 25 bp, Homo sapien
tggaagtccctctgcgaggcatgga

SEQ ID NO: 2968962 - DNA, 25 bp, Homo sapien
acccactggaagtccctctgcgagg

SEQ ID NO: 2968963 - DNA, 25 bp, Homo sapien
gtgcagctccgatcgtcccagcggc

SEQ ID NO: 2968964 - DNA, 25 bp, Homo sapien
cccagcggccagtgaagtgggctga

SEQ ID NO: 2968965 - DNA, 25 bp, Homo sapien
ccgatcgtcccagcggccagtgaag

SEQ ID NO: 2968966 - DNA, 25 bp, Homo sapien
ggtctcctccgtgcagctccgatcg

SEQ ID NO: 2968967 - DNA, 25 bp, Homo sapien
agggaaggggtcagggttcaggctg

SEQ ID NO: 2968968 - DNA, 25 bp, Homo sapien
gccaggagaaggccgcacaccaggc

SEQ ID NO: 2968969 - DNA, 25 bp, Homo sapien
ggccaggagaaggccgcacaccagg

SEQ ID NO: 2968970 - DNA, 25 bp, Homo sapien
cagggaaggggtcagggttcaggct

SEQ ID NO: 2968971 - DNA, 25 bp, Homo sapien
agccagcccaatccagagcggcgtg

SEQ ID NO: 2968972 - DNA, 25 bp, Homo sapien
ttgaggtaggagagctcagtgcccg

SEQ ID NO: 2968973 - DNA, 25 bp, Homo sapien
tggcattgcggctctcacacagcag

SEQ ID NO: 2968974 - DNA, 25 bp, Homo sapien
gcagccggaaggtgccgttgaggta

SEQ ID NO: 2968975 - DNA, 25 bp, Homo sapien
agacccaggagtaccgccgagagcc

SEQ ID NO: 2968976 - DNA, 25 bp, Homo sapien
gtccacatctacgtaggtacagccc

SEQ ID NO: 2968977 - DNA, 25 bp, Homo sapien
tgtcacagctggtggtgcgccaggc

SEQ ID NO: 2968978 - DNA, 25 bp, Homo sapien
ccacgtagttcagcggctcctctga

SEQ ID NO: 2968979 - DNA, 25 bp, Homo sapien
ccggaagggaatccacgcggagtct

SEQ ID NO: 2968980 - DNA, 25 bp, Homo sapien
tggcagcgctgtcgcgcctccttgt

SEQ ID NO: 2968981 - DNA, 25 bp, Homo sapien
ccacgcggagtctgccagtccctgg

SEQ ID NO: 2968982 - DNA, 25 bp, Homo sapien
aatagcagtgctcccggaagggaat

SEQ ID NO: 2968983 - DNA, 25 bp, Homo sapien
tccatctcatccaggatagacagga

SEQ ID NO: 2968984 - DNA, 25 bp, Homo sapien
tctcatccaggatagacaggacggc

SEQ ID NO: 2968985 - DNA, 25 bp, Homo sapien
atccaggatagacaggacggcccca

SEQ ID NO: 2968986 - DNA, 25 bp, Homo sapien
cattctccatctcatccaggataga

SEQ ID NO: 2968987 - DNA, 25 bp, Homo sapien
cagtagcagctgttgtggctcagca

SEQ ID NO: 2968988 - DNA, 25 bp, Homo sapien
gggcccccagttggagtagttcaca

SEQ ID NO: 2968989 - DNA, 25 bp, Homo sapien
gccatagcccgctgttgctctgaat

SEQ ID NO: 2968990 - DNA, 25 bp, Homo sapien
gcttgcagacgacacccatggtgat

SEQ ID NO: 2968991 - DNA, 25 bp, Homo sapien
tgatggggagaagctgctctgctca

SEQ ID NO: 2968992 - DNA, 25 bp, Homo sapien
ctgatggggagaagctgctctgctc

SEQ ID NO: 2968993 - DNA, 25 bp, Homo sapien
gatggggagaagctgctctgctcag

SEQ ID NO: 2968994 - DNA, 25 bp, Homo sapien
atgagggctgcggtcagcaaggcca

SEQ ID NO: 2968995 - DNA, 25 bp, Homo sapien
ggctgtagcgggcaccctcaaaggc

SEQ ID NO: 2968996 - DNA, 25 bp, Homo sapien
cctccggtaaaggatgagggctgcg

SEQ ID NO: 2968997 - DNA, 25 bp, Homo sapien
gctcgatgctctggcgcctccggta

SEQ ID NO: 2968998 - DNA, 25 bp, Homo sapien
gctcctcgggctctgcaaagaaggg

SEQ ID NO: 2968999 - DNA, 25 bp, Homo sapien
gagagacacaacagatctgcccgag

SEQ ID NO: 2969000 - DNA, 25 bp, Homo sapien
acaggagtgatggatgctcagcccc

SEQ ID NO: 2969001 - DNA, 25 bp, Homo sapien
gaaagggccatgtcttcgagtccat

SEQ ID NO: 2969002 - DNA, 25 bp, Homo sapien
tccttgggcacagaaacggtcccag

SEQ ID NO: 2969003 - DNA, 25 bp, Homo sapien
agaaaacggaggcagtggctagccc

SEQ ID NO: 2969004 - DNA, 25 bp, Homo sapien
gatagataacgatcagctggcacag

SEQ ID NO: 2969005 - DNA, 25 bp, Homo sapien
ggcaaccaggacctgctactctaga

SEQ ID NO: 2969006 - DNA, 25 bp, Homo sapien
tctttgggagcctggtggcaaacct

SEQ ID NO: 2969007 - DNA, 25 bp, Homo sapien
tcgcggacacgtgccaatgcttctg

SEQ ID NO: 2969008 - DNA, 25 bp, Homo sapien
gaggcctcgcttttcatccaatcag

SEQ ID NO: 2969009 - DNA, 25 bp, Homo sapien
gctctcaccaatggatccaccgtgg

SEQ ID NO: 2969010 - DNA, 25 bp, Homo sapien
tcagaatctaaggagagaacacaca

SEQ ID NO: 2969011 - DNA, 25 bp, Homo sapien
tagcctctaaactagcttctgggaa

SEQ ID NO: 2969012 - DNA, 25 bp, Homo sapien
cagtcggatgaaatggagcgctgcc

SEQ ID NO: 2969013 - DNA, 25 bp, Homo sapien
gattaagacactcctttcctagaag

SEQ ID NO: 2969014 - DNA, 25 bp, Homo sapien
tttcgttagttcttatcttcatcag

SEQ ID NO: 2969015 - DNA, 25 bp, Homo sapien
tattcgggagattgtgtccaggttt

SEQ ID NO: 2969016 - DNA, 25 bp, Homo sapien
ccaggtttattggttcatcatccac

SEQ ID NO: 2969017 - DNA, 25 bp, Homo sapien
ccagccgcttacattctggaatgct

SEQ ID NO: 2969018 - DNA, 25 bp, Homo sapien
tctgctgggtataaggatctctgac

SEQ ID NO: 2969019 - DNA, 25 bp, Homo sapien
gaataccacacccttaagtctgctg

SEQ ID NO: 2969020 - DNA, 25 bp, Homo sapien
gaaaaggttgctatctccctagaga

SEQ ID NO: 2969021 - DNA, 25 bp, Homo sapien
tagagaatgaaccagtccacacttg

SEQ ID NO: 2969022 - DNA, 25 bp, Homo sapien
aatgactgagaacgcccctgataga

SEQ ID NO: 2969023 - DNA, 25 bp, Homo sapien
tgtgtaacactaagctgaagaggcc

SEQ ID NO: 2969024 - DNA, 25 bp, Homo sapien
tatttcccagtaaacagtgcacacg

SEQ ID NO: 2969025 - DNA, 25 bp, Homo sapien
gtgaaaatgcgaaaaagagccctct

SEQ ID NO: 2969026 - DNA, 25 bp, Homo sapien
cagtcatttgtgtggcttccgccta

SEQ ID NO: 2969027 - DNA, 25 bp, Homo sapien
ggtatcaagttttatggctcaagca

SEQ ID NO: 2969028 - DNA, 25 bp, Homo sapien
taaggtcaaagaggcatgaatcgtg

SEQ ID NO: 2969029 - DNA, 25 bp, Homo sapien
taattcaggtttcgaaaggccagtg

SEQ ID NO: 2969030 - DNA, 25 bp, Homo sapien
ttctttttcgtgttggaccagagca

SEQ ID NO: 2969031 - DNA, 25 bp, Homo sapien
gcctgggctctaatgtcggttctgc

SEQ ID NO: 2969032 - DNA, 25 bp, Homo sapien
gactgattacgaagaggcctgggct

SEQ ID NO: 2969033 - DNA, 25 bp, Homo sapien
tcctctgcagaggtcgaactccagg

SEQ ID NO: 2969034 - DNA, 25 bp, Homo sapien
tatgcacagctcgagtttatccaga

SEQ ID NO: 2969035 - DNA, 25 bp, Homo sapien
cttgtatcagatgcattaacggcca

SEQ ID NO: 2969036 - DNA, 25 bp, Homo sapien
tgacactgacatcgctttctgaagc

SEQ ID NO: 2969037 - DNA, 25 bp, Homo sapien
ttgcccacggctcgatgatcagtcc

SEQ ID NO: 2969038 - DNA, 25 bp, Homo sapien
cattatcctgactcagagggcgccg

SEQ ID NO: 2969039 - DNA, 25 bp, Homo sapien
taatacaaatgaactggctgggaag

SEQ ID NO: 2969040 - DNA, 25 bp, Homo sapien
tcagaagagtgctaacaagcccgcc

SEQ ID NO: 2969041 - DNA, 25 bp, Homo sapien
cagaagggacgttgcacagtgatac

SEQ ID NO: 2969042 - DNA, 25 bp, Homo sapien
gccttctctgacacaaccctggtgg

SEQ ID NO: 2969043 - DNA, 25 bp, Homo sapien
gaggaaagacaccaacccattactg

SEQ ID NO: 2969044 - DNA, 25 bp, Homo sapien
taagggtggaatcgtaggctcccca

SEQ ID NO: 2969045 - DNA, 25 bp, Homo sapien
ggtagaagactaggttcactcagcc

SEQ ID NO: 2969046 - DNA, 25 bp, Homo sapien
cacactcaggctcatagagtttgga

SEQ ID NO: 2969047 - DNA, 25 bp, Homo sapien
gtggtcaaagacgtgtgccaaagtc

SEQ ID NO: 2969048 - DNA, 25 bp, Homo sapien
cactcaggctcatagagtttggata

SEQ ID NO: 2969049 - DNA, 25 bp, Homo sapien
cgtgtgccaaagtccataacttcat

SEQ ID NO: 2969050 - DNA, 25 bp, Homo sapien
tgagaagggaaccagagggatctat

SEQ ID NO: 2969051 - DNA, 25 bp, Homo sapien
gagaagggaaccagagggatctata

SEQ ID NO: 2969052 - DNA, 25 bp, Homo sapien
cacaatggaagcagccccctctctg

SEQ ID NO: 2969053 - DNA, 25 bp, Homo sapien
acaatggaagcagccccctctctgt

SEQ ID NO: 2969054 - DNA, 25 bp, Homo sapien
tcacaatggaagcagccccctctct

SEQ ID NO: 2969055 - DNA, 25 bp, Homo sapien
tttctgtcccgaggatgtggctttt

SEQ ID NO: 2969056 - DNA, 25 bp, Homo sapien
ttctgtcccgaggatgtggcttttc

SEQ ID NO: 2969057 - DNA, 25 bp, Homo sapien
ttttctgtcccgaggatgtggcttt

SEQ ID NO: 2969058 - DNA, 25 bp, Homo sapien
tacacacacttacacgtacaatcaa

SEQ ID NO: 2969059 - DNA, 25 bp, Homo sapien
cacgtacaatcaatctgatgccttc

SEQ ID NO: 2969060 - DNA, 25 bp, Homo sapien
tttcattgtgcttccatacacacac

SEQ ID NO: 2969061 - DNA, 25 bp, Homo sapien
cagagaattataagcagagtctgcc

SEQ ID NO: 2969062 - DNA, 25 bp, Homo sapien
aggatagtctttgctcccctaaact

SEQ ID NO: 2969063 - DNA, 25 bp, Homo sapien
tattcagaacttttgctgtgttcag

SEQ ID NO: 2969064 - DNA, 25 bp, Homo sapien
tgtcgtgtgcacataggatagtctt

SEQ ID NO: 2969065 - DNA, 25 bp, Homo sapien
gaacaggaaccgctggcatccaaaa

SEQ ID NO: 2969066 - DNA, 25 bp, Homo sapien
cttgtgaaaattttttctcgtcagc

SEQ ID NO: 2969067 - DNA, 25 bp, Homo sapien
tgaaaattttttctcgtcagctgtc

SEQ ID NO: 2969068 - DNA, 25 bp, Homo sapien
aaaattttttctcgtcagctgtcat

SEQ ID NO: 2969069 - DNA, 25 bp, Homo sapien
tgtgaaaattttttctcgtcagctg

SEQ ID NO: 2969070 - DNA, 25 bp, Homo sapien
ttagatgggataagggaggacattc

SEQ ID NO: 2969071 - DNA, 25 bp, Homo sapien
taatacacagcccttagcctcactg

SEQ ID NO: 2969072 - DNA, 25 bp, Homo sapien
catatcatactgagggaaatctgtt

SEQ ID NO: 2969073 - DNA, 25 bp, Homo sapien
taacgttgtgatggctggcactagc

SEQ ID NO: 2969074 - DNA, 25 bp, Homo sapien
caaaagtgagtgaaaattggatttt

SEQ ID NO: 2969075 - DNA, 25 bp, Homo sapien
tcacatgaaaaagtaactgaaccta

SEQ ID NO: 2969076 - DNA, 25 bp, Homo sapien
cacatgaaaaagtaactgaacctag

SEQ ID NO: 2969077 - DNA, 25 bp, Homo sapien
ggtttgcagtgtaatccctgggacc

SEQ ID NO: 2969078 - DNA, 25 bp, Homo sapien
taacaggcacttcaggtgatgctaa

SEQ ID NO: 2969079 - DNA, 25 bp, Homo sapien
gagaagcattggtctataccagtgg

SEQ ID NO: 2969080 - DNA, 25 bp, Homo sapien
gggcctaatcccagaactatggaat

SEQ ID NO: 2969081 - DNA, 25 bp, Homo sapien
tgtccaccccactggggtgaaaatg

SEQ ID NO: 2969082 - DNA, 25 bp, Homo sapien
cactgtttatggtgtccaccccact

SEQ ID NO: 2969083 - DNA, 25 bp, Homo sapien
ggtgaaaatgggtgacaacagccat

SEQ ID NO: 2969084 - DNA, 25 bp, Homo sapien
caccccactggggtgaaaatgggtg

SEQ ID NO: 2969085 - DNA, 25 bp, Homo sapien
tggtcatcatccaggagtcgtggcg

SEQ ID NO: 2969086 - DNA, 25 bp, Homo sapien
ctggtccacattttggatggtgact

SEQ ID NO: 2969087 - DNA, 25 bp, Homo sapien
gaggagcagtggtgaaactgggccg

SEQ ID NO: 2969088 - DNA, 25 bp, Homo sapien
aggagtcgtggcgctcagcgttcat

SEQ ID NO: 2969089 - DNA, 25 bp, Homo sapien
agaggtcgctgctgtaggcatcttg

SEQ ID NO: 2969090 - DNA, 25 bp, Homo sapien
tccggggagctcagaacaaggctgc

SEQ ID NO: 2969091 - DNA, 25 bp, Homo sapien
taatggccaatgaatacggctgatg

SEQ ID NO: 2969092 - DNA, 25 bp, Homo sapien
aatacggctgatgtatagaggatga

SEQ ID NO: 2969093 - DNA, 25 bp, Homo sapien
gagcatccaggacctttgtaaggaa

SEQ ID NO: 2969094 - DNA, 25 bp, Homo sapien
tacattaaggtcatctcaggacacc

SEQ ID NO: 2969095 - DNA, 25 bp, Homo sapien
cattgccccgagagttcagagggta

SEQ ID NO: 2969096 - DNA, 25 bp, Homo sapien
gttagaaaagcacctatagcccact

SEQ ID NO: 2969097 - DNA, 25 bp, Homo sapien
agtgtccaggaatgaactcactgct

SEQ ID NO: 2969098 - DNA, 25 bp, Homo sapien
ggaatgaactcactgcttcgctctt

SEQ ID NO: 2969099 - DNA, 25 bp, Homo sapien
gtcctcaccatacttccaaagatca

SEQ ID NO: 2969100 - DNA, 25 bp, Homo sapien
catacttccaaagatcagtcaccac

SEQ ID NO: 2969101 - DNA, 25 bp, Homo sapien
tcgcaccctctgaggccgcccgcag

SEQ ID NO: 2969102 - DNA, 25 bp, Homo sapien
cgcagccctcctccgcgcggagaga

SEQ ID NO: 2969103 - DNA, 25 bp, Homo sapien
tgggggcgtcgcaccctctgaggcc

SEQ ID NO: 2969104 - DNA, 25 bp, Homo sapien
gcgcgtgcgtggtggagcgcgcgcg

SEQ ID NO: 2969105 - DNA, 25 bp, Homo sapien
cgcggcggtgctcctgtcagcggcg

SEQ ID NO: 2969106 - DNA, 25 bp, Homo sapien
ctcgcagccggcgagcgcagcccgc

SEQ ID NO: 2969107 - DNA, 25 bp, Homo sapien
tcgcagccggcgagcgcagcccgcg

SEQ ID NO: 2969108 - DNA, 25 bp, Homo sapien
gcggcggtgctcctgtcagcggcgg

SEQ ID NO: 2969109 - DNA, 25 bp, Homo sapien
cgagtctgcaccccggaacggcgcg

SEQ ID NO: 2969110 - DNA, 25 bp, Homo sapien
ctcgcagtcctccaacgccccgcgg

SEQ ID NO: 2969111 - DNA, 25 bp, Homo sapien
cctccaacgccccgcggcgagtctg

SEQ ID NO: 2969112 - DNA, 25 bp, Homo sapien
ctgcaccccggaacggcgcggcggg

SEQ ID NO: 2969113 - DNA, 25 bp, Homo sapien
gtctcctgtgaggaccgcgccgccc

SEQ ID NO: 2969114 - DNA, 25 bp, Homo sapien
gcgccgcccgcgattcccggagcac

SEQ ID NO: 2969115 - DNA, 25 bp, Homo sapien
gctctctgcacctccgggtcaagcc

SEQ ID NO: 2969116 - DNA, 25 bp, Homo sapien
tgcacctccgggtcaagccccagtc

SEQ ID NO: 2969117 - DNA, 25 bp, Homo sapien
tgtcatattcggagccagccttccc

SEQ ID NO: 2969118 - DNA, 25 bp, Homo sapien
gccttggacaccgaggcacttcgct

SEQ ID NO: 2969119 - DNA, 25 bp, Homo sapien
gagacgctctaggtaccaaattcca

SEQ ID NO: 2969120 - DNA, 25 bp, Homo sapien
tcttcggtgacagccaagtggcgac

SEQ ID NO: 2969121 - DNA, 25 bp, Homo sapien
gcatcttatccttggtccccgtcat

SEQ ID NO: 2969122 - DNA, 25 bp, Homo sapien
attccctgccacgtttagcaatccg

SEQ ID NO: 2969123 - DNA, 25 bp, Homo sapien
ggcacatttcgcaactacttttatg

SEQ ID NO: 2969124 - DNA, 25 bp, Homo sapien
cacattttgcaactcgttctgcacc

SEQ ID NO: 2969125 - DNA, 25 bp, Homo sapien
tatctagcaatgagccttattaatc

SEQ ID NO: 2969126 - DNA, 25 bp, Homo sapien
gctcctcccgatttcctatggcaaa

SEQ ID NO: 2969127 - DNA, 25 bp, Homo sapien
ttattatgctacacctcctttccca

SEQ ID NO: 2969128 - DNA, 25 bp, Homo sapien
gaatttcaacgccacagaggccagc

SEQ ID NO: 2969129 - DNA, 25 bp, Homo sapien
gccaaatccaagaacaatatcacag

SEQ ID NO: 2969130 - DNA, 25 bp, Homo sapien
cagttgcagccagcagtacagatat

SEQ ID NO: 2969131 - DNA, 25 bp, Homo sapien
cagccagcagtacagatatggccaa

SEQ ID NO: 2969132 - DNA, 25 bp, Homo sapien
tctattgaaatcaacatggggctct

SEQ ID NO: 2969133 - DNA, 25 bp, Homo sapien
atgtggaaacggcaagggacccaga

SEQ ID NO: 2969134 - DNA, 25 bp, Homo sapien
tcaatagaggttccccaaaggtgac

SEQ ID NO: 2969135 - DNA, 25 bp, Homo sapien
tctccagacggaacacaggtatgcc

SEQ ID NO: 2969136 - DNA, 25 bp, Homo sapien
tacccaggcagacccaatgtagtca

SEQ ID NO: 2969137 - DNA, 25 bp, Homo sapien
tagctgctttacagtgtcaactgtc

SEQ ID NO: 2969138 - DNA, 25 bp, Homo sapien
gggatattcatctcacatggatttt

SEQ ID NO: 2969139 - DNA, 25 bp, Homo sapien
tataggccctcaatctgttcttgct

SEQ ID NO: 2969140 - DNA, 25 bp, Homo sapien
aatcactctggatcttaaaatggcc

SEQ ID NO: 2969141 - DNA, 25 bp, Homo sapien
agcagcatcttgagactattccgaa

SEQ ID NO: 2969142 - DNA, 25 bp, Homo sapien
gcagcatcttgagactattccgaaa

SEQ ID NO: 2969143 - DNA, 25 bp, Homo sapien
gcatcttgagactattccgaaacat

SEQ ID NO: 2969144 - DNA, 25 bp, Homo sapien
cagcatcttgagactattccgaaac

SEQ ID NO: 2969145 - DNA, 25 bp, Homo sapien
cactggcatgcaaggagtagacacc

SEQ ID NO: 2969146 - DNA, 25 bp, Homo sapien
taccttttggagaggtgagtcaagc

SEQ ID NO: 2969147 - DNA, 25 bp, Homo sapien
actggtcatcaggtcacactcttgt

SEQ ID NO: 2969148 - DNA, 25 bp, Homo sapien
tgtaagtggccagaagtagctacac

SEQ ID NO: 2969149 - DNA, 25 bp, Homo sapien
tgtttaatggaacacatctggtgtc

SEQ ID NO: 2969150 - DNA, 25 bp, Homo sapien
gaagtacaagggtctagacttggca

SEQ ID NO: 2969151 - DNA, 25 bp, Homo sapien
ggcgtcttgtgggactagtcctcaa

SEQ ID NO: 2969152 - DNA, 25 bp, Homo sapien
tgtatctccagtagctctagcaagc

SEQ ID NO: 2969153 - DNA, 25 bp, Homo sapien
gagtgtactggagtcagcagagtca

SEQ ID NO: 2969154 - DNA, 25 bp, Homo sapien
tactgcagtctgtatattgaacgca

SEQ ID NO: 2969155 - DNA, 25 bp, Homo sapien
ttgaacgcactcaaacccacaggtg

SEQ ID NO: 2969156 - DNA, 25 bp, Homo sapien
ggtgcctacgtaaaatcctccagct

SEQ ID NO: 2969157 - DNA, 25 bp, Homo sapien
caagccctgtacgtgctgcaccatt

SEQ ID NO: 2969158 - DNA, 25 bp, Homo sapien
ctctggatcatattgacggttatct

SEQ ID NO: 2969159 - DNA, 25 bp, Homo sapien
tgtacgtgctgcaccattttgtttg

SEQ ID NO: 2969160 - DNA, 25 bp, Homo sapien
cgtgctgcaccattttgtttgtctt

SEQ ID NO: 2969161 - DNA, 25 bp, Homo sapien
gctgaagacatctgacatactgaac

SEQ ID NO: 2969162 - DNA, 25 bp, Homo sapien
tcaccacagagtgcgctactaatgt

SEQ ID NO: 2969163 - DNA, 25 bp, Homo sapien
tactgaaccacatccaaggctttta

SEQ ID NO: 2969164 - DNA, 25 bp, Homo sapien
ggcaggagctgcaacaaatgtacaa

SEQ ID NO: 2969165 - DNA, 25 bp, Homo sapien
catagtaagctgcaacctgtgaatc

SEQ ID NO: 2969166 - DNA, 25 bp, Homo sapien
gccagccagccatacagttgttaat

SEQ ID NO: 2969167 - DNA, 25 bp, Homo sapien
taaggtaatccaacacagtggcagc

SEQ ID NO: 2969168 - DNA, 25 bp, Homo sapien
taaacatctcgtctcaactggacag

SEQ ID NO: 2969169 - DNA, 25 bp, Homo sapien
tctagttagaatggatttcgaggct

SEQ ID NO: 2969170 - DNA, 25 bp, Homo sapien
gctgtagaagcctctagttagaatg

SEQ ID NO: 2969171 - DNA, 25 bp, Homo sapien
gctgctgtatcttgtgaggaaccaa

SEQ ID NO: 2969172 - DNA, 25 bp, Homo sapien
tgaggaaccaatcagatttctttgt

SEQ ID NO: 2969173 - DNA, 25 bp, Homo sapien
ttagcacctcattaattccaggtct

SEQ ID NO: 2969174 - DNA, 25 bp, Homo sapien
cacctcattaattccaggtctagag

SEQ ID NO: 2969175 - DNA, 25 bp, Homo sapien
gcacctcattaattccaggtctaga

SEQ ID NO: 2969176 - DNA, 25 bp, Homo sapien
agcacctcattaattccaggtctag

SEQ ID NO: 2969177 - DNA, 25 bp, Homo sapien
cccagagcggctttggcgagagtct

SEQ ID NO: 2969178 - DNA, 25 bp, Homo sapien
gctttggcgagagtctacacttgac

SEQ ID NO: 2969179 - DNA, 25 bp, Homo sapien
gactgtcttcgatccggtggttcct

SEQ ID NO: 2969180 - DNA, 25 bp, Homo sapien
tacacttgactgtcttcgatccggt

SEQ ID NO: 2969181 - DNA, 25 bp, Homo sapien
tgaaattcctggactgatcctgtga

SEQ ID NO: 2969182 - DNA, 25 bp, Homo sapien
gcatgaacgatctgtttggctccag

SEQ ID NO: 2969183 - DNA, 25 bp, Homo sapien
tacgactgagaagtgcaaagccaac

SEQ ID NO: 2969184 - DNA, 25 bp, Homo sapien
tcagaatttcaatgcctaagagcct

SEQ ID NO: 2969185 - DNA, 25 bp, Homo sapien
tccaatctttcatgaatatatctga

SEQ ID NO: 2969186 - DNA, 25 bp, Homo sapien
ttgatttccaatctttcatgaatat

SEQ ID NO: 2969187 - DNA, 25 bp, Homo sapien
ccttgatttccaatctttcatgaat

SEQ ID NO: 2969188 - DNA, 25 bp, Homo sapien
caatctttcatgaatatatctgaca

SEQ ID NO: 2969189 - DNA, 25 bp, Homo sapien
aaagcacagtcgctttctgtggaga

SEQ ID NO: 2969190 - DNA, 25 bp, Homo sapien
gcacagtcgctttctgtggagatgc

SEQ ID NO: 2969191 - DNA, 25 bp, Homo sapien
gcgggacagcgtagtctggctcaaa

SEQ ID NO: 2969192 - DNA, 25 bp, Homo sapien
tagtctggctcaaaagcacagtcgc

SEQ ID NO: 2969193 - DNA, 25 bp, Homo sapien
tccataatccgaatgtgctgcatac

SEQ ID NO: 2969194 - DNA, 25 bp, Homo sapien
cactgatagactgatgtgtgagtaa

SEQ ID NO: 2969195 - DNA, 25 bp, Homo sapien
gaagagagcgagacatgccctccat

SEQ ID NO: 2969196 - DNA, 25 bp, Homo sapien
ctggagccgaacactgatagactga

SEQ ID NO: 2969197 - DNA, 25 bp, Homo sapien
gataaatgaaatcagaacaacagtg

SEQ ID NO: 2969198 - DNA, 25 bp, Homo sapien
tctggcaaaaccaggaacttcctga

SEQ ID NO: 2969199 - DNA, 25 bp, Homo sapien
ctgacatgaacaagctgataaatga

SEQ ID NO: 2969200 - DNA, 25 bp, Homo sapien
gaacaacagtgtattctggcaaaac

SEQ ID NO: 2969201 - DNA, 25 bp, Homo sapien
cccacttccgagtaagagttatctc

SEQ ID NO: 2969202 - DNA, 25 bp, Homo sapien
cactgggcaagaatctagagaccac

SEQ ID NO: 2969203 - DNA, 25 bp, Homo sapien
taggctaccaacaaacgcatgcatg

SEQ ID NO: 2969204 - DNA, 25 bp, Homo sapien
caaatttgagcgagattacagagtc

SEQ ID NO: 2969205 - DNA, 25 bp, Homo sapien
gactaataaagtagcaatgacacca

SEQ ID NO: 2969206 - DNA, 25 bp, Homo sapien
taagacagggttactggtccactcc

SEQ ID NO: 2969207 - DNA, 25 bp, Homo sapien
gatggtatgcatcagatatgccaaa

SEQ ID NO: 2969208 - DNA, 25 bp, Homo sapien
tccgtcaatcacttgtaagacaggg

SEQ ID NO: 2969209 - DNA, 25 bp, Homo sapien
caggagagacaatctaaccttcaca

SEQ ID NO: 2969210 - DNA, 25 bp, Homo sapien
gctcagaaatccacgtaacaaatac

SEQ ID NO: 2969211 - DNA, 25 bp, Homo sapien
ggcttccttgaaaactagatgtcaa

SEQ ID NO: 2969212 - DNA, 25 bp, Homo sapien
tcactggtcatgttgttatcagacc

SEQ ID NO: 2969213 - DNA, 25 bp, Homo sapien
ccagtatccatttgacagcaagatg

SEQ ID NO: 2969214 - DNA, 25 bp, Homo sapien
accagtatccatttgacagcaagat

SEQ ID NO: 2969215 - DNA, 25 bp, Homo sapien
tcttgtcctgacaacagtcagtagg

SEQ ID NO: 2969216 - DNA, 25 bp, Homo sapien
ctactggcctctaatatacatcttg

SEQ ID NO: 2969217 - DNA, 25 bp, Homo sapien
caacagtcagtaggtgtcacaaagg

SEQ ID NO: 2969218 - DNA, 25 bp, Homo sapien
taatatacatcttgtcctgacaaca

SEQ ID NO: 2969219 - DNA, 25 bp, Homo sapien
ctgaaggaataaagttaatgtgctt

SEQ ID NO: 2969220 - DNA, 25 bp, Homo sapien
gaaggaataaagttaatgtgctttg

SEQ ID NO: 2969221 - DNA, 25 bp, Homo sapien
aggaataaagttaatgtgctttgtt

SEQ ID NO: 2969222 - DNA, 25 bp, Homo sapien
aagttaatgtgctttgtttttggat

SEQ ID NO: 2969223 - DNA, 25 bp, Homo sapien
actgatgctggttgactcttataaa

SEQ ID NO: 2969224 - DNA, 25 bp, Homo sapien
gtgatctgcctcatgtttctcagtt

SEQ ID NO: 2969225 - DNA, 25 bp, Homo sapien
tttccatgcagtgtttttggtcttg

SEQ ID NO: 2969226 - DNA, 25 bp, Homo sapien
tgtttctcagtttcagctccctgaa

SEQ ID NO: 2969227 - DNA, 25 bp, Homo sapien
gggtgactacaattaccagctgttg

SEQ ID NO: 2969228 - DNA, 25 bp, Homo sapien
aactgtttctcaaggtatgggactg

SEQ ID NO: 2969229 - DNA, 25 bp, Homo sapien
tacatagcgcagtgggcattactag

SEQ ID NO: 2969230 - DNA, 25 bp, Homo sapien
taaaagcagaagtgacatagtccct

SEQ ID NO: 2969231 - DNA, 25 bp, Homo sapien
tacctaagctcattcgacctttgta

SEQ ID NO: 2969232 - DNA, 25 bp, Homo sapien
taagctcattcgacctttgtaattt

SEQ ID NO: 2969233 - DNA, 25 bp, Homo sapien
cctaagctcattcgacctttgtaat

SEQ ID NO: 2969234 - DNA, 25 bp, Homo sapien
tttacctaagctcattcgacctttg

SEQ ID NO: 2969235 - DNA, 25 bp, Homo sapien
cttccgagtagtcgggaccacagtc

SEQ ID NO: 2969236 - DNA, 25 bp, Homo sapien
ctggaactccttggactcaaaagat

SEQ ID NO: 2969237 - DNA, 25 bp, Homo sapien
cgcctggctattagaatttcttttc

SEQ ID NO: 2969238 - DNA, 25 bp, Homo sapien
ccacccacgcctggctattagaatt

SEQ ID NO: 2969239 - DNA, 25 bp, Homo sapien
cacagcagggacaatcacagatatg

SEQ ID NO: 2969240 - DNA, 25 bp, Homo sapien
cacagatatgataagttgaacaata

SEQ ID NO: 2969241 - DNA, 25 bp, Homo sapien
tccatggggtactgtgcttgtctaa

SEQ ID NO: 2969242 - DNA, 25 bp, Homo sapien
gaaaactagtgtcatttgtaagtca

SEQ ID NO: 2969243 - DNA, 25 bp, Homo sapien
tttctcaaaagtttctgcatgttct

SEQ ID NO: 2969244 - DNA, 25 bp, Homo sapien
aaagtttctgcatgttcttcaaagt

SEQ ID NO: 2969245 - DNA, 25 bp, Homo sapien
ttttctcaaaagtttctgcatgttc

SEQ ID NO: 2969246 - DNA, 25 bp, Homo sapien
tcaaaagtttctgcatgttcttcaa

SEQ ID NO: 2969247 - DNA, 25 bp, Homo sapien
agggcagtatgcatccacgtccagt

SEQ ID NO: 2969248 - DNA, 25 bp, Homo sapien
tccacgtccagtttctgagctgaag

SEQ ID NO: 2969249 - DNA, 25 bp, Homo sapien
ggttggtgagccaagctcggattct

SEQ ID NO: 2969250 - DNA, 25 bp, Homo sapien
gattctggaattcgtgggctctcaa

SEQ ID NO: 2969251 - DNA, 25 bp, Homo sapien
aggcccccatgacagtcattctgac

SEQ ID NO: 2969252 - DNA, 25 bp, Homo sapien
ggcccccatgacagtcattctgact

SEQ ID NO: 2969253 - DNA, 25 bp, Homo sapien
taggcccccatgacagtcattctga

SEQ ID NO: 2969254 - DNA, 25 bp, Homo sapien
ttaggcccccatgacagtcattctg

SEQ ID NO: 2969255 - DNA, 25 bp, Homo sapien
caccatcgattatctccacagttgt

SEQ ID NO: 2969256 - DNA, 25 bp, Homo sapien
ccatcgattatctccacagttgtag

SEQ ID NO: 2969257 - DNA, 25 bp, Homo sapien
ttacttaacaccatcgattatctcc

SEQ ID NO: 2969258 - DNA, 25 bp, Homo sapien
ttaacaccatcgattatctccacag

SEQ ID NO: 2969259 - DNA, 25 bp, Homo sapien
ccttgattgcaacctgtgagagcca

SEQ ID NO: 2969260 - DNA, 25 bp, Homo sapien
caagtgaagagtacctttctgtccc

SEQ ID NO: 2969261 - DNA, 25 bp, Homo sapien
gaattccagcttcttgcgtgtcaaa

SEQ ID NO: 2969262 - DNA, 25 bp, Homo sapien
aaagaagatccttccctagttgagc

SEQ ID NO: 2969263 - DNA, 25 bp, Homo sapien
gctcaggactcctagcagaagctaa

SEQ ID NO: 2969264 - DNA, 25 bp, Homo sapien
tatggcatagcgtcaatgaatggca

SEQ ID NO: 2969265 - DNA, 25 bp, Homo sapien
gacctaccagtagtgcttatgggca

SEQ ID NO: 2969266 - DNA, 25 bp, Homo sapien
tgaatggcactggaattcccactac

SEQ ID NO: 2969267 - DNA, 25 bp, Homo sapien
cagcctgttttacagatcgtcatgt

SEQ ID NO: 2969268 - DNA, 25 bp, Homo sapien
gtatgtattctagtctggtttttca

SEQ ID NO: 2969269 - DNA, 25 bp, Homo sapien
gttatataaggaattaaacagtatg

SEQ ID NO: 2969270 - DNA, 25 bp, Homo sapien
gttgagtatgttaatagtttgctcc

SEQ ID NO: 2969271 - DNA, 25 bp, Homo sapien
aagagcagagggaacaatttgtagg

SEQ ID NO: 2969272 - DNA, 25 bp, Homo sapien
caggattcttagaggagggtgtact

SEQ ID NO: 2969273 - DNA, 25 bp, Homo sapien
gaattcctgaccctcttgcattgac

SEQ ID NO: 2969274 - DNA, 25 bp, Homo sapien
gatcacaactgattaaatgcagcat

SEQ ID NO: 2969275 - DNA, 25 bp, Homo sapien
ttatctggatgccactttggtgcca

SEQ ID NO: 2969276 - DNA, 25 bp, Homo sapien
ccactttggtgccagtttccaatat

SEQ ID NO: 2969277 - DNA, 25 bp, Homo sapien
tgccagtttccaatatgcctcttta

SEQ ID NO: 2969278 - DNA, 25 bp, Homo sapien
agtttccaatatgcctctttaataa

SEQ ID NO: 2969279 - DNA, 25 bp, Homo sapien
tcaggtggtcctctcaaactcagca

SEQ ID NO: 2969280 - DNA, 25 bp, Homo sapien
ggctgttccggaacctctgagctca

SEQ ID NO: 2969281 - DNA, 25 bp, Homo sapien
caggtggtcctctcaaactcagcac

SEQ ID NO: 2969282 - DNA, 25 bp, Homo sapien
tgtccaggctgttccggaacctctg

SEQ ID NO: 2969283 - DNA, 25 bp, Homo sapien
aaggaggaaacccagacgagtcatg

SEQ ID NO: 2969284 - DNA, 25 bp, Homo sapien
gaaacccagacgagtcatgagtgtg

SEQ ID NO: 2969285 - DNA, 25 bp, Homo sapien
ctccaaggaggaaacccagacgagt

SEQ ID NO: 2969286 - DNA, 25 bp, Homo sapien
cccagacgagtcatgagtgtgtttg

SEQ ID NO: 2969287 - DNA, 25 bp, Homo sapien
ctgagacacatgtgagtagatgaac

SEQ ID NO: 2969288 - DNA, 25 bp, Homo sapien
tacaaaattgacagatactgagccc

SEQ ID NO: 2969289 - DNA, 25 bp, Homo sapien
cagtaagctctcaaacgtatccaaa

SEQ ID NO: 2969290 - DNA, 25 bp, Homo sapien
taatatgatgctggtctaccagagc

SEQ ID NO: 2969291 - DNA, 25 bp, Homo sapien
cagtgctgctagtcagagtggaaca

SEQ ID NO: 2969292 - DNA, 25 bp, Homo sapien
gacttatccgctgggtgattgctga

SEQ ID NO: 2969293 - DNA, 25 bp, Homo sapien
tagaggttggactagtaacagcccc

SEQ ID NO: 2969294 - DNA, 25 bp, Homo sapien
gatgccactatctctgctttcaagg

SEQ ID NO: 2969295 - DNA, 25 bp, Homo sapien
ctgcattcatgagagataattggtc

SEQ ID NO: 2969296 - DNA, 25 bp, Homo sapien
taattggtctgtactctcctgttca

SEQ ID NO: 2969297 - DNA, 25 bp, Homo sapien
aatattggcctcctagttgttcctc

SEQ ID NO: 2969298 - DNA, 25 bp, Homo sapien
gattaactacactgattgattcgtg

SEQ ID NO: 2969299 - DNA, 25 bp, Homo sapien
tgcatattgatcctacaccttgaga

SEQ ID NO: 2969300 - DNA, 25 bp, Homo sapien
ctttgtgggccagtaggcaacatcc

SEQ ID NO: 2969301 - DNA, 25 bp, Homo sapien
ttcaggagacaaacacgtgggtagc

SEQ ID NO: 2969302 - DNA, 25 bp, Homo sapien
ggcctgcctgccatggtttaccaac

SEQ ID NO: 2969303 - DNA, 25 bp, Homo sapien
tcgatacaaacaggagtccatgctg

SEQ ID NO: 2969304 - DNA, 25 bp, Homo sapien
cccagcatattttgtgcgttccaca

SEQ ID NO: 2969305 - DNA, 25 bp, Homo sapien
gaatttggccgtggcatgagataca

SEQ ID NO: 2969306 - DNA, 25 bp, Homo sapien
ccatgctggatttttgagactgcca

SEQ ID NO: 2969307 - DNA, 25 bp, Homo sapien
cacaaagcactgacgacagctgttg

SEQ ID NO: 2969308 - DNA, 25 bp, Homo sapien
ggatgaccgtagactgcctactctg

SEQ ID NO: 2969309 - DNA, 25 bp, Homo sapien
gcactgacgacagctgttgcaagca

SEQ ID NO: 2969310 - DNA, 25 bp, Homo sapien
aatctcatttttggacatcaaggat

SEQ ID NO: 2969311 - DNA, 25 bp, Homo sapien
gggattcagacccatcaagaatgaa

SEQ ID NO: 2969312 - DNA, 25 bp, Homo sapien
taggacatcctaccagggaaagaac

SEQ ID NO: 2969313 - DNA, 25 bp, Homo sapien
gaaccctgactagatgtggtcctgg

SEQ ID NO: 2969314 - DNA, 25 bp, Homo sapien
ggccctggcccatagttgtttctta

SEQ ID NO: 2969315 - DNA, 25 bp, Homo sapien
atagctgattataaataagctcttc

SEQ ID NO: 2969316 - DNA, 25 bp, Homo sapien
tagctgattataaataagctcttca

SEQ ID NO: 2969317 - DNA, 25 bp, Homo sapien
caaatagctgattataaataagctc

SEQ ID NO: 2969318 - DNA, 25 bp, Homo sapien
gctgattataaataagctcttcaat

SEQ ID NO: 2969319 - DNA, 25 bp, Homo sapien
tcttaaatcctgctgtgtgcgagca

SEQ ID NO: 2969320 - DNA, 25 bp, Homo sapien
aaaggtgtatgtctctgctcatcca

SEQ ID NO: 2969321 - DNA, 25 bp, Homo sapien
agcaccacccatgctctgtcttggc

SEQ ID NO: 2969322 - DNA, 25 bp, Homo sapien
tcttggcattcgtagagaagttctc

SEQ ID NO: 2969323 - DNA, 25 bp, Homo sapien
tgtttcagaacagtacgggactcat

SEQ ID NO: 2969324 - DNA, 25 bp, Homo sapien
tcaagatgactaagcaacctcaggg

SEQ ID NO: 2969325 - DNA, 25 bp, Homo sapien
aaccaagttaactgtggcagggcca

SEQ ID NO: 2969326 - DNA, 25 bp, Homo sapien
gccagccaggcaatgatcaagatga

SEQ ID NO: 2969327 - DNA, 25 bp, Homo sapien
gtggagctgagaatcccaggagacc

SEQ ID NO: 2969328 - DNA, 25 bp, Homo sapien
caagttcacacggagtatttaccaa

SEQ ID NO: 2969329 - DNA, 25 bp, Homo sapien
tgacacattcccttacttgaggagg

SEQ ID NO: 2969330 - DNA, 25 bp, Homo sapien
tagatgactttacccaacaagggca

SEQ ID NO: 2969331 - DNA, 25 bp, Homo sapien
tcttcaactaaggcaaagtgtaaac

SEQ ID NO: 2969332 - DNA, 25 bp, Homo sapien
ttcttctcttcataccatgtccata

SEQ ID NO: 2969333 - DNA, 25 bp, Homo sapien
tcttctcttcataccatgtccatat

SEQ ID NO: 2969334 - DNA, 25 bp, Homo sapien
cttctcttcataccatgtccatata

SEQ ID NO: 2969335 - DNA, 25 bp, Homo sapien
cagtatatgcagatggaagctaaca

SEQ ID NO: 2969336 - DNA, 25 bp, Homo sapien
taaaattggctatttctgccaggac

SEQ ID NO: 2969337 - DNA, 25 bp, Homo sapien
aatgtcaggctgagtacttggttta

SEQ ID NO: 2969338 - DNA, 25 bp, Homo sapien
gcatgggtgaatataactactgcca

SEQ ID NO: 2969339 - DNA, 25 bp, Homo sapien
cttttaattgttggattgtggagag

SEQ ID NO: 2969340 - DNA, 25 bp, Homo sapien
gagtgaagttcctgttggaaaggcc

SEQ ID NO: 2969341 - DNA, 25 bp, Homo sapien
aagttcctgttggaaaggccaggct

SEQ ID NO: 2969342 - DNA, 25 bp, Homo sapien
tgcaggagtgaagttcctgttggaa

SEQ ID NO: 2969343 - DNA, 25 bp, Homo sapien
tggaaaacccaatctcggccaacaa

SEQ ID NO: 2969344 - DNA, 25 bp, Homo sapien
tgatggcagttttgccgaatccaat

SEQ ID NO: 2969345 - DNA, 25 bp, Homo sapien
cagttttgccgaatccaatgtttcc

SEQ ID NO: 2969346 - DNA, 25 bp, Homo sapien
cggccaacaaacactgactctgtag

SEQ ID NO: 2969347 - DNA, 25 bp, Homo sapien
tgggctgtctgaggcgatctgtctc

SEQ ID NO: 2969348 - DNA, 25 bp, Homo sapien
gtctgaggcgatctgtctcatcctt

SEQ ID NO: 2969349 - DNA, 25 bp, Homo sapien
tttgggggaggcatgtgggctgtct

SEQ ID NO: 2969350 - DNA, 25 bp, Homo sapien
ctgtctgaggcgatctgtctcatcc

SEQ ID NO: 2969351 - DNA, 25 bp, Homo sapien
cagggaaatgacaaggaggggggcg

SEQ ID NO: 2969352 - DNA, 25 bp, Homo sapien
ctcctgccgcctgcgcatttccgga

SEQ ID NO: 2969353 - DNA, 25 bp, Homo sapien
cctgccgcctgcgcatttccggagt

SEQ ID NO: 2969354 - DNA, 25 bp, Homo sapien
tcctcctgccgcctgcgcatttccg

SEQ ID NO: 2969355 - DNA, 25 bp, Homo sapien
tgccgcctgcgcatttccggagttc

SEQ ID NO: 2969356 - DNA, 25 bp, Homo sapien
catatccccaacgtgggaatcatat

SEQ ID NO: 2969357 - DNA, 25 bp, Homo sapien
ccccaacgtgggaatcatattgtac

SEQ ID NO: 2969358 - DNA, 25 bp, Homo sapien
tccccaacgtgggaatcatattgta

SEQ ID NO: 2969359 - DNA, 25 bp, Homo sapien
tatccccaacgtgggaatcatattg

SEQ ID NO: 2969360 - DNA, 25 bp, Homo sapien
gctctatgcgtctacagaacacttt

SEQ ID NO: 2969361 - DNA, 25 bp, Homo sapien
gcagcaagattgcaggcttctgctc

SEQ ID NO: 2969362 - DNA, 25 bp, Homo sapien
caggcttctgctctatgcgtctaca

SEQ ID NO: 2969363 - DNA, 25 bp, Homo sapien
tggtttgctataggtgagcagcaag

SEQ ID NO: 2969364 - DNA, 25 bp, Homo sapien
cacagaggtcaaggtcacttcttct

SEQ ID NO: 2969365 - DNA, 25 bp, Homo sapien
catggcgaggttttccactggcagt

SEQ ID NO: 2969366 - DNA, 25 bp, Homo sapien
ggccctaaggcaagacatagctttt

SEQ ID NO: 2969367 - DNA, 25 bp, Homo sapien
aggaaacatagggtgctagggcaac

SEQ ID NO: 2969368 - DNA, 25 bp, Homo sapien
gcaaaagtagtacacagactttcta

SEQ ID NO: 2969369 - DNA, 25 bp, Homo sapien
tcttctggagtctgtaagagatcct

SEQ ID NO: 2969370 - DNA, 25 bp, Homo sapien
attttacagtttttccactatgtct

SEQ ID NO: 2969371 - DNA, 25 bp, Homo sapien
atccaggaccccatactgtatttag

SEQ ID NO: 2969372 - DNA, 25 bp, Homo sapien
agaaagatgagaatgcaaacaggct

SEQ ID NO: 2969373 - DNA, 25 bp, Homo sapien
gaaagatgagaatgcaaacaggctt

SEQ ID NO: 2969374 - DNA, 25 bp, Homo sapien
acaggcttatcagtagtaagagcaa

SEQ ID NO: 2969375 - DNA, 25 bp, Homo sapien
tgcaggtgaggttcccgaagaagct

SEQ ID NO: 2969376 - DNA, 25 bp, Homo sapien
tgaacacaggaacgaaggctcagca

SEQ ID NO: 2969377 - DNA, 25 bp, Homo sapien
gaagaagctgctcccgataggctgt

SEQ ID NO: 2969378 - DNA, 25 bp, Homo sapien
cagagcaaggcagcaacattgtgga

SEQ ID NO: 2969379 - DNA, 25 bp, Homo sapien
tgtattcctaacaaatacgtgaact

SEQ ID NO: 2969380 - DNA, 25 bp, Homo sapien
atacgtgaactttcttccttagtag

SEQ ID NO: 2969381 - DNA, 25 bp, Homo sapien
caaatacgtgaactttcttccttag

SEQ ID NO: 2969382 - DNA, 25 bp, Homo sapien
gacagagttgaaccaggtggctaga

SEQ ID NO: 2969383 - DNA, 25 bp, Homo sapien
ctagatcccaacaccgtagcagctt

SEQ ID NO: 2969384 - DNA, 25 bp, Homo sapien
gcagcttcctagactatacctaaag

SEQ ID NO: 2969385 - DNA, 25 bp, Homo sapien
tatataggactgcatgtgaatgtga

SEQ ID NO: 2969386 - DNA, 25 bp, Homo sapien
gaaactttccgatcattttactcag

SEQ ID NO: 2969387 - DNA, 25 bp, Homo sapien
ttttactcagaaacgatacaattgt

SEQ ID NO: 2969388 - DNA, 25 bp, Homo sapien
tgtaaactggtcctaactgttacaa

SEQ ID NO: 2969389 - DNA, 25 bp, Homo sapien
cataatccggtttgtgaaattctgc

SEQ ID NO: 2969390 - DNA, 25 bp, Homo sapien
aaaaatcctatggaaaggcagcagc

SEQ ID NO: 2969391 - DNA, 25 bp, Homo sapien
cctctgagagcgaaacaggaactac

SEQ ID NO: 2969392 - DNA, 25 bp, Homo sapien
catgtctctgcgcttgattaggaac

SEQ ID NO: 2969393 - DNA, 25 bp, Homo sapien
ggcatcacccggtcaaaggaagact

SEQ ID NO: 2969394 - DNA, 25 bp, Homo sapien
ccattctcgaaaagaaggatgtaca

SEQ ID NO: 2969395 - DNA, 25 bp, Homo sapien
taagccattctcgaaaagaaggatg

SEQ ID NO: 2969396 - DNA, 25 bp, Homo sapien
tccagataagccattctcgaaaaga

SEQ ID NO: 2969397 - DNA, 25 bp, Homo sapien
ttctctccagataagccattctcga

SEQ ID NO: 2969398 - DNA, 25 bp, Homo sapien
caagtgttagtgaaagacccagaat

SEQ ID NO: 2969399 - DNA, 25 bp, Homo sapien
gagatgaagcactaatggtcccagg

SEQ ID NO: 2969400 - DNA, 25 bp, Homo sapien
ttatactatagacccaaacggcatg

SEQ ID NO: 2969401 - DNA, 25 bp, Homo sapien
tggtcccagggaggtaagctcatct

SEQ ID NO: 2969402 - DNA, 25 bp, Homo sapien
ttcttgccaactcataaaacgatgc

SEQ ID NO: 2969403 - DNA, 25 bp, Homo sapien
cttctaatggtctgacagggtgaaa

SEQ ID NO: 2969404 - DNA, 25 bp, Homo sapien
gcttcatgaataagtaaacgctaag

SEQ ID NO: 2969405 - DNA, 25 bp, Homo sapien
cgatcctatgatttatgctgagaca

SEQ ID NO: 2969406 - DNA, 25 bp, Homo sapien
cccgttttccagtgtcaaccaacat

SEQ ID NO: 2969407 - DNA, 25 bp, Homo sapien
tatcttcccgttttccagtgtcaac

SEQ ID NO: 2969408 - DNA, 25 bp, Homo sapien
tttatcttcccgttttccagtgtca

SEQ ID NO: 2969409 - DNA, 25 bp, Homo sapien
tcttcccgttttccagtgtcaacca

SEQ ID NO: 2969410 - DNA, 25 bp, Homo sapien
ctgtgtatcttaaggttttcaaaat

SEQ ID NO: 2969411 - DNA, 25 bp, Homo sapien
aaataataacatcttatacctgtgt

SEQ ID NO: 2969412 - DNA, 25 bp, Homo sapien
taataacatcttatacctgtgtatc

SEQ ID NO: 2969413 - DNA, 25 bp, Homo sapien
tacctgtgtatcttaaggttttcaa

SEQ ID NO: 2969414 - DNA, 25 bp, Homo sapien
tgaagttggagctttccctcaaaac

SEQ ID NO: 2969415 - DNA, 25 bp, Homo sapien
tttttgaagttggagctttccctca

SEQ ID NO: 2969416 - DNA, 25 bp, Homo sapien
ttgaagttggagctttccctcaaaa

SEQ ID NO: 2969417 - DNA, 25 bp, Homo sapien
agttggagctttccctcaaaaccat

SEQ ID NO: 2969418 - DNA, 25 bp, Homo sapien
gaactcttatttatcccatgaaaac

SEQ ID NO: 2969419 - DNA, 25 bp, Homo sapien
cttatttatcccatgaaaactcagt

SEQ ID NO: 2969420 - DNA, 25 bp, Homo sapien
tcttatttatcccatgaaaactcag

SEQ ID NO: 2969421 - DNA, 25 bp, Homo sapien
actcttatttatcccatgaaaactc

SEQ ID NO: 2969422 - DNA, 25 bp, Homo sapien
gaaggcaagtaacgtgtgaccactc

SEQ ID NO: 2969423 - DNA, 25 bp, Homo sapien
caatagtctgctgtcggtttagttt

SEQ ID NO: 2969424 - DNA, 25 bp, Homo sapien
aaaccagaaggcaagtaacgtgtga

SEQ ID NO: 2969425 - DNA, 25 bp, Homo sapien
ctttgaggatgtgatgtcccagttc

SEQ ID NO: 2969426 - DNA, 25 bp, Homo sapien
gaagtcacacttggtagctttgatc

SEQ ID NO: 2969427 - DNA, 25 bp, Homo sapien
caagttaggctgtttgtttcattag

SEQ ID NO: 2969428 - DNA, 25 bp, Homo sapien
gtttcattagttggctttattaaga

SEQ ID NO: 2969429 - DNA, 25 bp, Homo sapien
tttcagtgactcacaagttaggctg

SEQ ID NO: 2969430 - DNA, 25 bp, Homo sapien
aatctggtaattgcactactaaggc

SEQ ID NO: 2969431 - DNA, 25 bp, Homo sapien
gaatagtggtttctcaactagctgg

SEQ ID NO: 2969432 - DNA, 25 bp, Homo sapien
ggaaactagtctggcaatgtcttgc

SEQ ID NO: 2969433 - DNA, 25 bp, Homo sapien
aatactactgatcagtcgctgccgg

SEQ ID NO: 2969434 - DNA, 25 bp, Homo sapien
gaggatggaggatgatacaccaact

SEQ ID NO: 2969435 - DNA, 25 bp, Homo sapien
tatttggagtgtagagatttcgtaa

SEQ ID NO: 2969436 - DNA, 25 bp, Homo sapien
accttctgtgctataagagatccag

SEQ ID NO: 2969437 - DNA, 25 bp, Homo sapien
agagatttcgtaaagacgccagtgc

SEQ ID NO: 2969438 - DNA, 25 bp, Homo sapien
aacctctgtccggtaattaatattg

SEQ ID NO: 2969439 - DNA, 25 bp, Homo sapien
ctgtccggtaattaatattggcacc

SEQ ID NO: 2969440 - DNA, 25 bp, Homo sapien
cacatagaattggagcattatttaa

SEQ ID NO: 2969441 - DNA, 25 bp, Homo sapien
ctgaacacatagaattggagcatta

SEQ ID NO: 2969442 - DNA, 25 bp, Homo sapien
tcagaagaggcatccacgttggccc

SEQ ID NO: 2969443 - DNA, 25 bp, Homo sapien
agcaccacaatgctcaggtaccctg

SEQ ID NO: 2969444 - DNA, 25 bp, Homo sapien
ccatttctgtgtaaccaagatggga

SEQ ID NO: 2969445 - DNA, 25 bp, Homo sapien
cagcagggctaccatttctgtgtaa

SEQ ID NO: 2969446 - DNA, 25 bp, Homo sapien
gaggtgcccttggtcagtctgagta

SEQ ID NO: 2969447 - DNA, 25 bp, Homo sapien
caaagggtttagaactgtgtgctcc

SEQ ID NO: 2969448 - DNA, 25 bp, Homo sapien
agtttcccaagcacctctcaaaggg

SEQ ID NO: 2969449 - DNA, 25 bp, Homo sapien
gagcctgcaggtgtcatttggtcca

SEQ ID NO: 2969450 - DNA, 25 bp, Homo sapien
cagaagaggcgtgataggatcttga

SEQ ID NO: 2969451 - DNA, 25 bp, Homo sapien
cttgaaagaagtacatatgagttac

SEQ ID NO: 2969452 - DNA, 25 bp, Homo sapien
gatgagctcgatcacagtgatgaag

SEQ ID NO: 2969453 - DNA, 25 bp, Homo sapien
cttgagatgagctcgatcacagtga

SEQ ID NO: 2969454 - DNA, 25 bp, Homo sapien
taagaactgataagagttttgagat

SEQ ID NO: 2969455 - DNA, 25 bp, Homo sapien
gataagagttttgagatacaggcac

SEQ ID NO: 2969456 - DNA, 25 bp, Homo sapien
actgataagagttttgagatacagg

SEQ ID NO: 2969457 - DNA, 25 bp, Homo sapien
gtaagaactgataagagttttgaga

SEQ ID NO: 2969458 - DNA, 25 bp, Homo sapien
agagaatgagcaacaccgtgggtta

SEQ ID NO: 2969459 - DNA, 25 bp, Homo sapien
cttctggttagcaagggagaggaac

SEQ ID NO: 2969460 - DNA, 25 bp, Homo sapien
gaatgtagccagtatagaggactct

SEQ ID NO: 2969461 - DNA, 25 bp, Homo sapien
tcatggaagccagaatgcaagtggt

SEQ ID NO: 2969462 - DNA, 25 bp, Homo sapien
gacggaaggaagaccagaggatctc

SEQ ID NO: 2969463 - DNA, 25 bp, Homo sapien
tgagaaaaacggaggctacattagc

SEQ ID NO: 2969464 - DNA, 25 bp, Homo sapien
aactagtcagggatatgaacatgcc

SEQ ID NO: 2969465 - DNA, 25 bp, Homo sapien
taaaagtttactactggccgagcac

SEQ ID NO: 2969466 - DNA, 25 bp, Homo sapien
cagaagggccttcgtttcaacagat

SEQ ID NO: 2969467 - DNA, 25 bp, Homo sapien
tagcctttcattagatgagtagcct

SEQ ID NO: 2969468 - DNA, 25 bp, Homo sapien
ttctggtaggtaggtggtacttgtc

SEQ ID NO: 2969469 - DNA, 25 bp, Homo sapien
ttcgtttcaacagatgagtagcctt

SEQ ID NO: 2969470 - DNA, 25 bp, Homo sapien
gcacactgcccgttcttatccaaat

SEQ ID NO: 2969471 - DNA, 25 bp, Homo sapien
ctcagtataacccatgctggctgca

SEQ ID NO: 2969472 - DNA, 25 bp, Homo sapien
gacctcggagtgcagcatgaaccaa

SEQ ID NO: 2969473 - DNA, 25 bp, Homo sapien
cctgttggatggcatggctcttctt

SEQ ID NO: 2969474 - DNA, 25 bp, Homo sapien
ttaatgaatagcgaggctgggactc

SEQ ID NO: 2969475 - DNA, 25 bp, Homo sapien
tcagagcagcgatcacgaattcaca

SEQ ID NO: 2969476 - DNA, 25 bp, Homo sapien
gatgatgccgaggtttgggacacaa

SEQ ID NO: 2969477 - DNA, 25 bp, Homo sapien
ggtttcctgggtccttcaatacaga

SEQ ID NO: 2969478 - DNA, 25 bp, Homo sapien
gctgattatcccatgcttgcactgg

SEQ ID NO: 2969479 - DNA, 25 bp, Homo sapien
taaatacgagaaaactgagggcctg

SEQ ID NO: 2969480 - DNA, 25 bp, Homo sapien
cctctcagatgtataaggactgttc

SEQ ID NO: 2969481 - DNA, 25 bp, Homo sapien
ctgggaatttgactgaacacggttc

SEQ ID NO: 2969482 - DNA, 25 bp, Homo sapien
tttctggaagatcaagtaggtagga

SEQ ID NO: 2969483 - DNA, 25 bp, Homo sapien
ctggaagatcaagtaggtaggagac

SEQ ID NO: 2969484 - DNA, 25 bp, Homo sapien
agctgttgatctgtgctcgctctac

SEQ ID NO: 2969485 - DNA, 25 bp, Homo sapien
gttgatctgtgctcgctctacttcc

SEQ ID NO: 2969486 - DNA, 25 bp, Homo sapien
tggcacattgtaaggtaactttcag

SEQ ID NO: 2969487 - DNA, 25 bp, Homo sapien
tgaaagaggaaaactgcttgactgt

SEQ ID NO: 2969488 - DNA, 25 bp, Homo sapien
tcttgagggcaacgtccatgagagg

SEQ ID NO: 2969489 - DNA, 25 bp, Homo sapien
gcctgagacagaagactgccaaatg

SEQ ID NO: 2969490 - DNA, 25 bp, Homo sapien
gagcaaacggcacacctccagtttg

SEQ ID NO: 2969491 - DNA, 25 bp, Homo sapien
tgtgctgaatagtggcactgctcct

SEQ ID NO: 2969492 - DNA, 25 bp, Homo sapien
cactgctcctcggcggtttggctgg

SEQ ID NO: 2969493 - DNA, 25 bp, Homo sapien
actgccgccccttgttccaagagca

SEQ ID NO: 2969494 - DNA, 25 bp, Homo sapien
gcagaaagtccacggttcctagatg

SEQ ID NO: 2969495 - DNA, 25 bp, Homo sapien
tcatcaggggagtgcggccctgctt

SEQ ID NO: 2969496 - DNA, 25 bp, Homo sapien
tccatgggtgagtaaaagatcaaca

SEQ ID NO: 2969497 - DNA, 25 bp, Homo sapien
tcctagatggccttcggaagcagcc

SEQ ID NO: 2969498 - DNA, 25 bp, Homo sapien
tatgctgaaagctactgcccttggg

SEQ ID NO: 2969499 - DNA, 25 bp, Homo sapien
gatggcttcctaactgatctcctgg

SEQ ID NO: 2969500 - DNA, 25 bp, Homo sapien
tgctgttcacatactgccagagtga

SEQ ID NO: 2969501 - DNA, 25 bp, Homo sapien
caaatgtccgtcttacaactctgga

SEQ ID NO: 2969502 - DNA, 25 bp, Homo sapien
ccgttatccaccagagaacgtacta

SEQ ID NO: 2969503 - DNA, 25 bp, Homo sapien
gccatagaaagctgccagatccagt

SEQ ID NO: 2969504 - DNA, 25 bp, Homo sapien
gaacgtactactgagagatggccct

SEQ ID NO: 2969505 - DNA, 25 bp, Homo sapien
ccagctgagggctgtcaatccttct

SEQ ID NO: 2969506 - DNA, 25 bp, Homo sapien
ggccccatgatctaccaggaactgg

SEQ ID NO: 2969507 - DNA, 25 bp, Homo sapien
aacgtgctcgatcatggccccatga

SEQ ID NO: 2969508 - DNA, 25 bp, Homo sapien
ggcgcattccactgtagtcaacgtg

SEQ ID NO: 2969509 - DNA, 25 bp, Homo sapien
caacaacagaagtgttccggcaccc

SEQ ID NO: 2969510 - DNA, 25 bp, Homo sapien
gggcgactcggtaacgtctgacaac

SEQ ID NO: 2969511 - DNA, 25 bp, Homo sapien
tcgtgggcgactcggtaacgtctga

SEQ ID NO: 2969512 - DNA, 25 bp, Homo sapien
ctcgtgggcgactcggtaacgtctg

SEQ ID NO: 2969513 - DNA, 25 bp, Homo sapien
gtgggcgactcggtaacgtctgaca

SEQ ID NO: 2969514 - DNA, 25 bp, Homo sapien
gcttgctcaacaggatgatcatgat

SEQ ID NO: 2969515 - DNA, 25 bp, Homo sapien
tgctcaacaggatgatcatgatgtc

SEQ ID NO: 2969516 - DNA, 25 bp, Homo sapien
tcagcttgctcaacaggatgatcat

SEQ ID NO: 2969517 - DNA, 25 bp, Homo sapien
ccatcagcttgctcaacaggatgat

SEQ ID NO: 2969518 - DNA, 25 bp, Homo sapien
ggaacttcttcagggcgtactggta

SEQ ID NO: 2969519 - DNA, 25 bp, Homo sapien
gttcattttcctgcgacaccgagag

SEQ ID NO: 2969520 - DNA, 25 bp, Homo sapien
tcctgcgacaccgagagaggttgag

SEQ ID NO: 2969521 - DNA, 25 bp, Homo sapien
ggcgtactggtagcgctgggcagct

SEQ ID NO: 2969522 - DNA, 25 bp, Homo sapien
ataaaggtccagggggagttctgag

SEQ ID NO: 2969523 - DNA, 25 bp, Homo sapien
gataaaggtccagggggagttctga

SEQ ID NO: 2969524 - DNA, 25 bp, Homo sapien
cgataaaggtccagggggagttctg

SEQ ID NO: 2969525 - DNA, 25 bp, Homo sapien
taaaggtccagggggagttctgaga

SEQ ID NO: 2969526 - DNA, 25 bp, Homo sapien
gctccagggccttagtagcaaattc

SEQ ID NO: 2969527 - DNA, 25 bp, Homo sapien
ctgctgcgttttgcccttgctctcg

SEQ ID NO: 2969528 - DNA, 25 bp, Homo sapien
aagatttcggtttcagctccagggc

SEQ ID NO: 2969529 - DNA, 25 bp, Homo sapien
ccttgctctcgcatagtaagcttca

SEQ ID NO: 2969530 - DNA, 25 bp, Homo sapien
ccctggccatagcagtgaacctgaa

SEQ ID NO: 2969531 - DNA, 25 bp, Homo sapien
agctgggtgtgattttcgggaccat

SEQ ID NO: 2969532 - DNA, 25 bp, Homo sapien
gattttcgggaccatgtgcccctgg

SEQ ID NO: 2969533 - DNA, 25 bp, Homo sapien
tagcagtgaacctgaagcagttctt

SEQ ID NO: 2969534 - DNA, 25 bp, Homo sapien
ttgtcatttacagggtcactgtcaa

SEQ ID NO: 2969535 - DNA, 25 bp, Homo sapien
catttacagggtcactgtcaagtag

SEQ ID NO: 2969536 - DNA, 25 bp, Homo sapien
gggttgtcatttacagggtcactgt

SEQ ID NO: 2969537 - DNA, 25 bp, Homo sapien
gtcatttacagggtcactgtcaagt

SEQ ID NO: 2969538 - DNA, 25 bp, Homo sapien
ttgacaaaatgtgaacacaggaact

SEQ ID NO: 2969539 - DNA, 25 bp, Homo sapien
cttgacaaaatgtgaacacaggaac

SEQ ID NO: 2969540 - DNA, 25 bp, Homo sapien
gacacagcttgatggcctcgttcag

SEQ ID NO: 2969541 - DNA, 25 bp, Homo sapien
ctcgttcaggtcctctaaggctgct

SEQ ID NO: 2969542 - DNA, 25 bp, Homo sapien
tctcagcagaagtctctggatctca

SEQ ID NO: 2969543 - DNA, 25 bp, Homo sapien
ctcagcagaagtctctggatctcac

SEQ ID NO: 2969544 - DNA, 25 bp, Homo sapien
tgcggtggcggcggtggctgctgtg

SEQ ID NO: 2969545 - DNA, 25 bp, Homo sapien
cttccggcaactgctgctgaggctg

SEQ ID NO: 2969546 - DNA, 25 bp, Homo sapien
ggtggcggcggtggctgctgtggct

SEQ ID NO: 2969547 - DNA, 25 bp, Homo sapien
gctgaggctgcggtggcggcggtgg

SEQ ID NO: 2969548 - DNA, 25 bp, Homo sapien
ttcatgctgtggctcaggttctgct

SEQ ID NO: 2969549 - DNA, 25 bp, Homo sapien
ctggagatgtaggctgagtcccgat

SEQ ID NO: 2969550 - DNA, 25 bp, Homo sapien
ctggaccggaagtcaaaaacctgat

SEQ ID NO: 2969551 - DNA, 25 bp, Homo sapien
gatgtaggctgagtcccgatgcggg

SEQ ID NO: 2969552 - DNA, 25 bp, Homo sapien
ggaccggaagtcaaaaacctgatga

SEQ ID NO: 2969553 - DNA, 25 bp, Homo sapien
cctgtaatgtgagttctgatgagtt

SEQ ID NO: 2969554 - DNA, 25 bp, Homo sapien
aggtctgtctagtgggagagcctac

SEQ ID NO: 2969555 - DNA, 25 bp, Homo sapien
tgaggtggactgataggtctgtcta

SEQ ID NO: 2969556 - DNA, 25 bp, Homo sapien
tgggctaggcctgtaatgtgagttc

SEQ ID NO: 2969557 - DNA, 25 bp, Homo sapien
tgctgatagcgcacgggtgaaccag

SEQ ID NO: 2969558 - DNA, 25 bp, Homo sapien
tagagtccgagctaccttcacgtcg

SEQ ID NO: 2969559 - DNA, 25 bp, Homo sapien
ggctggttacttctcacaatctggg

SEQ ID NO: 2969560 - DNA, 25 bp, Homo sapien
actttgggaatgcagcaacggcctg

SEQ ID NO: 2969561 - DNA, 25 bp, Homo sapien
tagaggttgccgctagagctacaca

SEQ ID NO: 2969562 - DNA, 25 bp, Homo sapien
taatagtgcacgtctgcaacccgga

SEQ ID NO: 2969563 - DNA, 25 bp, Homo sapien
ggagaggtccgtctatttcgcagaa

SEQ ID NO: 2969564 - DNA, 25 bp, Homo sapien
gacctggccaaaaagcaatctgaga

SEQ ID NO: 2969565 - DNA, 25 bp, Homo sapien
ctttgcaggtcggtttcttgagaaa

SEQ ID NO: 2969566 - DNA, 25 bp, Homo sapien
gacaggcagggtgtgcgaggctgct

SEQ ID NO: 2969567 - DNA, 25 bp, Homo sapien
gctgcctttgcaggtcggtttcttg

SEQ ID NO: 2969568 - DNA, 25 bp, Homo sapien
gcctttgcaggtcggtttcttgaga

SEQ ID NO: 2969569 - DNA, 25 bp, Homo sapien
tagaggaagaggagaaagagctgca

SEQ ID NO: 2969570 - DNA, 25 bp, Homo sapien
ctagaggaagaggagaaagagctgc

SEQ ID NO: 2969571 - DNA, 25 bp, Homo sapien
agaggaagaggagaaagagctgcac

SEQ ID NO: 2969572 - DNA, 25 bp, Homo sapien
ttgttagtcatggtagatggtcggt

SEQ ID NO: 2969573 - DNA, 25 bp, Homo sapien
tcatggtagatggtcggtctggaat

SEQ ID NO: 2969574 - DNA, 25 bp, Homo sapien
ttagtcatggtagatggtcggtctg

SEQ ID NO: 2969575 - DNA, 25 bp, Homo sapien
catggtagatggtcggtctggaatt

SEQ ID NO: 2969576 - DNA, 25 bp, Homo sapien
tctacctggaaaaatgagcgcggcg

SEQ ID NO: 2969577 - DNA, 25 bp, Homo sapien
tcagcgtcggtatcagagtcagcag

SEQ ID NO: 2969578 - DNA, 25 bp, Homo sapien
tagggcacttccgttccacagagta

SEQ ID NO: 2969579 - DNA, 25 bp, Homo sapien
cacctgccctgagcctgatgaggaa

SEQ ID NO: 2969580 - DNA, 25 bp, Homo sapien
cactggatgactaaggagctgaaga

SEQ ID NO: 2969581 - DNA, 25 bp, Homo sapien
gggtgccgtcagttcttcaatcagc

SEQ ID NO: 2969582 - DNA, 25 bp, Homo sapien
tacctgaggccgtcttagagaaagg

SEQ ID NO: 2969583 - DNA, 25 bp, Homo sapien
tagaacactgatcgtgtgcgaggcc

SEQ ID NO: 2969584 - DNA, 25 bp, Homo sapien
tgttggtggtgaaagcaaggttccc

SEQ ID NO: 2969585 - DNA, 25 bp, Homo sapien
gaggcagagggcacaaaccttataa

SEQ ID NO: 2969586 - DNA, 25 bp, Homo sapien
tctgttctggaggacgagccttctc

SEQ ID NO: 2969587 - DNA, 25 bp, Homo sapien
gatagaagcccatgacttcagacag

SEQ ID NO: 2969588 - DNA, 25 bp, Homo sapien
tgggcgctggcacacctttatccac

SEQ ID NO: 2969589 - DNA, 25 bp, Homo sapien
gcagtggtgaaagcgcgtctctaca

SEQ ID NO: 2969590 - DNA, 25 bp, Homo sapien
ggtagctccagatatcctccacttt

SEQ ID NO: 2969591 - DNA, 25 bp, Homo sapien
ttctgtgttcaataaggtagctcca

SEQ ID NO: 2969592 - DNA, 25 bp, Homo sapien
cggtcccgagcgtggccgcaaccgc

SEQ ID NO: 2969593 - DNA, 25 bp, Homo sapien
aaccgcggggacctggcacgtgcgg

SEQ ID NO: 2969594 - DNA, 25 bp, Homo sapien
tccggtcccggagacaccgcccagc

SEQ ID NO: 2969595 - DNA, 25 bp, Homo sapien
gtggccgcggttcgcccacgtgcgg

SEQ ID NO: 2969596 - DNA, 25 bp, Homo sapien
agggaggtcgcgaggccgggctcac

SEQ ID NO: 2969597 - DNA, 25 bp, Homo sapien
ccgatcatgggggccccggagggag

SEQ ID NO: 2969598 - DNA, 25 bp, Homo sapien
cggagggaggtcgcgaggccgggct

SEQ ID NO: 2969599 - DNA, 25 bp, Homo sapien
cgatcatgggggccccggagggagg

SEQ ID NO: 2969600 - DNA, 25 bp, Homo sapien
agctgcggacggcaagctctcggct

SEQ ID NO: 2969601 - DNA, 25 bp, Homo sapien
tggaatcggtgttccccgaaggcta

SEQ ID NO: 2969602 - DNA, 25 bp, Homo sapien
tttcgtgagagcctggtggaatcgg

SEQ ID NO: 2969603 - DNA, 25 bp, Homo sapien
tgcggacggcaagctctcggctttc

SEQ ID NO: 2969604 - DNA, 25 bp, Homo sapien
cctggaccgggctccgaaggggctg

SEQ ID NO: 2969605 - DNA, 25 bp, Homo sapien
tggaccgggctccgaaggggctggc

SEQ ID NO: 2969606 - DNA, 25 bp, Homo sapien
ctggaccgggctccgaaggggctgg

SEQ ID NO: 2969607 - DNA, 25 bp, Homo sapien
tgagcatcttctggctcgataattc

SEQ ID NO: 2969608 - DNA, 25 bp, Homo sapien
ccctgaccctcacatctgggttgag

SEQ ID NO: 2969609 - DNA, 25 bp, Homo sapien
taattctgtcatgacccaatacgcc

SEQ ID NO: 2969610 - DNA, 25 bp, Homo sapien
ggttgagggccttcctatgccctgt

SEQ ID NO: 2969611 - DNA, 25 bp, Homo sapien
actcagggtcttcgtcggtggctcc

SEQ ID NO: 2969612 - DNA, 25 bp, Homo sapien
agtagcctcgtactttcaagttcct

SEQ ID NO: 2969613 - DNA, 25 bp, Homo sapien
ctggctgctctgacgggtcctgccg

SEQ ID NO: 2969614 - DNA, 25 bp, Homo sapien
ggagcaggcccggaagatgatacct

SEQ ID NO: 2969615 - DNA, 25 bp, Homo sapien
cagggtcaggtgaaatctctcactc

SEQ ID NO: 2969616 - DNA, 25 bp, Homo sapien
acgaagttcagtgtgcccagttggg

SEQ ID NO: 2969617 - DNA, 25 bp, Homo sapien
cttggaggagtcacgaagttcagtg

SEQ ID NO: 2969618 - DNA, 25 bp, Homo sapien
gccaagagaagcataaggatggagt

SEQ ID NO: 2969619 - DNA, 25 bp, Homo sapien
tgagctacttttgctgtaagagtag

SEQ ID NO: 2969620 - DNA, 25 bp, Homo sapien
gccaccagctgagcgtgtgattcct

SEQ ID NO: 2969621 - DNA, 25 bp, Homo sapien
gagaaggaagcactgactgatccag

SEQ ID NO: 2969622 - DNA, 25 bp, Homo sapien
gagatcagctggaaccgggccacca

SEQ ID NO: 2969623 - DNA, 25 bp, Homo sapien
ctttggagaacatttttgggtctga

SEQ ID NO: 2969624 - DNA, 25 bp, Homo sapien
catttttgggtctgagagctttgag

SEQ ID NO: 2969625 - DNA, 25 bp, Homo sapien
gctttgaggccaggccttgagacaa

SEQ ID NO: 2969626 - DNA, 25 bp, Homo sapien
gaggccaggccttgagacaaaccca

SEQ ID NO: 2969627 - DNA, 25 bp, Homo sapien
ctgagcgctgggccaacgtgagccc

SEQ ID NO: 2969628 - DNA, 25 bp, Homo sapien
agcgctgggccaacgtgagccccag

SEQ ID NO: 2969629 - DNA, 25 bp, Homo sapien
ggtgcttggatttatcagctgaaga

SEQ ID NO: 2969630 - DNA, 25 bp, Homo sapien
ccagggggtgcttggatttatcagc

SEQ ID NO: 2969631 - DNA, 25 bp, Homo sapien
tcaatgatgggtcataggaggtgtt

SEQ ID NO: 2969632 - DNA, 25 bp, Homo sapien
caatgatgggtcataggaggtgttc

SEQ ID NO: 2969633 - DNA, 25 bp, Homo sapien
cagtaaataaattcactggaagaca

SEQ ID NO: 2969634 - DNA, 25 bp, Homo sapien
tcagtaaataaattcactggaagac

SEQ ID NO: 2969635 - DNA, 25 bp, Homo sapien
agcccagagaacctcggctcagaca

SEQ ID NO: 2969636 - DNA, 25 bp, Homo sapien
ggtgcctgcgtgattcttcttcatt

SEQ ID NO: 2969637 - DNA, 25 bp, Homo sapien
taaagccccacgacactgacctggt

SEQ ID NO: 2969638 - DNA, 25 bp, Homo sapien
tggaagcccagagaacctcggctca

SEQ ID NO: 2969639 - DNA, 25 bp, Homo sapien
agaatagggcattcccaaaagtaag

SEQ ID NO: 2969640 - DNA, 25 bp, Homo sapien
ggaatagccttctgggaatgcaagt

SEQ ID NO: 2969641 - DNA, 25 bp, Homo sapien
atagccttctgggaatgcaagtccc

SEQ ID NO: 2969642 - DNA, 25 bp, Homo sapien
atagacagaatagggcattcccaaa

SEQ ID NO: 2969643 - DNA, 25 bp, Homo sapien
tgtgggctggcctaacatgcgcaga

SEQ ID NO: 2969644 - DNA, 25 bp, Homo sapien
tctctcctaaactatgctgcctgta

SEQ ID NO: 2969645 - DNA, 25 bp, Homo sapien
catggatggactgcagattttccac

SEQ ID NO: 2969646 - DNA, 25 bp, Homo sapien
cacagtgccttcagtgattcccggg

SEQ ID NO: 2969647 - DNA, 25 bp, Homo sapien
catggctgggcatagatatactata

SEQ ID NO: 2969648 - DNA, 25 bp, Homo sapien
atggctgggcatagatatactataa

SEQ ID NO: 2969649 - DNA, 25 bp, Homo sapien
gtcttggcagtgcagttgcaaaact

SEQ ID NO: 2969650 - DNA, 25 bp, Homo sapien
gtgcagttgcaaaactgggaaccat

SEQ ID NO: 2969651 - DNA, 25 bp, Homo sapien
tttgccaaggaccacatgcatgcca

SEQ ID NO: 2969652 - DNA, 25 bp, Homo sapien
atgcatgccatccaaccacgcagtc

SEQ ID NO: 2969653 - DNA, 25 bp, Homo sapien
ccgcaatattcatgccttctttcac

SEQ ID NO: 2969654 - DNA, 25 bp, Homo sapien
gacccaaagcgctccatagcctccg

SEQ ID NO: 2969655 - DNA, 25 bp, Homo sapien
cccaaagcgctccatagcctccgca

SEQ ID NO: 2969656 - DNA, 25 bp, Homo sapien
agcctccgcaatattcatgccttct

SEQ ID NO: 2969657 - DNA, 25 bp, Homo sapien
tagaggctactgtgagcaaatgagg

SEQ ID NO: 2969658 - DNA, 25 bp, Homo sapien
ggcatggaggagaataaggcaaaca

SEQ ID NO: 2969659 - DNA, 25 bp, Homo sapien
acccaaagggaactgagagatagca

SEQ ID NO: 2969660 - DNA, 25 bp, Homo sapien
gagagatagcacaaagattagaggc

SEQ ID NO: 2969661 - DNA, 25 bp, Homo sapien
tccgacagggttggaagataatgga

SEQ ID NO: 2969662 - DNA, 25 bp, Homo sapien
ccgacagggttggaagataatggaa

SEQ ID NO: 2969663 - DNA, 25 bp, Homo sapien
ttccgacagggttggaagataatgg

SEQ ID NO: 2969664 - DNA, 25 bp, Homo sapien
gttcctgagaaccctcttcaggagg

SEQ ID NO: 2969665 - DNA, 25 bp, Homo sapien
ccagaggctggcctcgcctccaaag

SEQ ID NO: 2969666 - DNA, 25 bp, Homo sapien
agttcctgagaaccctcttcaggag

SEQ ID NO: 2969667 - DNA, 25 bp, Homo sapien
cttggagagccagtggataccagag

SEQ ID NO: 2969668 - DNA, 25 bp, Homo sapien
gcagttttccctcacaactcctccc

SEQ ID NO: 2969669 - DNA, 25 bp, Homo sapien
ccctgcccagtttggcttggagagc

SEQ ID NO: 2969670 - DNA, 25 bp, Homo sapien
aactcctccctgcccagtttggctt

SEQ ID NO: 2969671 - DNA, 25 bp, Homo sapien
cggtgcgcggtgctcggctctgccc

SEQ ID NO: 2969672 - DNA, 25 bp, Homo sapien
gtgcgcggtgctcggctctgcccct

SEQ ID NO: 2969673 - DNA, 25 bp, Homo sapien
tgcgcggtgctcggctctgcccctt

SEQ ID NO: 2969674 - DNA, 25 bp, Homo sapien
cgcggtgctcggctctgccccttct

SEQ ID NO: 2969675 - DNA, 25 bp, Homo sapien
ggcagcagcagccccggcccccggc

SEQ ID NO: 2969676 - DNA, 25 bp, Homo sapien
gcagcagccccggcccccggcggcc

SEQ ID NO: 2969677 - DNA, 25 bp, Homo sapien
cggcagcagcagccccggcccccgg

SEQ ID NO: 2969678 - DNA, 25 bp, Homo sapien
cagcagcagccccggcccccggcgg

SEQ ID NO: 2969679 - DNA, 25 bp, Homo sapien
cagcccggggtccaacgccagggcg

SEQ ID NO: 2969680 - DNA, 25 bp, Homo sapien
ctgcagcccggggtccaacgccagg

SEQ ID NO: 2969681 - DNA, 25 bp, Homo sapien
gcagcccggggtccaacgccagggc

SEQ ID NO: 2969682 - DNA, 25 bp, Homo sapien
tgcagcccggggtccaacgccaggg

SEQ ID NO: 2969683 - DNA, 25 bp, Homo sapien
cccggcctcgtcagcagaaaagttg

SEQ ID NO: 2969684 - DNA, 25 bp, Homo sapien
ggcgccttgcattctccgcggtgat

SEQ ID NO: 2969685 - DNA, 25 bp, Homo sapien
gaacagcacctgttcggcgctggag

SEQ ID NO: 2969686 - DNA, 25 bp, Homo sapien
tgatgttggtgtcgtgcgcccagct

SEQ ID NO: 2969687 - DNA, 25 bp, Homo sapien
tcctccttctggagggaatctgcct

SEQ ID NO: 2969688 - DNA, 25 bp, Homo sapien
cttagtttgcggaagccgcgcttcc

SEQ ID NO: 2969689 - DNA, 25 bp, Homo sapien
tcatccatccaactcgtgcatgctg

SEQ ID NO: 2969690 - DNA, 25 bp, Homo sapien
gaatctgcctcatgggaatggtgga

SEQ ID NO: 2969691 - DNA, 25 bp, Homo sapien
gaccctgcttagatgcaggccataa

SEQ ID NO: 2969692 - DNA, 25 bp, Homo sapien
tgcttagatgcaggccataaaggag

SEQ ID NO: 2969693 - DNA, 25 bp, Homo sapien
gggtgtaggaccctgcttagatgca

SEQ ID NO: 2969694 - DNA, 25 bp, Homo sapien
aggccataaaggagaagccacggtg

SEQ ID NO: 2969695 - DNA, 25 bp, Homo sapien
gatcggttcatacagctccttggcc

SEQ ID NO: 2969696 - DNA, 25 bp, Homo sapien
ccagggtgcgcacagctccgatgat

SEQ ID NO: 2969697 - DNA, 25 bp, Homo sapien
ctccgatgatcctgcgcagctgcgg

SEQ ID NO: 2969698 - DNA, 25 bp, Homo sapien
cagctgcgggtccgtgaagttctgc

SEQ ID NO: 2969699 - DNA, 25 bp, Homo sapien
cagcccctgggacatctgccctccc

SEQ ID NO: 2969700 - DNA, 25 bp, Homo sapien
gtcagaggggaggaatgctccagtg

SEQ ID NO: 2969701 - DNA, 25 bp, Homo sapien
agtgaccagcccctgggacatctgc

SEQ ID NO: 2969702 - DNA, 25 bp, Homo sapien
ctggggagtcagaggggaggaatgc

SEQ ID NO: 2969703 - DNA, 25 bp, Homo sapien
tgctcatgttgcttagcagggcgtt

SEQ ID NO: 2969704 - DNA, 25 bp, Homo sapien
gtggagtagatcctgctcatgttgc

SEQ ID NO: 2969705 - DNA, 25 bp, Homo sapien
cagaccttggcggtggagtagatcc

SEQ ID NO: 2969706 - DNA, 25 bp, Homo sapien
tcatgttgcttagcagggcgttgta

SEQ ID NO: 2969707 - DNA, 25 bp, Homo sapien
cgtacagcggtttcagcgggatgcc

SEQ ID NO: 2969708 - DNA, 25 bp, Homo sapien
catggcgtagcttcgcgaggaagcc

SEQ ID NO: 2969709 - DNA, 25 bp, Homo sapien
cctgcttgtaggcttcattgctgag

SEQ ID NO: 2969710 - DNA, 25 bp, Homo sapien
tgagggcagtgaaatcctcgtacag

SEQ ID NO: 2969711 - DNA, 25 bp, Homo sapien
ggtcccctgaggttgatgtatctgt

SEQ ID NO: 2969712 - DNA, 25 bp, Homo sapien
tgttccagatcgtcctcgaaggtgg

SEQ ID NO: 2969713 - DNA, 25 bp, Homo sapien
ctccgtatcggcgatgcagtgcgcg

SEQ ID NO: 2969714 - DNA, 25 bp, Homo sapien
tctagctgttggtagaggtgttcca

SEQ ID NO: 2969715 - DNA, 25 bp, Homo sapien
ccacacttccgtgggactcatgtgg

SEQ ID NO: 2969716 - DNA, 25 bp, Homo sapien
gggacccacacttccgtgggactca

SEQ ID NO: 2969717 - DNA, 25 bp, Homo sapien
acttccgtgggactcatgtggaggc

SEQ ID NO: 2969718 - DNA, 25 bp, Homo sapien
gggactcatgtggaggcgaggccag

SEQ ID NO: 2969719 - DNA, 25 bp, Homo sapien
ccaccatgtcgtagatgttttccca

SEQ ID NO: 2969720 - DNA, 25 bp, Homo sapien
agcatagtactggtgacatcgaggt

SEQ ID NO: 2969721 - DNA, 25 bp, Homo sapien
tactggtgacatcgaggttgggctt

SEQ ID NO: 2969722 - DNA, 25 bp, Homo sapien
ggcttgtctgggaaaggcaccacca

SEQ ID NO: 2969723 - DNA, 25 bp, Homo sapien
ggaacatgtgcgtggcgttccagcc

SEQ ID NO: 2969724 - DNA, 25 bp, Homo sapien
gtctttcctgttgtagaagtcccaa

SEQ ID NO: 2969725 - DNA, 25 bp, Homo sapien
tgaagaactcctctgccacccggaa

SEQ ID NO: 2969726 - DNA, 25 bp, Homo sapien
agagctccagggaggtgaagaactc

SEQ ID NO: 2969727 - DNA, 25 bp, Homo sapien
cagagaaggtggactaataggcctc

SEQ ID NO: 2969728 - DNA, 25 bp, Homo sapien
tgactatttgtcaaagctgccagag

SEQ ID NO: 2969729 - DNA, 25 bp, Homo sapien
tagccctggaacagacccagcctcc

SEQ ID NO: 2969730 - DNA, 25 bp, Homo sapien
tatagaagtgactatttgtcaaagc

SEQ ID NO: 2969731 - DNA, 25 bp, Homo sapien
catctcatggtgcactgtggagagc

SEQ ID NO: 2969732 - DNA, 25 bp, Homo sapien
caggccgattttgtgcagatgttca

SEQ ID NO: 2969733 - DNA, 25 bp, Homo sapien
gagagctggtccatcgtgacccgtg

SEQ ID NO: 2969734 - DNA, 25 bp, Homo sapien
ggtagtactgtatatggcccatctc

SEQ ID NO: 2969735 - DNA, 25 bp, Homo sapien
catttttagcaagtaattgatgtca

SEQ ID NO: 2969736 - DNA, 25 bp, Homo sapien
ccaccaagtagccaaagggcaggaa

SEQ ID NO: 2969737 - DNA, 25 bp, Homo sapien
caccagtcgaagttgtagcgggaag

SEQ ID NO: 2969738 - DNA, 25 bp, Homo sapien
ccagcgccactggtccaccaagtag

SEQ ID NO: 2969739 - DNA, 25 bp, Homo sapien
tgaaacttagctccagcatcaaagt

SEQ ID NO: 2969740 - DNA, 25 bp, Homo sapien
ttggaacatgaaacttagctccagc

SEQ ID NO: 2969741 - DNA, 25 bp, Homo sapien
tgtatggtgtcacatttggaacatg

SEQ ID NO: 2969742 - DNA, 25 bp, Homo sapien
caggaggacagatcccctgatactt

SEQ ID NO: 2969743 - DNA, 25 bp, Homo sapien
tgccttggtggaccggtagatgtca

SEQ ID NO: 2969744 - DNA, 25 bp, Homo sapien
tggtggaccggtagatgtcacactg

SEQ ID NO: 2969745 - DNA, 25 bp, Homo sapien
cttggtggaccggtagatgtcacac

SEQ ID NO: 2969746 - DNA, 25 bp, Homo sapien
gcccctgccttggtggaccggtaga

SEQ ID NO: 2969747 - DNA, 25 bp, Homo sapien
ggtgccactggtactcgggccagcc

SEQ ID NO: 2969748 - DNA, 25 bp, Homo sapien
gaagtacttgagcagcggctgggca

SEQ ID NO: 2969749 - DNA, 25 bp, Homo sapien
tatgccctccgggtagttgtcaggc

SEQ ID NO: 2969750 - DNA, 25 bp, Homo sapien
catccagggcatctaagccgaccat

SEQ ID NO: 2969751 - DNA, 25 bp, Homo sapien
tgcctgtccccactcgcaggccctg

SEQ ID NO: 2969752 - DNA, 25 bp, Homo sapien
gacatgcctgtccccactcgcaggc

SEQ ID NO: 2969753 - DNA, 25 bp, Homo sapien
cactcgcaggccctgctgatgagct

SEQ ID NO: 2969754 - DNA, 25 bp, Homo sapien
cctctctaggatgctgggggaaaga

SEQ ID NO: 2969755 - DNA, 25 bp, Homo sapien
cctgcagctaccgtcccctggccaa

SEQ ID NO: 2969756 - DNA, 25 bp, Homo sapien
gtcctgcagctaccgtcccctggcc

SEQ ID NO: 2969757 - DNA, 25 bp, Homo sapien
tgcagctaccgtcccctggccaata

SEQ ID NO: 2969758 - DNA, 25 bp, Homo sapien
gcagctaccgtcccctggccaataa

SEQ ID NO: 2969759 - DNA, 25 bp, Homo sapien
ctgcagtagcccaaccctggcccat

SEQ ID NO: 2969760 - DNA, 25 bp, Homo sapien
agcagagggtgcccgtagcagagca

SEQ ID NO: 2969761 - DNA, 25 bp, Homo sapien
gggtgcccgtagcagagcagcagga

SEQ ID NO: 2969762 - DNA, 25 bp, Homo sapien
agagggtgcccgtagcagagcagca

SEQ ID NO: 2969763 - DNA, 25 bp, Homo sapien
agggtgcccgtagcagagcagcagg

SEQ ID NO: 2969764 - DNA, 25 bp, Homo sapien
tgcttgtcccatgggtgactgtcac

SEQ ID NO: 2969765 - DNA, 25 bp, Homo sapien
gctgcttgtcccatgggtgactgtc

SEQ ID NO: 2969766 - DNA, 25 bp, Homo sapien
ctgcccctcccctgcatggtcccac

SEQ ID NO: 2969767 - DNA, 25 bp, Homo sapien
cctgcccctcccctgcatggtccca

SEQ ID NO: 2969768 - DNA, 25 bp, Homo sapien
cagagtgcagggaaacagacaaacc

SEQ ID NO: 2969769 - DNA, 25 bp, Homo sapien
cgcactcccttgtaccctgccctgt

SEQ ID NO: 2969770 - DNA, 25 bp, Homo sapien
ccaggtttgtggtctcaccagaagc

SEQ ID NO: 2969771 - DNA, 25 bp, Homo sapien
aagccattatccctctcgcactccc

SEQ ID NO: 2969772 - DNA, 25 bp, Homo sapien
tccggtcatattcctccacaaactt

SEQ ID NO: 2969773 - DNA, 25 bp, Homo sapien
ccacctgggatgtccggtcatattc

SEQ ID NO: 2969774 - DNA, 25 bp, Homo sapien
gttggcctcggcatactcgttccac

SEQ ID NO: 2969775 - DNA, 25 bp, Homo sapien
gttggtgttgtagttccagttggcc

SEQ ID NO: 2969776 - DNA, 25 bp, Homo sapien
gcgggacagcatctctgtgtgtatg

SEQ ID NO: 2969777 - DNA, 25 bp, Homo sapien
tgtggtgagcgggacagcatctctg

SEQ ID NO: 2969778 - DNA, 25 bp, Homo sapien
tggtgagcgggacagcatctctgtg

SEQ ID NO: 2969779 - DNA, 25 bp, Homo sapien
tgagcgggacagcatctctgtgtgt

SEQ ID NO: 2969780 - DNA, 25 bp, Homo sapien
tgcggtcaagcaacacatatccagg

SEQ ID NO: 2969781 - DNA, 25 bp, Homo sapien
cggtcaagcaacacatatccaggca

SEQ ID NO: 2969782 - DNA, 25 bp, Homo sapien
gcggtcaagcaacacatatccaggc

SEQ ID NO: 2969783 - DNA, 25 bp, Homo sapien
ctgcggtcaagcaacacatatccag

SEQ ID NO: 2969784 - DNA, 25 bp, Homo sapien
tccgcttgatagtggtgttctgcaa

SEQ ID NO: 2969785 - DNA, 25 bp, Homo sapien
gaaccttctttatgatccgcttgat

SEQ ID NO: 2969786 - DNA, 25 bp, Homo sapien
agtgctgcccgttctaggtcctgaa

SEQ ID NO: 2969787 - DNA, 25 bp, Homo sapien
aacttcctggcctgggtgccgtact

SEQ ID NO: 2969788 - DNA, 25 bp, Homo sapien
tctgaggtgcacatcgcatggcaga

SEQ ID NO: 2969789 - DNA, 25 bp, Homo sapien
ggagcgctgccctctcagcagttct

SEQ ID NO: 2969790 - DNA, 25 bp, Homo sapien
aaggagaggcaatgagctgtactcc

SEQ ID NO: 2969791 - DNA, 25 bp, Homo sapien
aatgagctgtactcctttgcacttg

SEQ ID NO: 2969792 - DNA, 25 bp, Homo sapien
gcacacagtggccacgctgtaggtg

SEQ ID NO: 2969793 - DNA, 25 bp, Homo sapien
ggcagctgccattcgggtggcacac

SEQ ID NO: 2969794 - DNA, 25 bp, Homo sapien
cagtggccacgctgtaggtggtttc

SEQ ID NO: 2969795 - DNA, 25 bp, Homo sapien
ccattcgggtggcacacagtggcca

SEQ ID NO: 2969796 - DNA, 25 bp, Homo sapien
cttagctcacctctgcttgtaaggg

SEQ ID NO: 2969797 - DNA, 25 bp, Homo sapien
cccttagctcacctctgcttgtaag

SEQ ID NO: 2969798 - DNA, 25 bp, Homo sapien
taggggtttgaatgccttgagctcc

SEQ ID NO: 2969799 - DNA, 25 bp, Homo sapien
ttgaatgccttgagctccagccctt

SEQ ID NO: 2969800 - DNA, 25 bp, Homo sapien
gacgtggccatcacattcgtcagat

SEQ ID NO: 2969801 - DNA, 25 bp, Homo sapien
tcccatgcccataacaggtcttcat

SEQ ID NO: 2969802 - DNA, 25 bp, Homo sapien
gatgagttccacgtatttcgggtaa

SEQ ID NO: 2969803 - DNA, 25 bp, Homo sapien
aacaggtcttcatatttccgggacg

SEQ ID NO: 2969804 - DNA, 25 bp, Homo sapien
cccggcgcacgtaggcatgcaggtt

SEQ ID NO: 2969805 - DNA, 25 bp, Homo sapien
caggtcttgctccagggatggtgtc

SEQ ID NO: 2969806 - DNA, 25 bp, Homo sapien
tgctgggccccgtagtgacggtgca

SEQ ID NO: 2969807 - DNA, 25 bp, Homo sapien
ggtgtctcgtacatagacctccacg

SEQ ID NO: 2969808 - DNA, 25 bp, Homo sapien
tcctcaaggcccgacatgtgccctt

SEQ ID NO: 2969809 - DNA, 25 bp, Homo sapien
cctcctcaaggcccgacatgtgccc

SEQ ID NO: 2969810 - DNA, 25 bp, Homo sapien
ctcaaggcccgacatgtgcccttac

SEQ ID NO: 2969811 - DNA, 25 bp, Homo sapien
tcacactgtggtccgtctttaccct

SEQ ID NO: 2969812 - DNA, 25 bp, Homo sapien
ggtgaactgacgtccactgtgacat

SEQ ID NO: 2969813 - DNA, 25 bp, Homo sapien
caggggctgagttctaaggccagct

SEQ ID NO: 2969814 - DNA, 25 bp, Homo sapien
tgagttctaaggccagctctgcccc

SEQ ID NO: 2969815 - DNA, 25 bp, Homo sapien
cagttggtgaactgacgtccactgt

SEQ ID NO: 2969816 - DNA, 25 bp, Homo sapien
tactgtcacgattcccattggctag

SEQ ID NO: 2969817 - DNA, 25 bp, Homo sapien
caggtggtcttcactgtccgtgagc

SEQ ID NO: 2969818 - DNA, 25 bp, Homo sapien
cattggctagtaaaggaaacaggct

SEQ ID NO: 2969819 - DNA, 25 bp, Homo sapien
ggtgtgcatatccagcccagtaggt

SEQ ID NO: 2969820 - DNA, 25 bp, Homo sapien
ctttagcatagcctctgtggtgtcc

SEQ ID NO: 2969821 - DNA, 25 bp, Homo sapien
tagatgttggaccaggtctgcgccc

SEQ ID NO: 2969822 - DNA, 25 bp, Homo sapien
accaccaagtcatagatgttggacc

SEQ ID NO: 2969823 - DNA, 25 bp, Homo sapien
tggaccaggtctgcgcccacatgtt

SEQ ID NO: 2969824 - DNA, 25 bp, Homo sapien
ttccagaactcaggaggcacgggca

SEQ ID NO: 2969825 - DNA, 25 bp, Homo sapien
agcatcgacttgttccagaactcag

SEQ ID NO: 2969826 - DNA, 25 bp, Homo sapien
cagaactcaggaggcacgggcagca

SEQ ID NO: 2969827 - DNA, 25 bp, Homo sapien
ccagcatcgacttgttccagaactc

SEQ ID NO: 2969828 - DNA, 25 bp, Homo sapien
tccctcaaggccacaggtaagtctt

SEQ ID NO: 2969829 - DNA, 25 bp, Homo sapien
tttgtactgcatgaaatactggatg

SEQ ID NO: 2969830 - DNA, 25 bp, Homo sapien
atgtggcccatttcgtggtgggcca

SEQ ID NO: 2969831 - DNA, 25 bp, Homo sapien
tagacactgagagggctagcacgtc

SEQ ID NO: 2969832 - DNA, 25 bp, Homo sapien
tcagacccagggtcctagcggcttg

SEQ ID NO: 2969833 - DNA, 25 bp, Homo sapien
gggagcccagctgtcagacccaggg

SEQ ID NO: 2969834 - DNA, 25 bp, Homo sapien
gacccagggtcctagcggcttggcc

SEQ ID NO: 2969835 - DNA, 25 bp, Homo sapien
ggtgctgtaccttttgggccctgtg

SEQ ID NO: 2969836 - DNA, 25 bp, Homo sapien
ctccagcgccactgatcgacgaggt

SEQ ID NO: 2969837 - DNA, 25 bp, Homo sapien
cactgatcgacgaggtagctgaagg

SEQ ID NO: 2969838 - DNA, 25 bp, Homo sapien
ggataaaggcgatcttgtcaagggc

SEQ ID NO: 2969839 - DNA, 25 bp, Homo sapien
gatgcttccatcaaataccctccag

SEQ ID NO: 2969840 - DNA, 25 bp, Homo sapien
ctgtcgagtgggaatatatgttgga

SEQ ID NO: 2969841 - DNA, 25 bp, Homo sapien
gaatatatgttggaagatgagtttg

SEQ ID NO: 2969842 - DNA, 25 bp, Homo sapien
ctgatgtaaggcacgctagaaggaa

SEQ ID NO: 2969843 - DNA, 25 bp, Homo sapien
ggcacgctagaaggaatgtggaact

SEQ ID NO: 2969844 - DNA, 25 bp, Homo sapien
tgggtcaaagtcaccttgagtcctg

SEQ ID NO: 2969845 - DNA, 25 bp, Homo sapien
gggtcaaagtcaccttgagtcctgg

SEQ ID NO: 2969846 - DNA, 25 bp, Homo sapien
aaagcatcacgaattccctggtaga

SEQ ID NO: 2969847 - DNA, 25 bp, Homo sapien
gctaagtcacatgcgcacagcagag

SEQ ID NO: 2969848 - DNA, 25 bp, Homo sapien
tcctagccgtgcctgtgtagatgcc

SEQ ID NO: 2969849 - DNA, 25 bp, Homo sapien
caaatgggccgtgtggatctactag

SEQ ID NO: 2969850 - DNA, 25 bp, Homo sapien
ggcacagtgcctcgtggaactggaa

SEQ ID NO: 2969851 - DNA, 25 bp, Homo sapien
ctggatgatgaagctgacaaagtac

SEQ ID NO: 2969852 - DNA, 25 bp, Homo sapien
ccggcctccttggactggtagatgt

SEQ ID NO: 2969853 - DNA, 25 bp, Homo sapien
ctggtagatgtcacacttgtgcagg

SEQ ID NO: 2969854 - DNA, 25 bp, Homo sapien
acggcctactgaagcccagcttcat

SEQ ID NO: 2969855 - DNA, 25 bp, Homo sapien
catgcagctcgttctccgtgcggag

SEQ ID NO: 2969856 - DNA, 25 bp, Homo sapien
cggagttcggcgtccagttgtactg

SEQ ID NO: 2969857 - DNA, 25 bp, Homo sapien
gaagtagctcaacatggccgaggcg

SEQ ID NO: 2969858 - DNA, 25 bp, Homo sapien
tccgaggtcagccgcatggctgccc

SEQ ID NO: 2969859 - DNA, 25 bp, Homo sapien
cgaggtcagccgcatggctgcccag

SEQ ID NO: 2969860 - DNA, 25 bp, Homo sapien
gctccgaggtcagccgcatggctgc

SEQ ID NO: 2969861 - DNA, 25 bp, Homo sapien
gaggtcagccgcatggctgcccagc

SEQ ID NO: 2969862 - DNA, 25 bp, Homo sapien
gcccgtgggagtgccggtggaggct

SEQ ID NO: 2969863 - DNA, 25 bp, Homo sapien
aggctgcggtggcggatgctgaaga

SEQ ID NO: 2969864 - DNA, 25 bp, Homo sapien
cccaggaagctgacgcggccgctgt

SEQ ID NO: 2969865 - DNA, 25 bp, Homo sapien
gtggctaccagcagggcgatgccca

SEQ ID NO: 2969866 - DNA, 25 bp, Homo sapien
caggacctttaattgtattcacaga

SEQ ID NO: 2969867 - DNA, 25 bp, Homo sapien
cctttaattgtattcacagagagac

SEQ ID NO: 2969868 - DNA, 25 bp, Homo sapien
ggacctttaattgtattcacagaga

SEQ ID NO: 2969869 - DNA, 25 bp, Homo sapien
gcaggacctttaattgtattcacag

SEQ ID NO: 2969870 - DNA, 25 bp, Homo sapien
taaaatgacactccctccaatgcag

SEQ ID NO: 2969871 - DNA, 25 bp, Homo sapien
cactggcagtgttagaatggctgtc

SEQ ID NO: 2969872 - DNA, 25 bp, Homo sapien
gcagccgataacagccggaagcctt

SEQ ID NO: 2969873 - DNA, 25 bp, Homo sapien
ccagagtccgcgtgggtcagtgctt

SEQ ID NO: 2969874 - DNA, 25 bp, Homo sapien
tgttcacccttgatcctgagccaag

SEQ ID NO: 2969875 - DNA, 25 bp, Homo sapien
cacccttgatcctgagccaaggcaa

SEQ ID NO: 2969876 - DNA, 25 bp, Homo sapien
gttcacccttgatcctgagccaagg

SEQ ID NO: 2969877 - DNA, 25 bp, Homo sapien
taaactgtgttcacccttgatcctg

SEQ ID NO: 2969878 - DNA, 25 bp, Homo sapien
gtctcggtctcattgtagaagtcat

SEQ ID NO: 2969879 - DNA, 25 bp, Homo sapien
tggtctcggtctcattgtagaagtc

SEQ ID NO: 2969880 - DNA, 25 bp, Homo sapien
ttggtctcggtctcattgtagaagt

SEQ ID NO: 2969881 - DNA, 25 bp, Homo sapien
ggtctcggtctcattgtagaagtca

SEQ ID NO: 2969882 - DNA, 25 bp, Homo sapien
catgaacttgttcaacacaacttca

SEQ ID NO: 2969883 - DNA, 25 bp, Homo sapien
tccatgaacttgttcaacacaactt

SEQ ID NO: 2969884 - DNA, 25 bp, Homo sapien
gatattggtgacatagttccaagtg

SEQ ID NO: 2969885 - DNA, 25 bp, Homo sapien
ggcctccatgaacttgttcaacaca

SEQ ID NO: 2969886 - DNA, 25 bp, Homo sapien
ggggcaggagatgtggtgccccatg

SEQ ID NO: 2969887 - DNA, 25 bp, Homo sapien
gggggcaggagatgtggtgccccat

SEQ ID NO: 2969888 - DNA, 25 bp, Homo sapien
actggggcttcccttgttcctcttg

SEQ ID NO: 2969889 - DNA, 25 bp, Homo sapien
ctggaggaagtttagggcttccagg

SEQ ID NO: 2969890 - DNA, 25 bp, Homo sapien
gcttgcagccctctttgacatgtac

SEQ ID NO: 2969891 - DNA, 25 bp, Homo sapien
aaaggacaagaagcaagagattctt

SEQ ID NO: 2969892 - DNA, 25 bp, Homo sapien
aaggacaagaagcaagagattcttg

SEQ ID NO: 2969893 - DNA, 25 bp, Homo sapien
aggacaagaagcaagagattcttgc

SEQ ID NO: 2969894 - DNA, 25 bp, Homo sapien
tgcaaagagagccaccaaggttggg

SEQ ID NO: 2969895 - DNA, 25 bp, Homo sapien
agagccaccaaggttgggggacagg

SEQ ID NO: 2969896 - DNA, 25 bp, Homo sapien
agagagccaccaaggttgggggaca

SEQ ID NO: 2969897 - DNA, 25 bp, Homo sapien
ctgcaaagagagccaccaaggttgg

SEQ ID NO: 2969898 - DNA, 25 bp, Homo sapien
gccaaagtaaatcatgaactgggac

SEQ ID NO: 2969899 - DNA, 25 bp, Homo sapien
tgccaaagtaaatcatgaactggga

SEQ ID NO: 2969900 - DNA, 25 bp, Homo sapien
tcagcatgccattcacatccgggtc

SEQ ID NO: 2969901 - DNA, 25 bp, Homo sapien
cacatccgggtccttgaactgggtg

SEQ ID NO: 2969902 - DNA, 25 bp, Homo sapien
ttcacatccgggtccttgaactggg

SEQ ID NO: 2969903 - DNA, 25 bp, Homo sapien
tgccattcacatccgggtccttgaa

SEQ ID NO: 2969904 - DNA, 25 bp, Homo sapien
gacagagccgccttgtctatgttct

SEQ ID NO: 2969905 - DNA, 25 bp, Homo sapien
acagagccgccttgtctatgttctg

SEQ ID NO: 2969906 - DNA, 25 bp, Homo sapien
cagagccgccttgtctatgttctgc

SEQ ID NO: 2969907 - DNA, 25 bp, Homo sapien
ccagggagcatgtgcctaaaggcct

SEQ ID NO: 2969908 - DNA, 25 bp, Homo sapien
cagggagcatgtgcctaaaggcctg

SEQ ID NO: 2969909 - DNA, 25 bp, Homo sapien
aaggcctgggggttccatccatcac

SEQ ID NO: 2969910 - DNA, 25 bp, Homo sapien
tgcctaaaggcctgggggttccatc

SEQ ID NO: 2969911 - DNA, 25 bp, Homo sapien
tgtcatctccaggtaggccagaagc

SEQ ID NO: 2969912 - DNA, 25 bp, Homo sapien
cacacctgggccatactgtatgtca

SEQ ID NO: 2969913 - DNA, 25 bp, Homo sapien
ccaggtaggccagaagctcgttata

SEQ ID NO: 2969914 - DNA, 25 bp, Homo sapien
ctcattcaggcacacctgggccata

SEQ ID NO: 2969915 - DNA, 25 bp, Homo sapien
ggtgggacagggcttgggtgttcac

SEQ ID NO: 2969916 - DNA, 25 bp, Homo sapien
gggcccctggaagggactgagtgct

SEQ ID NO: 2969917 - DNA, 25 bp, Homo sapien
actgagtgctggagattctgtggtt

SEQ ID NO: 2969918 - DNA, 25 bp, Homo sapien
ctggcaataagggagggtggttggg

SEQ ID NO: 2969919 - DNA, 25 bp, Homo sapien
ctatgcccagaaaaggagccatggg

SEQ ID NO: 2969920 - DNA, 25 bp, Homo sapien
ccatgggggacccactcccacttgc

SEQ ID NO: 2969921 - DNA, 25 bp, Homo sapien
gggacccactcccacttgcctcttc

SEQ ID NO: 2969922 - DNA, 25 bp, Homo sapien
ggagccatgggggacccactcccac

SEQ ID NO: 2969923 - DNA, 25 bp, Homo sapien
ctggaggtggccatgacttcgagtt

SEQ ID NO: 2969924 - DNA, 25 bp, Homo sapien
tcgaaggtggtgcagatctggcggc

SEQ ID NO: 2969925 - DNA, 25 bp, Homo sapien
gctccacatagtgctcgaaggtggt

SEQ ID NO: 2969926 - DNA, 25 bp, Homo sapien
ccttgttgctgagctccacatagtg

SEQ ID NO: 2969927 - DNA, 25 bp, Homo sapien
gtgcagatctggcggcccacggcat

SEQ ID NO: 2969928 - DNA, 25 bp, Homo sapien
gtcttggataaatgtcagaggcctt

SEQ ID NO: 2969929 - DNA, 25 bp, Homo sapien
tcacatcttgcttcccgtcttttgc

SEQ ID NO: 2969930 - DNA, 25 bp, Homo sapien
caggtcttggataaatgtcagaggc

SEQ ID NO: 2969931 - DNA, 25 bp, Homo sapien
tcctgccgcggagcctctgcctagg

SEQ ID NO: 2969932 - DNA, 25 bp, Homo sapien
tccagggtatccgactcatacttgg

SEQ ID NO: 2969933 - DNA, 25 bp, Homo sapien
tcatacttggagtgccacaaggccc

SEQ ID NO: 2969934 - DNA, 25 bp, Homo sapien
ctgcgcacgtaggtgtgcaggttca

SEQ ID NO: 2969935 - DNA, 25 bp, Homo sapien
aggtcgatgagctcgggcccatagt

SEQ ID NO: 2969936 - DNA, 25 bp, Homo sapien
caggaccgggtctaagatgttgacc

SEQ ID NO: 2969937 - DNA, 25 bp, Homo sapien
aagatgttgacccaggactgagcca

SEQ ID NO: 2969938 - DNA, 25 bp, Homo sapien
ggtctaagatgttgacccaggactg

SEQ ID NO: 2969939 - DNA, 25 bp, Homo sapien
gggatcttcttcaggaagggcagga

SEQ ID NO: 2969940 - DNA, 25 bp, Homo sapien
aggtggcagcgccaaggaggtgaag

SEQ ID NO: 2969941 - DNA, 25 bp, Homo sapien
cgcccatcggttggcctcattagca

SEQ ID NO: 2969942 - DNA, 25 bp, Homo sapien
tctcgcccatcggttggcctcatta

SEQ ID NO: 2969943 - DNA, 25 bp, Homo sapien
caggtggcagcgccaaggaggtgaa

SEQ ID NO: 2969944 - DNA, 25 bp, Homo sapien
ttccaggcagagatgtgacactcca

SEQ ID NO: 2969945 - DNA, 25 bp, Homo sapien
aatcgtcgtcctggtagaagttcca

SEQ ID NO: 2969946 - DNA, 25 bp, Homo sapien
tcgtcctggtagaagttccaggcag

SEQ ID NO: 2969947 - DNA, 25 bp, Homo sapien
ctgaaatcgtcgtcctggtagaagt

SEQ ID NO: 2969948 - DNA, 25 bp, Homo sapien
aggttccagtgattctcctgcctca

SEQ ID NO: 2969949 - DNA, 25 bp, Homo sapien
tgcaatggtgcgatcttggctcact

SEQ ID NO: 2969950 - DNA, 25 bp, Homo sapien
cagcctccggctcccaggttccagt

SEQ ID NO: 2969951 - DNA, 25 bp, Homo sapien
gtcttgctgtgtctcccagctggag

SEQ ID NO: 2969952 - DNA, 25 bp, Homo sapien
cccatttcgtggaagatggagagcg

SEQ ID NO: 2969953 - DNA, 25 bp, Homo sapien
tcttctgtggtcacttccgcgcact

SEQ ID NO: 2969954 - DNA, 25 bp, Homo sapien
tctgtggtcacttccgcgcacttct

SEQ ID NO: 2969955 - DNA, 25 bp, Homo sapien
tggaatggcccatttcgtggaagat

SEQ ID NO: 2969956 - DNA, 25 bp, Homo sapien
gatgatggagaggttcttgtactgc

SEQ ID NO: 2969957 - DNA, 25 bp, Homo sapien
atgatggagaggttcttgtactgca

SEQ ID NO: 2969958 - DNA, 25 bp, Homo sapien
tgatggagaggttcttgtactgcag

SEQ ID NO: 2969959 - DNA, 25 bp, Homo sapien
agcctcttcaaaggctgggttggca

SEQ ID NO: 2969960 - DNA, 25 bp, Homo sapien
cacagcctcttcaaaggctgggttg

SEQ ID NO: 2969961 - DNA, 25 bp, Homo sapien
cccacagcctcttcaaaggctgggt

SEQ ID NO: 2969962 - DNA, 25 bp, Homo sapien
cagcctcttcaaaggctgggttggc

SEQ ID NO: 2969963 - DNA, 25 bp, Homo sapien
ctgagtcctggtgctagaggctgag

SEQ ID NO: 2969964 - DNA, 25 bp, Homo sapien
gagtcctggtgctagaggctgagca

SEQ ID NO: 2969965 - DNA, 25 bp, Homo sapien
cctggtgctagaggctgagcaggcc

SEQ ID NO: 2969966 - DNA, 25 bp, Homo sapien
ggctgagcaggcctatgttgagcag

SEQ ID NO: 2969967 - DNA, 25 bp, Homo sapien
tccagcgaaggaggtccatcaggta

SEQ ID NO: 2969968 - DNA, 25 bp, Homo sapien
gatggtgccgtcaaagaccttccag

SEQ ID NO: 2969969 - DNA, 25 bp, Homo sapien
caatatgcatcaggaaattgacctc

SEQ ID NO: 2969970 - DNA, 25 bp, Homo sapien
tcctgattgtagatgtccttccaga

SEQ ID NO: 2969971 - DNA, 25 bp, Homo sapien
aaagtggaacttggcacctggatca

SEQ ID NO: 2969972 - DNA, 25 bp, Homo sapien
cctggatcaaagtcttcctctgagt

SEQ ID NO: 2969973 - DNA, 25 bp, Homo sapien
tgaggaatagcggggcacaagccct

SEQ ID NO: 2969974 - DNA, 25 bp, Homo sapien
caaagtcttcctctgagtgaggaat

SEQ ID NO: 2969975 - DNA, 25 bp, Homo sapien
tgtcacactggtgcagtggacccat

SEQ ID NO: 2969976 - DNA, 25 bp, Homo sapien
tcttggagttgtagatgtcacactg

SEQ ID NO: 2969977 - DNA, 25 bp, Homo sapien
gtggacccatgtggcccgaggcttt

SEQ ID NO: 2969978 - DNA, 25 bp, Homo sapien
gctttgcacagtgtttcgtggaact

SEQ ID NO: 2969979 - DNA, 25 bp, Homo sapien
ccacatgctttggtgccaagtcaga

SEQ ID NO: 2969980 - DNA, 25 bp, Homo sapien
tggccacatgctttggtgccaagtc

SEQ ID NO: 2969981 - DNA, 25 bp, Homo sapien
ggccacatgctttggtgccaagtca

SEQ ID NO: 2969982 - DNA, 25 bp, Homo sapien
gccacatgctttggtgccaagtcag

SEQ ID NO: 2969983 - DNA, 25 bp, Homo sapien
tcccctccacaaaccatattcggct

SEQ ID NO: 2969984 - DNA, 25 bp, Homo sapien
ctctcccctccacaaaccatattcg

SEQ ID NO: 2969985 - DNA, 25 bp, Homo sapien
cctccacaaaccatattcggctctg

SEQ ID NO: 2969986 - DNA, 25 bp, Homo sapien
acaaaccatattcggctctgctgct

SEQ ID NO: 2969987 - DNA, 25 bp, Homo sapien
tcagtaggggtttgaagtaggtcat

SEQ ID NO: 2969988 - DNA, 25 bp, Homo sapien
gcttgagcccagctttagagcatcc

SEQ ID NO: 2969989 - DNA, 25 bp, Homo sapien
gtcagcatctttaggacctctggcc

SEQ ID NO: 2969990 - DNA, 25 bp, Homo sapien
catctttaggacctctggccagggc

SEQ ID NO: 2969991 - DNA, 25 bp, Homo sapien
tggccagcctaagatgtccccttgc

SEQ ID NO: 2969992 - DNA, 25 bp, Homo sapien
ctaagatgtccccttgctgcatgtt

SEQ ID NO: 2969993 - DNA, 25 bp, Homo sapien
agatgtccccttgctgcatgttctg

SEQ ID NO: 2969994 - DNA, 25 bp, Homo sapien
agcctaagatgtccccttgctgcat

SEQ ID NO: 2969995 - DNA, 25 bp, Homo sapien
agagggacccctggggtctcctgtg

SEQ ID NO: 2969996 - DNA, 25 bp, Homo sapien
gaagacataggagtctcatagggtg

SEQ ID NO: 2969997 - DNA, 25 bp, Homo sapien
acataggagtctcatagggtgggta

SEQ ID NO: 2969998 - DNA, 25 bp, Homo sapien
gtggaagacataggagtctcatagg

SEQ ID NO: 2969999 - DNA, 25 bp, Homo sapien
taggagtctcatagggtgggtagaa

SEQ ID NO: 2970000 - DNA, 25 bp, Homo sapien
acagcacccagtacccaaatttagc

SEQ ID NO: 2970001 - DNA, 25 bp, Homo sapien
gcacccagtacccaaatttagcctg

SEQ ID NO: 2970002 - DNA, 25 bp, Homo sapien
tggcagggttccatggctatgccca

SEQ ID NO: 2970003 - DNA, 25 bp, Homo sapien
cagcacccagtacccaaatttagcc

SEQ ID NO: 2970004 - DNA, 25 bp, Homo sapien
gcactgcagtcccatagccgggtta

SEQ ID NO: 2970005 - DNA, 25 bp, Homo sapien
ggcactgcagtcccatagccgggtt

SEQ ID NO: 2970006 - DNA, 25 bp, Homo sapien
gatgtgcatccagctcttatagagc

SEQ ID NO: 2970007 - DNA, 25 bp, Homo sapien
tgctgactagagttgttacagaggg

SEQ ID NO: 2970008 - DNA, 25 bp, Homo sapien
tcattttccaagtcccttttgtgca

SEQ ID NO: 2970009 - DNA, 25 bp, Homo sapien
ccttttgtgcaccatggcctgtgct

SEQ ID NO: 2970010 - DNA, 25 bp, Homo sapien
tattctggtgacataaactttacaa

SEQ ID NO: 2970011 - DNA, 25 bp, Homo sapien
gtccaggtgagaggcttagagtcct

SEQ ID NO: 2970012 - DNA, 25 bp, Homo sapien
tgtttgtcatgcagagccacagtgc

SEQ ID NO: 2970013 - DNA, 25 bp, Homo sapien
gcaattagacatgaaagaaatattc

SEQ ID NO: 2970014 - DNA, 25 bp, Homo sapien
ctcccggcgtctccgtctgtcctcg

SEQ ID NO: 2970015 - DNA, 25 bp, Homo sapien
cccggagccacaggcgccactggct

SEQ ID NO: 2970016 - DNA, 25 bp, Homo sapien
tgcccggagccacaggcgccactgg

SEQ ID NO: 2970017 - DNA, 25 bp, Homo sapien
tcccggcgtctccgtctgtcctcgg

SEQ ID NO: 2970018 - DNA, 25 bp, Homo sapien
taagtgttttggggagcgacgtggc

SEQ ID NO: 2970019 - DNA, 25 bp, Homo sapien
tttggccctcgaacttgcggatgat

SEQ ID NO: 2970020 - DNA, 25 bp, Homo sapien
tttggggagcgacgtggcccctgcg

SEQ ID NO: 2970021 - DNA, 25 bp, Homo sapien
atgatggtgtccaggtaagtgtttt

SEQ ID NO: 2970022 - DNA, 25 bp, Homo sapien
tccactcgggagtagccgaagagtt

SEQ ID NO: 2970023 - DNA, 25 bp, Homo sapien
agggcctgcgctaggcgggacacgg

SEQ ID NO: 2970024 - DNA, 25 bp, Homo sapien
cggtagtagaggatgtccaccttgc

SEQ ID NO: 2970025 - DNA, 25 bp, Homo sapien
gggacacggcgctgcttggtgtgtt

SEQ ID NO: 2970026 - DNA, 25 bp, Homo sapien
taccagctaaaatgccccatgcctg

SEQ ID NO: 2970027 - DNA, 25 bp, Homo sapien
tgtgcctctcaggtcgtagactctg

SEQ ID NO: 2970028 - DNA, 25 bp, Homo sapien
ggtcgtagactctgcccctccaggg

SEQ ID NO: 2970029 - DNA, 25 bp, Homo sapien
gcagcccacacccagcggctggctg

SEQ ID NO: 2970030 - DNA, 25 bp, Homo sapien
agttggaacatttggcctcaggagg

SEQ ID NO: 2970031 - DNA, 25 bp, Homo sapien
tgaggctgggcattctaccccatgg

SEQ ID NO: 2970032 - DNA, 25 bp, Homo sapien
catggacccccattctgcagaagag

SEQ ID NO: 2970033 - DNA, 25 bp, Homo sapien
tcctgcaaagatgccctgctcctgt

SEQ ID NO: 2970034 - DNA, 25 bp, Homo sapien
acatctaccaggcagcggaagctgg

SEQ ID NO: 2970035 - DNA, 25 bp, Homo sapien
tcctcgaagttgagaatgaacatga

SEQ ID NO: 2970036 - DNA, 25 bp, Homo sapien
acaacaggcgctgggacaagctgcg

SEQ ID NO: 2970037 - DNA, 25 bp, Homo sapien
ctgggccaggtcctcgaagttgaga

SEQ ID NO: 2970038 - DNA, 25 bp, Homo sapien
aagttgagcgtgaactgtgggatct

SEQ ID NO: 2970039 - DNA, 25 bp, Homo sapien
aagttgaactccacgaagttgagcg

SEQ ID NO: 2970040 - DNA, 25 bp, Homo sapien
tcagtgacgttctgtgtccgctcca

SEQ ID NO: 2970041 - DNA, 25 bp, Homo sapien
ctcaatctccgtggtggagctggag

SEQ ID NO: 2970042 - DNA, 25 bp, Homo sapien
tgagactggcctagagggctgaggc

SEQ ID NO: 2970043 - DNA, 25 bp, Homo sapien
tcaggaggtcgaaagggatggcggc

SEQ ID NO: 2970044 - DNA, 25 bp, Homo sapien
tcatcggagccagtgcggaagatca

SEQ ID NO: 2970045 - DNA, 25 bp, Homo sapien
gccgtgattcgtcctgatcgctgag

SEQ ID NO: 2970046 - DNA, 25 bp, Homo sapien
gaagttgatgacgatgtccacgacg

SEQ ID NO: 2970047 - DNA, 25 bp, Homo sapien
gaaggggcagcctgctcctcttacc

SEQ ID NO: 2970048 - DNA, 25 bp, Homo sapien
tgcccatcctggaaggggcagcctg

SEQ ID NO: 2970049 - DNA, 25 bp, Homo sapien
aggggcagcctgctcctcttaccag

SEQ ID NO: 2970050 - DNA, 25 bp, Homo sapien
gggcagcctgctcctcttaccaggg

SEQ ID NO: 2970051 - DNA, 25 bp, Homo sapien
gggtagggaaatggtcacagggctg

SEQ ID NO: 2970052 - DNA, 25 bp, Homo sapien
ggtagggaaatggtcacagggctgg

SEQ ID NO: 2970053 - DNA, 25 bp, Homo sapien
gtagggaaatggtcacagggctggg

SEQ ID NO: 2970054 - DNA, 25 bp, Homo sapien
tagggaaatggtcacagggctgggg

SEQ ID NO: 2970055 - DNA, 25 bp, Homo sapien
gcagcagccgcgctgtcttcaatag

SEQ ID NO: 2970056 - DNA, 25 bp, Homo sapien
agccgccccatactcagagtagcgg

SEQ ID NO: 2970057 - DNA, 25 bp, Homo sapien
agcggtccagcttccgtgctacgcg

SEQ ID NO: 2970058 - DNA, 25 bp, Homo sapien
cagccagtgcgctatgagcgcgaag

SEQ ID NO: 2970059 - DNA, 25 bp, Homo sapien
tagagggctgtgacatacttgtcct

SEQ ID NO: 2970060 - DNA, 25 bp, Homo sapien
tgtgttctaggtagggccgctccac

SEQ ID NO: 2970061 - DNA, 25 bp, Homo sapien
gccgctccacattgccgatggcgta

SEQ ID NO: 2970062 - DNA, 25 bp, Homo sapien
tcgctgccgttgtagcgcttgccaa

SEQ ID NO: 2970063 - DNA, 25 bp, Homo sapien
ccttctcggagttggtgttgggcga

SEQ ID NO: 2970064 - DNA, 25 bp, Homo sapien
ctcggagttggtgttgggcgagaca

SEQ ID NO: 2970065 - DNA, 25 bp, Homo sapien
cggagttggtgttgggcgagacatt

SEQ ID NO: 2970066 - DNA, 25 bp, Homo sapien
gaccttctcggagttggtgttgggc

SEQ ID NO: 2970067 - DNA, 25 bp, Homo sapien
cagtgtactgcatgaattgttgcta

SEQ ID NO: 2970068 - DNA, 25 bp, Homo sapien
cagagcatgaagttaggccgtggca

SEQ ID NO: 2970069 - DNA, 25 bp, Homo sapien
gctgcacacttaggatcagtgtact

SEQ ID NO: 2970070 - DNA, 25 bp, Homo sapien
tttcacgggtaagaccagagcatga

SEQ ID NO: 2970071 - DNA, 25 bp, Homo sapien
tgaactccttgacacgcagcatctg

SEQ ID NO: 2970072 - DNA, 25 bp, Homo sapien
tacaggcgctggatgatcgcggaca

SEQ ID NO: 2970073 - DNA, 25 bp, Homo sapien
cacgttcccgaagatgctggcgtac

SEQ ID NO: 2970074 - DNA, 25 bp, Homo sapien
cagcatctgcgtgtggtagcgcgcg

SEQ ID NO: 2970075 - DNA, 25 bp, Homo sapien
cacgtcgtcgcgcaggatctcgatg

SEQ ID NO: 2970076 - DNA, 25 bp, Homo sapien
acgtcgccgaggtgcaccagcgtgt

SEQ ID NO: 2970077 - DNA, 25 bp, Homo sapien
taggatggccacgaccacgtcgtcg

SEQ ID NO: 2970078 - DNA, 25 bp, Homo sapien
ggtcttgaacttgacggctagcgcg

SEQ ID NO: 2970079 - DNA, 25 bp, Homo sapien
aaggtgacctccagcttactccaga

SEQ ID NO: 2970080 - DNA, 25 bp, Homo sapien
ttactccagaagctctccgcaaagg

SEQ ID NO: 2970081 - DNA, 25 bp, Homo sapien
tgcaggtcgcagtaggtcagagccc

SEQ ID NO: 2970082 - DNA, 25 bp, Homo sapien
gcacgtctgcactggacttgcctgg

SEQ ID NO: 2970083 - DNA, 25 bp, Homo sapien
tgtcggggggatgagtggagacccc

SEQ ID NO: 2970084 - DNA, 25 bp, Homo sapien
ctgtcggggggatgagtggagaccc

SEQ ID NO: 2970085 - DNA, 25 bp, Homo sapien
tcactgagaaagaaaccttggtggt

SEQ ID NO: 2970086 - DNA, 25 bp, Homo sapien
ctgactggttgtcactgagaaagaa

SEQ ID NO: 2970087 - DNA, 25 bp, Homo sapien
tgagaaagaaaccttggtggtcttg

SEQ ID NO: 2970088 - DNA, 25 bp, Homo sapien
actggttgtcactgagaaagaaacc

SEQ ID NO: 2970089 - DNA, 25 bp, Homo sapien
gcagggtgaggacttttagcactgg

SEQ ID NO: 2970090 - DNA, 25 bp, Homo sapien
tggcagggtgaggacttttagcact

SEQ ID NO: 2970091 - DNA, 25 bp, Homo sapien
agggtgaggacttttagcactggtt

SEQ ID NO: 2970092 - DNA, 25 bp, Homo sapien
ctggcagggtgaggacttttagcac

SEQ ID NO: 2970093 - DNA, 25 bp, Homo sapien
tggagcacaaggtcctgcccccatg

SEQ ID NO: 2970094 - DNA, 25 bp, Homo sapien
aggctgtagcccttagaggggaact

SEQ ID NO: 2970095 - DNA, 25 bp, Homo sapien
ccccatggagttctggctcccagga

SEQ ID NO: 2970096 - DNA, 25 bp, Homo sapien
ggtgccctggagcacaaggtcctgc

SEQ ID NO: 2970097 - DNA, 25 bp, Homo sapien
tcctgcagtagctcaggccagaggc

SEQ ID NO: 2970098 - DNA, 25 bp, Homo sapien
catttcctgcagtagctcaggccag

SEQ ID NO: 2970099 - DNA, 25 bp, Homo sapien
gggctgtgccttgggggcatttcct

SEQ ID NO: 2970100 - DNA, 25 bp, Homo sapien
cagatgcatctgagatgctcagggg

SEQ ID NO: 2970101 - DNA, 25 bp, Homo sapien
gcaagatgcggctgaggtctgagga

SEQ ID NO: 2970102 - DNA, 25 bp, Homo sapien
tgggccctggactcgtcgtctccga

SEQ ID NO: 2970103 - DNA, 25 bp, Homo sapien
tctccgaggctataggaaccaaggc

SEQ ID NO: 2970104 - DNA, 25 bp, Homo sapien
tccagaatgtagctggcgtggccct

SEQ ID NO: 2970105 - DNA, 25 bp, Homo sapien
gccagagttttgtccgttgccacag

SEQ ID NO: 2970106 - DNA, 25 bp, Homo sapien
tggtgccagagttttgtccgttgcc

SEQ ID NO: 2970107 - DNA, 25 bp, Homo sapien
gttctgaggatggtgccagagtttt

SEQ ID NO: 2970108 - DNA, 25 bp, Homo sapien
gttttgtccgttgccacagccaggt

SEQ ID NO: 2970109 - DNA, 25 bp, Homo sapien
ggaccacagatgagtccttgtactt

SEQ ID NO: 2970110 - DNA, 25 bp, Homo sapien
ccttgtacttccaggggatgtagag

SEQ ID NO: 2970111 - DNA, 25 bp, Homo sapien
tgcttgggaacagagccaaggtgtt

SEQ ID NO: 2970112 - DNA, 25 bp, Homo sapien
agcagggaccacagatgagtccttg

SEQ ID NO: 2970113 - DNA, 25 bp, Homo sapien
cccaccttcagtcccctcatggtgt

SEQ ID NO: 2970114 - DNA, 25 bp, Homo sapien
caccttcagtcccctcatggtgtct

SEQ ID NO: 2970115 - DNA, 25 bp, Homo sapien
ccttcagtcccctcatggtgtcttt

SEQ ID NO: 2970116 - DNA, 25 bp, Homo sapien
cttcagtcccctcatggtgtcttta

SEQ ID NO: 2970117 - DNA, 25 bp, Homo sapien
gtttgtagctactttaggagaggcc

SEQ ID NO: 2970118 - DNA, 25 bp, Homo sapien
cctgggtcacctggatcagcagttt

SEQ ID NO: 2970119 - DNA, 25 bp, Homo sapien
ggctgggaaaagtcgtgagcttctt

SEQ ID NO: 2970120 - DNA, 25 bp, Homo sapien
aaagtcgtgagcttcttcacccacg

SEQ ID NO: 2970121 - DNA, 25 bp, Homo sapien
ctcaatcctgtaagctgcctccaca

SEQ ID NO: 2970122 - DNA, 25 bp, Homo sapien
gaggactgtcctgacatgtctgcca

SEQ ID NO: 2970123 - DNA, 25 bp, Homo sapien
tattagctgtgtgacactccactgc

SEQ ID NO: 2970124 - DNA, 25 bp, Homo sapien
aggctcagagcaaggtactcatgta

SEQ ID NO: 2970125 - DNA, 25 bp, Homo sapien
tgggcccagcagaaccaccttcagg

SEQ ID NO: 2970126 - DNA, 25 bp, Homo sapien
aggagcctctgggcccagcagaacc

SEQ ID NO: 2970127 - DNA, 25 bp, Homo sapien
agcagaaccaccttcaggtccccaa

SEQ ID NO: 2970128 - DNA, 25 bp, Homo sapien
cagaaccaccttcaggtccccaaca

SEQ ID NO: 2970129 - DNA, 25 bp, Homo sapien
accatgcccagctaaaggaaatccc

SEQ ID NO: 2970130 - DNA, 25 bp, Homo sapien
taatccagccccaaaggtatctgtg

SEQ ID NO: 2970131 - DNA, 25 bp, Homo sapien
aatccagccccaaaggtatctgtgc

SEQ ID NO: 2970132 - DNA, 25 bp, Homo sapien
ctaatccagccccaaaggtatctgt

SEQ ID NO: 2970133 - DNA, 25 bp, Homo sapien
tcaaaccagcttgggaacggacgac

SEQ ID NO: 2970134 - DNA, 25 bp, Homo sapien
tacgggccgggtcaacagtgggctg

SEQ ID NO: 2970135 - DNA, 25 bp, Homo sapien
atgcggcgacaaacaacgacgacgg

SEQ ID NO: 2970136 - DNA, 25 bp, Homo sapien
gagccgagcctgagatctatgggtc

SEQ ID NO: 2970137 - DNA, 25 bp, Homo sapien
tgtagatctccttccgtttgccgtg

SEQ ID NO: 2970138 - DNA, 25 bp, Homo sapien
ccagggcgcttcatacttgtagatc

SEQ ID NO: 2970139 - DNA, 25 bp, Homo sapien
tcatcgcgtagactgtccagggcgc

SEQ ID NO: 2970140 - DNA, 25 bp, Homo sapien
aagcgaaagcgcttatcgggccgca

SEQ ID NO: 2970141 - DNA, 25 bp, Homo sapien
tgttcaggaaacaacggcgggatca

SEQ ID NO: 2970142 - DNA, 25 bp, Homo sapien
gaaacaagccaagagataaggccct

SEQ ID NO: 2970143 - DNA, 25 bp, Homo sapien
tggatatcaggaagcaagagcaaca

SEQ ID NO: 2970144 - DNA, 25 bp, Homo sapien
catggcataaagcaggagtagtggc

SEQ ID NO: 2970145 - DNA, 25 bp, Homo sapien
atctcgcccgggcaatgggtggact

SEQ ID NO: 2970146 - DNA, 25 bp, Homo sapien
tgtccactatgggccataaggaaga

SEQ ID NO: 2970147 - DNA, 25 bp, Homo sapien
tgtttgtaaattgttcatgtatgtg

SEQ ID NO: 2970148 - DNA, 25 bp, Homo sapien
gacttaaagatcagtgcatattcct

SEQ ID NO: 2970149 - DNA, 25 bp, Homo sapien
ctgatctactgataggtggaggcac

SEQ ID NO: 2970150 - DNA, 25 bp, Homo sapien
tatatctgtagtgcaacataagtgg

SEQ ID NO: 2970151 - DNA, 25 bp, Homo sapien
gaccatggcacacagaatttaagaa

SEQ ID NO: 2970152 - DNA, 25 bp, Homo sapien
gattttaagacagcgcattgcctac

SEQ ID NO: 2970153 - DNA, 25 bp, Homo sapien
gtatgactgtctgtgactttgccag

SEQ ID NO: 2970154 - DNA, 25 bp, Homo sapien
gaaatgctgtttacccttgtcacca

SEQ ID NO: 2970155 - DNA, 25 bp, Homo sapien
catggcaagcaggaaccaatggtct

SEQ ID NO: 2970156 - DNA, 25 bp, Homo sapien
ttatgaagtcgaccacctctttggc

SEQ ID NO: 2970157 - DNA, 25 bp, Homo sapien
ttttagtatgggtactttatctgcc

SEQ ID NO: 2970158 - DNA, 25 bp, Homo sapien
gtggtaggactgacaattatttttc

SEQ ID NO: 2970159 - DNA, 25 bp, Homo sapien
caatcctctatatctctgcttgaag

SEQ ID NO: 2970160 - DNA, 25 bp, Homo sapien
ttgaactcacagtggtaggactgac

SEQ ID NO: 2970161 - DNA, 25 bp, Homo sapien
tcctatcacctttagcacagactac

SEQ ID NO: 2970162 - DNA, 25 bp, Homo sapien
ttcatttctagactctgtttataca

SEQ ID NO: 2970163 - DNA, 25 bp, Homo sapien
tcagttcttagagtatcaaacgatc

SEQ ID NO: 2970164 - DNA, 25 bp, Homo sapien
tatgttttaatatccatcattagtc

SEQ ID NO: 2970165 - DNA, 25 bp, Homo sapien
tgggcaagccacttagcacatagct

SEQ ID NO: 2970166 - DNA, 25 bp, Homo sapien
tggccctcctttaccccttatatga

SEQ ID NO: 2970167 - DNA, 25 bp, Homo sapien
tttccgttgaatgcaaagctctcta

SEQ ID NO: 2970168 - DNA, 25 bp, Homo sapien
tttttccaatcagttgatttcaact

SEQ ID NO: 2970169 - DNA, 25 bp, Homo sapien
tacagtcagacatgtcccatggctc

SEQ ID NO: 2970170 - DNA, 25 bp, Homo sapien
tacaactgggtaggagaggtcagat

SEQ ID NO: 2970171 - DNA, 25 bp, Homo sapien
gaagtgattggctgaagcccgagac

SEQ ID NO: 2970172 - DNA, 25 bp, Homo sapien
gcaaattggcctcctcagaatgggc

SEQ ID NO: 2970173 - DNA, 25 bp, Homo sapien
tacaaaacaatgtaagctttgccta

SEQ ID NO: 2970174 - DNA, 25 bp, Homo sapien
caaaacaatgtaagctttgcctacg

SEQ ID NO: 2970175 - DNA, 25 bp, Homo sapien
caatgtaagctttgcctacgactag

SEQ ID NO: 2970176 - DNA, 25 bp, Homo sapien
aaacaatgtaagctttgcctacgac

SEQ ID NO: 2970177 - DNA, 25 bp, Homo sapien
tacatagcgagtgagaatgacaagc

SEQ ID NO: 2970178 - DNA, 25 bp, Homo sapien
gaactggttggacttctgagctaac

SEQ ID NO: 2970179 - DNA, 25 bp, Homo sapien
gggagaataatctacctaggccaag

SEQ ID NO: 2970180 - DNA, 25 bp, Homo sapien
gcaacgaacgttaaatcaagccaag

SEQ ID NO: 2970181 - DNA, 25 bp, Homo sapien
gcacacacactcaaatcagaactat

SEQ ID NO: 2970182 - DNA, 25 bp, Homo sapien
taaagaaggaagattctagatgaaa

SEQ ID NO: 2970183 - DNA, 25 bp, Homo sapien
attattatgttttgcatgcctatac

SEQ ID NO: 2970184 - DNA, 25 bp, Homo sapien
ggaatttttggtatcagcctttgtg

SEQ ID NO: 2970185 - DNA, 25 bp, Homo sapien
tctacacaagttttatgctattata

SEQ ID NO: 2970186 - DNA, 25 bp, Homo sapien
tgcccatctcagcctgacagagttc

SEQ ID NO: 2970187 - DNA, 25 bp, Homo sapien
ccatctcagcctgacagagttctgg

SEQ ID NO: 2970188 - DNA, 25 bp, Homo sapien
gatttctacacaagttttatgctat

SEQ ID NO: 2970189 - DNA, 25 bp, Homo sapien
gctacagctcccgaacaaggtttgc

SEQ ID NO: 2970190 - DNA, 25 bp, Homo sapien
tctgtctgctagtaggcaaactgtc

SEQ ID NO: 2970191 - DNA, 25 bp, Homo sapien
tcttccagcatcattggttgagaat

SEQ ID NO: 2970192 - DNA, 25 bp, Homo sapien
gcttttttacatatgaacgtctgac

SEQ ID NO: 2970193 - DNA, 25 bp, Homo sapien
tgtctctccataatacgatataaat

SEQ ID NO: 2970194 - DNA, 25 bp, Homo sapien
gcattatgtgcaatgtggcagtata

SEQ ID NO: 2970195 - DNA, 25 bp, Homo sapien
cactgatctatggttttgtctctcc

SEQ ID NO: 2970196 - DNA, 25 bp, Homo sapien
catcagtacactgctcttgagattc

SEQ ID NO: 2970197 - DNA, 25 bp, Homo sapien
catgagagggtatctagtccaacca

SEQ ID NO: 2970198 - DNA, 25 bp, Homo sapien
gttacactcaacactgcaaagccag

SEQ ID NO: 2970199 - DNA, 25 bp, Homo sapien
tcttgactccaactacataagtgca

SEQ ID NO: 2970200 - DNA, 25 bp, Homo sapien
gtccaaccatcctctggcagacaag

SEQ ID NO: 2970201 - DNA, 25 bp, Homo sapien
ggatagacgccttttgtgtcaggga

SEQ ID NO: 2970202 - DNA, 25 bp, Homo sapien
gtttctgcaaataaactctgaactc

SEQ ID NO: 2970203 - DNA, 25 bp, Homo sapien
tctcctcatctaaaccaacaagctg

SEQ ID NO: 2970204 - DNA, 25 bp, Homo sapien
gatagtcaccgcttgttgccagtag

SEQ ID NO: 2970205 - DNA, 25 bp, Homo sapien
gggagcacagaaatcagagttctta

SEQ ID NO: 2970206 - DNA, 25 bp, Homo sapien
attgtttagcaaacactccagcctg

SEQ ID NO: 2970207 - DNA, 25 bp, Homo sapien
taaaagataaggatccacctcattc

SEQ ID NO: 2970208 - DNA, 25 bp, Homo sapien
aaagataaggatccacctcattcca

SEQ ID NO: 2970209 - DNA, 25 bp, Homo sapien
gggtcttcacgtggccagacacgag

SEQ ID NO: 2970210 - DNA, 25 bp, Homo sapien
catgggcgatcagctgggtcttcac

SEQ ID NO: 2970211 - DNA, 25 bp, Homo sapien
ccccagatggtgcatgtcgtatcaa

SEQ ID NO: 2970212 - DNA, 25 bp, Homo sapien
cagacacgagattcactcgccctaa

SEQ ID NO: 2970213 - DNA, 25 bp, Homo sapien
caactctagaagtcttgtaacaggg

SEQ ID NO: 2970214 - DNA, 25 bp, Homo sapien
ttagcagcagtcaactctagaagtc

SEQ ID NO: 2970215 - DNA, 25 bp, Homo sapien
tggtttagcagcagtcaactctaga

SEQ ID NO: 2970216 - DNA, 25 bp, Homo sapien
ctagaagtcttgtaacagggcttac

SEQ ID NO: 2970217 - DNA, 25 bp, Homo sapien
gaccgggccagtcatcaacaaggag

SEQ ID NO: 2970218 - DNA, 25 bp, Homo sapien
tattccttcaagacaaggctgccgg

SEQ ID NO: 2970219 - DNA, 25 bp, Homo sapien
gatctgccaggtatcaatgagagcc

SEQ ID NO: 2970220 - DNA, 25 bp, Homo sapien
gtaatgctctctcggctctaagtga

SEQ ID NO: 2970221 - DNA, 25 bp, Homo sapien
aacccgagagctctaatatcagtgg

SEQ ID NO: 2970222 - DNA, 25 bp, Homo sapien
tgagtactgaaacccgagagctcta

SEQ ID NO: 2970223 - DNA, 25 bp, Homo sapien
acagtgtctgtgagtactgaaaccc

SEQ ID NO: 2970224 - DNA, 25 bp, Homo sapien
gcccaaacagtgtctgtgagtactg

SEQ ID NO: 2970225 - DNA, 25 bp, Homo sapien
ctgttggtgaacaagaagctccagt

SEQ ID NO: 2970226 - DNA, 25 bp, Homo sapien
tgccacgtccagttcatctaaacct

SEQ ID NO: 2970227 - DNA, 25 bp, Homo sapien
atctgccacgtccagttcatctaaa

SEQ ID NO: 2970228 - DNA, 25 bp, Homo sapien
tcagattcagatccattacctcttc

SEQ ID NO: 2970229 - DNA, 25 bp, Homo sapien
ccccggcccggctaaatgcaatatc

SEQ ID NO: 2970230 - DNA, 25 bp, Homo sapien
cccccggcccggctaaatgcaatat

SEQ ID NO: 2970231 - DNA, 25 bp, Homo sapien
cccggcccggctaaatgcaatatca

SEQ ID NO: 2970232 - DNA, 25 bp, Homo sapien
accgagccatcagcacccacagagg

SEQ ID NO: 2970233 - DNA, 25 bp, Homo sapien
ctgtgttctagatggcggaggtcaa

SEQ ID NO: 2970234 - DNA, 25 bp, Homo sapien
gggtcttcgtaaatgatggtgctgt

SEQ ID NO: 2970235 - DNA, 25 bp, Homo sapien
gaggtcaaacatccgcaccgagcca

SEQ ID NO: 2970236 - DNA, 25 bp, Homo sapien
ctcgatggttgtttaacctggcgac

SEQ ID NO: 2970237 - DNA, 25 bp, Homo sapien
tgtggggcccaagcaatgccattga

SEQ ID NO: 2970238 - DNA, 25 bp, Homo sapien
cattgacacatgctcgatggttgtt

SEQ ID NO: 2970239 - DNA, 25 bp, Homo sapien
gggaacccggacatctagaatcacc

SEQ ID NO: 2970240 - DNA, 25 bp, Homo sapien
ggtgctagctttggtctgggaaaca

SEQ ID NO: 2970241 - DNA, 25 bp, Homo sapien
tctgttatatccatgagggatgcct

SEQ ID NO: 2970242 - DNA, 25 bp, Homo sapien
gagatgttgatcttcacagtcccaa

SEQ ID NO: 2970243 - DNA, 25 bp, Homo sapien
tgtccatgagggtacaagatcgtct

SEQ ID NO: 2970244 - DNA, 25 bp, Homo sapien
tccacctcctgggttgaagtgcttc

SEQ ID NO: 2970245 - DNA, 25 bp, Homo sapien
tggcataatctctggtcaatgcaac

SEQ ID NO: 2970246 - DNA, 25 bp, Homo sapien
ggcataatctctggtcaatgcaacc

SEQ ID NO: 2970247 - DNA, 25 bp, Homo sapien
cagtggcataatctctggtcaatgc

SEQ ID NO: 2970248 - DNA, 25 bp, Homo sapien
ctggaaggagacacattacctgttg

SEQ ID NO: 2970249 - DNA, 25 bp, Homo sapien
aaagatgactttcgccttgctctta

SEQ ID NO: 2970250 - DNA, 25 bp, Homo sapien
tgatagaggtcatctatgcagaggg

SEQ ID NO: 2970251 - DNA, 25 bp, Homo sapien
caataaaagtgcattgacaaccagc

SEQ ID NO: 2970252 - DNA, 25 bp, Homo sapien
aaaataaggcaatggccttcagagc

SEQ ID NO: 2970253 - DNA, 25 bp, Homo sapien
gctggtctcagatacaaagaaaatc

SEQ ID NO: 2970254 - DNA, 25 bp, Homo sapien
cctaatagactaattgtgggcaata

SEQ ID NO: 2970255 - DNA, 25 bp, Homo sapien
tagtctcctgccaaggccgcatagt

SEQ ID NO: 2970256 - DNA, 25 bp, Homo sapien
tttgcagccacttaaaatacttgag

SEQ ID NO: 2970257 - DNA, 25 bp, Homo sapien
caatataatgagagcgtttcttccc

SEQ ID NO: 2970258 - DNA, 25 bp, Homo sapien
cttcagtgaggtgttatatagaaga

SEQ ID NO: 2970259 - DNA, 25 bp, Homo sapien
tagaagactgataaagtagtgctga

SEQ ID NO: 2970260 - DNA, 25 bp, Homo sapien
tatctccaggcagttgttgtagcag

SEQ ID NO: 2970261 - DNA, 25 bp, Homo sapien
gatgcccactgcacattgttgatct

SEQ ID NO: 2970262 - DNA, 25 bp, Homo sapien
caggatagggtcctcaatggctcgg

SEQ ID NO: 2970263 - DNA, 25 bp, Homo sapien
gatccagtcgggctgagttgatgcc

SEQ ID NO: 2970264 - DNA, 25 bp, Homo sapien
aaaagcccctgcctcgtgggcacag

SEQ ID NO: 2970265 - DNA, 25 bp, Homo sapien
acatactggccactggaaacatgtt

SEQ ID NO: 2970266 - DNA, 25 bp, Homo sapien
agacatactggccactggaaacatg

SEQ ID NO: 2970267 - DNA, 25 bp, Homo sapien
gacatactggccactggaaacatgt

SEQ ID NO: 2970268 - DNA, 25 bp, Homo sapien
aagacatactggccactggaaacat

SEQ ID NO: 2970269 - DNA, 25 bp, Homo sapien
ctgagtctgccacagagggcgatgg

SEQ ID NO: 2970270 - DNA, 25 bp, Homo sapien
ctgggctgaggaggcgccacacagc

SEQ ID NO: 2970271 - DNA, 25 bp, Homo sapien
ggcgatggggtgactggccaggaac

SEQ ID NO: 2970272 - DNA, 25 bp, Homo sapien
gagaaaatcttaaaactcagccctg

SEQ ID NO: 2970273 - DNA, 25 bp, Homo sapien
caagggctcatctaacggtggaatc

SEQ ID NO: 2970274 - DNA, 25 bp, Homo sapien
aaccttcgggtaggagcagagcgca

SEQ ID NO: 2970275 - DNA, 25 bp, Homo sapien
cataacagaaagacacctgcggcct

SEQ ID NO: 2970276 - DNA, 25 bp, Homo sapien
tacacaggcagtgactcaagaaggc

SEQ ID NO: 2970277 - DNA, 25 bp, Homo sapien
cagtgcaaatccagtggcaaatgca

SEQ ID NO: 2970278 - DNA, 25 bp, Homo sapien
aagaactgctcgctttgtatctcca

SEQ ID NO: 2970279 - DNA, 25 bp, Homo sapien
agaggcaaccacaagcacatggcca

SEQ ID NO: 2970280 - DNA, 25 bp, Homo sapien
tctccaaacgatgcagtgcaaatcc

SEQ ID NO: 2970281 - DNA, 25 bp, Homo sapien
aatgaaaagcagaggagggttctga

SEQ ID NO: 2970282 - DNA, 25 bp, Homo sapien
atgaaaagcagaggagggttctgac

SEQ ID NO: 2970283 - DNA, 25 bp, Homo sapien
gatgcccaatttatggcccaggaag

SEQ ID NO: 2970284 - DNA, 25 bp, Homo sapien
ggtataccacaatcaacccaaggtg

SEQ ID NO: 2970285 - DNA, 25 bp, Homo sapien
catgctacaaattcactctgggtgg

SEQ ID NO: 2970286 - DNA, 25 bp, Homo sapien
agtagccttcaatggagattcccca

SEQ ID NO: 2970287 - DNA, 25 bp, Homo sapien
tgatgggcagaaaatacggtacttc

SEQ ID NO: 2970288 - DNA, 25 bp, Homo sapien
tattacaaagtatgatgggcagaaa

SEQ ID NO: 2970289 - DNA, 25 bp, Homo sapien
cagaaaatacggtacttcttataca

SEQ ID NO: 2970290 - DNA, 25 bp, Homo sapien
aatacggtacttcttatacaggagg

SEQ ID NO: 2970291 - DNA, 25 bp, Homo sapien
ccggtcacctgagatccaaaggctt

SEQ ID NO: 2970292 - DNA, 25 bp, Homo sapien
gggcggctcaacagctaatgaccct

SEQ ID NO: 2970293 - DNA, 25 bp, Homo sapien
gaccctggggttcaagctgctagca

SEQ ID NO: 2970294 - DNA, 25 bp, Homo sapien
aacagctaatgaccctacactgtcc

SEQ ID NO: 2970295 - DNA, 25 bp, Homo sapien
gggcagcggccctgcttaggctggc

SEQ ID NO: 2970296 - DNA, 25 bp, Homo sapien
cccggggcctcgtgccagcaagcat

SEQ ID NO: 2970297 - DNA, 25 bp, Homo sapien
gccgggggtcgcgcggaggagccgc

SEQ ID NO: 2970298 - DNA, 25 bp, Homo sapien
gcctcgtgccagcaagcatcgggca

SEQ ID NO: 2970299 - DNA, 25 bp, Homo sapien
ccttcggacccttgatgtgcctgac

SEQ ID NO: 2970300 - DNA, 25 bp, Homo sapien
gcgactcctttcgacgtccttcgga

SEQ ID NO: 2970301 - DNA, 25 bp, Homo sapien
ttggaccacttgttgtgcccggcgg

SEQ ID NO: 2970302 - DNA, 25 bp, Homo sapien
gacagccgcggtaaagtgcagcgtc

SEQ ID NO: 2970303 - DNA, 25 bp, Homo sapien
gccggagatctaggtgggcccaatt

SEQ ID NO: 2970304 - DNA, 25 bp, Homo sapien
ccaattccgagaggcaagcgaggct

SEQ ID NO: 2970305 - DNA, 25 bp, Homo sapien
tctaggtgggcccaattccgagagg

SEQ ID NO: 2970306 - DNA, 25 bp, Homo sapien
aaacaaagtgaagggccggagatct

SEQ ID NO: 2970307 - DNA, 25 bp, Homo sapien
ccaggttgctgttgtgctcagggtt

SEQ ID NO: 2970308 - DNA, 25 bp, Homo sapien
cgacacacctctaagatattggcca

SEQ ID NO: 2970309 - DNA, 25 bp, Homo sapien
tgggcatatgtttgctgcgacacac

SEQ ID NO: 2970310 - DNA, 25 bp, Homo sapien
tctcaatcgttgacttgggcatatg

SEQ ID NO: 2970311 - DNA, 25 bp, Homo sapien
ggctgagcagtcccggtcttgactg

SEQ ID NO: 2970312 - DNA, 25 bp, Homo sapien
tgagcagtcccggtcttgactgtat

SEQ ID NO: 2970313 - DNA, 25 bp, Homo sapien
agcagtcccggtcttgactgtatgg

SEQ ID NO: 2970314 - DNA, 25 bp, Homo sapien
cagtcccggtcttgactgtatggcc

SEQ ID NO: 2970315 - DNA, 25 bp, Homo sapien
gcataacggttagagcacaggctct

SEQ ID NO: 2970316 - DNA, 25 bp, Homo sapien
tgagtcaactcacctaacattcctg

SEQ ID NO: 2970317 - DNA, 25 bp, Homo sapien
gagtttttatccatgcttagcctgc

SEQ ID NO: 2970318 - DNA, 25 bp, Homo sapien
cacacctaggccttgtcgtaagagc

SEQ ID NO: 2970319 - DNA, 25 bp, Homo sapien
aatgcctcgatgagcagagaagagc

SEQ ID NO: 2970320 - DNA, 25 bp, Homo sapien
cttggcacttgtggctactgttaga

SEQ ID NO: 2970321 - DNA, 25 bp, Homo sapien
gggcctcgaccctcatacagcaaat

SEQ ID NO: 2970322 - DNA, 25 bp, Homo sapien
ggatatgtctaatgtctgcttggca

SEQ ID NO: 2970323 - DNA, 25 bp, Homo sapien
gatcaacagtacttgccttgcagag

SEQ ID NO: 2970324 - DNA, 25 bp, Homo sapien
gctgctgggtaagggaacagcccaa

SEQ ID NO: 2970325 - DNA, 25 bp, Homo sapien
ggagcagatcgcatcctcaaggaga

SEQ ID NO: 2970326 - DNA, 25 bp, Homo sapien
gaacaagtctttgggatcctgctag

SEQ ID NO: 2970327 - DNA, 25 bp, Homo sapien
atctccagggcacgctctaggttca

SEQ ID NO: 2970328 - DNA, 25 bp, Homo sapien
ccctttttgtcaaaagagtgacgag

SEQ ID NO: 2970329 - DNA, 25 bp, Homo sapien
cctgcttcgattgccatctccaggg

SEQ ID NO: 2970330 - DNA, 25 bp, Homo sapien
agagtgacgagctcctacagccatc

SEQ ID NO: 2970331 - DNA, 25 bp, Homo sapien
cacttggtgcagtgaagaggcatca

SEQ ID NO: 2970332 - DNA, 25 bp, Homo sapien
gggatgaactctagtgcacaggaca

SEQ ID NO: 2970333 - DNA, 25 bp, Homo sapien
agagcctgaatgagatgtgcggcct

SEQ ID NO: 2970334 - DNA, 25 bp, Homo sapien
catagacgtgaatcacatcctcgtg

SEQ ID NO: 2970335 - DNA, 25 bp, Homo sapien
catcagagtctgaccagctgggtgg

SEQ ID NO: 2970336 - DNA, 25 bp, Homo sapien
tgccacatttctaggaaggaacccg

SEQ ID NO: 2970337 - DNA, 25 bp, Homo sapien
tcagagattgctgcagaagcctgtg

SEQ ID NO: 2970338 - DNA, 25 bp, Homo sapien
gcttcaaggtcgcaagtcctgtcct

SEQ ID NO: 2970339 - DNA, 25 bp, Homo sapien
catcagaccatggagtgcctggata

SEQ ID NO: 2970340 - DNA, 25 bp, Homo sapien
gacacaaactcaggaagactcaaga

SEQ ID NO: 2970341 - DNA, 25 bp, Homo sapien
cacaggacaccagttgaatagctta

SEQ ID NO: 2970342 - DNA, 25 bp, Homo sapien
ttagtccagaggatcccaacagctg

SEQ ID NO: 2970343 - DNA, 25 bp, Homo sapien
ggatccccatttctggtcatcaaga

SEQ ID NO: 2970344 - DNA, 25 bp, Homo sapien
ccagtgagttggagaagttccggca

SEQ ID NO: 2970345 - DNA, 25 bp, Homo sapien
ccaactatggccaagaagatgaagg

SEQ ID NO: 2970346 - DNA, 25 bp, Homo sapien
cagggtctcatgttccggtgcagca

SEQ ID NO: 2970347 - DNA, 25 bp, Homo sapien
ggaggctctcttatccattgggaaa

SEQ ID NO: 2970348 - DNA, 25 bp, Homo sapien
gatatttgggcaagtggcatgacca

SEQ ID NO: 2970349 - DNA, 25 bp, Homo sapien
gaaagccactctaggcctgacatgc

SEQ ID NO: 2970350 - DNA, 25 bp, Homo sapien
gacatgcttgacaggctctgacgca

SEQ ID NO: 2970351 - DNA, 25 bp, Homo sapien
tgtataacagggatcagaaagccac

SEQ ID NO: 2970352 - DNA, 25 bp, Homo sapien
caaaacagccgcatgtaatcggtac

SEQ ID NO: 2970353 - DNA, 25 bp, Homo sapien
cagagctagaatttggtccctagca

SEQ ID NO: 2970354 - DNA, 25 bp, Homo sapien
aacacttaactattgccaggtgctg

SEQ ID NO: 2970355 - DNA, 25 bp, Homo sapien
taagttcttgtccaaggttgctagc

SEQ ID NO: 2970356 - DNA, 25 bp, Homo sapien
catcggcagggtggcccgctacatc

SEQ ID NO: 2970357 - DNA, 25 bp, Homo sapien
ggtggcccgctacatcccgggcgct

SEQ ID NO: 2970358 - DNA, 25 bp, Homo sapien
tgtggcatcggcagggtggcccgct

SEQ ID NO: 2970359 - DNA, 25 bp, Homo sapien
ccgcccgcccgccagtccctcagac

SEQ ID NO: 2970360 - DNA, 25 bp, Homo sapien
gggcgcgggctgcgctctgggcccc

SEQ ID NO: 2970361 - DNA, 25 bp, Homo sapien
gcggggacggcagcgggcctggctc

SEQ ID NO: 2970362 - DNA, 25 bp, Homo sapien
ggcagcgggcctggctccgcgcggg

SEQ ID NO: 2970363 - DNA, 25 bp, Homo sapien
gccggggctgcatgccgggggcccg

SEQ ID NO: 2970364 - DNA, 25 bp, Homo sapien
ggcggtggctaaggtccgtgagtgt

SEQ ID NO: 2970365 - DNA, 25 bp, Homo sapien
cggtggctaaggtccgtgagtgtca

SEQ ID NO: 2970366 - DNA, 25 bp, Homo sapien
ggtggctaaggtccgtgagtgtcac

SEQ ID NO: 2970367 - DNA, 25 bp, Homo sapien
ggcggcggtggctaaggtccgtgag

SEQ ID NO: 2970368 - DNA, 25 bp, Homo sapien
gattgagttcaatgcctcctgttcg

SEQ ID NO: 2970369 - DNA, 25 bp, Homo sapien
attgagttcaatgcctcctgttcgt

SEQ ID NO: 2970370 - DNA, 25 bp, Homo sapien
tctggagggccaccagatcgttcat

SEQ ID NO: 2970371 - DNA, 25 bp, Homo sapien
tcatatccaggcatccggtgacgtc

SEQ ID NO: 2970372 - DNA, 25 bp, Homo sapien
catccggtgacgtcggttcatctgg

SEQ ID NO: 2970373 - DNA, 25 bp, Homo sapien
ttcttcatggtctcatatccaggca

SEQ ID NO: 2970374 - DNA, 25 bp, Homo sapien
tggttggtatgtattacttcccatt

SEQ ID NO: 2970375 - DNA, 25 bp, Homo sapien
catttaaccatacctggttggtatg

SEQ ID NO: 2970376 - DNA, 25 bp, Homo sapien
cacatgagcttgttgttactgtggg

SEQ ID NO: 2970377 - DNA, 25 bp, Homo sapien
ggctgttcagaagggctgagctgct

SEQ ID NO: 2970378 - DNA, 25 bp, Homo sapien
tggcccctgcacatgagcttgttgt

SEQ ID NO: 2970379 - DNA, 25 bp, Homo sapien
cctgcacatgagcttgttgttactg

SEQ ID NO: 2970380 - DNA, 25 bp, Homo sapien
aatttctaaacagctgttctagttc

SEQ ID NO: 2970381 - DNA, 25 bp, Homo sapien
tttctaaacagctgttctagttcca

SEQ ID NO: 2970382 - DNA, 25 bp, Homo sapien
tctaaacagctgttctagttccaca

SEQ ID NO: 2970383 - DNA, 25 bp, Homo sapien
aaacagctgttctagttccacatct

SEQ ID NO: 2970384 - DNA, 25 bp, Homo sapien
cacagagaactaacacccattgata

SEQ ID NO: 2970385 - DNA, 25 bp, Homo sapien
gaactaacacccattgataactcac

SEQ ID NO: 2970386 - DNA, 25 bp, Homo sapien
cacccattgataactcactgtgagt

SEQ ID NO: 2970387 - DNA, 25 bp, Homo sapien
agacccacagagaactaacacccat

SEQ ID NO: 2970388 - DNA, 25 bp, Homo sapien
cacaggccagcactcttttcactat

SEQ ID NO: 2970389 - DNA, 25 bp, Homo sapien
gccacaggccagcactcttttcact

SEQ ID NO: 2970390 - DNA, 25 bp, Homo sapien
tcagccacaggccagcactcttttc

SEQ ID NO: 2970391 - DNA, 25 bp, Homo sapien
acaggccagcactcttttcactata

SEQ ID NO: 2970392 - DNA, 25 bp, Homo sapien
catgctggatctgcgtggctgtgtc

SEQ ID NO: 2970393 - DNA, 25 bp, Homo sapien
ttggcacatgggagacacatgctgg

SEQ ID NO: 2970394 - DNA, 25 bp, Homo sapien
tgggagacacatgctggatctgcgt

SEQ ID NO: 2970395 - DNA, 25 bp, Homo sapien
ctggatctgcgtggctgtgtccctg

SEQ ID NO: 2970396 - DNA, 25 bp, Homo sapien
aggacttgaccaccaacgcagtctt

SEQ ID NO: 2970397 - DNA, 25 bp, Homo sapien
cttgtcaccctctgctagtgtggct

SEQ ID NO: 2970398 - DNA, 25 bp, Homo sapien
tgaccaccaacgcagtcttcttggc

SEQ ID NO: 2970399 - DNA, 25 bp, Homo sapien
gtccttgtcaccctctgctagtgtg

SEQ ID NO: 2970400 - DNA, 25 bp, Homo sapien
ggcctccaattgggctatattggtc

SEQ ID NO: 2970401 - DNA, 25 bp, Homo sapien
gcctccaattgggctatattggtct

SEQ ID NO: 2970402 - DNA, 25 bp, Homo sapien
attgggctatattggtctcattgtc

SEQ ID NO: 2970403 - DNA, 25 bp, Homo sapien
cctccaattgggctatattggtctc

SEQ ID NO: 2970404 - DNA, 25 bp, Homo sapien
ccgtccagctggatgaagcgcatac

SEQ ID NO: 2970405 - DNA, 25 bp, Homo sapien
cagcccgtccagctggatgaagcgc

SEQ ID NO: 2970406 - DNA, 25 bp, Homo sapien
gcccgtccagctggatgaagcgcat

SEQ ID NO: 2970407 - DNA, 25 bp, Homo sapien
cccgtccagctggatgaagcgcata

SEQ ID NO: 2970408 - DNA, 25 bp, Homo sapien
gtaatctcctcttccagaaagtttg

SEQ ID NO: 2970409 - DNA, 25 bp, Homo sapien
ttggtaatctcctcttccagaaagt

SEQ ID NO: 2970410 - DNA, 25 bp, Homo sapien
ttccggataccgtagcccatgggca

SEQ ID NO: 2970411 - DNA, 25 bp, Homo sapien
tgaatctgcagcttccggataccgt

SEQ ID NO: 2970412 - DNA, 25 bp, Homo sapien
gaccttgttgaaagctgcaacatcg

SEQ ID NO: 2970413 - DNA, 25 bp, Homo sapien
tcagaccttgttgaaagctgcaaca

SEQ ID NO: 2970414 - DNA, 25 bp, Homo sapien
cagaccttgttgaaagctgcaacat

SEQ ID NO: 2970415 - DNA, 25 bp, Homo sapien
ccttgttgaaagctgcaacatcgac

SEQ ID NO: 2970416 - DNA, 25 bp, Homo sapien
cttgcacacgtgcgcatgcacgcac

SEQ ID NO: 2970417 - DNA, 25 bp, Homo sapien
acttgcacacgtgcgcatgcacgca

SEQ ID NO: 2970418 - DNA, 25 bp, Homo sapien
cacttgcacacgtgcgcatgcacgc

SEQ ID NO: 2970419 - DNA, 25 bp, Homo sapien
aggagagaatgaagtcatagtcgat

SEQ ID NO: 2970420 - DNA, 25 bp, Homo sapien
tggaagaaagaggacttaagagtat

SEQ ID NO: 2970421 - DNA, 25 bp, Homo sapien
tcatagtcgatgaagaaaaattatt

SEQ ID NO: 2970422 - DNA, 25 bp, Homo sapien
gaagaagacaaattaataggctgtg

SEQ ID NO: 2970423 - DNA, 25 bp, Homo sapien
gaagtttctcccactctatcacctc

SEQ ID NO: 2970424 - DNA, 25 bp, Homo sapien
tctatcacctcctgaccaggataca

SEQ ID NO: 2970425 - DNA, 25 bp, Homo sapien
cctatttctacaattggctctggaa

SEQ ID NO: 2970426 - DNA, 25 bp, Homo sapien
ggatacatttccttgttggctgatg

SEQ ID NO: 2970427 - DNA, 25 bp, Homo sapien
gctcgaacttgattctgacgtcact

SEQ ID NO: 2970428 - DNA, 25 bp, Homo sapien
ccgttgtgctcgaacttgattctga

SEQ ID NO: 2970429 - DNA, 25 bp, Homo sapien
tgtgctcgaacttgattctgacgtc

SEQ ID NO: 2970430 - DNA, 25 bp, Homo sapien
ctctccccgttgtgctcgaacttga

SEQ ID NO: 2970431 - DNA, 25 bp, Homo sapien
cagccatatgtgtactggacagcac

SEQ ID NO: 2970432 - DNA, 25 bp, Homo sapien
agaaagttctacagggcaacattga

SEQ ID NO: 2970433 - DNA, 25 bp, Homo sapien
ttagccacatgtacagcagccatat

SEQ ID NO: 2970434 - DNA, 25 bp, Homo sapien
gaaagttctacagggcaacattgat

SEQ ID NO: 2970435 - DNA, 25 bp, Homo sapien
aatactgttgtcaccttgtgctcca

SEQ ID NO: 2970436 - DNA, 25 bp, Homo sapien
tgtaatgtagatcaagaggttgtcc

SEQ ID NO: 2970437 - DNA, 25 bp, Homo sapien
cacaggccggctgaacgctataatt

SEQ ID NO: 2970438 - DNA, 25 bp, Homo sapien
ttcacaggccggctgaacgctataa

SEQ ID NO: 2970439 - DNA, 25 bp, Homo sapien
gagtatgttaagacatgtatgaact

SEQ ID NO: 2970440 - DNA, 25 bp, Homo sapien
gattcttagatcttgacagtgcagg

SEQ ID NO: 2970441 - DNA, 25 bp, Homo sapien
tcagtagatttttcatttgggattc

SEQ ID NO: 2970442 - DNA, 25 bp, Homo sapien
tcaaatgtaagttagtcaactcctg

SEQ ID NO: 2970443 - DNA, 25 bp, Homo sapien
tagcatacctcagtacccagttgtg

SEQ ID NO: 2970444 - DNA, 25 bp, Homo sapien
tcctgtcgccatatgaaggatgtgt

SEQ ID NO: 2970445 - DNA, 25 bp, Homo sapien
gtgactagaacctgaaaactacctc

SEQ ID NO: 2970446 - DNA, 25 bp, Homo sapien
caaatttagactgcatagcacggtt

SEQ ID NO: 2970447 - DNA, 25 bp, Homo sapien
agcttctatctaaaatgtcaattgc

SEQ ID NO: 2970448 - DNA, 25 bp, Homo sapien
ggcttttcggtgaaatcaaatgcag

SEQ ID NO: 2970449 - DNA, 25 bp, Homo sapien
tatgctctcaatttggcagtggctg

SEQ ID NO: 2970450 - DNA, 25 bp, Homo sapien
gccactgacaagtgggctgtgctgt

SEQ ID NO: 2970451 - DNA, 25 bp, Homo sapien
tgcagaatgttcactggccactgac

SEQ ID NO: 2970452 - DNA, 25 bp, Homo sapien
aaagtgactccaactccttgaaaat

SEQ ID NO: 2970453 - DNA, 25 bp, Homo sapien
cgcctggccaagcattgtaaacttt

SEQ ID NO: 2970454 - DNA, 25 bp, Homo sapien
acgcctggccaagcattgtaaactt

SEQ ID NO: 2970455 - DNA, 25 bp, Homo sapien
gagggtcatagtcttgcactcacaa

SEQ ID NO: 2970456 - DNA, 25 bp, Homo sapien
aagggcaagggagggtcatagtctt

SEQ ID NO: 2970457 - DNA, 25 bp, Homo sapien
ggaggtgcatgatgagcaccctgcc

SEQ ID NO: 2970458 - DNA, 25 bp, Homo sapien
acaaagaggaggtgcatgatgagca

SEQ ID NO: 2970459 - DNA, 25 bp, Homo sapien
gaagcctccgatgtgcaatagctct

SEQ ID NO: 2970460 - DNA, 25 bp, Homo sapien
tattacaaataagcagggcactggt

SEQ ID NO: 2970461 - DNA, 25 bp, Homo sapien
gctctctgctaagggtcaaaaagga

SEQ ID NO: 2970462 - DNA, 25 bp, Homo sapien
gaaaaactgtcttgctctaacggga

SEQ ID NO: 2970463 - DNA, 25 bp, Homo sapien
acagagaggtgcctgcttctgggct

SEQ ID NO: 2970464 - DNA, 25 bp, Homo sapien
gccttgatccgcacctgtctggaca

SEQ ID NO: 2970465 - DNA, 25 bp, Homo sapien
cctgcggactgggaagccttgatcc

SEQ ID NO: 2970466 - DNA, 25 bp, Homo sapien
gatagtatttatatcccctgcggac

SEQ ID NO: 2970467 - DNA, 25 bp, Homo sapien
ttagttatagcccacctgcagcacc

SEQ ID NO: 2970468 - DNA, 25 bp, Homo sapien
catttcttagttatagcccacctgc

SEQ ID NO: 2970469 - DNA, 25 bp, Homo sapien
cattaatcacatcataagaagtaaa

SEQ ID NO: 2970470 - DNA, 25 bp, Homo sapien
cacacctttcagtcacagtttgtaa

SEQ ID NO: 2970471 - DNA, 25 bp, Homo sapien
tttgattgggctaccctgcgcttcc

SEQ ID NO: 2970472 - DNA, 25 bp, Homo sapien
tcaagggagcagcactagaatcagt

SEQ ID NO: 2970473 - DNA, 25 bp, Homo sapien
tgctaaggcttactaaccaaggact

SEQ ID NO: 2970474 - DNA, 25 bp, Homo sapien
gaactgagtagcctgcttgctgcag

SEQ ID NO: 2970475 - DNA, 25 bp, Homo sapien
ctcagcagccgagtagctcgaatta

SEQ ID NO: 2970476 - DNA, 25 bp, Homo sapien
actcgattcatctccagcaggagtc

SEQ ID NO: 2970477 - DNA, 25 bp, Homo sapien
ctggactcgattcatctccagcagg

SEQ ID NO: 2970478 - DNA, 25 bp, Homo sapien
cgattcatctccagcaggagtcagc

SEQ ID NO: 2970479 - DNA, 25 bp, Homo sapien
tggactcgattcatctccagcagga

SEQ ID NO: 2970480 - DNA, 25 bp, Homo sapien
gacactggtccaaactatgcctagg

SEQ ID NO: 2970481 - DNA, 25 bp, Homo sapien
tatgcctaggcaggatgaaatgccc

SEQ ID NO: 2970482 - DNA, 25 bp, Homo sapien
gaactctgaccaacacactctggag

SEQ ID NO: 2970483 - DNA, 25 bp, Homo sapien
tgattacagaagagggaggacgctc

SEQ ID NO: 2970484 - DNA, 25 bp, Homo sapien
tttgccgatgttgacaggtgtggac

SEQ ID NO: 2970485 - DNA, 25 bp, Homo sapien
actggacttctggaccggtggcttc

SEQ ID NO: 2970486 - DNA, 25 bp, Homo sapien
ggcactggacttctggaccggtggc

SEQ ID NO: 2970487 - DNA, 25 bp, Homo sapien
ctttgccgatgttgacaggtgtgga

SEQ ID NO: 2970488 - DNA, 25 bp, Homo sapien
ctatgagattaacaggcttcctgct

SEQ ID NO: 2970489 - DNA, 25 bp, Homo sapien
tctatgagattaacaggcttcctgc

SEQ ID NO: 2970490 - DNA, 25 bp, Homo sapien
gacaccaggaatagagtagtaccat

SEQ ID NO: 2970491 - DNA, 25 bp, Homo sapien
caattcccagacaccaggaatagag

SEQ ID NO: 2970492 - DNA, 25 bp, Homo sapien
ccagcaattcccagacaccaggaat

SEQ ID NO: 2970493 - DNA, 25 bp, Homo sapien
ttcccagacaccaggaatagagtag

SEQ ID NO: 2970494 - DNA, 25 bp, Homo sapien
ttttgagtccgagaaatcaggtcct

SEQ ID NO: 2970495 - DNA, 25 bp, Homo sapien
ctttacttaacagaggaggagacgg

SEQ ID NO: 2970496 - DNA, 25 bp, Homo sapien
gacggagactcaaggaacttaaatc

SEQ ID NO: 2970497 - DNA, 25 bp, Homo sapien
cagaggtgtgcagtcttacaaatga

SEQ ID NO: 2970498 - DNA, 25 bp, Homo sapien
ttgatgctggtgtaggacccctgcc

SEQ ID NO: 2970499 - DNA, 25 bp, Homo sapien
ggaggtgagcttcggccagggttct

SEQ ID NO: 2970500 - DNA, 25 bp, Homo sapien
gatgaactccccctcactgttgatg

SEQ ID NO: 2970501 - DNA, 25 bp, Homo sapien
ggcaatgtgctgctgccgctcagga

SEQ ID NO: 2970502 - DNA, 25 bp, Homo sapien
cgctcttgtaaaaaatgacgttctt

SEQ ID NO: 2970503 - DNA, 25 bp, Homo sapien
taccaaagattcacaagaggccttg

SEQ ID NO: 2970504 - DNA, 25 bp, Homo sapien
tgaaaccaacatcggagagaattgc

SEQ ID NO: 2970505 - DNA, 25 bp, Homo sapien
gctgagtcctgtgaacgctcttgta

SEQ ID NO: 2970506 - DNA, 25 bp, Homo sapien
gacaaggaattttctgcactgctca

SEQ ID NO: 2970507 - DNA, 25 bp, Homo sapien
cagcttccagacaaggaattttctg

SEQ ID NO: 2970508 - DNA, 25 bp, Homo sapien
ttccagacaaggaattttctgcact

SEQ ID NO: 2970509 - DNA, 25 bp, Homo sapien
aaggaattttctgcactgctcaggg

SEQ ID NO: 2970510 - DNA, 25 bp, Homo sapien
tcaaggccagactttaaatccaggt

SEQ ID NO: 2970511 - DNA, 25 bp, Homo sapien
tcatcagtgctcaggtctattaggc

SEQ ID NO: 2970512 - DNA, 25 bp, Homo sapien
tcccagatcccgtgaagggaagatg

SEQ ID NO: 2970513 - DNA, 25 bp, Homo sapien
ttactcccctggttggaaagcaagc

SEQ ID NO: 2970514 - DNA, 25 bp, Homo sapien
cgggctggagtgctgtagcatctca

SEQ ID NO: 2970515 - DNA, 25 bp, Homo sapien
aggcacgcgccactggccaagatgg

SEQ ID NO: 2970516 - DNA, 25 bp, Homo sapien
gccgggctggagtgctgtagcatct

SEQ ID NO: 2970517 - DNA, 25 bp, Homo sapien
acaggcacgcgccactggccaagat

SEQ ID NO: 2970518 - DNA, 25 bp, Homo sapien
cattcgtgatttccggaaggatggg

SEQ ID NO: 2970519 - DNA, 25 bp, Homo sapien
ctgagtattcctgtctgttgtcagg

SEQ ID NO: 2970520 - DNA, 25 bp, Homo sapien
gcacgggacattcgtgatttccgga

SEQ ID NO: 2970521 - DNA, 25 bp, Homo sapien
gaagctctgggcacgggacattcgt

SEQ ID NO: 2970522 - DNA, 25 bp, Homo sapien
ctgagtaagacaggggaatcactgg

SEQ ID NO: 2970523 - DNA, 25 bp, Homo sapien
gagtaagacaggggaatcactggct

SEQ ID NO: 2970524 - DNA, 25 bp, Homo sapien
tgagtaagacaggggaatcactggc

SEQ ID NO: 2970525 - DNA, 25 bp, Homo sapien
gacccctttgtcataaagctgagtt

SEQ ID NO: 2970526 - DNA, 25 bp, Homo sapien
tagtccttgtggtgcacagacacgt

SEQ ID NO: 2970527 - DNA, 25 bp, Homo sapien
tccttgtggtgcacagacacgtggt

SEQ ID NO: 2970528 - DNA, 25 bp, Homo sapien
catcactgtagtccttgtggtgcac

SEQ ID NO: 2970529 - DNA, 25 bp, Homo sapien
gagagggcattctcgctgtccgcac

SEQ ID NO: 2970530 - DNA, 25 bp, Homo sapien
catgttctcgccatttgtgctcagg

SEQ ID NO: 2970531 - DNA, 25 bp, Homo sapien
gggtccaggtattgcacagccagac

SEQ ID NO: 2970532 - DNA, 25 bp, Homo sapien
caagttgccttgatgacgccgtatt

SEQ ID NO: 2970533 - DNA, 25 bp, Homo sapien
tagtcactcggacctgaagtcagag

SEQ ID NO: 2970534 - DNA, 25 bp, Homo sapien
catgtggtgcatttgggccaaagcc

SEQ ID NO: 2970535 - DNA, 25 bp, Homo sapien
gacactccaaggcttatcccatgtg

SEQ ID NO: 2970536 - DNA, 25 bp, Homo sapien
cacacaatagtggagccaggcttca

SEQ ID NO: 2970537 - DNA, 25 bp, Homo sapien
actgtctggatcaaattggacctgc

SEQ ID NO: 2970538 - DNA, 25 bp, Homo sapien
tcccgtgtccacgtcatagcacaaa

SEQ ID NO: 2970539 - DNA, 25 bp, Homo sapien
tagcacaaatagaccctgccgaagg

SEQ ID NO: 2970540 - DNA, 25 bp, Homo sapien
tggaagcaagttcacgtcccgtgtc

SEQ ID NO: 2970541 - DNA, 25 bp, Homo sapien
tggatctcgcactccagagcactca

SEQ ID NO: 2970542 - DNA, 25 bp, Homo sapien
ctgcaagttctttagcaactggatc

SEQ ID NO: 2970543 - DNA, 25 bp, Homo sapien
cggtcccgcagacagccatagtact

SEQ ID NO: 2970544 - DNA, 25 bp, Homo sapien
cacgatgcgctcatgctgcaagttc

SEQ ID NO: 2970545 - DNA, 25 bp, Homo sapien
agccttcaactggtctttcaccgag

SEQ ID NO: 2970546 - DNA, 25 bp, Homo sapien
aggatctgccgcgtgtactttcggg

SEQ ID NO: 2970547 - DNA, 25 bp, Homo sapien
tttcgggtcacgctctctgtcagag

SEQ ID NO: 2970548 - DNA, 25 bp, Homo sapien
gtgtactttcgggtcacgctctctg

SEQ ID NO: 2970549 - DNA, 25 bp, Homo sapien
tgccagtgacggagcgcatgcccgt

SEQ ID NO: 2970550 - DNA, 25 bp, Homo sapien
gtctgctttccttccatagccctcg

SEQ ID NO: 2970551 - DNA, 25 bp, Homo sapien
ttacattcccagcagagtctcggag

SEQ ID NO: 2970552 - DNA, 25 bp, Homo sapien
tacagatcgtctgcaggcgtttgct

SEQ ID NO: 2970553 - DNA, 25 bp, Homo sapien
tctggcgagcctccacaaaaatgcg

SEQ ID NO: 2970554 - DNA, 25 bp, Homo sapien
cccacggtggtttctctgtcagcat

SEQ ID NO: 2970555 - DNA, 25 bp, Homo sapien
tagcttcatactctgcccacggtgg

SEQ ID NO: 2970556 - DNA, 25 bp, Homo sapien
caatcttgaagatggcggccatagc

SEQ ID NO: 2970557 - DNA, 25 bp, Homo sapien
gcttcggtgccaattgcagtgtcag

SEQ ID NO: 2970558 - DNA, 25 bp, Homo sapien
cactgctagcgagtgctggcctttc

SEQ ID NO: 2970559 - DNA, 25 bp, Homo sapien
aaataacactcttcataccctggcg

SEQ ID NO: 2970560 - DNA, 25 bp, Homo sapien
gcagtgtcaggacacatccccgagg

SEQ ID NO: 2970561 - DNA, 25 bp, Homo sapien
gactccaacttgtaaaacagagaca

SEQ ID NO: 2970562 - DNA, 25 bp, Homo sapien
tgcattgacaaaactggatcccccc

SEQ ID NO: 2970563 - DNA, 25 bp, Homo sapien
ggtacagcataagagtgactccaac

SEQ ID NO: 2970564 - DNA, 25 bp, Homo sapien
tttcaatgcagcctaggcccaagcc

SEQ ID NO: 2970565 - DNA, 25 bp, Homo sapien
caagccctcggtcaagatatagtca

SEQ ID NO: 2970566 - DNA, 25 bp, Homo sapien
taagtaatgcgcaacactggcctgg

SEQ ID NO: 2970567 - DNA, 25 bp, Homo sapien
acagagctggcggttttggacacag

SEQ ID NO: 2970568 - DNA, 25 bp, Homo sapien
gacgcacagttgagtcagccagcac

SEQ ID NO: 2970569 - DNA, 25 bp, Homo sapien
tctgaaaacccagggacaatgaggg

SEQ ID NO: 2970570 - DNA, 25 bp, Homo sapien
tacaactgcctgagttcctaagtgg

SEQ ID NO: 2970571 - DNA, 25 bp, Homo sapien
ccttttcaagctctgcggaggtgca

SEQ ID NO: 2970572 - DNA, 25 bp, Homo sapien
gatcgatgagaacagagactcctgg

SEQ ID NO: 2970573 - DNA, 25 bp, Homo sapien
ctcccagtaggatgcggagcgcggc

SEQ ID NO: 2970574 - DNA, 25 bp, Homo sapien
gaaaccgaggcagtgaatggcccag

SEQ ID NO: 2970575 - DNA, 25 bp, Homo sapien
ggccgccgtcgggatgggcagacgg

SEQ ID NO: 2970576 - DNA, 25 bp, Homo sapien
gtacccgaggcctgcgagcgcgagg

SEQ ID NO: 2970577 - DNA, 25 bp, Homo sapien
tgttctgttccctgacaagcgcgtg

SEQ ID NO: 2970578 - DNA, 25 bp, Homo sapien
tcttgcaaccggacatgggtgtctc

SEQ ID NO: 2970579 - DNA, 25 bp, Homo sapien
tgtggaagctttcccgagaggcagc

SEQ ID NO: 2970580 - DNA, 25 bp, Homo sapien
tcccacgtgagaaatgaggtgcgct

SEQ ID NO: 2970581 - DNA, 25 bp, Homo sapien
gctgaattccaagcccagggtttgg

SEQ ID NO: 2970582 - DNA, 25 bp, Homo sapien
tgacctcctccgcagaagagagatg

SEQ ID NO: 2970583 - DNA, 25 bp, Homo sapien
tcagtgtcttgcctagcttgagggc

SEQ ID NO: 2970584 - DNA, 25 bp, Homo sapien
tcaacaaccagggatcaggagggtc

SEQ ID NO: 2970585 - DNA, 25 bp, Homo sapien
catgaggacttccacgaggacagca

SEQ ID NO: 2970586 - DNA, 25 bp, Homo sapien
tctggcttggacagcttatgcggtc

SEQ ID NO: 2970587 - DNA, 25 bp, Homo sapien
tttaaatcgaaatagccacaagtgg

SEQ ID NO: 2970588 - DNA, 25 bp, Homo sapien
tcatcggatccacctgagcatggca

SEQ ID NO: 2970589 - DNA, 25 bp, Homo sapien
ccgggagtttgagattgcactacca

SEQ ID NO: 2970590 - DNA, 25 bp, Homo sapien
tgcccagtcctgacattcctttcta

SEQ ID NO: 2970591 - DNA, 25 bp, Homo sapien
ctagtaagtgcttgggagttagact

SEQ ID NO: 2970592 - DNA, 25 bp, Homo sapien
tctattcgagaagcaagtagccact

SEQ ID NO: 2970593 - DNA, 25 bp, Homo sapien
catttggcactaaggattgggctga

SEQ ID NO: 2970594 - DNA, 25 bp, Homo sapien
tacgtgactgtacggaggattaacc

SEQ ID NO: 2970595 - DNA, 25 bp, Homo sapien
tttccggtgtcctggccatagtgag

SEQ ID NO: 2970596 - DNA, 25 bp, Homo sapien
ctttctgccagagggagggtgttac

SEQ ID NO: 2970597 - DNA, 25 bp, Homo sapien
gacacatcctaagtggctggactcc

SEQ ID NO: 2970598 - DNA, 25 bp, Homo sapien
tggcccgggctcttggtttgctaaa

SEQ ID NO: 2970599 - DNA, 25 bp, Homo sapien
tgcctggacgatgcctgagacctga

SEQ ID NO: 2970600 - DNA, 25 bp, Homo sapien
tagaggccagagttgtgacacatcc

SEQ ID NO: 2970601 - DNA, 25 bp, Homo sapien
ccaacagggtggtagattaatctca

SEQ ID NO: 2970602 - DNA, 25 bp, Homo sapien
gcctgagcgacaaagagataaccca

SEQ ID NO: 2970603 - DNA, 25 bp, Homo sapien
cacgtgaaacgtcagccaacagggt

SEQ ID NO: 2970604 - DNA, 25 bp, Homo sapien
atctcactggtttgggcctgggtcc

SEQ ID NO: 2970605 - DNA, 25 bp, Homo sapien
gtgacagggcttaattttgcttgac

SEQ ID NO: 2970606 - DNA, 25 bp, Homo sapien
ggagacagagcccacttgagggttt

SEQ ID NO: 2970607 - DNA, 25 bp, Homo sapien
acagcagtgaaaatgggcgaactac

SEQ ID NO: 2970608 - DNA, 25 bp, Homo sapien
gactaggttcctcttattgccaggg

SEQ ID NO: 2970609 - DNA, 25 bp, Homo sapien
tatcagattgagtacattggttagc

SEQ ID NO: 2970610 - DNA, 25 bp, Homo sapien
cagattatcagattgagtacattgg

SEQ ID NO: 2970611 - DNA, 25 bp, Homo sapien
tagctgatccaaaatacgcccagat

SEQ ID NO: 2970612 - DNA, 25 bp, Homo sapien
gagtacattggttagctgatccaaa

SEQ ID NO: 2970613 - DNA, 25 bp, Homo sapien
agaaacagattaccggccgggtatg

SEQ ID NO: 2970614 - DNA, 25 bp, Homo sapien
tatgaacttcctattgtaaaacctg

SEQ ID NO: 2970615 - DNA, 25 bp, Homo sapien
tctagttgactcattttttcatggt

SEQ ID NO: 2970616 - DNA, 25 bp, Homo sapien
gaagtaaactttgacaggcctaggc

SEQ ID NO: 2970617 - DNA, 25 bp, Homo sapien
gggattacagccatctgccaccttg

SEQ ID NO: 2970618 - DNA, 25 bp, Homo sapien
tcaaacgattcttaagtaggtggga

SEQ ID NO: 2970619 - DNA, 25 bp, Homo sapien
ttacagccatctgccaccttgcctg

SEQ ID NO: 2970620 - DNA, 25 bp, Homo sapien
caaacgattcttaagtaggtgggat

SEQ ID NO: 2970621 - DNA, 25 bp, Homo sapien
tgacctagtgaaccacccgcgtcgg

SEQ ID NO: 2970622 - DNA, 25 bp, Homo sapien
ctgacctagtgaaccacccgcgtcg

SEQ ID NO: 2970623 - DNA, 25 bp, Homo sapien
tcctgacctagtgaaccacccgcgt

SEQ ID NO: 2970624 - DNA, 25 bp, Homo sapien
ctcctgacctagtgaaccacccgcg

SEQ ID NO: 2970625 - DNA, 25 bp, Homo sapien
gaggcaataacaagttgctgtgaaa

SEQ ID NO: 2970626 - DNA, 25 bp, Homo sapien
gtcccatacatttggaccatggcag

SEQ ID NO: 2970627 - DNA, 25 bp, Homo sapien
tcaaagttgatagtcttagttatct

SEQ ID NO: 2970628 - DNA, 25 bp, Homo sapien
tgttgatgctttagtgcaggcctgt

SEQ ID NO: 2970629 - DNA, 25 bp, Homo sapien
tcagtgtttaaagaaataccgtgaa

SEQ ID NO: 2970630 - DNA, 25 bp, Homo sapien
tacaaatcatcagtgcttttagtac

SEQ ID NO: 2970631 - DNA, 25 bp, Homo sapien
gactgactctaaaccaagattctgc

SEQ ID NO: 2970632 - DNA, 25 bp, Homo sapien
ttataggtagataaccagattgttg

SEQ ID NO: 2970633 - DNA, 25 bp, Homo sapien
tttgattattttataaaaggaatga

SEQ ID NO: 2970634 - DNA, 25 bp, Homo sapien
ttgattattttataaaaggaatgat

SEQ ID NO: 2970635 - DNA, 25 bp, Homo sapien
gcaaagtattgctactctgaagctg

SEQ ID NO: 2970636 - DNA, 25 bp, Homo sapien
taagctgatcatcgttaaactgaca

SEQ ID NO: 2970637 - DNA, 25 bp, Homo sapien
tagaggaacgtgaggtattcggcct

SEQ ID NO: 2970638 - DNA, 25 bp, Homo sapien
ctgaagctgtgatcattttgtggtc

SEQ ID NO: 2970639 - DNA, 25 bp, Homo sapien
cctcaacgggtcataatcactgaag

SEQ ID NO: 2970640 - DNA, 25 bp, Homo sapien
ccttctggtgtttgggagtgtctct

SEQ ID NO: 2970641 - DNA, 25 bp, Homo sapien
tctgttactgaatctcctcaacggg

SEQ ID NO: 2970642 - DNA, 25 bp, Homo sapien
tctcaaggtgcaatgaaagccttcc

SEQ ID NO: 2970643 - DNA, 25 bp, Homo sapien
tgaacatgcctatagtttaaactgt

SEQ ID NO: 2970644 - DNA, 25 bp, Homo sapien
tctagaaagtgggtctgcgaatgaa

SEQ ID NO: 2970645 - DNA, 25 bp, Homo sapien
cagttgggtggacagtgttcatgac

SEQ ID NO: 2970646 - DNA, 25 bp, Homo sapien
ctctgacgggaaactgcagttgggt

SEQ ID NO: 2970647 - DNA, 25 bp, Homo sapien
cgcagtgaggaacgcgcgggcagaa

SEQ ID NO: 2970648 - DNA, 25 bp, Homo sapien
gaacgcgcgggcagaagggcggggc

SEQ ID NO: 2970649 - DNA, 25 bp, Homo sapien
aggaacgcgcgggcagaagggcggg

SEQ ID NO: 2970650 - DNA, 25 bp, Homo sapien
atgcgcagtgaggaacgcgcgggca

SEQ ID NO: 2970651 - DNA, 25 bp, Homo sapien
agcggcagctgctacaaccgcgggc

SEQ ID NO: 2970652 - DNA, 25 bp, Homo sapien
gcgcggagcgaatcccggagcccaa

SEQ ID NO: 2970653 - DNA, 25 bp, Homo sapien
gagcccaaagtacgcgctgtcccgg

SEQ ID NO: 2970654 - DNA, 25 bp, Homo sapien
tgctgctatggctgcagcggcagct

SEQ ID NO: 2970655 - DNA, 25 bp, Homo sapien
aggactggcggccttgcgtccagaa

SEQ ID NO: 2970656 - DNA, 25 bp, Homo sapien
tgcgtccagaaaccccacgcacaaa

SEQ ID NO: 2970657 - DNA, 25 bp, Homo sapien
ccaaggactggcggccttgcgtcca

SEQ ID NO: 2970658 - DNA, 25 bp, Homo sapien
actggcggccttgcgtccagaaacc

SEQ ID NO: 2970659 - DNA, 25 bp, Homo sapien
caaagcgccttaagacatagtccct

SEQ ID NO: 2970660 - DNA, 25 bp, Homo sapien
aatgagcttggctctgcaaagcgcc

SEQ ID NO: 2970661 - DNA, 25 bp, Homo sapien
ctcttatgtgccagaaatgagcttg

SEQ ID NO: 2970662 - DNA, 25 bp, Homo sapien
gacatagtccctgcgcttgaggaag

SEQ ID NO: 2970663 - DNA, 25 bp, Homo sapien
gagtgcctattttgtgccagtaact

SEQ ID NO: 2970664 - DNA, 25 bp, Homo sapien
gagggacatccctcacgtatacccg

SEQ ID NO: 2970665 - DNA, 25 bp, Homo sapien
tatgtgcccagtactatgagggaca

SEQ ID NO: 2970666 - DNA, 25 bp, Homo sapien
tgatggcgcgcacccatagttccag

SEQ ID NO: 2970667 - DNA, 25 bp, Homo sapien
gagagatactcatggtagaggcaag

SEQ ID NO: 2970668 - DNA, 25 bp, Homo sapien
gctgttgcagcaacgcaggtataaa

SEQ ID NO: 2970669 - DNA, 25 bp, Homo sapien
tctggctttaaagactgggtgaact

SEQ ID NO: 2970670 - DNA, 25 bp, Homo sapien
taaataagctagcagagagaccatg

SEQ ID NO: 2970671 - DNA, 25 bp, Homo sapien
cttcatcaaagttggcccgcttaga

SEQ ID NO: 2970672 - DNA, 25 bp, Homo sapien
gcccgcttagatccaattttgtaga

SEQ ID NO: 2970673 - DNA, 25 bp, Homo sapien
cactgtgggactgctgtgggagttt

SEQ ID NO: 2970674 - DNA, 25 bp, Homo sapien
aatcctcgcttagtgccaggaccac

SEQ ID NO: 2970675 - DNA, 25 bp, Homo sapien
gtccaaactttgctacactaccagg

SEQ ID NO: 2970676 - DNA, 25 bp, Homo sapien
gaatgaatatatcaaagtccaaact

SEQ ID NO: 2970677 - DNA, 25 bp, Homo sapien
tcagcgagacacataatttaagaat

SEQ ID NO: 2970678 - DNA, 25 bp, Homo sapien
taacttattaggaacaatggaattc

SEQ ID NO: 2970679 - DNA, 25 bp, Homo sapien
tgaattatataaaactcttcagcca

SEQ ID NO: 2970680 - DNA, 25 bp, Homo sapien
accacatgaattatataaaactctt

SEQ ID NO: 2970681 - DNA, 25 bp, Homo sapien
aactcttcagccatatttatgtttc

SEQ ID NO: 2970682 - DNA, 25 bp, Homo sapien
aaactcttcagccatatttatgttt

SEQ ID NO: 2970683 - DNA, 25 bp, Homo sapien
ttgctggcgagttggtgagttttca

SEQ ID NO: 2970684 - DNA, 25 bp, Homo sapien
tgcctccaagggatcatcatcgctg

SEQ ID NO: 2970685 - DNA, 25 bp, Homo sapien
tgtaaggtaaatcaacgttgctaga

SEQ ID NO: 2970686 - DNA, 25 bp, Homo sapien
cgctgtcagaatctactggcttgga

SEQ ID NO: 2970687 - DNA, 25 bp, Homo sapien
gatagtactggtttctagaggcgga

SEQ ID NO: 2970688 - DNA, 25 bp, Homo sapien
attatccagcgccaaatgacagtag

SEQ ID NO: 2970689 - DNA, 25 bp, Homo sapien
tagaggcggaggatggctactaaac

SEQ ID NO: 2970690 - DNA, 25 bp, Homo sapien
gaaaggttgctctcaatctgggaca

SEQ ID NO: 2970691 - DNA, 25 bp, Homo sapien
tttcttcaagcctcttcatgtctct

SEQ ID NO: 2970692 - DNA, 25 bp, Homo sapien
tcttcaagcctcttcatgtctctag

SEQ ID NO: 2970693 - DNA, 25 bp, Homo sapien
tccttgtccttttcttcaagcctct

SEQ ID NO: 2970694 - DNA, 25 bp, Homo sapien
gtccttttcttcaagcctcttcatg

SEQ ID NO: 2970695 - DNA, 25 bp, Homo sapien
tcctcttcaatgtcatctcgaatac

SEQ ID NO: 2970696 - DNA, 25 bp, Homo sapien
tcttcctcttcaatgtcatctcgaa

SEQ ID NO: 2970697 - DNA, 25 bp, Homo sapien
cttcctcttcaatgtcatctcgaat

SEQ ID NO: 2970698 - DNA, 25 bp, Homo sapien
ctcttcaatgtcatctcgaataccc

SEQ ID NO: 2970699 - DNA, 25 bp, Homo sapien
tgcacagttaacatacctaccaagt

SEQ ID NO: 2970700 - DNA, 25 bp, Homo sapien
taatcacacccaagtacaattgaga

SEQ ID NO: 2970701 - DNA, 25 bp, Homo sapien
taaggcaagatccttactagcaatg

SEQ ID NO: 2970702 - DNA, 25 bp, Homo sapien
gctcctgtaattagcgcacatagtg

SEQ ID NO: 2970703 - DNA, 25 bp, Homo sapien
tcatattctagattgtcttcctctt

SEQ ID NO: 2970704 - DNA, 25 bp, Homo sapien
gatttttttggtaggtgcaattgga

SEQ ID NO: 2970705 - DNA, 25 bp, Homo sapien
ttggatttccgtcactatcatattc

SEQ ID NO: 2970706 - DNA, 25 bp, Homo sapien
ctgccatgtatcgaaaataagcttc

SEQ ID NO: 2970707 - DNA, 25 bp, Homo sapien
ctgcaggtccaattattcaaagtta

SEQ ID NO: 2970708 - DNA, 25 bp, Homo sapien
tgcaggtccaattattcaaagttag

SEQ ID NO: 2970709 - DNA, 25 bp, Homo sapien
gcaggtccaattattcaaagttagt

SEQ ID NO: 2970710 - DNA, 25 bp, Homo sapien
agtgaggttggttatctcttcatgc

SEQ ID NO: 2970711 - DNA, 25 bp, Homo sapien
gtggagtgaggttggttatctcttc

SEQ ID NO: 2970712 - DNA, 25 bp, Homo sapien
ccgaagattgagcttatgccggaga

SEQ ID NO: 2970713 - DNA, 25 bp, Homo sapien
agatctattaactgctgtggagtga

SEQ ID NO: 2970714 - DNA, 25 bp, Homo sapien
tgtagccaatgtgcagcccaaaact

SEQ ID NO: 2970715 - DNA, 25 bp, Homo sapien
tagcaactgataaggtgcacacagg

SEQ ID NO: 2970716 - DNA, 25 bp, Homo sapien
taagacaagtctacacatgctggct

SEQ ID NO: 2970717 - DNA, 25 bp, Homo sapien
gagatagagacaactccccagaatg

SEQ ID NO: 2970718 - DNA, 25 bp, Homo sapien
gcataagttgttcgtcaaacccaaa

SEQ ID NO: 2970719 - DNA, 25 bp, Homo sapien
tacttcctggtctaggaggtgcagc

SEQ ID NO: 2970720 - DNA, 25 bp, Homo sapien
ctgtgtgtattcagatttccgaatc

SEQ ID NO: 2970721 - DNA, 25 bp, Homo sapien
tttccgaatctggtgcataagttgt

SEQ ID NO: 2970722 - DNA, 25 bp, Homo sapien
tcatgaaagactaccctactttatt

SEQ ID NO: 2970723 - DNA, 25 bp, Homo sapien
gtcatgaaagactaccctactttat

SEQ ID NO: 2970724 - DNA, 25 bp, Homo sapien
catgaaagactaccctactttattt

SEQ ID NO: 2970725 - DNA, 25 bp, Homo sapien
tcaacatgggccaaatgaaggctgc

SEQ ID NO: 2970726 - DNA, 25 bp, Homo sapien
cactgcaattggtccatcacctggt

SEQ ID NO: 2970727 - DNA, 25 bp, Homo sapien
ggtaggacacacaatcactgcaatt

SEQ ID NO: 2970728 - DNA, 25 bp, Homo sapien
tctctaccacttaatgccacaggca

SEQ ID NO: 2970729 - DNA, 25 bp, Homo sapien
gggtacacacaacaatctctgcccc

SEQ ID NO: 2970730 - DNA, 25 bp, Homo sapien
tttccaaaccgcttacattctgcat

SEQ ID NO: 2970731 - DNA, 25 bp, Homo sapien
tccatatacggccactgatcgaaga

SEQ ID NO: 2970732 - DNA, 25 bp, Homo sapien
ctgatcgaagattatatgcttttcc

SEQ ID NO: 2970733 - DNA, 25 bp, Homo sapien
ttttcacatgatctatcagtcgacc

SEQ ID NO: 2970734 - DNA, 25 bp, Homo sapien
gactctttgaagattggtagctttc

SEQ ID NO: 2970735 - DNA, 25 bp, Homo sapien
gagactctttgaagattggtagctt

SEQ ID NO: 2970736 - DNA, 25 bp, Homo sapien
caaacattcgatctgcttcatcaaa

SEQ ID NO: 2970737 - DNA, 25 bp, Homo sapien
tattataacctgaaatacagtttgg

SEQ ID NO: 2970738 - DNA, 25 bp, Homo sapien
gaacatgacttgctatggatcgaac

SEQ ID NO: 2970739 - DNA, 25 bp, Homo sapien
cttgctatggatcgaacttggtact

SEQ ID NO: 2970740 - DNA, 25 bp, Homo sapien
tctgcctgtcaggacgaacatgact

SEQ ID NO: 2970741 - DNA, 25 bp, Homo sapien
tcaggacgaacatgacttgctatgg

SEQ ID NO: 2970742 - DNA, 25 bp, Homo sapien
tagtgctaagatcctgtccagctca

SEQ ID NO: 2970743 - DNA, 25 bp, Homo sapien
ttggtttaacaaaggtgcttcatac

SEQ ID NO: 2970744 - DNA, 25 bp, Homo sapien
ggaacaagttatatctagtgctaag

SEQ ID NO: 2970745 - DNA, 25 bp, Homo sapien
tgtacactgcttctacccactgata

SEQ ID NO: 2970746 - DNA, 25 bp, Homo sapien
cgaatagggtcgatcaggatgtctc

SEQ ID NO: 2970747 - DNA, 25 bp, Homo sapien
ttcaatcttcttccgaaaagttgca

SEQ ID NO: 2970748 - DNA, 25 bp, Homo sapien
cactcgaatagggtcgatcaggatg

SEQ ID NO: 2970749 - DNA, 25 bp, Homo sapien
tagggtcgatcaggatgtctctggc

SEQ ID NO: 2970750 - DNA, 25 bp, Homo sapien
cccattaaggtcccatccagccctg

SEQ ID NO: 2970751 - DNA, 25 bp, Homo sapien
ataaacccattaaggtcccatccag

SEQ ID NO: 2970752 - DNA, 25 bp, Homo sapien
gaaattaattctgtgttccataata

SEQ ID NO: 2970753 - DNA, 25 bp, Homo sapien
taaacccattaaggtcccatccagc

SEQ ID NO: 2970754 - DNA, 25 bp, Homo sapien
cacagggcacctgaacaaggactag

SEQ ID NO: 2970755 - DNA, 25 bp, Homo sapien
aataaccatggcaagcaactgaagg

SEQ ID NO: 2970756 - DNA, 25 bp, Homo sapien
tacctgcatcgagaagaccttgaac

SEQ ID NO: 2970757 - DNA, 25 bp, Homo sapien
gggccttcagcaagtcaagtgcagc

SEQ ID NO: 2970758 - DNA, 25 bp, Homo sapien
agaggtaaattctaccagacgccgg

SEQ ID NO: 2970759 - DNA, 25 bp, Homo sapien
aaggttattcgctagctcttcagca

SEQ ID NO: 2970760 - DNA, 25 bp, Homo sapien
taggtccagaatggagaatctccac

SEQ ID NO: 2970761 - DNA, 25 bp, Homo sapien
agacgccgggtaagccagttccatt

SEQ ID NO: 2970762 - DNA, 25 bp, Homo sapien
gttaatgacagtcttaattgaagga

SEQ ID NO: 2970763 - DNA, 25 bp, Homo sapien
aatgtctcgtgccacatcatagtta

SEQ ID NO: 2970764 - DNA, 25 bp, Homo sapien
ctcgtgccacatcatagttaatgac

SEQ ID NO: 2970765 - DNA, 25 bp, Homo sapien
aattgaaggaatgtccagaccacgg

SEQ ID NO: 2970766 - DNA, 25 bp, Homo sapien
gctcttcctgtgcggccaatcctat

SEQ ID NO: 2970767 - DNA, 25 bp, Homo sapien
cggccaatcctatgcgtgtgggtat

SEQ ID NO: 2970768 - DNA, 25 bp, Homo sapien
tgtgcggccaatcctatgcgtgtgg

SEQ ID NO: 2970769 - DNA, 25 bp, Homo sapien
ttcctgtgcggccaatcctatgcgt

SEQ ID NO: 2970770 - DNA, 25 bp, Homo sapien
cattgccagatctaggagttcctta

SEQ ID NO: 2970771 - DNA, 25 bp, Homo sapien
gagttccttagaaacgtgttgattg

SEQ ID NO: 2970772 - DNA, 25 bp, Homo sapien
gaccaggtcaccagcaaaattgctg

SEQ ID NO: 2970773 - DNA, 25 bp, Homo sapien
gaaacgtgttgattggctccttcca

SEQ ID NO: 2970774 - DNA, 25 bp, Homo sapien
gaatcgagatttccgaaaccaggca

SEQ ID NO: 2970775 - DNA, 25 bp, Homo sapien
ggccaggccgctccctgtagcctag

SEQ ID NO: 2970776 - DNA, 25 bp, Homo sapien
tcctttccctcctttgaatcgagat

SEQ ID NO: 2970777 - DNA, 25 bp, Homo sapien
cctcctttgaatcgagatttccgaa

SEQ ID NO: 2970778 - DNA, 25 bp, Homo sapien
gagcaagcctagtcaaccaagtaca

SEQ ID NO: 2970779 - DNA, 25 bp, Homo sapien
gagaccaactataaaggcactactg

SEQ ID NO: 2970780 - DNA, 25 bp, Homo sapien
gacagggctttaaactcactgaggc

SEQ ID NO: 2970781 - DNA, 25 bp, Homo sapien
taatgactttcaggacatgagacca

SEQ ID NO: 2970782 - DNA, 25 bp, Homo sapien
tcctgtggaaggcttgtaggcctca

SEQ ID NO: 2970783 - DNA, 25 bp, Homo sapien
gatctcccatagctcctgtggaagg

SEQ ID NO: 2970784 - DNA, 25 bp, Homo sapien
tgtaggcctcataattgctcattac

SEQ ID NO: 2970785 - DNA, 25 bp, Homo sapien
ctttcattgccgttagtcgatctcc

SEQ ID NO: 2970786 - DNA, 25 bp, Homo sapien
tgatgttgccagtattgccaaagcc

SEQ ID NO: 2970787 - DNA, 25 bp, Homo sapien
ttgttgactccttgggctccggcag

SEQ ID NO: 2970788 - DNA, 25 bp, Homo sapien
gtgacgtggactatcgctatgccga

SEQ ID NO: 2970789 - DNA, 25 bp, Homo sapien
tggccatcagtatgacggctgctgc

SEQ ID NO: 2970790 - DNA, 25 bp, Homo sapien
tccaccttgtccatcttgctgctgt

SEQ ID NO: 2970791 - DNA, 25 bp, Homo sapien
ctgggacagcaaagccgtcagctgt

SEQ ID NO: 2970792 - DNA, 25 bp, Homo sapien
cgtcagctgtcttatctgtcttgct

SEQ ID NO: 2970793 - DNA, 25 bp, Homo sapien
gtccaccttgtccatcttgctgctg

SEQ ID NO: 2970794 - DNA, 25 bp, Homo sapien
tcgacttttcttgcgtttaggcggc

SEQ ID NO: 2970795 - DNA, 25 bp, Homo sapien
cccatcgacttttcttgcgtttagg

SEQ ID NO: 2970796 - DNA, 25 bp, Homo sapien
tgtcccatcgacttttcttgcgttt

SEQ ID NO: 2970797 - DNA, 25 bp, Homo sapien
ctaactgtcccatcgacttttcttg

SEQ ID NO: 2970798 - DNA, 25 bp, Homo sapien
cagccctgagacacctagttaccaa

SEQ ID NO: 2970799 - DNA, 25 bp, Homo sapien
tggagcaatcctggaacagttacca

SEQ ID NO: 2970800 - DNA, 25 bp, Homo sapien
gactgcctggccatacaactaagaa

SEQ ID NO: 2970801 - DNA, 25 bp, Homo sapien
tcctacatgtctcagggctggatgc

SEQ ID NO: 2970802 - DNA, 25 bp, Homo sapien
ttctctcttcagcagagaccgccgg

SEQ ID NO: 2970803 - DNA, 25 bp, Homo sapien
tccgagccgtcttggcgcgcaagcg

SEQ ID NO: 2970804 - DNA, 25 bp, Homo sapien
tctcttcagcagagaccgccggcat

SEQ ID NO: 2970805 - DNA, 25 bp, Homo sapien
gccggcatccgagccgtcttggcgc

SEQ ID NO: 2970806 - DNA, 25 bp, Homo sapien
cccgtaacctgccgggccgccactg

SEQ ID NO: 2970807 - DNA, 25 bp, Homo sapien
agatcacgctcgctccgcacccagc

SEQ ID NO: 2970808 - DNA, 25 bp, Homo sapien
ccgctctccactcagatcacgctcg

SEQ ID NO: 2970809 - DNA, 25 bp, Homo sapien
tccactcagatcacgctcgctccgc

SEQ ID NO: 2970810 - DNA, 25 bp, Homo sapien
acacagcagatccggtcgcaggcag

SEQ ID NO: 2970811 - DNA, 25 bp, Homo sapien
agcagatccggtcgcaggcagcgtc

SEQ ID NO: 2970812 - DNA, 25 bp, Homo sapien
acagcagatccggtcgcaggcagcg

SEQ ID NO: 2970813 - DNA, 25 bp, Homo sapien
agatccggtcgcaggcagcgtccag

SEQ ID NO: 2970814 - DNA, 25 bp, Homo sapien
gtactgacgaaggagccagcggaac

SEQ ID NO: 2970815 - DNA, 25 bp, Homo sapien
ctacaagcccgaggtgtcagtactg

SEQ ID NO: 2970816 - DNA, 25 bp, Homo sapien
aaggactggcgtcccgtctcctgcg

SEQ ID NO: 2970817 - DNA, 25 bp, Homo sapien
gaacggagccaaaggactggcgtcc

SEQ ID NO: 2970818 - DNA, 25 bp, Homo sapien
ggcgctttgcactgcgtgaagtgct

SEQ ID NO: 2970819 - DNA, 25 bp, Homo sapien
atacgacttttaggaggaccgagag

SEQ ID NO: 2970820 - DNA, 25 bp, Homo sapien
ggaccgagaggcgatatgatataga

SEQ ID NO: 2970821 - DNA, 25 bp, Homo sapien
ctcatacgacttttaggaggaccga

SEQ ID NO: 2970822 - DNA, 25 bp, Homo sapien
tccgagggggtaaagccacttgcag

SEQ ID NO: 2970823 - DNA, 25 bp, Homo sapien
ccaggtagctttgcgtagtagaaaa

SEQ ID NO: 2970824 - DNA, 25 bp, Homo sapien
taaggcttgacaccaggtagctttg

SEQ ID NO: 2970825 - DNA, 25 bp, Homo sapien
cactttgaataaggcttgacaccag

SEQ ID NO: 2970826 - DNA, 25 bp, Homo sapien
aatattggcggagtccgctgcctgc

SEQ ID NO: 2970827 - DNA, 25 bp, Homo sapien
ggacagataatattggcggagtccg

SEQ ID NO: 2970828 - DNA, 25 bp, Homo sapien
ataatattggcggagtccgctgcct

SEQ ID NO: 2970829 - DNA, 25 bp, Homo sapien
acagataatattggcggagtccgct

SEQ ID NO: 2970830 - DNA, 25 bp, Homo sapien
tgtgaacactaagaccctcaaagag

SEQ ID NO: 2970831 - DNA, 25 bp, Homo sapien
tctgtaaggcttactactggaagcc

SEQ ID NO: 2970832 - DNA, 25 bp, Homo sapien
tgactcgaagatgtgtaacaaactg

SEQ ID NO: 2970833 - DNA, 25 bp, Homo sapien
gccataccttactgctggaagcctt

SEQ ID NO: 2970834 - DNA, 25 bp, Homo sapien
gcccagccgctgtcaatcaaaagca

SEQ ID NO: 2970835 - DNA, 25 bp, Homo sapien
ccctgcttcaagactactaaggtga

SEQ ID NO: 2970836 - DNA, 25 bp, Homo sapien
aatttcttgcaggaaggcaacaaca

SEQ ID NO: 2970837 - DNA, 25 bp, Homo sapien
gatctgttaccaaacggcacatggg

SEQ ID NO: 2970838 - DNA, 25 bp, Homo sapien
aagaaggctgcttgtccaatactgg

SEQ ID NO: 2970839 - DNA, 25 bp, Homo sapien
gcttgtccaatactggtccaggagt

SEQ ID NO: 2970840 - DNA, 25 bp, Homo sapien
gctgcttgtccaatactggtccagg

SEQ ID NO: 2970841 - DNA, 25 bp, Homo sapien
caatactggtccaggagtaacagaa

SEQ ID NO: 2970842 - DNA, 25 bp, Homo sapien
caggaggaggtaggatcttggccaa

SEQ ID NO: 2970843 - DNA, 25 bp, Homo sapien
tatgatcctaatgaccctgccctgt

SEQ ID NO: 2970844 - DNA, 25 bp, Homo sapien
caagacctcacaggtctgaatgagc

SEQ ID NO: 2970845 - DNA, 25 bp, Homo sapien
tcagattctccagtatgatcctaat

SEQ ID NO: 2970846 - DNA, 25 bp, Homo sapien
tgcagcctccggaggttttggctct

SEQ ID NO: 2970847 - DNA, 25 bp, Homo sapien
catttagttcgttcctctgtgcctg

SEQ ID NO: 2970848 - DNA, 25 bp, Homo sapien
ctttagcatttagttcgttcctctg

SEQ ID NO: 2970849 - DNA, 25 bp, Homo sapien
cagcctccggaggttttggctctta

SEQ ID NO: 2970850 - DNA, 25 bp, Homo sapien
tggtcacctagctactcctttggag

SEQ ID NO: 2970851 - DNA, 25 bp, Homo sapien
gcagggagataaggacagacctcag

SEQ ID NO: 2970852 - DNA, 25 bp, Homo sapien
tagatggcaaacagacacagtggtc

SEQ ID NO: 2970853 - DNA, 25 bp, Homo sapien
caggacccaattctacgtgcatgag

SEQ ID NO: 2970854 - DNA, 25 bp, Homo sapien
gactacttcccccacataggagccc

SEQ ID NO: 2970855 - DNA, 25 bp, Homo sapien
ccggactacttcccccacataggag

SEQ ID NO: 2970856 - DNA, 25 bp, Homo sapien
tcccccacataggagccctgctcct

SEQ ID NO: 2970857 - DNA, 25 bp, Homo sapien
acttcccccacataggagccctgct

SEQ ID NO: 2970858 - DNA, 25 bp, Homo sapien
caaatcactaatcctacccaggaag

SEQ ID NO: 2970859 - DNA, 25 bp, Homo sapien
gaaacaagggctcatgaccttcctt

SEQ ID NO: 2970860 - DNA, 25 bp, Homo sapien
ccaggaagacctatgagaatcccac

SEQ ID NO: 2970861 - DNA, 25 bp, Homo sapien
tcccacaataccttgacagaacaca

SEQ ID NO: 2970862 - DNA, 25 bp, Homo sapien
caatgtttttgtccacgtctacaac

SEQ ID NO: 2970863 - DNA, 25 bp, Homo sapien
caacaaatttaccttcaggatgtac

SEQ ID NO: 2970864 - DNA, 25 bp, Homo sapien
tgtccacgtctacaacaaatttacc

SEQ ID NO: 2970865 - DNA, 25 bp, Homo sapien
gatgtcaatgtttttgtccacgtct

SEQ ID NO: 2970866 - DNA, 25 bp, Homo sapien
gtacagtaagagctgaccccaccac

SEQ ID NO: 2970867 - DNA, 25 bp, Homo sapien
cgagtttcagaagtggtacagtaag

SEQ ID NO: 2970868 - DNA, 25 bp, Homo sapien
ctgggtgaagggggcgagtttcaga

SEQ ID NO: 2970869 - DNA, 25 bp, Homo sapien
gtttcagaagtggtacagtaagagc

SEQ ID NO: 2970870 - DNA, 25 bp, Homo sapien
tagagccacccggcaattgggtgtc

SEQ ID NO: 2970871 - DNA, 25 bp, Homo sapien
agagccacccggcaattgggtgtca

SEQ ID NO: 2970872 - DNA, 25 bp, Homo sapien
cttagagccacccggcaattgggtg

SEQ ID NO: 2970873 - DNA, 25 bp, Homo sapien
gagccacccggcaattgggtgtcac

SEQ ID NO: 2970874 - DNA, 25 bp, Homo sapien
ttcgaagagctcaggatgcttaaca

SEQ ID NO: 2970875 - DNA, 25 bp, Homo sapien
tgggtctaccttgttgggcaggatc

SEQ ID NO: 2970876 - DNA, 25 bp, Homo sapien
tttgatctccttgatctgtttgtcc

SEQ ID NO: 2970877 - DNA, 25 bp, Homo sapien
tcaggatgcttaacaggcagctcga

SEQ ID NO: 2970878 - DNA, 25 bp, Homo sapien
aaagctacacccctcatttcattca

SEQ ID NO: 2970879 - DNA, 25 bp, Homo sapien
gctgggtcccttgctagatgttagg

SEQ ID NO: 2970880 - DNA, 25 bp, Homo sapien
tgaacatttaccgagtgctgggtcc

SEQ ID NO: 2970881 - DNA, 25 bp, Homo sapien
ggcagaaagctacacccctcatttc

SEQ ID NO: 2970882 - DNA, 25 bp, Homo sapien
gacacgaataaaggtacagtccgta

SEQ ID NO: 2970883 - DNA, 25 bp, Homo sapien
taaaggtacagtccgtatgatgagc

SEQ ID NO: 2970884 - DNA, 25 bp, Homo sapien
acagcccgggccaacagtgtcttcc

SEQ ID NO: 2970885 - DNA, 25 bp, Homo sapien
gtacagtccgtatgatgagccacag

SEQ ID NO: 2970886 - DNA, 25 bp, Homo sapien
ttagggagcttattagcttattagc

SEQ ID NO: 2970887 - DNA, 25 bp, Homo sapien
attagcttattagctctctaacccc

SEQ ID NO: 2970888 - DNA, 25 bp, Homo sapien
ggagcttattagcttattagctctc

SEQ ID NO: 2970889 - DNA, 25 bp, Homo sapien
ctggtgttagggagcttattagctt

SEQ ID NO: 2970890 - DNA, 25 bp, Homo sapien
agcaactccagcatcgtgcgctgca

SEQ ID NO: 2970891 - DNA, 25 bp, Homo sapien
gccgtcgagctggttgagcaactcc

SEQ ID NO: 2970892 - DNA, 25 bp, Homo sapien
gagccgatggagtcgatttcgtcca

SEQ ID NO: 2970893 - DNA, 25 bp, Homo sapien
gatagatggagcatgttcccgtgcc

SEQ ID NO: 2970894 - DNA, 25 bp, Homo sapien
caatcctattagtagccatgataac

SEQ ID NO: 2970895 - DNA, 25 bp, Homo sapien
tcaatcctattagtagccatgataa

SEQ ID NO: 2970896 - DNA, 25 bp, Homo sapien
cagccagagccactttgcacagtgt

SEQ ID NO: 2970897 - DNA, 25 bp, Homo sapien
ggcaaggaaaagcctgagccccaca

SEQ ID NO: 2970898 - DNA, 25 bp, Homo sapien
gccagagccactttgcacagtgtcc

SEQ ID NO: 2970899 - DNA, 25 bp, Homo sapien
gagccactttgcacagtgtccatca

SEQ ID NO: 2970900 - DNA, 25 bp, Homo sapien
gatcccccgggtcaggttcatcttc

SEQ ID NO: 2970901 - DNA, 25 bp, Homo sapien
ttcatcttccgagaatgaatcttca

SEQ ID NO: 2970902 - DNA, 25 bp, Homo sapien
ccccgggtcaggttcatcttccgag

SEQ ID NO: 2970903 - DNA, 25 bp, Homo sapien
gggtcaggttcatcttccgagaatg

SEQ ID NO: 2970904 - DNA, 25 bp, Homo sapien
cagcccctgatgctcctggcatgag

SEQ ID NO: 2970905 - DNA, 25 bp, Homo sapien
acttcagcccctgatgctcctggca

SEQ ID NO: 2970906 - DNA, 25 bp, Homo sapien
ttcagcccctgatgctcctggcatg

SEQ ID NO: 2970907 - DNA, 25 bp, Homo sapien
agcccctgatgctcctggcatgagc

SEQ ID NO: 2970908 - DNA, 25 bp, Homo sapien
tgtggcccttgagcccagagcttcc

SEQ ID NO: 2970909 - DNA, 25 bp, Homo sapien
tgttttcagtgggtactccaattac

SEQ ID NO: 2970910 - DNA, 25 bp, Homo sapien
gcctctgccctgttttcagtgggta

SEQ ID NO: 2970911 - DNA, 25 bp, Homo sapien
aaaggaaattgaggccccactgctg

SEQ ID NO: 2970912 - DNA, 25 bp, Homo sapien
acatggactcgccgttctcgcaggg

SEQ ID NO: 2970913 - DNA, 25 bp, Homo sapien
gtgacatggactcgccgttctcgca

SEQ ID NO: 2970914 - DNA, 25 bp, Homo sapien
gacatggactcgccgttctcgcagg

SEQ ID NO: 2970915 - DNA, 25 bp, Homo sapien
tgacatggactcgccgttctcgcag

SEQ ID NO: 2970916 - DNA, 25 bp, Homo sapien
gtttttctcactgtccttctgcatg

SEQ ID NO: 2970917 - DNA, 25 bp, Homo sapien
catgtttttctcactgtccttctgc

SEQ ID NO: 2970918 - DNA, 25 bp, Homo sapien
tggacatgtttttctcactgtcctt

SEQ ID NO: 2970919 - DNA, 25 bp, Homo sapien
tccataatttcttgatggacatgtt

SEQ ID NO: 2970920 - DNA, 25 bp, Homo sapien
cagcacagccctcattaacagactg

SEQ ID NO: 2970921 - DNA, 25 bp, Homo sapien
aacagcacagccctcattaacagac

SEQ ID NO: 2970922 - DNA, 25 bp, Homo sapien
cacagccctcattaacagactggag

SEQ ID NO: 2970923 - DNA, 25 bp, Homo sapien
cttgaacagcacagccctcattaac

SEQ ID NO: 2970924 - DNA, 25 bp, Homo sapien
agcaagttttctatgtgggagccac

SEQ ID NO: 2970925 - DNA, 25 bp, Homo sapien
gggacactccagttctctagcatgg

SEQ ID NO: 2970926 - DNA, 25 bp, Homo sapien
caatctatgcaagcggctctggccg

SEQ ID NO: 2970927 - DNA, 25 bp, Homo sapien
tagggcttggcgagtgccacatctg

SEQ ID NO: 2970928 - DNA, 25 bp, Homo sapien
gcgggtcgcggtggagaagtgggaa

SEQ ID NO: 2970929 - DNA, 25 bp, Homo sapien
ccgcggcacagggattccgagtgac

SEQ ID NO: 2970930 - DNA, 25 bp, Homo sapien
aatgcatgaggaactccgggagacg

SEQ ID NO: 2970931 - DNA, 25 bp, Homo sapien
cagtaccaggtgagcaaggaggacg

SEQ ID NO: 2970932 - DNA, 25 bp, Homo sapien
ccggaattaagatcgccaagtcccg

SEQ ID NO: 2970933 - DNA, 25 bp, Homo sapien
agatcgccaagtcccggatcgcgga

SEQ ID NO: 2970934 - DNA, 25 bp, Homo sapien
tcccggatcgcggagcacagagcac

SEQ ID NO: 2970935 - DNA, 25 bp, Homo sapien
aattaagatcgccaagtcccggatc

SEQ ID NO: 2970936 - DNA, 25 bp, Homo sapien
gtcaccacactcggctaatttttgt

SEQ ID NO: 2970937 - DNA, 25 bp, Homo sapien
tgatgagtttcactcttgccgccca

SEQ ID NO: 2970938 - DNA, 25 bp, Homo sapien
ttttgatgagtttcactcttgccgc

SEQ ID NO: 2970939 - DNA, 25 bp, Homo sapien
tcaccacactcggctaatttttgta

SEQ ID NO: 2970940 - DNA, 25 bp, Homo sapien
gaacccagattggtgggtgccagaa

SEQ ID NO: 2970941 - DNA, 25 bp, Homo sapien
tgcccaacacccacctattatgatt

SEQ ID NO: 2970942 - DNA, 25 bp, Homo sapien
cttctaatgaggatggagttttctt

SEQ ID NO: 2970943 - DNA, 25 bp, Homo sapien
ctaggtagaggaggtgttgcacaac

SEQ ID NO: 2970944 - DNA, 25 bp, Homo sapien
cgagcaggaagctacaacgacggga

SEQ ID NO: 2970945 - DNA, 25 bp, Homo sapien
gatctgcctagaaactcgtgacgcc

SEQ ID NO: 2970946 - DNA, 25 bp, Homo sapien
agaccgtttgttctacaccgccagg

SEQ ID NO: 2970947 - DNA, 25 bp, Homo sapien
cagaaagcgcgtgtttggcgccgca

SEQ ID NO: 2970948 - DNA, 25 bp, Homo sapien
tccagacaccaaacagaagcgtttt

SEQ ID NO: 2970949 - DNA, 25 bp, Homo sapien
ctgggcaaaggatcaaggccagcag

SEQ ID NO: 2970950 - DNA, 25 bp, Homo sapien
cagggtccagacaccaaacagaagc

SEQ ID NO: 2970951 - DNA, 25 bp, Homo sapien
aaggatcaaggccagcagggtccag

SEQ ID NO: 2970952 - DNA, 25 bp, Homo sapien
tgttcctttcccgtcatcaggagaa

SEQ ID NO: 2970953 - DNA, 25 bp, Homo sapien
tctgtacctgagctatgtatgggtc

SEQ ID NO: 2970954 - DNA, 25 bp, Homo sapien
cacaaacggtggcaacaaagaagta

SEQ ID NO: 2970955 - DNA, 25 bp, Homo sapien
tgtatgggtcctgtcctaccaagag

SEQ ID NO: 2970956 - DNA, 25 bp, Homo sapien
cgcggtggctcacgcctgtaatccc

SEQ ID NO: 2970957 - DNA, 25 bp, Homo sapien
tgaaatatgaaccacatcggccagg

SEQ ID NO: 2970958 - DNA, 25 bp, Homo sapien
ggatcacaaggtcaagagatcaaga

SEQ ID NO: 2970959 - DNA, 25 bp, Homo sapien
agcactttgggaggccgaggcgggc

SEQ ID NO: 2970960 - DNA, 25 bp, Homo sapien
tagggactgtccaaactccaccagg

SEQ ID NO: 2970961 - DNA, 25 bp, Homo sapien
gcctgacttggccaaatagaaacct

SEQ ID NO: 2970962 - DNA, 25 bp, Homo sapien
aagaaggtctcaattccactgggtc

SEQ ID NO: 2970963 - DNA, 25 bp, Homo sapien
tagtgctgcagttgaccactaggga

SEQ ID NO: 2970964 - DNA, 25 bp, Homo sapien
tgccaaggcttgtgtccttttgaat

SEQ ID NO: 2970965 - DNA, 25 bp, Homo sapien
ccaaggcttgtgtccttttgaatcc

SEQ ID NO: 2970966 - DNA, 25 bp, Homo sapien
aatacacagtgatgccaaggcttgt

SEQ ID NO: 2970967 - DNA, 25 bp, Homo sapien
gatgccaaggcttgtgtccttttga

SEQ ID NO: 2970968 - DNA, 25 bp, Homo sapien
ggcaggacttgatgagcatgccacc

SEQ ID NO: 2970969 - DNA, 25 bp, Homo sapien
aaaaaggcaggacttgatgagcatg

SEQ ID NO: 2970970 - DNA, 25 bp, Homo sapien
ctttaagacaaaaaggcaggacttg

SEQ ID NO: 2970971 - DNA, 25 bp, Homo sapien
aggacttgatgagcatgccacccac

SEQ ID NO: 2970972 - DNA, 25 bp, Homo sapien
tccaagggtgctacactgggtacat

SEQ ID NO: 2970973 - DNA, 25 bp, Homo sapien
aagggtgctacactgggtacatgac

SEQ ID NO: 2970974 - DNA, 25 bp, Homo sapien
gactctccaagggtgctacactggg

SEQ ID NO: 2970975 - DNA, 25 bp, Homo sapien
gagactctccaagggtgctacactg

SEQ ID NO: 2970976 - DNA, 25 bp, Homo sapien
gctcgtaaagttctttctatgcagt

SEQ ID NO: 2970977 - DNA, 25 bp, Homo sapien
caagctcgtaaagttctttctatgc

SEQ ID NO: 2970978 - DNA, 25 bp, Homo sapien
gacactgatgatgacttcagctctt

SEQ ID NO: 2970979 - DNA, 25 bp, Homo sapien
ctgacactgatgatgacttcagctc

SEQ ID NO: 2970980 - DNA, 25 bp, Homo sapien
gggtgagctgccttgaaagagcctc

SEQ ID NO: 2970981 - DNA, 25 bp, Homo sapien
tccggactattctgatgggtgagct

SEQ ID NO: 2970982 - DNA, 25 bp, Homo sapien
caaagatccggactattctgatggg

SEQ ID NO: 2970983 - DNA, 25 bp, Homo sapien
tgggtgagctgccttgaaagagcct

SEQ ID NO: 2970984 - DNA, 25 bp, Homo sapien
ctcgcagctcacagtctccgccatc

SEQ ID NO: 2970985 - DNA, 25 bp, Homo sapien
cagcctccatggtccgaatggtagc

SEQ ID NO: 2970986 - DNA, 25 bp, Homo sapien
acttctttggctggaaacaccctag

SEQ ID NO: 2970987 - DNA, 25 bp, Homo sapien
aatggtagcattggcccatgctgtg

SEQ ID NO: 2970988 - DNA, 25 bp, Homo sapien
ctgttccattgcacccagagatgca

SEQ ID NO: 2970989 - DNA, 25 bp, Homo sapien
ttgtagctatgcactagctttcttg

SEQ ID NO: 2970990 - DNA, 25 bp, Homo sapien
tctgttccattgcacccagagatgc

SEQ ID NO: 2970991 - DNA, 25 bp, Homo sapien
ccacttattgtagctatgcactagc

SEQ ID NO: 2970992 - DNA, 25 bp, Homo sapien
cacttgagagcatacccagcaaagg

SEQ ID NO: 2970993 - DNA, 25 bp, Homo sapien
cagggatgtctacagccgaatcacc

SEQ ID NO: 2970994 - DNA, 25 bp, Homo sapien
tcatgttcacttgagagcataccca

SEQ ID NO: 2970995 - DNA, 25 bp, Homo sapien
tcagcagcagagaacccgtatgaaa

SEQ ID NO: 2970996 - DNA, 25 bp, Homo sapien
gattcaagagcttctcttatgcatg

SEQ ID NO: 2970997 - DNA, 25 bp, Homo sapien
cagacacttctgcactcttgctgct

SEQ ID NO: 2970998 - DNA, 25 bp, Homo sapien
gctatgcttcgctgcaaggactgca

SEQ ID NO: 2970999 - DNA, 25 bp, Homo sapien
ttggataccattgcttcttctgtaa

SEQ ID NO: 2971000 - DNA, 25 bp, Homo sapien
tcctccctggcagtaagtagaagcc

SEQ ID NO: 2971001 - DNA, 25 bp, Homo sapien
gatgttaatacatgccctgagcagg

SEQ ID NO: 2971002 - DNA, 25 bp, Homo sapien
gaggcctcgcaggagaaatttcagc

SEQ ID NO: 2971003 - DNA, 25 bp, Homo sapien
attaatgtcggtccctgccaatggg

SEQ ID NO: 2971004 - DNA, 25 bp, Homo sapien
agaaaaatgtggcaactgtaataat

SEQ ID NO: 2971005 - DNA, 25 bp, Homo sapien
aatgtggcaactgtaataatgaagc

SEQ ID NO: 2971006 - DNA, 25 bp, Homo sapien
gaaaaatgtggcaactgtaataatg

SEQ ID NO: 2971007 - DNA, 25 bp, Homo sapien
aaaatgtggcaactgtaataatgaa

SEQ ID NO: 2971008 - DNA, 25 bp, Homo sapien
aggtcaaagaccaccccattccagg

SEQ ID NO: 2971009 - DNA, 25 bp, Homo sapien
caaggtcaaagaccaccccattcca

SEQ ID NO: 2971010 - DNA, 25 bp, Homo sapien
accaccccattccaggtacacacca

SEQ ID NO: 2971011 - DNA, 25 bp, Homo sapien
aagaccaccccattccaggtacaca

SEQ ID NO: 2971012 - DNA, 25 bp, Homo sapien
agcaatgtctttgctgacagagccc

SEQ ID NO: 2971013 - DNA, 25 bp, Homo sapien
cagcaatgtctttgctgacagagcc

SEQ ID NO: 2971014 - DNA, 25 bp, Homo sapien
cacagtagcagaagtctcattcaat

SEQ ID NO: 2971015 - DNA, 25 bp, Homo sapien
cctgaaacaccgttttacaggacag

SEQ ID NO: 2971016 - DNA, 25 bp, Homo sapien
ttacaggacagacgtacacaaaggg

SEQ ID NO: 2971017 - DNA, 25 bp, Homo sapien
gtacacaaaggggaatgcagcctgc

SEQ ID NO: 2971018 - DNA, 25 bp, Homo sapien
tctaacctagacacccacatgggta

SEQ ID NO: 2971019 - DNA, 25 bp, Homo sapien
gaagcttgccactgatccttaatga

SEQ ID NO: 2971020 - DNA, 25 bp, Homo sapien
tgatgtcaacaagctcagctctggg

SEQ ID NO: 2971021 - DNA, 25 bp, Homo sapien
cagaacactgggctagataggatgc

SEQ ID NO: 2971022 - DNA, 25 bp, Homo sapien
agtgcctctcctggtcgtggaaggt

SEQ ID NO: 2971023 - DNA, 25 bp, Homo sapien
tcctggtcgtggaaggtgctactcc

SEQ ID NO: 2971024 - DNA, 25 bp, Homo sapien
tggtcgtggaaggtgctactccagt

SEQ ID NO: 2971025 - DNA, 25 bp, Homo sapien
gcctctcctggtcgtggaaggtgct

SEQ ID NO: 2971026 - DNA, 25 bp, Homo sapien
ggcctcagttcttccctctggtcca

SEQ ID NO: 2971027 - DNA, 25 bp, Homo sapien
ctgtgggcctcagttcttccctctg

SEQ ID NO: 2971028 - DNA, 25 bp, Homo sapien
tgggcctcagttcttccctctggtc

SEQ ID NO: 2971029 - DNA, 25 bp, Homo sapien
tgtgggcctcagttcttccctctgg

SEQ ID NO: 2971030 - DNA, 25 bp, Homo sapien
aggtcaaagaccaccccattccagg

SEQ ID NO: 2971031 - DNA, 25 bp, Homo sapien
caaggtcaaagaccaccccattcca

SEQ ID NO: 2971032 - DNA, 25 bp, Homo sapien
accaccccattccaggtacacacca

SEQ ID NO: 2971033 - DNA, 25 bp, Homo sapien
aagaccaccccattccaggtacaca

SEQ ID NO: 2971034 - DNA, 25 bp, Homo sapien
ccactccaagggcaacggtaataat

SEQ ID NO: 2971035 - DNA, 25 bp, Homo sapien
tcctgaacagcaaactggctttcct

SEQ ID NO: 2971036 - DNA, 25 bp, Homo sapien
ctttgcagggccgatagctcaaata

SEQ ID NO: 2971037 - DNA, 25 bp, Homo sapien
tacagtgctatggtgatgacaccca

SEQ ID NO: 2971038 - DNA, 25 bp, Homo sapien
agtttgacacaaactcgcacaacca

SEQ ID NO: 2971039 - DNA, 25 bp, Homo sapien
gctgtggcttctaggtgcccgagta

SEQ ID NO: 2971040 - DNA, 25 bp, Homo sapien
gcacaaccatgacgcactgctcaag

SEQ ID NO: 2971041 - DNA, 25 bp, Homo sapien
ggccctgaaggtgccactccagtgc

SEQ ID NO: 2971042 - DNA, 25 bp, Homo sapien
ctgtgggcctcagttcttccctctg

SEQ ID NO: 2971043 - DNA, 25 bp, Homo sapien
ggcctcagttcttccctctggtcca

SEQ ID NO: 2971044 - DNA, 25 bp, Homo sapien
tgggcctcagttcttccctctggtc

SEQ ID NO: 2971045 - DNA, 25 bp, Homo sapien
tgtgggcctcagttcttccctctgg

SEQ ID NO: 2971046 - DNA, 25 bp, Homo sapien
ggcagagcaactggattcctctaac

SEQ ID NO: 2971047 - DNA, 25 bp, Homo sapien
caggcgagcgtgtgttccatccctt

SEQ ID NO: 2971048 - DNA, 25 bp, Homo sapien
tttccctttgggacgcaggcgagcg

SEQ ID NO: 2971049 - DNA, 25 bp, Homo sapien
cagccaggtctgtttggcagagcaa

SEQ ID NO: 2971050 - DNA, 25 bp, Homo sapien
tgcagcagtaggttccagtgtggtt

SEQ ID NO: 2971051 - DNA, 25 bp, Homo sapien
ctgtgcagcagtaggttccagtgtg

SEQ ID NO: 2971052 - DNA, 25 bp, Homo sapien
tgtgcagcagtaggttccagtgtgg

SEQ ID NO: 2971053 - DNA, 25 bp, Homo sapien
gtgcagcagtaggttccagtgtggt

SEQ ID NO: 2971054 - DNA, 25 bp, Homo sapien
agcaatgtctttgctgacagagccc

SEQ ID NO: 2971055 - DNA, 25 bp, Homo sapien
cagcaatgtctttgctgacagagcc

SEQ ID NO: 2971056 - DNA, 25 bp, Homo sapien
ccactccaagggcaacggtaataat

SEQ ID NO: 2971057 - DNA, 25 bp, Homo sapien
tcctgaacagcaaactggctttcct

SEQ ID NO: 2971058 - DNA, 25 bp, Homo sapien
ctttgcagggccgatagctcaaata

SEQ ID NO: 2971059 - DNA, 25 bp, Homo sapien
tacagtgctatggtgatgacaccca

SEQ ID NO: 2971060 - DNA, 25 bp, Homo sapien
ggcagatcttcaagcagacctacag

SEQ ID NO: 2971061 - DNA, 25 bp, Homo sapien
aaactcacacaacgatgacgcacta

SEQ ID NO: 2971062 - DNA, 25 bp, Homo sapien
ccccggactgggcagatcttcaagc

SEQ ID NO: 2971063 - DNA, 25 bp, Homo sapien
acacaacgatgacgcactactcaag

SEQ ID NO: 2971064 - DNA, 25 bp, Homo sapien
gaggaaggcatccaaacgctgatgg

SEQ ID NO: 2971065 - DNA, 25 bp, Homo sapien
gcgcctctgacagcaacgtctatga

SEQ ID NO: 2971066 - DNA, 25 bp, Homo sapien
caacgtctatgacctcctaaaggac

SEQ ID NO: 2971067 - DNA, 25 bp, Homo sapien
aggaaggcatccaaacgctgatggg

SEQ ID NO: 2971068 - DNA, 25 bp, Homo sapien
tcatccagtcgtggctggagcccgt

SEQ ID NO: 2971069 - DNA, 25 bp, Homo sapien
ctgctcatccagtcgtggctggagc

SEQ ID NO: 2971070 - DNA, 25 bp, Homo sapien
ccgtgcagttcctcaggagtgtctt

SEQ ID NO: 2971071 - DNA, 25 bp, Homo sapien
tggagcccgtgcagttcctcaggag

SEQ ID NO: 2971072 - DNA, 25 bp, Homo sapien
gtctattccgacaccctccaacagg

SEQ ID NO: 2971073 - DNA, 25 bp, Homo sapien
ttctcagagtctattccgacaccct

SEQ ID NO: 2971074 - DNA, 25 bp, Homo sapien
ctgtttctcagagtctattccgaca

SEQ ID NO: 2971075 - DNA, 25 bp, Homo sapien
gtttctcagagtctattccgacacc

SEQ ID NO: 2971076 - DNA, 25 bp, Homo sapien
ctcctcggactgtgtgcaggttgca

SEQ ID NO: 2971077 - DNA, 25 bp, Homo sapien
cagaaatctgtttgattggatattc

SEQ ID NO: 2971078 - DNA, 25 bp, Homo sapien
tccttcagaagtttcgtctaatggg

SEQ ID NO: 2971079 - DNA, 25 bp, Homo sapien
tagatgagccgggtccggcctctcc

SEQ ID NO: 2971080 - DNA, 25 bp, Homo sapien
ctcaggtttcactcatgaccctgtg

SEQ ID NO: 2971081 - DNA, 25 bp, Homo sapien
tgggcacggcgctctgggcttgtca

SEQ ID NO: 2971082 - DNA, 25 bp, Homo sapien
gggcttgtcagcaaccgctctgctc

SEQ ID NO: 2971083 - DNA, 25 bp, Homo sapien
gaccctgtgacatcagcggcagcag

SEQ ID NO: 2971084 - DNA, 25 bp, Homo sapien
tgtgaggcaactccgtggggaccac

SEQ ID NO: 2971085 - DNA, 25 bp, Homo sapien
cttcttgaaccacgggcaggcctgg

SEQ ID NO: 2971086 - DNA, 25 bp, Homo sapien
gcagagatgggcatcgggcctggca

SEQ ID NO: 2971087 - DNA, 25 bp, Homo sapien
aggaacttcttgaaccacgggcagg

SEQ ID NO: 2971088 - DNA, 25 bp, Homo sapien
gctatttgccctgtttcctggccaa

SEQ ID NO: 2971089 - DNA, 25 bp, Homo sapien
aaagcacgcgttcttttgacaggaa

SEQ ID NO: 2971090 - DNA, 25 bp, Homo sapien
tcctcagacgaggaaaatcgtggtg

SEQ ID NO: 2971091 - DNA, 25 bp, Homo sapien
aatcgtggtgacttcagcacccgcg

SEQ ID NO: 2971092 - DNA, 25 bp, Homo sapien
cgtcgggactgcgctctgcggtggg

SEQ ID NO: 2971093 - DNA, 25 bp, Homo sapien
tcgggactgcgctctgcggtgggga

SEQ ID NO: 2971094 - DNA, 25 bp, Homo sapien
gtggggagcgaccccagcttccgcc

SEQ ID NO: 2971095 - DNA, 25 bp, Homo sapien
ggagcgaccccagcttccgcccgcc

SEQ ID NO: 2971096 - DNA, 25 bp, Homo sapien
gggtgtgcgcggagtcagccaggtg

SEQ ID NO: 2971097 - DNA, 25 bp, Homo sapien
tcttcctctcggtttggggctgtct

SEQ ID NO: 2971098 - DNA, 25 bp, Homo sapien
cagtggcctccctaaccccgcaggg

SEQ ID NO: 2971099 - DNA, 25 bp, Homo sapien
atggggacacgtcgcgagccccaac

SEQ ID NO: 2971100 - DNA, 25 bp, Homo sapien
gtgggacggcccacgagaggggctg

SEQ ID NO: 2971101 - DNA, 25 bp, Homo sapien
gcgcaggtgggacggcccacgagag

SEQ ID NO: 2971102 - DNA, 25 bp, Homo sapien
gcaggtgggacggcccacgagaggg

SEQ ID NO: 2971103 - DNA, 25 bp, Homo sapien
ggggcgcaggtgggacggcccacga

SEQ ID NO: 2971104 - DNA, 25 bp, Homo sapien
aagaatgggttggcgggttgtgctg

SEQ ID NO: 2971105 - DNA, 25 bp, Homo sapien
gcgggttgtgctgcggggactccca

SEQ ID NO: 2971106 - DNA, 25 bp, Homo sapien
gaggatgtgcgaggcagaagagggt

SEQ ID NO: 2971107 - DNA, 25 bp, Homo sapien
gggactcccagaggatgtgcgaggc

SEQ ID NO: 2971108 - DNA, 25 bp, Homo sapien
ctaggaagcggggttcagcaagccc

SEQ ID NO: 2971109 - DNA, 25 bp, Homo sapien
aggaagcggggttcagcaagcccac

SEQ ID NO: 2971110 - DNA, 25 bp, Homo sapien
aagcggggttcagcaagcccacgcc

SEQ ID NO: 2971111 - DNA, 25 bp, Homo sapien
gcaagcccacgccgggcctccgagt

SEQ ID NO: 2971112 - DNA, 25 bp, Homo sapien
agctggtgcatctgcgcgttctgca

SEQ ID NO: 2971113 - DNA, 25 bp, Homo sapien
ctgggcacgtcctgcaagtagggct

SEQ ID NO: 2971114 - DNA, 25 bp, Homo sapien
catcaaatagggcaagtagtggtgg

SEQ ID NO: 2971115 - DNA, 25 bp, Homo sapien
ggcaagtagtggtggtgaaacacca

SEQ ID NO: 2971116 - DNA, 25 bp, Homo sapien
ctgaatcctgggcacgtcctgcaag

SEQ ID NO: 2971117 - DNA, 25 bp, Homo sapien
tgaagccgggggtacatcagcaccc

SEQ ID NO: 2971118 - DNA, 25 bp, Homo sapien
ctgaagccgggggtacatcagcacc

SEQ ID NO: 2971119 - DNA, 25 bp, Homo sapien
gaagccgggggtacatcagcaccca

SEQ ID NO: 2971120 - DNA, 25 bp, Homo sapien
tcataggaggctctcggcatcatag

SEQ ID NO: 2971121 - DNA, 25 bp, Homo sapien
cataggaggctctcggcatcatagt

SEQ ID NO: 2971122 - DNA, 25 bp, Homo sapien
ataggaggctctcggcatcatagta

SEQ ID NO: 2971123 - DNA, 25 bp, Homo sapien
aggaggctctcggcatcatagtagt

SEQ ID NO: 2971124 - DNA, 25 bp, Homo sapien
tggtgcagttcccagggccggggtc

SEQ ID NO: 2971125 - DNA, 25 bp, Homo sapien
ctggtgcagttcccagggccggggt

SEQ ID NO: 2971126 - DNA, 25 bp, Homo sapien
gcagttcccagggccggggtctgtc

SEQ ID NO: 2971127 - DNA, 25 bp, Homo sapien
gtgcagttcccagggccggggtctg

SEQ ID NO: 2971128 - DNA, 25 bp, Homo sapien
acaacagcacagatccggcccgtcc

SEQ ID NO: 2971129 - DNA, 25 bp, Homo sapien
atgggcaccggggagtcgacaagag

SEQ ID NO: 2971130 - DNA, 25 bp, Homo sapien
atccggcccgtccaggaactcattg

SEQ ID NO: 2971131 - DNA, 25 bp, Homo sapien
ccggggagtcgacaagagaggtgca

SEQ ID NO: 2971132 - DNA, 25 bp, Homo sapien
ggaactcagtgtgactcctcagggt

SEQ ID NO: 2971133 - DNA, 25 bp, Homo sapien
cagagacttgggacattgccttttc

SEQ ID NO: 2971134 - DNA, 25 bp, Homo sapien
ttctagcccgaatacaaacacctgg

SEQ ID NO: 2971135 - DNA, 25 bp, Homo sapien
cagccctggctgaaggactgtgaca

SEQ ID NO: 2971136 - DNA, 25 bp, Homo sapien
cagagcctgtgtcggacagccagat

SEQ ID NO: 2971137 - DNA, 25 bp, Homo sapien
gatggtcatcatagtcacggtggtg

SEQ ID NO: 2971138 - DNA, 25 bp, Homo sapien
ctgggatcacaggacgtctaagacc

SEQ ID NO: 2971139 - DNA, 25 bp, Homo sapien
gtccctgttcgtgacatctgtcctg

SEQ ID NO: 2971140 - DNA, 25 bp, Homo sapien
tctgcactatgagaccttcgggaag

SEQ ID NO: 2971141 - DNA, 25 bp, Homo sapien
aatgagaagtttggcctgactgccc

SEQ ID NO: 2971142 - DNA, 25 bp, Homo sapien
gacttgatgtctcgcggtggcaaca

SEQ ID NO: 2971143 - DNA, 25 bp, Homo sapien
tgttccgtggcaatgagactctgca

SEQ ID NO: 2971144 - DNA, 25 bp, Homo sapien
tcttcatgggaagatctttaaatta

SEQ ID NO: 2971145 - DNA, 25 bp, Homo sapien
tctgcaaaaccatctagacctggta

SEQ ID NO: 2971146 - DNA, 25 bp, Homo sapien
cttctgcaaaaccatctagacctgg

SEQ ID NO: 2971147 - DNA, 25 bp, Homo sapien
ctagacctggtattttcttcatggg

SEQ ID NO: 2971148 - DNA, 25 bp, Homo sapien
tccatgggatggatgctttacagta

SEQ ID NO: 2971149 - DNA, 25 bp, Homo sapien
agtgatactgtatccttccatggga

SEQ ID NO: 2971150 - DNA, 25 bp, Homo sapien
gatttgttttggacaacacccttga

SEQ ID NO: 2971151 - DNA, 25 bp, Homo sapien
tgtgccattatgtcttctgtgtgga

SEQ ID NO: 2971152 - DNA, 25 bp, Homo sapien
tggtgtgcccattggatccttggcc

SEQ ID NO: 2971153 - DNA, 25 bp, Homo sapien
cttgctgcagtgagagattaattgg

SEQ ID NO: 2971154 - DNA, 25 bp, Homo sapien
tgatcaaaccgttcatgcagatggg

SEQ ID NO: 2971155 - DNA, 25 bp, Homo sapien
gacctttggattgtacggctttctc

SEQ ID NO: 2971156 - DNA, 25 bp, Homo sapien
ggtgccacgagtgatttaacaggcc

SEQ ID NO: 2971157 - DNA, 25 bp, Homo sapien
cgattacctcacttaggccttggaa

SEQ ID NO: 2971158 - DNA, 25 bp, Homo sapien
gaaacgtggccagaccgcatttcct

SEQ ID NO: 2971159 - DNA, 25 bp, Homo sapien
tccccatacggctgcaaggtgcttt

SEQ ID NO: 2971160 - DNA, 25 bp, Homo sapien
tcaatccatatttagtcacagccgc

SEQ ID NO: 2971161 - DNA, 25 bp, Homo sapien
tctctcttgggatggcgagtggtca

SEQ ID NO: 2971162 - DNA, 25 bp, Homo sapien
cctggtatgggtgcaacaagtcttt

SEQ ID NO: 2971163 - DNA, 25 bp, Homo sapien
gaggcaccgtagtgtatccacttgg

SEQ ID NO: 2971164 - DNA, 25 bp, Homo sapien
gaacagaggccgagacaactttgac

SEQ ID NO: 2971165 - DNA, 25 bp, Homo sapien
tccactgaccagtcccaggtactag

SEQ ID NO: 2971166 - DNA, 25 bp, Homo sapien
gggaattacttactggctgggaaca

SEQ ID NO: 2971167 - DNA, 25 bp, Homo sapien
gacatccttagcatcaggttgcaac

SEQ ID NO: 2971168 - DNA, 25 bp, Homo sapien
caaaatggaaatacacgcatcacag

SEQ ID NO: 2971169 - DNA, 25 bp, Homo sapien
cattggaggcccttgctacagactc

SEQ ID NO: 2971170 - DNA, 25 bp, Homo sapien
ttgaccttcacattggaggcccttg

SEQ ID NO: 2971171 - DNA, 25 bp, Homo sapien
ggaaatacacgcatcacagtgactg

SEQ ID NO: 2971172 - DNA, 25 bp, Homo sapien
cccagctacttgggaggctgaggca

SEQ ID NO: 2971173 - DNA, 25 bp, Homo sapien
gtggagcttgcagtgagctgagatc

SEQ ID NO: 2971174 - DNA, 25 bp, Homo sapien
gccaggtgcggtggcgggcgcctat

SEQ ID NO: 2971175 - DNA, 25 bp, Homo sapien
caggaaaatggcgtgaacccgggag

SEQ ID NO: 2971176 - DNA, 25 bp, Homo sapien
tggtatgttgttccatgccctgggc

SEQ ID NO: 2971177 - DNA, 25 bp, Homo sapien
tactcacttatacacctacacacaa

SEQ ID NO: 2971178 - DNA, 25 bp, Homo sapien
tctattcctccatcatgggtttgcg

SEQ ID NO: 2971179 - DNA, 25 bp, Homo sapien
catcatgggtttgcgtggctttggt

SEQ ID NO: 2971180 - DNA, 25 bp, Homo sapien
ggaagcctgggatggtcctgacagg

SEQ ID NO: 2971181 - DNA, 25 bp, Homo sapien
gaagcctgggatggtcctgacaggg

SEQ ID NO: 2971182 - DNA, 25 bp, Homo sapien
ggatggtcctgacagggtccttcat

SEQ ID NO: 2971183 - DNA, 25 bp, Homo sapien
agcctgggatggtcctgacagggtc

SEQ ID NO: 2971184 - DNA, 25 bp, Homo sapien
cagagagaggccgtcaatctcgaag

SEQ ID NO: 2971185 - DNA, 25 bp, Homo sapien
tggttgattgcatcaaagacatttt

SEQ ID NO: 2971186 - DNA, 25 bp, Homo sapien
gctgacttatcaccccatgttttcc

SEQ ID NO: 2971187 - DNA, 25 bp, Homo sapien
cccaggccctcacgaattttgccag

SEQ ID NO: 2971188 - DNA, 25 bp, Homo sapien
tgctgactcgggtcccagaactctt

SEQ ID NO: 2971189 - DNA, 25 bp, Homo sapien
tctgcctggacgtcttttgggagtc

SEQ ID NO: 2971190 - DNA, 25 bp, Homo sapien
tgtccaaggcacttgatgctgactc

SEQ ID NO: 2971191 - DNA, 25 bp, Homo sapien
aactcttctgcctggacgtcttttg

SEQ ID NO: 2971192 - DNA, 25 bp, Homo sapien
tcggctgtttacttttttcaggagc

SEQ ID NO: 2971193 - DNA, 25 bp, Homo sapien
taactcaccaaactggggttcttca

SEQ ID NO: 2971194 - DNA, 25 bp, Homo sapien
gaggcctgcaactccattcggctgt

SEQ ID NO: 2971195 - DNA, 25 bp, Homo sapien
tcttcagaatagaggcctgcaactc

SEQ ID NO: 2971196 - DNA, 25 bp, Homo sapien
gcccagcctaataatttccagtagt

SEQ ID NO: 2971197 - DNA, 25 bp, Homo sapien
tgttttagttcagccctggatacca

SEQ ID NO: 2971198 - DNA, 25 bp, Homo sapien
tccagtagtattcatgatgatctgt

SEQ ID NO: 2971199 - DNA, 25 bp, Homo sapien
tggcatgttttagttcagccctgga

SEQ ID NO: 2971200 - DNA, 25 bp, Homo sapien
atgtgattgaacaggtgagtgactc

SEQ ID NO: 2971201 - DNA, 25 bp, Homo sapien
tcaacaggtgctcgcttttcgatga

SEQ ID NO: 2971202 - DNA, 25 bp, Homo sapien
tctgactgaacaggaaattgggagc

SEQ ID NO: 2971203 - DNA, 25 bp, Homo sapien
cgcttttcgatgactctagcagctg

SEQ ID NO: 2971204 - DNA, 25 bp, Homo sapien
ttaactggttccacagaaacatatt

SEQ ID NO: 2971205 - DNA, 25 bp, Homo sapien
gatcggacagtctcctactatgtga

SEQ ID NO: 2971206 - DNA, 25 bp, Homo sapien
atggtattagaaagcggtactctgc

SEQ ID NO: 2971207 - DNA, 25 bp, Homo sapien
tagaaagcggtactctgctggctgc

SEQ ID NO: 2971208 - DNA, 25 bp, Homo sapien
tctcctactatgtgatgaaatggta

SEQ ID NO: 2971209 - DNA, 25 bp, Homo sapien
gtgttctactgctttggtgaatttt

SEQ ID NO: 2971210 - DNA, 25 bp, Homo sapien
ttcagtgttctactgctttggtgaa

SEQ ID NO: 2971211 - DNA, 25 bp, Homo sapien
tgggcactgatttcagtgttctact

SEQ ID NO: 2971212 - DNA, 25 bp, Homo sapien
tgatttcagtgttctactgctttgg

SEQ ID NO: 2971213 - DNA, 25 bp, Homo sapien
gctttacaacgatgtgaacagcaac

SEQ ID NO: 2971214 - DNA, 25 bp, Homo sapien
tgtggttggtgtattacacgcctca

SEQ ID NO: 2971215 - DNA, 25 bp, Homo sapien
tttcttccaggtggctttacaacga

SEQ ID NO: 2971216 - DNA, 25 bp, Homo sapien
cctcaccttagggagagtgcttttt

SEQ ID NO: 2971217 - DNA, 25 bp, Homo sapien
tgcctcttgtaatgaaaatagtcct

SEQ ID NO: 2971218 - DNA, 25 bp, Homo sapien
tcctgtaagtttagtatccccaaga

SEQ ID NO: 2971219 - DNA, 25 bp, Homo sapien
gcctcttgtaatgaaaatagtcctg

SEQ ID NO: 2971220 - DNA, 25 bp, Homo sapien
ttgtcctgtaagtttagtatcccca

SEQ ID NO: 2971221 - DNA, 25 bp, Homo sapien
tcaaattgttatgcggattttgggc

SEQ ID NO: 2971222 - DNA, 25 bp, Homo sapien
catgttttgattggttggggctaga

SEQ ID NO: 2971223 - DNA, 25 bp, Homo sapien
ttggggctagaagaagctgcagcaa

SEQ ID NO: 2971224 - DNA, 25 bp, Homo sapien
ttatgcggattttgggcatgttttg

SEQ ID NO: 2971225 - DNA, 25 bp, Homo sapien
gaaatacctcgggataattctctgg

SEQ ID NO: 2971226 - DNA, 25 bp, Homo sapien
tctctggttttgagggtggcccgcc

SEQ ID NO: 2971227 - DNA, 25 bp, Homo sapien
ggccactttcttttaggagcgtaga

SEQ ID NO: 2971228 - DNA, 25 bp, Homo sapien
tggcacccatgagcaccctgaaata

SEQ ID NO: 2971229 - DNA, 25 bp, Homo sapien
tataatcaaatgtctccctaaagag

SEQ ID NO: 2971230 - DNA, 25 bp, Homo sapien
taaaaaataggactggtgaatcaca

SEQ ID NO: 2971231 - DNA, 25 bp, Homo sapien
taactgggcttgtaacctaggaata

SEQ ID NO: 2971232 - DNA, 25 bp, Homo sapien
gagcgtgatgctggcttaaaaaata

SEQ ID NO: 2971233 - DNA, 25 bp, Homo sapien
cataaatctagtgagccgcattaaa

SEQ ID NO: 2971234 - DNA, 25 bp, Homo sapien
tcatgtctggatggaatagtgtcac

SEQ ID NO: 2971235 - DNA, 25 bp, Homo sapien
ttcatgtctggatggaatagtgtca

SEQ ID NO: 2971236 - DNA, 25 bp, Homo sapien
tagtgagccgcattaaagtttcttc

SEQ ID NO: 2971237 - DNA, 25 bp, Homo sapien
tactgaggccataagtagaatgttc

SEQ ID NO: 2971238 - DNA, 25 bp, Homo sapien
taaaaagtcaccgagaactgaggat

SEQ ID NO: 2971239 - DNA, 25 bp, Homo sapien
tcattgagtttgttatcagggctgc

SEQ ID NO: 2971240 - DNA, 25 bp, Homo sapien
tgagttgagactttaggctaccaga

SEQ ID NO: 2971241 - DNA, 25 bp, Homo sapien
gaggccgcttcagaacctcaaatga

SEQ ID NO: 2971242 - DNA, 25 bp, Homo sapien
tgtaccaggtgtcccagtagagcac

SEQ ID NO: 2971243 - DNA, 25 bp, Homo sapien
tgtgagcgtggcaaatttgtccgtg

SEQ ID NO: 2971244 - DNA, 25 bp, Homo sapien
ggcactttgtgggagacttggcttt

SEQ ID NO: 2971245 - DNA, 25 bp, Homo sapien
ttccttctgtgcaccgagacttcct

SEQ ID NO: 2971246 - DNA, 25 bp, Homo sapien
tgccctgccggtttcttggtactgg

SEQ ID NO: 2971247 - DNA, 25 bp, Homo sapien
caccgagacttccttgagcaagtgg

SEQ ID NO: 2971248 - DNA, 25 bp, Homo sapien
gagctgtgggaattgcactcttgga

SEQ ID NO: 2971249 - DNA, 25 bp, Homo sapien
cgaatgcaacagggagtaaggactc

SEQ ID NO: 2971250 - DNA, 25 bp, Homo sapien
acgaatgcaacagggagtaaggact

SEQ ID NO: 2971251 - DNA, 25 bp, Homo sapien
aacgaatgcaacagggagtaaggac

SEQ ID NO: 2971252 - DNA, 25 bp, Homo sapien
gcacggcacttgggggtcccagaag

SEQ ID NO: 2971253 - DNA, 25 bp, Homo sapien
agatgccccgtgagcccagccgtgg

SEQ ID NO: 2971254 - DNA, 25 bp, Homo sapien
agagcttccctgacgggagtcgcgg

SEQ ID NO: 2971255 - DNA, 25 bp, Homo sapien
ggctcgggcgcaacttcgtggcgtc

SEQ ID NO: 2971256 - DNA, 25 bp, Homo sapien
ctcgggccgggcgtaggaggcggca

SEQ ID NO: 2971257 - DNA, 25 bp, Homo sapien
cacccagcgcttatagggccgggaa

SEQ ID NO: 2971258 - DNA, 25 bp, Homo sapien
ttctgcgtccgctgaggctcggtca

SEQ ID NO: 2971259 - DNA, 25 bp, Homo sapien
agccgcggcacccagcgcttatagg

SEQ ID NO: 2971260 - DNA, 25 bp, Homo sapien
tgccgccgctgcctagtcagttctg

SEQ ID NO: 2971261 - DNA, 25 bp, Homo sapien
ttgcggatgattccaccacggcgga

SEQ ID NO: 2971262 - DNA, 25 bp, Homo sapien
ctgcgccgtgtttgctggaagcctc

SEQ ID NO: 2971263 - DNA, 25 bp, Homo sapien
gctgctgaaaccttcgctccggagg

SEQ ID NO: 2971264 - DNA, 25 bp, Homo sapien
tggaagcctccggtagctgctgaaa

SEQ ID NO: 2971265 - DNA, 25 bp, Homo sapien
tcattccaagcggaagtgatggctg

SEQ ID NO: 2971266 - DNA, 25 bp, Homo sapien
attccaagcggaagtgatggctggt

SEQ ID NO: 2971267 - DNA, 25 bp, Homo sapien
gatggctggtggatatgacttgagg

SEQ ID NO: 2971268 - DNA, 25 bp, Homo sapien
gtgatggctggtggatatgacttga

SEQ ID NO: 2971269 - DNA, 25 bp, Homo sapien
aaaagggctgccagagttccagtac

SEQ ID NO: 2971270 - DNA, 25 bp, Homo sapien
taaaagggctgccagagttccagta

SEQ ID NO: 2971271 - DNA, 25 bp, Homo sapien
gtaaaagggctgccagagttccagt

SEQ ID NO: 2971272 - DNA, 25 bp, Homo sapien
ctccctgctcccgagccacgacctc

SEQ ID NO: 2971273 - DNA, 25 bp, Homo sapien
agacgacccgccaggaatacaacct

SEQ ID NO: 2971274 - DNA, 25 bp, Homo sapien
cacccagccagacgacccgccagga

SEQ ID NO: 2971275 - DNA, 25 bp, Homo sapien
ctgctcccgagccacgacctccggg

SEQ ID NO: 2971276 - DNA, 25 bp, Homo sapien
ggcaggctcagactccagttcgcat

SEQ ID NO: 2971277 - DNA, 25 bp, Homo sapien
agttcgcatcacccgcgtcagcagt

SEQ ID NO: 2971278 - DNA, 25 bp, Homo sapien
acccgcgtcagcagtctaacacgtg

SEQ ID NO: 2971279 - DNA, 25 bp, Homo sapien
cacgtgctttaattggaatgtcatc

SEQ ID NO: 2971280 - DNA, 25 bp, Homo sapien
caaaccactttattgacgggaatgg

SEQ ID NO: 2971281 - DNA, 25 bp, Homo sapien
acgtcctcggctgggagctacaaga

SEQ ID NO: 2971282 - DNA, 25 bp, Homo sapien
gcaaagcagcaaggacgatgacatc

SEQ ID NO: 2971283 - DNA, 25 bp, Homo sapien
caagaacgagagtgatagatcagcg

SEQ ID NO: 2971284 - DNA, 25 bp, Homo sapien
tcaggttacttcttgtcgctcgcgg

SEQ ID NO: 2971285 - DNA, 25 bp, Homo sapien
gcagacgcgacagcctgggacttat

SEQ ID NO: 2971286 - DNA, 25 bp, Homo sapien
tcaactaaatctgcgcgtctgatgg

SEQ ID NO: 2971287 - DNA, 25 bp, Homo sapien
tatgtcgaactcacggcgaaggcac

SEQ ID NO: 2971288 - DNA, 25 bp, Homo sapien
taagcatctaagtcatttctacgga

SEQ ID NO: 2971289 - DNA, 25 bp, Homo sapien
ggctaaggactagatgcactatcgt

SEQ ID NO: 2971290 - DNA, 25 bp, Homo sapien
catttactgcgttgatcactgccca

SEQ ID NO: 2971291 - DNA, 25 bp, Homo sapien
tctacggaatcctgttcagataggg

SEQ ID NO: 2971292 - DNA, 25 bp, Homo sapien
catgtgtggacaaagctaatagtgg

SEQ ID NO: 2971293 - DNA, 25 bp, Homo sapien
gcaccttgcctgaacatgactttaa

SEQ ID NO: 2971294 - DNA, 25 bp, Homo sapien
gctgcattcaacgtcaaaattacct

SEQ ID NO: 2971295 - DNA, 25 bp, Homo sapien
tttgataacttacatgtgtggacaa

SEQ ID NO: 2971296 - DNA, 25 bp, Homo sapien
gaagcaagtagccatagtacacaca

SEQ ID NO: 2971297 - DNA, 25 bp, Homo sapien
cacgctatcagcttgggtaaggaca

SEQ ID NO: 2971298 - DNA, 25 bp, Homo sapien
cactgcacatgacaggatgggtcct

SEQ ID NO: 2971299 - DNA, 25 bp, Homo sapien
gatgggtcctctcatacagatggga

SEQ ID NO: 2971300 - DNA, 25 bp, Homo sapien
ccatgatgggtgatgtcagatgttc

SEQ ID NO: 2971301 - DNA, 25 bp, Homo sapien
aagtttttgtcatgccaaacatgga

SEQ ID NO: 2971302 - DNA, 25 bp, Homo sapien
cttggccgccatctgtactgtagca

SEQ ID NO: 2971303 - DNA, 25 bp, Homo sapien
ttccccatattgtgacatcgagctg

SEQ ID NO: 2971304 - DNA, 25 bp, Homo sapien
gctgaaagctcggccaaaacttgga

SEQ ID NO: 2971305 - DNA, 25 bp, Homo sapien
tttccgaaagccaccacatgtggag

SEQ ID NO: 2971306 - DNA, 25 bp, Homo sapien
agtgactttagttcatgtgacagac

SEQ ID NO: 2971307 - DNA, 25 bp, Homo sapien
gagagaagtgactttagttcatgtg

SEQ ID NO: 2971308 - DNA, 25 bp, Homo sapien
gatcgaagaagtctccaacacaccc

SEQ ID NO: 2971309 - DNA, 25 bp, Homo sapien
gaatgtagaggaaccttggcggtca

SEQ ID NO: 2971310 - DNA, 25 bp, Homo sapien
gtacgttggaggtcatcgaacaagt

SEQ ID NO: 2971311 - DNA, 25 bp, Homo sapien
gaaccttggcggtcaacattccacc

SEQ ID NO: 2971312 - DNA, 25 bp, Homo sapien
atgaggaatcctccagcgctggctc

SEQ ID NO: 2971313 - DNA, 25 bp, Homo sapien
gctcctccgaggaagacgatgcccc

SEQ ID NO: 2971314 - DNA, 25 bp, Homo sapien
gcaggccccgggcattctgtctggc

SEQ ID NO: 2971315 - DNA, 25 bp, Homo sapien
tctggcggacagcgatgaggaatcc

SEQ ID NO: 2971316 - DNA, 25 bp, Homo sapien
aatgtcctacaatgggtcctttctg

SEQ ID NO: 2971317 - DNA, 25 bp, Homo sapien
ttgaccaaactaggtaaagagcctc

SEQ ID NO: 2971318 - DNA, 25 bp, Homo sapien
gatgactctcgagaccaaaatgaat

SEQ ID NO: 2971319 - DNA, 25 bp, Homo sapien
tcctttctgatgactctcgagacca

SEQ ID NO: 2971320 - DNA, 25 bp, Homo sapien
ttcaagccttacgttgatcaccaag

SEQ ID NO: 2971321 - DNA, 25 bp, Homo sapien
tctgacggaacttgacatgggcgtg

SEQ ID NO: 2971322 - DNA, 25 bp, Homo sapien
tcccctactttatgaatgagctcac

SEQ ID NO: 2971323 - DNA, 25 bp, Homo sapien
gccaaaaatcctccaggccttcaag

SEQ ID NO: 2971324 - DNA, 25 bp, Homo sapien
tattttgggacttcttaggagagaa

SEQ ID NO: 2971325 - DNA, 25 bp, Homo sapien
gccttgcttggaagaatattttggg

SEQ ID NO: 2971326 - DNA, 25 bp, Homo sapien
taagaagatccaaatgaaactcagc

SEQ ID NO: 2971327 - DNA, 25 bp, Homo sapien
aatactggtctgatctggtgtctaa

SEQ ID NO: 2971328 - DNA, 25 bp, Homo sapien
cagaagatgcttctcgactacagcg

SEQ ID NO: 2971329 - DNA, 25 bp, Homo sapien
agcagacacaacagtccgtccgggc

SEQ ID NO: 2971330 - DNA, 25 bp, Homo sapien
tggaggagatcatgtcacagccaaa

SEQ ID NO: 2971331 - DNA, 25 bp, Homo sapien
actacagcgtgtacatgggcaggtg

SEQ ID NO: 2971332 - DNA, 25 bp, Homo sapien
cactacttgggatgtgttggtccta

SEQ ID NO: 2971333 - DNA, 25 bp, Homo sapien
ggagaaaagagaatagtacctacca

SEQ ID NO: 2971334 - DNA, 25 bp, Homo sapien
tatctgcttaggtgcgtgagttcaa

SEQ ID NO: 2971335 - DNA, 25 bp, Homo sapien
gatagcactgacaagttcgccacta

SEQ ID NO: 2971336 - DNA, 25 bp, Homo sapien
ggcaggcaaataccatctggtggtt

SEQ ID NO: 2971337 - DNA, 25 bp, Homo sapien
taggattggagttagagcaaagtac

SEQ ID NO: 2971338 - DNA, 25 bp, Homo sapien
tgtaagtaatttactctgtgtgccc

SEQ ID NO: 2971339 - DNA, 25 bp, Homo sapien
ccctgatcatggaaacctggtggaa

SEQ ID NO: 2971340 - DNA, 25 bp, Homo sapien
gcattgcggaatgtctctaagaggt

SEQ ID NO: 2971341 - DNA, 25 bp, Homo sapien
tgtagtagaaggaagaactgcctgg

SEQ ID NO: 2971342 - DNA, 25 bp, Homo sapien
cacaagtcgcatgtaggttccaaac

SEQ ID NO: 2971343 - DNA, 25 bp, Homo sapien
taatctgggcaacaaatcaaagggc

SEQ ID NO: 2971344 - DNA, 25 bp, Homo sapien
tgcgggcagatctttcacctttttt

SEQ ID NO: 2971345 - DNA, 25 bp, Homo sapien
caaggtggaccggaagcagctgttc

SEQ ID NO: 2971346 - DNA, 25 bp, Homo sapien
gtggagcaaggtggaccggaagcag

SEQ ID NO: 2971347 - DNA, 25 bp, Homo sapien
ttagtgtttggatgcgggcagatct

SEQ ID NO: 2971348 - DNA, 25 bp, Homo sapien
tcaaagtgaatcttcaaagaccagt

SEQ ID NO: 2971349 - DNA, 25 bp, Homo sapien
tatattaatcctcacgtctgttgac

SEQ ID NO: 2971350 - DNA, 25 bp, Homo sapien
tctcctcactgtagattactttcag

SEQ ID NO: 2971351 - DNA, 25 bp, Homo sapien
tattagttgcctttccttcaagtca

SEQ ID NO: 2971352 - DNA, 25 bp, Homo sapien
ggagttggtgcaggggagtcttccc

SEQ ID NO: 2971353 - DNA, 25 bp, Homo sapien
gggagttggtgcaggggagtcttcc

SEQ ID NO: 2971354 - DNA, 25 bp, Homo sapien
ggaacggctggccacattgcaccac

SEQ ID NO: 2971355 - DNA, 25 bp, Homo sapien
gctgcctagagcgtacggctgccat

SEQ ID NO: 2971356 - DNA, 25 bp, Homo sapien
tggacgccgtcgctgctggctgctg

SEQ ID NO: 2971357 - DNA, 25 bp, Homo sapien
tgagcacggaaaccatacggtggaa

SEQ ID NO: 2971358 - DNA, 25 bp, Homo sapien
tcttctgggatcatgactgggcctg

SEQ ID NO: 2971359 - DNA, 25 bp, Homo sapien
tatttatgcactgtctcacgggtca

SEQ ID NO: 2971360 - DNA, 25 bp, Homo sapien
agctgacctgcaagatctagtgggc

SEQ ID NO: 2971361 - DNA, 25 bp, Homo sapien
tcacgggtcagagaactagcctggc

SEQ ID NO: 2971362 - DNA, 25 bp, Homo sapien
catgctggatcttactggcttctag

SEQ ID NO: 2971363 - DNA, 25 bp, Homo sapien
ggaaacctcttctgttgggacatga

SEQ ID NO: 2971364 - DNA, 25 bp, Homo sapien
caacagaagcaagtggtgatcccag

SEQ ID NO: 2971365 - DNA, 25 bp, Homo sapien
catgaggctgatcaatccttgtgca

SEQ ID NO: 2971366 - DNA, 25 bp, Homo sapien
gcagatgaggaccaaatcttcttat

SEQ ID NO: 2971367 - DNA, 25 bp, Homo sapien
cgggatccgtgcagatgaggaccaa

SEQ ID NO: 2971368 - DNA, 25 bp, Homo sapien
gcccataggcgggatccgtgcagat

SEQ ID NO: 2971369 - DNA, 25 bp, Homo sapien
tccgtgcagatgaggaccaaatctt

SEQ ID NO: 2971370 - DNA, 25 bp, Homo sapien
caatcatttctagcgcatggcctgg

SEQ ID NO: 2971371 - DNA, 25 bp, Homo sapien
cgcctgtgaaataccaacctgaaga

SEQ ID NO: 2971372 - DNA, 25 bp, Homo sapien
gcagggaccctcgtggatgttgtat

SEQ ID NO: 2971373 - DNA, 25 bp, Homo sapien
actacttgggagcaccgcctgtgaa

SEQ ID NO: 2971374 - DNA, 25 bp, Homo sapien
tacataacgcaaatcacacaggaga

SEQ ID NO: 2971375 - DNA, 25 bp, Homo sapien
gagaaacatcaatgatgagtaactc

SEQ ID NO: 2971376 - DNA, 25 bp, Homo sapien
catcttaggctgatcgcagtggctc

SEQ ID NO: 2971377 - DNA, 25 bp, Homo sapien
gggccctgcgaattggacaagcaga

SEQ ID NO: 2971378 - DNA, 25 bp, Homo sapien
tgcaaagggtggctactcaggctag

SEQ ID NO: 2971379 - DNA, 25 bp, Homo sapien
taaaaggatgactcctccgagtaca

SEQ ID NO: 2971380 - DNA, 25 bp, Homo sapien
tccgagtacagtcggcaaaccagca

SEQ ID NO: 2971381 - DNA, 25 bp, Homo sapien
ggtggctcattaagcactcagtaag

SEQ ID NO: 2971382 - DNA, 25 bp, Homo sapien
cagtctcaggagtaggcaattgtcc

SEQ ID NO: 2971383 - DNA, 25 bp, Homo sapien
gacaggatgcaaatgagttctcgga

SEQ ID NO: 2971384 - DNA, 25 bp, Homo sapien
taaactgggtcgatatcagtggcac

SEQ ID NO: 2971385 - DNA, 25 bp, Homo sapien
tctcggaacgatccacctggtggct

SEQ ID NO: 2971386 - DNA, 25 bp, Homo sapien
tcagggactctatgcttcgtggctc

SEQ ID NO: 2971387 - DNA, 25 bp, Homo sapien
aattttcctgacgagggtgggcagc

SEQ ID NO: 2971388 - DNA, 25 bp, Homo sapien
acactctggtttctgtaatgggcca

SEQ ID NO: 2971389 - DNA, 25 bp, Homo sapien
tcatggatgggaacttgaactgaac

SEQ ID NO: 2971390 - DNA, 25 bp, Homo sapien
tcaacggtgacttgtgggcagtgcc

SEQ ID NO: 2971391 - DNA, 25 bp, Homo sapien
cttctgctgagcgagtcatggcccg

SEQ ID NO: 2971392 - DNA, 25 bp, Homo sapien
cacagggcgggtttctcaacggtga

SEQ ID NO: 2971393 - DNA, 25 bp, Homo sapien
tcatggcccgaaggcagaactaact

SEQ ID NO: 2971394 - DNA, 25 bp, Homo sapien
ctgttttggcttcagtgcctgggac

SEQ ID NO: 2971395 - DNA, 25 bp, Homo sapien
tgttttggcttcagtgcctgggaca

SEQ ID NO: 2971396 - DNA, 25 bp, Homo sapien
gttttggcttcagtgcctgggacat

SEQ ID NO: 2971397 - DNA, 25 bp, Homo sapien
catgatacccctgtggtaggctgct

SEQ ID NO: 2971398 - DNA, 25 bp, Homo sapien
tgacccccaaggatatcaggccctg

SEQ ID NO: 2971399 - DNA, 25 bp, Homo sapien
tggttgatgtttcacctcctggccc

SEQ ID NO: 2971400 - DNA, 25 bp, Homo sapien
tctgtaatatgggtcatgatacccc

SEQ ID NO: 2971401 - DNA, 25 bp, Homo sapien
aatggcaaccacattgacgatgaca

SEQ ID NO: 2971402 - DNA, 25 bp, Homo sapien
ctgtggcaatcagcgggacactgct

SEQ ID NO: 2971403 - DNA, 25 bp, Homo sapien
gatatttgacagctacattctcccc

SEQ ID NO: 2971404 - DNA, 25 bp, Homo sapien
gacccctggcattggttttgacaaa

SEQ ID NO: 2971405 - DNA, 25 bp, Homo sapien
ggcttgtgccaccacgcacggctaa

SEQ ID NO: 2971406 - DNA, 25 bp, Homo sapien
gggttcaagtgattcagcctcttga

SEQ ID NO: 2971407 - DNA, 25 bp, Homo sapien
ttgaatagctgcgactacaggcttg

SEQ ID NO: 2971408 - DNA, 25 bp, Homo sapien
gttcaagtgattcagcctcttgaat

SEQ ID NO: 2971409 - DNA, 25 bp, Homo sapien
gtggcccatgctgggtcctccaggc

SEQ ID NO: 2971410 - DNA, 25 bp, Homo sapien
ctgggtcctccaggcatggtgggct

SEQ ID NO: 2971411 - DNA, 25 bp, Homo sapien
catgctgggtcctccaggcatggtg

SEQ ID NO: 2971412 - DNA, 25 bp, Homo sapien
gcccatgctgggtcctccaggcatg

SEQ ID NO: 2971413 - DNA, 25 bp, Homo sapien
tcctcctcctctcggatgaacttgt

SEQ ID NO: 2971414 - DNA, 25 bp, Homo sapien
tggaaacagtccagcaaaaccttga

SEQ ID NO: 2971415 - DNA, 25 bp, Homo sapien
ccttctttgaacaccggattagtgc

SEQ ID NO: 2971416 - DNA, 25 bp, Homo sapien
caccggattagtgcatcagggagcc

SEQ ID NO: 2971417 - DNA, 25 bp, Homo sapien
cgtggtggattcaggctcaaacact

SEQ ID NO: 2971418 - DNA, 25 bp, Homo sapien
ggtgcacattgttgatgccgttgcc

SEQ ID NO: 2971419 - DNA, 25 bp, Homo sapien
cacagtaacctacgtggcccaagaa

SEQ ID NO: 2971420 - DNA, 25 bp, Homo sapien
gagaacaatgcagccagcgggctga

SEQ ID NO: 2971421 - DNA, 25 bp, Homo sapien
gccgttgccccacagatcagaagtt

SEQ ID NO: 2971422 - DNA, 25 bp, Homo sapien
ctaatcttccactagatggcgtcat

SEQ ID NO: 2971423 - DNA, 25 bp, Homo sapien
tgctaatcttccactagatggcgtc

SEQ ID NO: 2971424 - DNA, 25 bp, Homo sapien
ctgctaatcttccactagatggcgt

SEQ ID NO: 2971425 - DNA, 25 bp, Homo sapien
gctaatcttccactagatggcgtca

SEQ ID NO: 2971426 - DNA, 25 bp, Homo sapien
tgagtacctcctggttaaagatcag

SEQ ID NO: 2971427 - DNA, 25 bp, Homo sapien
taaagatcagttcattagatgggcc

SEQ ID NO: 2971428 - DNA, 25 bp, Homo sapien
gagtacctcctggttaaagatcagt

SEQ ID NO: 2971429 - DNA, 25 bp, Homo sapien
tcagttcattagatgggccagctga

SEQ ID NO: 2971430 - DNA, 25 bp, Homo sapien
ctcccagttgaagtccaagacgggg

SEQ ID NO: 2971431 - DNA, 25 bp, Homo sapien
tctcccagttgaagtccaagacggg

SEQ ID NO: 2971432 - DNA, 25 bp, Homo sapien
ccagttgaagtccaagacggggtca

SEQ ID NO: 2971433 - DNA, 25 bp, Homo sapien
gttgaagtccaagacggggtcagaa

SEQ ID NO: 2971434 - DNA, 25 bp, Homo sapien
aagaggagcctgttcaaatggctcc

SEQ ID NO: 2971435 - DNA, 25 bp, Homo sapien
gaggagcctgttcaaatggctccac

SEQ ID NO: 2971436 - DNA, 25 bp, Homo sapien
agaggagcctgttcaaatggctcca

SEQ ID NO: 2971437 - DNA, 25 bp, Homo sapien
ggagcctgttcaaatggctccacat

SEQ ID NO: 2971438 - DNA, 25 bp, Homo sapien
tgcctcacaatccaatacagctttt

SEQ ID NO: 2971439 - DNA, 25 bp, Homo sapien
ttgcctcacaatccaatacagcttt

SEQ ID NO: 2971440 - DNA, 25 bp, Homo sapien
cgacaatcgtgaagctgaagtcacg

SEQ ID NO: 2971441 - DNA, 25 bp, Homo sapien
ggttcccaggtgtgtcttacgtcga

SEQ ID NO: 2971442 - DNA, 25 bp, Homo sapien
tttgaacagctggtaacttgggctt

SEQ ID NO: 2971443 - DNA, 25 bp, Homo sapien
aagtcacgactgtattttgaacagc

SEQ ID NO: 2971444 - DNA, 25 bp, Homo sapien
ggctccctgtcatacttggaaatag

SEQ ID NO: 2971445 - DNA, 25 bp, Homo sapien
aagtgtaattgatgggcagcgagcc

SEQ ID NO: 2971446 - DNA, 25 bp, Homo sapien
cagcgagccattgactgagaggcaa

SEQ ID NO: 2971447 - DNA, 25 bp, Homo sapien
gaatgaccataatgttcagcactgg

SEQ ID NO: 2971448 - DNA, 25 bp, Homo sapien
agaagaccgcatccattggtgacca

SEQ ID NO: 2971449 - DNA, 25 bp, Homo sapien
ctggaagaagaccgcatccattggt

SEQ ID NO: 2971450 - DNA, 25 bp, Homo sapien
ggaagaagaccgcatccattggtga

SEQ ID NO: 2971451 - DNA, 25 bp, Homo sapien
gaagaagaccgcatccattggtgac

SEQ ID NO: 2971452 - DNA, 25 bp, Homo sapien
cagtaataaccctggaagtagtagc

SEQ ID NO: 2971453 - DNA, 25 bp, Homo sapien
ggattatcaccaccagcaacagtaa

SEQ ID NO: 2971454 - DNA, 25 bp, Homo sapien
gaagtagtagcttcagacagaaagg

SEQ ID NO: 2971455 - DNA, 25 bp, Homo sapien
tatttgggcagtacccaaaaagcca

SEQ ID NO: 2971456 - DNA, 25 bp, Homo sapien
tgtctgtatcccaagcccacgggaa

SEQ ID NO: 2971457 - DNA, 25 bp, Homo sapien
cagcacaggctgtacgtctgtgaag

SEQ ID NO: 2971458 - DNA, 25 bp, Homo sapien
taccctctgcatgaaccgttcagga

SEQ ID NO: 2971459 - DNA, 25 bp, Homo sapien
ggagttcttcttggcacagggccct

SEQ ID NO: 2971460 - DNA, 25 bp, Homo sapien
tgtctccacggtccctgggcacatt

SEQ ID NO: 2971461 - DNA, 25 bp, Homo sapien
tgcttgtttttcaaggatatttgca

SEQ ID NO: 2971462 - DNA, 25 bp, Homo sapien
tgtgtctccacggtccctgggcaca

SEQ ID NO: 2971463 - DNA, 25 bp, Homo sapien
tgtttttcaaggatatttgcataga

SEQ ID NO: 2971464 - DNA, 25 bp, Homo sapien
ggatcccacttctggcacagattcc

SEQ ID NO: 2971465 - DNA, 25 bp, Homo sapien
ggaaacacacggcctggatcccact

SEQ ID NO: 2971466 - DNA, 25 bp, Homo sapien
cttgggctgtggaaacacacggcct

SEQ ID NO: 2971467 - DNA, 25 bp, Homo sapien
gatcccacttctggcacagattcct

SEQ ID NO: 2971468 - DNA, 25 bp, Homo sapien
acacgggggtggcatactgtagctc

SEQ ID NO: 2971469 - DNA, 25 bp, Homo sapien
tgctctcttggtgccacctcctgga

SEQ ID NO: 2971470 - DNA, 25 bp, Homo sapien
ggcatactgtagctcctgggagtgt

SEQ ID NO: 2971471 - DNA, 25 bp, Homo sapien
ttgctctcttggtgccacctcctgg

SEQ ID NO: 2971472 - DNA, 25 bp, Homo sapien
tggcctgacagaaccaggtattaac

SEQ ID NO: 2971473 - DNA, 25 bp, Homo sapien
gcctgacagaaccaggtattaacta

SEQ ID NO: 2971474 - DNA, 25 bp, Homo sapien
ggtggcctgacagaaccaggtatta

SEQ ID NO: 2971475 - DNA, 25 bp, Homo sapien
tgacagaaccaggtattaactaatt

SEQ ID NO: 2971476 - DNA, 25 bp, Homo sapien
tccagatttataagaatcacaggct

SEQ ID NO: 2971477 - DNA, 25 bp, Homo sapien
tcagaagttgagttcagaatagaca

SEQ ID NO: 2971478 - DNA, 25 bp, Homo sapien
tgagttcagaatagacatatccaga

SEQ ID NO: 2971479 - DNA, 25 bp, Homo sapien
gaatagacatatccagatttataag

SEQ ID NO: 2971480 - DNA, 25 bp, Homo sapien
cctgagatgtagtttgtttctgtaa

SEQ ID NO: 2971481 - DNA, 25 bp, Homo sapien
ctgagatgtagtttgtttctgtaaa

SEQ ID NO: 2971482 - DNA, 25 bp, Homo sapien
tgagatgtagtttgtttctgtaaat

SEQ ID NO: 2971483 - DNA, 25 bp, Homo sapien
gagatgtagtttgtttctgtaaatt

SEQ ID NO: 2971484 - DNA, 25 bp, Homo sapien
tcatggaaatcagcttcataaaaag

SEQ ID NO: 2971485 - DNA, 25 bp, Homo sapien
gctttttgttcatggaaatcagctt

SEQ ID NO: 2971486 - DNA, 25 bp, Homo sapien
tttgttcatggaaatcagcttcata

SEQ ID NO: 2971487 - DNA, 25 bp, Homo sapien
gaaatcagcttcataaaaagcatct

SEQ ID NO: 2971488 - DNA, 25 bp, Homo sapien
actaaagcgattcagggccgggcac

SEQ ID NO: 2971489 - DNA, 25 bp, Homo sapien
ccctttatttactaaagcgattcag

SEQ ID NO: 2971490 - DNA, 25 bp, Homo sapien
tttatttactaaagcgattcagggc

SEQ ID NO: 2971491 - DNA, 25 bp, Homo sapien
atttactaaagcgattcagggccgg

SEQ ID NO: 2971492 - DNA, 25 bp, Homo sapien
ctcctaagtagatggaattacaagt

SEQ ID NO: 2971493 - DNA, 25 bp, Homo sapien
cctaagtagatggaattacaagtgc

SEQ ID NO: 2971494 - DNA, 25 bp, Homo sapien
taagtagatggaattacaagtgccc

SEQ ID NO: 2971495 - DNA, 25 bp, Homo sapien
acaagtgcccgccactgtgcccagc

SEQ ID NO: 2971496 - DNA, 25 bp, Homo sapien
cagctgagtggtccaatacaggatc

SEQ ID NO: 2971497 - DNA, 25 bp, Homo sapien
cagcaaaccagaggcaatgctacat

SEQ ID NO: 2971498 - DNA, 25 bp, Homo sapien
acaggatccacagcaaaccagaggc

SEQ ID NO: 2971499 - DNA, 25 bp, Homo sapien
gagtggtccaatacaggatccacag

SEQ ID NO: 2971500 - DNA, 25 bp, Homo sapien
gaatacccacatgctagtctagaag

SEQ ID NO: 2971501 - DNA, 25 bp, Homo sapien
aaccagtgagcgttggacaccagtg

SEQ ID NO: 2971502 - DNA, 25 bp, Homo sapien
gagggtctactcactttgcactgat

SEQ ID NO: 2971503 - DNA, 25 bp, Homo sapien
tgtgtcctgtgtcatatccctgggc

SEQ ID NO: 2971504 - DNA, 25 bp, Homo sapien
cagtcatgcttcacctaacagtgga

SEQ ID NO: 2971505 - DNA, 25 bp, Homo sapien
gaaggccaaaaagtcgaccacacat

SEQ ID NO: 2971506 - DNA, 25 bp, Homo sapien
ctcatcccagcaagatttctgtgct

SEQ ID NO: 2971507 - DNA, 25 bp, Homo sapien
tgctgccctggtgttaccctgcaga

SEQ ID NO: 2971508 - DNA, 25 bp, Homo sapien
tggtattatgctaaggaaacaggtc

SEQ ID NO: 2971509 - DNA, 25 bp, Homo sapien
ttttgagactgcctcagtagtaacc

SEQ ID NO: 2971510 - DNA, 25 bp, Homo sapien
agttgtatttctcctactggtgtgg

SEQ ID NO: 2971511 - DNA, 25 bp, Homo sapien
gagactgcctcagtagtaaccactg

SEQ ID NO: 2971512 - DNA, 25 bp, Homo sapien
gcagtcgtcatttctgtctgggtga

SEQ ID NO: 2971513 - DNA, 25 bp, Homo sapien
gctttcatttcgttccagagactcc

SEQ ID NO: 2971514 - DNA, 25 bp, Homo sapien
cccagacctgaatgcggacactaaa

SEQ ID NO: 2971515 - DNA, 25 bp, Homo sapien
aaatactcttaagaaaggccatggg

SEQ ID NO: 2971516 - DNA, 25 bp, Homo sapien
tattaactatcagttcgacgataac

SEQ ID NO: 2971517 - DNA, 25 bp, Homo sapien
cgacgataactgtgtgaaatacaac

SEQ ID NO: 2971518 - DNA, 25 bp, Homo sapien
tactgcctttgagggcaaattcttg

SEQ ID NO: 2971519 - DNA, 25 bp, Homo sapien
gaatagagtcccaggtatcagaaag

SEQ ID NO: 2971520 - DNA, 25 bp, Homo sapien
tctttgaaacgctccatcaaggcca

SEQ ID NO: 2971521 - DNA, 25 bp, Homo sapien
gtccttcactggtacaactgactcc

SEQ ID NO: 2971522 - DNA, 25 bp, Homo sapien
aaacgctccatcaaggccactaggg

SEQ ID NO: 2971523 - DNA, 25 bp, Homo sapien
ctccatcaaggccactagggctgaa

SEQ ID NO: 2971524 - DNA, 25 bp, Homo sapien
aaggcagtagatgaagagcatgtac

SEQ ID NO: 2971525 - DNA, 25 bp, Homo sapien
gtaggaaaggcagtagatgaagagc

SEQ ID NO: 2971526 - DNA, 25 bp, Homo sapien
ggaaaggcagtagatgaagagcatg

SEQ ID NO: 2971527 - DNA, 25 bp, Homo sapien
ttgtaggaaaggcagtagatgaaga

SEQ ID NO: 2971528 - DNA, 25 bp, Homo sapien
gggagtgcagagcatgtcttcttca

SEQ ID NO: 2971529 - DNA, 25 bp, Homo sapien
gagcatgtcttcttcagtggtactt

SEQ ID NO: 2971530 - DNA, 25 bp, Homo sapien
ggttgcagccaagaaggttgctggg

SEQ ID NO: 2971531 - DNA, 25 bp, Homo sapien
agtggtacttgcatagccgctcgtg

SEQ ID NO: 2971532 - DNA, 25 bp, Homo sapien
aattagccggccgtgacggcgagcg

SEQ ID NO: 2971533 - DNA, 25 bp, Homo sapien
agccggccgtgacggcgagcgcctg

SEQ ID NO: 2971534 - DNA, 25 bp, Homo sapien
ttcatgtatatcataggataaatca

SEQ ID NO: 2971535 - DNA, 25 bp, Homo sapien
tctgaaactatttcatgtatatcat

SEQ ID NO: 2971536 - DNA, 25 bp, Homo sapien
cagggagcaggtattcccggtggac

SEQ ID NO: 2971537 - DNA, 25 bp, Homo sapien
cttcggacccttgggcgtagagttg

SEQ ID NO: 2971538 - DNA, 25 bp, Homo sapien
aagcagcagcttagccgggattctc

SEQ ID NO: 2971539 - DNA, 25 bp, Homo sapien
ttctgagtgggtgccaccccggctt

SEQ ID NO: 2971540 - DNA, 25 bp, Homo sapien
actaattcagcctgtagtaacctgg

SEQ ID NO: 2971541 - DNA, 25 bp, Homo sapien
tgtgtccagcctgtggtcgtcttaa

SEQ ID NO: 2971542 - DNA, 25 bp, Homo sapien
gatagggagtgatatttctaggact

SEQ ID NO: 2971543 - DNA, 25 bp, Homo sapien
ctgaaatgattgttgggctgtggaa

SEQ ID NO: 2971544 - DNA, 25 bp, Homo sapien
tcacgaagcacagagataaggtcgc

SEQ ID NO: 2971545 - DNA, 25 bp, Homo sapien
tacccctggaacgacctgtcaagaa

SEQ ID NO: 2971546 - DNA, 25 bp, Homo sapien
gataaccaatcataggtgcagctgc

SEQ ID NO: 2971547 - DNA, 25 bp, Homo sapien
gaacctctgtcttcgaccaactgaa

SEQ ID NO: 2971548 - DNA, 25 bp, Homo sapien
gatttgtagacaacgatgtgactcg

SEQ ID NO: 2971549 - DNA, 25 bp, Homo sapien
taagtccctgttggattaccagtcc

SEQ ID NO: 2971550 - DNA, 25 bp, Homo sapien
tgctgcaaattacaccaatgggagc

SEQ ID NO: 2971551 - DNA, 25 bp, Homo sapien
taaagcaagtgagcgaccttatctc

SEQ ID NO: 2971552 - DNA, 25 bp, Homo sapien
catgaaggatgaccgtcgggacaga

SEQ ID NO: 2971553 - DNA, 25 bp, Homo sapien
taggactggtaatccaacagggact

SEQ ID NO: 2971554 - DNA, 25 bp, Homo sapien
gaactgctcgcagtaccaaaacagg

SEQ ID NO: 2971555 - DNA, 25 bp, Homo sapien
gacagatactctgcgggcaaaaggg

SEQ ID NO: 2971556 - DNA, 25 bp, Homo sapien
gttttgcacaccacaacagccagac

SEQ ID NO: 2971557 - DNA, 25 bp, Homo sapien
tacggagttttgcacaccacaacag

SEQ ID NO: 2971558 - DNA, 25 bp, Homo sapien
gagttttgcacaccacaacagccag

SEQ ID NO: 2971559 - DNA, 25 bp, Homo sapien
aaagttagacaattgtattcccaag

SEQ ID NO: 2971560 - DNA, 25 bp, Homo sapien
caatgtacggagttttgcacaccac

SEQ ID NO: 2971561 - DNA, 25 bp, Homo sapien
tgtggcaaaatagcaatgtacggag

SEQ ID NO: 2971562 - DNA, 25 bp, Homo sapien
tggtgtgcaaaactccgtacattgc

SEQ ID NO: 2971563 - DNA, 25 bp, Homo sapien
gtctggctgttgtggtgtgcaaaac

SEQ ID NO: 2971564 - DNA, 25 bp, Homo sapien
ctccgtacattgctattttgccaca

SEQ ID NO: 2971565 - DNA, 25 bp, Homo sapien
gctgttgtggtgtgcaaaactccgt

SEQ ID NO: 2971566 - DNA, 25 bp, Homo sapien
tcttgggaatacaattgtctaactt

SEQ ID NO: 2971567 - DNA, 25 bp, Homo sapien
gttgtggtgtgcaaaactccgtaca

SEQ ID NO: 2971568 - DNA, 25 bp, Homo sapien
tcctgtaggaataccattgaggttg

SEQ ID NO: 2971569 - DNA, 25 bp, Homo sapien
cctgtaggaataccattgaggttga

SEQ ID NO: 2971570 - DNA, 25 bp, Homo sapien
taggaataccattgaggttgaaaaa

SEQ ID NO: 2971571 - DNA, 25 bp, Homo sapien
tgtaggaataccattgaggttgaaa

SEQ ID NO: 2971572 - DNA, 25 bp, Homo sapien
cagcaagttcccttacagatcatca

SEQ ID NO: 2971573 - DNA, 25 bp, Homo sapien
tgacagaccctgtcaaaaggaatgt

SEQ ID NO: 2971574 - DNA, 25 bp, Homo sapien
acattccttttgacagggtctgtca

SEQ ID NO: 2971575 - DNA, 25 bp, Homo sapien
ttcaacctcaatggtattcctacag

SEQ ID NO: 2971576 - DNA, 25 bp, Homo sapien
tgatgatctgtaagggaacttgctg

SEQ ID NO: 2971577 - DNA, 25 bp, Homo sapien
tcaacctcaatggtattcctacagg

SEQ ID NO: 2971578 - DNA, 25 bp, Homo sapien
caacctcaatggtattcctacagga

SEQ ID NO: 2971579 - DNA, 25 bp, Homo sapien
tttttcaacctcaatggtattccta

SEQ ID NO: 2971580 - DNA, 25 bp, Homo sapien
tgtgtctcgtctaggcaagcgcttc

SEQ ID NO: 2971581 - DNA, 25 bp, Homo sapien
gacagaagaaataccacggcagtga

SEQ ID NO: 2971582 - DNA, 25 bp, Homo sapien
tgagaagttgctcctgctctagatc

SEQ ID NO: 2971583 - DNA, 25 bp, Homo sapien
aagaccttacaaccgcagctgcaag

SEQ ID NO: 2971584 - DNA, 25 bp, Homo sapien
cagtgaactgtgaggataacttcca

SEQ ID NO: 2971585 - DNA, 25 bp, Homo sapien
tctggcaggtctcgacatgacgact

SEQ ID NO: 2971586 - DNA, 25 bp, Homo sapien
tgttctctccgagggaaaaaatgga

SEQ ID NO: 2971587 - DNA, 25 bp, Homo sapien
tagtcgtcatgtcgagacctgccag

SEQ ID NO: 2971588 - DNA, 25 bp, Homo sapien
ttggaagcgcttgcctagacgagac

SEQ ID NO: 2971589 - DNA, 25 bp, Homo sapien
gagtactggcacatgagatctagag

SEQ ID NO: 2971590 - DNA, 25 bp, Homo sapien
gatctagagcaggagcaacttctca

SEQ ID NO: 2971591 - DNA, 25 bp, Homo sapien
gaggtgaaaaagctgaacgtgtgcc

SEQ ID NO: 2971592 - DNA, 25 bp, Homo sapien
tcctccgattgtcatgcctaggcct

SEQ ID NO: 2971593 - DNA, 25 bp, Homo sapien
atggagatcttctgggaaaccaagc

SEQ ID NO: 2971594 - DNA, 25 bp, Homo sapien
taggccttgccacaaagacagcacc

SEQ ID NO: 2971595 - DNA, 25 bp, Homo sapien
gccacaaagacagcacctttatgtg

SEQ ID NO: 2971596 - DNA, 25 bp, Homo sapien
cgagtcctccgattgtcatgcctag

SEQ ID NO: 2971597 - DNA, 25 bp, Homo sapien
aaaatgcaggttaaagaaagcaata

SEQ ID NO: 2971598 - DNA, 25 bp, Homo sapien
tattgctttctttaacctgcatttt

SEQ ID NO: 2971599 - DNA, 25 bp, Homo sapien
aggcctaggcatgacaatcggagga

SEQ ID NO: 2971600 - DNA, 25 bp, Homo sapien
cacataaaggtgctgtctttgtggc

SEQ ID NO: 2971601 - DNA, 25 bp, Homo sapien
gcttggtttcccagaagatctccat

SEQ ID NO: 2971602 - DNA, 25 bp, Homo sapien
ggtgctgtctttgtggcaaggccta

SEQ ID NO: 2971603 - DNA, 25 bp, Homo sapien
taggcatgacaatcggaggactcga

SEQ ID NO: 2971604 - DNA, 25 bp, Homo sapien
cagaattctagctaggttaagtaag

SEQ ID NO: 2971605 - DNA, 25 bp, Homo sapien
tagaacccagtcacgctcttgttga

SEQ ID NO: 2971606 - DNA, 25 bp, Homo sapien
tatacatgatcaattatctgagcag

SEQ ID NO: 2971607 - DNA, 25 bp, Homo sapien
aggaaggcatatacatgatcaatta

SEQ ID NO: 2971608 - DNA, 25 bp, Homo sapien
tttaccatttagaacccagtcacgc

SEQ ID NO: 2971609 - DNA, 25 bp, Homo sapien
tctgagcagaattctagctaggtta

SEQ ID NO: 2971610 - DNA, 25 bp, Homo sapien
tctgctcagataattgatcatgtat

SEQ ID NO: 2971611 - DNA, 25 bp, Homo sapien
tcaacaagagcgtgactgggttcta

SEQ ID NO: 2971612 - DNA, 25 bp, Homo sapien
taacctagctagaattctgctcaga

SEQ ID NO: 2971613 - DNA, 25 bp, Homo sapien
taattgatcatgtatatgccttcct

SEQ ID NO: 2971614 - DNA, 25 bp, Homo sapien
ttacttaacctagctagaattctgc

SEQ ID NO: 2971615 - DNA, 25 bp, Homo sapien
gcgtgactgggttctaaatggtaaa

SEQ ID NO: 2971616 - DNA, 25 bp, Homo sapien
tgatctcttccattagacgaataag

SEQ ID NO: 2971617 - DNA, 25 bp, Homo sapien
catgatctcttccattagacgaata

SEQ ID NO: 2971618 - DNA, 25 bp, Homo sapien
gttttattctccttctcactcatga

SEQ ID NO: 2971619 - DNA, 25 bp, Homo sapien
ggttttattctccttctcactcatg

SEQ ID NO: 2971620 - DNA, 25 bp, Homo sapien
tctccttctcactcatgatctcttc

SEQ ID NO: 2971621 - DNA, 25 bp, Homo sapien
gatctcttccattagacgaataagt

SEQ ID NO: 2971622 - DNA, 25 bp, Homo sapien
tattcgtctaatggaagagatcatg

SEQ ID NO: 2971623 - DNA, 25 bp, Homo sapien
tcatgagtgagaaggagaataaaac

SEQ ID NO: 2971624 - DNA, 25 bp, Homo sapien
tgagtgagaaggagaataaaaccat

SEQ ID NO: 2971625 - DNA, 25 bp, Homo sapien
catgagtgagaaggagaataaaacc

SEQ ID NO: 2971626 - DNA, 25 bp, Homo sapien
gaagagatcatgagtgagaaggaga

SEQ ID NO: 2971627 - DNA, 25 bp, Homo sapien
acttattcgtctaatggaagagatc

SEQ ID NO: 2971628 - DNA, 25 bp, Homo sapien
tgttgtggtttgcactcagttcaag

SEQ ID NO: 2971629 - DNA, 25 bp, Homo sapien
ttttctacgtcatgacacacatcca

SEQ ID NO: 2971630 - DNA, 25 bp, Homo sapien
tcttttggccaagtcgcactccaca

SEQ ID NO: 2971631 - DNA, 25 bp, Homo sapien
caagctgtcttacttcttttggcca

SEQ ID NO: 2971632 - DNA, 25 bp, Homo sapien
cgcactccacattagagtttgccta

SEQ ID NO: 2971633 - DNA, 25 bp, Homo sapien
ttcaggaaatcttcagcaagctgtc

SEQ ID NO: 2971634 - DNA, 25 bp, Homo sapien
tgaactgagtgcaaaccacaacatt

SEQ ID NO: 2971635 - DNA, 25 bp, Homo sapien
ggccaaaagaagtaagacagcttgc

SEQ ID NO: 2971636 - DNA, 25 bp, Homo sapien
tgtggagtgcgacttggccaaaaga

SEQ ID NO: 2971637 - DNA, 25 bp, Homo sapien
gacagcttgctgaagatttcctgaa

SEQ ID NO: 2971638 - DNA, 25 bp, Homo sapien
tgtgtcatgacgtagaaaaggatga

SEQ ID NO: 2971639 - DNA, 25 bp, Homo sapien
taggcaaactctaatgtggagtgcg

SEQ ID NO: 2971640 - DNA, 25 bp, Homo sapien
ggacaaggtaggttgttcttctcag

SEQ ID NO: 2971641 - DNA, 25 bp, Homo sapien
aagcattctatctgcttcatcaagg

SEQ ID NO: 2971642 - DNA, 25 bp, Homo sapien
ccaggtgttgcaatacagatttcca

SEQ ID NO: 2971643 - DNA, 25 bp, Homo sapien
tcatcaaggacaaggtaggttgttc

SEQ ID NO: 2971644 - DNA, 25 bp, Homo sapien
tgatccacaatcttccttatttggg

SEQ ID NO: 2971645 - DNA, 25 bp, Homo sapien
ggttcaaagcccatatcaagcattc

SEQ ID NO: 2971646 - DNA, 25 bp, Homo sapien
ggaaatctgtattgcaacacctgga

SEQ ID NO: 2971647 - DNA, 25 bp, Homo sapien
gaatgcttgatatgggctttgaacc

SEQ ID NO: 2971648 - DNA, 25 bp, Homo sapien
gaacaacctaccttgtccttgatga

SEQ ID NO: 2971649 - DNA, 25 bp, Homo sapien
ctgagaagaacaacctaccttgtcc

SEQ ID NO: 2971650 - DNA, 25 bp, Homo sapien
ccccaaataaggaagattgtggatc

SEQ ID NO: 2971651 - DNA, 25 bp, Homo sapien
ccttgatgaagcagatagaatgctt

SEQ ID NO: 2971652 - DNA, 25 bp, Homo sapien
tatttgtggtcccttaggagcacca

SEQ ID NO: 2971653 - DNA, 25 bp, Homo sapien
aggagcaccaccgtagatacaagta

SEQ ID NO: 2971654 - DNA, 25 bp, Homo sapien
tacttgctgcacctgttgggccagt

SEQ ID NO: 2971655 - DNA, 25 bp, Homo sapien
tctccaaatcacgtatttgtggtcc

SEQ ID NO: 2971656 - DNA, 25 bp, Homo sapien
tacaagtagacttcaagcgacatgc

SEQ ID NO: 2971657 - DNA, 25 bp, Homo sapien
gccagttcccgagttggtgccagca

SEQ ID NO: 2971658 - DNA, 25 bp, Homo sapien
aactcgggaactggcccaacaggtg

SEQ ID NO: 2971659 - DNA, 25 bp, Homo sapien
tggtgctggcaccaactcgggaact

SEQ ID NO: 2971660 - DNA, 25 bp, Homo sapien
ctggcccaacaggtgcagcaagtag

SEQ ID NO: 2971661 - DNA, 25 bp, Homo sapien
gctcctaagggaccacaaatacgtg

SEQ ID NO: 2971662 - DNA, 25 bp, Homo sapien
gagcatgtcgcttgaagtctacttg

SEQ ID NO: 2971663 - DNA, 25 bp, Homo sapien
tacttgtatctacggtggtgctcct

SEQ ID NO: 2971664 - DNA, 25 bp, Homo sapien
atcgcctctctctaggaatggctga

SEQ ID NO: 2971665 - DNA, 25 bp, Homo sapien
ccatcgcctctctctaggaatggct

SEQ ID NO: 2971666 - DNA, 25 bp, Homo sapien
tcgcctctctctaggaatggctgat

SEQ ID NO: 2971667 - DNA, 25 bp, Homo sapien
catcgcctctctctaggaatggctg

SEQ ID NO: 2971668 - DNA, 25 bp, Homo sapien
cccatcgcctctctctaggaatggc

SEQ ID NO: 2971669 - DNA, 25 bp, Homo sapien
gcccatcgcctctctctaggaatgg

SEQ ID NO: 2971670 - DNA, 25 bp, Homo sapien
ccattcctagagagaggcgatgggc

SEQ ID NO: 2971671 - DNA, 25 bp, Homo sapien
tcagccattcctagagagaggcgat

SEQ ID NO: 2971672 - DNA, 25 bp, Homo sapien
agccattcctagagagaggcgatgg

SEQ ID NO: 2971673 - DNA, 25 bp, Homo sapien
atcagccattcctagagagaggcga

SEQ ID NO: 2971674 - DNA, 25 bp, Homo sapien
gccattcctagagagaggcgatggg

SEQ ID NO: 2971675 - DNA, 25 bp, Homo sapien
cagccattcctagagagaggcgatg

SEQ ID NO: 2971676 - DNA, 25 bp, Homo sapien
cttgcttcttctgtatgtttccacc

SEQ ID NO: 2971677 - DNA, 25 bp, Homo sapien
tccttgcttcttctgtatgtttcca

SEQ ID NO: 2971678 - DNA, 25 bp, Homo sapien
ttgcttcttctgtatgtttccacct

SEQ ID NO: 2971679 - DNA, 25 bp, Homo sapien
cttctgtatgtttccacctcttgct

SEQ ID NO: 2971680 - DNA, 25 bp, Homo sapien
ccttgcttcttctgtatgtttccac

SEQ ID NO: 2971681 - DNA, 25 bp, Homo sapien
tcttctgtatgtttccacctcttgc

SEQ ID NO: 2971682 - DNA, 25 bp, Homo sapien
aggtggaaacatacagaagaagcaa

SEQ ID NO: 2971683 - DNA, 25 bp, Homo sapien
agcaagaggtggaaacatacagaag

SEQ ID NO: 2971684 - DNA, 25 bp, Homo sapien
ggtggaaacatacagaagaagcaag

SEQ ID NO: 2971685 - DNA, 25 bp, Homo sapien
tggaaacatacagaagaagcaagga

SEQ ID NO: 2971686 - DNA, 25 bp, Homo sapien
gtggaaacatacagaagaagcaagg

SEQ ID NO: 2971687 - DNA, 25 bp, Homo sapien
gcaagaggtggaaacatacagaaga

SEQ ID NO: 2971688 - DNA, 25 bp, Homo sapien
tgtgcgcctagccaaatcagggtgc

SEQ ID NO: 2971689 - DNA, 25 bp, Homo sapien
ctgtgcgcctagccaaatcagggtg

SEQ ID NO: 2971690 - DNA, 25 bp, Homo sapien
gtgcgcctagccaaatcagggtgct

SEQ ID NO: 2971691 - DNA, 25 bp, Homo sapien
agcaccctgatttggctaggcgcac

SEQ ID NO: 2971692 - DNA, 25 bp, Homo sapien
caccctgatttggctaggcgcacag

SEQ ID NO: 2971693 - DNA, 25 bp, Homo sapien
gcaccctgatttggctaggcgcaca

SEQ ID NO: 2971694 - DNA, 25 bp, Homo sapien
tgggatttatcatgtcggaagccgg

SEQ ID NO: 2971695 - DNA, 25 bp, Homo sapien
gaacctaaacagtacagtcagcgat

SEQ ID NO: 2971696 - DNA, 25 bp, Homo sapien
ggtaaacctagcactgtccttcgtg

SEQ ID NO: 2971697 - DNA, 25 bp, Homo sapien
tgaaccgaagagcatcacgacgatg

SEQ ID NO: 2971698 - DNA, 25 bp, Homo sapien
ttctttccagataagggccctgccc

SEQ ID NO: 2971699 - DNA, 25 bp, Homo sapien
ggaaacttgtcacccacatgccaga

SEQ ID NO: 2971700 - DNA, 25 bp, Homo sapien
ggcttccgacatgataaatcccagg

SEQ ID NO: 2971701 - DNA, 25 bp, Homo sapien
gggcagggcccttatctggaaagaa

SEQ ID NO: 2971702 - DNA, 25 bp, Homo sapien
catcgtcgtgatgctcttcggttca

SEQ ID NO: 2971703 - DNA, 25 bp, Homo sapien
gattttcacgaaggacagtgctagg

SEQ ID NO: 2971704 - DNA, 25 bp, Homo sapien
gacatgataaatccccggcttccga

SEQ ID NO: 2971705 - DNA, 25 bp, Homo sapien
caaattctggcatgtgggtgacaag

SEQ ID NO: 2971706 - DNA, 25 bp, Homo sapien
tcactcgaataacccgacatggcgt

SEQ ID NO: 2971707 - DNA, 25 bp, Homo sapien
tatagaaaagcgtgcgacaagtcgc

SEQ ID NO: 2971708 - DNA, 25 bp, Homo sapien
gccgcggtctcggtcactcgaataa

SEQ ID NO: 2971709 - DNA, 25 bp, Homo sapien
cgacatggcgtcaatggttgcggtt

SEQ ID NO: 2971710 - DNA, 25 bp, Homo sapien
tggcctcgatgacggcgaagccttg

SEQ ID NO: 2971711 - DNA, 25 bp, Homo sapien
gacaagtcgctggaaatggcctcga

SEQ ID NO: 2971712 - DNA, 25 bp, Homo sapien
ggcttcgccgtcatcgaggccattt

SEQ ID NO: 2971713 - DNA, 25 bp, Homo sapien
gaggccatttccagcgacttgtcgc

SEQ ID NO: 2971714 - DNA, 25 bp, Homo sapien
ccatgtcgggttattcgagtgaccg

SEQ ID NO: 2971715 - DNA, 25 bp, Homo sapien
gcgacttgtcgcacgcttttctata

SEQ ID NO: 2971716 - DNA, 25 bp, Homo sapien
cgcaaccattgacgccatgtcgggt

SEQ ID NO: 2971717 - DNA, 25 bp, Homo sapien
ttattcgagtgaccgagaccgcggc

SEQ ID NO: 2971718 - DNA, 25 bp, Homo sapien
taaacatctccgagtggcgagggtg

SEQ ID NO: 2971719 - DNA, 25 bp, Homo sapien
tcaacgggaaagtagtgcggaccgc

SEQ ID NO: 2971720 - DNA, 25 bp, Homo sapien
cgttaaaagagcttctcgccgctga

SEQ ID NO: 2971721 - DNA, 25 bp, Homo sapien
caaaggattatcagacacgcgggtc

SEQ ID NO: 2971722 - DNA, 25 bp, Homo sapien
tatgttctggacacgtaacgttctg

SEQ ID NO: 2971723 - DNA, 25 bp, Homo sapien
tacaaaagcaggtacgacctcaggg

SEQ ID NO: 2971724 - DNA, 25 bp, Homo sapien
tagacaaagcccatgactctagagg

SEQ ID NO: 2971725 - DNA, 25 bp, Homo sapien
tgaagctgagagaccctatccaggg

SEQ ID NO: 2971726 - DNA, 25 bp, Homo sapien
tattctcagatgtatatgacactta

SEQ ID NO: 2971727 - DNA, 25 bp, Homo sapien
tcatgtattctcagatgtatatgac

SEQ ID NO: 2971728 - DNA, 25 bp, Homo sapien
aaaatagactgataaagagcaataa

SEQ ID NO: 2971729 - DNA, 25 bp, Homo sapien
tagcatcacagtcttgaagttcatg

SEQ ID NO: 2971730 - DNA, 25 bp, Homo sapien
aagctgacctgcaagtagtccaagg

SEQ ID NO: 2971731 - DNA, 25 bp, Homo sapien
agacaagctgacctgcaagtagtcc

SEQ ID NO: 2971732 - DNA, 25 bp, Homo sapien
ccaaggccagtgaatcaattactgc

SEQ ID NO: 2971733 - DNA, 25 bp, Homo sapien
gcttgtacattgtgtgcatcatctt

SEQ ID NO: 2971734 - DNA, 25 bp, Homo sapien
tagagagttcttccgattgcaaaca

SEQ ID NO: 2971735 - DNA, 25 bp, Homo sapien
tatgctagagattgttcccaacacg

SEQ ID NO: 2971736 - DNA, 25 bp, Homo sapien
tgttggaagcaatcagtattacgag

SEQ ID NO: 2971737 - DNA, 25 bp, Homo sapien
agtccactgtatgcagctatcatga

SEQ ID NO: 2971738 - DNA, 25 bp, Homo sapien
ttctgaaatataagccctgcatata

SEQ ID NO: 2971739 - DNA, 25 bp, Homo sapien
taaatctcactccatcttcagcgtc

SEQ ID NO: 2971740 - DNA, 25 bp, Homo sapien
tacatctcttaccatatccacttca

SEQ ID NO: 2971741 - DNA, 25 bp, Homo sapien
tataagccctgcatataaaaccttt

SEQ ID NO: 2971742 - DNA, 25 bp, Homo sapien
ttttctcatgagatgtttcactgat

SEQ ID NO: 2971743 - DNA, 25 bp, Homo sapien
ttctgtaagatactccaacaaacca

SEQ ID NO: 2971744 - DNA, 25 bp, Homo sapien
gtaagatactccaacaaaccatcaa

SEQ ID NO: 2971745 - DNA, 25 bp, Homo sapien
tgtaagatactccaacaaaccatca

SEQ ID NO: 2971746 - DNA, 25 bp, Homo sapien
tattattccattcgtgaccaacagc

SEQ ID NO: 2971747 - DNA, 25 bp, Homo sapien
agcagcttggaatcctcccagagta

SEQ ID NO: 2971748 - DNA, 25 bp, Homo sapien
tagccttgaattaggtgagtcccac

SEQ ID NO: 2971749 - DNA, 25 bp, Homo sapien
gaatggaggatgagcctaccccaat

SEQ ID NO: 2971750 - DNA, 25 bp, Homo sapien
gaaaatgctgtccagctaaggtact

SEQ ID NO: 2971751 - DNA, 25 bp, Homo sapien
gtagctcaccacatactgccgatct

SEQ ID NO: 2971752 - DNA, 25 bp, Homo sapien
aagcctatctgagcaacttccccag

SEQ ID NO: 2971753 - DNA, 25 bp, Homo sapien
cataaaagtatctctcagttgcctc

SEQ ID NO: 2971754 - DNA, 25 bp, Homo sapien
gataatgctagctcaggtcccaggt

SEQ ID NO: 2971755 - DNA, 25 bp, Homo sapien
gccctgcacagctgatatgattagt

SEQ ID NO: 2971756 - DNA, 25 bp, Homo sapien
tagagagctgccatcatatagtgag

SEQ ID NO: 2971757 - DNA, 25 bp, Homo sapien
tctgagctaggctgtgtgcccaact

SEQ ID NO: 2971758 - DNA, 25 bp, Homo sapien
agattctttagtactttctggctct

SEQ ID NO: 2971759 - DNA, 25 bp, Homo sapien
tccatgatgatttagattctttagt

SEQ ID NO: 2971760 - DNA, 25 bp, Homo sapien
ttccaaacgttctcctcgatcagat

SEQ ID NO: 2971761 - DNA, 25 bp, Homo sapien
agtactttctggctcttccaaacgt

SEQ ID NO: 2971762 - DNA, 25 bp, Homo sapien
aaatgcaggaaacgagcctggtgag

SEQ ID NO: 2971763 - DNA, 25 bp, Homo sapien
ttaaaaatgcaggaaacgagcctgg

SEQ ID NO: 2971764 - DNA, 25 bp, Homo sapien
ttaaacaacttgagaacacttaatg

SEQ ID NO: 2971765 - DNA, 25 bp, Homo sapien
caacttgagaacacttaatgttaag

SEQ ID NO: 2971766 - DNA, 25 bp, Homo sapien
caatgatactggctcatgaaggtcc

SEQ ID NO: 2971767 - DNA, 25 bp, Homo sapien
ggaaagaagttcatcaggccgggca

SEQ ID NO: 2971768 - DNA, 25 bp, Homo sapien
gaaggtcctgtaacccagcattgct

SEQ ID NO: 2971769 - DNA, 25 bp, Homo sapien
cagcaaatactggtgactctagggt

SEQ ID NO: 2971770 - DNA, 25 bp, Homo sapien
tccttcactcagggcccagcctgac

SEQ ID NO: 2971771 - DNA, 25 bp, Homo sapien
tggaaaagttccctccttcactcag

SEQ ID NO: 2971772 - DNA, 25 bp, Homo sapien
ctggaaaagttccctccttcactca

SEQ ID NO: 2971773 - DNA, 25 bp, Homo sapien
agggcccagcctgaccagagggccc

SEQ ID NO: 2971774 - DNA, 25 bp, Homo sapien
tcatctccatcccaagaggggccca

SEQ ID NO: 2971775 - DNA, 25 bp, Homo sapien
gctgtgtctccaagtctaatgattt

SEQ ID NO: 2971776 - DNA, 25 bp, Homo sapien
tgtctccaagtctaatgatttcacc

SEQ ID NO: 2971777 - DNA, 25 bp, Homo sapien
ggcccaacatctcagaagacaagga

SEQ ID NO: 2971778 - DNA, 25 bp, Homo sapien
gagccactgtgacgggccataatat

SEQ ID NO: 2971779 - DNA, 25 bp, Homo sapien
tgctatcagaaagtaagatgccatt

SEQ ID NO: 2971780 - DNA, 25 bp, Homo sapien
aaaatagatgccagagttacggaaa

SEQ ID NO: 2971781 - DNA, 25 bp, Homo sapien
gccattttgtaatccagaatcattt

SEQ ID NO: 2971782 - DNA, 25 bp, Homo sapien
taggagggtacaacatatcttcatg

SEQ ID NO: 2971783 - DNA, 25 bp, Homo sapien
tgtcttcaacaaaggatgtcctact

SEQ ID NO: 2971784 - DNA, 25 bp, Homo sapien
tcttggacaaaacactaggagggta

SEQ ID NO: 2971785 - DNA, 25 bp, Homo sapien
catgtgatttagaacttggtgaggc

SEQ ID NO: 2971786 - DNA, 25 bp, Homo sapien
agaactaacatccattacaactcac

SEQ ID NO: 2971787 - DNA, 25 bp, Homo sapien
aaacatttacaagtaagatcatgta

SEQ ID NO: 2971788 - DNA, 25 bp, Homo sapien
taagatcatgtaagaccaaaaagga

SEQ ID NO: 2971789 - DNA, 25 bp, Homo sapien
gatcatcagcagtaaagaactaaca

SEQ ID NO: 2971790 - DNA, 25 bp, Homo sapien
tggaatcccactcacagaaagggtt

SEQ ID NO: 2971791 - DNA, 25 bp, Homo sapien
ctagcatttggaatcccactcacag

SEQ ID NO: 2971792 - DNA, 25 bp, Homo sapien
tttggaatcccactcacagaaaggg

SEQ ID NO: 2971793 - DNA, 25 bp, Homo sapien
catttggaatcccactcacagaaag

SEQ ID NO: 2971794 - DNA, 25 bp, Homo sapien
tagggtggatgtaaaggaatagctg

SEQ ID NO: 2971795 - DNA, 25 bp, Homo sapien
tgctcggataggctcccctagcttc

SEQ ID NO: 2971796 - DNA, 25 bp, Homo sapien
ttcttttcctatggggcagggtgct

SEQ ID NO: 2971797 - DNA, 25 bp, Homo sapien
cagggtgctcgaggctctgaagggt

SEQ ID NO: 2971798 - DNA, 25 bp, Homo sapien
gaaaattccgtatgctctccagtag

SEQ ID NO: 2971799 - DNA, 25 bp, Homo sapien
ccagaaaattccgtatgctctccag

SEQ ID NO: 2971800 - DNA, 25 bp, Homo sapien
aaattccgtatgctctccagtagaa

SEQ ID NO: 2971801 - DNA, 25 bp, Homo sapien
ctccagtagaatttacggctgggga

SEQ ID NO: 2971802 - DNA, 25 bp, Homo sapien
cccatttgctgcctttaggcaactt

SEQ ID NO: 2971803 - DNA, 25 bp, Homo sapien
tgcctttaggcaacttggaaattaa

SEQ ID NO: 2971804 - DNA, 25 bp, Homo sapien
gagctggatatacttcccatttgct

SEQ ID NO: 2971805 - DNA, 25 bp, Homo sapien
ctgagctggatatacttcccatttg

SEQ ID NO: 2971806 - DNA, 25 bp, Homo sapien
gaggcttccttgtcctaggcccttg

SEQ ID NO: 2971807 - DNA, 25 bp, Homo sapien
gcttccttgtcctaggcccttggac

SEQ ID NO: 2971808 - DNA, 25 bp, Homo sapien
cctttgggaggcttccttgtcctag

SEQ ID NO: 2971809 - DNA, 25 bp, Homo sapien
tcctttgggaggcttccttgtccta

SEQ ID NO: 2971810 - DNA, 25 bp, Homo sapien
gaattgcaggatgaggctgtagctc

SEQ ID NO: 2971811 - DNA, 25 bp, Homo sapien
ggtgaattgcaggatgaggctgtag

SEQ ID NO: 2971812 - DNA, 25 bp, Homo sapien
tgaattgcaggatgaggctgtagct

SEQ ID NO: 2971813 - DNA, 25 bp, Homo sapien
attgcaggatgaggctgtagctctg

SEQ ID NO: 2971814 - DNA, 25 bp, Homo sapien
tctgatacatcatgtaattcttgtt

SEQ ID NO: 2971815 - DNA, 25 bp, Homo sapien
ccaatctagttcagaaagccgctga

SEQ ID NO: 2971816 - DNA, 25 bp, Homo sapien
cagaaagccgctgagagagtttttc

SEQ ID NO: 2971817 - DNA, 25 bp, Homo sapien
gccgctgagagagtttttctgatac

SEQ ID NO: 2971818 - DNA, 25 bp, Homo sapien
ttctttaatccgatcacccagagca

SEQ ID NO: 2971819 - DNA, 25 bp, Homo sapien
tttctttaatccgatcacccagagc

SEQ ID NO: 2971820 - DNA, 25 bp, Homo sapien
ttctttggcccatactccacgatgc

SEQ ID NO: 2971821 - DNA, 25 bp, Homo sapien
tttggcccatactccacgatgccat

SEQ ID NO: 2971822 - DNA, 25 bp, Homo sapien
catactccacgatgccatcactgtg

SEQ ID NO: 2971823 - DNA, 25 bp, Homo sapien
gcccatactccacgatgccatcact

SEQ ID NO: 2971824 - DNA, 25 bp, Homo sapien
tagggtggctttctacgcatggaaa

SEQ ID NO: 2971825 - DNA, 25 bp, Homo sapien
gatggagagagcgaatgggatctgt

SEQ ID NO: 2971826 - DNA, 25 bp, Homo sapien
tgtgcttggaattggcggacatctg

SEQ ID NO: 2971827 - DNA, 25 bp, Homo sapien
tttctctccaagtggaactgtttgt

SEQ ID NO: 2971828 - DNA, 25 bp, Homo sapien
tggctgctgcttaatggtagtcaag

SEQ ID NO: 2971829 - DNA, 25 bp, Homo sapien
tgcttaatggtagtcaagagatggg

SEQ ID NO: 2971830 - DNA, 25 bp, Homo sapien
ctgctgcttaatggtagtcaagaga

SEQ ID NO: 2971831 - DNA, 25 bp, Homo sapien
gctgcttaatggtagtcaagagatg

SEQ ID NO: 2971832 - DNA, 25 bp, Homo sapien
ctgggcggcaagagtgaatctccac

SEQ ID NO: 2971833 - DNA, 25 bp, Homo sapien
aattccaatggtgcctcaaccgagc

SEQ ID NO: 2971834 - DNA, 25 bp, Homo sapien
aaacatacacaacgggcagcaccat

SEQ ID NO: 2971835 - DNA, 25 bp, Homo sapien
gagcatccaagctcttagccgcgtg

SEQ ID NO: 2971836 - DNA, 25 bp, Homo sapien
catgtattcttagaggtccaatatt

SEQ ID NO: 2971837 - DNA, 25 bp, Homo sapien
tctcatgtattcttagaggtccaat

SEQ ID NO: 2971838 - DNA, 25 bp, Homo sapien
cttcttagttccctttcaaatgctt

SEQ ID NO: 2971839 - DNA, 25 bp, Homo sapien
tgtcttcttagttccctttcaaatg

SEQ ID NO: 2971840 - DNA, 25 bp, Homo sapien
aatggcatttattacagtggagact

SEQ ID NO: 2971841 - DNA, 25 bp, Homo sapien
gcatttattacagtggagactttta

SEQ ID NO: 2971842 - DNA, 25 bp, Homo sapien
ggcatttattacagtggagactttt

SEQ ID NO: 2971843 - DNA, 25 bp, Homo sapien
catttattacagtggagacttttac

SEQ ID NO: 2971844 - DNA, 25 bp, Homo sapien
gccacctcttagactctgcgttgtg

SEQ ID NO: 2971845 - DNA, 25 bp, Homo sapien
aatcttccagggctgactacattct

SEQ ID NO: 2971846 - DNA, 25 bp, Homo sapien
cacctcttagactctgcgttgtggt

SEQ ID NO: 2971847 - DNA, 25 bp, Homo sapien
gaggccacctcttagactctgcgtt

SEQ ID NO: 2971848 - DNA, 25 bp, Homo sapien
taaagtacaattctgtggttcttac

SEQ ID NO: 2971849 - DNA, 25 bp, Homo sapien
ataaagtacaattctgtggttctta

SEQ ID NO: 2971850 - DNA, 25 bp, Homo sapien
tctaaaggatagagtaggagggcca

SEQ ID NO: 2971851 - DNA, 25 bp, Homo sapien
cagtgcctgtgggtagattctctac

SEQ ID NO: 2971852 - DNA, 25 bp, Homo sapien
taagcacacgagtgaggctaacgct

SEQ ID NO: 2971853 - DNA, 25 bp, Homo sapien
gaagtccatcctaattgctcagccg

SEQ ID NO: 2971854 - DNA, 25 bp, Homo sapien
catccctggtagatcaaagcttatg

SEQ ID NO: 2971855 - DNA, 25 bp, Homo sapien
gatgttcttaatctgagacgtggac

SEQ ID NO: 2971856 - DNA, 25 bp, Homo sapien
taagtgatgtggttttgatcctgaa

SEQ ID NO: 2971857 - DNA, 25 bp, Homo sapien
ggacaagaactgtcatccaacatcc

SEQ ID NO: 2971858 - DNA, 25 bp, Homo sapien
ttttgcttagtgttgggccagaaac

SEQ ID NO: 2971859 - DNA, 25 bp, Homo sapien
tctttgatcgattttctctacatgc

SEQ ID NO: 2971860 - DNA, 25 bp, Homo sapien
tgttcaacctgtgcaatttgctgtt

SEQ ID NO: 2971861 - DNA, 25 bp, Homo sapien
acctgtgcaatttgctgtttccaca

SEQ ID NO: 2971862 - DNA, 25 bp, Homo sapien
catgccttcttagggcttcttctat

SEQ ID NO: 2971863 - DNA, 25 bp, Homo sapien
acaagggtagtaaggaggtcatgcc

SEQ ID NO: 2971864 - DNA, 25 bp, Homo sapien
tcttgacaagggtagtaaggaggtc

SEQ ID NO: 2971865 - DNA, 25 bp, Homo sapien
aggaggtcatgccttcttagggctt

SEQ ID NO: 2971866 - DNA, 25 bp, Homo sapien
taaggacaagaggaatgcagattcc

SEQ ID NO: 2971867 - DNA, 25 bp, Homo sapien
gagctgccaggagcatttaggcaaa

SEQ ID NO: 2971868 - DNA, 25 bp, Homo sapien
taggaaaatggcacacccagacttt

SEQ ID NO: 2971869 - DNA, 25 bp, Homo sapien
cacaggaaagtaccatctgcagttc

SEQ ID NO: 2971870 - DNA, 25 bp, Homo sapien
cacgaacgatttgctgtcgattttc

SEQ ID NO: 2971871 - DNA, 25 bp, Homo sapien
gattgggtcaacctttgcctacgaa

SEQ ID NO: 2971872 - DNA, 25 bp, Homo sapien
tgcctacgaatgcagtccttgaagt

SEQ ID NO: 2971873 - DNA, 25 bp, Homo sapien
tcataatattttcgagcacgaacga

SEQ ID NO: 2971874 - DNA, 25 bp, Homo sapien
tcagggccagcactataggacttca

SEQ ID NO: 2971875 - DNA, 25 bp, Homo sapien
gaaaacacactgctcaaagggcttg

SEQ ID NO: 2971876 - DNA, 25 bp, Homo sapien
catagggtaagaacgccaagagcag

SEQ ID NO: 2971877 - DNA, 25 bp, Homo sapien
gaaaaactggttctgacggcgacgc

SEQ ID NO: 2971878 - DNA, 25 bp, Homo sapien
gcatagtttcttaggtctcgtaatc

SEQ ID NO: 2971879 - DNA, 25 bp, Homo sapien
catggagtccagttcatcctggtgg

SEQ ID NO: 2971880 - DNA, 25 bp, Homo sapien
ggtggcgtctcctttgttcatctcg

SEQ ID NO: 2971881 - DNA, 25 bp, Homo sapien
ccttatagtagttctccatggagtc

SEQ ID NO: 2971882 - DNA, 25 bp, Homo sapien
gactaagcaagttttgccacaaggg

SEQ ID NO: 2971883 - DNA, 25 bp, Homo sapien
tcaggactaagcacaacagcgtaag

SEQ ID NO: 2971884 - DNA, 25 bp, Homo sapien
tctaatctgtagagtgcaaacttca

SEQ ID NO: 2971885 - DNA, 25 bp, Homo sapien
cacaagggcaagtggtcaggactaa

SEQ ID NO: 2971886 - DNA, 25 bp, Homo sapien
ttcttgatgttcctgtgatatggct

SEQ ID NO: 2971887 - DNA, 25 bp, Homo sapien
cctgtgatatggcttctgccagcaa

SEQ ID NO: 2971888 - DNA, 25 bp, Homo sapien
gtgatatggcttctgccagcaatga

SEQ ID NO: 2971889 - DNA, 25 bp, Homo sapien
gatgttcctgtgatatggcttctgc

SEQ ID NO: 2971890 - DNA, 25 bp, Homo sapien
gttcacagcatttatccaggccctc

SEQ ID NO: 2971891 - DNA, 25 bp, Homo sapien
ggtcccttgctgaaagaaacattgc

SEQ ID NO: 2971892 - DNA, 25 bp, Homo sapien
tgctccaaccaccaatgtacgaggt

SEQ ID NO: 2971893 - DNA, 25 bp, Homo sapien
gaaaaaagaaggcatgtcatcccgc

SEQ ID NO: 2971894 - DNA, 25 bp, Homo sapien
aagccagctgaagccgagatctgaa

SEQ ID NO: 2971895 - DNA, 25 bp, Homo sapien
ccagttcccggaagaaaacatcatc

SEQ ID NO: 2971896 - DNA, 25 bp, Homo sapien
tctgtgttatcatgtcctgcagctg

SEQ ID NO: 2971897 - DNA, 25 bp, Homo sapien
gaagccgagatctgaagcgctcagc

SEQ ID NO: 2971898 - DNA, 25 bp, Homo sapien
cagaaccttcacctactattatcaa

SEQ ID NO: 2971899 - DNA, 25 bp, Homo sapien
tgtttactggctcgattctagctct

SEQ ID NO: 2971900 - DNA, 25 bp, Homo sapien
ttctggcttagactgtttactggct

SEQ ID NO: 2971901 - DNA, 25 bp, Homo sapien
tcacctactattatcaagtctggcc

SEQ ID NO: 2971902 - DNA, 25 bp, Homo sapien
ctgttgggggtaccgcataggtgga

SEQ ID NO: 2971903 - DNA, 25 bp, Homo sapien
tgttgggggtaccgcataggtggat

SEQ ID NO: 2971904 - DNA, 25 bp, Homo sapien
gccgtggtgactgctcagttggtag

SEQ ID NO: 2971905 - DNA, 25 bp, Homo sapien
gtggtgactgctcagttggtagtac

SEQ ID NO: 2971906 - DNA, 25 bp, Homo sapien
ccgtggtgactgctcagttggtagt

SEQ ID NO: 2971907 - DNA, 25 bp, Homo sapien
cgtggtgactgctcagttggtagta

SEQ ID NO: 2971908 - DNA, 25 bp, Homo sapien
gcactgtcacagcatcaacgttttt

SEQ ID NO: 2971909 - DNA, 25 bp, Homo sapien
aagttcaagaacacatgccatcctg

SEQ ID NO: 2971910 - DNA, 25 bp, Homo sapien
gctctatggagggtgacaacatgag

SEQ ID NO: 2971911 - DNA, 25 bp, Homo sapien
tgtatgtgcccatgccgaagtcgag

SEQ ID NO: 2971912 - DNA, 25 bp, Homo sapien
ccccaatgtattattgaaccatgga

SEQ ID NO: 2971913 - DNA, 25 bp, Homo sapien
tctagctgtattgttatttcagata

SEQ ID NO: 2971914 - DNA, 25 bp, Homo sapien
cattacccgattacttccaaatagg

SEQ ID NO: 2971915 - DNA, 25 bp, Homo sapien
tccaaataggtgctaagcaaaaacc

SEQ ID NO: 2971916 - DNA, 25 bp, Homo sapien
tagtactttactggttgcagaccca

SEQ ID NO: 2971917 - DNA, 25 bp, Homo sapien
aaatgtatggaagtggtttctatgc

SEQ ID NO: 2971918 - DNA, 25 bp, Homo sapien
tgataatcagtaatgttcagctgtc

SEQ ID NO: 2971919 - DNA, 25 bp, Homo sapien
cagaaatcataactgacagggatac

SEQ ID NO: 2971920 - DNA, 25 bp, Homo sapien
tgatcttgaacagctcctgtacttg

SEQ ID NO: 2971921 - DNA, 25 bp, Homo sapien
gaacggatttcctggaatacagcga

SEQ ID NO: 2971922 - DNA, 25 bp, Homo sapien
tccagagttaggcagtattctacac

SEQ ID NO: 2971923 - DNA, 25 bp, Homo sapien
tatgtttcaacctagtctaagtggg

SEQ ID NO: 2971924 - DNA, 25 bp, Homo sapien
cccaggtgcacagaattaacatctc

SEQ ID NO: 2971925 - DNA, 25 bp, Homo sapien
catctctgagcctaggacctggaat

SEQ ID NO: 2971926 - DNA, 25 bp, Homo sapien
caagtctatcacagctgtggttctc

SEQ ID NO: 2971927 - DNA, 25 bp, Homo sapien
gacagccagcagtacaaacctaaag

SEQ ID NO: 2971928 - DNA, 25 bp, Homo sapien
gggactataggcacttgccatcaac

SEQ ID NO: 2971929 - DNA, 25 bp, Homo sapien
ctataggcacttgccatcaacctgg

SEQ ID NO: 2971930 - DNA, 25 bp, Homo sapien
ggactataggcacttgccatcaacc

SEQ ID NO: 2971931 - DNA, 25 bp, Homo sapien
gactataggcacttgccatcaacct

SEQ ID NO: 2971932 - DNA, 25 bp, Homo sapien
cacttttcgaggctgcctgtaatcc

SEQ ID NO: 2971933 - DNA, 25 bp, Homo sapien
tcttataacaggtgccattgttatt

SEQ ID NO: 2971934 - DNA, 25 bp, Homo sapien
acagtttgtttgacaggtcatgctg

SEQ ID NO: 2971935 - DNA, 25 bp, Homo sapien
catgtgacttatgcttgtggtccca

SEQ ID NO: 2971936 - DNA, 25 bp, Homo sapien
tgcagtgacgcaatctaggctcacc

SEQ ID NO: 2971937 - DNA, 25 bp, Homo sapien
attgcaggtgcatgccaccgtgcct

SEQ ID NO: 2971938 - DNA, 25 bp, Homo sapien
agtgacgcaatctaggctcaccaca

SEQ ID NO: 2971939 - DNA, 25 bp, Homo sapien
cgtgcctggctaagtttttttgtat

SEQ ID NO: 2971940 - DNA, 25 bp, Homo sapien
taggataattacctcagaacctgta

SEQ ID NO: 2971941 - DNA, 25 bp, Homo sapien
taactacttgccaggtactgaatat

SEQ ID NO: 2971942 - DNA, 25 bp, Homo sapien
cccagaaaatttaactggagtctgc

SEQ ID NO: 2971943 - DNA, 25 bp, Homo sapien
gtgagtcgtgtttgcgccactccat

SEQ ID NO: 2971944 - DNA, 25 bp, Homo sapien
tactaactaggtgttttgagggcat

SEQ ID NO: 2971945 - DNA, 25 bp, Homo sapien
tattggtagggtttagatgctttta

SEQ ID NO: 2971946 - DNA, 25 bp, Homo sapien
tcctgtctacgtatagatttgtcaa

SEQ ID NO: 2971947 - DNA, 25 bp, Homo sapien
gatttgtcaaggaatattggtaggg

SEQ ID NO: 2971948 - DNA, 25 bp, Homo sapien
ttggcttcatcggatggctcagtca

SEQ ID NO: 2971949 - DNA, 25 bp, Homo sapien
tggcttcatcggatggctcagtcat

SEQ ID NO: 2971950 - DNA, 25 bp, Homo sapien
tgttggcttcatcggatggctcagt

SEQ ID NO: 2971951 - DNA, 25 bp, Homo sapien
gttggcttcatcggatggctcagtc

SEQ ID NO: 2971952 - DNA, 25 bp, Homo sapien
tgtaagccctcgttgaaattgcaag

SEQ ID NO: 2971953 - DNA, 25 bp, Homo sapien
tgccatagtacttattagacatgta

SEQ ID NO: 2971954 - DNA, 25 bp, Homo sapien
ttgcaagttccccaaagtggccgcg

SEQ ID NO: 2971955 - DNA, 25 bp, Homo sapien
cctttggttctaaggcattgtggga

SEQ ID NO: 2971956 - DNA, 25 bp, Homo sapien
agttgttctttcctctatttgattt

SEQ ID NO: 2971957 - DNA, 25 bp, Homo sapien
tcctctatttgattttgagggaccc

SEQ ID NO: 2971958 - DNA, 25 bp, Homo sapien
gagggaccctgattgactcccagta

SEQ ID NO: 2971959 - DNA, 25 bp, Homo sapien
ctgggatggaatgataccggtgtgg

SEQ ID NO: 2971960 - DNA, 25 bp, Homo sapien
acccgccaccatgtatttttagtag

SEQ ID NO: 2971961 - DNA, 25 bp, Homo sapien
agacagggttttgctgtgttggcca

SEQ ID NO: 2971962 - DNA, 25 bp, Homo sapien
gcacccgccaccatgtatttttagt

SEQ ID NO: 2971963 - DNA, 25 bp, Homo sapien
ggctgttcttgaattcctgacctca

SEQ ID NO: 2971964 - DNA, 25 bp, Homo sapien
cgcgcccagctttatgtgtatattt

SEQ ID NO: 2971965 - DNA, 25 bp, Homo sapien
ttctccaaggcaaaagaaaggaaga

SEQ ID NO: 2971966 - DNA, 25 bp, Homo sapien
caccgcgcccagctttatgtgtata

SEQ ID NO: 2971967 - DNA, 25 bp, Homo sapien
ccaccgcgcccagctttatgtgtat

SEQ ID NO: 2971968 - DNA, 25 bp, Homo sapien
gtagaaaatcagttgacaggccagg

SEQ ID NO: 2971969 - DNA, 25 bp, Homo sapien
tttttaatatgctgtgagaagtaag

SEQ ID NO: 2971970 - DNA, 25 bp, Homo sapien
tctatttttgtagccctatttgttg

SEQ ID NO: 2971971 - DNA, 25 bp, Homo sapien
gctgtgagaagtaagtgtcatgatt

SEQ ID NO: 2971972 - DNA, 25 bp, Homo sapien
actgttatccctagaactttccctg

SEQ ID NO: 2971973 - DNA, 25 bp, Homo sapien
tccctgacctgagttgaactgtcct

SEQ ID NO: 2971974 - DNA, 25 bp, Homo sapien
gtcttaaagacgtaatatgtcctcc

SEQ ID NO: 2971975 - DNA, 25 bp, Homo sapien
gtataattatgaatgccctcgcccc

SEQ ID NO: 2971976 - DNA, 25 bp, Homo sapien
tttgtaaaggaattggaatcacggc

SEQ ID NO: 2971977 - DNA, 25 bp, Homo sapien
caggtacgttttgcttacagtgcca

SEQ ID NO: 2971978 - DNA, 25 bp, Homo sapien
caaagtgtttatgattccaggtgca

SEQ ID NO: 2971979 - DNA, 25 bp, Homo sapien
gaatcacggcgttatcctaccttca

SEQ ID NO: 2971980 - DNA, 25 bp, Homo sapien
actcatgtctctgaggtgaggagac

SEQ ID NO: 2971981 - DNA, 25 bp, Homo sapien
ctcatgtctctgaggtgaggagaca

SEQ ID NO: 2971982 - DNA, 25 bp, Homo sapien
tcatgtctctgaggtgaggagacag

SEQ ID NO: 2971983 - DNA, 25 bp, Homo sapien
cagttatgcccgcatgaaaaacctt

SEQ ID NO: 2971984 - DNA, 25 bp, Homo sapien
ttatgcccgcatgaaaaacctttac

SEQ ID NO: 2971985 - DNA, 25 bp, Homo sapien
ttgcacacacccagttatgcccgca

SEQ ID NO: 2971986 - DNA, 25 bp, Homo sapien
acacccagttatgcccgcatgaaaa

SEQ ID NO: 2971987 - DNA, 25 bp, Homo sapien
cggttgctgactgcgcgcagtaaac

SEQ ID NO: 2971988 - DNA, 25 bp, Homo sapien
tgaagagctcccgtggcgaggatta

SEQ ID NO: 2971989 - DNA, 25 bp, Homo sapien
cttaaagatggagcgcttaacggga

SEQ ID NO: 2971990 - DNA, 25 bp, Homo sapien
gactgcgcgcagtaaacactcctta

SEQ ID NO: 2971991 - DNA, 25 bp, Homo sapien
gggagtcggcaggtaacctgatctc

SEQ ID NO: 2971992 - DNA, 25 bp, Homo sapien
aagagcgggagtcggcaggtaacct

SEQ ID NO: 2971993 - DNA, 25 bp, Homo sapien
cgggagtcggcaggtaacctgatct

SEQ ID NO: 2971994 - DNA, 25 bp, Homo sapien
agcgggagtcggcaggtaacctgat

SEQ ID NO: 2971995 - DNA, 25 bp, Homo sapien
ttcaacttcaaaacaagcagtctcc

SEQ ID NO: 2971996 - DNA, 25 bp, Homo sapien
tcaacttcaaaacaagcagtctccc

SEQ ID NO: 2971997 - DNA, 25 bp, Homo sapien
ctctgaggatgagcttaggacagat

SEQ ID NO: 2971998 - DNA, 25 bp, Homo sapien
tacaatgacccagtagtgtccgtcc

SEQ ID NO: 2971999 - DNA, 25 bp, Homo sapien
tgtgttgacgccactctcaaacagt

SEQ ID NO: 2972000 - DNA, 25 bp, Homo sapien
aacagtgtctgccactgagtacaat

SEQ ID NO: 2972001 - DNA, 25 bp, Homo sapien
tctgccactgagtacaatgacccag

SEQ ID NO: 2972002 - DNA, 25 bp, Homo sapien
tgattcctgagatttgcaggacatg

SEQ ID NO: 2972003 - DNA, 25 bp, Homo sapien
ctgattcctgagatttgcaggacat

SEQ ID NO: 2972004 - DNA, 25 bp, Homo sapien
gattcctgagatttgcaggacatgt

SEQ ID NO: 2972005 - DNA, 25 bp, Homo sapien
attcctgagatttgcaggacatgtt

SEQ ID NO: 2972006 - DNA, 25 bp, Homo sapien
tggaaccctcttgctccctcgacct

SEQ ID NO: 2972007 - DNA, 25 bp, Homo sapien
cagggaaatcgccagggacagagct

SEQ ID NO: 2972008 - DNA, 25 bp, Homo sapien
gacagagctgcaacttgccaggcca

SEQ ID NO: 2972009 - DNA, 25 bp, Homo sapien
tctccaccacatcaaaaggtcctct

SEQ ID NO: 2972010 - DNA, 25 bp, Homo sapien
caggaagcgtgggacgaagcttact

SEQ ID NO: 2972011 - DNA, 25 bp, Homo sapien
caggcctttgaatcagctgggtgca

SEQ ID NO: 2972012 - DNA, 25 bp, Homo sapien
tcaggctgcctggaccgacaggaag

SEQ ID NO: 2972013 - DNA, 25 bp, Homo sapien
tccgggtctggctcgtggtcagcct

SEQ ID NO: 2972014 - DNA, 25 bp, Homo sapien
gacacctttgtctcgtagtcatcag

SEQ ID NO: 2972015 - DNA, 25 bp, Homo sapien
ctttgtctcgtagtcatcaggaaaa

SEQ ID NO: 2972016 - DNA, 25 bp, Homo sapien
ggacacctttgtctcgtagtcatca

SEQ ID NO: 2972017 - DNA, 25 bp, Homo sapien
cacctttgtctcgtagtcatcagga

SEQ ID NO: 2972018 - DNA, 25 bp, Homo sapien
ggatgctgtgccctagtgtccaagc

SEQ ID NO: 2972019 - DNA, 25 bp, Homo sapien
gcttggctcagtccactgggcttct

SEQ ID NO: 2972020 - DNA, 25 bp, Homo sapien
ggcttcttccagctcacaaacctgt

SEQ ID NO: 2972021 - DNA, 25 bp, Homo sapien
gtgaaccagatgtgggcacctcgct

SEQ ID NO: 2972022 - DNA, 25 bp, Homo sapien
cccttgggagctggccaggcccagt

SEQ ID NO: 2972023 - DNA, 25 bp, Homo sapien
aagcccttgggagctggccaggccc

SEQ ID NO: 2972024 - DNA, 25 bp, Homo sapien
cgcgtcccctctgcaagcccttggg

SEQ ID NO: 2972025 - DNA, 25 bp, Homo sapien
gcaagcccttgggagctggccaggc

SEQ ID NO: 2972026 - DNA, 25 bp, Homo sapien
ggagcgcaaactgattgcatctggc

SEQ ID NO: 2972027 - DNA, 25 bp, Homo sapien
gaggagcgcaaactgattgcatctg

SEQ ID NO: 2972028 - DNA, 25 bp, Homo sapien
gctggaggagcgcaaactgattgca

SEQ ID NO: 2972029 - DNA, 25 bp, Homo sapien
tggaggagcgcaaactgattgcatc

SEQ ID NO: 2972030 - DNA, 25 bp, Homo sapien
gacagaaagtggaagttactggtta

SEQ ID NO: 2972031 - DNA, 25 bp, Homo sapien
ccagagctttgaggtcctgtgttcc

SEQ ID NO: 2972032 - DNA, 25 bp, Homo sapien
tgttcctcgcagtgaatacagtgag

SEQ ID NO: 2972033 - DNA, 25 bp, Homo sapien
gatgcctctgcgtcttatgagtggg

SEQ ID NO: 2972034 - DNA, 25 bp, Homo sapien
gtgaggcgtcccgtttctctgaaga

SEQ ID NO: 2972035 - DNA, 25 bp, Homo sapien
ctgagcttctgggtgacgaagacat

SEQ ID NO: 2972036 - DNA, 25 bp, Homo sapien
gcctctgtgggtgatgacattgtcc

SEQ ID NO: 2972037 - DNA, 25 bp, Homo sapien
atgcctctgtgggtgatgacattgt

SEQ ID NO: 2972038 - DNA, 25 bp, Homo sapien
tgggtgacgaagacatgcctctcac

SEQ ID NO: 2972039 - DNA, 25 bp, Homo sapien
tctgctgtagtgatcatacttgccc

SEQ ID NO: 2972040 - DNA, 25 bp, Homo sapien
tacttgcccttctcataggaaacca

SEQ ID NO: 2972041 - DNA, 25 bp, Homo sapien
taggccttgttctttgctccagagg

SEQ ID NO: 2972042 - DNA, 25 bp, Homo sapien
gatctgtcattctctttaggaactg

SEQ ID NO: 2972043 - DNA, 25 bp, Homo sapien
cccaaactctggatccgagctctgc

SEQ ID NO: 2972044 - DNA, 25 bp, Homo sapien
tggatccgagctctgccgccgccgg

SEQ ID NO: 2972045 - DNA, 25 bp, Homo sapien
gccgccgccggaggaaaggcttcta

SEQ ID NO: 2972046 - DNA, 25 bp, Homo sapien
tgccgccgccggaggaaaggcttct

SEQ ID NO: 2972047 - DNA, 25 bp, Homo sapien
ttatatttctcgtttggccaggagt

SEQ ID NO: 2972048 - DNA, 25 bp, Homo sapien
acaatgggacatgtttggctcctca

SEQ ID NO: 2972049 - DNA, 25 bp, Homo sapien
tctcgtttggccaggagttcagttt

SEQ ID NO: 2972050 - DNA, 25 bp, Homo sapien
tgggtggtaacaatgggacatgttt

SEQ ID NO: 2972051 - DNA, 25 bp, Homo sapien
taaacctggacatcctagatttttg

SEQ ID NO: 2972052 - DNA, 25 bp, Homo sapien
gggaagtaaacctggacatcctaga

SEQ ID NO: 2972053 - DNA, 25 bp, Homo sapien
gtgatggggaagtaaacctggacat

SEQ ID NO: 2972054 - DNA, 25 bp, Homo sapien
tggacatcctagatttttgctttaa

SEQ ID NO: 2972055 - DNA, 25 bp, Homo sapien
tcctctccccaactcgagtcccttc

SEQ ID NO: 2972056 - DNA, 25 bp, Homo sapien
ttcttggatactgaatccaaaagtc

SEQ ID NO: 2972057 - DNA, 25 bp, Homo sapien
ccttcttggatactgaatccaaaag

SEQ ID NO: 2972058 - DNA, 25 bp, Homo sapien
cccttcttggatactgaatccaaaa

SEQ ID NO: 2972059 - DNA, 25 bp, Homo sapien
gaatgtacccagttctgtttcgttg

SEQ ID NO: 2972060 - DNA, 25 bp, Homo sapien
cccagttctgtttcgttgatgaggg

SEQ ID NO: 2972061 - DNA, 25 bp, Homo sapien
ctgggaatgtacccagttctgtttc

SEQ ID NO: 2972062 - DNA, 25 bp, Homo sapien
tgtacccagttctgtttcgttgatg

SEQ ID NO: 2972063 - DNA, 25 bp, Homo sapien
catgtagctgaggcataaatttgtt

SEQ ID NO: 2972064 - DNA, 25 bp, Homo sapien
aaggctacactttccaagttcagga

SEQ ID NO: 2972065 - DNA, 25 bp, Homo sapien
agatgatctcaataagccctcgcac

SEQ ID NO: 2972066 - DNA, 25 bp, Homo sapien
tggagatgatctcaataagccctcg

SEQ ID NO: 2972067 - DNA, 25 bp, Homo sapien
cattggagatgatctcaataagccc

SEQ ID NO: 2972068 - DNA, 25 bp, Homo sapien
ctgcattggagatgatctcaataag

SEQ ID NO: 2972069 - DNA, 25 bp, Homo sapien
gtgctggatggggatattctcgtac

SEQ ID NO: 2972070 - DNA, 25 bp, Homo sapien
tggtgctggatggggatattctcgt

SEQ ID NO: 2972071 - DNA, 25 bp, Homo sapien
ggtgctggatggggatattctcgta

SEQ ID NO: 2972072 - DNA, 25 bp, Homo sapien
ttgaacttagggttattcagcttgt

SEQ ID NO: 2972073 - DNA, 25 bp, Homo sapien
tatctgactgcaactcagcactcag

SEQ ID NO: 2972074 - DNA, 25 bp, Homo sapien
tttcctccgtatctgactgcaactc

SEQ ID NO: 2972075 - DNA, 25 bp, Homo sapien
gtgcggatcattgaacttagggtta

SEQ ID NO: 2972076 - DNA, 25 bp, Homo sapien
caggtatgagtccttggaccacatg

SEQ ID NO: 2972077 - DNA, 25 bp, Homo sapien
aggtatgagtccttggaccacatgg

SEQ ID NO: 2972078 - DNA, 25 bp, Homo sapien
cagctgaagaattgtgttccgttct

SEQ ID NO: 2972079 - DNA, 25 bp, Homo sapien
gtcagtcagctgaagaattgtgttc

SEQ ID NO: 2972080 - DNA, 25 bp, Homo sapien
cagtcagctgaagaattgtgttccg

SEQ ID NO: 2972081 - DNA, 25 bp, Homo sapien
gtcagctgaagaattgtgttccgtt

SEQ ID NO: 2972082 - DNA, 25 bp, Homo sapien
taagatagttcgatattagggtagc

SEQ ID NO: 2972083 - DNA, 25 bp, Homo sapien
tggcccgccactgcggatgctgtcc

SEQ ID NO: 2972084 - DNA, 25 bp, Homo sapien
ctgcggatgctgtccttatccacca

SEQ ID NO: 2972085 - DNA, 25 bp, Homo sapien
gcggatgctgtccttatccaccacc

SEQ ID NO: 2972086 - DNA, 25 bp, Homo sapien
ggatgctgtccttatccaccacctc

SEQ ID NO: 2972087 - DNA, 25 bp, Homo sapien
ctgcgggaagagaggcgcaatgaca

SEQ ID NO: 2972088 - DNA, 25 bp, Homo sapien
gagaggcgcaatgacagggcctgtg

SEQ ID NO: 2972089 - DNA, 25 bp, Homo sapien
tgatggagatgaggctattggactt

SEQ ID NO: 2972090 - DNA, 25 bp, Homo sapien
ttgatggagatgaggctattggact

SEQ ID NO: 2972091 - DNA, 25 bp, Homo sapien
tttgtactcctggtcacatcccatg

SEQ ID NO: 2972092 - DNA, 25 bp, Homo sapien
ttgtactcctggtcacatcccatgt

SEQ ID NO: 2972093 - DNA, 25 bp, Homo sapien
tgtactcctggtcacatcccatgta

SEQ ID NO: 2972094 - DNA, 25 bp, Homo sapien
gtactcctggtcacatcccatgtaa

SEQ ID NO: 2972095 - DNA, 25 bp, Homo sapien
caccaggatccctacaatatacaca

SEQ ID NO: 2972096 - DNA, 25 bp, Homo sapien
actggatccagagtgtgaacaaggg

SEQ ID NO: 2972097 - DNA, 25 bp, Homo sapien
caaaaggaactaccagtaacatgcc

SEQ ID NO: 2972098 - DNA, 25 bp, Homo sapien
gacgtggtccccataaccaccagga

SEQ ID NO: 2972099 - DNA, 25 bp, Homo sapien
tcattaagcttaactgagaagtatt

SEQ ID NO: 2972100 - DNA, 25 bp, Homo sapien
cattaagcttaactgagaagtattt

SEQ ID NO: 2972101 - DNA, 25 bp, Homo sapien
cttcattaagcttaactgagaagta

SEQ ID NO: 2972102 - DNA, 25 bp, Homo sapien
attaagcttaactgagaagtatttc

SEQ ID NO: 2972103 - DNA, 25 bp, Homo sapien
agatgtgtagcaaactcagagaatt

SEQ ID NO: 2972104 - DNA, 25 bp, Homo sapien
cagatgtgtagcaaactcagagaat

SEQ ID NO: 2972105 - DNA, 25 bp, Homo sapien
gaagggaagtatcgcgtctaccaca

SEQ ID NO: 2972106 - DNA, 25 bp, Homo sapien
tgagactgactatcacccaattaga

SEQ ID NO: 2972107 - DNA, 25 bp, Homo sapien
ggagaaatttcacggttgagcaccg

SEQ ID NO: 2972108 - DNA, 25 bp, Homo sapien
gaaggcatcttgcacataagttctg

SEQ ID NO: 2972109 - DNA, 25 bp, Homo sapien
agacaggtgagacaccaagcatgag

SEQ ID NO: 2972110 - DNA, 25 bp, Homo sapien
caactgctgagcagtagcagagaaa

SEQ ID NO: 2972111 - DNA, 25 bp, Homo sapien
gcgagttgttgatctacagccagtg

SEQ ID NO: 2972112 - DNA, 25 bp, Homo sapien
ctcccaaggcggtggagtgagaaga

SEQ ID NO: 2972113 - DNA, 25 bp, Homo sapien
tgtcatctatgacctaagccatcgt

SEQ ID NO: 2972114 - DNA, 25 bp, Homo sapien
tttaacaatacttgctccttgctgg

SEQ ID NO: 2972115 - DNA, 25 bp, Homo sapien
ttggttcaggatcccatgcaaggtc

SEQ ID NO: 2972116 - DNA, 25 bp, Homo sapien
tccttgctggctgctctactaggaa

SEQ ID NO: 2972117 - DNA, 25 bp, Homo sapien
tccacctcagacatagcctctcacc

SEQ ID NO: 2972118 - DNA, 25 bp, Homo sapien
tcaggcagtagtagcaggtcacagt

SEQ ID NO: 2972119 - DNA, 25 bp, Homo sapien
gagaggaactacttcgtctgtaata

SEQ ID NO: 2972120 - DNA, 25 bp, Homo sapien
tctgaaagggagaggaactacttcg

SEQ ID NO: 2972121 - DNA, 25 bp, Homo sapien
ggattcttttcgcagcaccctcatc

SEQ ID NO: 2972122 - DNA, 25 bp, Homo sapien
tcagcttaggaacatctatttgttg

SEQ ID NO: 2972123 - DNA, 25 bp, Homo sapien
ttttcttcccctgttgcactttcca

SEQ ID NO: 2972124 - DNA, 25 bp, Homo sapien
tattctttagcacatgcctcgatgg

SEQ ID NO: 2972125 - DNA, 25 bp, Homo sapien
agatcgtgaagcaggtacgaccccg

SEQ ID NO: 2972126 - DNA, 25 bp, Homo sapien
actccgctcagcgtcgggcatgacg

SEQ ID NO: 2972127 - DNA, 25 bp, Homo sapien
tgtcggaagacttcggatgagctcc

SEQ ID NO: 2972128 - DNA, 25 bp, Homo sapien
actaccggttcgtgagcgcggctgt

SEQ ID NO: 2972129 - DNA, 25 bp, Homo sapien
caacgcctagcaggggcaaagatac

SEQ ID NO: 2972130 - DNA, 25 bp, Homo sapien
agaggtaagggagttccagaacgag

SEQ ID NO: 2972131 - DNA, 25 bp, Homo sapien
gggagttccagaacgagtgtggcca

SEQ ID NO: 2972132 - DNA, 25 bp, Homo sapien
ggcaacgcctagcaggggcaaagat

SEQ ID NO: 2972133 - DNA, 25 bp, Homo sapien
agagataaggcagaactcccaaggc

SEQ ID NO: 2972134 - DNA, 25 bp, Homo sapien
gagataaggcagaactcccaaggcc

SEQ ID NO: 2972135 - DNA, 25 bp, Homo sapien
gagaatctcctgttccgggatggaa

SEQ ID NO: 2972136 - DNA, 25 bp, Homo sapien
ggatactcaccgtgtcacagctgtg

SEQ ID NO: 2972137 - DNA, 25 bp, Homo sapien
tatgtcacagccatatcgtgggttc

SEQ ID NO: 2972138 - DNA, 25 bp, Homo sapien
cacagcgtgcgtgcatgggttacac

SEQ ID NO: 2972139 - DNA, 25 bp, Homo sapien
gattggccacctattcttgacgata

SEQ ID NO: 2972140 - DNA, 25 bp, Homo sapien
cccagtccaagccatcagggcagat

SEQ ID NO: 2972141 - DNA, 25 bp, Homo sapien
tgcagagctcactggaaagacaatc

SEQ ID NO: 2972142 - DNA, 25 bp, Homo sapien
tgatcttgtggttctactacccacc

SEQ ID NO: 2972143 - DNA, 25 bp, Homo sapien
catggaaagagcaccagcattgggt

SEQ ID NO: 2972144 - DNA, 25 bp, Homo sapien
tgtatagacaaatgccggacagtgg

SEQ ID NO: 2972145 - DNA, 25 bp, Homo sapien
ggagattgtctcgtaggcccagaaa

SEQ ID NO: 2972146 - DNA, 25 bp, Homo sapien
ttgcatcagcggaaaagaaggtccc

SEQ ID NO: 2972147 - DNA, 25 bp, Homo sapien
ccggcctaaagatataatttctatc

SEQ ID NO: 2972148 - DNA, 25 bp, Homo sapien
aagggattcttaactgagtatgtgc

SEQ ID NO: 2972149 - DNA, 25 bp, Homo sapien
ggaagcagttaagcaaagttccagg

SEQ ID NO: 2972150 - DNA, 25 bp, Homo sapien
tgaggaggtccaagaactattctct

SEQ ID NO: 2972151 - DNA, 25 bp, Homo sapien
tacacctgtggatctctagccttga

SEQ ID NO: 2972152 - DNA, 25 bp, Homo sapien
tgaaaatacacctgtggatctctag

SEQ ID NO: 2972153 - DNA, 25 bp, Homo sapien
aaaatacacctgtggatctctagcc

SEQ ID NO: 2972154 - DNA, 25 bp, Homo sapien
acctgtggatctctagccttgaaca

SEQ ID NO: 2972155 - DNA, 25 bp, Homo sapien
gggcaatcctgtcgctaagtaaata

SEQ ID NO: 2972156 - DNA, 25 bp, Homo sapien
ccccgcaagatagcaaggatgactg

SEQ ID NO: 2972157 - DNA, 25 bp, Homo sapien
gaactatggaagaatcaaagcagtg

SEQ ID NO: 2972158 - DNA, 25 bp, Homo sapien
gggatgcgtgttggttataagcaaa

SEQ ID NO: 2972159 - DNA, 25 bp, Homo sapien
aatttaagaactagggtggacacag

SEQ ID NO: 2972160 - DNA, 25 bp, Homo sapien
ctgccttataggacagatgtagata

SEQ ID NO: 2972161 - DNA, 25 bp, Homo sapien
gccttataggacagatgtagatacg

SEQ ID NO: 2972162 - DNA, 25 bp, Homo sapien
cttataggacagatgtagatacggt

SEQ ID NO: 2972163 - DNA, 25 bp, Homo sapien
tataggacagatgtagatacggttt

SEQ ID NO: 2972164 - DNA, 25 bp, Homo sapien
tcattcagagttaaactccctcaat

SEQ ID NO: 2972165 - DNA, 25 bp, Homo sapien
gagttaaactccctcaatttctgaa

SEQ ID NO: 2972166 - DNA, 25 bp, Homo sapien
attttaagctaatgacataattgct

SEQ ID NO: 2972167 - DNA, 25 bp, Homo sapien
gaactactcccttgctgagagtcag

SEQ ID NO: 2972168 - DNA, 25 bp, Homo sapien
taattttgaccagctttaagttagc

SEQ ID NO: 2972169 - DNA, 25 bp, Homo sapien
tgaccagctttaagttagcattttt

SEQ ID NO: 2972170 - DNA, 25 bp, Homo sapien
tttgaccagctttaagttagcattt

SEQ ID NO: 2972171 - DNA, 25 bp, Homo sapien
tcttaaatggcttgtgattttttgt

SEQ ID NO: 2972172 - DNA, 25 bp, Homo sapien
acgttgtagttcagattaattccaa

SEQ ID NO: 2972173 - DNA, 25 bp, Homo sapien
aaaactttgcttctctaaagctcca

SEQ ID NO: 2972174 - DNA, 25 bp, Homo sapien
tgcgcatctgtcgtctcagctacat

SEQ ID NO: 2972175 - DNA, 25 bp, Homo sapien
taattttataacgttgtagttcaga

SEQ ID NO: 2972176 - DNA, 25 bp, Homo sapien
agggagagtgaatcttcactcctct

SEQ ID NO: 2972177 - DNA, 25 bp, Homo sapien
tcagattctctagattttgcccctg

SEQ ID NO: 2972178 - DNA, 25 bp, Homo sapien
tttcagattctctagattttgcccc

SEQ ID NO: 2972179 - DNA, 25 bp, Homo sapien
agattctctagattttgcccctgaa

SEQ ID NO: 2972180 - DNA, 25 bp, Homo sapien
cagattctctagattttgcccctga

SEQ ID NO: 2972181 - DNA, 25 bp, Homo sapien
ttacatagcggtagatgcacaaaag

SEQ ID NO: 2972182 - DNA, 25 bp, Homo sapien
cagttgagggtattgtcatcatgtt

SEQ ID NO: 2972183 - DNA, 25 bp, Homo sapien
tgttttggtatgtactggaatcctg

SEQ ID NO: 2972184 - DNA, 25 bp, Homo sapien
catcatgttttggtatgtactggaa

SEQ ID NO: 2972185 - DNA, 25 bp, Homo sapien
ataaacatatgctaggcgcggtggc

SEQ ID NO: 2972186 - DNA, 25 bp, Homo sapien
tcattatttcaatgtatatagacaa

SEQ ID NO: 2972187 - DNA, 25 bp, Homo sapien
aaataaacatatgctaggcgcggtg

SEQ ID NO: 2972188 - DNA, 25 bp, Homo sapien
caagccacgatgagttctaaattaa

SEQ ID NO: 2972189 - DNA, 25 bp, Homo sapien
gcctcttaaagtgttcatattacag

SEQ ID NO: 2972190 - DNA, 25 bp, Homo sapien
agggtcttcctatgctgcttaggct

SEQ ID NO: 2972191 - DNA, 25 bp, Homo sapien
acagggtcttcctatgctgcttagg

SEQ ID NO: 2972192 - DNA, 25 bp, Homo sapien
tggcctcttaaagtgttcatattac

SEQ ID NO: 2972193 - DNA, 25 bp, Homo sapien
tgccagtgaccccgcataatttctt

SEQ ID NO: 2972194 - DNA, 25 bp, Homo sapien
agtgaccccgcataatttcttgatg

SEQ ID NO: 2972195 - DNA, 25 bp, Homo sapien
tgtgccagtgaccccgcataatttc

SEQ ID NO: 2972196 - DNA, 25 bp, Homo sapien
ccagtgaccccgcataatttcttga

SEQ ID NO: 2972197 - DNA, 25 bp, Homo sapien
tatcatttcagtgggaacttaactt

SEQ ID NO: 2972198 - DNA, 25 bp, Homo sapien
aagtatcatttcagtgggaacttaa

SEQ ID NO: 2972199 - DNA, 25 bp, Homo sapien
tcatttcagtgggaacttaacttgg

SEQ ID NO: 2972200 - DNA, 25 bp, Homo sapien
catttcagtgggaacttaacttggg

SEQ ID NO: 2972201 - DNA, 25 bp, Homo sapien
aaccgaggattgtgttactacagtt

SEQ ID NO: 2972202 - DNA, 25 bp, Homo sapien
tttggagagcagaaccgaggattgt

SEQ ID NO: 2972203 - DNA, 25 bp, Homo sapien
caactcaagggttggataacattgc

SEQ ID NO: 2972204 - DNA, 25 bp, Homo sapien
ttactacagttgtggacacaggaga

SEQ ID NO: 2972205 - DNA, 25 bp, Homo sapien
cagacccagtgaagagattgtagat

SEQ ID NO: 2972206 - DNA, 25 bp, Homo sapien
cacggtttaatataagtatgtggag

SEQ ID NO: 2972207 - DNA, 25 bp, Homo sapien
tatgtggagataaaaactcaaaggt

SEQ ID NO: 2972208 - DNA, 25 bp, Homo sapien
tagatgtcagatgggaagaagaact

SEQ ID NO: 2972209 - DNA, 25 bp, Homo sapien
acagaaggatcacttcaagccagga

SEQ ID NO: 2972210 - DNA, 25 bp, Homo sapien
agacagaaggatcacttcaagccag

SEQ ID NO: 2972211 - DNA, 25 bp, Homo sapien
ggccaagacagaaggatcacttcaa

SEQ ID NO: 2972212 - DNA, 25 bp, Homo sapien
caagacagaaggatcacttcaagcc

SEQ ID NO: 2972213 - DNA, 25 bp, Homo sapien
catttctggcactgacatattggcc

SEQ ID NO: 2972214 - DNA, 25 bp, Homo sapien
taagaggtggccctgattgctctca

SEQ ID NO: 2972215 - DNA, 25 bp, Homo sapien
tgtttaacgagtccctgaacagagt

SEQ ID NO: 2972216 - DNA, 25 bp, Homo sapien
aatgtcatagcctgtgcccaaagga

SEQ ID NO: 2972217 - DNA, 25 bp, Homo sapien
tagccttcagttatcccaacaaaat

SEQ ID NO: 2972218 - DNA, 25 bp, Homo sapien
aatatgtatctcttatagccttcag

SEQ ID NO: 2972219 - DNA, 25 bp, Homo sapien
tgaacgcgcccaatctcgtctaaaa

SEQ ID NO: 2972220 - DNA, 25 bp, Homo sapien
caatctcgtctaaaatagtccttca

SEQ ID NO: 2972221 - DNA, 25 bp, Homo sapien
cagagccttgggttactgcttgacc

SEQ ID NO: 2972222 - DNA, 25 bp, Homo sapien
gagaggagagggcattcatattaga

SEQ ID NO: 2972223 - DNA, 25 bp, Homo sapien
cactgttatctagtttaagggtcct

SEQ ID NO: 2972224 - DNA, 25 bp, Homo sapien
tcatcgctgatgcagtaatgaagga

SEQ ID NO: 2972225 - DNA, 25 bp, Homo sapien
gaagtctgcaatgattgttatgggt

SEQ ID NO: 2972226 - DNA, 25 bp, Homo sapien
tgtatatggcctgaaacattgtttg

SEQ ID NO: 2972227 - DNA, 25 bp, Homo sapien
tgtaataggaaagatgtgttctgct

SEQ ID NO: 2972228 - DNA, 25 bp, Homo sapien
tggttgatcgtgttaaggtcttccc

SEQ ID NO: 2972229 - DNA, 25 bp, Homo sapien
tgaggtggcgcccaagacgcggctg

SEQ ID NO: 2972230 - DNA, 25 bp, Homo sapien
ctgaggtggcgcccaagacgcggct

SEQ ID NO: 2972231 - DNA, 25 bp, Homo sapien
aggctgaggtggcgcccaagacgcg

SEQ ID NO: 2972232 - DNA, 25 bp, Homo sapien
aggtggcgcccaagacgcggctgag

SEQ ID NO: 2972233 - DNA, 25 bp, Homo sapien
ctccgcctcggttccaacatgaggg

SEQ ID NO: 2972234 - DNA, 25 bp, Homo sapien
cgccgcccacgtccggacccatccg

SEQ ID NO: 2972235 - DNA, 25 bp, Homo sapien
ctcggttccaacatgaggggccggc

SEQ ID NO: 2972236 - DNA, 25 bp, Homo sapien
aggccgaccaagcagcccgcggctc

SEQ ID NO: 2972237 - DNA, 25 bp, Homo sapien
acaagatggcggctgaaggcgatcc

SEQ ID NO: 2972238 - DNA, 25 bp, Homo sapien
tgaggccccagccattcggattgag

SEQ ID NO: 2972239 - DNA, 25 bp, Homo sapien
tgaccgcgctccggtaacggaagaa

SEQ ID NO: 2972240 - DNA, 25 bp, Homo sapien
ttctccctccaaccgcttccgcagg

SEQ ID NO: 2972241 - DNA, 25 bp, Homo sapien
ccgtcccaggctcgtaggctgctca

SEQ ID NO: 2972242 - DNA, 25 bp, Homo sapien
cgtcccaggctcgtaggctgctcag

SEQ ID NO: 2972243 - DNA, 25 bp, Homo sapien
ccccgtcccaggctcgtaggctgct

SEQ ID NO: 2972244 - DNA, 25 bp, Homo sapien
gtcccaggctcgtaggctgctcagc

SEQ ID NO: 2972245 - DNA, 25 bp, Homo sapien
cgctcgggccgccccactccgagac

SEQ ID NO: 2972246 - DNA, 25 bp, Homo sapien
gctcgggccgccccactccgagact

SEQ ID NO: 2972247 - DNA, 25 bp, Homo sapien
ctcgggccgccccactccgagactt

SEQ ID NO: 2972248 - DNA, 25 bp, Homo sapien
gctttgaagtgcaactgacctattt

SEQ ID NO: 2972249 - DNA, 25 bp, Homo sapien
tactagcctttggtatccgggccca

SEQ ID NO: 2972250 - DNA, 25 bp, Homo sapien
cacgtatttgatcttcctggttcct

SEQ ID NO: 2972251 - DNA, 25 bp, Homo sapien
tgtccaaaaggccaaagcgcttctg

SEQ ID NO: 2972252 - DNA, 25 bp, Homo sapien
tcctggcgccatgtgattcacctcc

SEQ ID NO: 2972253 - DNA, 25 bp, Homo sapien
cttgcctgagtctccggagtagcca

SEQ ID NO: 2972254 - DNA, 25 bp, Homo sapien
gcgccatgtgattcacctcccttgg

SEQ ID NO: 2972255 - DNA, 25 bp, Homo sapien
ctggcgccatgtgattcacctccct

SEQ ID NO: 2972256 - DNA, 25 bp, Homo sapien
taaaaaaattcgtccagcacagtgg

SEQ ID NO: 2972257 - DNA, 25 bp, Homo sapien
cttatagtctctcagaaaaataact

SEQ ID NO: 2972258 - DNA, 25 bp, Homo sapien
ttcccaaaacgtttcatcatgatta

SEQ ID NO: 2972259 - DNA, 25 bp, Homo sapien
aaatattcccaaaacgtttcatcat

SEQ ID NO: 2972260 - DNA, 25 bp, Homo sapien
taagtgtgtgattgtggagtgcaca

SEQ ID NO: 2972261 - DNA, 25 bp, Homo sapien
tacactgcctggcaaggcggagctg

SEQ ID NO: 2972262 - DNA, 25 bp, Homo sapien
tctacactgcttggcagggtctaca

SEQ ID NO: 2972263 - DNA, 25 bp, Homo sapien
caaggcggagctgtgtaagtgtgtg

SEQ ID NO: 2972264 - DNA, 25 bp, Homo sapien
tatcagggctatttcttagataggt

SEQ ID NO: 2972265 - DNA, 25 bp, Homo sapien
tatctgatgctctatcacatgtgga

SEQ ID NO: 2972266 - DNA, 25 bp, Homo sapien
cacatcagtttcaacaagtacactg

SEQ ID NO: 2972267 - DNA, 25 bp, Homo sapien
gctatgagtcagctaaacattcctg

SEQ ID NO: 2972268 - DNA, 25 bp, Homo sapien
ttttgagctgcatggtacttaaatc

SEQ ID NO: 2972269 - DNA, 25 bp, Homo sapien
tacagtacaattcctcactgctgcc

SEQ ID NO: 2972270 - DNA, 25 bp, Homo sapien
tacaatcattacagatgtacacatc

SEQ ID NO: 2972271 - DNA, 25 bp, Homo sapien
tttacaatcattacagatgtacaca

SEQ ID NO: 2972272 - DNA, 25 bp, Homo sapien
ttctgcagatacagtacaattcctc

SEQ ID NO: 2972273 - DNA, 25 bp, Homo sapien
taagtaaccagtcagagcaatttgg

SEQ ID NO: 2972274 - DNA, 25 bp, Homo sapien
gtcagagcaatttggcttcctaaat

SEQ ID NO: 2972275 - DNA, 25 bp, Homo sapien
taaataagtaaccagtcagagcaat

SEQ ID NO: 2972276 - DNA, 25 bp, Homo sapien
aaccagtcagagcaatttggcttcc

SEQ ID NO: 2972277 - DNA, 25 bp, Homo sapien
gacattccagtacattaatttagta

SEQ ID NO: 2972278 - DNA, 25 bp, Homo sapien
gaaatggaaatgtgagttcaaaaca

SEQ ID NO: 2972279 - DNA, 25 bp, Homo sapien
tcaagatcgacattccagtacatta

SEQ ID NO: 2972280 - DNA, 25 bp, Homo sapien
agatgggatgatgttacttataata

SEQ ID NO: 2972281 - DNA, 25 bp, Homo sapien
cccatggtaccaattctgacaccga

SEQ ID NO: 2972282 - DNA, 25 bp, Homo sapien
atggtaccaattctgacaccgatca

SEQ ID NO: 2972283 - DNA, 25 bp, Homo sapien
catggtaccaattctgacaccgatc

SEQ ID NO: 2972284 - DNA, 25 bp, Homo sapien
ccatggtaccaattctgacaccgat

SEQ ID NO: 2972285 - DNA, 25 bp, Homo sapien
ggggctctcatctgtaaggaacgga

SEQ ID NO: 2972286 - DNA, 25 bp, Homo sapien
gggctctcatctgtaaggaacggag

SEQ ID NO: 2972287 - DNA, 25 bp, Homo sapien
cactctaagattggaaacttgaaat

SEQ ID NO: 2972288 - DNA, 25 bp, Homo sapien
actctaagattggaaacttgaaatc

SEQ ID NO: 2972289 - DNA, 25 bp, Homo sapien
tcactctaagattggaaacttgaaa

SEQ ID NO: 2972290 - DNA, 25 bp, Homo sapien
ataataactataatctaatcatact

SEQ ID NO: 2972291 - DNA, 25 bp, Homo sapien
aataataactataatctaatcatac

SEQ ID NO: 2972292 - DNA, 25 bp, Homo sapien
taataactataatctaatcatactg

SEQ ID NO: 2972293 - DNA, 25 bp, Homo sapien
gattggtctctaactaagtgactca

SEQ ID NO: 2972294 - DNA, 25 bp, Homo sapien
taacaccataataatctggtgcatc

SEQ ID NO: 2972295 - DNA, 25 bp, Homo sapien
ggccttatcaccctccttggtcaag

SEQ ID NO: 2972296 - DNA, 25 bp, Homo sapien
tatcaccctccttggtcaaggagcc

SEQ ID NO: 2972297 - DNA, 25 bp, Homo sapien
acctaaccaggtggcgaaatctctg

SEQ ID NO: 2972298 - DNA, 25 bp, Homo sapien
tccagagagactatcctcctgccca

SEQ ID NO: 2972299 - DNA, 25 bp, Homo sapien
agctccactgtgtagtcgggggtag

SEQ ID NO: 2972300 - DNA, 25 bp, Homo sapien
ctccactgtgtagtcgggggtagaa

SEQ ID NO: 2972301 - DNA, 25 bp, Homo sapien
gctccactgtgtagtcgggggtaga

SEQ ID NO: 2972302 - DNA, 25 bp, Homo sapien
tccactgtgtagtcgggggtagaaa

SEQ ID NO: 2972303 - DNA, 25 bp, Homo sapien
gttgcctgtgtctagtgtccctgct

SEQ ID NO: 2972304 - DNA, 25 bp, Homo sapien
gcctgtgtctagtgtccctgctgct

SEQ ID NO: 2972305 - DNA, 25 bp, Homo sapien
cacccgtccactcgggccccagaat

SEQ ID NO: 2972306 - DNA, 25 bp, Homo sapien
agcctcctctaggtccacccgtcca

SEQ ID NO: 2972307 - DNA, 25 bp, Homo sapien
tacaaagaagccgatctgctggaag

SEQ ID NO: 2972308 - DNA, 25 bp, Homo sapien
acaaagaagccgatctgctggaagc

SEQ ID NO: 2972309 - DNA, 25 bp, Homo sapien
ctgtgacgagctgggctcgagactt

SEQ ID NO: 2972310 - DNA, 25 bp, Homo sapien
caaactcctctaaacagatgaacag

SEQ ID NO: 2972311 - DNA, 25 bp, Homo sapien
cagcagcaaagaggattgaacaccc

SEQ ID NO: 2972312 - DNA, 25 bp, Homo sapien
cagcttcccttgtttagaggagcca

SEQ ID NO: 2972313 - DNA, 25 bp, Homo sapien
gtcatgtatcatggcaggtgaaccc

SEQ ID NO: 2972314 - DNA, 25 bp, Homo sapien
gatttgctacaaatggccatatgga

SEQ ID NO: 2972315 - DNA, 25 bp, Homo sapien
gctctgatggcagggtatacatgaa

SEQ ID NO: 2972316 - DNA, 25 bp, Homo sapien
gcgtcaattggctccccttgtagaa

SEQ ID NO: 2972317 - DNA, 25 bp, Homo sapien
gaatagaatttggttcatggaaaga

SEQ ID NO: 2972318 - DNA, 25 bp, Homo sapien
gcaggagctaaatcagatataactt

SEQ ID NO: 2972319 - DNA, 25 bp, Homo sapien
agaatagaatttggttcatggaaag

SEQ ID NO: 2972320 - DNA, 25 bp, Homo sapien
gctaaatcagatataactttcttca

SEQ ID NO: 2972321 - DNA, 25 bp, Homo sapien
gataattgccttgcgtgccaccatg

SEQ ID NO: 2972322 - DNA, 25 bp, Homo sapien
gagaattgaggctaccagtcttgtc

SEQ ID NO: 2972323 - DNA, 25 bp, Homo sapien
gaggctaccagtcttgtcacagggt

SEQ ID NO: 2972324 - DNA, 25 bp, Homo sapien
gtcacagggtttatagataattgcc

SEQ ID NO: 2972325 - DNA, 25 bp, Homo sapien
cctgagtcaatggagtctattgagg

SEQ ID NO: 2972326 - DNA, 25 bp, Homo sapien
ttaactgtagtaggcccacgaagag

SEQ ID NO: 2972327 - DNA, 25 bp, Homo sapien
gtctattgaggttcgtgttttctca

SEQ ID NO: 2972328 - DNA, 25 bp, Homo sapien
ggtagttagttctactcctgagtca

SEQ ID NO: 2972329 - DNA, 25 bp, Homo sapien
tccagttctgggttagtgtgagtag

SEQ ID NO: 2972330 - DNA, 25 bp, Homo sapien
tctgccttcggctccagttctgggt

SEQ ID NO: 2972331 - DNA, 25 bp, Homo sapien
tgctgcaggtctgccttcggctcca

SEQ ID NO: 2972332 - DNA, 25 bp, Homo sapien
ttcggctccagttctgggttagtgt

SEQ ID NO: 2972333 - DNA, 25 bp, Homo sapien
ggagaagtctaatagcggggctttc

SEQ ID NO: 2972334 - DNA, 25 bp, Homo sapien
agaagtctaatagcggggctttctt

SEQ ID NO: 2972335 - DNA, 25 bp, Homo sapien
ttcaaaatggagaagtctaatagcg

SEQ ID NO: 2972336 - DNA, 25 bp, Homo sapien
caaaatggagaagtctaatagcggg

SEQ ID NO: 2972337 - DNA, 25 bp, Homo sapien
tgtcgcaaggagaccaaataatgca

SEQ ID NO: 2972338 - DNA, 25 bp, Homo sapien
gagaccaaataatgcataacaaata

SEQ ID NO: 2972339 - DNA, 25 bp, Homo sapien
caaggagaccaaataatgcataaca

SEQ ID NO: 2972340 - DNA, 25 bp, Homo sapien
agtgtcgcaaggagaccaaataatg

SEQ ID NO: 2972341 - DNA, 25 bp, Homo sapien
tagataataaaaaagcagcgctgtc

SEQ ID NO: 2972342 - DNA, 25 bp, Homo sapien
gcaatggccattgtagataataaaa

SEQ ID NO: 2972343 - DNA, 25 bp, Homo sapien
tgtagataataaaaaagcagcgctg

SEQ ID NO: 2972344 - DNA, 25 bp, Homo sapien
ctgcaatggccattgtagataataa

SEQ ID NO: 2972345 - DNA, 25 bp, Homo sapien
taaatcacacgaatgggctctctgt

SEQ ID NO: 2972346 - DNA, 25 bp, Homo sapien
aatcacacgaatgggctctctgttg

SEQ ID NO: 2972347 - DNA, 25 bp, Homo sapien
gtaaatcacacgaatgggctctctg

SEQ ID NO: 2972348 - DNA, 25 bp, Homo sapien
atcacacgaatgggctctctgttga

SEQ ID NO: 2972349 - DNA, 25 bp, Homo sapien
aatgaagatgtagaccccagctgca

SEQ ID NO: 2972350 - DNA, 25 bp, Homo sapien
gaatgaagatgtagaccccagctgc

SEQ ID NO: 2972351 - DNA, 25 bp, Homo sapien
atgaagatgtagaccccagctgcag

SEQ ID NO: 2972352 - DNA, 25 bp, Homo sapien
agaagtccgatatttctgtcattcc

SEQ ID NO: 2972353 - DNA, 25 bp, Homo sapien
tctgaaggtgataaatccatgcgtt

SEQ ID NO: 2972354 - DNA, 25 bp, Homo sapien
ctgaaggtgataaatccatgcgttc

SEQ ID NO: 2972355 - DNA, 25 bp, Homo sapien
ggcacagtcccatcttacacggtct

SEQ ID NO: 2972356 - DNA, 25 bp, Homo sapien
cagctgcgcaggagtagaaggccct

SEQ ID NO: 2972357 - DNA, 25 bp, Homo sapien
taaagtcttcccacgatggctcact

SEQ ID NO: 2972358 - DNA, 25 bp, Homo sapien
ggctccatttgcacgtgaactctgt

SEQ ID NO: 2972359 - DNA, 25 bp, Homo sapien
tgtgaaccaaagagtctttctacat

SEQ ID NO: 2972360 - DNA, 25 bp, Homo sapien
agcgatgttggtagtgctcttcaca

SEQ ID NO: 2972361 - DNA, 25 bp, Homo sapien
tgctactgaatacagccagatttat

SEQ ID NO: 2972362 - DNA, 25 bp, Homo sapien
aaaacaaaagcgatgttggtagtgc

SEQ ID NO: 2972363 - DNA, 25 bp, Homo sapien
aatgatgagtaaagatggagcagcg

SEQ ID NO: 2972364 - DNA, 25 bp, Homo sapien
atgatgagtaaagatggagcagcga

SEQ ID NO: 2972365 - DNA, 25 bp, Homo sapien
tgatgagtaaagatggagcagcgag

SEQ ID NO: 2972366 - DNA, 25 bp, Homo sapien
taaaaatacgttgtaaagtgctgaa

SEQ ID NO: 2972367 - DNA, 25 bp, Homo sapien
cattcatagtaaaaatacgttgtaa

SEQ ID NO: 2972368 - DNA, 25 bp, Homo sapien
gtaaaaatacgttgtaaagtgctga

SEQ ID NO: 2972369 - DNA, 25 bp, Homo sapien
gtacgctacgatcgccctcacttag

SEQ ID NO: 2972370 - DNA, 25 bp, Homo sapien
ccctcacttaggacacatgcaatat

SEQ ID NO: 2972371 - DNA, 25 bp, Homo sapien
cacttaggacacatgcaatataaac

SEQ ID NO: 2972372 - DNA, 25 bp, Homo sapien
gcggctggcccagctgtacgctacg

SEQ ID NO: 2972373 - DNA, 25 bp, Homo sapien
tccatcctcagatgctgaaccggtg

SEQ ID NO: 2972374 - DNA, 25 bp, Homo sapien
gtgggttctcggcacagtgctttca

SEQ ID NO: 2972375 - DNA, 25 bp, Homo sapien
tagtacactactgctgggcagtctg

SEQ ID NO: 2972376 - DNA, 25 bp, Homo sapien
gtcctgtggttatccagctgtttca

SEQ ID NO: 2972377 - DNA, 25 bp, Homo sapien
tgtgagagccacgtgtgccgcgctc

SEQ ID NO: 2972378 - DNA, 25 bp, Homo sapien
tgagagccacgtgtgccgcgctctg

SEQ ID NO: 2972379 - DNA, 25 bp, Homo sapien
ctgtgtgagagccacgtgtgccgcg

SEQ ID NO: 2972380 - DNA, 25 bp, Homo sapien
cacgtgtgccgcgctctgggcacag

SEQ ID NO: 2972381 - DNA, 25 bp, Homo sapien
cccgggcaggaaacgcgtcgctgtc

SEQ ID NO: 2972382 - DNA, 25 bp, Homo sapien
agcagcagtgctaaaatcgaagcag

SEQ ID NO: 2972383 - DNA, 25 bp, Homo sapien
tgcgggaccgctatagccggccctg

SEQ ID NO: 2972384 - DNA, 25 bp, Homo sapien
gctaaaatcgaagcaggcagctgcg

SEQ ID NO: 2972385 - DNA, 25 bp, Homo sapien
gcagcttaaaatacgacctctcagg

SEQ ID NO: 2972386 - DNA, 25 bp, Homo sapien
ggttgtgaacatcagccccattgct

SEQ ID NO: 2972387 - DNA, 25 bp, Homo sapien
tggacaggtggaaaagctcagactt

SEQ ID NO: 2972388 - DNA, 25 bp, Homo sapien
ggagttccgttgcaggtctcagcta

SEQ ID NO: 2972389 - DNA, 25 bp, Homo sapien
gacctccagcccattaagttttaca

SEQ ID NO: 2972390 - DNA, 25 bp, Homo sapien
aaaacttcagcttgccttagagtga

SEQ ID NO: 2972391 - DNA, 25 bp, Homo sapien
ttaaaaacatgcgaagaaatgccct

SEQ ID NO: 2972392 - DNA, 25 bp, Homo sapien
gtgtaaagataagcaggaagctgtg

SEQ ID NO: 2972393 - DNA, 25 bp, Homo sapien
tgcgcacgcgcgtgagggatgtcgc

SEQ ID NO: 2972394 - DNA, 25 bp, Homo sapien
gagtggtgtcgaggcctgttgggtc

SEQ ID NO: 2972395 - DNA, 25 bp, Homo sapien
gtcgcgcggcgcgaaggggcgtggc

SEQ ID NO: 2972396 - DNA, 25 bp, Homo sapien
gggcgtggcgtagtgcgaagagacg

SEQ ID NO: 2972397 - DNA, 25 bp, Homo sapien
gaactgaaggctaagcactgctgac

SEQ ID NO: 2972398 - DNA, 25 bp, Homo sapien
gggagacagaacataagatgaactg

SEQ ID NO: 2972399 - DNA, 25 bp, Homo sapien
taaagtcgatgattcttccgtaatg

SEQ ID NO: 2972400 - DNA, 25 bp, Homo sapien
ctagactgccgctttagacacgctt

SEQ ID NO: 2972401 - DNA, 25 bp, Homo sapien
gttcaggatgggcaataaattattt

SEQ ID NO: 2972402 - DNA, 25 bp, Homo sapien
ttttgtcagtgctttagttcaggat

SEQ ID NO: 2972403 - DNA, 25 bp, Homo sapien
agttgctagttcattacagcttttt

SEQ ID NO: 2972404 - DNA, 25 bp, Homo sapien
tgctagttcattacagctttttact

SEQ ID NO: 2972405 - DNA, 25 bp, Homo sapien
cactcttgtagcattcaggtcttac

SEQ ID NO: 2972406 - DNA, 25 bp, Homo sapien
tctgtacttgaacgtgtagttagca

SEQ ID NO: 2972407 - DNA, 25 bp, Homo sapien
tcaaatgcgagagcttatatgaaca

SEQ ID NO: 2972408 - DNA, 25 bp, Homo sapien
cactgaacgtcatatactacttggt

SEQ ID NO: 2972409 - DNA, 25 bp, Homo sapien
gtgtgggtgtgtccgcatgtcccaa

SEQ ID NO: 2972410 - DNA, 25 bp, Homo sapien
ttcagtctagtaaacatgaggaggg

SEQ ID NO: 2972411 - DNA, 25 bp, Homo sapien
gatacagggtggcttttcagtctag

SEQ ID NO: 2972412 - DNA, 25 bp, Homo sapien
taggctggtaggtgattaacaacat

SEQ ID NO: 2972413 - DNA, 25 bp, Homo sapien
agaaggtcctctggttagtctctca

SEQ ID NO: 2972414 - DNA, 25 bp, Homo sapien
gcctgtaaagcccaaacatttgtaa

SEQ ID NO: 2972415 - DNA, 25 bp, Homo sapien
gaatccgtgaaatcatgcctgtaaa

SEQ ID NO: 2972416 - DNA, 25 bp, Homo sapien
tctgtgtatgtcatgagaaggctaa

SEQ ID NO: 2972417 - DNA, 25 bp, Homo sapien
ggagaaattagcatgtcagtgttcc

SEQ ID NO: 2972418 - DNA, 25 bp, Homo sapien
tatttagagggatacagtgactaag

SEQ ID NO: 2972419 - DNA, 25 bp, Homo sapien
gtccaattctgtgatactcactttt

SEQ ID NO: 2972420 - DNA, 25 bp, Homo sapien
gactcatgccataggaggtgctgat

SEQ ID NO: 2972421 - DNA, 25 bp, Homo sapien
tggagtagttaatagccctgcttgg

SEQ ID NO: 2972422 - DNA, 25 bp, Homo sapien
tattattctcttcgaactaccagga

SEQ ID NO: 2972423 - DNA, 25 bp, Homo sapien
catctggagatctagtcttggagta

SEQ ID NO: 2972424 - DNA, 25 bp, Homo sapien
tacttacatggagtaggagcttccc

SEQ ID NO: 2972425 - DNA, 25 bp, Homo sapien
tttttatgtatctacacagcaaagg

SEQ ID NO: 2972426 - DNA, 25 bp, Homo sapien
ggaaaatggcttgtcggctataagt

SEQ ID NO: 2972427 - DNA, 25 bp, Homo sapien
tttactcctcctgaactaaacagaa

SEQ ID NO: 2972428 - DNA, 25 bp, Homo sapien
catgaactgaacattttactcctcc

SEQ ID NO: 2972429 - DNA, 25 bp, Homo sapien
cacaccccttccacgtgcacacaca

SEQ ID NO: 2972430 - DNA, 25 bp, Homo sapien
cccacaccccttccacgtgcacaca

SEQ ID NO: 2972431 - DNA, 25 bp, Homo sapien
acacagacgtactctttccctttct

SEQ ID NO: 2972432 - DNA, 25 bp, Homo sapien
ctttgtctctgaggtgctccccaca

SEQ ID NO: 2972433 - DNA, 25 bp, Homo sapien
caatctgttgcgttgatggtagcta

SEQ ID NO: 2972434 - DNA, 25 bp, Homo sapien
gaactgaactttagtgcacttggcc

SEQ ID NO: 2972435 - DNA, 25 bp, Homo sapien
tgttatagccacattagcagagcag

SEQ ID NO: 2972436 - DNA, 25 bp, Homo sapien
tcttgctctgttcccgaggccaatg

SEQ ID NO: 2972437 - DNA, 25 bp, Homo sapien
gtaaccatttagctccatgattggc

SEQ ID NO: 2972438 - DNA, 25 bp, Homo sapien
gaagccgataagatagtgtattcat

SEQ ID NO: 2972439 - DNA, 25 bp, Homo sapien
gaggttactcttcttgaagccgata

SEQ ID NO: 2972440 - DNA, 25 bp, Homo sapien
gagatttactccctcaatctgtgta

SEQ ID NO: 2972441 - DNA, 25 bp, Homo sapien
ccaaagtgtttttgctaatcatggt

SEQ ID NO: 2972442 - DNA, 25 bp, Homo sapien
caaagtgtttttgctaatcatggta

SEQ ID NO: 2972443 - DNA, 25 bp, Homo sapien
aaccaaagtgtttttgctaatcatg

SEQ ID NO: 2972444 - DNA, 25 bp, Homo sapien
aaagtgtttttgctaatcatggtac

SEQ ID NO: 2972445 - DNA, 25 bp, Homo sapien
gaaagctaaaatttgcgtgctccca

SEQ ID NO: 2972446 - DNA, 25 bp, Homo sapien
ccattcctcgttgtgtttgtgtatc

SEQ ID NO: 2972447 - DNA, 25 bp, Homo sapien
tccctggacgggtcatatcctctgt

SEQ ID NO: 2972448 - DNA, 25 bp, Homo sapien
tgtcctggcctgaatctgctgttag

SEQ ID NO: 2972449 - DNA, 25 bp, Homo sapien
tctgtaccgttaagcagtctcccca

SEQ ID NO: 2972450 - DNA, 25 bp, Homo sapien
tagatatgcgacatttggtttatcc

SEQ ID NO: 2972451 - DNA, 25 bp, Homo sapien
cataagtggaaccttataatatggg

SEQ ID NO: 2972452 - DNA, 25 bp, Homo sapien
catgtgaccactttacagtgtagaa

SEQ ID NO: 2972453 - DNA, 25 bp, Homo sapien
agaaattgtatgactacatttggag

SEQ ID NO: 2972454 - DNA, 25 bp, Homo sapien
gatacttaactctgactagaaattg

SEQ ID NO: 2972455 - DNA, 25 bp, Homo sapien
taattttaagactgatacttaactc

SEQ ID NO: 2972456 - DNA, 25 bp, Homo sapien
gtggctagtgtcactaattggaatt

SEQ ID NO: 2972457 - DNA, 25 bp, Homo sapien
tctcacttctgagtttgaagcgcct

SEQ ID NO: 2972458 - DNA, 25 bp, Homo sapien
ggaggagcaatttccccagcggagc

SEQ ID NO: 2972459 - DNA, 25 bp, Homo sapien
tgaagcgcctttaattcgaatcccg

SEQ ID NO: 2972460 - DNA, 25 bp, Homo sapien
atgcatttcccagggaagatgtcgg

SEQ ID NO: 2972461 - DNA, 25 bp, Homo sapien
tcaggggagtggaagattagggaag

SEQ ID NO: 2972462 - DNA, 25 bp, Homo sapien
tccatgggtcagtcgctgagtgccc

SEQ ID NO: 2972463 - DNA, 25 bp, Homo sapien
taacagaaagcgcagtccatgggtc

SEQ ID NO: 2972464 - DNA, 25 bp, Homo sapien
tctgaacaatgcagcgttgggcttg

SEQ ID NO: 2972465 - DNA, 25 bp, Homo sapien
tgagtgcccgcagcctgtctgagtc

SEQ ID NO: 2972466 - DNA, 25 bp, Homo sapien
gaacttggtgcagacgtccagttgg

SEQ ID NO: 2972467 - DNA, 25 bp, Homo sapien
cttggtgcagacgtccagttggcat

SEQ ID NO: 2972468 - DNA, 25 bp, Homo sapien
gaggccatcttattgatactgaact

SEQ ID NO: 2972469 - DNA, 25 bp, Homo sapien
ctgggaggccatcttattgatactg

SEQ ID NO: 2972470 - DNA, 25 bp, Homo sapien
tgtttactattccacaagttccact

SEQ ID NO: 2972471 - DNA, 25 bp, Homo sapien
caggtacgggaccatctgtgttgcg

SEQ ID NO: 2972472 - DNA, 25 bp, Homo sapien
catctccttcactcttcgggtcctc

SEQ ID NO: 2972473 - DNA, 25 bp, Homo sapien
cgtttcacgaaacgtaactgtgaca

SEQ ID NO: 2972474 - DNA, 25 bp, Homo sapien
tagtgttcctgtgactcaagctcag

SEQ ID NO: 2972475 - DNA, 25 bp, Homo sapien
caagaccctccacggcagggacttt

SEQ ID NO: 2972476 - DNA, 25 bp, Homo sapien
aggagccggtgcatccccccaagac

SEQ ID NO: 2972477 - DNA, 25 bp, Homo sapien
ctccttgtgcttccggcaggcgtct

SEQ ID NO: 2972478 - DNA, 25 bp, Homo sapien
gccggccttggtaccggattgtcat

SEQ ID NO: 2972479 - DNA, 25 bp, Homo sapien
ctcctggcgcctggatggattcacg

SEQ ID NO: 2972480 - DNA, 25 bp, Homo sapien
tcagcctgtactgccggccttggta

SEQ ID NO: 2972481 - DNA, 25 bp, Homo sapien
cggattgtcatctcctggcgcctgg

SEQ ID NO: 2972482 - DNA, 25 bp, Homo sapien
gcctgcactgcagtccgtggatctc

SEQ ID NO: 2972483 - DNA, 25 bp, Homo sapien
ctgcagtccgtggatctctgtctca

SEQ ID NO: 2972484 - DNA, 25 bp, Homo sapien
cttatatgactcggatctggggtgg

SEQ ID NO: 2972485 - DNA, 25 bp, Homo sapien
cactgcagtccgtggatctctgtct

SEQ ID NO: 2972486 - DNA, 25 bp, Homo sapien
tttcaacaagtccaggcatcagagg

SEQ ID NO: 2972487 - DNA, 25 bp, Homo sapien
tggtagacatacctacacagggctg

SEQ ID NO: 2972488 - DNA, 25 bp, Homo sapien
agggctgcatcgagcctgggacatc

SEQ ID NO: 2972489 - DNA, 25 bp, Homo sapien
agtcacaggagaagggcccttctga

SEQ ID NO: 2972490 - DNA, 25 bp, Homo sapien
gaagagaactgcagtctgttccacg

SEQ ID NO: 2972491 - DNA, 25 bp, Homo sapien
cctgttatgttgtaagaccctctga

SEQ ID NO: 2972492 - DNA, 25 bp, Homo sapien
tagcctgagccatggcctgtactgc

SEQ ID NO: 2972493 - DNA, 25 bp, Homo sapien
ctctggctttggattttggtcccca

SEQ ID NO: 2972494 - DNA, 25 bp, Homo sapien
tcacaaagaattccaagccccagat

SEQ ID NO: 2972495 - DNA, 25 bp, Homo sapien
gactccaaacaatactgatcaacag

SEQ ID NO: 2972496 - DNA, 25 bp, Homo sapien
gcttgcttcatcagttaattcttcc

SEQ ID NO: 2972497 - DNA, 25 bp, Homo sapien
aaggaatatcaatacagatcccaca

SEQ ID NO: 2972498 - DNA, 25 bp, Homo sapien
cttccttatttgaagttgtatagtg

SEQ ID NO: 2972499 - DNA, 25 bp, Homo sapien
tgtcgagcaaaaggagtaaagtccc

SEQ ID NO: 2972500 - DNA, 25 bp, Homo sapien
tcaacatggctcgtgaggtctcagg

SEQ ID NO: 2972501 - DNA, 25 bp, Homo sapien
catgactaaattacctcatactggc

SEQ ID NO: 2972502 - DNA, 25 bp, Homo sapien
ggagcagctgagtcacgtgtcagca

SEQ ID NO: 2972503 - DNA, 25 bp, Homo sapien
agatggttgatgtggatgacctctg

SEQ ID NO: 2972504 - DNA, 25 bp, Homo sapien
tccagctcctacttttccaaggaaa

SEQ ID NO: 2972505 - DNA, 25 bp, Homo sapien
agctgagtcacgtgtcagcagctga

SEQ ID NO: 2972506 - DNA, 25 bp, Homo sapien
gggtcaggaattttgcagcatcata

SEQ ID NO: 2972507 - DNA, 25 bp, Homo sapien
gaatgtgaccttcagctaactctca

SEQ ID NO: 2972508 - DNA, 25 bp, Homo sapien
tgctggcgcaggttctctcatgaga

SEQ ID NO: 2972509 - DNA, 25 bp, Homo sapien
catcatagctaggtagtgctggcgc

SEQ ID NO: 2972510 - DNA, 25 bp, Homo sapien
gggaggccttgccgggtggacgcga

SEQ ID NO: 2972511 - DNA, 25 bp, Homo sapien
gcgaacccctaatgccgactctggg

SEQ ID NO: 2972512 - DNA, 25 bp, Homo sapien
gcctcctccacggaactcgcgcgcc

SEQ ID NO: 2972513 - DNA, 25 bp, Homo sapien
cacggaactcgcgcgccgcgggatt

SEQ ID NO: 2972514 - DNA, 25 bp, Homo sapien
gatgaaagcaatttccgaggctctg

SEQ ID NO: 2972515 - DNA, 25 bp, Homo sapien
catagagatgcggaaacctccggat

SEQ ID NO: 2972516 - DNA, 25 bp, Homo sapien
tttcctttgcgccagagaccacagg

SEQ ID NO: 2972517 - DNA, 25 bp, Homo sapien
gctcgacgcccagaccatagagatg

SEQ ID NO: 2972518 - DNA, 25 bp, Homo sapien
ttccatctaaggaccgggtcagatt

SEQ ID NO: 2972519 - DNA, 25 bp, Homo sapien
ttcccaattctgtagggtacaattc

SEQ ID NO: 2972520 - DNA, 25 bp, Homo sapien
caattctgtagggtacaattccatc

SEQ ID NO: 2972521 - DNA, 25 bp, Homo sapien
tcagattggaactgttgaagggcat

SEQ ID NO: 2972522 - DNA, 25 bp, Homo sapien
tcctcatgggtcagcccaagttcaa

SEQ ID NO: 2972523 - DNA, 25 bp, Homo sapien
aaagaagctatgttggacctccgga

SEQ ID NO: 2972524 - DNA, 25 bp, Homo sapien
ggcagagtctctatgctcctcatgg

SEQ ID NO: 2972525 - DNA, 25 bp, Homo sapien
tgagcatatcgagccagctgggcag

SEQ ID NO: 2972526 - DNA, 25 bp, Homo sapien
cccccaagttcgaaaggcagcctgg

SEQ ID NO: 2972527 - DNA, 25 bp, Homo sapien
gcctgtactgctggccttggtgtcg

SEQ ID NO: 2972528 - DNA, 25 bp, Homo sapien
cttttggagaaatgccatcctcggc

SEQ ID NO: 2972529 - DNA, 25 bp, Homo sapien
gaaatgccatcctcggcctgtactg

SEQ ID NO: 2972530 - DNA, 25 bp, Homo sapien
gctggccttggtgtcggattgtcat

SEQ ID NO: 2972531 - DNA, 25 bp, Homo sapien
tgctacccggaagatgagcacgagc

SEQ ID NO: 2972532 - DNA, 25 bp, Homo sapien
tctgctacccggaagatgagcacga

SEQ ID NO: 2972533 - DNA, 25 bp, Homo sapien
ctctgctacccggaagatgagcacg

SEQ ID NO: 2972534 - DNA, 25 bp, Homo sapien
ctacccggaagatgagcacgagcat

SEQ ID NO: 2972535 - DNA, 25 bp, Homo sapien
caggaaaaagccgactgacgagaac

SEQ ID NO: 2972536 - DNA, 25 bp, Homo sapien
tgagtgactctaatgcaaccaggac

SEQ ID NO: 2972537 - DNA, 25 bp, Homo sapien
gggacctcaaaatgcaaaggtggac

SEQ ID NO: 2972538 - DNA, 25 bp, Homo sapien
ccaggactaaggtgtgctccacaga

SEQ ID NO: 2972539 - DNA, 25 bp, Homo sapien
gcattcggacccctgtctctgggtt

SEQ ID NO: 2972540 - DNA, 25 bp, Homo sapien
tggttctgcattcggacccctgtct

SEQ ID NO: 2972541 - DNA, 25 bp, Homo sapien
gcatgtccttcacgagcgcttcaat

SEQ ID NO: 2972542 - DNA, 25 bp, Homo sapien
ctgcatgtccttcacgagcgcttca

SEQ ID NO: 2972543 - DNA, 25 bp, Homo sapien
tctattccaggccaagactaaagtg

SEQ ID NO: 2972544 - DNA, 25 bp, Homo sapien
attgggcctgtggggtctattccag

SEQ ID NO: 2972545 - DNA, 25 bp, Homo sapien
ggtctattccaggccaagactaaag

SEQ ID NO: 2972546 - DNA, 25 bp, Homo sapien
gaggtgggccgtattgggcctgtgg

SEQ ID NO: 2972547 - DNA, 25 bp, Homo sapien
cagaaggtacagctcgtaggcacaa

SEQ ID NO: 2972548 - DNA, 25 bp, Homo sapien
catcgtgcagatgccaatggtcaca

SEQ ID NO: 2972549 - DNA, 25 bp, Homo sapien
tggaacgaagcaccgcatcacagat

SEQ ID NO: 2972550 - DNA, 25 bp, Homo sapien
gatagacaaggtgccctggaacgaa

SEQ ID NO: 2972551 - DNA, 25 bp, Homo sapien
caaagccgctggacgatccattgca

SEQ ID NO: 2972552 - DNA, 25 bp, Homo sapien
gacgatccattgcagaacatcactt

SEQ ID NO: 2972553 - DNA, 25 bp, Homo sapien
gatccaaagccgctggacgatccat

SEQ ID NO: 2972554 - DNA, 25 bp, Homo sapien
ccagactggagatccaaagccgctg

SEQ ID NO: 2972555 - DNA, 25 bp, Homo sapien
tgtccccttataggaagaccctcag

SEQ ID NO: 2972556 - DNA, 25 bp, Homo sapien
tctggtacttttacacacgaaggtc

SEQ ID NO: 2972557 - DNA, 25 bp, Homo sapien
cacgaaggtcatgtctgtccaatta

SEQ ID NO: 2972558 - DNA, 25 bp, Homo sapien
agctgtcccggataactgagtgcca

SEQ ID NO: 2972559 - DNA, 25 bp, Homo sapien
gtcttgcagggggtaaatgtagcca

SEQ ID NO: 2972560 - DNA, 25 bp, Homo sapien
aatgtagccatacctgacaataaag

SEQ ID NO: 2972561 - DNA, 25 bp, Homo sapien
ggtaaatgtagccatacctgacaat

SEQ ID NO: 2972562 - DNA, 25 bp, Homo sapien
tgtagccatacctgacaataaagtt

SEQ ID NO: 2972563 - DNA, 25 bp, Homo sapien
gtaatcggtatcttcagctggccac

SEQ ID NO: 2972564 - DNA, 25 bp, Homo sapien
ctggccactgctgggtgggccagaa

SEQ ID NO: 2972565 - DNA, 25 bp, Homo sapien
cgtaatcggtatcttcagctggcca

SEQ ID NO: 2972566 - DNA, 25 bp, Homo sapien
gctgggtgggccagaaatacggtgt

SEQ ID NO: 2972567 - DNA, 25 bp, Homo sapien
tctttttgatatttcgcttggccag

SEQ ID NO: 2972568 - DNA, 25 bp, Homo sapien
ttgatatttcgcttggccagataga

SEQ ID NO: 2972569 - DNA, 25 bp, Homo sapien
ttttgatatttcgcttggccagata

SEQ ID NO: 2972570 - DNA, 25 bp, Homo sapien
gatatttcgcttggccagatagatg

SEQ ID NO: 2972571 - DNA, 25 bp, Homo sapien
ctgtactgctctttggcctgcataa

SEQ ID NO: 2972572 - DNA, 25 bp, Homo sapien
gacaaagtcccacttatagttcatt

SEQ ID NO: 2972573 - DNA, 25 bp, Homo sapien
gctctttggcctgcataatgacaaa

SEQ ID NO: 2972574 - DNA, 25 bp, Homo sapien
tcattttttggttcaagaaattgta

SEQ ID NO: 2972575 - DNA, 25 bp, Homo sapien
gttcaatgccatttctacgattcct

SEQ ID NO: 2972576 - DNA, 25 bp, Homo sapien
tcttcctccacaactgctatccttc

SEQ ID NO: 2972577 - DNA, 25 bp, Homo sapien
ctcctatgcattccccaggttcaat

SEQ ID NO: 2972578 - DNA, 25 bp, Homo sapien
atccttcacctggacccctcctatg

SEQ ID NO: 2972579 - DNA, 25 bp, Homo sapien
gtcactctctgatttaccccacggg

SEQ ID NO: 2972580 - DNA, 25 bp, Homo sapien
accagcctgaggcattgcagtttcc

SEQ ID NO: 2972581 - DNA, 25 bp, Homo sapien
gagcctggtaaatagagtcactctc

SEQ ID NO: 2972582 - DNA, 25 bp, Homo sapien
cacgggtcctttccggctttgctct

SEQ ID NO: 2972583 - DNA, 25 bp, Homo sapien
atcggtgcaccagccagtatgcctt

SEQ ID NO: 2972584 - DNA, 25 bp, Homo sapien
gcatcggtgcaccagccagtatgcc

SEQ ID NO: 2972585 - DNA, 25 bp, Homo sapien
ggtgcaccagccagtatgccttctc

SEQ ID NO: 2972586 - DNA, 25 bp, Homo sapien
agggcatcggtgcaccagccagtat

SEQ ID NO: 2972587 - DNA, 25 bp, Homo sapien
gccaagaggcacttggatgctaacc

SEQ ID NO: 2972588 - DNA, 25 bp, Homo sapien
agcagaccccatccaggcagagaac

SEQ ID NO: 2972589 - DNA, 25 bp, Homo sapien
caacagatgggccatgagcagaccc

SEQ ID NO: 2972590 - DNA, 25 bp, Homo sapien
gatgctaacccaacactgagcagct

SEQ ID NO: 2972591 - DNA, 25 bp, Homo sapien
aacacagacgtattccttctccttc

SEQ ID NO: 2972592 - DNA, 25 bp, Homo sapien
cagctctgtacagcttgtccctctg

SEQ ID NO: 2972593 - DNA, 25 bp, Homo sapien
gggcaagttacaccagctctgtaca

SEQ ID NO: 2972594 - DNA, 25 bp, Homo sapien
aagcaaggagaagctcaacacagac

SEQ ID NO: 2972595 - DNA, 25 bp, Homo sapien
ctgcgtcaggcatctgtaaactggt

SEQ ID NO: 2972596 - DNA, 25 bp, Homo sapien
tctgtaaactggtttccctagagga

SEQ ID NO: 2972597 - DNA, 25 bp, Homo sapien
ggcatctgtaaactggtttccctag

SEQ ID NO: 2972598 - DNA, 25 bp, Homo sapien
tgtaaactggtttccctagaggaga

SEQ ID NO: 2972599 - DNA, 25 bp, Homo sapien
tgagagagggaccacgggtggggcc

SEQ ID NO: 2972600 - DNA, 25 bp, Homo sapien
tgctccagcaatttggattttgagc

SEQ ID NO: 2972601 - DNA, 25 bp, Homo sapien
gtgctccagcaatttggattttgag

SEQ ID NO: 2972602 - DNA, 25 bp, Homo sapien
tgtgctccagcaatttggattttga

SEQ ID NO: 2972603 - DNA, 25 bp, Homo sapien
ctgtgctccagcaatttggattttg

SEQ ID NO: 2972604 - DNA, 25 bp, Homo sapien
caggtgagaaacatcgttttccttc

SEQ ID NO: 2972605 - DNA, 25 bp, Homo sapien
cagatctgtacttggttccatttga

SEQ ID NO: 2972606 - DNA, 25 bp, Homo sapien
tgtttgcatcgtgctcagatctgta

SEQ ID NO: 2972607 - DNA, 25 bp, Homo sapien
ggatgctgaatcacaggtgtccttt

SEQ ID NO: 2972608 - DNA, 25 bp, Homo sapien
ggaggcagcaggcactttctgccct

SEQ ID NO: 2972609 - DNA, 25 bp, Homo sapien
tcagagacatgcaagctcccctcct

SEQ ID NO: 2972610 - DNA, 25 bp, Homo sapien
tggtgcctcatgcaggaagccttca

SEQ ID NO: 2972611 - DNA, 25 bp, Homo sapien
tgtgtggcccgcagataaggaggca

SEQ ID NO: 2972612 - DNA, 25 bp, Homo sapien
caggaaataagggcagccgatgcat

SEQ ID NO: 2972613 - DNA, 25 bp, Homo sapien
ccaggaaataagggcagccgatgca

SEQ ID NO: 2972614 - DNA, 25 bp, Homo sapien
aggaaataagggcagccgatgcatc

SEQ ID NO: 2972615 - DNA, 25 bp, Homo sapien
tgtaaagtctttgacccactatgat

SEQ ID NO: 2972616 - DNA, 25 bp, Homo sapien
tggcacataacagggtgttcagatg

SEQ ID NO: 2972617 - DNA, 25 bp, Homo sapien
atgatcatcaccagagtgctgctga

SEQ ID NO: 2972618 - DNA, 25 bp, Homo sapien
tcattcatcaggtagtgtaaagtct

SEQ ID NO: 2972619 - DNA, 25 bp, Homo sapien
ttggtcactcggtccaggccgtagt

SEQ ID NO: 2972620 - DNA, 25 bp, Homo sapien
tcactcggtccaggccgtagtccag

SEQ ID NO: 2972621 - DNA, 25 bp, Homo sapien
ttcggattggtcactcggtccaggc

SEQ ID NO: 2972622 - DNA, 25 bp, Homo sapien
acttcattcggattggtcactcggt

SEQ ID NO: 2972623 - DNA, 25 bp, Homo sapien
gctgagggtgttgccagcatccaca

SEQ ID NO: 2972624 - DNA, 25 bp, Homo sapien
agggtgttgccagcatccacatccg

SEQ ID NO: 2972625 - DNA, 25 bp, Homo sapien
tgggctgagggtgttgccagcatcc

SEQ ID NO: 2972626 - DNA, 25 bp, Homo sapien
aaaggcaccctctgtcgtacaccca

SEQ ID NO: 2972627 - DNA, 25 bp, Homo sapien
gactcgcagacagtggaaaatgttg

SEQ ID NO: 2972628 - DNA, 25 bp, Homo sapien
gaagtgagacaaaaatccaaagcct

SEQ ID NO: 2972629 - DNA, 25 bp, Homo sapien
tcagggcagattaacccgggaacac

SEQ ID NO: 2972630 - DNA, 25 bp, Homo sapien
gatgcttcatgctcttggcaaccct

SEQ ID NO: 2972631 - DNA, 25 bp, Homo sapien
tatgcttatttcctgagtgacaaga

SEQ ID NO: 2972632 - DNA, 25 bp, Homo sapien
taccaaactccggtgacatgcagtt

SEQ ID NO: 2972633 - DNA, 25 bp, Homo sapien
attgtcttaagcgaactaacgcagg

SEQ ID NO: 2972634 - DNA, 25 bp, Homo sapien
aagaaggattgatagccaggcgcag

SEQ ID NO: 2972635 - DNA, 25 bp, Homo sapien
tcgccagtgtagactgaggttctga

SEQ ID NO: 2972636 - DNA, 25 bp, Homo sapien
gaaattggcatgtaacccctccttc

SEQ ID NO: 2972637 - DNA, 25 bp, Homo sapien
ctgtatactcgccagtgtagactga

SEQ ID NO: 2972638 - DNA, 25 bp, Homo sapien
tatactcgccagtgtagactgaggt

SEQ ID NO: 2972639 - DNA, 25 bp, Homo sapien
cagtgtcataagcacctccaaggtg

SEQ ID NO: 2972640 - DNA, 25 bp, Homo sapien
cgccagtgtcataagcacctccaag

SEQ ID NO: 2972641 - DNA, 25 bp, Homo sapien
tcagccgccagtgtcataagcacct

SEQ ID NO: 2972642 - DNA, 25 bp, Homo sapien
agaccccagcatcaagctttctgcc

SEQ ID NO: 2972643 - DNA, 25 bp, Homo sapien
cactctattctatgtaacccctggg

SEQ ID NO: 2972644 - DNA, 25 bp, Homo sapien
aaaaccgttaggcagatgtcatgaa

SEQ ID NO: 2972645 - DNA, 25 bp, Homo sapien
taactttgctcacctaaaggccaag

SEQ ID NO: 2972646 - DNA, 25 bp, Homo sapien
gaggctagcccgagcaacatgacaa

SEQ ID NO: 2972647 - DNA, 25 bp, Homo sapien
ctcttttttgacagcaacgactgtt

SEQ ID NO: 2972648 - DNA, 25 bp, Homo sapien
cttttttgacagcaacgactgtttg

SEQ ID NO: 2972649 - DNA, 25 bp, Homo sapien
ttttttgacagcaacgactgtttgt

SEQ ID NO: 2972650 - DNA, 25 bp, Homo sapien
ttttgacagcaacgactgtttgttt

SEQ ID NO: 2972651 - DNA, 25 bp, Homo sapien
gacacagaagacttcactgtggacc

SEQ ID NO: 2972652 - DNA, 25 bp, Homo sapien
cctcatcaaggcctgttggtaatac

SEQ ID NO: 2972653 - DNA, 25 bp, Homo sapien
tcatcaaggcctgttggtaatacat

SEQ ID NO: 2972654 - DNA, 25 bp, Homo sapien
agggacacagaagacttcactgtgg

SEQ ID NO: 2972655 - DNA, 25 bp, Homo sapien
ttagcaagatcaacaaatcagggac

SEQ ID NO: 2972656 - DNA, 25 bp, Homo sapien
tagcaagatcaacaaatcagggaca

SEQ ID NO: 2972657 - DNA, 25 bp, Homo sapien
ctttagcaagatcaacaaatcaggg

SEQ ID NO: 2972658 - DNA, 25 bp, Homo sapien
caagatcaacaaatcagggacatac

SEQ ID NO: 2972659 - DNA, 25 bp, Homo sapien
agcccaggacttgtcgagtttgcag

SEQ ID NO: 2972660 - DNA, 25 bp, Homo sapien
aggacttgtcgagtttgcagaagtt

SEQ ID NO: 2972661 - DNA, 25 bp, Homo sapien
gcccaggacttgtcgagtttgcaga

SEQ ID NO: 2972662 - DNA, 25 bp, Homo sapien
ccaggacttgtcgagtttgcagaag

SEQ ID NO: 2972663 - DNA, 25 bp, Homo sapien
catgatggcatcgttggatgagaac

SEQ ID NO: 2972664 - DNA, 25 bp, Homo sapien
aactgggtgtcatcggtgatccagg

SEQ ID NO: 2972665 - DNA, 25 bp, Homo sapien
ggaggcagcctgacatgatggcatc

SEQ ID NO: 2972666 - DNA, 25 bp, Homo sapien
ttggcatttaagtcccagaactggg

SEQ ID NO: 2972667 - DNA, 25 bp, Homo sapien
ttggggtgagggcctttagtctcat

SEQ ID NO: 2972668 - DNA, 25 bp, Homo sapien
gttggggtgagggcctttagtctca

SEQ ID NO: 2972669 - DNA, 25 bp, Homo sapien
gtaaatgcaccagagaggtagcggt

SEQ ID NO: 2972670 - DNA, 25 bp, Homo sapien
aggtagcggttgtgacaggtggtgg

SEQ ID NO: 2972671 - DNA, 25 bp, Homo sapien
tttgtaaatgcaccagagaggtagc

SEQ ID NO: 2972672 - DNA, 25 bp, Homo sapien
atgatttgtaaatgcaccagagagg

SEQ ID NO: 2972673 - DNA, 25 bp, Homo sapien
gctgaagttgaaggcccatcgttcc

SEQ ID NO: 2972674 - DNA, 25 bp, Homo sapien
tcgcatcttggttgggatttccacc

SEQ ID NO: 2972675 - DNA, 25 bp, Homo sapien
gggtctcggatcaattcgctgaagt

SEQ ID NO: 2972676 - DNA, 25 bp, Homo sapien
catcgttccactcgcatcttggttg

SEQ ID NO: 2972677 - DNA, 25 bp, Homo sapien
tctgtgagcaggtgcaattttcccc

SEQ ID NO: 2972678 - DNA, 25 bp, Homo sapien
ggatggatggagccctcagaaatgt

SEQ ID NO: 2972679 - DNA, 25 bp, Homo sapien
gtctatggaaagaacgagtcttggg

SEQ ID NO: 2972680 - DNA, 25 bp, Homo sapien
agcgggggctcctcgggtgacagtg

SEQ ID NO: 2972681 - DNA, 25 bp, Homo sapien
ggactgaactgagcatcacctgagc

SEQ ID NO: 2972682 - DNA, 25 bp, Homo sapien
tatgttcatacagtggtcccaggtg

SEQ ID NO: 2972683 - DNA, 25 bp, Homo sapien
ccagaggtaccacgcatatgttcat

SEQ ID NO: 2972684 - DNA, 25 bp, Homo sapien
ggttctctaacctgcagcgtccaga

SEQ ID NO: 2972685 - DNA, 25 bp, Homo sapien
caagaagcagtgctgatggactgac

SEQ ID NO: 2972686 - DNA, 25 bp, Homo sapien
tgttcaagaagcagtgctgatggac

SEQ ID NO: 2972687 - DNA, 25 bp, Homo sapien
agagaggctgttcaagaagcagtgc

SEQ ID NO: 2972688 - DNA, 25 bp, Homo sapien
ttcaagaagcagtgctgatggactg

SEQ ID NO: 2972689 - DNA, 25 bp, Homo sapien
tttggactgatctccatacttcaga

SEQ ID NO: 2972690 - DNA, 25 bp, Homo sapien
tggactgatctccatacttcagatc

SEQ ID NO: 2972691 - DNA, 25 bp, Homo sapien
atacttcagatcctcgcaggcttcc

SEQ ID NO: 2972692 - DNA, 25 bp, Homo sapien
acttcagatcctcgcaggcttccca

SEQ ID NO: 2972693 - DNA, 25 bp, Homo sapien
gatttacataacataaccagggagc

SEQ ID NO: 2972694 - DNA, 25 bp, Homo sapien
taaatgtgggtttgtgcggcgtcca

SEQ ID NO: 2972695 - DNA, 25 bp, Homo sapien
catctatgttgatccagcgcctcgc

SEQ ID NO: 2972696 - DNA, 25 bp, Homo sapien
gtgcttcagccccttcactgtgatg

SEQ ID NO: 2972697 - DNA, 25 bp, Homo sapien
tgtgcggcgtccagcacatagcggt

SEQ ID NO: 2972698 - DNA, 25 bp, Homo sapien
ttcaatagctttggccagcatgtcc

SEQ ID NO: 2972699 - DNA, 25 bp, Homo sapien
gatcggagattttaaatagcgagca

SEQ ID NO: 2972700 - DNA, 25 bp, Homo sapien
cagcatgtccttatagatcggagat

SEQ ID NO: 2972701 - DNA, 25 bp, Homo sapien
gtggtttcctgaggttcaatagctt

SEQ ID NO: 2972702 - DNA, 25 bp, Homo sapien
tctctgtaaactaagcagcaggcag

SEQ ID NO: 2972703 - DNA, 25 bp, Homo sapien
tctgtaaactaagcagcaggcagcc

SEQ ID NO: 2972704 - DNA, 25 bp, Homo sapien
ttctctgtaaactaagcagcaggca

SEQ ID NO: 2972705 - DNA, 25 bp, Homo sapien
ctctgtaaactaagcagcaggcagc

SEQ ID NO: 2972706 - DNA, 25 bp, Homo sapien
tattttcatcaagcaaatatctcca

SEQ ID NO: 2972707 - DNA, 25 bp, Homo sapien
tccataatagccatttggctgaaag

SEQ ID NO: 2972708 - DNA, 25 bp, Homo sapien
aatatctccataatagccatttggc

SEQ ID NO: 2972709 - DNA, 25 bp, Homo sapien
taatagccatttggctgaaagagac

SEQ ID NO: 2972710 - DNA, 25 bp, Homo sapien
tttgataaaggctctggtccggcca

SEQ ID NO: 2972711 - DNA, 25 bp, Homo sapien
tccttttcataacagggccattatc

SEQ ID NO: 2972712 - DNA, 25 bp, Homo sapien
ccagaagaatagcaccacaaagacc

SEQ ID NO: 2972713 - DNA, 25 bp, Homo sapien
ctcaagaatgaagccaagttggttt

SEQ ID NO: 2972714 - DNA, 25 bp, Homo sapien
ggatgtaaagcctgacactgacatt

SEQ ID NO: 2972715 - DNA, 25 bp, Homo sapien
aggatgtaaagcctgacactgacat

SEQ ID NO: 2972716 - DNA, 25 bp, Homo sapien
gatgtaaagcctgacactgacattg

SEQ ID NO: 2972717 - DNA, 25 bp, Homo sapien
ctttgagggcccacgtaagcttgga

SEQ ID NO: 2972718 - DNA, 25 bp, Homo sapien
cataagccccttgactacataagcc

SEQ ID NO: 2972719 - DNA, 25 bp, Homo sapien
catatttctggactacataagcccc

SEQ ID NO: 2972720 - DNA, 25 bp, Homo sapien
taagagacaaagacctgcaacatac

SEQ ID NO: 2972721 - DNA, 25 bp, Homo sapien
ggtgatgtccacagtgttggctgct

SEQ ID NO: 2972722 - DNA, 25 bp, Homo sapien
gagcgcaggtgacgccgcataaaag

SEQ ID NO: 2972723 - DNA, 25 bp, Homo sapien
gtgacgccgcataaaagggagggtg

SEQ ID NO: 2972724 - DNA, 25 bp, Homo sapien
ctgggtgatgtccacagtgttggct

SEQ ID NO: 2972725 - DNA, 25 bp, Homo sapien
gctctttttggagttggctcctgcg

SEQ ID NO: 2972726 - DNA, 25 bp, Homo sapien
ttttggagttggctcctgcggtcca

SEQ ID NO: 2972727 - DNA, 25 bp, Homo sapien
ctttttggagttggctcctgcggtc

SEQ ID NO: 2972728 - DNA, 25 bp, Homo sapien
tttggagttggctcctgcggtccag

SEQ ID NO: 2972729 - DNA, 25 bp, Homo sapien
ctcgtctacacctacagaagaggga

SEQ ID NO: 2972730 - DNA, 25 bp, Homo sapien
aatgagtgagtattcctgcttggtc

SEQ ID NO: 2972731 - DNA, 25 bp, Homo sapien
tcaatagacgtgctgaatgagtgag

SEQ ID NO: 2972732 - DNA, 25 bp, Homo sapien
gagtgagcctaacttcgagaatgac

SEQ ID NO: 2972733 - DNA, 25 bp, Homo sapien
tagacagatgagtggacccagccaa

SEQ ID NO: 2972734 - DNA, 25 bp, Homo sapien
gatgaccccacatgcatgaacaatg

SEQ ID NO: 2972735 - DNA, 25 bp, Homo sapien
ggccactgcaacactcctagacaga

SEQ ID NO: 2972736 - DNA, 25 bp, Homo sapien
tcagcatgggattctgcctaggcaa

SEQ ID NO: 2972737 - DNA, 25 bp, Homo sapien
ccccgtatgagcctgacacagagca

SEQ ID NO: 2972738 - DNA, 25 bp, Homo sapien
tcctgtgtgtctcaacttgagcagg

SEQ ID NO: 2972739 - DNA, 25 bp, Homo sapien
catcaatacacaaggagtccccgta

SEQ ID NO: 2972740 - DNA, 25 bp, Homo sapien
gcaggcttccatcaatacacaagga

SEQ ID NO: 2972741 - DNA, 25 bp, Homo sapien
tccagcatacgaactgcaagcccat

SEQ ID NO: 2972742 - DNA, 25 bp, Homo sapien
ttcagacatccagcatacgaactgc

SEQ ID NO: 2972743 - DNA, 25 bp, Homo sapien
ttcttaactcgtcttcactcctcag

SEQ ID NO: 2972744 - DNA, 25 bp, Homo sapien
agagaccacagcaaccacttcttaa

SEQ ID NO: 2972745 - DNA, 25 bp, Homo sapien
ttcttgattcggcacggcaggatgg

SEQ ID NO: 2972746 - DNA, 25 bp, Homo sapien
gatgggctatgctacagcaactcca

SEQ ID NO: 2972747 - DNA, 25 bp, Homo sapien
gccagtccttgacatgctcaacttc

SEQ ID NO: 2972748 - DNA, 25 bp, Homo sapien
caggatgggctatgctacagcaact

SEQ ID NO: 2972749 - DNA, 25 bp, Homo sapien
cctaggagctgcatagagctttcca

SEQ ID NO: 2972750 - DNA, 25 bp, Homo sapien
gcaaatgccgcaagggtgtctctct

SEQ ID NO: 2972751 - DNA, 25 bp, Homo sapien
taattgtctctcctgttgaacagca

SEQ ID NO: 2972752 - DNA, 25 bp, Homo sapien
tggtgatcccaagcacttagcagga

SEQ ID NO: 2972753 - DNA, 25 bp, Homo sapien
gtggaaaagagctgatacctggagt

SEQ ID NO: 2972754 - DNA, 25 bp, Homo sapien
gactccagggttggaaagcagagca

SEQ ID NO: 2972755 - DNA, 25 bp, Homo sapien
caaacatgagaatttcctggtggac

SEQ ID NO: 2972756 - DNA, 25 bp, Homo sapien
cagatgcttgcaagccctcagaacc

SEQ ID NO: 2972757 - DNA, 25 bp, Homo sapien
ggccctgtgggacacatagtttaaa

SEQ ID NO: 2972758 - DNA, 25 bp, Homo sapien
atttgggatttcaacgggccctgtg

SEQ ID NO: 2972759 - DNA, 25 bp, Homo sapien
tttaaacattagcaggagaagctgc

SEQ ID NO: 2972760 - DNA, 25 bp, Homo sapien
cacatagtttaaacattagcaggag

SEQ ID NO: 2972761 - DNA, 25 bp, Homo sapien
ggaggaccgcactgcaaaattctca

SEQ ID NO: 2972762 - DNA, 25 bp, Homo sapien
catgggtgaacacatggcatgaccc

SEQ ID NO: 2972763 - DNA, 25 bp, Homo sapien
tgagcagagggccacatttaggtgc

SEQ ID NO: 2972764 - DNA, 25 bp, Homo sapien
cagcatgcagtgtgcaaagtcccct

SEQ ID NO: 2972765 - DNA, 25 bp, Homo sapien
gtgaaggagagcttagcattgtttt

SEQ ID NO: 2972766 - DNA, 25 bp, Homo sapien
cagtgaaggagagcttagcattgtt

SEQ ID NO: 2972767 - DNA, 25 bp, Homo sapien
acagtgaaggagagcttagcattgt

SEQ ID NO: 2972768 - DNA, 25 bp, Homo sapien
agtgaaggagagcttagcattgttt

SEQ ID NO: 2972769 - DNA, 25 bp, Homo sapien
tgcttggagacccagcccctccagc

SEQ ID NO: 2972770 - DNA, 25 bp, Homo sapien
ttggagacccagcccctccagccca

SEQ ID NO: 2972771 - DNA, 25 bp, Homo sapien
gagacccagcccctccagcccatgc

SEQ ID NO: 2972772 - DNA, 25 bp, Homo sapien
ctgcttggagacccagcccctccag

SEQ ID NO: 2972773 - DNA, 25 bp, Homo sapien
gcagatgtcttttccacccgttccc

SEQ ID NO: 2972774 - DNA, 25 bp, Homo sapien
tttcttctgggcaaatgaccattag

SEQ ID NO: 2972775 - DNA, 25 bp, Homo sapien
tcctggacaatctaagcagatgtct

SEQ ID NO: 2972776 - DNA, 25 bp, Homo sapien
cattagctttactggtcctggacaa

SEQ ID NO: 2972777 - DNA, 25 bp, Homo sapien
cactcctcccctagcatcttctctt

SEQ ID NO: 2972778 - DNA, 25 bp, Homo sapien
ccactcctcccctagcatcttctct

SEQ ID NO: 2972779 - DNA, 25 bp, Homo sapien
cagatcacctgcatgggcaggtccc

SEQ ID NO: 2972780 - DNA, 25 bp, Homo sapien
ctttcagatcacctgcatgggcagg

SEQ ID NO: 2972781 - DNA, 25 bp, Homo sapien
ggcctggctttcagatcacctgcat

SEQ ID NO: 2972782 - DNA, 25 bp, Homo sapien
cctggctttcagatcacctgcatgg

SEQ ID NO: 2972783 - DNA, 25 bp, Homo sapien
gctagaaggagacgggggcatgcag

SEQ ID NO: 2972784 - DNA, 25 bp, Homo sapien
gggcatgcaggtcccggtgtacacg

SEQ ID NO: 2972785 - DNA, 25 bp, Homo sapien
aggtcccggtgtacacggtcagatg

SEQ ID NO: 2972786 - DNA, 25 bp, Homo sapien
atgcaggtcccggtgtacacggtca

SEQ ID NO: 2972787 - DNA, 25 bp, Homo sapien
tctcagaaacctgctgaaggacaga

SEQ ID NO: 2972788 - DNA, 25 bp, Homo sapien
tggatttcaatcgtggcagctgctg

SEQ ID NO: 2972789 - DNA, 25 bp, Homo sapien
gcggctgggtgaggcgaaaggcttc

SEQ ID NO: 2972790 - DNA, 25 bp, Homo sapien
tttctgctccaagcccgatgagctc

SEQ ID NO: 2972791 - DNA, 25 bp, Homo sapien
gagtccatcaagcaggtcccgctcc

SEQ ID NO: 2972792 - DNA, 25 bp, Homo sapien
gctccccgtgggcacatccattttg

SEQ ID NO: 2972793 - DNA, 25 bp, Homo sapien
tctgtggcccggtcacccgactctc

SEQ ID NO: 2972794 - DNA, 25 bp, Homo sapien
atcctccgagtccatcaagcaggtc

SEQ ID NO: 2972795 - DNA, 25 bp, Homo sapien
tttgccacaatctaccccatcttgt

SEQ ID NO: 2972796 - DNA, 25 bp, Homo sapien
tcttctggtccacatgcgtttcttc

SEQ ID NO: 2972797 - DNA, 25 bp, Homo sapien
aaatgtcacccaaatgcactttggt

SEQ ID NO: 2972798 - DNA, 25 bp, Homo sapien
caagtgtgtcctgtggcccatacca

SEQ ID NO: 2972799 - DNA, 25 bp, Homo sapien
gtaccaggcgcatagccacagcgct

SEQ ID NO: 2972800 - DNA, 25 bp, Homo sapien
tattagaggtggcatagtgttcccc

SEQ ID NO: 2972801 - DNA, 25 bp, Homo sapien
ccatgttcccatggagtaaccgctg

SEQ ID NO: 2972802 - DNA, 25 bp, Homo sapien
gaagtgcgcttcgtaaagcatagag

SEQ ID NO: 2972803 - DNA, 25 bp, Homo sapien
tgttcatccctatcaggctgttctt

SEQ ID NO: 2972804 - DNA, 25 bp, Homo sapien
ttctttcgttttccatcccagagcc

SEQ ID NO: 2972805 - DNA, 25 bp, Homo sapien
ctgttctttcgttttccatcccaga

SEQ ID NO: 2972806 - DNA, 25 bp, Homo sapien
caccaggtcgcattccaggtcctgt

SEQ ID NO: 2972807 - DNA, 25 bp, Homo sapien
ttgggcacccaagccctgtgatttc

SEQ ID NO: 2972808 - DNA, 25 bp, Homo sapien
cccatccacaacagtttgttgccgg

SEQ ID NO: 2972809 - DNA, 25 bp, Homo sapien
cacaacagtttgttgccgggatcat

SEQ ID NO: 2972810 - DNA, 25 bp, Homo sapien
cttgggcacccaagccctgtgattt

SEQ ID NO: 2972811 - DNA, 25 bp, Homo sapien
gggctttgtgccaaaatggtcagca

SEQ ID NO: 2972812 - DNA, 25 bp, Homo sapien
ggtcagcaaagccaataaagtagcc

SEQ ID NO: 2972813 - DNA, 25 bp, Homo sapien
gtttctactgggctttgtgccaaaa

SEQ ID NO: 2972814 - DNA, 25 bp, Homo sapien
gtcagcaaagccaataaagtagccc

SEQ ID NO: 2972815 - DNA, 25 bp, Homo sapien
cctcaattccgagccctggtcttct

SEQ ID NO: 2972816 - DNA, 25 bp, Homo sapien
ctcaattccgagccctggtcttctc

SEQ ID NO: 2972817 - DNA, 25 bp, Homo sapien
accctcaattccgagccctggtctt

SEQ ID NO: 2972818 - DNA, 25 bp, Homo sapien
caccctcaattccgagccctggtct

SEQ ID NO: 2972819 - DNA, 25 bp, Homo sapien
aaagagaggtcgtggaaggcaccaa

SEQ ID NO: 2972820 - DNA, 25 bp, Homo sapien
caaagagaggtcgtggaaggcacca

SEQ ID NO: 2972821 - DNA, 25 bp, Homo sapien
agagaggtcgtggaaggcaccaaaa

SEQ ID NO: 2972822 - DNA, 25 bp, Homo sapien
aagagaggtcgtggaaggcaccaaa

SEQ ID NO: 2972823 - DNA, 25 bp, Homo sapien
caaagcagtaacatgcctgcaattt

SEQ ID NO: 2972824 - DNA, 25 bp, Homo sapien
gcaaagcagtaacatgcctgcaatt

SEQ ID NO: 2972825 - DNA, 25 bp, Homo sapien
aaagcagtaacatgcctgcaatttc

SEQ ID NO: 2972826 - DNA, 25 bp, Homo sapien
gagcaaagcagtaacatgcctgcaa

SEQ ID NO: 2972827 - DNA, 25 bp, Homo sapien
aggagagagtttaagctccataatc

SEQ ID NO: 2972828 - DNA, 25 bp, Homo sapien
gatttgaattgctttgttctcgttc

SEQ ID NO: 2972829 - DNA, 25 bp, Homo sapien
tcaaaaacttgaacatggcttggag

SEQ ID NO: 2972830 - DNA, 25 bp, Homo sapien
caaattccgtgggatccagttggga

SEQ ID NO: 2972831 - DNA, 25 bp, Homo sapien
atcttttactattaattcagtggtg

SEQ ID NO: 2972832 - DNA, 25 bp, Homo sapien
tcatcttttactattaattcagtgg

SEQ ID NO: 2972833 - DNA, 25 bp, Homo sapien
catcatcttttactattaattcagt

SEQ ID NO: 2972834 - DNA, 25 bp, Homo sapien
catcttttactattaattcagtggt

SEQ ID NO: 2972835 - DNA, 25 bp, Homo sapien
cacccatactgggtatagcgtcagg

SEQ ID NO: 2972836 - DNA, 25 bp, Homo sapien
actgggtatagcgtcaggctgaaca

SEQ ID NO: 2972837 - DNA, 25 bp, Homo sapien
gatggattctttgggttgtgtttta

SEQ ID NO: 2972838 - DNA, 25 bp, Homo sapien
gaactgggcacccatactgggtata

SEQ ID NO: 2972839 - DNA, 25 bp, Homo sapien
agcgccacatggcattagggctcca

SEQ ID NO: 2972840 - DNA, 25 bp, Homo sapien
gtcccggcggcaccagcattccttg

SEQ ID NO: 2972841 - DNA, 25 bp, Homo sapien
tgggagcactgtgcagcccttcgtc

SEQ ID NO: 2972842 - DNA, 25 bp, Homo sapien
tgtgttgcagttgcccaaaagagcc

SEQ ID NO: 2972843 - DNA, 25 bp, Homo sapien
ggccagggaggtgagtacacccaac

SEQ ID NO: 2972844 - DNA, 25 bp, Homo sapien
cagtggacactcgatagcacttggg

SEQ ID NO: 2972845 - DNA, 25 bp, Homo sapien
gccgggcagtcagtggacactcgat

SEQ ID NO: 2972846 - DNA, 25 bp, Homo sapien
cagggaggtgagtacacccaaccac

SEQ ID NO: 2972847 - DNA, 25 bp, Homo sapien
ctcacagttcccttgcagagctctg

SEQ ID NO: 2972848 - DNA, 25 bp, Homo sapien
tgacttcttgatgcctcgggaataa

SEQ ID NO: 2972849 - DNA, 25 bp, Homo sapien
cctcgggaataaaagtacagagtgg

SEQ ID NO: 2972850 - DNA, 25 bp, Homo sapien
aacaggtacaggtttgagctcacag

SEQ ID NO: 2972851 - DNA, 25 bp, Homo sapien
tggcatactggtcctcccgaaatat

SEQ ID NO: 2972852 - DNA, 25 bp, Homo sapien
gatcgcctcccttttgtaccagtgg

SEQ ID NO: 2972853 - DNA, 25 bp, Homo sapien
tctgaagcccggagactctagtggg

SEQ ID NO: 2972854 - DNA, 25 bp, Homo sapien
taccagtgggagctggcgacatttt

SEQ ID NO: 2972855 - DNA, 25 bp, Homo sapien
tcctgtacacctgccatggcttcct

SEQ ID NO: 2972856 - DNA, 25 bp, Homo sapien
ctcctgtacacctgccatggcttcc

SEQ ID NO: 2972857 - DNA, 25 bp, Homo sapien
tctcctgtacacctgccatggcttc

SEQ ID NO: 2972858 - DNA, 25 bp, Homo sapien
cctcttgggagactttctggagcat

SEQ ID NO: 2972859 - DNA, 25 bp, Homo sapien
gcctcttgggagactttctggagca

SEQ ID NO: 2972860 - DNA, 25 bp, Homo sapien
ctctgctacccacacagtgacctgg

SEQ ID NO: 2972861 - DNA, 25 bp, Homo sapien
tctgctacccacacagtgacctggc

SEQ ID NO: 2972862 - DNA, 25 bp, Homo sapien
ctgctacccacacagtgacctggcc

SEQ ID NO: 2972863 - DNA, 25 bp, Homo sapien
gctacccacacagtgacctggccca

SEQ ID NO: 2972864 - DNA, 25 bp, Homo sapien
catgccagttggacttcagagaaga

SEQ ID NO: 2972865 - DNA, 25 bp, Homo sapien
tgaactgtgatggtgccccagcatg

SEQ ID NO: 2972866 - DNA, 25 bp, Homo sapien
tcagcaatatttcccaggagatcaa

SEQ ID NO: 2972867 - DNA, 25 bp, Homo sapien
gagttcaggtccaatctggcagatg

SEQ ID NO: 2972868 - DNA, 25 bp, Homo sapien
cctttctggccactggtgggtggaa

SEQ ID NO: 2972869 - DNA, 25 bp, Homo sapien
tgggtggaaggtgaagggggctcac

SEQ ID NO: 2972870 - DNA, 25 bp, Homo sapien
tcaccctttctggccactggtgggt

SEQ ID NO: 2972871 - DNA, 25 bp, Homo sapien
gtgggtggaaggtgaagggggctca

SEQ ID NO: 2972872 - DNA, 25 bp, Homo sapien
ctgcttgactgttctgtttgtttaa

SEQ ID NO: 2972873 - DNA, 25 bp, Homo sapien
ctgtttgtttaatatggtcatctga

SEQ ID NO: 2972874 - DNA, 25 bp, Homo sapien
ctgaagatatttttacaacagtgta

SEQ ID NO: 2972875 - DNA, 25 bp, Homo sapien
tttttacaacagtgtaactcttcat

SEQ ID NO: 2972876 - DNA, 25 bp, Homo sapien
actgtcccccatagactagaggaag

SEQ ID NO: 2972877 - DNA, 25 bp, Homo sapien
ctgtcccccatagactagaggaaga

SEQ ID NO: 2972878 - DNA, 25 bp, Homo sapien
tgtcccccatagactagaggaagat

SEQ ID NO: 2972879 - DNA, 25 bp, Homo sapien
tctgccccgggactatccctcctct

SEQ ID NO: 2972880 - DNA, 25 bp, Homo sapien
gtctgccccgggactatccctcctc

SEQ ID NO: 2972881 - DNA, 25 bp, Homo sapien
ctgaggggaattaaagaggtcaagg

SEQ ID NO: 2972882 - DNA, 25 bp, Homo sapien
tatataaacgacagccttattgttg

SEQ ID NO: 2972883 - DNA, 25 bp, Homo sapien
agccttattgttggcaatgtatgtg

SEQ ID NO: 2972884 - DNA, 25 bp, Homo sapien
tactttcagtaacatccactatata

SEQ ID NO: 2972885 - DNA, 25 bp, Homo sapien
catccactatataaacgacagcctt

SEQ ID NO: 2972886 - DNA, 25 bp, Homo sapien
ttttgaagacgtgctctggattgag

SEQ ID NO: 2972887 - DNA, 25 bp, Homo sapien
ctccttctacttccagagtgctgac

SEQ ID NO: 2972888 - DNA, 25 bp, Homo sapien
gacgtgctctggattgaggcaaaca

SEQ ID NO: 2972889 - DNA, 25 bp, Homo sapien
gctctggattgaggcaaacaaacct

SEQ ID NO: 2972890 - DNA, 25 bp, Homo sapien
cactgaggagctctcggtctccatg

SEQ ID NO: 2972891 - DNA, 25 bp, Homo sapien
cagcaagctgcaagagcgagaaggt

SEQ ID NO: 2972892 - DNA, 25 bp, Homo sapien
tcccagcaagctgcaagagcgagaa

SEQ ID NO: 2972893 - DNA, 25 bp, Homo sapien
tccatggtgtggaaacaatagagcc

SEQ ID NO: 2972894 - DNA, 25 bp, Homo sapien
ttccttgctgaggagtttttcccca

SEQ ID NO: 2972895 - DNA, 25 bp, Homo sapien
tccttgctgaggagtttttccccac

SEQ ID NO: 2972896 - DNA, 25 bp, Homo sapien
aggttcactggagactgttttcgca

SEQ ID NO: 2972897 - DNA, 25 bp, Homo sapien
gcccagcaagcatagagtgagggct

SEQ ID NO: 2972898 - DNA, 25 bp, Homo sapien
tttgcaccttggcaatgctcgtggc

SEQ ID NO: 2972899 - DNA, 25 bp, Homo sapien
gctcgtggcgctgggtaggttcact

SEQ ID NO: 2972900 - DNA, 25 bp, Homo sapien
gattttcataacctagtgagtgagg

SEQ ID NO: 2972901 - DNA, 25 bp, Homo sapien
cacagtggtgattccatgacaggct

SEQ ID NO: 2972902 - DNA, 25 bp, Homo sapien
tgggcgtgggaaatgacttcatcct

SEQ ID NO: 2972903 - DNA, 25 bp, Homo sapien
gaagggatgatctccaattatgcag

SEQ ID NO: 2972904 - DNA, 25 bp, Homo sapien
tgcatgcttccaactccgtgtccct

SEQ ID NO: 2972905 - DNA, 25 bp, Homo sapien
aggccaaaagctagaaagtgtcctt

SEQ ID NO: 2972906 - DNA, 25 bp, Homo sapien
aacctccaggccaaaagctagaaag

SEQ ID NO: 2972907 - DNA, 25 bp, Homo sapien
tccaggccaaaagctagaaagtgtc

SEQ ID NO: 2972908 - DNA, 25 bp, Homo sapien
ttcctttggtctggtggcacttcca

SEQ ID NO: 2972909 - DNA, 25 bp, Homo sapien
tgctcctgaagatagccctgcaggc

SEQ ID NO: 2972910 - DNA, 25 bp, Homo sapien
tgtgtccctgctcctgaagatagcc

SEQ ID NO: 2972911 - DNA, 25 bp, Homo sapien
aggcctgaagcctagtggcagatat

SEQ ID NO: 2972912 - DNA, 25 bp, Homo sapien
tgaccctggaattagaatgcttgag

SEQ ID NO: 2972913 - DNA, 25 bp, Homo sapien
gctgaccctggaattagaatgcttg

SEQ ID NO: 2972914 - DNA, 25 bp, Homo sapien
ccttggaaaagcaaacgctgtagtg

SEQ ID NO: 2972915 - DNA, 25 bp, Homo sapien
cgctgtagtgtaaaaggatcctctt

SEQ ID NO: 2972916 - DNA, 25 bp, Homo sapien
agtctgtcccactgaatctctaggc

SEQ ID NO: 2972917 - DNA, 25 bp, Homo sapien
gaatgagtcactttagcactatctg

SEQ ID NO: 2972918 - DNA, 25 bp, Homo sapien
ggatgtctactactgaacaggcatg

SEQ ID NO: 2972919 - DNA, 25 bp, Homo sapien
gcactatctgatcttgagttccagg

SEQ ID NO: 2972920 - DNA, 25 bp, Homo sapien
gacaggtccacagaatgatctttat

SEQ ID NO: 2972921 - DNA, 25 bp, Homo sapien
ggtccacagaatgatctttatcttg

SEQ ID NO: 2972922 - DNA, 25 bp, Homo sapien
caggtccacagaatgatctttatct

SEQ ID NO: 2972923 - DNA, 25 bp, Homo sapien
ccacagaatgatctttatcttgact

SEQ ID NO: 2972924 - DNA, 25 bp, Homo sapien
gaagccacgctcttggtgatcgctc

SEQ ID NO: 2972925 - DNA, 25 bp, Homo sapien
tcctccagttcatagtggtgtggaa

SEQ ID NO: 2972926 - DNA, 25 bp, Homo sapien
tagtggtgtggaagccacgctcttg

SEQ ID NO: 2972927 - DNA, 25 bp, Homo sapien
acgctcttggtgatcgctctgcctg

SEQ ID NO: 2972928 - DNA, 25 bp, Homo sapien
ttaaacgtcacagttccctgcccag

SEQ ID NO: 2972929 - DNA, 25 bp, Homo sapien
caaagtgttctccagacattagcca

SEQ ID NO: 2972930 - DNA, 25 bp, Homo sapien
agctgcaatcttccgctgggctctg

SEQ ID NO: 2972931 - DNA, 25 bp, Homo sapien
ggaaccacgcagcaagtgggtgact

SEQ ID NO: 2972932 - DNA, 25 bp, Homo sapien
ggatgcccaccatttctttatacca

SEQ ID NO: 2972933 - DNA, 25 bp, Homo sapien
gtggtcaacttcagtgttcagggat

SEQ ID NO: 2972934 - DNA, 25 bp, Homo sapien
aattgtctgtctttgggatgcgtat

SEQ ID NO: 2972935 - DNA, 25 bp, Homo sapien
tatccccctgctgtatatctaggtg

SEQ ID NO: 2972936 - DNA, 25 bp, Homo sapien
aatattgcaggaacagcatcgacaa

SEQ ID NO: 2972937 - DNA, 25 bp, Homo sapien
ttgcaggaacagcatcgacaaagcc

SEQ ID NO: 2972938 - DNA, 25 bp, Homo sapien
gcaggaacagcatcgacaaagcctt

SEQ ID NO: 2972939 - DNA, 25 bp, Homo sapien
gtggcgggagaaatattgcaggaac

SEQ ID NO: 2972940 - DNA, 25 bp, Homo sapien
aatggtctgaaccaggccccttggt

SEQ ID NO: 2972941 - DNA, 25 bp, Homo sapien
ggaactcgggccctctatgtccatc

SEQ ID NO: 2972942 - DNA, 25 bp, Homo sapien
ggccctctatgtccatcaagtaaga

SEQ ID NO: 2972943 - DNA, 25 bp, Homo sapien
tcaagtaagacaatggtctgaacca

SEQ ID NO: 2972944 - DNA, 25 bp, Homo sapien
ctttgatgtgggcagcttactgtag

SEQ ID NO: 2972945 - DNA, 25 bp, Homo sapien
gaacggaaaagtacagcgtcttctc

SEQ ID NO: 2972946 - DNA, 25 bp, Homo sapien
aaatcttgaggtgggtctgagagct

SEQ ID NO: 2972947 - DNA, 25 bp, Homo sapien
agatgagattcagcccttccaagga

SEQ ID NO: 2972948 - DNA, 25 bp, Homo sapien
gatctgtggccgtgtattaatgtta

SEQ ID NO: 2972949 - DNA, 25 bp, Homo sapien
tctggctgtgggtcaacttccagaa

SEQ ID NO: 2972950 - DNA, 25 bp, Homo sapien
cataacaacatctgggatctgtggc

SEQ ID NO: 2972951 - DNA, 25 bp, Homo sapien
tttccaagtccgtgtaatccaacca

SEQ ID NO: 2972952 - DNA, 25 bp, Homo sapien
aataaaggaccaccctcgcagtggc

SEQ ID NO: 2972953 - DNA, 25 bp, Homo sapien
ttctgacaataaaggaccaccctcg

SEQ ID NO: 2972954 - DNA, 25 bp, Homo sapien
tcgcagtggcgctgcactctagaca

SEQ ID NO: 2972955 - DNA, 25 bp, Homo sapien
tagacaggagtcctcatagaatccc

SEQ ID NO: 2972956 - DNA, 25 bp, Homo sapien
taattgcgcctctcatccacaggtg

SEQ ID NO: 2972957 - DNA, 25 bp, Homo sapien
gactgataacgttaattgcgcctct

SEQ ID NO: 2972958 - DNA, 25 bp, Homo sapien
ccttctgatccttcacgactgataa

SEQ ID NO: 2972959 - DNA, 25 bp, Homo sapien
gatccttcacgactgataacgttaa

SEQ ID NO: 2972960 - DNA, 25 bp, Homo sapien
gcaaacaaatctaggttgacaaaag

SEQ ID NO: 2972961 - DNA, 25 bp, Homo sapien
aacaaatctaggttgacaaaagcag

SEQ ID NO: 2972962 - DNA, 25 bp, Homo sapien
ctgcaaacaaatctaggttgacaaa

SEQ ID NO: 2972963 - DNA, 25 bp, Homo sapien
caaacaaatctaggttgacaaaagc

SEQ ID NO: 2972964 - DNA, 25 bp, Homo sapien
tgcagaccccacgaggcgctgggaa

SEQ ID NO: 2972965 - DNA, 25 bp, Homo sapien
cgctgggaactcgaaggcatggctc

SEQ ID NO: 2972966 - DNA, 25 bp, Homo sapien
aaacaactctgggtccgctgacaga

SEQ ID NO: 2972967 - DNA, 25 bp, Homo sapien
cagaggtgagaaatttgaccggaca

SEQ ID NO: 2972968 - DNA, 25 bp, Homo sapien
aactgccttccctagtcttttgtgg

SEQ ID NO: 2972969 - DNA, 25 bp, Homo sapien
cttccctagtcttttgtggaggaga

SEQ ID NO: 2972970 - DNA, 25 bp, Homo sapien
caccttttggcctgtgggtgaagga

SEQ ID NO: 2972971 - DNA, 25 bp, Homo sapien
gtgaaggaccattaaccaaactgcc

SEQ ID NO: 2972972 - DNA, 25 bp, Homo sapien
cagcttccaaacaaggtgaataccc

SEQ ID NO: 2972973 - DNA, 25 bp, Homo sapien
ttcagcatggtgtcttcgtgtgcca

SEQ ID NO: 2972974 - DNA, 25 bp, Homo sapien
gcagctggtactctgggcagttcca

SEQ ID NO: 2972975 - DNA, 25 bp, Homo sapien
caggcttggaggagtagctctgaat

SEQ ID NO: 2972976 - DNA, 25 bp, Homo sapien
cccctccgcaaatgcaagggaaagg

SEQ ID NO: 2972977 - DNA, 25 bp, Homo sapien
caagggaaaggtctcgataaatgga

SEQ ID NO: 2972978 - DNA, 25 bp, Homo sapien
ggtctcgataaatggaaggcagagc

SEQ ID NO: 2972979 - DNA, 25 bp, Homo sapien
caaatgcaagggaaaggtctcgata

SEQ ID NO: 2972980 - DNA, 25 bp, Homo sapien
tcttcttctttgaaaagtttccagc

SEQ ID NO: 2972981 - DNA, 25 bp, Homo sapien
ctcttcttctttgaaaagtttccag

SEQ ID NO: 2972982 - DNA, 25 bp, Homo sapien
ctatccccagcagacctttcagatt

SEQ ID NO: 2972983 - DNA, 25 bp, Homo sapien
acctatccccagcagacctttcaga

SEQ ID NO: 2972984 - DNA, 25 bp, Homo sapien
atccccagcagacctttcagattct

SEQ ID NO: 2972985 - DNA, 25 bp, Homo sapien
aaacctatccccagcagacctttca

SEQ ID NO: 2972986 - DNA, 25 bp, Homo sapien
ttttagcgtgagtagttcctgaaca

SEQ ID NO: 2972987 - DNA, 25 bp, Homo sapien
agttcctgaacatgtggttgctcta

SEQ ID NO: 2972988 - DNA, 25 bp, Homo sapien
atgtggttgctctatttggaacaca

SEQ ID NO: 2972989 - DNA, 25 bp, Homo sapien
ctgcaagtttttagcgtgagtagtt

SEQ ID NO: 2972990 - DNA, 25 bp, Homo sapien
acaggagccttggttcagactcaaa

SEQ ID NO: 2972991 - DNA, 25 bp, Homo sapien
ggagccttggttcagactcaaaacc

SEQ ID NO: 2972992 - DNA, 25 bp, Homo sapien
aggagccttggttcagactcaaaac

SEQ ID NO: 2972993 - DNA, 25 bp, Homo sapien
caggagccttggttcagactcaaaa

SEQ ID NO: 2972994 - DNA, 25 bp, Homo sapien
ctgaccaactggtaatgagggcttg

SEQ ID NO: 2972995 - DNA, 25 bp, Homo sapien
tgttttcacaataagttgtgtggga

SEQ ID NO: 2972996 - DNA, 25 bp, Homo sapien
taatgagggcttgagacagagcctg

SEQ ID NO: 2972997 - DNA, 25 bp, Homo sapien
cacaataagttgtgtgggatcagct

SEQ ID NO: 2972998 - DNA, 25 bp, Homo sapien
tcagggaatgctcttgcggctcctt

SEQ ID NO: 2972999 - DNA, 25 bp, Homo sapien
gggaatgctcttgcggctccttggt

SEQ ID NO: 2973000 - DNA, 25 bp, Homo sapien
atgctcttgcggctccttggtccat

SEQ ID NO: 2973001 - DNA, 25 bp, Homo sapien
gctcttgcggctccttggtccatct

SEQ ID NO: 2973002 - DNA, 25 bp, Homo sapien
tacgcagagcactcaaggactctct

SEQ ID NO: 2973003 - DNA, 25 bp, Homo sapien
tgccaaaggactggacaaaagatct

SEQ ID NO: 2973004 - DNA, 25 bp, Homo sapien
aaagatctacgcagagcactcaagg

SEQ ID NO: 2973005 - DNA, 25 bp, Homo sapien
tggacaaaagatctacgcagagcac

SEQ ID NO: 2973006 - DNA, 25 bp, Homo sapien
ttgccctccagggtttgtacggagc

SEQ ID NO: 2973007 - DNA, 25 bp, Homo sapien
gctcggaggtcagactgagactctg

SEQ ID NO: 2973008 - DNA, 25 bp, Homo sapien
tacggagctccggtctgggagcctt

SEQ ID NO: 2973009 - DNA, 25 bp, Homo sapien
tccggtctgggagccttgggagtct

SEQ ID NO: 2973010 - DNA, 25 bp, Homo sapien
ggcagcttaggctctcctacatacg

SEQ ID NO: 2973011 - DNA, 25 bp, Homo sapien
tcttccttgtttgcctggggtaatg

SEQ ID NO: 2973012 - DNA, 25 bp, Homo sapien
ggtaatggaggcagcttaggctctc

SEQ ID NO: 2973013 - DNA, 25 bp, Homo sapien
tctcctacatacgccctcagatggg

SEQ ID NO: 2973014 - DNA, 25 bp, Homo sapien
atgttgctgagtggggcattaatgg

SEQ ID NO: 2973015 - DNA, 25 bp, Homo sapien
ttgctgagtggggcattaatgggtt

SEQ ID NO: 2973016 - DNA, 25 bp, Homo sapien
tgttgctgagtggggcattaatggg

SEQ ID NO: 2973017 - DNA, 25 bp, Homo sapien
gttgctgagtggggcattaatgggt

SEQ ID NO: 2973018 - DNA, 25 bp, Homo sapien
gacacccatttcttggcatggctga

SEQ ID NO: 2973019 - DNA, 25 bp, Homo sapien
gctgacacgtcctccagatgacacc

SEQ ID NO: 2973020 - DNA, 25 bp, Homo sapien
tggccacaaggcctttgttgttcat

SEQ ID NO: 2973021 - DNA, 25 bp, Homo sapien
tcaacataaaaggtttgggctgaca

SEQ ID NO: 2973022 - DNA, 25 bp, Homo sapien
cccgatcttcctgtttttcatctct

SEQ ID NO: 2973023 - DNA, 25 bp, Homo sapien
gtgcacaccagcgtcctgttgcctt

SEQ ID NO: 2973024 - DNA, 25 bp, Homo sapien
ctgttgccttaatcccccccgatct

SEQ ID NO: 2973025 - DNA, 25 bp, Homo sapien
cacaccagcgtcctgttgccttaat

SEQ ID NO: 2973026 - DNA, 25 bp, Homo sapien
ccattccattggctagacgggacct

SEQ ID NO: 2973027 - DNA, 25 bp, Homo sapien
cattccattggctagacgggacctg

SEQ ID NO: 2973028 - DNA, 25 bp, Homo sapien
ttccattggctagacgggacctgcg

SEQ ID NO: 2973029 - DNA, 25 bp, Homo sapien
ccattggctagacgggacctgcgtg

SEQ ID NO: 2973030 - DNA, 25 bp, Homo sapien
taccagggtgtccaacactttccga

SEQ ID NO: 2973031 - DNA, 25 bp, Homo sapien
tccctaaccatgcaggtgctgtgcc

SEQ ID NO: 2973032 - DNA, 25 bp, Homo sapien
agctctgatgccttgaacttgtccc

SEQ ID NO: 2973033 - DNA, 25 bp, Homo sapien
gggttcataccagggtgtccaacac

SEQ ID NO: 2973034 - DNA, 25 bp, Homo sapien
gcttatgtggccaaggacctcggca

SEQ ID NO: 2973035 - DNA, 25 bp, Homo sapien
catgaaatgaactcggtggtctgca

SEQ ID NO: 2973036 - DNA, 25 bp, Homo sapien
tcgaacccagtagcctcggagtggt

SEQ ID NO: 2973037 - DNA, 25 bp, Homo sapien
tcaggccggcagcatagagaaaggc

SEQ ID NO: 2973038 - DNA, 25 bp, Homo sapien
tacgtccctccaagtgaagacagac

SEQ ID NO: 2973039 - DNA, 25 bp, Homo sapien
gaaatgaacagttgtagggagaccc

SEQ ID NO: 2973040 - DNA, 25 bp, Homo sapien
cactgccgctgtgctttcgtggaaa

SEQ ID NO: 2973041 - DNA, 25 bp, Homo sapien
cctgaggcctgctagaatcactgcc

SEQ ID NO: 2973042 - DNA, 25 bp, Homo sapien
tatttatagaacagttgatttcccc

SEQ ID NO: 2973043 - DNA, 25 bp, Homo sapien
acttaggagttgagctaggagtgcg

SEQ ID NO: 2973044 - DNA, 25 bp, Homo sapien
tttatagaacagttgatttccccca

SEQ ID NO: 2973045 - DNA, 25 bp, Homo sapien
ggatctgaaatccataaactaagag

SEQ ID NO: 2973046 - DNA, 25 bp, Homo sapien
cataatatatgacttcctagggatc

SEQ ID NO: 2973047 - DNA, 25 bp, Homo sapien
ctaagagaaactgtgtatagcttac

SEQ ID NO: 2973048 - DNA, 25 bp, Homo sapien
agagactgccatacataatatatga

SEQ ID NO: 2973049 - DNA, 25 bp, Homo sapien
cgggcataatagaagggcctttggt

SEQ ID NO: 2973050 - DNA, 25 bp, Homo sapien
ttaatcaacgggcataatagaaggg

SEQ ID NO: 2973051 - DNA, 25 bp, Homo sapien
tcaacgggcataatagaagggcctt

SEQ ID NO: 2973052 - DNA, 25 bp, Homo sapien
taatagaagggcctttggtgtttga

SEQ ID NO: 2973053 - DNA, 25 bp, Homo sapien
taccccttggagtctgcccgctcgt

SEQ ID NO: 2973054 - DNA, 25 bp, Homo sapien
gctcgtctccaggcgaacgagccag

SEQ ID NO: 2973055 - DNA, 25 bp, Homo sapien
cgagccagccggcaccatctgtggg

SEQ ID NO: 2973056 - DNA, 25 bp, Homo sapien
aggcctaccccttggagtctgcccg

SEQ ID NO: 2973057 - DNA, 25 bp, Homo sapien
tcgaaatgcaaaagccactccaagg

SEQ ID NO: 2973058 - DNA, 25 bp, Homo sapien
aggctccggaaaccatgcccagcga

SEQ ID NO: 2973059 - DNA, 25 bp, Homo sapien
tccccaagaccaaggaggagatcga

SEQ ID NO: 2973060 - DNA, 25 bp, Homo sapien
cacgcagcgggtgcactgcttctgc

SEQ ID NO: 2973061 - DNA, 25 bp, Homo sapien
gagggtagctgttcctttccaactc

SEQ ID NO: 2973062 - DNA, 25 bp, Homo sapien
tgtgcctatcaaatgcggaatgaac

SEQ ID NO: 2973063 - DNA, 25 bp, Homo sapien
gctcctgaagccctggagggtagct

SEQ ID NO: 2973064 - DNA, 25 bp, Homo sapien
tacctgctggtgagtctgtgcctat

SEQ ID NO: 2973065 - DNA, 25 bp, Homo sapien
gtggcccaaagactccctggaacca

SEQ ID NO: 2973066 - DNA, 25 bp, Homo sapien
tatggcaatccatacccctctgtct

SEQ ID NO: 2973067 - DNA, 25 bp, Homo sapien
tctgttccagtaataacaccctctg

SEQ ID NO: 2973068 - DNA, 25 bp, Homo sapien
cctggaaccacagtgacagttttac

SEQ ID NO: 2973069 - DNA, 25 bp, Homo sapien
tttccccttgtggcttcaaaatctc

SEQ ID NO: 2973070 - DNA, 25 bp, Homo sapien
ttccccttgtggcttcaaaatctcc

SEQ ID NO: 2973071 - DNA, 25 bp, Homo sapien
gaagggatctcctagcttctgggcc

SEQ ID NO: 2973072 - DNA, 25 bp, Homo sapien
gggcccgtgtatgcgctctgcattc

SEQ ID NO: 2973073 - DNA, 25 bp, Homo sapien
tgaggttctcttggatcggccagag

SEQ ID NO: 2973074 - DNA, 25 bp, Homo sapien
agcccttttagtgccagcacgttgg

SEQ ID NO: 2973075 - DNA, 25 bp, Homo sapien
gactggcctgcaagagtcatcccgg

SEQ ID NO: 2973076 - DNA, 25 bp, Homo sapien
cccaaagccaaatagggtggattca

SEQ ID NO: 2973077 - DNA, 25 bp, Homo sapien
cagagataaaagcaaccagcgagac

SEQ ID NO: 2973078 - DNA, 25 bp, Homo sapien
caaggcatgtgaacgttagcctcac

SEQ ID NO: 2973079 - DNA, 25 bp, Homo sapien
atgaagcttgcaaaggcagccgcca

SEQ ID NO: 2973080 - DNA, 25 bp, Homo sapien
gcatgaagcttgcaaaggcagccgc

SEQ ID NO: 2973081 - DNA, 25 bp, Homo sapien
ctgcatgaagcttgcaaaggcagcc

SEQ ID NO: 2973082 - DNA, 25 bp, Homo sapien
gaagcttgcaaaggcagccgccaac

SEQ ID NO: 2973083 - DNA, 25 bp, Homo sapien
tttattgggctgattgcccagctca

SEQ ID NO: 2973084 - DNA, 25 bp, Homo sapien
tgatttattgggctgattgcccagc

SEQ ID NO: 2973085 - DNA, 25 bp, Homo sapien
tattgggctgattgcccagctcagg

SEQ ID NO: 2973086 - DNA, 25 bp, Homo sapien
gcccttcagtaaatcccaaagccag

SEQ ID NO: 2973087 - DNA, 25 bp, Homo sapien
ccagggagacccaacacttgtatga

SEQ ID NO: 2973088 - DNA, 25 bp, Homo sapien
ggcatcagccctggctagcatcttt

SEQ ID NO: 2973089 - DNA, 25 bp, Homo sapien
gggagacccaacacttgtatgacac

SEQ ID NO: 2973090 - DNA, 25 bp, Homo sapien
gagacccaacacttgtatgacactg

SEQ ID NO: 2973091 - DNA, 25 bp, Homo sapien
ggcagtgactgctgctaaccccaaa

SEQ ID NO: 2973092 - DNA, 25 bp, Homo sapien
agctccaggtaacactccgcccggc

SEQ ID NO: 2973093 - DNA, 25 bp, Homo sapien
gcccccctcatacggatggcagtga

SEQ ID NO: 2973094 - DNA, 25 bp, Homo sapien
gctaaccccaaacttctctgccaaa

SEQ ID NO: 2973095 - DNA, 25 bp, Homo sapien
ttaacatttgtagccgctgacttga

SEQ ID NO: 2973096 - DNA, 25 bp, Homo sapien
aacatttgtagccgctgacttgaga

SEQ ID NO: 2973097 - DNA, 25 bp, Homo sapien
taacatttgtagccgctgacttgag

SEQ ID NO: 2973098 - DNA, 25 bp, Homo sapien
tgctttcaaaggatcgcccagctga

SEQ ID NO: 2973099 - DNA, 25 bp, Homo sapien
tccttggtccagtcatagataaaag

SEQ ID NO: 2973100 - DNA, 25 bp, Homo sapien
agtttaaccccaagcgaagagagtg

SEQ ID NO: 2973101 - DNA, 25 bp, Homo sapien
ggtaataacccatcacagacttgct

SEQ ID NO: 2973102 - DNA, 25 bp, Homo sapien
gccttcaacgttgcccagctagact

SEQ ID NO: 2973103 - DNA, 25 bp, Homo sapien
aacgttgcccagctagactcctggg

SEQ ID NO: 2973104 - DNA, 25 bp, Homo sapien
gaaagccttcaacgttgcccagcta

SEQ ID NO: 2973105 - DNA, 25 bp, Homo sapien
ttcaacgttgcccagctagactcct

SEQ ID NO: 2973106 - DNA, 25 bp, Homo sapien
aaagaatatccctggcttcgggcct

SEQ ID NO: 2973107 - DNA, 25 bp, Homo sapien
tggacgggaagcatccatccctgag

SEQ ID NO: 2973108 - DNA, 25 bp, Homo sapien
cagcaaaaccacctttaataggagc

SEQ ID NO: 2973109 - DNA, 25 bp, Homo sapien
cctgagtgggaccaaggccctgttt

SEQ ID NO: 2973110 - DNA, 25 bp, Homo sapien
tgtgggtcttaagttcactcttgcc

SEQ ID NO: 2973111 - DNA, 25 bp, Homo sapien
gggactgtgggtcttaagttcactc

SEQ ID NO: 2973112 - DNA, 25 bp, Homo sapien
ctggggactgtgggtcttaagttca

SEQ ID NO: 2973113 - DNA, 25 bp, Homo sapien
gactgtgggtcttaagttcactctt

SEQ ID NO: 2973114 - DNA, 25 bp, Homo sapien
ttgcaacatctaacagactgaggtt

SEQ ID NO: 2973115 - DNA, 25 bp, Homo sapien
gggttgaggatccttaaactctgaa

SEQ ID NO: 2973116 - DNA, 25 bp, Homo sapien
tctaacagactgaggttgcatttcc

SEQ ID NO: 2973117 - DNA, 25 bp, Homo sapien
atttccaagctctatcagtagatgc

SEQ ID NO: 2973118 - DNA, 25 bp, Homo sapien
tcacaacacctcagacccataggat

SEQ ID NO: 2973119 - DNA, 25 bp, Homo sapien
cacctcagacccataggatttggct

SEQ ID NO: 2973120 - DNA, 25 bp, Homo sapien
gacccataggatttggctttcacat

SEQ ID NO: 2973121 - DNA, 25 bp, Homo sapien
cagacccataggatttggctttcac

SEQ ID NO: 2973122 - DNA, 25 bp, Homo sapien
ttggctaagaagtgacccacaccgt

SEQ ID NO: 2973123 - DNA, 25 bp, Homo sapien
taccactctgaggacggagttggct

SEQ ID NO: 2973124 - DNA, 25 bp, Homo sapien
tcagatcagcttagcaagcggccca

SEQ ID NO: 2973125 - DNA, 25 bp, Homo sapien
taggtacccttcatcaacggttcag

SEQ ID NO: 2973126 - DNA, 25 bp, Homo sapien
aaagagtagagctgttgggtagtca

SEQ ID NO: 2973127 - DNA, 25 bp, Homo sapien
taacttgttaccagcttggtaacca

SEQ ID NO: 2973128 - DNA, 25 bp, Homo sapien
tcattgtaataacccaagaagggtg

SEQ ID NO: 2973129 - DNA, 25 bp, Homo sapien
taaccaattagcttgtggaggattg

SEQ ID NO: 2973130 - DNA, 25 bp, Homo sapien
tggtttacaggtaactgcacgagag

SEQ ID NO: 2973131 - DNA, 25 bp, Homo sapien
gacttcttccagcaggtttgaagat

SEQ ID NO: 2973132 - DNA, 25 bp, Homo sapien
taaacctagagaaagtcgtgactgc

SEQ ID NO: 2973133 - DNA, 25 bp, Homo sapien
gcaacggatgcaatttccaggctgt

SEQ ID NO: 2973134 - DNA, 25 bp, Homo sapien
gtttagggaagagatatgaaaacaa

SEQ ID NO: 2973135 - DNA, 25 bp, Homo sapien
acaaataaccacaaagcagtttgag

SEQ ID NO: 2973136 - DNA, 25 bp, Homo sapien
tttagggaagagatatgaaaacaaa

SEQ ID NO: 2973137 - DNA, 25 bp, Homo sapien
ataaccacaaagcagtttgagaagt

SEQ ID NO: 2973138 - DNA, 25 bp, Homo sapien
gtcaaaatcaacgtctttgcccatg

SEQ ID NO: 2973139 - DNA, 25 bp, Homo sapien
atcaacgtctttgcccatgagctcc

SEQ ID NO: 2973140 - DNA, 25 bp, Homo sapien
gaaagtcaaaatcaacgtctttgcc

SEQ ID NO: 2973141 - DNA, 25 bp, Homo sapien
aaaatcaacgtctttgcccatgagc

SEQ ID NO: 2973142 - DNA, 25 bp, Homo sapien
tctccgggatgacttcaaaagtgtt

SEQ ID NO: 2973143 - DNA, 25 bp, Homo sapien
taggttgcaacaagcgccagtgaga

SEQ ID NO: 2973144 - DNA, 25 bp, Homo sapien
tcagcctgcacccaacaaaggcagt

SEQ ID NO: 2973145 - DNA, 25 bp, Homo sapien
gatttctgcctacatacacttttaa

SEQ ID NO: 2973146 - DNA, 25 bp, Homo sapien
tacatcctaaatgtggaagtccctt

SEQ ID NO: 2973147 - DNA, 25 bp, Homo sapien
cttgatcttggcagcacctaacacc

SEQ ID NO: 2973148 - DNA, 25 bp, Homo sapien
tcccttgtgaaacctaaaggcttgc

SEQ ID NO: 2973149 - DNA, 25 bp, Homo sapien
tagatgagccttggctcctgggaca

SEQ ID NO: 2973150 - DNA, 25 bp, Homo sapien
tattaggctacagtttaccaaagaa

SEQ ID NO: 2973151 - DNA, 25 bp, Homo sapien
cccatgggtaaagctgaatatttca

SEQ ID NO: 2973152 - DNA, 25 bp, Homo sapien
atgtcaggaaatacccatgggtaaa

SEQ ID NO: 2973153 - DNA, 25 bp, Homo sapien
gttactttcatctttgtagtgacaa

SEQ ID NO: 2973154 - DNA, 25 bp, Homo sapien
ggtaagtctccctttcaacatgctg

SEQ ID NO: 2973155 - DNA, 25 bp, Homo sapien
gactctgtgatgcaaattaacctga

SEQ ID NO: 2973156 - DNA, 25 bp, Homo sapien
tgcagcactcgcagcagtcgatgga

SEQ ID NO: 2973157 - DNA, 25 bp, Homo sapien
taacctgagcagtaggtgcctctgg

SEQ ID NO: 2973158 - DNA, 25 bp, Homo sapien
cttggcttttagagtggggctcagc

SEQ ID NO: 2973159 - DNA, 25 bp, Homo sapien
tcccttggcttttagagtggggctc

SEQ ID NO: 2973160 - DNA, 25 bp, Homo sapien
cttgcaattcaagcagaaatttccc

SEQ ID NO: 2973161 - DNA, 25 bp, Homo sapien
ctactgtggttccttgcaattcaag

SEQ ID NO: 2973162 - DNA, 25 bp, Homo sapien
tcagtattcaatagcaaatggttct

SEQ ID NO: 2973163 - DNA, 25 bp, Homo sapien
gtggttctccttgtaagtgaaactg

SEQ ID NO: 2973164 - DNA, 25 bp, Homo sapien
aagtgaaactgacttgtagtgtctc

SEQ ID NO: 2973165 - DNA, 25 bp, Homo sapien
aatggttctgaagcatagtggttct

SEQ ID NO: 2973166 - DNA, 25 bp, Homo sapien
caagcgtctgtacctttgcacgtca

SEQ ID NO: 2973167 - DNA, 25 bp, Homo sapien
acaagttctttatctgctgggtctc

SEQ ID NO: 2973168 - DNA, 25 bp, Homo sapien
gctgcatagccgtagacaagttctt

SEQ ID NO: 2973169 - DNA, 25 bp, Homo sapien
cggtttcagtgaggataatagtgcc

SEQ ID NO: 2973170 - DNA, 25 bp, Homo sapien
tttacatgccacctaaatgcggtca

SEQ ID NO: 2973171 - DNA, 25 bp, Homo sapien
cctacatggcgcctcaaaaggaagt

SEQ ID NO: 2973172 - DNA, 25 bp, Homo sapien
gcagtcctcaactttgtggtccaag

SEQ ID NO: 2973173 - DNA, 25 bp, Homo sapien
gcttgcattaaagcctaggcatcag

SEQ ID NO: 2973174 - DNA, 25 bp, Homo sapien
gatttaggtaaagctgcggcagttc

SEQ ID NO: 2973175 - DNA, 25 bp, Homo sapien
gattacatggagcaataagtttggg

SEQ ID NO: 2973176 - DNA, 25 bp, Homo sapien
catctgagtgtaggagcgctgttta

SEQ ID NO: 2973177 - DNA, 25 bp, Homo sapien
aaagtagttccacaatcacatctga

SEQ ID NO: 2973178 - DNA, 25 bp, Homo sapien
tgccctccgggtatgacatgaatga

SEQ ID NO: 2973179 - DNA, 25 bp, Homo sapien
aaaagcgaaacaggcttccagctga

SEQ ID NO: 2973180 - DNA, 25 bp, Homo sapien
gacaggaggcatgaccttcaccaat

SEQ ID NO: 2973181 - DNA, 25 bp, Homo sapien
tgaaaagaccttgtagctaatagca

SEQ ID NO: 2973182 - DNA, 25 bp, Homo sapien
gaacatcatgaactgaccactcaag

SEQ ID NO: 2973183 - DNA, 25 bp, Homo sapien
agctgggcttaaaacgtctgtgtca

SEQ ID NO: 2973184 - DNA, 25 bp, Homo sapien
aaattgttgggctatgtgcatttcc

SEQ ID NO: 2973185 - DNA, 25 bp, Homo sapien
cactcaagttgagaattggaacata

SEQ ID NO: 2973186 - DNA, 25 bp, Homo sapien
aattccttccacagctaacctattc

SEQ ID NO: 2973187 - DNA, 25 bp, Homo sapien
catcttgtagtttactagtgtcatt

SEQ ID NO: 2973188 - DNA, 25 bp, Homo sapien
actttagtcttgtgtatagaattcc

SEQ ID NO: 2973189 - DNA, 25 bp, Homo sapien
gtgaacaaaggtgccacactttagt

SEQ ID NO: 2973190 - DNA, 25 bp, Homo sapien
gactgcctacaatctgtaggttggg

SEQ ID NO: 2973191 - DNA, 25 bp, Homo sapien
ctttatagtaccagagcccagagcc

SEQ ID NO: 2973192 - DNA, 25 bp, Homo sapien
cactagttccggctttcacagcatg

SEQ ID NO: 2973193 - DNA, 25 bp, Homo sapien
tgatagctaaatgggctcctagatc

SEQ ID NO: 2973194 - DNA, 25 bp, Homo sapien
tttgagtcacatttacgaaagggaa

SEQ ID NO: 2973195 - DNA, 25 bp, Homo sapien
tcttatctgctcgatgattcttgct

SEQ ID NO: 2973196 - DNA, 25 bp, Homo sapien
tacaatagcacaaaaccacaaggtt

SEQ ID NO: 2973197 - DNA, 25 bp, Homo sapien
aaatatgtgggcttctaaagtttca

SEQ ID NO: 2973198 - DNA, 25 bp, Homo sapien
gaattgtgctactgattccgcagtg

SEQ ID NO: 2973199 - DNA, 25 bp, Homo sapien
tctccctgtggaggctaccatgtcc

SEQ ID NO: 2973200 - DNA, 25 bp, Homo sapien
taaaagctaccacaatcaaccaagg

SEQ ID NO: 2973201 - DNA, 25 bp, Homo sapien
tccgcagtgagggaacagtagtatt

SEQ ID NO: 2973202 - DNA, 25 bp, Homo sapien
cacgtatgaagtgtgggaccaggta

SEQ ID NO: 2973203 - DNA, 25 bp, Homo sapien
catgcagttctcttgatagtgggtg

SEQ ID NO: 2973204 - DNA, 25 bp, Homo sapien
tatcccttcgcttttagtctatttg

SEQ ID NO: 2973205 - DNA, 25 bp, Homo sapien
gactaatgtactctattttatccaa

SEQ ID NO: 2973206 - DNA, 25 bp, Homo sapien
tgactgctgcccaccatgttctctg

SEQ ID NO: 2973207 - DNA, 25 bp, Homo sapien
taaccccacattggggaatctgccc

SEQ ID NO: 2973208 - DNA, 25 bp, Homo sapien
tgcccaccatgttctctgccatagg

SEQ ID NO: 2973209 - DNA, 25 bp, Homo sapien
catgttctctgccataggaccatct

SEQ ID NO: 2973210 - DNA, 25 bp, Homo sapien
catggttgtggaccagcttaagaca

SEQ ID NO: 2973211 - DNA, 25 bp, Homo sapien
cattgacgtgtcatgccttatgtgg

SEQ ID NO: 2973212 - DNA, 25 bp, Homo sapien
gaccagcttaagacatgaagacccc

SEQ ID NO: 2973213 - DNA, 25 bp, Homo sapien
atcacagcgcaggacgatcagccca

SEQ ID NO: 2973214 - DNA, 25 bp, Homo sapien
tggggctgattgagacctgctttaa

SEQ ID NO: 2973215 - DNA, 25 bp, Homo sapien
gggctgattgagacctgctttaacc

SEQ ID NO: 2973216 - DNA, 25 bp, Homo sapien
tttggggctgattgagacctgcttt

SEQ ID NO: 2973217 - DNA, 25 bp, Homo sapien
ggctgattgagacctgctttaacct

SEQ ID NO: 2973218 - DNA, 25 bp, Homo sapien
cctggccattgtactcagtgtggcc

SEQ ID NO: 2973219 - DNA, 25 bp, Homo sapien
tggccattgtactcagtgtggcctt

SEQ ID NO: 2973220 - DNA, 25 bp, Homo sapien
aagaaatgtggaaacctggccattg

SEQ ID NO: 2973221 - DNA, 25 bp, Homo sapien
aaacctggccattgtactcagtgtg

SEQ ID NO: 2973222 - DNA, 25 bp, Homo sapien
ccttgtcttgtagctgggtcaaatt

SEQ ID NO: 2973223 - DNA, 25 bp, Homo sapien
cccttgtcttgtagctgggtcaaat

SEQ ID NO: 2973224 - DNA, 25 bp, Homo sapien
aatgaaacagaagctggatctttgc

SEQ ID NO: 2973225 - DNA, 25 bp, Homo sapien
tctttgcaaagaacaataaaacgga

SEQ ID NO: 2973226 - DNA, 25 bp, Homo sapien
atctttgcaaagaacaataaaacgg

SEQ ID NO: 2973227 - DNA, 25 bp, Homo sapien
cagaagctggatctttgcaaagaac

SEQ ID NO: 2973228 - DNA, 25 bp, Homo sapien
gcaaaacctgactgaccagatggag

SEQ ID NO: 2973229 - DNA, 25 bp, Homo sapien
ttggccattgcaaaacctgactgac

SEQ ID NO: 2973230 - DNA, 25 bp, Homo sapien
gccattgcaaaacctgactgaccag

SEQ ID NO: 2973231 - DNA, 25 bp, Homo sapien
cttgggtgctggtgcatagaaactg

SEQ ID NO: 2973232 - DNA, 25 bp, Homo sapien
ttgggtcatctaaataatacatgtg

SEQ ID NO: 2973233 - DNA, 25 bp, Homo sapien
tcgccgccgccgggaacgtcgccat

SEQ ID NO: 2973234 - DNA, 25 bp, Homo sapien
gtgggtggagaaatgcccgcgcgga

SEQ ID NO: 2973235 - DNA, 25 bp, Homo sapien
gaaatgcccgcgcggaagtctccgc

SEQ ID NO: 2973236 - DNA, 25 bp, Homo sapien
tggagaaatgcccgcgcggaagtct

SEQ ID NO: 2973237 - DNA, 25 bp, Homo sapien
aagctggggtgcgagtctggcggtt

SEQ ID NO: 2973238 - DNA, 25 bp, Homo sapien
atggcaacggggccgcgcgcacgcc

SEQ ID NO: 2973239 - DNA, 25 bp, Homo sapien
gggtgcgagtctggcggttgctggg

SEQ ID NO: 2973240 - DNA, 25 bp, Homo sapien
gctggggtgcgagtctggcggttgc

SEQ ID NO: 2973241 - DNA, 25 bp, Homo sapien
gaagcttcgactggggacccgccaa

SEQ ID NO: 2973242 - DNA, 25 bp, Homo sapien
ctgtggtcgggttatcccggaagct

SEQ ID NO: 2973243 - DNA, 25 bp, Homo sapien
tatcccggaagcttcgactggggac

SEQ ID NO: 2973244 - DNA, 25 bp, Homo sapien
cgggttatcccggaagcttcgactg

SEQ ID NO: 2973245 - DNA, 25 bp, Homo sapien
tgcaaacaccggcagcggtagtgat

SEQ ID NO: 2973246 - DNA, 25 bp, Homo sapien
ctgcaaacaccggcagcggtagtga

SEQ ID NO: 2973247 - DNA, 25 bp, Homo sapien
gcaaacaccggcagcggtagtgatt

SEQ ID NO: 2973248 - DNA, 25 bp, Homo sapien
caaacaccggcagcggtagtgattt

SEQ ID NO: 2973249 - DNA, 25 bp, Homo sapien
tcgcccaggcctggctccctgctac

SEQ ID NO: 2973250 - DNA, 25 bp, Homo sapien
ctcgcccaggcctggctccctgcta

SEQ ID NO: 2973251 - DNA, 25 bp, Homo sapien
agcaccggggatggcccaccacctt

SEQ ID NO: 2973252 - DNA, 25 bp, Homo sapien
gcagcaccggggatggcccaccacc

SEQ ID NO: 2973253 - DNA, 25 bp, Homo sapien
cccaccaccttctgtactaccagct

SEQ ID NO: 2973254 - DNA, 25 bp, Homo sapien
ggcccaccaccttctgtactaccag

SEQ ID NO: 2973255 - DNA, 25 bp, Homo sapien
aatgacgcatttctggattccaacc

SEQ ID NO: 2973256 - DNA, 25 bp, Homo sapien
aacagaccaatgacgcatttctgga

SEQ ID NO: 2973257 - DNA, 25 bp, Homo sapien
aaaacagaccaatgacgcatttctg

SEQ ID NO: 2973258 - DNA, 25 bp, Homo sapien
gaccaatgacgcatttctggattcc

SEQ ID NO: 2973259 - DNA, 25 bp, Homo sapien
accgagttaggatagtatcttttca

SEQ ID NO: 2973260 - DNA, 25 bp, Homo sapien
gagttcattgatggtaatgccattc

SEQ ID NO: 2973261 - DNA, 25 bp, Homo sapien
ctaggtcctttggattcacgtcaat

SEQ ID NO: 2973262 - DNA, 25 bp, Homo sapien
caataatgatcaataccgagttagg

SEQ ID NO: 2973263 - DNA, 25 bp, Homo sapien
tgttttcaaggttggagttccatca

SEQ ID NO: 2973264 - DNA, 25 bp, Homo sapien
ttccatcatcttggatttcttccac

SEQ ID NO: 2973265 - DNA, 25 bp, Homo sapien
tctgctccaatttcactggtcacat

SEQ ID NO: 2973266 - DNA, 25 bp, Homo sapien
gctccaatttcactggtcacatgtt

SEQ ID NO: 2973267 - DNA, 25 bp, Homo sapien
gtgcccaccgttgtgttgtgtcttt

SEQ ID NO: 2973268 - DNA, 25 bp, Homo sapien
cagagtgcccaccgttgtgttgtgt

SEQ ID NO: 2973269 - DNA, 25 bp, Homo sapien
gagtgcccaccgttgtgttgtgtct

SEQ ID NO: 2973270 - DNA, 25 bp, Homo sapien
agagtgcccaccgttgtgttgtgtc

SEQ ID NO: 2973271 - DNA, 25 bp, Homo sapien
cttcaaaccatggacccggtttgtg

SEQ ID NO: 2973272 - DNA, 25 bp, Homo sapien
aaccatggacccggtttgtgatccg

SEQ ID NO: 2973273 - DNA, 25 bp, Homo sapien
gagttcggtcccttcaaaccatgga

SEQ ID NO: 2973274 - DNA, 25 bp, Homo sapien
agaagcttggagttcggtcccttca

SEQ ID NO: 2973275 - DNA, 25 bp, Homo sapien
aaaaggctttaataggctcctgcag

SEQ ID NO: 2973276 - DNA, 25 bp, Homo sapien
gtaaaaggctttaataggctcctgc

SEQ ID NO: 2973277 - DNA, 25 bp, Homo sapien
aaggctttaataggctcctgcaggc

SEQ ID NO: 2973278 - DNA, 25 bp, Homo sapien
tcaggtaaaaggctttaataggctc

SEQ ID NO: 2973279 - DNA, 25 bp, Homo sapien
tccatttcgtattctcctcatcctt

SEQ ID NO: 2973280 - DNA, 25 bp, Homo sapien
tctggtggtgtgacaaagaccttca

SEQ ID NO: 2973281 - DNA, 25 bp, Homo sapien
gcagttggccttcgaactgcaactg

SEQ ID NO: 2973282 - DNA, 25 bp, Homo sapien
accatccatttcgtattctcctcat

SEQ ID NO: 2973283 - DNA, 25 bp, Homo sapien
atgtcttctcttgcccacacatagt

SEQ ID NO: 2973284 - DNA, 25 bp, Homo sapien
tgcccacacatagtcactgcattgg

SEQ ID NO: 2973285 - DNA, 25 bp, Homo sapien
gaaggagggcagtaagcatttagaa

SEQ ID NO: 2973286 - DNA, 25 bp, Homo sapien
taacagctctagacatggaaggagg

SEQ ID NO: 2973287 - DNA, 25 bp, Homo sapien
tctcagaacttaacccgattccgtg

SEQ ID NO: 2973288 - DNA, 25 bp, Homo sapien
tctccacaatctgcattctccatag

SEQ ID NO: 2973289 - DNA, 25 bp, Homo sapien
cttttacagaaaccagagtggctcc

SEQ ID NO: 2973290 - DNA, 25 bp, Homo sapien
cccgattccgtgtgatgtggaccag

SEQ ID NO: 2973291 - DNA, 25 bp, Homo sapien
gtagggagcagacaaagctaagaag

SEQ ID NO: 2973292 - DNA, 25 bp, Homo sapien
agtagggagcagacaaagctaagaa

SEQ ID NO: 2973293 - DNA, 25 bp, Homo sapien
ggacagaattaagcacaaggtaact

SEQ ID NO: 2973294 - DNA, 25 bp, Homo sapien
ccagttacaggaacacacagtgatt

SEQ ID NO: 2973295 - DNA, 25 bp, Homo sapien
gattcagtggtgtgacagagacaag

SEQ ID NO: 2973296 - DNA, 25 bp, Homo sapien
tatccagggtaccacagatataaga

SEQ ID NO: 2973297 - DNA, 25 bp, Homo sapien
tacctctgagaatattgtgctcctg

SEQ ID NO: 2973298 - DNA, 25 bp, Homo sapien
tactgttgaggatcttaaggaggcc

SEQ ID NO: 2973299 - DNA, 25 bp, Homo sapien
tcataaggacgtgggtttgggcctc

SEQ ID NO: 2973300 - DNA, 25 bp, Homo sapien
ttgctttctcgcactgcagctcata

SEQ ID NO: 2973301 - DNA, 25 bp, Homo sapien
gtgccaggatgaccgaagtgagcca

SEQ ID NO: 2973302 - DNA, 25 bp, Homo sapien
aaagtgccaggatgaccgaagtgag

SEQ ID NO: 2973303 - DNA, 25 bp, Homo sapien
tttatttaatgtgtggtagaaccaa

SEQ ID NO: 2973304 - DNA, 25 bp, Homo sapien
ttttatttaatgtgtggtagaacca

SEQ ID NO: 2973305 - DNA, 25 bp, Homo sapien
tatgcaggatctaatcaagaatcac

SEQ ID NO: 2973306 - DNA, 25 bp, Homo sapien
tcccaattgacccagaagtatctct

SEQ ID NO: 2973307 - DNA, 25 bp, Homo sapien
taacaacaacgatatcatgcaacat

SEQ ID NO: 2973308 - DNA, 25 bp, Homo sapien
tattacgatacttgcccataaagcc

SEQ ID NO: 2973309 - DNA, 25 bp, Homo sapien
tgggcactcaactatgggccaggca

SEQ ID NO: 2973310 - DNA, 25 bp, Homo sapien
gactattaacttctccagtggtaga

SEQ ID NO: 2973311 - DNA, 25 bp, Homo sapien
tcagcatggaggagctaccaataac

SEQ ID NO: 2973312 - DNA, 25 bp, Homo sapien
tagtaacttgtacctttctgggcac

SEQ ID NO: 2973313 - DNA, 25 bp, Homo sapien
gatacgtagccaatttaagcctcag

SEQ ID NO: 2973314 - DNA, 25 bp, Homo sapien
gactgtggcccatcaacactctgaa

SEQ ID NO: 2973315 - DNA, 25 bp, Homo sapien
gattacgtattcctgcaagccgggc

SEQ ID NO: 2973316 - DNA, 25 bp, Homo sapien
tattgccatgtgtaaagctcctctg

SEQ ID NO: 2973317 - DNA, 25 bp, Homo sapien
tatccaaccccttcgtatatgtcag

SEQ ID NO: 2973318 - DNA, 25 bp, Homo sapien
ccttcgtatatgtcagggatcaata

SEQ ID NO: 2973319 - DNA, 25 bp, Homo sapien
tatgtcagggatcaataatgataag

SEQ ID NO: 2973320 - DNA, 25 bp, Homo sapien
caataatgataagtaggccgggcgt

SEQ ID NO: 2973321 - DNA, 25 bp, Homo sapien
ggactccaactcaagtatacggtga

SEQ ID NO: 2973322 - DNA, 25 bp, Homo sapien
agtaaagactttggcccctagctag

SEQ ID NO: 2973323 - DNA, 25 bp, Homo sapien
gactagagaatgttacttgcccaag

SEQ ID NO: 2973324 - DNA, 25 bp, Homo sapien
taatgtatgcttcacaagagcagca

SEQ ID NO: 2973325 - DNA, 25 bp, Homo sapien
gattttgtgtaggaatttcaaattc

SEQ ID NO: 2973326 - DNA, 25 bp, Homo sapien
caaattctttggagtaagacatcag

SEQ ID NO: 2973327 - DNA, 25 bp, Homo sapien
tgtgtgattttgtgtaggaatttca

SEQ ID NO: 2973328 - DNA, 25 bp, Homo sapien
tgtgtaggaatttcaaattctttgg

SEQ ID NO: 2973329 - DNA, 25 bp, Homo sapien
tgctcagcgaccgtgccttgatgtg

SEQ ID NO: 2973330 - DNA, 25 bp, Homo sapien
tgatgtgctttagatcagccatccc

SEQ ID NO: 2973331 - DNA, 25 bp, Homo sapien
tatcctgtcgcttcagtccaagcag

SEQ ID NO: 2973332 - DNA, 25 bp, Homo sapien
gaaagaagcgagtaatgagtccatc

SEQ ID NO: 2973333 - DNA, 25 bp, Homo sapien
cagacagacggagaatgttcagggt

SEQ ID NO: 2973334 - DNA, 25 bp, Homo sapien
agatcagacagacggagaatgttca

SEQ ID NO: 2973335 - DNA, 25 bp, Homo sapien
ttccaagatcagacagacggagaat

SEQ ID NO: 2973336 - DNA, 25 bp, Homo sapien
ccaagatcagacagacggagaatgt

SEQ ID NO: 2973337 - DNA, 25 bp, Homo sapien
tggaaagactgtcttaggcacgtaa

SEQ ID NO: 2973338 - DNA, 25 bp, Homo sapien
gactgtcttaggcacgtaatacctt

SEQ ID NO: 2973339 - DNA, 25 bp, Homo sapien
taggcacgtaataccttgcaaagat

SEQ ID NO: 2973340 - DNA, 25 bp, Homo sapien
aataccttgcaaagataatctgcac

SEQ ID NO: 2973341 - DNA, 25 bp, Homo sapien
aagtaggaaaagatcagcaagttgt

SEQ ID NO: 2973342 - DNA, 25 bp, Homo sapien
catcaggaggacgggtgggactggg

SEQ ID NO: 2973343 - DNA, 25 bp, Homo sapien
gcgagtagacgagccaagtaggaaa

SEQ ID NO: 2973344 - DNA, 25 bp, Homo sapien
gggaatgattgtgcggcgagtagac

SEQ ID NO: 2973345 - DNA, 25 bp, Homo sapien
tgtgcttagagaattggaggagatt

SEQ ID NO: 2973346 - DNA, 25 bp, Homo sapien
cttagagaattggaggagattggag

SEQ ID NO: 2973347 - DNA, 25 bp, Homo sapien
gagattggagtgagaagtgctctgc

SEQ ID NO: 2973348 - DNA, 25 bp, Homo sapien
gcttgtgcttagagaattggaggag

SEQ ID NO: 2973349 - DNA, 25 bp, Homo sapien
ctgtaggggatagggacaggagccc

SEQ ID NO: 2973350 - DNA, 25 bp, Homo sapien
gtaggggatagggacaggagcccca

SEQ ID NO: 2973351 - DNA, 25 bp, Homo sapien
taggggatagggacaggagccccac

SEQ ID NO: 2973352 - DNA, 25 bp, Homo sapien
tgtaggggatagggacaggagcccc

SEQ ID NO: 2973353 - DNA, 25 bp, Homo sapien
gagtgacatatcgagagacaacaga

SEQ ID NO: 2973354 - DNA, 25 bp, Homo sapien
tggtgcaaagagtgacatatcgaga

SEQ ID NO: 2973355 - DNA, 25 bp, Homo sapien
ctgagaaagggaacgggaaattcat

SEQ ID NO: 2973356 - DNA, 25 bp, Homo sapien
tgtgtgaagcattgagaatgatcct

SEQ ID NO: 2973357 - DNA, 25 bp, Homo sapien
tgtagaataagtgttctgggaggct

SEQ ID NO: 2973358 - DNA, 25 bp, Homo sapien
ctgtagaataagtgttctgggaggc

SEQ ID NO: 2973359 - DNA, 25 bp, Homo sapien
ttcttctggcggcttggacaggatc

SEQ ID NO: 2973360 - DNA, 25 bp, Homo sapien
cattacatcctaatgaaatttcctt

SEQ ID NO: 2973361 - DNA, 25 bp, Homo sapien
caggatcctgactgtagcctccttt

SEQ ID NO: 2973362 - DNA, 25 bp, Homo sapien
ggcctgagatcattacatcctaatg

SEQ ID NO: 2973363 - DNA, 25 bp, Homo sapien
cgctcgcgcttcctactcgcggcgg

SEQ ID NO: 2973364 - DNA, 25 bp, Homo sapien
cggcgctcgcgcttcctactcgcgg

SEQ ID NO: 2973365 - DNA, 25 bp, Homo sapien
ggtgcccggcgctcgcgcttcctac

SEQ ID NO: 2973366 - DNA, 25 bp, Homo sapien
gcgcttcctactcgcggcggcagag

SEQ ID NO: 2973367 - DNA, 25 bp, Homo sapien
gggccggtggccgaggtcgcggcga

SEQ ID NO: 2973368 - DNA, 25 bp, Homo sapien
gccggtggccgaggtcgcggcgagg

SEQ ID NO: 2973369 - DNA, 25 bp, Homo sapien
ccggtggccgaggtcgcggcgaggg

SEQ ID NO: 2973370 - DNA, 25 bp, Homo sapien
cggtggccgaggtcgcggcgagggg

SEQ ID NO: 2973371 - DNA, 25 bp, Homo sapien
ccaaccacctcttgcctccgccggg

SEQ ID NO: 2973372 - DNA, 25 bp, Homo sapien
accacctcttgcctccgccggggag

SEQ ID NO: 2973373 - DNA, 25 bp, Homo sapien
ccccaaccacctcttgcctccgccg

SEQ ID NO: 2973374 - DNA, 25 bp, Homo sapien
caaccacctcttgcctccgccgggg

SEQ ID NO: 2973375 - DNA, 25 bp, Homo sapien
gaagcggttggccacgtcctgagac

SEQ ID NO: 2973376 - DNA, 25 bp, Homo sapien
tgtggtccttcacctcgtgcacgtt

SEQ ID NO: 2973377 - DNA, 25 bp, Homo sapien
ctgagacgccgtggagtcgttgccc

SEQ ID NO: 2973378 - DNA, 25 bp, Homo sapien
cgttgcccgggaaaacgtcagccat

SEQ ID NO: 2973379 - DNA, 25 bp, Homo sapien
gtggcaggattcactccgtgactgc

SEQ ID NO: 2973380 - DNA, 25 bp, Homo sapien
gcaggattcactccgtgactgccac

SEQ ID NO: 2973381 - DNA, 25 bp, Homo sapien
tggtggcaggattcactccgtgact

SEQ ID NO: 2973382 - DNA, 25 bp, Homo sapien
ctggtggcaggattcactccgtgac

SEQ ID NO: 2973383 - DNA, 25 bp, Homo sapien
aaatcactcatagaggtggctgtgc

SEQ ID NO: 2973384 - DNA, 25 bp, Homo sapien
gcttcatatgccgactagacagtgg

SEQ ID NO: 2973385 - DNA, 25 bp, Homo sapien
tagcctcagtatgctgcaagtccct

SEQ ID NO: 2973386 - DNA, 25 bp, Homo sapien
tattcgcaccacgatcatgggacct

SEQ ID NO: 2973387 - DNA, 25 bp, Homo sapien
actggtggtgacctgagcgcctctt

SEQ ID NO: 2973388 - DNA, 25 bp, Homo sapien
gtggtgacctgagcgcctcttcagc

SEQ ID NO: 2973389 - DNA, 25 bp, Homo sapien
cttcacaatactggtggtgacctga

SEQ ID NO: 2973390 - DNA, 25 bp, Homo sapien
gggatcctcaggggggcattttcca

SEQ ID NO: 2973391 - DNA, 25 bp, Homo sapien
tctccctaaagataacaaagtggct

SEQ ID NO: 2973392 - DNA, 25 bp, Homo sapien
cagagaaccctgacgtggacgttca

SEQ ID NO: 2973393 - DNA, 25 bp, Homo sapien
catgtctagaaactgccaaacggca

SEQ ID NO: 2973394 - DNA, 25 bp, Homo sapien
tagcattcaaagcacatagggaggc

SEQ ID NO: 2973395 - DNA, 25 bp, Homo sapien
ggcactggaagccttgtttcccaaa

SEQ ID NO: 2973396 - DNA, 25 bp, Homo sapien
cttggcactggaagccttgtttccc

SEQ ID NO: 2973397 - DNA, 25 bp, Homo sapien
gcactggaagccttgtttcccaaac

SEQ ID NO: 2973398 - DNA, 25 bp, Homo sapien
ttggcactggaagccttgtttccca

SEQ ID NO: 2973399 - DNA, 25 bp, Homo sapien
taatgttcttgtttggaatgcttat

SEQ ID NO: 2973400 - DNA, 25 bp, Homo sapien
taaggcccaaatttacagccctcat

SEQ ID NO: 2973401 - DNA, 25 bp, Homo sapien
aggcagctctatatgcagattagta

SEQ ID NO: 2973402 - DNA, 25 bp, Homo sapien
tatgcagattagtaggccccaatta

SEQ ID NO: 2973403 - DNA, 25 bp, Homo sapien
tttgtgcaataagatttattcttga

SEQ ID NO: 2973404 - DNA, 25 bp, Homo sapien
tgctatagcccatgatacactcttg

SEQ ID NO: 2973405 - DNA, 25 bp, Homo sapien
gtgcaataagatttattcttgatgc

SEQ ID NO: 2973406 - DNA, 25 bp, Homo sapien
agacattttccccctcctgctatag

SEQ ID NO: 2973407 - DNA, 25 bp, Homo sapien
aactcaaagtaatcctagggctctc

SEQ ID NO: 2973408 - DNA, 25 bp, Homo sapien
gactacttgggtcacagagctctgt

SEQ ID NO: 2973409 - DNA, 25 bp, Homo sapien
ggaacattagcctcctgacttgctg

SEQ ID NO: 2973410 - DNA, 25 bp, Homo sapien
tctctaggtagctcaaaggattcgg

SEQ ID NO: 2973411 - DNA, 25 bp, Homo sapien
tcagttctacagcattagctacgct

SEQ ID NO: 2973412 - DNA, 25 bp, Homo sapien
taacttcccactatgtgtagaggct

SEQ ID NO: 2973413 - DNA, 25 bp, Homo sapien
tagctacgctcacaccattctgcaa

SEQ ID NO: 2973414 - DNA, 25 bp, Homo sapien
catcatcatccatccgcagaatgtt

SEQ ID NO: 2973415 - DNA, 25 bp, Homo sapien
tctgagacaccgctgtatgaaactc

SEQ ID NO: 2973416 - DNA, 25 bp, Homo sapien
cagtgtctgagacaccgctgtatga

SEQ ID NO: 2973417 - DNA, 25 bp, Homo sapien
tgtctgagacaccgctgtatgaaac

SEQ ID NO: 2973418 - DNA, 25 bp, Homo sapien
gtgtctgagacaccgctgtatgaaa

SEQ ID NO: 2973419 - DNA, 25 bp, Homo sapien
taggagttatagtgtagacctttca

SEQ ID NO: 2973420 - DNA, 25 bp, Homo sapien
caagctgccactgtttgctcggcaa

SEQ ID NO: 2973421 - DNA, 25 bp, Homo sapien
ttggtcctttttggtggccttcaga

SEQ ID NO: 2973422 - DNA, 25 bp, Homo sapien
ggtaaggcttacacatttagctcat

SEQ ID NO: 2973423 - DNA, 25 bp, Homo sapien
tagcagctttctagacacggaagtc

SEQ ID NO: 2973424 - DNA, 25 bp, Homo sapien
taatataaggactcaactggcccca

SEQ ID NO: 2973425 - DNA, 25 bp, Homo sapien
taagcccttatggacccctgtctgc

SEQ ID NO: 2973426 - DNA, 25 bp, Homo sapien
ttgggcccacaggacttcaactggc

SEQ ID NO: 2973427 - DNA, 25 bp, Homo sapien
tcaggactcagaaacgggggcacca

SEQ ID NO: 2973428 - DNA, 25 bp, Homo sapien
tgccctgtcagttggcacgcgccca

SEQ ID NO: 2973429 - DNA, 25 bp, Homo sapien
cataggaaccaacacaatgccagga

SEQ ID NO: 2973430 - DNA, 25 bp, Homo sapien
ctgtcagttggcacgcgcccatagc

SEQ ID NO: 2973431 - DNA, 25 bp, Homo sapien
gtaggttcacacctccctcaggcaa

SEQ ID NO: 2973432 - DNA, 25 bp, Homo sapien
acagtgcactacagctcagtgctcc

SEQ ID NO: 2973433 - DNA, 25 bp, Homo sapien
catgggagtcttgatctgctccagt

SEQ ID NO: 2973434 - DNA, 25 bp, Homo sapien
gtgcactcaactggcacagtgcact

SEQ ID NO: 2973435 - DNA, 25 bp, Homo sapien
ggtacatccattccctaagatcaaa

SEQ ID NO: 2973436 - DNA, 25 bp, Homo sapien
tgttcttcattatcgttccctctct

SEQ ID NO: 2973437 - DNA, 25 bp, Homo sapien
tccatacagggctacttgtttaagg

SEQ ID NO: 2973438 - DNA, 25 bp, Homo sapien
tctggtagagctggcatcttccggc

SEQ ID NO: 2973439 - DNA, 25 bp, Homo sapien
gctgctctaactgctgcggggcacc

SEQ ID NO: 2973440 - DNA, 25 bp, Homo sapien
tcaacaagctgctctaactgctgcg

SEQ ID NO: 2973441 - DNA, 25 bp, Homo sapien
tgcggctccttctcaacaagctgct

SEQ ID NO: 2973442 - DNA, 25 bp, Homo sapien
cctgcggctccttctcaacaagctg

SEQ ID NO: 2973443 - DNA, 25 bp, Homo sapien
aacaaaaagctgagcgagagcccac

SEQ ID NO: 2973444 - DNA, 25 bp, Homo sapien
ttttccagaaaataaccgcagatgc

SEQ ID NO: 2973445 - DNA, 25 bp, Homo sapien
tttgcttcgcatgctgatggcccca

SEQ ID NO: 2973446 - DNA, 25 bp, Homo sapien
ttcaagttgcagacagtggagaggc

SEQ ID NO: 2973447 - DNA, 25 bp, Homo sapien
cttggccaatgtggagcagatgaca

SEQ ID NO: 2973448 - DNA, 25 bp, Homo sapien
ttggccaatgtggagcagatgacac

SEQ ID NO: 2973449 - DNA, 25 bp, Homo sapien
ccttggccaatgtggagcagatgac

SEQ ID NO: 2973450 - DNA, 25 bp, Homo sapien
tggccaatgtggagcagatgacacc

SEQ ID NO: 2973451 - DNA, 25 bp, Homo sapien
gatccagacagaggaatacccaagt

SEQ ID NO: 2973452 - DNA, 25 bp, Homo sapien
gggctcaatcagtgcttgtccaata

SEQ ID NO: 2973453 - DNA, 25 bp, Homo sapien
tccgatgatctagcgcaagaggagg

SEQ ID NO: 2973454 - DNA, 25 bp, Homo sapien
tgttaacagttgctggatccagaca

SEQ ID NO: 2973455 - DNA, 25 bp, Homo sapien
agctgacctggtttagtgcttcctt

SEQ ID NO: 2973456 - DNA, 25 bp, Homo sapien
tatcccacgtcacaagctgacctgg

SEQ ID NO: 2973457 - DNA, 25 bp, Homo sapien
agaagccttctttatcccacgtcac

SEQ ID NO: 2973458 - DNA, 25 bp, Homo sapien
caagctgacctggtttagtgcttcc

SEQ ID NO: 2973459 - DNA, 25 bp, Homo sapien
taaggatcttcacacggcctggtat

SEQ ID NO: 2973460 - DNA, 25 bp, Homo sapien
ggtatctccacgctgccaaacttat

SEQ ID NO: 2973461 - DNA, 25 bp, Homo sapien
ctggacaaaggtcctaaggatcttc

SEQ ID NO: 2973462 - DNA, 25 bp, Homo sapien
tcagtctttgtatcttgacactgcc

SEQ ID NO: 2973463 - DNA, 25 bp, Homo sapien
gccttgcttcttcgtatttgggtag

SEQ ID NO: 2973464 - DNA, 25 bp, Homo sapien
gcttgccttgcagccttgcttcttc

SEQ ID NO: 2973465 - DNA, 25 bp, Homo sapien
gaagattcagggtgaataacaagtt

SEQ ID NO: 2973466 - DNA, 25 bp, Homo sapien
tgaataacaagtttggtgcttgcct

SEQ ID NO: 2973467 - DNA, 25 bp, Homo sapien
tttccaaggaaagcaagggctggac

SEQ ID NO: 2973468 - DNA, 25 bp, Homo sapien
gctggacccgatccagagagcatca

SEQ ID NO: 2973469 - DNA, 25 bp, Homo sapien
agggctggacccgatccagagagca

SEQ ID NO: 2973470 - DNA, 25 bp, Homo sapien
tggacccgatccagagagcatcaca

SEQ ID NO: 2973471 - DNA, 25 bp, Homo sapien
tcccttagaagcagacaggagctct

SEQ ID NO: 2973472 - DNA, 25 bp, Homo sapien
ggtaaaactctgcactaagctgaca

SEQ ID NO: 2973473 - DNA, 25 bp, Homo sapien
gaagttgccagcaattcgcagtccc

SEQ ID NO: 2973474 - DNA, 25 bp, Homo sapien
gaagtgtcctctacagatcaagaag

SEQ ID NO: 2973475 - DNA, 25 bp, Homo sapien
aggcctcacagaagcatccaagact

SEQ ID NO: 2973476 - DNA, 25 bp, Homo sapien
ggtgtcacctgccttgtatgcaaaa

SEQ ID NO: 2973477 - DNA, 25 bp, Homo sapien
gcatatattgtacagagctatcagg

SEQ ID NO: 2973478 - DNA, 25 bp, Homo sapien
tcaacaagtgaacctgaggagaaag

SEQ ID NO: 2973479 - DNA, 25 bp, Homo sapien
tgtccagagtagagcgcacacatga

SEQ ID NO: 2973480 - DNA, 25 bp, Homo sapien
gtccagagtagagcgcacacatgaa

SEQ ID NO: 2973481 - DNA, 25 bp, Homo sapien
cagagtagagcgcacacatgaaaaa

SEQ ID NO: 2973482 - DNA, 25 bp, Homo sapien
agtagagcgcacacatgaaaaagta

SEQ ID NO: 2973483 - DNA, 25 bp, Homo sapien
tctaacatcgatttaaggatatctt

SEQ ID NO: 2973484 - DNA, 25 bp, Homo sapien
gaatgctttaagactgcgcttagaa

SEQ ID NO: 2973485 - DNA, 25 bp, Homo sapien
tgcgcttagaaatctggccgtttgg

SEQ ID NO: 2973486 - DNA, 25 bp, Homo sapien
gaacacttctttgaacgctttctct

SEQ ID NO: 2973487 - DNA, 25 bp, Homo sapien
gcagctagtctatcagccacctcag

SEQ ID NO: 2973488 - DNA, 25 bp, Homo sapien
ggtccaggacctgtagcctgtgtga

SEQ ID NO: 2973489 - DNA, 25 bp, Homo sapien
cagtgcaggctctttcatgatggta

SEQ ID NO: 2973490 - DNA, 25 bp, Homo sapien
gcctgtgtgatagacaccagcagca

SEQ ID NO: 2973491 - DNA, 25 bp, Homo sapien
atctgcaagccattcccatcttttt

SEQ ID NO: 2973492 - DNA, 25 bp, Homo sapien
atctttttcagcaagaactgtcctt

SEQ ID NO: 2973493 - DNA, 25 bp, Homo sapien
tcagcaagaactgtccttccttcac

SEQ ID NO: 2973494 - DNA, 25 bp, Homo sapien
cctgcacgtccttccaaatggggga

SEQ ID NO: 2973495 - DNA, 25 bp, Homo sapien
tggtatgacatctcgcgcctttgaa

SEQ ID NO: 2973496 - DNA, 25 bp, Homo sapien
gatgtagcgggtatccattcacaca

SEQ ID NO: 2973497 - DNA, 25 bp, Homo sapien
cgtttctgggttaagtctgtgctca

SEQ ID NO: 2973498 - DNA, 25 bp, Homo sapien
cattagatttcctgaccgcctgcgt

SEQ ID NO: 2973499 - DNA, 25 bp, Homo sapien
tgccttctccaaccctaaacaccca

SEQ ID NO: 2973500 - DNA, 25 bp, Homo sapien
tggtctttgctgttacctggcattt

SEQ ID NO: 2973501 - DNA, 25 bp, Homo sapien
ctccaaccctaaacacccaaatctg

SEQ ID NO: 2973502 - DNA, 25 bp, Homo sapien
tggtgaaagcatccacatactctac

SEQ ID NO: 2973503 - DNA, 25 bp, Homo sapien
gctgctgcagatcctgcataactgc

SEQ ID NO: 2973504 - DNA, 25 bp, Homo sapien
taactgctccatgtgaatactggtg

SEQ ID NO: 2973505 - DNA, 25 bp, Homo sapien
tactctacacgaccgaggttacgcg

SEQ ID NO: 2973506 - DNA, 25 bp, Homo sapien
ctgaaggccctcaaagtgtgaccac

SEQ ID NO: 2973507 - DNA, 25 bp, Homo sapien
tgaaggccctcaaagtgtgaccacg

SEQ ID NO: 2973508 - DNA, 25 bp, Homo sapien
gccctcaaagtgtgaccacgtacat

SEQ ID NO: 2973509 - DNA, 25 bp, Homo sapien
aaggccctcaaagtgtgaccacgta

SEQ ID NO: 2973510 - DNA, 25 bp, Homo sapien
tcaggatcatacaagtggaggaagg

SEQ ID NO: 2973511 - DNA, 25 bp, Homo sapien
ggaaggtcttgccaatgtaaggtgt

SEQ ID NO: 2973512 - DNA, 25 bp, Homo sapien
ccagccttgagttcagggaagactt

SEQ ID NO: 2973513 - DNA, 25 bp, Homo sapien
gaagacttgtggcagaaatgacgct

SEQ ID NO: 2973514 - DNA, 25 bp, Homo sapien
tggcagtacaagcttcatgtctgaa

SEQ ID NO: 2973515 - DNA, 25 bp, Homo sapien
ttggcagtacaagcttcatgtctga

SEQ ID NO: 2973516 - DNA, 25 bp, Homo sapien
cacccaagtgttgtggttgatggta

SEQ ID NO: 2973517 - DNA, 25 bp, Homo sapien
gaccaagccatgagagatgtcttca

SEQ ID NO: 2973518 - DNA, 25 bp, Homo sapien
ggcgagtcctggaaacacccaagtg

SEQ ID NO: 2973519 - DNA, 25 bp, Homo sapien
catggtgagggagaactgcaaggcg

SEQ ID NO: 2973520 - DNA, 25 bp, Homo sapien
gaaaggctgccccagaaaactgagc

SEQ ID NO: 2973521 - DNA, 25 bp, Homo sapien
tccaaactaaattgggtaatgcata

SEQ ID NO: 2973522 - DNA, 25 bp, Homo sapien
cagaaaactgagcaacagccagagg

SEQ ID NO: 2973523 - DNA, 25 bp, Homo sapien
ttgggtaatgcatattttgtaagat

SEQ ID NO: 2973524 - DNA, 25 bp, Homo sapien
ggagcttggaggttggccgacgctg

SEQ ID NO: 2973525 - DNA, 25 bp, Homo sapien
gaggagcttggaggttggccgacgc

SEQ ID NO: 2973526 - DNA, 25 bp, Homo sapien
agcttggaggttggccgacgctggc

SEQ ID NO: 2973527 - DNA, 25 bp, Homo sapien
gcttggaggttggccgacgctggct

SEQ ID NO: 2973528 - DNA, 25 bp, Homo sapien
ttacacgaaagcttcccatttgaag

SEQ ID NO: 2973529 - DNA, 25 bp, Homo sapien
tacacgaaagcttcccatttgaagg

SEQ ID NO: 2973530 - DNA, 25 bp, Homo sapien
acacgaaagcttcccatttgaagga

SEQ ID NO: 2973531 - DNA, 25 bp, Homo sapien
cttacacgaaagcttcccatttgaa

SEQ ID NO: 2973532 - DNA, 25 bp, Homo sapien
gctaaaagcatcttgattgcaaaac

SEQ ID NO: 2973533 - DNA, 25 bp, Homo sapien
caaattaatctgatctgctctctct

SEQ ID NO: 2973534 - DNA, 25 bp, Homo sapien
taataaagccgtgctgtgatggcac

SEQ ID NO: 2973535 - DNA, 25 bp, Homo sapien
gattgcaaaactctcgaaggacgga

SEQ ID NO: 2973536 - DNA, 25 bp, Homo sapien
tcagtgtcgggtcccttatccgcac

SEQ ID NO: 2973537 - DNA, 25 bp, Homo sapien
gtcccttatccgcacccggacaaga

SEQ ID NO: 2973538 - DNA, 25 bp, Homo sapien
acctcttgtggaccacaaaacagca

SEQ ID NO: 2973539 - DNA, 25 bp, Homo sapien
atggcacctcttgtggaccacaaaa

SEQ ID NO: 2973540 - DNA, 25 bp, Homo sapien
ttaacatacaccgaaaaggcagcaa

SEQ ID NO: 2973541 - DNA, 25 bp, Homo sapien
tttaacatacaccgaaaaggcagca

SEQ ID NO: 2973542 - DNA, 25 bp, Homo sapien
aagcctgagccccgggtgcaaacac

SEQ ID NO: 2973543 - DNA, 25 bp, Homo sapien
gagccacatacttcagcatccaagc

SEQ ID NO: 2973544 - DNA, 25 bp, Homo sapien
taaatcctgcaccaattcaaagtgc

SEQ ID NO: 2973545 - DNA, 25 bp, Homo sapien
caccgctaacgttggttctcttaag

SEQ ID NO: 2973546 - DNA, 25 bp, Homo sapien
cacagtacagggctatcaatcaatg

SEQ ID NO: 2973547 - DNA, 25 bp, Homo sapien
aagggcttcagtaatgtggcctggc

SEQ ID NO: 2973548 - DNA, 25 bp, Homo sapien
taactttaccgtgtcagttcaggaa

SEQ ID NO: 2973549 - DNA, 25 bp, Homo sapien
tgggagggcaggaactctctttacc

SEQ ID NO: 2973550 - DNA, 25 bp, Homo sapien
tggtcagcctggctggtcttgagct

SEQ ID NO: 2973551 - DNA, 25 bp, Homo sapien
tttcaccatgttggtcagcctggct

SEQ ID NO: 2973552 - DNA, 25 bp, Homo sapien
caccatgttggtcagcctggctggt

SEQ ID NO: 2973553 - DNA, 25 bp, Homo sapien
atgttggtcagcctggctggtcttg

SEQ ID NO: 2973554 - DNA, 25 bp, Homo sapien
tgcacggagaataggcaagagtgct

SEQ ID NO: 2973555 - DNA, 25 bp, Homo sapien
cataagcaatggcttgcagggtgga

SEQ ID NO: 2973556 - DNA, 25 bp, Homo sapien
gggtgttacaccatgatcaatcagg

SEQ ID NO: 2973557 - DNA, 25 bp, Homo sapien
gatggagacaaccaagaaaatcctg

SEQ ID NO: 2973558 - DNA, 25 bp, Homo sapien
caaatggttacactaacggccccag

SEQ ID NO: 2973559 - DNA, 25 bp, Homo sapien
aagtcagagatcatactaggcattg

SEQ ID NO: 2973560 - DNA, 25 bp, Homo sapien
cagagatgaataagatttacaggaa

SEQ ID NO: 2973561 - DNA, 25 bp, Homo sapien
ttatgtgccgacttgactgggcccc

SEQ ID NO: 2973562 - DNA, 25 bp, Homo sapien
gaagatgtccgatcacacggcaggt

SEQ ID NO: 2973563 - DNA, 25 bp, Homo sapien
tatttggaagatgtccgatcacacg

SEQ ID NO: 2973564 - DNA, 25 bp, Homo sapien
tgtccgatcacacggcaggtctcag

SEQ ID NO: 2973565 - DNA, 25 bp, Homo sapien
ttttatttggaagatgtccgatcac

SEQ ID NO: 2973566 - DNA, 25 bp, Homo sapien
gagcgagcctcctattcagttcaag

SEQ ID NO: 2973567 - DNA, 25 bp, Homo sapien
cagttcaagtcgctgcttagtcagg

SEQ ID NO: 2973568 - DNA, 25 bp, Homo sapien
tattactcacgtttgaatcccagga

SEQ ID NO: 2973569 - DNA, 25 bp, Homo sapien
cacctaccgggtaacaaagatgaga

SEQ ID NO: 2973570 - DNA, 25 bp, Homo sapien
aactttgttccaggtagaaacatgc

SEQ ID NO: 2973571 - DNA, 25 bp, Homo sapien
aacattttccaaatcggagtggcta

SEQ ID NO: 2973572 - DNA, 25 bp, Homo sapien
gcaaacaaaaccatccagataaacc

SEQ ID NO: 2973573 - DNA, 25 bp, Homo sapien
catgatatggttctggccaagatga

SEQ ID NO: 2973574 - DNA, 25 bp, Homo sapien
tgggtatggtgatgcactcctgcag

SEQ ID NO: 2973575 - DNA, 25 bp, Homo sapien
aacaacttagacatagtacaactac

SEQ ID NO: 2973576 - DNA, 25 bp, Homo sapien
acaaaataaacaacttagacatagt

SEQ ID NO: 2973577 - DNA, 25 bp, Homo sapien
gcccagagaattgaggccgcagtga

SEQ ID NO: 2973578 - DNA, 25 bp, Homo sapien
acccaagctgctttaatgaatactg

SEQ ID NO: 2973579 - DNA, 25 bp, Homo sapien
ggatgctctgccgtttctacaggca

SEQ ID NO: 2973580 - DNA, 25 bp, Homo sapien
tacaggcaacccaagctgctttaat

SEQ ID NO: 2973581 - DNA, 25 bp, Homo sapien
gtcctgcagatgaagtctgctaccc

SEQ ID NO: 2973582 - DNA, 25 bp, Homo sapien
cagagaatatcttacgaaacaggag

SEQ ID NO: 2973583 - DNA, 25 bp, Homo sapien
tggtagcattcacagtaaaatcctg

SEQ ID NO: 2973584 - DNA, 25 bp, Homo sapien
taggaggcccttcaacttacaaagc

SEQ ID NO: 2973585 - DNA, 25 bp, Homo sapien
taatagggaccgattcagaacacta

SEQ ID NO: 2973586 - DNA, 25 bp, Homo sapien
ccagtacagaaggaattcggtctct

SEQ ID NO: 2973587 - DNA, 25 bp, Homo sapien
gaacagacactatggttttcactgc

SEQ ID NO: 2973588 - DNA, 25 bp, Homo sapien
tcggtcctgccaactgacaagagct

SEQ ID NO: 2973589 - DNA, 25 bp, Homo sapien
tctgggagatcacaaacaggagctt

SEQ ID NO: 2973590 - DNA, 25 bp, Homo sapien
gatactgttggaaaccggagggcac

SEQ ID NO: 2973591 - DNA, 25 bp, Homo sapien
gcagaaatcaagaccccactggatt

SEQ ID NO: 2973592 - DNA, 25 bp, Homo sapien
tatcaaggaagtcctggtggcacag

SEQ ID NO: 2973593 - DNA, 25 bp, Homo sapien
tgcagccagaatgacagtgtgacca

SEQ ID NO: 2973594 - DNA, 25 bp, Homo sapien
caaatagtcaggtgcattcgctttt

SEQ ID NO: 2973595 - DNA, 25 bp, Homo sapien
ctcagccatattcagggaagggagc

SEQ ID NO: 2973596 - DNA, 25 bp, Homo sapien
caggtgcattcgctttttctcagcc

SEQ ID NO: 2973597 - DNA, 25 bp, Homo sapien
ttctcagccatattcagggaaggga

SEQ ID NO: 2973598 - DNA, 25 bp, Homo sapien
taagtggatggtccaaaatgtgaaa

SEQ ID NO: 2973599 - DNA, 25 bp, Homo sapien
atgccaaccttccagggcctatttc

SEQ ID NO: 2973600 - DNA, 25 bp, Homo sapien
tccaatgccaaccttccagggccta

SEQ ID NO: 2973601 - DNA, 25 bp, Homo sapien
aagtggatggtccaaaatgtgaaag

SEQ ID NO: 2973602 - DNA, 25 bp, Homo sapien
aaaacacgtgtacagctgggcacca

SEQ ID NO: 2973603 - DNA, 25 bp, Homo sapien
tctcacacgtgccagcgctaatctg

SEQ ID NO: 2973604 - DNA, 25 bp, Homo sapien
gcaggtccatgagccctggcgatct

SEQ ID NO: 2973605 - DNA, 25 bp, Homo sapien
actatttacatccatctgaagcagg

SEQ ID NO: 2973606 - DNA, 25 bp, Homo sapien
tcatcgggtaatgtcaattccaccc

SEQ ID NO: 2973607 - DNA, 25 bp, Homo sapien
gctccatggcccttaccagtggctt

SEQ ID NO: 2973608 - DNA, 25 bp, Homo sapien
tgggaaggaagcttgatggcccgtg

SEQ ID NO: 2973609 - DNA, 25 bp, Homo sapien
attccacccacaagtgatgggaagg

SEQ ID NO: 2973610 - DNA, 25 bp, Homo sapien
catggtgctctgtcagcaaaggcgc

SEQ ID NO: 2973611 - DNA, 25 bp, Homo sapien
gaggctcggcagcttagctcctcag

SEQ ID NO: 2973612 - DNA, 25 bp, Homo sapien
taatgcaggagcgaatccacagagg

SEQ ID NO: 2973613 - DNA, 25 bp, Homo sapien
tagaagccgaacacagctcctctct

SEQ ID NO: 2973614 - DNA, 25 bp, Homo sapien
taaggttacaattgccttccagtat

SEQ ID NO: 2973615 - DNA, 25 bp, Homo sapien
tgttggctgcctaaggttacaattg

SEQ ID NO: 2973616 - DNA, 25 bp, Homo sapien
ccaaaggactgaagtgttgttggct

SEQ ID NO: 2973617 - DNA, 25 bp, Homo sapien
tccagtattttccagccgtgggttc

SEQ ID NO: 2973618 - DNA, 25 bp, Homo sapien
tcttgcctggttgcttaagaccaac

SEQ ID NO: 2973619 - DNA, 25 bp, Homo sapien
taggctaacagttggaagctccact

SEQ ID NO: 2973620 - DNA, 25 bp, Homo sapien
tgtttaaatgcctgagaagccggct

SEQ ID NO: 2973621 - DNA, 25 bp, Homo sapien
caacagccttgcaggaaactcgcaa

SEQ ID NO: 2973622 - DNA, 25 bp, Homo sapien
catcattgatagcttctactgctgc

SEQ ID NO: 2973623 - DNA, 25 bp, Homo sapien
acaatggtaataaaagtgataacca

SEQ ID NO: 2973624 - DNA, 25 bp, Homo sapien
caatggtaataaaagtgataaccac

SEQ ID NO: 2973625 - DNA, 25 bp, Homo sapien
gtgatgatgacatcaacagcagcat

SEQ ID NO: 2973626 - DNA, 25 bp, Homo sapien
tttccacagtgtgggataccatagg

SEQ ID NO: 2973627 - DNA, 25 bp, Homo sapien
aaatacttgcacataccttgtctta

SEQ ID NO: 2973628 - DNA, 25 bp, Homo sapien
gataccataggtgtgaccattttct

SEQ ID NO: 2973629 - DNA, 25 bp, Homo sapien
tctaccaaatacttgcacatacctt

SEQ ID NO: 2973630 - DNA, 25 bp, Homo sapien
attgcaagctctttgcaagaaagac

SEQ ID NO: 2973631 - DNA, 25 bp, Homo sapien
gaatgtgtcgcttcctttccacccg

SEQ ID NO: 2973632 - DNA, 25 bp, Homo sapien
caagaaagacgaatgtgtcgcttcc

SEQ ID NO: 2973633 - DNA, 25 bp, Homo sapien
tctttgcaagaaagacgaatgtgtc

SEQ ID NO: 2973634 - DNA, 25 bp, Homo sapien
gctttaagccacgacattttaggga

SEQ ID NO: 2973635 - DNA, 25 bp, Homo sapien
cagccataaggaactaagggtccag

SEQ ID NO: 2973636 - DNA, 25 bp, Homo sapien
gcttttaggaagcaaggagcccatg

SEQ ID NO: 2973637 - DNA, 25 bp, Homo sapien
aagggtccagtctaacgtcaacgag

SEQ ID NO: 2973638 - DNA, 25 bp, Homo sapien
gagtgagtaggatctcaaaaggtag

SEQ ID NO: 2973639 - DNA, 25 bp, Homo sapien
ggatctcaaaaggtagaggcagact

SEQ ID NO: 2973640 - DNA, 25 bp, Homo sapien
gtagaggcagactagcaatacaggg

SEQ ID NO: 2973641 - DNA, 25 bp, Homo sapien
cttcggagagtgagtaggatctcaa

SEQ ID NO: 2973642 - DNA, 25 bp, Homo sapien
catgagagagcagttgcaccaacaa

SEQ ID NO: 2973643 - DNA, 25 bp, Homo sapien
gaatttattcattcgaaaatcctaa

SEQ ID NO: 2973644 - DNA, 25 bp, Homo sapien
cattcgaaaatcctaatgagtaatc

SEQ ID NO: 2973645 - DNA, 25 bp, Homo sapien
tgaatcagattttggtacctattac

SEQ ID NO: 2973646 - DNA, 25 bp, Homo sapien
aaacgagtacatttgctggcaggtg

SEQ ID NO: 2973647 - DNA, 25 bp, Homo sapien
tccctagatgtcagcaaacgagtac

SEQ ID NO: 2973648 - DNA, 25 bp, Homo sapien
caattgggaacggtgggcagtattc

SEQ ID NO: 2973649 - DNA, 25 bp, Homo sapien
tattcagaagcatcacaaggctccc

SEQ ID NO: 2973650 - DNA, 25 bp, Homo sapien
ccccagcggccagaactcattagat

SEQ ID NO: 2973651 - DNA, 25 bp, Homo sapien
gctgttgacttgaaaccgttctggg

SEQ ID NO: 2973652 - DNA, 25 bp, Homo sapien
caattacagccgtccacatacaagg

SEQ ID NO: 2973653 - DNA, 25 bp, Homo sapien
caccggctgcgtgtctttgtatgaa

SEQ ID NO: 2973654 - DNA, 25 bp, Homo sapien
cccttctacaggtctgaccaagaat

SEQ ID NO: 2973655 - DNA, 25 bp, Homo sapien
ctgaccaagaatggacagcacagtg

SEQ ID NO: 2973656 - DNA, 25 bp, Homo sapien
tttcccttctacaggtctgaccaag

SEQ ID NO: 2973657 - DNA, 25 bp, Homo sapien
gtctgaccaagaatggacagcacag

SEQ ID NO: 2973658 - DNA, 25 bp, Homo sapien
cagctggtaggatggaccacacaga

SEQ ID NO: 2973659 - DNA, 25 bp, Homo sapien
tggaatatcagataaccccagctgg

SEQ ID NO: 2973660 - DNA, 25 bp, Homo sapien
ccttaggtgtcctccagggtgcctg

SEQ ID NO: 2973661 - DNA, 25 bp, Homo sapien
tgtgtccttgtcagatgagtttccc

SEQ ID NO: 2973662 - DNA, 25 bp, Homo sapien
acaccaaacagtaggggcacctgca

SEQ ID NO: 2973663 - DNA, 25 bp, Homo sapien
caaacaccaaacagtaggggcacct

SEQ ID NO: 2973664 - DNA, 25 bp, Homo sapien
aaacaccaaacagtaggggcacctg

SEQ ID NO: 2973665 - DNA, 25 bp, Homo sapien
aacaccaaacagtaggggcacctgc

SEQ ID NO: 2973666 - DNA, 25 bp, Homo sapien
ggagagagcaaacactgacatccca

SEQ ID NO: 2973667 - DNA, 25 bp, Homo sapien
agagggtagggaggagagagcaaac

SEQ ID NO: 2973668 - DNA, 25 bp, Homo sapien
ttgaggtaacagagggtagggagga

SEQ ID NO: 2973669 - DNA, 25 bp, Homo sapien
gagagagcaaacactgacatcccag

SEQ ID NO: 2973670 - DNA, 25 bp, Homo sapien
gtctggctccgaggtggatctggaa

SEQ ID NO: 2973671 - DNA, 25 bp, Homo sapien
tcaagtgtctggctccgaggtggat

SEQ ID NO: 2973672 - DNA, 25 bp, Homo sapien
gtgtctggctccgaggtggatctgg

SEQ ID NO: 2973673 - DNA, 25 bp, Homo sapien
aagtgtctggctccgaggtggatct

SEQ ID NO: 2973674 - DNA, 25 bp, Homo sapien
taataaggatgttttcccaaacgca

SEQ ID NO: 2973675 - DNA, 25 bp, Homo sapien
aataaggatgttttcccaaacgcag

SEQ ID NO: 2973676 - DNA, 25 bp, Homo sapien
ataaggatgttttcccaaacgcagg

SEQ ID NO: 2973677 - DNA, 25 bp, Homo sapien
tttatctgctctacggactcaggtt

SEQ ID NO: 2973678 - DNA, 25 bp, Homo sapien
taaaccacttgcctaggtcaatagt

SEQ ID NO: 2973679 - DNA, 25 bp, Homo sapien
gcaaaagtatatgtctaccgtcaaa

SEQ ID NO: 2973680 - DNA, 25 bp, Homo sapien
tatataccgacaagaattacttttg

SEQ ID NO: 2973681 - DNA, 25 bp, Homo sapien
aaagatggttgcgtttaggtactgc

SEQ ID NO: 2973682 - DNA, 25 bp, Homo sapien
tctgatgggtgaatgtcgcacttca

SEQ ID NO: 2973683 - DNA, 25 bp, Homo sapien
tatctgttgctcatagcgtgctagg

SEQ ID NO: 2973684 - DNA, 25 bp, Homo sapien
cgtgctaggcaagctagaattactc

SEQ ID NO: 2973685 - DNA, 25 bp, Homo sapien
taaaaatatagagactgactgaggg

SEQ ID NO: 2973686 - DNA, 25 bp, Homo sapien
tctccgtgctagacagggttctaag

SEQ ID NO: 2973687 - DNA, 25 bp, Homo sapien
tgacaactgcgctgtttctccgtgc

SEQ ID NO: 2973688 - DNA, 25 bp, Homo sapien
gagacagggattattgtcgtcccca

SEQ ID NO: 2973689 - DNA, 25 bp, Homo sapien
tcctcacagccactatgcagtaggt

SEQ ID NO: 2973690 - DNA, 25 bp, Homo sapien
ggtaagtaacacgtcccaggatgta

SEQ ID NO: 2973691 - DNA, 25 bp, Homo sapien
tctgaaacagcaaggtagagttggt

SEQ ID NO: 2973692 - DNA, 25 bp, Homo sapien
gagagttttaatcagcctaccaatc

SEQ ID NO: 2973693 - DNA, 25 bp, Homo sapien
gagagcagcactctaattcttcaag

SEQ ID NO: 2973694 - DNA, 25 bp, Homo sapien
tgattgtctattcttaacccctgca

SEQ ID NO: 2973695 - DNA, 25 bp, Homo sapien
cactagctcaggattagatgtctac

SEQ ID NO: 2973696 - DNA, 25 bp, Homo sapien
gaccattaactgtgacttccttcag

SEQ ID NO: 2973697 - DNA, 25 bp, Homo sapien
atatacctaagttgaggatcttgag

SEQ ID NO: 2973698 - DNA, 25 bp, Homo sapien
ggccctaaattcaacgactgatgta

SEQ ID NO: 2973699 - DNA, 25 bp, Homo sapien
gagataaggtgatctagaatttagg

SEQ ID NO: 2973700 - DNA, 25 bp, Homo sapien
agagtttttgcaaatatacctaagt

SEQ ID NO: 2973701 - DNA, 25 bp, Homo sapien
ggccagaattccaaggaagcacagc

SEQ ID NO: 2973702 - DNA, 25 bp, Homo sapien
tgcgatgatagtgttctctggctcc

SEQ ID NO: 2973703 - DNA, 25 bp, Homo sapien
gatggtagtgctgtaaggctttctc

SEQ ID NO: 2973704 - DNA, 25 bp, Homo sapien
ttttaccctcaaggagatgacgcgt

SEQ ID NO: 2973705 - DNA, 25 bp, Homo sapien
ccatggtagccccagtgatcattcc

SEQ ID NO: 2973706 - DNA, 25 bp, Homo sapien
gggtttctggtcaaatcattcagac

SEQ ID NO: 2973707 - DNA, 25 bp, Homo sapien
tttcctcctcacgttgactctcggg

SEQ ID NO: 2973708 - DNA, 25 bp, Homo sapien
tagtctcaattaggtggtatttgtc

SEQ ID NO: 2973709 - DNA, 25 bp, Homo sapien
tactcacaaagtgagatatgtgtaa

SEQ ID NO: 2973710 - DNA, 25 bp, Homo sapien
ggtgatctgcctactgtgacctctc

SEQ ID NO: 2973711 - DNA, 25 bp, Homo sapien
ttttactcacaaagtgagatatgtg

SEQ ID NO: 2973712 - DNA, 25 bp, Homo sapien
ctcacaaagtgagatatgtgtaaaa

SEQ ID NO: 2973713 - DNA, 25 bp, Homo sapien
tataatgtcataagattccccagca

SEQ ID NO: 2973714 - DNA, 25 bp, Homo sapien
ggcaggactgtctctttaggtacct

SEQ ID NO: 2973715 - DNA, 25 bp, Homo sapien
ggaggcagaaggtgtaaccatgtct

SEQ ID NO: 2973716 - DNA, 25 bp, Homo sapien
taggtacctccgaacttcaccctga

SEQ ID NO: 2973717 - DNA, 25 bp, Homo sapien
aggttctcaccgtttggaggtgtag

SEQ ID NO: 2973718 - DNA, 25 bp, Homo sapien
tgcacaggaacaacgctcatctctg

SEQ ID NO: 2973719 - DNA, 25 bp, Homo sapien
tctgtttcactccaagttttgtatt

SEQ ID NO: 2973720 - DNA, 25 bp, Homo sapien
gcacgtgatccttgcacaggaacaa

SEQ ID NO: 2973721 - DNA, 25 bp, Homo sapien
cacatatttgcacgtgatccttgca

SEQ ID NO: 2973722 - DNA, 25 bp, Homo sapien
gggcttccgtaagtgtggattttga

SEQ ID NO: 2973723 - DNA, 25 bp, Homo sapien
ccgtaagtgtggattttgaacttgt

SEQ ID NO: 2973724 - DNA, 25 bp, Homo sapien
atggataagtccatagagcagtgac

SEQ ID NO: 2973725 - DNA, 25 bp, Homo sapien
tcatcccttgatggataagtccata

SEQ ID NO: 2973726 - DNA, 25 bp, Homo sapien
caacctcagcctttaggtaaatccg

SEQ ID NO: 2973727 - DNA, 25 bp, Homo sapien
gatccattccgcagaggctggggac

SEQ ID NO: 2973728 - DNA, 25 bp, Homo sapien
tgcttgtgaacgttcatatcgcagg

SEQ ID NO: 2973729 - DNA, 25 bp, Homo sapien
gggacattgatgacgcattgcttgt

SEQ ID NO: 2973730 - DNA, 25 bp, Homo sapien
ctgctccgggatgagcaagccttac

SEQ ID NO: 2973731 - DNA, 25 bp, Homo sapien
cctgccttaatatcagtgtaacctt

SEQ ID NO: 2973732 - DNA, 25 bp, Homo sapien
gccttaatatcagtgtaaccttcat

SEQ ID NO: 2973733 - DNA, 25 bp, Homo sapien
caaatgcctgcccacgatgctgctc

SEQ ID NO: 2973734 - DNA, 25 bp, Homo sapien
ctggatagggaattccggtcccata

SEQ ID NO: 2973735 - DNA, 25 bp, Homo sapien
agggaattccggtcccatagccagg

SEQ ID NO: 2973736 - DNA, 25 bp, Homo sapien
atagggaattccggtcccatagcca

SEQ ID NO: 2973737 - DNA, 25 bp, Homo sapien
ggatagggaattccggtcccatagc

SEQ ID NO: 2973738 - DNA, 25 bp, Homo sapien
taagactccaggataacttgactga

SEQ ID NO: 2973739 - DNA, 25 bp, Homo sapien
acttgactgagtgtgccgatgaacc

SEQ ID NO: 2973740 - DNA, 25 bp, Homo sapien
tgccgatgaaccgaaagtggatttg

SEQ ID NO: 2973741 - DNA, 25 bp, Homo sapien
ccaggataacttgactgagtgtgcc

SEQ ID NO: 2973742 - DNA, 25 bp, Homo sapien
gctgatcaaatgaaaatgaatgccc

SEQ ID NO: 2973743 - DNA, 25 bp, Homo sapien
tgatgcctgagagctgaaccataca

SEQ ID NO: 2973744 - DNA, 25 bp, Homo sapien
ccaacatggagtgggtcatggtacc

SEQ ID NO: 2973745 - DNA, 25 bp, Homo sapien
ggtaatgtatacagttggtccctca

SEQ ID NO: 2973746 - DNA, 25 bp, Homo sapien
agaatgccagctaaacatttcaggc

SEQ ID NO: 2973747 - DNA, 25 bp, Homo sapien
gggcgtgtccagcatgcatagcaca

SEQ ID NO: 2973748 - DNA, 25 bp, Homo sapien
cttttattacagaagacggcacggg

SEQ ID NO: 2973749 - DNA, 25 bp, Homo sapien
gtaagctctagcacgataaggcctg

SEQ ID NO: 2973750 - DNA, 25 bp, Homo sapien
gaaggttccggcagtaccatatggt

SEQ ID NO: 2973751 - DNA, 25 bp, Homo sapien
aaccaaaggagcagatacatctgct

SEQ ID NO: 2973752 - DNA, 25 bp, Homo sapien
aaaccaaaggagcagatacatctgc

SEQ ID NO: 2973753 - DNA, 25 bp, Homo sapien
caaaccaaaggagcagatacatctg

SEQ ID NO: 2973754 - DNA, 25 bp, Homo sapien
ccaaaccaaaggagcagatacatct

SEQ ID NO: 2973755 - DNA, 25 bp, Homo sapien
ccaacagtggacactctgggtgccc

SEQ ID NO: 2973756 - DNA, 25 bp, Homo sapien
gagaacgctgaaccaggtggtcaaa

SEQ ID NO: 2973757 - DNA, 25 bp, Homo sapien
gagggatctgctgagaacgctgaac

SEQ ID NO: 2973758 - DNA, 25 bp, Homo sapien
ggtcaaatgcaggatcaccaacagt

SEQ ID NO: 2973759 - DNA, 25 bp, Homo sapien
gtgagtgctcttcatgaaccaggct

SEQ ID NO: 2973760 - DNA, 25 bp, Homo sapien
caggtgagtgctcttcatgaaccag

SEQ ID NO: 2973761 - DNA, 25 bp, Homo sapien
caaggaaacacagcgttgggttgag

SEQ ID NO: 2973762 - DNA, 25 bp, Homo sapien
caggggccaggtgagtgctcttcat

SEQ ID NO: 2973763 - DNA, 25 bp, Homo sapien
cccagatcgaggagagtggtatcca

SEQ ID NO: 2973764 - DNA, 25 bp, Homo sapien
gccatcatagatccctgttacctcg

SEQ ID NO: 2973765 - DNA, 25 bp, Homo sapien
agctttgccaatactgtgcccacaa

SEQ ID NO: 2973766 - DNA, 25 bp, Homo sapien
atgcagaatgcaaacggcccactca

SEQ ID NO: 2973767 - DNA, 25 bp, Homo sapien
caccagtgaactcaaggcaggtgac

SEQ ID NO: 2973768 - DNA, 25 bp, Homo sapien
accagtgaactcaaggcaggtgact

SEQ ID NO: 2973769 - DNA, 25 bp, Homo sapien
gcaccagtgaactcaaggcaggtga

SEQ ID NO: 2973770 - DNA, 25 bp, Homo sapien
ccagtgaactcaaggcaggtgactg

SEQ ID NO: 2973771 - DNA, 25 bp, Homo sapien
ttaatcttgtgcttaaatgataatc

SEQ ID NO: 2973772 - DNA, 25 bp, Homo sapien
gcaattaatcttgtgcttaaatgat

SEQ ID NO: 2973773 - DNA, 25 bp, Homo sapien
cacagcaattaatcttgtgcttaaa

SEQ ID NO: 2973774 - DNA, 25 bp, Homo sapien
ttcacagcaattaatcttgtgctta

SEQ ID NO: 2973775 - DNA, 25 bp, Homo sapien
gacatgcttcagtccattgagctac

SEQ ID NO: 2973776 - DNA, 25 bp, Homo sapien
ccccacaggttgtaggaaggacgag

SEQ ID NO: 2973777 - DNA, 25 bp, Homo sapien
ttgagctacatgacttaacgtgact

SEQ ID NO: 2973778 - DNA, 25 bp, Homo sapien
tatagctacaccatgaaagagtcag

SEQ ID NO: 2973779 - DNA, 25 bp, Homo sapien
aaaccaaatgcacagcctcacaggc

SEQ ID NO: 2973780 - DNA, 25 bp, Homo sapien
taaaccaaatgcacagcctcacagg

SEQ ID NO: 2973781 - DNA, 25 bp, Homo sapien
ttgatgattcctggtactaaaccaa

SEQ ID NO: 2973782 - DNA, 25 bp, Homo sapien
gattcctggtactaaaccaaatgca

SEQ ID NO: 2973783 - DNA, 25 bp, Homo sapien
tgttccatgtctacagactgacagc

SEQ ID NO: 2973784 - DNA, 25 bp, Homo sapien
gctgtcagcccttagccttgcacaa

SEQ ID NO: 2973785 - DNA, 25 bp, Homo sapien
tagcccagcccaaaggtgttccatg

SEQ ID NO: 2973786 - DNA, 25 bp, Homo sapien
tagccttgcacaagacccatttcct

SEQ ID NO: 2973787 - DNA, 25 bp, Homo sapien
tttcagaacctgtgtgcaaagggac

SEQ ID NO: 2973788 - DNA, 25 bp, Homo sapien
tgcagggaccgagggatcgtcctct

SEQ ID NO: 2973789 - DNA, 25 bp, Homo sapien
ttcctctgggtcattcctacttcgg

SEQ ID NO: 2973790 - DNA, 25 bp, Homo sapien
gcaaagggacagcagccttcctctg

SEQ ID NO: 2973791 - DNA, 25 bp, Homo sapien
cctcggcaaatgttgattgggaaac

SEQ ID NO: 2973792 - DNA, 25 bp, Homo sapien
gagtgacagattgcctccagaacag

SEQ ID NO: 2973793 - DNA, 25 bp, Homo sapien
acaagtcagttctgcaccgggagcc

SEQ ID NO: 2973794 - DNA, 25 bp, Homo sapien
gaacaggatttaccgagcgcccttc

SEQ ID NO: 2973795 - DNA, 25 bp, Homo sapien
tgcttcctcgttattctagctgcgt

SEQ ID NO: 2973796 - DNA, 25 bp, Homo sapien
cctcgttattctagctgcgtttttc

SEQ ID NO: 2973797 - DNA, 25 bp, Homo sapien
cctctgcttcctcgttattctagct

SEQ ID NO: 2973798 - DNA, 25 bp, Homo sapien
tattctagctgcgtttttccagagc

SEQ ID NO: 2973799 - DNA, 25 bp, Homo sapien
tcttttctcccggcttttctggtgc

SEQ ID NO: 2973800 - DNA, 25 bp, Homo sapien
acttctggacaaacatgactcacag

SEQ ID NO: 2973801 - DNA, 25 bp, Homo sapien
tcagggtatctgatctggctgtgac

SEQ ID NO: 2973802 - DNA, 25 bp, Homo sapien
tggacaaacatgactcacagcctcc

SEQ ID NO: 2973803 - DNA, 25 bp, Homo sapien
gcttcaacccaggagccagaggttt

SEQ ID NO: 2973804 - DNA, 25 bp, Homo sapien
attagccgggtgtagcagcgtgcgc

SEQ ID NO: 2973805 - DNA, 25 bp, Homo sapien
agccgggtgtagcagcgtgcgcctg

SEQ ID NO: 2973806 - DNA, 25 bp, Homo sapien
gccaaggtgggtgcactgcctgagc

SEQ ID NO: 2973807 - DNA, 25 bp, Homo sapien
aggcatgagcaaaaatgttctctga

SEQ ID NO: 2973808 - DNA, 25 bp, Homo sapien
ggcatgagcaaaaatgttctctgac

SEQ ID NO: 2973809 - DNA, 25 bp, Homo sapien
caggcatgagcaaaaatgttctctg

SEQ ID NO: 2973810 - DNA, 25 bp, Homo sapien
gcatgagcaaaaatgttctctgaca

SEQ ID NO: 2973811 - DNA, 25 bp, Homo sapien
aggcccccaggggacttggtcactg

SEQ ID NO: 2973812 - DNA, 25 bp, Homo sapien
gctggaatctatagggttggaggcc

SEQ ID NO: 2973813 - DNA, 25 bp, Homo sapien
ctggaatctatagggttggaggccc

SEQ ID NO: 2973814 - DNA, 25 bp, Homo sapien
tcactggagaattcaccaagctcat

SEQ ID NO: 2973815 - DNA, 25 bp, Homo sapien
ccaggcatgatgttccggactcctt

SEQ ID NO: 2973816 - DNA, 25 bp, Homo sapien
gcatgatgttccggactcctttcca

SEQ ID NO: 2973817 - DNA, 25 bp, Homo sapien
aggcatgatgttccggactcctttc

SEQ ID NO: 2973818 - DNA, 25 bp, Homo sapien
cccaggcatgatgttccggactcct

SEQ ID NO: 2973819 - DNA, 25 bp, Homo sapien
gctccccaggagtaatggtgcaccc

SEQ ID NO: 2973820 - DNA, 25 bp, Homo sapien
gtgcaccctccctgcatggaagcga

SEQ ID NO: 2973821 - DNA, 25 bp, Homo sapien
atggaagcgaccagcccaacctggt

SEQ ID NO: 2973822 - DNA, 25 bp, Homo sapien
aacctggtctatggtgccacacacg

SEQ ID NO: 2973823 - DNA, 25 bp, Homo sapien
gggattagattttttgcatctcgta

SEQ ID NO: 2973824 - DNA, 25 bp, Homo sapien
agggattagattttttgcatctcgt

SEQ ID NO: 2973825 - DNA, 25 bp, Homo sapien
taaggatctgaaagcccgtttggat

SEQ ID NO: 2973826 - DNA, 25 bp, Homo sapien
acataaggatctgaaagcccgtttg

SEQ ID NO: 2973827 - DNA, 25 bp, Homo sapien
tccactgcggatttagtgtggagcg

SEQ ID NO: 2973828 - DNA, 25 bp, Homo sapien
aatgtaaaggactcattccactgcg

SEQ ID NO: 2973829 - DNA, 25 bp, Homo sapien
gttcgatcccagtcccagatttcta

SEQ ID NO: 2973830 - DNA, 25 bp, Homo sapien
gaagtcattccttgttgttcgatcc

SEQ ID NO: 2973831 - DNA, 25 bp, Homo sapien
ttcatcagctccgaaactccaaagg

SEQ ID NO: 2973832 - DNA, 25 bp, Homo sapien
tacagacagtcgtcggtctttgtct

SEQ ID NO: 2973833 - DNA, 25 bp, Homo sapien
atgggtacgttgtagtactcacctt

SEQ ID NO: 2973834 - DNA, 25 bp, Homo sapien
gaatgggtacgttgtagtactcacc

SEQ ID NO: 2973835 - DNA, 25 bp, Homo sapien
aatgggtacgttgtagtactcacct

SEQ ID NO: 2973836 - DNA, 25 bp, Homo sapien
cggaatgggtacgttgtagtactca

SEQ ID NO: 2973837 - DNA, 25 bp, Homo sapien
tgtttccgggcattttgttatcctc

SEQ ID NO: 2973838 - DNA, 25 bp, Homo sapien
gtttccgggcattttgttatcctca

SEQ ID NO: 2973839 - DNA, 25 bp, Homo sapien
aaatgtgaccacaacatctcggccg

SEQ ID NO: 2973840 - DNA, 25 bp, Homo sapien
gattacacacaaatgagctcccaag

SEQ ID NO: 2973841 - DNA, 25 bp, Homo sapien
cagtgaatccgggacagaggcaaac

SEQ ID NO: 2973842 - DNA, 25 bp, Homo sapien
aatcaaccatgctctcagttctgcg

SEQ ID NO: 2973843 - DNA, 25 bp, Homo sapien
tttgaagagcagagactgcaagctg

SEQ ID NO: 2973844 - DNA, 25 bp, Homo sapien
ttgaagagcagagactgcaagctgg

SEQ ID NO: 2973845 - DNA, 25 bp, Homo sapien
ttttgaagagcagagactgcaagct

SEQ ID NO: 2973846 - DNA, 25 bp, Homo sapien
aggtggtcctgtccagtaccccagg

SEQ ID NO: 2973847 - DNA, 25 bp, Homo sapien
gtggtcctgtccagtaccccaggtc

SEQ ID NO: 2973848 - DNA, 25 bp, Homo sapien
tggtcctgtccagtaccccaggtct

SEQ ID NO: 2973849 - DNA, 25 bp, Homo sapien
catggaaggataaggacagactgga

SEQ ID NO: 2973850 - DNA, 25 bp, Homo sapien
cagttagttggcgagaaagggccca

SEQ ID NO: 2973851 - DNA, 25 bp, Homo sapien
caacaggacgaaccctcgtgtgtgt

SEQ ID NO: 2973852 - DNA, 25 bp, Homo sapien
tcgaaaactgcatggagggaaccct

SEQ ID NO: 2973853 - DNA, 25 bp, Homo sapien
cttcctgggtacagctcaagatgtg

SEQ ID NO: 2973854 - DNA, 25 bp, Homo sapien
tgtagcccaagtaggctcagggaaa

SEQ ID NO: 2973855 - DNA, 25 bp, Homo sapien
caaggctctgaaggtagatgtagcc

SEQ ID NO: 2973856 - DNA, 25 bp, Homo sapien
tgaatgtagcatgtaacttcctggg

SEQ ID NO: 2973857 - DNA, 25 bp, Homo sapien
tcttgggtcctgatactcaaatgag

SEQ ID NO: 2973858 - DNA, 25 bp, Homo sapien
gaaaggaatatacgatgcccagcac

SEQ ID NO: 2973859 - DNA, 25 bp, Homo sapien
tcatacaagcttcaagggacattgc

SEQ ID NO: 2973860 - DNA, 25 bp, Homo sapien
taatcatcacacagcgggtgtttgc

SEQ ID NO: 2973861 - DNA, 25 bp, Homo sapien
gcggcagtctctattatcatctcca

SEQ ID NO: 2973862 - DNA, 25 bp, Homo sapien
tcccagcagtcctatgcggcagtct

SEQ ID NO: 2973863 - DNA, 25 bp, Homo sapien
agtcctatgcggcagtctctattat

SEQ ID NO: 2973864 - DNA, 25 bp, Homo sapien
tatgcggcagtctctattatcatct

SEQ ID NO: 2973865 - DNA, 25 bp, Homo sapien
ccaaggctttctcgactctctgagg

SEQ ID NO: 2973866 - DNA, 25 bp, Homo sapien
aggctttctcgactctctgaggaga

SEQ ID NO: 2973867 - DNA, 25 bp, Homo sapien
ttgtctaatgggtcgaagaatttcc

SEQ ID NO: 2973868 - DNA, 25 bp, Homo sapien
taatgggtcgaagaatttccaaggc

SEQ ID NO: 2973869 - DNA, 25 bp, Homo sapien
aatcacaagaggtagacagactggg

SEQ ID NO: 2973870 - DNA, 25 bp, Homo sapien
acaagaggtagacagactgggttcc

SEQ ID NO: 2973871 - DNA, 25 bp, Homo sapien
aaatcacaagaggtagacagactgg

SEQ ID NO: 2973872 - DNA, 25 bp, Homo sapien
tcacaagaggtagacagactgggtt

SEQ ID NO: 2973873 - DNA, 25 bp, Homo sapien
tctagaatttccacaatgcaaatgt

SEQ ID NO: 2973874 - DNA, 25 bp, Homo sapien
gctgtctttaagttcatggattctt

SEQ ID NO: 2973875 - DNA, 25 bp, Homo sapien
tgttagcccttttaatgttgtccca

SEQ ID NO: 2973876 - DNA, 25 bp, Homo sapien
taaatgagctgtctttaagttcatg

SEQ ID NO: 2973877 - DNA, 25 bp, Homo sapien
accatactgtgttgattattataga

SEQ ID NO: 2973878 - DNA, 25 bp, Homo sapien
caaagatagttgaccacgtatgtgt

SEQ ID NO: 2973879 - DNA, 25 bp, Homo sapien
gtatgtcagtttgtatgccagtacc

SEQ ID NO: 2973880 - DNA, 25 bp, Homo sapien
ggatcagaaagtgtgatacctccgt

SEQ ID NO: 2973881 - DNA, 25 bp, Homo sapien
aaaggttttatagtcaggcactaca

SEQ ID NO: 2973882 - DNA, 25 bp, Homo sapien
caacgatggactgcataaatgatgg

SEQ ID NO: 2973883 - DNA, 25 bp, Homo sapien
gacactaacattgctgcacaacaca

SEQ ID NO: 2973884 - DNA, 25 bp, Homo sapien
tagaacagccttaggcagagccttc

SEQ ID NO: 2973885 - DNA, 25 bp, Homo sapien
agatagagccatgaagacttgtgcc

SEQ ID NO: 2973886 - DNA, 25 bp, Homo sapien
ttggtacctgctcatcccctgtggg

SEQ ID NO: 2973887 - DNA, 25 bp, Homo sapien
catgttcatgctagtgccagtggac

SEQ ID NO: 2973888 - DNA, 25 bp, Homo sapien
tcctgtaaatgaagggtggcaccct

SEQ ID NO: 2973889 - DNA, 25 bp, Homo sapien
gctatcggccagttcacatgacggg

SEQ ID NO: 2973890 - DNA, 25 bp, Homo sapien
tcaaacagctccactacattcaggg

SEQ ID NO: 2973891 - DNA, 25 bp, Homo sapien
cgaatcgactcgtttgaggtagcac

SEQ ID NO: 2973892 - DNA, 25 bp, Homo sapien
cctggagtatttggcgaatcgactc

SEQ ID NO: 2973893 - DNA, 25 bp, Homo sapien
tgaatagtgaaaggcctagaatcaa

SEQ ID NO: 2973894 - DNA, 25 bp, Homo sapien
agagaaggtgcggtgaaccttccag

SEQ ID NO: 2973895 - DNA, 25 bp, Homo sapien
ttccagtgcactctgctccggaggc

SEQ ID NO: 2973896 - DNA, 25 bp, Homo sapien
gaagtaactcttccttgtttgaata

SEQ ID NO: 2973897 - DNA, 25 bp, Homo sapien
tggtgtgagaaaacgagattgagta

SEQ ID NO: 2973898 - DNA, 25 bp, Homo sapien
aggttccaattatgatgcaggcagg

SEQ ID NO: 2973899 - DNA, 25 bp, Homo sapien
acagcacaggttccaattatgatgc

SEQ ID NO: 2973900 - DNA, 25 bp, Homo sapien
gagattgagtacaacacagcacagg

SEQ ID NO: 2973901 - DNA, 25 bp, Homo sapien
cggtgcatccttaagggtggagagc

SEQ ID NO: 2973902 - DNA, 25 bp, Homo sapien
atccttaagggtggagagcatggct

SEQ ID NO: 2973903 - DNA, 25 bp, Homo sapien
acgcggtgcatccttaagggtggag

SEQ ID NO: 2973904 - DNA, 25 bp, Homo sapien
aggcaagtgttttgtggaaggaaag

SEQ ID NO: 2973905 - DNA, 25 bp, Homo sapien
taaactaacctaatctgaagaggag

SEQ ID NO: 2973906 - DNA, 25 bp, Homo sapien
cacaagtaggtgtgagattcaagct

SEQ ID NO: 2973907 - DNA, 25 bp, Homo sapien
tctctgggtgattaagacatggcat

SEQ ID NO: 2973908 - DNA, 25 bp, Homo sapien
cgtggctgcttggaagggagcacac

SEQ ID NO: 2973909 - DNA, 25 bp, Homo sapien
taattacgaacacaggcaatacgct

SEQ ID NO: 2973910 - DNA, 25 bp, Homo sapien
tctaatgcgaacataaaagcactgc

SEQ ID NO: 2973911 - DNA, 25 bp, Homo sapien
ttcccagaagagagtggcgctatca

SEQ ID NO: 2973912 - DNA, 25 bp, Homo sapien
aaagcactgcgacaatcttgggctg

SEQ ID NO: 2973913 - DNA, 25 bp, Homo sapien
cacccatgaccattgggaattcatg

SEQ ID NO: 2973914 - DNA, 25 bp, Homo sapien
atgtgagtcacaaaacgaatacccc

SEQ ID NO: 2973915 - DNA, 25 bp, Homo sapien
cgaatacccctagtaagagctgaga

SEQ ID NO: 2973916 - DNA, 25 bp, Homo sapien
tagtaagagctgagactatggctgt

SEQ ID NO: 2973917 - DNA, 25 bp, Homo sapien
gtgtttcctgtctccaacggtgggc

SEQ ID NO: 2973918 - DNA, 25 bp, Homo sapien
tcctgtctccaacggtgggcacagg

SEQ ID NO: 2973919 - DNA, 25 bp, Homo sapien
cctcaggggacttggacaggactga

SEQ ID NO: 2973920 - DNA, 25 bp, Homo sapien
tttcctgtctccaacggtgggcaca

SEQ ID NO: 2973921 - DNA, 25 bp, Homo sapien
ccaaggaagaaggttccagagcctt

SEQ ID NO: 2973922 - DNA, 25 bp, Homo sapien
tccccaaggaagaaggttccagagc

SEQ ID NO: 2973923 - DNA, 25 bp, Homo sapien
agctataactggcaataaaacccag

SEQ ID NO: 2973924 - DNA, 25 bp, Homo sapien
ccaagctataactggcaataaaacc

SEQ ID NO: 2973925 - DNA, 25 bp, Homo sapien
gatccaaacagttgtaggcctttct

SEQ ID NO: 2973926 - DNA, 25 bp, Homo sapien
taagatctctgggtgctctatttct

SEQ ID NO: 2973927 - DNA, 25 bp, Homo sapien
tgccaaaagtgggttttaagatctc

SEQ ID NO: 2973928 - DNA, 25 bp, Homo sapien
tttccaaacccttgactgggtgcag

SEQ ID NO: 2973929 - DNA, 25 bp, Homo sapien
caatccgatctgtaagtgcaacctg

SEQ ID NO: 2973930 - DNA, 25 bp, Homo sapien
tgtatggagagcttaacagtgatcc

SEQ ID NO: 2973931 - DNA, 25 bp, Homo sapien
tgaccagcaaatcacaggcatgagt

SEQ ID NO: 2973932 - DNA, 25 bp, Homo sapien
ttttctcccggaggcgggaatcaca

SEQ ID NO: 2973933 - DNA, 25 bp, Homo sapien
ttgtatatctatgaggggctggatg

SEQ ID NO: 2973934 - DNA, 25 bp, Homo sapien
attgtatatctatgaggggctggat

SEQ ID NO: 2973935 - DNA, 25 bp, Homo sapien
agaccagaaacctgtgacctgcaga

SEQ ID NO: 2973936 - DNA, 25 bp, Homo sapien
tccgtgactgtacactgaaggcctc

SEQ ID NO: 2973937 - DNA, 25 bp, Homo sapien
ctgggctagagttctgtgggctaac

SEQ ID NO: 2973938 - DNA, 25 bp, Homo sapien
gaaggcctctgggattcaatgagca

SEQ ID NO: 2973939 - DNA, 25 bp, Homo sapien
ggagacccccatggctctcagtgct

SEQ ID NO: 2973940 - DNA, 25 bp, Homo sapien
ctgagcagcagtccacaggctggag

SEQ ID NO: 2973941 - DNA, 25 bp, Homo sapien
acaggctggagacccccatggctct

SEQ ID NO: 2973942 - DNA, 25 bp, Homo sapien
ggctctgagcagcagtccacaggct

SEQ ID NO: 2973943 - DNA, 25 bp, Homo sapien
tcttggatttattgatctgtcttcc

SEQ ID NO: 2973944 - DNA, 25 bp, Homo sapien
caagtttgtatcttgagaccaagca

SEQ ID NO: 2973945 - DNA, 25 bp, Homo sapien
ggaccaagtcttactcaagtttgta

SEQ ID NO: 2973946 - DNA, 25 bp, Homo sapien
gatcctaggaggtaaggaccaagtc

SEQ ID NO: 2973947 - DNA, 25 bp, Homo sapien
acacctgcgaacacctgagggttcc

SEQ ID NO: 2973948 - DNA, 25 bp, Homo sapien
cacctgcgaacacctgagggttcca

SEQ ID NO: 2973949 - DNA, 25 bp, Homo sapien
cacctgcgaacacctgagctttctg

SEQ ID NO: 2973950 - DNA, 25 bp, Homo sapien
tttctgtcctgcacacctgcgaaca

SEQ ID NO: 2973951 - DNA, 25 bp, Homo sapien
acacctgcgaacacctgagctttct

SEQ ID NO: 2973952 - DNA, 25 bp, Homo sapien
ggctttactatggatcagcagcaga

SEQ ID NO: 2973953 - DNA, 25 bp, Homo sapien
ttggcatgctataggaaactcccgc

SEQ ID NO: 2973954 - DNA, 25 bp, Homo sapien
gaatcatccgtcgtccctcttggag

SEQ ID NO: 2973955 - DNA, 25 bp, Homo sapien
gaactcactccagtcaacaccttgg

SEQ ID NO: 2973956 - DNA, 25 bp, Homo sapien
ggaaattgaagtccgtgagtttcac

SEQ ID NO: 2973957 - DNA, 25 bp, Homo sapien
tttcccaacaccatgaggaaattga

SEQ ID NO: 2973958 - DNA, 25 bp, Homo sapien
cctgtcttcagagggactgatgact

SEQ ID NO: 2973959 - DNA, 25 bp, Homo sapien
cactcggtcaaggttgttggaaggt

SEQ ID NO: 2973960 - DNA, 25 bp, Homo sapien
cacgtcaagaacaacctgaacactt

SEQ ID NO: 2973961 - DNA, 25 bp, Homo sapien
gaacacgtcaagaacaacctgaaca

SEQ ID NO: 2973962 - DNA, 25 bp, Homo sapien
ctgagaacacgtcaagaacaacctg

SEQ ID NO: 2973963 - DNA, 25 bp, Homo sapien
gagaacacgtcaagaacaacctgaa

SEQ ID NO: 2973964 - DNA, 25 bp, Homo sapien
ctgcgtcaagaacgggggtttgtca

SEQ ID NO: 2973965 - DNA, 25 bp, Homo sapien
tcatcatcctgaatcaccacatcct

SEQ ID NO: 2973966 - DNA, 25 bp, Homo sapien
aggagtgcagctgcgtcaagaacgg

SEQ ID NO: 2973967 - DNA, 25 bp, Homo sapien
gcagggccaagactcgcttttctac

SEQ ID NO: 2973968 - DNA, 25 bp, Homo sapien
atcccaaagtctgagcacagtacca

SEQ ID NO: 2973969 - DNA, 25 bp, Homo sapien
cacagtaccaggcatgaagaaaacc

SEQ ID NO: 2973970 - DNA, 25 bp, Homo sapien
tgtatcccaaagtctgagcacagta

SEQ ID NO: 2973971 - DNA, 25 bp, Homo sapien
taccaggcatgaagaaaacctttca

SEQ ID NO: 2973972 - DNA, 25 bp, Homo sapien
catgaggtccccaccgttgacatat

SEQ ID NO: 2973973 - DNA, 25 bp, Homo sapien
ccttaaattttcctacttgctgaat

SEQ ID NO: 2973974 - DNA, 25 bp, Homo sapien
cccaccgttgacatattccatgacg

SEQ ID NO: 2973975 - DNA, 25 bp, Homo sapien
tattccatgacgaagtacagccgat

SEQ ID NO: 2973976 - DNA, 25 bp, Homo sapien
aagaaagaacaatccgatggaaatc

SEQ ID NO: 2973977 - DNA, 25 bp, Homo sapien
aaatgattcctcttttatgaagaaa

SEQ ID NO: 2973978 - DNA, 25 bp, Homo sapien
aaagaacaatccgatggaaatctct

SEQ ID NO: 2973979 - DNA, 25 bp, Homo sapien
aacaatccgatggaaatctctgccg

SEQ ID NO: 2973980 - DNA, 25 bp, Homo sapien
tctgcctgtgccatatatccttcta

SEQ ID NO: 2973981 - DNA, 25 bp, Homo sapien
cacgggtttagaaccacttcactgg

SEQ ID NO: 2973982 - DNA, 25 bp, Homo sapien
tcactgggtcatacacatgtccctt

SEQ ID NO: 2973983 - DNA, 25 bp, Homo sapien
tttggcaccagactttcagcacagc

SEQ ID NO: 2973984 - DNA, 25 bp, Homo sapien
catgtgttccttgcacatcccaaag

SEQ ID NO: 2973985 - DNA, 25 bp, Homo sapien
tggtcgtgactccatccatcatgtg

SEQ ID NO: 2973986 - DNA, 25 bp, Homo sapien
agtcccacagaaggtcctggtcgtg

SEQ ID NO: 2973987 - DNA, 25 bp, Homo sapien
ttgatatgtccttctgaatccaaca

SEQ ID NO: 2973988 - DNA, 25 bp, Homo sapien
ttgagaaaacgatcactggggttcc

SEQ ID NO: 2973989 - DNA, 25 bp, Homo sapien
acagtttgggagtcctggttgagaa

SEQ ID NO: 2973990 - DNA, 25 bp, Homo sapien
gagaaaacgatcactggggttccta

SEQ ID NO: 2973991 - DNA, 25 bp, Homo sapien
tacagtttgggagtcctggttgaga

SEQ ID NO: 2973992 - DNA, 25 bp, Homo sapien
tcaagatacaagtcctggaaccatt

SEQ ID NO: 2973993 - DNA, 25 bp, Homo sapien
attttgcttagaaccacactgacac

SEQ ID NO: 2973994 - DNA, 25 bp, Homo sapien
tttgcttagaaccacactgacacat

SEQ ID NO: 2973995 - DNA, 25 bp, Homo sapien
agatacaagtcctggaaccattttg

SEQ ID NO: 2973996 - DNA, 25 bp, Homo sapien
ggcattcctgtagggcgggaacgca

SEQ ID NO: 2973997 - DNA, 25 bp, Homo sapien
ggccaacttggaacaattaggtgta

SEQ ID NO: 2973998 - DNA, 25 bp, Homo sapien
gcaggtcaggcaaccacgtctgcaa

SEQ ID NO: 2973999 - DNA, 25 bp, Homo sapien
tgctgtcccaggcatcagtgggctg

SEQ ID NO: 2974000 - DNA, 25 bp, Homo sapien
tctcttcagccgatgacatgaggtg

SEQ ID NO: 2974001 - DNA, 25 bp, Homo sapien
agattcctaggtggccacatccagg

SEQ ID NO: 2974002 - DNA, 25 bp, Homo sapien
caatcacctggctaaagagttccac

SEQ ID NO: 2974003 - DNA, 25 bp, Homo sapien
tcagcccaacacctgtgatggcctt

SEQ ID NO: 2974004 - DNA, 25 bp, Homo sapien
gatggtgtgtgaagtaaccactctg

SEQ ID NO: 2974005 - DNA, 25 bp, Homo sapien
cccgtagatcaaatttctttcttga

SEQ ID NO: 2974006 - DNA, 25 bp, Homo sapien
tcccgtagatcaaatttctttcttg

SEQ ID NO: 2974007 - DNA, 25 bp, Homo sapien
tattgtgtctaacatttgccatgga

SEQ ID NO: 2974008 - DNA, 25 bp, Homo sapien
tctgtattgtgtctaacatttgcca

SEQ ID NO: 2974009 - DNA, 25 bp, Homo sapien
atctgtattgtgtctaacatttgcc

SEQ ID NO: 2974010 - DNA, 25 bp, Homo sapien
tgtattgtgtctaacatttgccatg

SEQ ID NO: 2974011 - DNA, 25 bp, Homo sapien
atggtttccacgatattctcttcac

SEQ ID NO: 2974012 - DNA, 25 bp, Homo sapien
ttaagatagaacatgagtcaaattt

SEQ ID NO: 2974013 - DNA, 25 bp, Homo sapien
taagatagaacatgagtcaaattta

SEQ ID NO: 2974014 - DNA, 25 bp, Homo sapien
aagatagaacatgagtcaaatttat

SEQ ID NO: 2974015 - DNA, 25 bp, Homo sapien
caatactataagtttcctaagccct

SEQ ID NO: 2974016 - DNA, 25 bp, Homo sapien
taacatttgataagtcgtatctacg

SEQ ID NO: 2974017 - DNA, 25 bp, Homo sapien
taagccctgctttaattgcaccgta

SEQ ID NO: 2974018 - DNA, 25 bp, Homo sapien
gcaccgtataacatttgataagtcg

SEQ ID NO: 2974019 - DNA, 25 bp, Homo sapien
tgtctgacgcgtccaaacagcacca

SEQ ID NO: 2974020 - DNA, 25 bp, Homo sapien
agacaggcctgaacgttttctgggt

SEQ ID NO: 2974021 - DNA, 25 bp, Homo sapien
gacgcgtccaaacagcaccatttgg

SEQ ID NO: 2974022 - DNA, 25 bp, Homo sapien
tcaaagcactgtctgacgcgtccaa

SEQ ID NO: 2974023 - DNA, 25 bp, Homo sapien
acaggaccagggcatgaaagggacc

SEQ ID NO: 2974024 - DNA, 25 bp, Homo sapien
tgtcaggatgttacaaatggctgcc

SEQ ID NO: 2974025 - DNA, 25 bp, Homo sapien
ggctgcctgtcttgtaaaagtgaga

SEQ ID NO: 2974026 - DNA, 25 bp, Homo sapien
ttgtcttgtacaaggccaagggcct

SEQ ID NO: 2974027 - DNA, 25 bp, Homo sapien
caaaagcagaatgccaagcgccaag

SEQ ID NO: 2974028 - DNA, 25 bp, Homo sapien
aatgccaagcgccaaggctcgtttt

SEQ ID NO: 2974029 - DNA, 25 bp, Homo sapien
caagcgccaaggctcgtttttctcg

SEQ ID NO: 2974030 - DNA, 25 bp, Homo sapien
tcgtttttctcgtgacagcactcat

SEQ ID NO: 2974031 - DNA, 25 bp, Homo sapien
tgccgtggcagacactaccataggg

SEQ ID NO: 2974032 - DNA, 25 bp, Homo sapien
gacactaccatagggctagaaacat

SEQ ID NO: 2974033 - DNA, 25 bp, Homo sapien
gaaacatttagacacgtacttctac

SEQ ID NO: 2974034 - DNA, 25 bp, Homo sapien
tgctcccattgctactgctgccgtg

SEQ ID NO: 2974035 - DNA, 25 bp, Homo sapien
cagatcagcagaaaagttggaaccc

SEQ ID NO: 2974036 - DNA, 25 bp, Homo sapien
cccagatcagcagaaaagttggaac

SEQ ID NO: 2974037 - DNA, 25 bp, Homo sapien
ttcccagatcagcagaaaagttgga

SEQ ID NO: 2974038 - DNA, 25 bp, Homo sapien
agatcagcagaaaagttggaaccct

SEQ ID NO: 2974039 - DNA, 25 bp, Homo sapien
caattacattagtggtaagtccaat

SEQ ID NO: 2974040 - DNA, 25 bp, Homo sapien
acattagtggtaagtccaatagccc

SEQ ID NO: 2974041 - DNA, 25 bp, Homo sapien
catcaattacattagtggtaagtcc

SEQ ID NO: 2974042 - DNA, 25 bp, Homo sapien
caaacacatcaattacattagtggt

SEQ ID NO: 2974043 - DNA, 25 bp, Homo sapien
gtccacagattttccatacggctga

SEQ ID NO: 2974044 - DNA, 25 bp, Homo sapien
ttccatacggctgataagcgattat

SEQ ID NO: 2974045 - DNA, 25 bp, Homo sapien
aagcatttcatacaacaggacgcca

SEQ ID NO: 2974046 - DNA, 25 bp, Homo sapien
aacaggacgccataggcccaccagt

SEQ ID NO: 2974047 - DNA, 25 bp, Homo sapien
gctgctggccgatgcagcttctgtg

SEQ ID NO: 2974048 - DNA, 25 bp, Homo sapien
gcgctagagacctggcatggttttc

SEQ ID NO: 2974049 - DNA, 25 bp, Homo sapien
tagagagcgactggcctctgcgcta

SEQ ID NO: 2974050 - DNA, 25 bp, Homo sapien
tgatgggaatcaggctgcctccctc

SEQ ID NO: 2974051 - DNA, 25 bp, Homo sapien
gtgacggagctacagtgcaggtcat

SEQ ID NO: 2974052 - DNA, 25 bp, Homo sapien
gggagagctgtgacggagctacagt

SEQ ID NO: 2974053 - DNA, 25 bp, Homo sapien
ctgtgacggagctacagtgcaggtc

SEQ ID NO: 2974054 - DNA, 25 bp, Homo sapien
agagctgtgacggagctacagtgca

SEQ ID NO: 2974055 - DNA, 25 bp, Homo sapien
gtgcaggctgccgacggccacctgt

SEQ ID NO: 2974056 - DNA, 25 bp, Homo sapien
gacggccacctgtgtcagcagggac

SEQ ID NO: 2974057 - DNA, 25 bp, Homo sapien
gcaggctgccgacggccacctgtgt

SEQ ID NO: 2974058 - DNA, 25 bp, Homo sapien
tgccgacggccacctgtgtcagcag

SEQ ID NO: 2974059 - DNA, 25 bp, Homo sapien
tgagcttagcgtcagaaaggcagag

SEQ ID NO: 2974060 - DNA, 25 bp, Homo sapien
gaccagcgcttgtacagaatcctct

SEQ ID NO: 2974061 - DNA, 25 bp, Homo sapien
acttcgcagtagtcagaaggatgcc

SEQ ID NO: 2974062 - DNA, 25 bp, Homo sapien
cacaggaggaaagcgttcatgggaa

SEQ ID NO: 2974063 - DNA, 25 bp, Homo sapien
agcctccttggacaaggattttgga

SEQ ID NO: 2974064 - DNA, 25 bp, Homo sapien
ttttggataggaaacgttgtgctcc

SEQ ID NO: 2974065 - DNA, 25 bp, Homo sapien
gactgaaatagctcgtcttcatctt

SEQ ID NO: 2974066 - DNA, 25 bp, Homo sapien
cgttgtgctccatgatagactgaaa

SEQ ID NO: 2974067 - DNA, 25 bp, Homo sapien
cagtttttcccagtcgatcctccgg

SEQ ID NO: 2974068 - DNA, 25 bp, Homo sapien
cagcccagccgcttggctgggtgtt

SEQ ID NO: 2974069 - DNA, 25 bp, Homo sapien
agaaggcatgctctctcacgtccct

SEQ ID NO: 2974070 - DNA, 25 bp, Homo sapien
tcgatcctccggaagaaggcatgct

SEQ ID NO: 2974071 - DNA, 25 bp, Homo sapien
aaagaggtgagtgggatactcccag

SEQ ID NO: 2974072 - DNA, 25 bp, Homo sapien
gcagcaggaatcccggctgctgagg

SEQ ID NO: 2974073 - DNA, 25 bp, Homo sapien
gagtgggatactcccagaatttggg

SEQ ID NO: 2974074 - DNA, 25 bp, Homo sapien
aagaaaagaggtgagtgggatactc

SEQ ID NO: 2974075 - DNA, 25 bp, Homo sapien
tgaaggctgtgaatacggccctgct

SEQ ID NO: 2974076 - DNA, 25 bp, Homo sapien
gacacgaagcctgagtcctgctgag

SEQ ID NO: 2974077 - DNA, 25 bp, Homo sapien
caaagtccagacctaaagcacagct

SEQ ID NO: 2974078 - DNA, 25 bp, Homo sapien
tgctgggtgcgagtccacaaagtcc

SEQ ID NO: 2974079 - DNA, 25 bp, Homo sapien
gggaccatagtacccatctcacagg

SEQ ID NO: 2974080 - DNA, 25 bp, Homo sapien
tgctggccgcaatcaacaattaggg

SEQ ID NO: 2974081 - DNA, 25 bp, Homo sapien
gcgaaaccaacagggcgatgcttct

SEQ ID NO: 2974082 - DNA, 25 bp, Homo sapien
ttagaaacaggacgcccttggaggc

SEQ ID NO: 2974083 - DNA, 25 bp, Homo sapien
ccagtgggctcaccaacagcagttt

SEQ ID NO: 2974084 - DNA, 25 bp, Homo sapien
tttttcttcagtgtgtgctaaaaat

SEQ ID NO: 2974085 - DNA, 25 bp, Homo sapien
aataaaatccagtgggctcaccaac

SEQ ID NO: 2974086 - DNA, 25 bp, Homo sapien
gtgctaaaaatatcttcgaaaaata

SEQ ID NO: 2974087 - DNA, 25 bp, Homo sapien
ggttttccagcagaacacgggcttc

SEQ ID NO: 2974088 - DNA, 25 bp, Homo sapien
tgcatgaaacctccagttttagggc

SEQ ID NO: 2974089 - DNA, 25 bp, Homo sapien
ccaagcggggccttttgcatgaaac

SEQ ID NO: 2974090 - DNA, 25 bp, Homo sapien
ctggccagagcttttaccaagcggg

SEQ ID NO: 2974091 - DNA, 25 bp, Homo sapien
gaaacagctctcaagaggcacatcg

SEQ ID NO: 2974092 - DNA, 25 bp, Homo sapien
gcatgacatgctgcgatgagcctca

SEQ ID NO: 2974093 - DNA, 25 bp, Homo sapien
gcgtgtcaccactgaacagagtgca

SEQ ID NO: 2974094 - DNA, 25 bp, Homo sapien
cttttgaacacagcgtctacgggtc

SEQ ID NO: 2974095 - DNA, 25 bp, Homo sapien
tataaacccacgtgagctgatgcgg

SEQ ID NO: 2974096 - DNA, 25 bp, Homo sapien
gaataagaacggacaaaggagagga

SEQ ID NO: 2974097 - DNA, 25 bp, Homo sapien
tcagttcctggccttgcaagtccag

SEQ ID NO: 2974098 - DNA, 25 bp, Homo sapien
cgggaatggacacgcaaagaatgct

SEQ ID NO: 2974099 - DNA, 25 bp, Homo sapien
cgaagacctggaggcccactgaagc

SEQ ID NO: 2974100 - DNA, 25 bp, Homo sapien
acctggaggcccactgaagccagtg

SEQ ID NO: 2974101 - DNA, 25 bp, Homo sapien
tggaggcccactgaagccagtgcat

SEQ ID NO: 2974102 - DNA, 25 bp, Homo sapien
gacctggaggcccactgaagccagt

SEQ ID NO: 2974103 - DNA, 25 bp, Homo sapien
ggtggtcagacccaaccagtcagcg

SEQ ID NO: 2974104 - DNA, 25 bp, Homo sapien
accacacgatgggtatgggacagag

SEQ ID NO: 2974105 - DNA, 25 bp, Homo sapien
ccttttgccgactgaggcttttgcc

SEQ ID NO: 2974106 - DNA, 25 bp, Homo sapien
gccctctgggatgtgacgtaccaca

SEQ ID NO: 2974107 - DNA, 25 bp, Homo sapien
aatggcctcgggtgccatcttggag

SEQ ID NO: 2974108 - DNA, 25 bp, Homo sapien
tgggcaatggcctcgggtgccatct

SEQ ID NO: 2974109 - DNA, 25 bp, Homo sapien
cttactcatcaccatgagcttgatg

SEQ ID NO: 2974110 - DNA, 25 bp, Homo sapien
catgagcttgatgggcaatggcctc

SEQ ID NO: 2974111 - DNA, 25 bp, Homo sapien
ccagctgatcaggtggtgttaagac

SEQ ID NO: 2974112 - DNA, 25 bp, Homo sapien
ctgtcctcgtgtgaagaacttgtca

SEQ ID NO: 2974113 - DNA, 25 bp, Homo sapien
gtgttaagacgggctgtcctcgtgt

SEQ ID NO: 2974114 - DNA, 25 bp, Homo sapien
gtctatgttagcaataaccagctga

SEQ ID NO: 2974115 - DNA, 25 bp, Homo sapien
gatggggtgcacaaactgggggttg

SEQ ID NO: 2974116 - DNA, 25 bp, Homo sapien
agatggggtgcacaaactgggggtt

SEQ ID NO: 2974117 - DNA, 25 bp, Homo sapien
ctgtaagatggggtgcacaaactgg

SEQ ID NO: 2974118 - DNA, 25 bp, Homo sapien
cactctgtaagatggggtgcacaaa

SEQ ID NO: 2974119 - DNA, 25 bp, Homo sapien
tgagctgttaggcatccgggtttcc

SEQ ID NO: 2974120 - DNA, 25 bp, Homo sapien
tatggaatcagacacaaggccgtgg

SEQ ID NO: 2974121 - DNA, 25 bp, Homo sapien
gacgcagtcggtattttgaggcctc

SEQ ID NO: 2974122 - DNA, 25 bp, Homo sapien
caagacagttatcaaccaaggaggg

SEQ ID NO: 2974123 - DNA, 25 bp, Homo sapien
tatctgatacagtgcccatgtgcag

SEQ ID NO: 2974124 - DNA, 25 bp, Homo sapien
gaaacaagaacctgcacaaatagag

SEQ ID NO: 2974125 - DNA, 25 bp, Homo sapien
tgtaccaacgtactaggcagactgg

SEQ ID NO: 2974126 - DNA, 25 bp, Homo sapien
gggagtgtcagctcaaaaatagtcc

SEQ ID NO: 2974127 - DNA, 25 bp, Homo sapien
tacacacagcaagaggggagtctcc

SEQ ID NO: 2974128 - DNA, 25 bp, Homo sapien
acacacagcaagaggggagtctccc

SEQ ID NO: 2974129 - DNA, 25 bp, Homo sapien
ctgcgtgtccagtacacacagcaag

SEQ ID NO: 2974130 - DNA, 25 bp, Homo sapien
catgctggagcaaacgacaggtcgt

SEQ ID NO: 2974131 - DNA, 25 bp, Homo sapien
tgccacaatggctggaagaaagtcc

SEQ ID NO: 2974132 - DNA, 25 bp, Homo sapien
tctgaaaagcacgtgctggtgcctg

SEQ ID NO: 2974133 - DNA, 25 bp, Homo sapien
gcgcgctcctcccaagactggaaag

SEQ ID NO: 2974134 - DNA, 25 bp, Homo sapien
taatgcgagcttagctgggagatgc

SEQ ID NO: 2974135 - DNA, 25 bp, Homo sapien
tgtttgtggtagaacccggctactc

SEQ ID NO: 2974136 - DNA, 25 bp, Homo sapien
gaaacagagcggctctctacaagga

SEQ ID NO: 2974137 - DNA, 25 bp, Homo sapien
tacaaggactgacagctactttcat

SEQ ID NO: 2974138 - DNA, 25 bp, Homo sapien
gaccccctggagtctcgatgtctat

SEQ ID NO: 2974139 - DNA, 25 bp, Homo sapien
tctatggtgcataaaagatggcaga

SEQ ID NO: 2974140 - DNA, 25 bp, Homo sapien
tgtctatggtgcataaaagatggca

SEQ ID NO: 2974141 - DNA, 25 bp, Homo sapien
gagtctcgatgtctatggtgcataa

SEQ ID NO: 2974142 - DNA, 25 bp, Homo sapien
tgtctcctaggctctttctataaac

SEQ ID NO: 2974143 - DNA, 25 bp, Homo sapien
tttcccctcggatcaaaggaggagc

SEQ ID NO: 2974144 - DNA, 25 bp, Homo sapien
gtgttcctccgtgggatcttcctcc

SEQ ID NO: 2974145 - DNA, 25 bp, Homo sapien
gacacgaacccagatcatgcactga

SEQ ID NO: 2974146 - DNA, 25 bp, Homo sapien
gaactgattctgaggcgagccattg

SEQ ID NO: 2974147 - DNA, 25 bp, Homo sapien
tctcattaaccttggagggcggccc

SEQ ID NO: 2974148 - DNA, 25 bp, Homo sapien
ttgaaatgccaagagacgggctgcc

SEQ ID NO: 2974149 - DNA, 25 bp, Homo sapien
gattcggacggtgctagattctgcc

SEQ ID NO: 2974150 - DNA, 25 bp, Homo sapien
tcatccatgtgtgcgtcaggtaacc

SEQ ID NO: 2974151 - DNA, 25 bp, Homo sapien
taaaaactcgcagagcatcagtcgg

SEQ ID NO: 2974152 - DNA, 25 bp, Homo sapien
cagtgggcaaaatccttacagggca

SEQ ID NO: 2974153 - DNA, 25 bp, Homo sapien
gaaaatgggcaggaacctactggcc

SEQ ID NO: 2974154 - DNA, 25 bp, Homo sapien
gggcgggaggtaccgcgctaggctg

SEQ ID NO: 2974155 - DNA, 25 bp, Homo sapien
tttgggaccggtcagatgcggtctc

SEQ ID NO: 2974156 - DNA, 25 bp, Homo sapien
ggaaccgctcggcgccaatgaccgt

SEQ ID NO: 2974157 - DNA, 25 bp, Homo sapien
ccccgtccagtcagccggaaccgct

SEQ ID NO: 2974158 - DNA, 25 bp, Homo sapien
cagatgactggtgactcttgagtga

SEQ ID NO: 2974159 - DNA, 25 bp, Homo sapien
ggttgctgtcaccacaaggctgtgc

SEQ ID NO: 2974160 - DNA, 25 bp, Homo sapien
cagcaaaggccatcgcttctcatgg

SEQ ID NO: 2974161 - DNA, 25 bp, Homo sapien
tggagcatgtccctacgagtgagga

SEQ ID NO: 2974162 - DNA, 25 bp, Homo sapien
gggtgagcaggtggcagtacccacg

SEQ ID NO: 2974163 - DNA, 25 bp, Homo sapien
tagggagagtgggtgagcaggtggc

SEQ ID NO: 2974164 - DNA, 25 bp, Homo sapien
ctagggagagtgggtgagcaggtgg

SEQ ID NO: 2974165 - DNA, 25 bp, Homo sapien
tgagcaggtggcagtacccacggct

SEQ ID NO: 2974166 - DNA, 25 bp, Homo sapien
cgttgctgtgcaactagtcgccacg

SEQ ID NO: 2974167 - DNA, 25 bp, Homo sapien
ccaccagcacggactgcgctctggg

SEQ ID NO: 2974168 - DNA, 25 bp, Homo sapien
tgctgtgcaactagtcgccacgctc

SEQ ID NO: 2974169 - DNA, 25 bp, Homo sapien
agtcgccacgctcccaccagcacgg

SEQ ID NO: 2974170 - DNA, 25 bp, Homo sapien
gtagtcggtgctgaccgcgataccc

SEQ ID NO: 2974171 - DNA, 25 bp, Homo sapien
cagggacatcttgatctcggtgctc

SEQ ID NO: 2974172 - DNA, 25 bp, Homo sapien
aaggaagcagacccgccagaggcct

SEQ ID NO: 2974173 - DNA, 25 bp, Homo sapien
gtgctgaccgcgatacccaggaggc

SEQ ID NO: 2974174 - DNA, 25 bp, Homo sapien
atttgaagttggtccatacaaatgg

SEQ ID NO: 2974175 - DNA, 25 bp, Homo sapien
gtttttaggatctttgacctgctgt

SEQ ID NO: 2974176 - DNA, 25 bp, Homo sapien
gaagttggtccatacaaatggtatt

SEQ ID NO: 2974177 - DNA, 25 bp, Homo sapien
gttggtccatacaaatggtatttcc

SEQ ID NO: 2974178 - DNA, 25 bp, Homo sapien
tctatggtgaagcaacgcccccgct

SEQ ID NO: 2974179 - DNA, 25 bp, Homo sapien
ttagaacattgaccgtggactcgga

SEQ ID NO: 2974180 - DNA, 25 bp, Homo sapien
catgggcatcacatattctatggtg

SEQ ID NO: 2974181 - DNA, 25 bp, Homo sapien
gactcggatgtcagctgggtgttca

SEQ ID NO: 2974182 - DNA, 25 bp, Homo sapien
gagtccacactgtctgccaatatgg

SEQ ID NO: 2974183 - DNA, 25 bp, Homo sapien
ggtctgacttcaagtgccagcatct

SEQ ID NO: 2974184 - DNA, 25 bp, Homo sapien
tctcccattactagcagggcttttg

SEQ ID NO: 2974185 - DNA, 25 bp, Homo sapien
tggcctggggatctcccattactag

SEQ ID NO: 2974186 - DNA, 25 bp, Homo sapien
acccaatgaacatgaagaagaggct

SEQ ID NO: 2974187 - DNA, 25 bp, Homo sapien
gacaaaggccagtatcgtccggtgg

SEQ ID NO: 2974188 - DNA, 25 bp, Homo sapien
ggaatggtgtggctgagcggatcat

SEQ ID NO: 2974189 - DNA, 25 bp, Homo sapien
gggacggatgtgtccgatgttgttc

SEQ ID NO: 2974190 - DNA, 25 bp, Homo sapien
accaggcccaccacgagagagaggc

SEQ ID NO: 2974191 - DNA, 25 bp, Homo sapien
gagcatctcatcgttgatgctggag

SEQ ID NO: 2974192 - DNA, 25 bp, Homo sapien
cgaccacccatacttgtagttgaag

SEQ ID NO: 2974193 - DNA, 25 bp, Homo sapien
agatggcggcgaaggcaaacgacca

SEQ ID NO: 2974194 - DNA, 25 bp, Homo sapien
aatggttgtggaatgtcccttctcc

SEQ ID NO: 2974195 - DNA, 25 bp, Homo sapien
gcccagcctatccatacttagggtg

SEQ ID NO: 2974196 - DNA, 25 bp, Homo sapien
tatccatacttagggtgacgggctt

SEQ ID NO: 2974197 - DNA, 25 bp, Homo sapien
taagacagtgacacattctgggatg

SEQ ID NO: 2974198 - DNA, 25 bp, Homo sapien
caggacacagctcgagtggggtggg

SEQ ID NO: 2974199 - DNA, 25 bp, Homo sapien
gggaagtggacgtggggacaggagc

SEQ ID NO: 2974200 - DNA, 25 bp, Homo sapien
ggacacagctcgagtggggtgggaa

SEQ ID NO: 2974201 - DNA, 25 bp, Homo sapien
gtgggaagtggacgtggggacagga

SEQ ID NO: 2974202 - DNA, 25 bp, Homo sapien
tgtcctccgcggtgtaccgcttcat

SEQ ID NO: 2974203 - DNA, 25 bp, Homo sapien
ccgcttcataaacaggtacacagac

SEQ ID NO: 2974204 - DNA, 25 bp, Homo sapien
ggtgtaggaactggcctgagtaatc

SEQ ID NO: 2974205 - DNA, 25 bp, Homo sapien
taatcggagcagttgctcagccgag

SEQ ID NO: 2974206 - DNA, 25 bp, Homo sapien
agcaaggcggggtagttgctgttca

SEQ ID NO: 2974207 - DNA, 25 bp, Homo sapien
gcaaggcggggtagttgctgttcat

SEQ ID NO: 2974208 - DNA, 25 bp, Homo sapien
gagcaaggcggggtagttgctgttc

SEQ ID NO: 2974209 - DNA, 25 bp, Homo sapien
ttgagcaaggcggggtagttgctgt

SEQ ID NO: 2974210 - DNA, 25 bp, Homo sapien
tacaacagtcattgcaagggtgcca

SEQ ID NO: 2974211 - DNA, 25 bp, Homo sapien
gcgcttacctaaatgattgtccagt

SEQ ID NO: 2974212 - DNA, 25 bp, Homo sapien
agtttggaaacgctatctgtctcca

SEQ ID NO: 2974213 - DNA, 25 bp, Homo sapien
tactttgcggtgaggagaacatggt

SEQ ID NO: 2974214 - DNA, 25 bp, Homo sapien
gggccagtgaagaccgaacctagtg

SEQ ID NO: 2974215 - DNA, 25 bp, Homo sapien
ttccaggtgcaccaaaaacaagcct

SEQ ID NO: 2974216 - DNA, 25 bp, Homo sapien
tcaacttgtatttaggagtggattc

SEQ ID NO: 2974217 - DNA, 25 bp, Homo sapien
tgatgtctgagtccacaatcaactt

SEQ ID NO: 2974218 - DNA, 25 bp, Homo sapien
tctgccaggagactgcaagtttgga

SEQ ID NO: 2974219 - DNA, 25 bp, Homo sapien
gttaacttccaagtgtcacacgagc

SEQ ID NO: 2974220 - DNA, 25 bp, Homo sapien
cacacgagcatatgaaagtggttca

SEQ ID NO: 2974221 - DNA, 25 bp, Homo sapien
ggccttaggtggaatgtggctcccc

SEQ ID NO: 2974222 - DNA, 25 bp, Homo sapien
caagctgtcaccctatgaggaagac

SEQ ID NO: 2974223 - DNA, 25 bp, Homo sapien
gagatctgggactaaacccctagag

SEQ ID NO: 2974224 - DNA, 25 bp, Homo sapien
cacatctgagatggtgggatctacg

SEQ ID NO: 2974225 - DNA, 25 bp, Homo sapien
caaagccagtcatggtacagcagat

SEQ ID NO: 2974226 - DNA, 25 bp, Homo sapien
ttgaaacaggacttgcagagcagag

SEQ ID NO: 2974227 - DNA, 25 bp, Homo sapien
tcgacatttgcaagagactgtgcct

SEQ ID NO: 2974228 - DNA, 25 bp, Homo sapien
tatgtgccaaggactctgataagga

SEQ ID NO: 2974229 - DNA, 25 bp, Homo sapien
tattaccagctgtgcggtcatgagc

SEQ ID NO: 2974230 - DNA, 25 bp, Homo sapien
gagggtacatttaccatgcagaaca

SEQ ID NO: 2974231 - DNA, 25 bp, Homo sapien
ctgattatagaagagggtacattta

SEQ ID NO: 2974232 - DNA, 25 bp, Homo sapien
acatttaccatgcagaacatttagg

SEQ ID NO: 2974233 - DNA, 25 bp, Homo sapien
tagaagagggtacatttaccatgca

SEQ ID NO: 2974234 - DNA, 25 bp, Homo sapien
cacgggctgaccacagttaggaaaa

SEQ ID NO: 2974235 - DNA, 25 bp, Homo sapien
caggattaacgtgtagaggctttca

SEQ ID NO: 2974236 - DNA, 25 bp, Homo sapien
tatccagaacaagagtgtggcgagg

SEQ ID NO: 2974237 - DNA, 25 bp, Homo sapien
gctttcaggaaacgacacatcaccg

SEQ ID NO: 2974238 - DNA, 25 bp, Homo sapien
caggaatttacgcttccagtgcttc

SEQ ID NO: 2974239 - DNA, 25 bp, Homo sapien
gaggccagagtctgacatgagctca

SEQ ID NO: 2974240 - DNA, 25 bp, Homo sapien
ggtcacgttggtaggatgcatcaga

SEQ ID NO: 2974241 - DNA, 25 bp, Homo sapien
cacacacgccaaacatgttccatgg

SEQ ID NO: 2974242 - DNA, 25 bp, Homo sapien
gcaattgatgggttcctagagcagc

SEQ ID NO: 2974243 - DNA, 25 bp, Homo sapien
catgaactggagagggtaactaact

SEQ ID NO: 2974244 - DNA, 25 bp, Homo sapien
cattggattcccatgcaaccctggg

SEQ ID NO: 2974245 - DNA, 25 bp, Homo sapien
tagagcagcagtgagcagagtcctt

SEQ ID NO: 2974246 - DNA, 25 bp, Homo sapien
acccactcttggtccggatggtgtc

SEQ ID NO: 2974247 - DNA, 25 bp, Homo sapien
tcattatccaggctgccagcatgct

SEQ ID NO: 2974248 - DNA, 25 bp, Homo sapien
cactgtctcccatggaggggtccca

SEQ ID NO: 2974249 - DNA, 25 bp, Homo sapien
aggacccactcttggtccggatggt

SEQ ID NO: 2974250 - DNA, 25 bp, Homo sapien
tcactagcagtgagagcggagcctc

SEQ ID NO: 2974251 - DNA, 25 bp, Homo sapien
agcaagccgtcatctttctcaggaa

SEQ ID NO: 2974252 - DNA, 25 bp, Homo sapien
tcagccttgaatcgggctcctgtgg

SEQ ID NO: 2974253 - DNA, 25 bp, Homo sapien
aatgccaagacgtgctctcctcttc

SEQ ID NO: 2974254 - DNA, 25 bp, Homo sapien
ttcatccctgttggtagaatcagag

SEQ ID NO: 2974255 - DNA, 25 bp, Homo sapien
agaatcagagttgtgtttctggacc

SEQ ID NO: 2974256 - DNA, 25 bp, Homo sapien
tggacctttgtcacaccacctaggg

SEQ ID NO: 2974257 - DNA, 25 bp, Homo sapien
ggtggcgtccattcccctttctgag

SEQ ID NO: 2974258 - DNA, 25 bp, Homo sapien
gagcccaagttcattcctcctgtga

SEQ ID NO: 2974259 - DNA, 25 bp, Homo sapien
aggtggtcttcaagtaggagcccaa

SEQ ID NO: 2974260 - DNA, 25 bp, Homo sapien
tctgctaactaggtcctgccttgcc

SEQ ID NO: 2974261 - DNA, 25 bp, Homo sapien
ctacttctgtcctagtcctcatgag

SEQ ID NO: 2974262 - DNA, 25 bp, Homo sapien
cagagaaatcggtaggacccacgga

SEQ ID NO: 2974263 - DNA, 25 bp, Homo sapien
gacctgctgcagagaaatcggtagg

SEQ ID NO: 2974264 - DNA, 25 bp, Homo sapien
tctggattgcttaggtattgctgga

SEQ ID NO: 2974265 - DNA, 25 bp, Homo sapien
tcgcctcccttgtgcttttctcttg

SEQ ID NO: 2974266 - DNA, 25 bp, Homo sapien
cagtagggccactggtagggtcaga

SEQ ID NO: 2974267 - DNA, 25 bp, Homo sapien
tcccagacagtagggccactggtag

SEQ ID NO: 2974268 - DNA, 25 bp, Homo sapien
agtagggccactggtagggtcagag

SEQ ID NO: 2974269 - DNA, 25 bp, Homo sapien
agccatcccagacagtagggccact

SEQ ID NO: 2974270 - DNA, 25 bp, Homo sapien
aatcagcagctgaggtgtggaaagc

SEQ ID NO: 2974271 - DNA, 25 bp, Homo sapien
cttttgaagaatggacttgaagggt

SEQ ID NO: 2974272 - DNA, 25 bp, Homo sapien
gccgagagagggcagttggcaaatc

SEQ ID NO: 2974273 - DNA, 25 bp, Homo sapien
cttgaagggttgtcccgtgaaagag

SEQ ID NO: 2974274 - DNA, 25 bp, Homo sapien
tcactctcaaagtcgtacaccagct

SEQ ID NO: 2974275 - DNA, 25 bp, Homo sapien
gccagacaatgcctcttgtcactct

SEQ ID NO: 2974276 - DNA, 25 bp, Homo sapien
tacaccagctcctgtgttgaagtgc

SEQ ID NO: 2974277 - DNA, 25 bp, Homo sapien
cctgtgttgaagtgctcctggaagc

SEQ ID NO: 2974278 - DNA, 25 bp, Homo sapien
gacgttgtgcatgcttgcctcgatc

SEQ ID NO: 2974279 - DNA, 25 bp, Homo sapien
catcatttccgttgtcttcctggct

SEQ ID NO: 2974280 - DNA, 25 bp, Homo sapien
tactgggcttgattcatcatttccg

SEQ ID NO: 2974281 - DNA, 25 bp, Homo sapien
ggcaatggactctcttactgggctt

SEQ ID NO: 2974282 - DNA, 25 bp, Homo sapien
gcgggcaccaaggggcgccttggct

SEQ ID NO: 2974283 - DNA, 25 bp, Homo sapien
aagagggcctttctgcggctgcagc

SEQ ID NO: 2974284 - DNA, 25 bp, Homo sapien
gaagcaggtcattagcgttcatcaa

SEQ ID NO: 2974285 - DNA, 25 bp, Homo sapien
atcaatttgtagtgggatcccagca

SEQ ID NO: 2974286 - DNA, 25 bp, Homo sapien
tggaggaagcaggtcattagcgttc

SEQ ID NO: 2974287 - DNA, 25 bp, Homo sapien
tgtgaggtcctgtatcctggctgct

SEQ ID NO: 2974288 - DNA, 25 bp, Homo sapien
gtgaggtcctgtatcctggctgctc

SEQ ID NO: 2974289 - DNA, 25 bp, Homo sapien
tgaggtcctgtatcctggctgctct

SEQ ID NO: 2974290 - DNA, 25 bp, Homo sapien
caccagaattcatctttggcagata

SEQ ID NO: 2974291 - DNA, 25 bp, Homo sapien
tggctcagactctggtaactatcaa

SEQ ID NO: 2974292 - DNA, 25 bp, Homo sapien
tctggtaactatcaaggaatgtggg

SEQ ID NO: 2974293 - DNA, 25 bp, Homo sapien
tcaccagaattcatctttggcagat

SEQ ID NO: 2974294 - DNA, 25 bp, Homo sapien
tgtgtttgcaaaccggatcccagta

SEQ ID NO: 2974295 - DNA, 25 bp, Homo sapien
cggatcccagtatggactgtgccct

SEQ ID NO: 2974296 - DNA, 25 bp, Homo sapien
gaatctgttctggaactagcccggt

SEQ ID NO: 2974297 - DNA, 25 bp, Homo sapien
ggcggcctctcttgctagaatctgt

SEQ ID NO: 2974298 - DNA, 25 bp, Homo sapien
gtcgcataaggacttgaccgccggc

SEQ ID NO: 2974299 - DNA, 25 bp, Homo sapien
tgagggtgtagactgtggagtcgca

SEQ ID NO: 2974300 - DNA, 25 bp, Homo sapien
ataaggacttgaccgccggcacagg

SEQ ID NO: 2974301 - DNA, 25 bp, Homo sapien
actgtggagtcgcataaggacttga

SEQ ID NO: 2974302 - DNA, 25 bp, Homo sapien
tgtttgcggacacccactggcagct

SEQ ID NO: 2974303 - DNA, 25 bp, Homo sapien
accccaacgggagctccgcagtttg

SEQ ID NO: 2974304 - DNA, 25 bp, Homo sapien
tgcctttctgtttgcggacacccac

SEQ ID NO: 2974305 - DNA, 25 bp, Homo sapien
ggagctccgcagtttgcctttctgt

SEQ ID NO: 2974306 - DNA, 25 bp, Homo sapien
ggtgggcgcctcatagtccgccgcc

SEQ ID NO: 2974307 - DNA, 25 bp, Homo sapien
gtgggcgcctcatagtccgccgccc

SEQ ID NO: 2974308 - DNA, 25 bp, Homo sapien
tgggcgcctcatagtccgccgcccg

SEQ ID NO: 2974309 - DNA, 25 bp, Homo sapien
gggcgcctcatagtccgccgcccgc

SEQ ID NO: 2974310 - DNA, 25 bp, Homo sapien
gcggcgaaggctccggccgtggtca

SEQ ID NO: 2974311 - DNA, 25 bp, Homo sapien
agcatctgcagcccgcggtcgcatc

SEQ ID NO: 2974312 - DNA, 25 bp, Homo sapien
gcagcccgcggtcgcatcgcaccat

SEQ ID NO: 2974313 - DNA, 25 bp, Homo sapien
tggcgatggccatgagcgagaaggc

SEQ ID NO: 2974314 - DNA, 25 bp, Homo sapien
cagcacacccgccacagaccagagt

SEQ ID NO: 2974315 - DNA, 25 bp, Homo sapien
ccagagtgggtgaggtcgccgcggg

SEQ ID NO: 2974316 - DNA, 25 bp, Homo sapien
cgttgcagatgtgcgcgctggagta

SEQ ID NO: 2974317 - DNA, 25 bp, Homo sapien
caggttggtgccgttgcagatgtgc

SEQ ID NO: 2974318 - DNA, 25 bp, Homo sapien
tgttcgtgatctgagcaattgcaca

SEQ ID NO: 2974319 - DNA, 25 bp, Homo sapien
tgctgtggcaggtagtgacgtgggt

SEQ ID NO: 2974320 - DNA, 25 bp, Homo sapien
gtagtgacgtgggtacattctccag

SEQ ID NO: 2974321 - DNA, 25 bp, Homo sapien
gagtaggtgttcgtgatctgagcaa

SEQ ID NO: 2974322 - DNA, 25 bp, Homo sapien
ggcagcccagttctttcggtgaggt

SEQ ID NO: 2974323 - DNA, 25 bp, Homo sapien
ccagatggctccctctgctagtgga

SEQ ID NO: 2974324 - DNA, 25 bp, Homo sapien
cgaagtgcaaatggctcgaggcagc

SEQ ID NO: 2974325 - DNA, 25 bp, Homo sapien
ggctctcttgatgaacaccgaagtg

SEQ ID NO: 2974326 - DNA, 25 bp, Homo sapien
tttgtccctgcaaccctaaacgatg

SEQ ID NO: 2974327 - DNA, 25 bp, Homo sapien
ggccccatgtgctttctcgaaggga

SEQ ID NO: 2974328 - DNA, 25 bp, Homo sapien
ggaattccagctacaaagaatcatg

SEQ ID NO: 2974329 - DNA, 25 bp, Homo sapien
tgctttctcgaagggaagtgaagtg

SEQ ID NO: 2974330 - DNA, 25 bp, Homo sapien
gggcagcattgtggttctcagctcc

SEQ ID NO: 2974331 - DNA, 25 bp, Homo sapien
acagcataagaactgggcagcattg

SEQ ID NO: 2974332 - DNA, 25 bp, Homo sapien
gcataagaactgggcagcattgtgg

SEQ ID NO: 2974333 - DNA, 25 bp, Homo sapien
ccctggcttgcacagcataagaact

SEQ ID NO: 2974334 - DNA, 25 bp, Homo sapien
ggctcactcaatttgccatttaata

SEQ ID NO: 2974335 - DNA, 25 bp, Homo sapien
cgtaccagatgatcttcaaaggttc

SEQ ID NO: 2974336 - DNA, 25 bp, Homo sapien
cactcaatttgccatttaatagaat

SEQ ID NO: 2974337 - DNA, 25 bp, Homo sapien
cagtcacatctgtttcgtaccagat

SEQ ID NO: 2974338 - DNA, 25 bp, Homo sapien
gaagcccaatgtggaaattgtgctg

SEQ ID NO: 2974339 - DNA, 25 bp, Homo sapien
tggatttctagggatggaagcccaa

SEQ ID NO: 2974340 - DNA, 25 bp, Homo sapien
tagcacttttattgtaggagatgga

SEQ ID NO: 2974341 - DNA, 25 bp, Homo sapien
aaataaagattcaactgtggttggc

SEQ ID NO: 2974342 - DNA, 25 bp, Homo sapien
gataatacctaatgtgcttggtgca

SEQ ID NO: 2974343 - DNA, 25 bp, Homo sapien
ctattaagggtcgaagatgattgct

SEQ ID NO: 2974344 - DNA, 25 bp, Homo sapien
taattctggactctaaacagaggag

SEQ ID NO: 2974345 - DNA, 25 bp, Homo sapien
aactgcttgcaagaatatgaagggc

SEQ ID NO: 2974346 - DNA, 25 bp, Homo sapien
tcctccaagaagcctgctgtgccag

SEQ ID NO: 2974347 - DNA, 25 bp, Homo sapien
gcctggcatcgtgcgttgttctggt

SEQ ID NO: 2974348 - DNA, 25 bp, Homo sapien
ttagactgcatgagtcagacctggg

SEQ ID NO: 2974349 - DNA, 25 bp, Homo sapien
ttgttctggtcacgacgctgtgccc

SEQ ID NO: 2974350 - DNA, 25 bp, Homo sapien
caggcatcagggctttgacatatct

SEQ ID NO: 2974351 - DNA, 25 bp, Homo sapien
tcatcttaacttgatgacatccaaa

SEQ ID NO: 2974352 - DNA, 25 bp, Homo sapien
aaggcctattctaatggagtatgac

SEQ ID NO: 2974353 - DNA, 25 bp, Homo sapien
taaagatgccgggaataaaaagctc

SEQ ID NO: 2974354 - DNA, 25 bp, Homo sapien
caacaaccagtgagcatgcaagagg

SEQ ID NO: 2974355 - DNA, 25 bp, Homo sapien
aacaaatagccatgcagtgaactgc

SEQ ID NO: 2974356 - DNA, 25 bp, Homo sapien
gatggctagcaagagaatggcagtc

SEQ ID NO: 2974357 - DNA, 25 bp, Homo sapien
aaccacaaccgggtcaattctgcca

SEQ ID NO: 2974358 - DNA, 25 bp, Homo sapien
gcatagagtttggtcatgccagcca

SEQ ID NO: 2974359 - DNA, 25 bp, Homo sapien
accctccaataaccctgagctccgc

SEQ ID NO: 2974360 - DNA, 25 bp, Homo sapien
cagcatagagtttggtcatgccagc

SEQ ID NO: 2974361 - DNA, 25 bp, Homo sapien
atagagtttggtcatgccagccatc

SEQ ID NO: 2974362 - DNA, 25 bp, Homo sapien
ccaggatgagggagcacacatgcat

SEQ ID NO: 2974363 - DNA, 25 bp, Homo sapien
ggcaaccaggccaggatgagggagc

SEQ ID NO: 2974364 - DNA, 25 bp, Homo sapien
ctggcaaccaggccaggatgaggga

SEQ ID NO: 2974365 - DNA, 25 bp, Homo sapien
caggccaggatgagggagcacacat

SEQ ID NO: 2974366 - DNA, 25 bp, Homo sapien
ccaggtctgccaggtcaccagtgct

SEQ ID NO: 2974367 - DNA, 25 bp, Homo sapien
ctgccaggtctgccaggtcaccagt

SEQ ID NO: 2974368 - DNA, 25 bp, Homo sapien
aggtctgccaggtcaccagtgcttt

SEQ ID NO: 2974369 - DNA, 25 bp, Homo sapien
tgccaggtctgccaggtcaccagtg

SEQ ID NO: 2974370 - DNA, 25 bp, Homo sapien
tccaggcttcctgccgagattcata

SEQ ID NO: 2974371 - DNA, 25 bp, Homo sapien
gattcataattaaacggagccggag

SEQ ID NO: 2974372 - DNA, 25 bp, Homo sapien
tactccatgtctcagcgcaggtctg

SEQ ID NO: 2974373 - DNA, 25 bp, Homo sapien
tcatctggctcagcgagttcttcaa

SEQ ID NO: 2974374 - DNA, 25 bp, Homo sapien
ttcactgggggagggagattccaac

SEQ ID NO: 2974375 - DNA, 25 bp, Homo sapien
cttcactgggggagggagattccaa

SEQ ID NO: 2974376 - DNA, 25 bp, Homo sapien
gtaagcggagacatcactctgggtc

SEQ ID NO: 2974377 - DNA, 25 bp, Homo sapien
gctcgtgtggtaagcggagacatca

SEQ ID NO: 2974378 - DNA, 25 bp, Homo sapien
cctggagatcaaagctcgtgtggta

SEQ ID NO: 2974379 - DNA, 25 bp, Homo sapien
gatcaaagctcgtgtggtaagcgga

SEQ ID NO: 2974380 - DNA, 25 bp, Homo sapien
cagtccagggaactacaaggtccga

SEQ ID NO: 2974381 - DNA, 25 bp, Homo sapien
gactctgatacaaaatccactcggg

SEQ ID NO: 2974382 - DNA, 25 bp, Homo sapien
tcctttcaatggagcagcctggaat

SEQ ID NO: 2974383 - DNA, 25 bp, Homo sapien
gagaggtcacctttgtgatcagcag

SEQ ID NO: 2974384 - DNA, 25 bp, Homo sapien
tgggccaagcgtccaggcaattttg

SEQ ID NO: 2974385 - DNA, 25 bp, Homo sapien
tgagggtgaagaccacatctgggcc

SEQ ID NO: 2974386 - DNA, 25 bp, Homo sapien
ttgttctagagagccagcaatgcga

SEQ ID NO: 2974387 - DNA, 25 bp, Homo sapien
ctccaaattggagaggtttccctgg

SEQ ID NO: 2974388 - DNA, 25 bp, Homo sapien
gatttcagaccatcctccatgatcc

SEQ ID NO: 2974389 - DNA, 25 bp, Homo sapien
ccatgatccccactctctccaggca

SEQ ID NO: 2974390 - DNA, 25 bp, Homo sapien
gtgatttcagaccatcctccatgat

SEQ ID NO: 2974391 - DNA, 25 bp, Homo sapien
ctccatgatccccactctctccagg

SEQ ID NO: 2974392 - DNA, 25 bp, Homo sapien
gaccagctctgtgcaggtggagcct

SEQ ID NO: 2974393 - DNA, 25 bp, Homo sapien
ttcagctgcaccagttacttcttgc

SEQ ID NO: 2974394 - DNA, 25 bp, Homo sapien
gagcctgctgacacctcaattcagc

SEQ ID NO: 2974395 - DNA, 25 bp, Homo sapien
tgccgcgagcgaccagctctgtgca

SEQ ID NO: 2974396 - DNA, 25 bp, Homo sapien
tgttcagtgacaaccctgattcctg

SEQ ID NO: 2974397 - DNA, 25 bp, Homo sapien
aggagctggagtgttcagtgacaac

SEQ ID NO: 2974398 - DNA, 25 bp, Homo sapien
cagtgacaaccctgattcctgaagg

SEQ ID NO: 2974399 - DNA, 25 bp, Homo sapien
caaggagctggagtgttcagtgaca

SEQ ID NO: 2974400 - DNA, 25 bp, Homo sapien
ctggcgagctgggagcacgctgccc

SEQ ID NO: 2974401 - DNA, 25 bp, Homo sapien
ccctggcgagctgggagcacgctgc

SEQ ID NO: 2974402 - DNA, 25 bp, Homo sapien
ggcgagctgggagcacgctgccctt

SEQ ID NO: 2974403 - DNA, 25 bp, Homo sapien
tggcgagctgggagcacgctgccct

SEQ ID NO: 2974404 - DNA, 25 bp, Homo sapien
ggaggaggtactccgagctgtcgtg

SEQ ID NO: 2974405 - DNA, 25 bp, Homo sapien
gattgatccggaagcagtgcccttt

SEQ ID NO: 2974406 - DNA, 25 bp, Homo sapien
gaggtactccgagctgtcgtggtcg

SEQ ID NO: 2974407 - DNA, 25 bp, Homo sapien
tctgggaagtgattgatccggaagc

SEQ ID NO: 2974408 - DNA, 25 bp, Homo sapien
tcaggaccatatatcagaggctgct

SEQ ID NO: 2974409 - DNA, 25 bp, Homo sapien
cccaagaggctgtcttggtgtgtga

SEQ ID NO: 2974410 - DNA, 25 bp, Homo sapien
ggctcccatgggcagaggcggtgct

SEQ ID NO: 2974411 - DNA, 25 bp, Homo sapien
agaggcggtgctgaaaagacttcag

SEQ ID NO: 2974412 - DNA, 25 bp, Homo sapien
gagctttaagaaccacctgattgcc

SEQ ID NO: 2974413 - DNA, 25 bp, Homo sapien
ccagggttgggccatgggcacatct

SEQ ID NO: 2974414 - DNA, 25 bp, Homo sapien
atctgcccccagagctttaagaacc

SEQ ID NO: 2974415 - DNA, 25 bp, Homo sapien
cccagggttgggccatgggcacatc

SEQ ID NO: 2974416 - DNA, 25 bp, Homo sapien
acggtttgtttctctaatgcctctt

SEQ ID NO: 2974417 - DNA, 25 bp, Homo sapien
gaacggtttgtttctctaatgcctc

SEQ ID NO: 2974418 - DNA, 25 bp, Homo sapien
tcaggggagctccagtgggaaatgg

SEQ ID NO: 2974419 - DNA, 25 bp, Homo sapien
gggagctccagtgggaaatggagag

SEQ ID NO: 2974420 - DNA, 25 bp, Homo sapien
gcagccaccgagtggaaaaacacct

SEQ ID NO: 2974421 - DNA, 25 bp, Homo sapien
gcagagcttggttttagggccagat

SEQ ID NO: 2974422 - DNA, 25 bp, Homo sapien
tagggccagatatccctgtttctgc

SEQ ID NO: 2974423 - DNA, 25 bp, Homo sapien
tgcactctggagataaaaggatgat

SEQ ID NO: 2974424 - DNA, 25 bp, Homo sapien
tggcctgtctctgaaagttgctcag

SEQ ID NO: 2974425 - DNA, 25 bp, Homo sapien
ctgtctctgaaagttgctcagcccc

SEQ ID NO: 2974426 - DNA, 25 bp, Homo sapien
cctccggcttcaagctcacaggcac

SEQ ID NO: 2974427 - DNA, 25 bp, Homo sapien
agcccctccggcttcaagctcacag

SEQ ID NO: 2974428 - DNA, 25 bp, Homo sapien
gtctccttttttgtgaacgcatcag

SEQ ID NO: 2974429 - DNA, 25 bp, Homo sapien
tgaggtcagtcatcccctcaatgcc

SEQ ID NO: 2974430 - DNA, 25 bp, Homo sapien
agctgagcgggtttcagggctgtca

SEQ ID NO: 2974431 - DNA, 25 bp, Homo sapien
gaacgcatcagtgtgtgtccctgct

SEQ ID NO: 2974432 - DNA, 25 bp, Homo sapien
gagtcgggccgcactggcaggcgcc

SEQ ID NO: 2974433 - DNA, 25 bp, Homo sapien
agtgagtcgggccgcactggcaggc

SEQ ID NO: 2974434 - DNA, 25 bp, Homo sapien
gtgagtcgggccgcactggcaggcg

SEQ ID NO: 2974435 - DNA, 25 bp, Homo sapien
tgagtcgggccgcactggcaggcgc

SEQ ID NO: 2974436 - DNA, 25 bp, Homo sapien
cagccccgtagaaatctcggctgca

SEQ ID NO: 2974437 - DNA, 25 bp, Homo sapien
tctcccagccccgtagaaatctcgg

SEQ ID NO: 2974438 - DNA, 25 bp, Homo sapien
gccccgtagaaatctcggctgcatg

SEQ ID NO: 2974439 - DNA, 25 bp, Homo sapien
ccgtagaaatctcggctgcatggac

SEQ ID NO: 2974440 - DNA, 25 bp, Homo sapien
gtgatagacaaggatgtgggacctc

SEQ ID NO: 2974441 - DNA, 25 bp, Homo sapien
ctaggtgatagacaaggatgtggga

SEQ ID NO: 2974442 - DNA, 25 bp, Homo sapien
tagacaaggatgtgggacctcaaaa

SEQ ID NO: 2974443 - DNA, 25 bp, Homo sapien
caaggatgtgggacctcaaaaccgg

SEQ ID NO: 2974444 - DNA, 25 bp, Homo sapien
agaggatgccggcactgaggacgat

SEQ ID NO: 2974445 - DNA, 25 bp, Homo sapien
tgtagatcctgccagcaccgatgca

SEQ ID NO: 2974446 - DNA, 25 bp, Homo sapien
gaagacgctggaggctcgcacgatg

SEQ ID NO: 2974447 - DNA, 25 bp, Homo sapien
ccggcactgaggacgatgttgttct

SEQ ID NO: 2974448 - DNA, 25 bp, Homo sapien
ttctgcttcctctgcaagacggcca

SEQ ID NO: 2974449 - DNA, 25 bp, Homo sapien
tgccttcttgtagccaggagggttg

SEQ ID NO: 2974450 - DNA, 25 bp, Homo sapien
gctattccccgatggcactttccgg

SEQ ID NO: 2974451 - DNA, 25 bp, Homo sapien
ttttggcatgattcccgtgggcacc

SEQ ID NO: 2974452 - DNA, 25 bp, Homo sapien
tttgaaaaatgactgcttcaaggag

SEQ ID NO: 2974453 - DNA, 25 bp, Homo sapien
tgaaaaatgactgcttcaaggagca

SEQ ID NO: 2974454 - DNA, 25 bp, Homo sapien
gaaaaatgactgcttcaaggagcag

SEQ ID NO: 2974455 - DNA, 25 bp, Homo sapien
aaaatgactgcttcaaggagcaggt

SEQ ID NO: 2974456 - DNA, 25 bp, Homo sapien
agagcgctggcatggccactgtggt

SEQ ID NO: 2974457 - DNA, 25 bp, Homo sapien
tctgatgtgactggagtattctctc

SEQ ID NO: 2974458 - DNA, 25 bp, Homo sapien
cgctggcatggccactgtggtttct

SEQ ID NO: 2974459 - DNA, 25 bp, Homo sapien
ggtttctgatgtgactggagtattc

SEQ ID NO: 2974460 - DNA, 25 bp, Homo sapien
tgggcctgcctttgaaacggctcct

SEQ ID NO: 2974461 - DNA, 25 bp, Homo sapien
ctgcctttgaaacggctcctcctgg

SEQ ID NO: 2974462 - DNA, 25 bp, Homo sapien
cattttcttcggctagggctctggg

SEQ ID NO: 2974463 - DNA, 25 bp, Homo sapien
ctggactcattttcttcggctaggg

SEQ ID NO: 2974464 - DNA, 25 bp, Homo sapien
tgtgttctgtaagaaccctttccaa

SEQ ID NO: 2974465 - DNA, 25 bp, Homo sapien
tgttctgtaagaaccctttccaaca

SEQ ID NO: 2974466 - DNA, 25 bp, Homo sapien
caactccttgtctcttctgttgtgt

SEQ ID NO: 2974467 - DNA, 25 bp, Homo sapien
gcccggcccattgcgttttatcata

SEQ ID NO: 2974468 - DNA, 25 bp, Homo sapien
tatcataaagtgctgtgttgtgttt

SEQ ID NO: 2974469 - DNA, 25 bp, Homo sapien
cggcccattgcgttttatcataaag

SEQ ID NO: 2974470 - DNA, 25 bp, Homo sapien
cgtgcccggcccattgcgttttatc

SEQ ID NO: 2974471 - DNA, 25 bp, Homo sapien
gcagaggttagacccacagtgggac

SEQ ID NO: 2974472 - DNA, 25 bp, Homo sapien
gaggcagaggttagacccacagtgg

SEQ ID NO: 2974473 - DNA, 25 bp, Homo sapien
ggcagaggttagacccacagtggga

SEQ ID NO: 2974474 - DNA, 25 bp, Homo sapien
agaggttagacccacagtgggacgg

SEQ ID NO: 2974475 - DNA, 25 bp, Homo sapien
tcgggtcacctgtgttgctggaaat

SEQ ID NO: 2974476 - DNA, 25 bp, Homo sapien
tgctggaaatgtagacgatgatacc

SEQ ID NO: 2974477 - DNA, 25 bp, Homo sapien
gacagagctccaaagtaaaaagacc

SEQ ID NO: 2974478 - DNA, 25 bp, Homo sapien
aaaagaccagccgtagttgtaatgg

SEQ ID NO: 2974479 - DNA, 25 bp, Homo sapien
agcatgctgacgtggaaaccttcct

SEQ ID NO: 2974480 - DNA, 25 bp, Homo sapien
tgtagctcggcatcctggcataagg

SEQ ID NO: 2974481 - DNA, 25 bp, Homo sapien
cctggacagcgtgtacatggacagc

SEQ ID NO: 2974482 - DNA, 25 bp, Homo sapien
cctcggtggaccttgagctggacct

SEQ ID NO: 2974483 - DNA, 25 bp, Homo sapien
gttcgtcgtcttgaggatcacatgc

SEQ ID NO: 2974484 - DNA, 25 bp, Homo sapien
cacatgccatcctgtgtgacaaaaa

SEQ ID NO: 2974485 - DNA, 25 bp, Homo sapien
tggctttagttcattgttcgtcgtc

SEQ ID NO: 2974486 - DNA, 25 bp, Homo sapien
agcacaaccttcgtgcaaagccagc

SEQ ID NO: 2974487 - DNA, 25 bp, Homo sapien
tcttcccaagttgatcaaggccagg

SEQ ID NO: 2974488 - DNA, 25 bp, Homo sapien
tgacatcatcactaggccgaacgga

SEQ ID NO: 2974489 - DNA, 25 bp, Homo sapien
ccagggtggatcaaggagtctcaaa

SEQ ID NO: 2974490 - DNA, 25 bp, Homo sapien
tgatttctggctcaacgacgcagga

SEQ ID NO: 2974491 - DNA, 25 bp, Homo sapien
tgaggtggttttgctcccggctcgt

SEQ ID NO: 2974492 - DNA, 25 bp, Homo sapien
tgcttaactggcgaaacacacaggg

SEQ ID NO: 2974493 - DNA, 25 bp, Homo sapien
accagtagtaggtactggagtcaca

SEQ ID NO: 2974494 - DNA, 25 bp, Homo sapien
tggtccctaggtgggccctgcttac

SEQ ID NO: 2974495 - DNA, 25 bp, Homo sapien
gccagtggtcctcagcttgtggccc

SEQ ID NO: 2974496 - DNA, 25 bp, Homo sapien
tctggaggttttaagtcctactgaa

SEQ ID NO: 2974497 - DNA, 25 bp, Homo sapien
caggataatccgagcatctgaagat

SEQ ID NO: 2974498 - DNA, 25 bp, Homo sapien
cctttttgtcatgtaaggccacata

SEQ ID NO: 2974499 - DNA, 25 bp, Homo sapien
caagagcctctgacggccttggaaa

SEQ ID NO: 2974500 - DNA, 25 bp, Homo sapien
gcattaaagattgatggcctctgcc

SEQ ID NO: 2974501 - DNA, 25 bp, Homo sapien
ttgtgtaagtcgcaccaggagaccc

SEQ ID NO: 2974502 - DNA, 25 bp, Homo sapien
tactgcgggcaggtccactttctct

SEQ ID NO: 2974503 - DNA, 25 bp, Homo sapien
ggtggtcgccgaggcgtgggtgccc

SEQ ID NO: 2974504 - DNA, 25 bp, Homo sapien
gccctgggcagggtccggcggctgc

SEQ ID NO: 2974505 - DNA, 25 bp, Homo sapien
tggtcgccgaggcgtgggtgccctg

SEQ ID NO: 2974506 - DNA, 25 bp, Homo sapien
tcgccgaggcgtgggtgccctgggc

SEQ ID NO: 2974507 - DNA, 25 bp, Homo sapien
cggttaccacggctgtcatggccag

SEQ ID NO: 2974508 - DNA, 25 bp, Homo sapien
gcacagcccagtggtcggttaccac

SEQ ID NO: 2974509 - DNA, 25 bp, Homo sapien
caggtagtgttgtggtgctccatgt

SEQ ID NO: 2974510 - DNA, 25 bp, Homo sapien
cctcgcaggtagtgttgtggtgctc

SEQ ID NO: 2974511 - DNA, 25 bp, Homo sapien
cgcaggtcttgctgtcgtccatggg

SEQ ID NO: 2974512 - DNA, 25 bp, Homo sapien
tgatgggcccgcaggtcttgctgtc

SEQ ID NO: 2974513 - DNA, 25 bp, Homo sapien
tggggatgcgcttggtacaaatccg

SEQ ID NO: 2974514 - DNA, 25 bp, Homo sapien
tgggcccgcaggtcttgctgtcgtc

SEQ ID NO: 2974515 - DNA, 25 bp, Homo sapien
ccagggggatgacggggaagagcag

SEQ ID NO: 2974516 - DNA, 25 bp, Homo sapien
cttccttcgcaagggcaactttgcc

SEQ ID NO: 2974517 - DNA, 25 bp, Homo sapien
cttcgcaagggcaactttgccaggg

SEQ ID NO: 2974518 - DNA, 25 bp, Homo sapien
tgccttccttcgcaagggcaacttt

SEQ ID NO: 2974519 - DNA, 25 bp, Homo sapien
acacggtaggaaatcgaggaatacg

SEQ ID NO: 2974520 - DNA, 25 bp, Homo sapien
cggtcacacggtaggaaatcgagga

SEQ ID NO: 2974521 - DNA, 25 bp, Homo sapien
caacgtgtggttcggtcacacggta

SEQ ID NO: 2974522 - DNA, 25 bp, Homo sapien
cttcaacgtgtggttcggtcacacg

SEQ ID NO: 2974523 - DNA, 25 bp, Homo sapien
gctgggcacttatgagtcttctggg

SEQ ID NO: 2974524 - DNA, 25 bp, Homo sapien
ctgcaagcacatggccacacctgtc

SEQ ID NO: 2974525 - DNA, 25 bp, Homo sapien
cttggtgtttctacaacagctgggc

SEQ ID NO: 2974526 - DNA, 25 bp, Homo sapien
catccgggctatgcgataccctgca

SEQ ID NO: 2974527 - DNA, 25 bp, Homo sapien
catctgcccatgttactcaagaggg

SEQ ID NO: 2974528 - DNA, 25 bp, Homo sapien
ggcaacgtaaagaggaaggacatcc

SEQ ID NO: 2974529 - DNA, 25 bp, Homo sapien
gacatccgaggtggacccatcttag

SEQ ID NO: 2974530 - DNA, 25 bp, Homo sapien
tgttaggaactctgaggtcgtgcca

SEQ ID NO: 2974531 - DNA, 25 bp, Homo sapien
taagcctgtggtctcataccatgcc

SEQ ID NO: 2974532 - DNA, 25 bp, Homo sapien
tcttcttgcaccttaagcctgtggt

SEQ ID NO: 2974533 - DNA, 25 bp, Homo sapien
gcaccttaagcctgtggtctcatac

SEQ ID NO: 2974534 - DNA, 25 bp, Homo sapien
aaatcattcttcttgcaccttaagc

SEQ ID NO: 2974535 - DNA, 25 bp, Homo sapien
gcttttctttgggatgaagactttc

SEQ ID NO: 2974536 - DNA, 25 bp, Homo sapien
caaggcttttctttgggatgaagac

SEQ ID NO: 2974537 - DNA, 25 bp, Homo sapien
ctgcagtgataccaaggcttttctt

SEQ ID NO: 2974538 - DNA, 25 bp, Homo sapien
tctttgggatgaagactttctttaa

SEQ ID NO: 2974539 - DNA, 25 bp, Homo sapien
ggagacagactgtgagttgagggga

SEQ ID NO: 2974540 - DNA, 25 bp, Homo sapien
gggagcaacccgtagcaaggacaga

SEQ ID NO: 2974541 - DNA, 25 bp, Homo sapien
agcaacccgtagcaaggacagaggc

SEQ ID NO: 2974542 - DNA, 25 bp, Homo sapien
agttgaggggagcaacccgtagcaa

SEQ ID NO: 2974543 - DNA, 25 bp, Homo sapien
gagtggtgaattcgaagatctccga

SEQ ID NO: 2974544 - DNA, 25 bp, Homo sapien
gaattcgaagatctccgagctctcg

SEQ ID NO: 2974545 - DNA, 25 bp, Homo sapien
tggtgaattcgaagatctccgagct

SEQ ID NO: 2974546 - DNA, 25 bp, Homo sapien
cttctgagtggtgaattcgaagatc

SEQ ID NO: 2974547 - DNA, 25 bp, Homo sapien
tggcccagtggtgcacaacacagaa

SEQ ID NO: 2974548 - DNA, 25 bp, Homo sapien
cctggagatggaaggcggctgcctg

SEQ ID NO: 2974549 - DNA, 25 bp, Homo sapien
ccctggccccgaggtgtggaagctc

SEQ ID NO: 2974550 - DNA, 25 bp, Homo sapien
gtcagtgcttttgccaatgactttc

SEQ ID NO: 2974551 - DNA, 25 bp, Homo sapien
ggtcgcagcagatagtccctcttct

SEQ ID NO: 2974552 - DNA, 25 bp, Homo sapien
atggcggctgccgagatgctgtact

SEQ ID NO: 2974553 - DNA, 25 bp, Homo sapien
tcttcttcccgagggacaggaggac

SEQ ID NO: 2974554 - DNA, 25 bp, Homo sapien
gcatagaacatggacgcgggtcgca

SEQ ID NO: 2974555 - DNA, 25 bp, Homo sapien
tccaccgagacgaggatgcagagac

SEQ ID NO: 2974556 - DNA, 25 bp, Homo sapien
tagtgctcgggctcagcatccatgc

SEQ ID NO: 2974557 - DNA, 25 bp, Homo sapien
taatagtactcgatccagacggtgt

SEQ ID NO: 2974558 - DNA, 25 bp, Homo sapien
cagacggtgtcctcactgtcaatca

SEQ ID NO: 2974559 - DNA, 25 bp, Homo sapien
tttatcaccgagaaagagacaggct

SEQ ID NO: 2974560 - DNA, 25 bp, Homo sapien
gagacaggctggctatttacacgga

SEQ ID NO: 2974561 - DNA, 25 bp, Homo sapien
ccaggttaggactcacgtcttgctc

SEQ ID NO: 2974562 - DNA, 25 bp, Homo sapien
caggttgtccctgcaatgttcataa

SEQ ID NO: 2974563 - DNA, 25 bp, Homo sapien
gattctacccagttaaaaatgcttc

SEQ ID NO: 2974564 - DNA, 25 bp, Homo sapien
gctttttatttcaagccacagtcag

SEQ ID NO: 2974565 - DNA, 25 bp, Homo sapien
cagtcagattctacccagttaaaaa

SEQ ID NO: 2974566 - DNA, 25 bp, Homo sapien
ccacagtcagattctacccagttaa

SEQ ID NO: 2974567 - DNA, 25 bp, Homo sapien
aaagcctgggaagccgaatgtattc

SEQ ID NO: 2974568 - DNA, 25 bp, Homo sapien
ctttggtttgtatcgcagttctggc

SEQ ID NO: 2974569 - DNA, 25 bp, Homo sapien
tgtgtggctctctggcggccagcct

SEQ ID NO: 2974570 - DNA, 25 bp, Homo sapien
tgtggacatccttctggcaagcagc

SEQ ID NO: 2974571 - DNA, 25 bp, Homo sapien
caaaactgaggtggtcaggttcatc

SEQ ID NO: 2974572 - DNA, 25 bp, Homo sapien
tacgttagctactttggttccatag

SEQ ID NO: 2974573 - DNA, 25 bp, Homo sapien
taagaggctctaatacctaaagagt

SEQ ID NO: 2974574 - DNA, 25 bp, Homo sapien
tcctacagtgtgctcattgtctcag

SEQ ID NO: 2974575 - DNA, 25 bp, Homo sapien
gggatctaccacctacacagcatga

SEQ ID NO: 2974576 - DNA, 25 bp, Homo sapien
tgccagcaggtgttagagagagcct

SEQ ID NO: 2974577 - DNA, 25 bp, Homo sapien
ggcttgctcacctttggagaggatt

SEQ ID NO: 2974578 - DNA, 25 bp, Homo sapien
tgtaaaagtacacgtgaagaccatc

SEQ ID NO: 2974579 - DNA, 25 bp, Homo sapien
gagtttgtaaagtgagccttcatgc

SEQ ID NO: 2974580 - DNA, 25 bp, Homo sapien
gcaaagctgcagacgtaaaagatgt

SEQ ID NO: 2974581 - DNA, 25 bp, Homo sapien
gatttgaagaacctcattccgtgta

SEQ ID NO: 2974582 - DNA, 25 bp, Homo sapien
gagccacctttgttaagagtcaggg

SEQ ID NO: 2974583 - DNA, 25 bp, Homo sapien
tgttgtaatctccatccaccatagg

SEQ ID NO: 2974584 - DNA, 25 bp, Homo sapien
cataggatagagttaaaggcattct

SEQ ID NO: 2974585 - DNA, 25 bp, Homo sapien
gattgttggtgcttagtagacttga

SEQ ID NO: 2974586 - DNA, 25 bp, Homo sapien
tttttggacaagctacacttcaagc

SEQ ID NO: 2974587 - DNA, 25 bp, Homo sapien
cacgccactgtgtctagctttcatt

SEQ ID NO: 2974588 - DNA, 25 bp, Homo sapien
tgtatgttcagtgattccagcacta

SEQ ID NO: 2974589 - DNA, 25 bp, Homo sapien
tccttcattgaactgccttggcacc

SEQ ID NO: 2974590 - DNA, 25 bp, Homo sapien
tgtttacaccaaatatgctgtcttg

SEQ ID NO: 2974591 - DNA, 25 bp, Homo sapien
gacttttgtcccatactctctagta

SEQ ID NO: 2974592 - DNA, 25 bp, Homo sapien
caagtttattgaggtatgagttata

SEQ ID NO: 2974593 - DNA, 25 bp, Homo sapien
caaaatcaagatacaagatatttac

SEQ ID NO: 2974594 - DNA, 25 bp, Homo sapien
tccagagttgttaacttccaccaaa

SEQ ID NO: 2974595 - DNA, 25 bp, Homo sapien
actaggaaagatggatataaggcat

SEQ ID NO: 2974596 - DNA, 25 bp, Homo sapien
aagttgtatagtaatcaagtctgga

SEQ ID NO: 2974597 - DNA, 25 bp, Homo sapien
cacggtttggaattaaactctgcaa

SEQ ID NO: 2974598 - DNA, 25 bp, Homo sapien
ttcgacagctttatgggtacaagtg

SEQ ID NO: 2974599 - DNA, 25 bp, Homo sapien
tgaaaacttcgttgagtagtgagat

SEQ ID NO: 2974600 - DNA, 25 bp, Homo sapien
gaatacaaactgtcatgttggcatc

SEQ ID NO: 2974601 - DNA, 25 bp, Homo sapien
tgttggcatcagttacaatcattgt

SEQ ID NO: 2974602 - DNA, 25 bp, Homo sapien
aatactgaatgtgctgagggcaaaa

SEQ ID NO: 2974603 - DNA, 25 bp, Homo sapien
gagcgaaactctgtctcaaaaaaaa

SEQ ID NO: 2974604 - DNA, 25 bp, Homo sapien
ccagcctgggcaacaagagcgaaac

SEQ ID NO: 2974605 - DNA, 25 bp, Homo sapien
tccgctgatatcataccactgcact

SEQ ID NO: 2974606 - DNA, 25 bp, Homo sapien
gtgcgccagcatagttgattaattt

SEQ ID NO: 2974607 - DNA, 25 bp, Homo sapien
gggacaacaaagtgtgcgccagcat

SEQ ID NO: 2974608 - DNA, 25 bp, Homo sapien
aatatttagtgaatgagttaacagt

SEQ ID NO: 2974609 - DNA, 25 bp, Homo sapien
caaagtgtgcgccagcatagttgat

SEQ ID NO: 2974610 - DNA, 25 bp, Homo sapien
tttctgggttaaggagtatgtacac

SEQ ID NO: 2974611 - DNA, 25 bp, Homo sapien
ggatgtgctgctatttattcaacca

SEQ ID NO: 2974612 - DNA, 25 bp, Homo sapien
tcctgcttaattttccatggcgtgg

SEQ ID NO: 2974613 - DNA, 25 bp, Homo sapien
caaccattcccgtattgatgggcat

SEQ ID NO: 2974614 - DNA, 25 bp, Homo sapien
tttctccctgtgaatcagctctgcc

SEQ ID NO: 2974615 - DNA, 25 bp, Homo sapien
caggcacagctagccagagctggat

SEQ ID NO: 2974616 - DNA, 25 bp, Homo sapien
ctaacttcgaagtccaggcacagct

SEQ ID NO: 2974617 - DNA, 25 bp, Homo sapien
ggtgatgtcatcaggacttagtttc

SEQ ID NO: 2974618 - DNA, 25 bp, Homo sapien
agtcttagcacagtcgtctttgtag

SEQ ID NO: 2974619 - DNA, 25 bp, Homo sapien
aagtcttagcacagtcgtctttgta

SEQ ID NO: 2974620 - DNA, 25 bp, Homo sapien
gtcttagcacagtcgtctttgtagt

SEQ ID NO: 2974621 - DNA, 25 bp, Homo sapien
ttagatctgtttgggctcaacgcac

SEQ ID NO: 2974622 - DNA, 25 bp, Homo sapien
gatcacttgaccctttctcttatct

SEQ ID NO: 2974623 - DNA, 25 bp, Homo sapien
tggatcacttgaccctttctcttat

SEQ ID NO: 2974624 - DNA, 25 bp, Homo sapien
gcttgcatctttttaatagccagca

SEQ ID NO: 2974625 - DNA, 25 bp, Homo sapien
tcacttgaccctttctcttatctcc

SEQ ID NO: 2974626 - DNA, 25 bp, Homo sapien
gcctctgtcgtttacagtgtaactg

SEQ ID NO: 2974627 - DNA, 25 bp, Homo sapien
cagaatcagtgtcgtggtaaaagta

SEQ ID NO: 2974628 - DNA, 25 bp, Homo sapien
gaaccttagttgcttgtgggctcag

SEQ ID NO: 2974629 - DNA, 25 bp, Homo sapien
taaaagtaggagttgtcgggctgcc

SEQ ID NO: 2974630 - DNA, 25 bp, Homo sapien
ggtcctggaccaaccatctagctat

SEQ ID NO: 2974631 - DNA, 25 bp, Homo sapien
tctaaaacctacatatgcaggaagg

SEQ ID NO: 2974632 - DNA, 25 bp, Homo sapien
taaaaaatcatgtcggttgggtgtg

SEQ ID NO: 2974633 - DNA, 25 bp, Homo sapien
ggttcttctcatactgtcacagaca

SEQ ID NO: 2974634 - DNA, 25 bp, Homo sapien
taaggtcaaaaaccagactcatttg

SEQ ID NO: 2974635 - DNA, 25 bp, Homo sapien
aggtcaaaaaccagactcatttgca

SEQ ID NO: 2974636 - DNA, 25 bp, Homo sapien
atttgcaaagctgcacactgtacca

SEQ ID NO: 2974637 - DNA, 25 bp, Homo sapien
tcatttgcaaagctgcacactgtac

SEQ ID NO: 2974638 - DNA, 25 bp, Homo sapien
taatgacaggtaagtcctgacttcc

SEQ ID NO: 2974639 - DNA, 25 bp, Homo sapien
ccaagatggcgtagaaagtaatgac

SEQ ID NO: 2974640 - DNA, 25 bp, Homo sapien
gggacgttgacaagtggatccaaga

SEQ ID NO: 2974641 - DNA, 25 bp, Homo sapien
ctcttcgaggcgaggcccggacgct

SEQ ID NO: 2974642 - DNA, 25 bp, Homo sapien
ggtgaattttcaatgccgtcagccc

SEQ ID NO: 2974643 - DNA, 25 bp, Homo sapien
gcacaaataaatccgcgagcagctc

SEQ ID NO: 2974644 - DNA, 25 bp, Homo sapien
gagcagaaacgctcacatccacgcg

SEQ ID NO: 2974645 - DNA, 25 bp, Homo sapien
gaaacctcgggttgattcaatgcag

SEQ ID NO: 2974646 - DNA, 25 bp, Homo sapien
tccgcagcccggacgctcccagggt

SEQ ID NO: 2974647 - DNA, 25 bp, Homo sapien
acagtccgcagcccggacgctccca

SEQ ID NO: 2974648 - DNA, 25 bp, Homo sapien
agtccgcagcccggacgctcccagg

SEQ ID NO: 2974649 - DNA, 25 bp, Homo sapien
tcacagtccgcagcccggacgctcc

SEQ ID NO: 2974650 - DNA, 25 bp, Homo sapien
caccgaaagagggttttaatgccag

SEQ ID NO: 2974651 - DNA, 25 bp, Homo sapien
tagggtctggaggagcgtaaaatcc

SEQ ID NO: 2974652 - DNA, 25 bp, Homo sapien
cacgttcctagtgaggctgttgata

SEQ ID NO: 2974653 - DNA, 25 bp, Homo sapien
taaaatcctcgggtagatccaaggc

SEQ ID NO: 2974654 - DNA, 25 bp, Homo sapien
caaaagaggaattggaaaagaagca

SEQ ID NO: 2974655 - DNA, 25 bp, Homo sapien
agtgcaaaagaggaattggaaaaga

SEQ ID NO: 2974656 - DNA, 25 bp, Homo sapien
agaggaattggaaaagaagcacctg

SEQ ID NO: 2974657 - DNA, 25 bp, Homo sapien
cagtggctaaataagtgcaaaagag

SEQ ID NO: 2974658 - DNA, 25 bp, Homo sapien
aatatcacagggttggtcaggtgga

SEQ ID NO: 2974659 - DNA, 25 bp, Homo sapien
gaacacttatttgggtcaatgccta

SEQ ID NO: 2974660 - DNA, 25 bp, Homo sapien
cagctcaggcaacaggcggtgtatt

SEQ ID NO: 2974661 - DNA, 25 bp, Homo sapien
caaagaaacgtgtttgggagacaca

SEQ ID NO: 2974662 - DNA, 25 bp, Homo sapien
ggactgttcgaggaaggcctgcggg

SEQ ID NO: 2974663 - DNA, 25 bp, Homo sapien
gtcatggactgttcgaggaaggcct

SEQ ID NO: 2974664 - DNA, 25 bp, Homo sapien
tcctgctctgctgactcaggacccc

SEQ ID NO: 2974665 - DNA, 25 bp, Homo sapien
atggactgttcgaggaaggcctgcg

SEQ ID NO: 2974666 - DNA, 25 bp, Homo sapien
gtagaaataggaagttggtcttgtg

SEQ ID NO: 2974667 - DNA, 25 bp, Homo sapien
atgtagaaataggaagttggtcttg

SEQ ID NO: 2974668 - DNA, 25 bp, Homo sapien
tgtggagcctaagtgccattcgagt

SEQ ID NO: 2974669 - DNA, 25 bp, Homo sapien
agcctaagtgccattcgagttgcag

SEQ ID NO: 2974670 - DNA, 25 bp, Homo sapien
gaattcatcaccgaaccctgtgctt

SEQ ID NO: 2974671 - DNA, 25 bp, Homo sapien
tctttgctgaatgaaaagctccact

SEQ ID NO: 2974672 - DNA, 25 bp, Homo sapien
gaatgaaaagctccactccgaacct

SEQ ID NO: 2974673 - DNA, 25 bp, Homo sapien
cacgtgagaattcatcaccgaaccc

SEQ ID NO: 2974674 - DNA, 25 bp, Homo sapien
gaatgttctggcgtctctgagtgta

SEQ ID NO: 2974675 - DNA, 25 bp, Homo sapien
tgattgtagacggttgcctgtgcca

SEQ ID NO: 2974676 - DNA, 25 bp, Homo sapien
ctttagagtgcggacaggagaccaa

SEQ ID NO: 2974677 - DNA, 25 bp, Homo sapien
ggctgtggcctaggacccatagtca

SEQ ID NO: 2974678 - DNA, 25 bp, Homo sapien
aggctccttaaacaaactgtcttgc

SEQ ID NO: 2974679 - DNA, 25 bp, Homo sapien
ccttaaacaaactgtcttgcatcca

SEQ ID NO: 2974680 - DNA, 25 bp, Homo sapien
ggctaccttcttgtgaagagaatca

SEQ ID NO: 2974681 - DNA, 25 bp, Homo sapien
caaactgtcttgcatccaataaata

SEQ ID NO: 2974682 - DNA, 25 bp, Homo sapien
tgttcacagtggtaggcccatggac

SEQ ID NO: 2974683 - DNA, 25 bp, Homo sapien
gttcacagtggtaggcccatggact

SEQ ID NO: 2974684 - DNA, 25 bp, Homo sapien
tgtggtattccctgttggcctctca

SEQ ID NO: 2974685 - DNA, 25 bp, Homo sapien
gtattccctgttggcctctcatcca

SEQ ID NO: 2974686 - DNA, 25 bp, Homo sapien
tgacctttgaacaccttagcaagag

SEQ ID NO: 2974687 - DNA, 25 bp, Homo sapien
ttagcaagagtaaactgctgggtgc

SEQ ID NO: 2974688 - DNA, 25 bp, Homo sapien
agtcaagaaaaccaatgatgccaga

SEQ ID NO: 2974689 - DNA, 25 bp, Homo sapien
ccaatgatgccagatactgaatttc

SEQ ID NO: 2974690 - DNA, 25 bp, Homo sapien
ccccagatagtggatggtaaagagg

SEQ ID NO: 2974691 - DNA, 25 bp, Homo sapien
ctagacgacgacgaggacttcaatc

SEQ ID NO: 2974692 - DNA, 25 bp, Homo sapien
tagacgacgacgaggacttcaatct

SEQ ID NO: 2974693 - DNA, 25 bp, Homo sapien
accaccccccagatagtggatggta

SEQ ID NO: 2974694 - DNA, 25 bp, Homo sapien
ctctcgaagcgtagcaagaaacagc

SEQ ID NO: 2974695 - DNA, 25 bp, Homo sapien
tgtggtcaccagtggtccagttgat

SEQ ID NO: 2974696 - DNA, 25 bp, Homo sapien
tttgatctctcgaagcgtagcaaga

SEQ ID NO: 2974697 - DNA, 25 bp, Homo sapien
gatccgtgtgttgtcagccgttcag

SEQ ID NO: 2974698 - DNA, 25 bp, Homo sapien
ctaagtcaggagggtgccctgaatc

SEQ ID NO: 2974699 - DNA, 25 bp, Homo sapien
tcgccttgagtcaggaggtctgcga

SEQ ID NO: 2974700 - DNA, 25 bp, Homo sapien
tcaggaggaggtcgccttgagtcag

SEQ ID NO: 2974701 - DNA, 25 bp, Homo sapien
cttgttctttgaagcgggccagtgc

SEQ ID NO: 2974702 - DNA, 25 bp, Homo sapien
cagttgacccgtatgttgttagccg

SEQ ID NO: 2974703 - DNA, 25 bp, Homo sapien
tccagttgacccgtatgttgttagc

SEQ ID NO: 2974704 - DNA, 25 bp, Homo sapien
cccgtatgttgttagccgttcagga

SEQ ID NO: 2974705 - DNA, 25 bp, Homo sapien
ttgacccgtatgttgttagccgttc

SEQ ID NO: 2974706 - DNA, 25 bp, Homo sapien
ctcttccgcgtagacttcaaacaac

SEQ ID NO: 2974707 - DNA, 25 bp, Homo sapien
ttaaagcttgcacggccacaccgtg

SEQ ID NO: 2974708 - DNA, 25 bp, Homo sapien
tcaaacaacttaaagcttgcacggc

SEQ ID NO: 2974709 - DNA, 25 bp, Homo sapien
cacaccgtgtcttgccgtgggtctg

SEQ ID NO: 2974710 - DNA, 25 bp, Homo sapien
tcattcaatattcccgcttaatgga

SEQ ID NO: 2974711 - DNA, 25 bp, Homo sapien
tcaatattcccgcttaatggacctg

SEQ ID NO: 2974712 - DNA, 25 bp, Homo sapien
aatattcccgcttaatggacctgct

SEQ ID NO: 2974713 - DNA, 25 bp, Homo sapien
tattcccgcttaatggacctgctac

SEQ ID NO: 2974714 - DNA, 25 bp, Homo sapien
gatcagctgttcatccatttcgtgt

SEQ ID NO: 2974715 - DNA, 25 bp, Homo sapien
tgttcggaacctcaattaatcctgt

SEQ ID NO: 2974716 - DNA, 25 bp, Homo sapien
tctttaacacacactaggctctttg

SEQ ID NO: 2974717 - DNA, 25 bp, Homo sapien
gaccaaattgcactcgactcgatca

SEQ ID NO: 2974718 - DNA, 25 bp, Homo sapien
gacgtcaggccaccctcatagtaag

SEQ ID NO: 2974719 - DNA, 25 bp, Homo sapien
tggtcacactaataacatcaacatc

SEQ ID NO: 2974720 - DNA, 25 bp, Homo sapien
cattgtgaataatgacatacagtac

SEQ ID NO: 2974721 - DNA, 25 bp, Homo sapien
gaagacagttgtgggatatctgtca

SEQ ID NO: 2974722 - DNA, 25 bp, Homo sapien
caataagggtcttagtgctttagaa

SEQ ID NO: 2974723 - DNA, 25 bp, Homo sapien
aactgaactcattaatgtctctggt

SEQ ID NO: 2974724 - DNA, 25 bp, Homo sapien
tacataatctacaataagggtctta

SEQ ID NO: 2974725 - DNA, 25 bp, Homo sapien
actacgcatctcatagccaaagagg

SEQ ID NO: 2974726 - DNA, 25 bp, Homo sapien
agccttcacctccatggctcaagcc

SEQ ID NO: 2974727 - DNA, 25 bp, Homo sapien
gacaggtttcgccatgtagcccagc

SEQ ID NO: 2974728 - DNA, 25 bp, Homo sapien
caggtttcgccatgtagcccagcct

SEQ ID NO: 2974729 - DNA, 25 bp, Homo sapien
cttcacctccatggctcaagccagc

SEQ ID NO: 2974730 - DNA, 25 bp, Homo sapien
cagtttacattgttaacagcttaaa

SEQ ID NO: 2974731 - DNA, 25 bp, Homo sapien
tgagtagctggtagtgcacaacact

SEQ ID NO: 2974732 - DNA, 25 bp, Homo sapien
tcagcctcttatggttaatgtcaaa

SEQ ID NO: 2974733 - DNA, 25 bp, Homo sapien
ctgtacctggcttaatgtcttttca

SEQ ID NO: 2974734 - DNA, 25 bp, Homo sapien
gattggctagccacacatgcgcatg

SEQ ID NO: 2974735 - DNA, 25 bp, Homo sapien
catcgggatgtgtaggctcagttcc

SEQ ID NO: 2974736 - DNA, 25 bp, Homo sapien
tggaaggaagtattctactgacggg

SEQ ID NO: 2974737 - DNA, 25 bp, Homo sapien
tactgacgggtgacactgttgagga

SEQ ID NO: 2974738 - DNA, 25 bp, Homo sapien
cacctatgtgtggtccagtaagcaa

SEQ ID NO: 2974739 - DNA, 25 bp, Homo sapien
tgaccctagggacaagtcaccaatg

SEQ ID NO: 2974740 - DNA, 25 bp, Homo sapien
gaagtgcagccgtgtgaatggaaat

SEQ ID NO: 2974741 - DNA, 25 bp, Homo sapien
gaacatgaaccccacgtagcctgtt

SEQ ID NO: 2974742 - DNA, 25 bp, Homo sapien
tgcccgatgctaatgtcaccaggaa

SEQ ID NO: 2974743 - DNA, 25 bp, Homo sapien
cccggaacgcggtgttgcaaagtca

SEQ ID NO: 2974744 - DNA, 25 bp, Homo sapien
taaaacgaatgcacaaaagtcaccc

SEQ ID NO: 2974745 - DNA, 25 bp, Homo sapien
tttccagacaaaggctcgatcggct

SEQ ID NO: 2974746 - DNA, 25 bp, Homo sapien
gtgagcggcatgcagatccggtact

SEQ ID NO: 2974747 - DNA, 25 bp, Homo sapien
ctcgtctacggtgagcggcatgcag

SEQ ID NO: 2974748 - DNA, 25 bp, Homo sapien
cgtctacggtgagcggcatgcagat

SEQ ID NO: 2974749 - DNA, 25 bp, Homo sapien
catgcagatccggtactctttcagc

SEQ ID NO: 2974750 - DNA, 25 bp, Homo sapien
aagacggtctgggtggctgatttca

SEQ ID NO: 2974751 - DNA, 25 bp, Homo sapien
cagagacgctcagcagtcgtggaat

SEQ ID NO: 2974752 - DNA, 25 bp, Homo sapien
tgaatactggagctcgcggcttcgc

SEQ ID NO: 2974753 - DNA, 25 bp, Homo sapien
catatctgatagtttcgaggcacca

SEQ ID NO: 2974754 - DNA, 25 bp, Homo sapien
ccttggtccagatggcaaatacgga

SEQ ID NO: 2974755 - DNA, 25 bp, Homo sapien
cttggtccagatggcaaatacggac

SEQ ID NO: 2974756 - DNA, 25 bp, Homo sapien
tggtccagatggcaaatacggacag

SEQ ID NO: 2974757 - DNA, 25 bp, Homo sapien
tccagatggcaaatacggacagccc

SEQ ID NO: 2974758 - DNA, 25 bp, Homo sapien
catttacttgatagtgctgacttta

SEQ ID NO: 2974759 - DNA, 25 bp, Homo sapien
taaacactagtgacaggcaaaaagc

SEQ ID NO: 2974760 - DNA, 25 bp, Homo sapien
taaagctagagaaatagtagaggcc

SEQ ID NO: 2974761 - DNA, 25 bp, Homo sapien
tctatagcaagtcaaaaggcctctg

SEQ ID NO: 2974762 - DNA, 25 bp, Homo sapien
tccgttctcagaaatgtgcgcaaga

SEQ ID NO: 2974763 - DNA, 25 bp, Homo sapien
gatcccaaatccgttctcagaaatg

SEQ ID NO: 2974764 - DNA, 25 bp, Homo sapien
aatgtgcgcaagaaaactctctggg

SEQ ID NO: 2974765 - DNA, 25 bp, Homo sapien
cagaaatgtgcgcaagaaaactctc

SEQ ID NO: 2974766 - DNA, 25 bp, Homo sapien
gacttccactaacgtccgatgagga

SEQ ID NO: 2974767 - DNA, 25 bp, Homo sapien
ctatggtttgcaaagccagtggcca

SEQ ID NO: 2974768 - DNA, 25 bp, Homo sapien
cagtcttgtataatgtggctcaggc

SEQ ID NO: 2974769 - DNA, 25 bp, Homo sapien
caatctgaccaagaacttacgctgg

SEQ ID NO: 2974770 - DNA, 25 bp, Homo sapien
tcaccaggatatacacatccagtga

SEQ ID NO: 2974771 - DNA, 25 bp, Homo sapien
ctcttcaaatagttccttttaggtg

SEQ ID NO: 2974772 - DNA, 25 bp, Homo sapien
tattttagccaagcgcagcggctca

SEQ ID NO: 2974773 - DNA, 25 bp, Homo sapien
catccagtgaagtgcagtcctcttc

SEQ ID NO: 2974774 - DNA, 25 bp, Homo sapien
tcctttgacagagggcagaattcag

SEQ ID NO: 2974775 - DNA, 25 bp, Homo sapien
caagtatttcgctggctgcaaaagt

SEQ ID NO: 2974776 - DNA, 25 bp, Homo sapien
tgccacccaaatacagatatgcgtc

SEQ ID NO: 2974777 - DNA, 25 bp, Homo sapien
ggtcagtgccaaccctgcttctttg

SEQ ID NO: 2974778 - DNA, 25 bp, Homo sapien
gaatggctaaagaatgcacagtgca

SEQ ID NO: 2974779 - DNA, 25 bp, Homo sapien
gactgactaggtcttccgtgtccac

SEQ ID NO: 2974780 - DNA, 25 bp, Homo sapien
tgatatcacacagcaaggactgact

SEQ ID NO: 2974781 - DNA, 25 bp, Homo sapien
aacttacaggtactttggctcaggg

SEQ ID NO: 2974782 - DNA, 25 bp, Homo sapien
tgccacgaagctaagaagaacggtt

SEQ ID NO: 2974783 - DNA, 25 bp, Homo sapien
catgcttatcacatctgccacgaag

SEQ ID NO: 2974784 - DNA, 25 bp, Homo sapien
tcaaaaacgtggtcaggctaggcgc

SEQ ID NO: 2974785 - DNA, 25 bp, Homo sapien
acctggccagacctatgttttatga

SEQ ID NO: 2974786 - DNA, 25 bp, Homo sapien
atcctcaacgaagcaaccaccatgt

SEQ ID NO: 2974787 - DNA, 25 bp, Homo sapien
gcactataaaagctcctatagggag

SEQ ID NO: 2974788 - DNA, 25 bp, Homo sapien
cataaactggtagtcatcctcaacg

SEQ ID NO: 2974789 - DNA, 25 bp, Homo sapien
atcataggcgtgagtgacggtgcct

SEQ ID NO: 2974790 - DNA, 25 bp, Homo sapien
tgttcctgacaccaagttgccttct

SEQ ID NO: 2974791 - DNA, 25 bp, Homo sapien
tgacaccaagttgccttctggtctt

SEQ ID NO: 2974792 - DNA, 25 bp, Homo sapien
tcctgacaccaagttgccttctggt

SEQ ID NO: 2974793 - DNA, 25 bp, Homo sapien
cttgttcctgacaccaagttgcctt

SEQ ID NO: 2974794 - DNA, 25 bp, Homo sapien
aggctgagcatagcgagaagcccca

SEQ ID NO: 2974795 - DNA, 25 bp, Homo sapien
tgacagtaatgatgacacacaggct

SEQ ID NO: 2974796 - DNA, 25 bp, Homo sapien
gacacacaggctgagcatagcgaga

SEQ ID NO: 2974797 - DNA, 25 bp, Homo sapien
cagcatgacagtaatgatgacacac

SEQ ID NO: 2974798 - DNA, 25 bp, Homo sapien
tgtgaaccacggaagcagcagcaaa

SEQ ID NO: 2974799 - DNA, 25 bp, Homo sapien
tgcctcatgtgaaccacggaagcag

SEQ ID NO: 2974800 - DNA, 25 bp, Homo sapien
tcatgtgaaccacggaagcagcagc

SEQ ID NO: 2974801 - DNA, 25 bp, Homo sapien
atctgcctcatgtgaaccacggaag

SEQ ID NO: 2974802 - DNA, 25 bp, Homo sapien
gcctgcgaagcaacatcaatgattt

SEQ ID NO: 2974803 - DNA, 25 bp, Homo sapien
taaatccctggaacgcttgtccctg

SEQ ID NO: 2974804 - DNA, 25 bp, Homo sapien
caacctctaggatgcaaactgccct

SEQ ID NO: 2974805 - DNA, 25 bp, Homo sapien
tgccctaggaaaagcatcgaactgt

SEQ ID NO: 2974806 - DNA, 25 bp, Homo sapien
ctaatgggagtgacacctaaagagg

SEQ ID NO: 2974807 - DNA, 25 bp, Homo sapien
tgcaaagaggtcaggcatgatagct

SEQ ID NO: 2974808 - DNA, 25 bp, Homo sapien
gacaacagtagatggcaacaaacag

SEQ ID NO: 2974809 - DNA, 25 bp, Homo sapien
gcataacagatcaagagaatgtgca

SEQ ID NO: 2974810 - DNA, 25 bp, Homo sapien
ggcggactttaaatgtcacacaaag

SEQ ID NO: 2974811 - DNA, 25 bp, Homo sapien
gatgacgtgcgtcttgttaggaaac

SEQ ID NO: 2974812 - DNA, 25 bp, Homo sapien
aaaggatttggagacgatgacgtgc

SEQ ID NO: 2974813 - DNA, 25 bp, Homo sapien
cagtccaggcggactttaaatgtca

SEQ ID NO: 2974814 - DNA, 25 bp, Homo sapien
tctgatttttgagagaaccaaggca

SEQ ID NO: 2974815 - DNA, 25 bp, Homo sapien
gtccacgtaattgtaatagccaaca

SEQ ID NO: 2974816 - DNA, 25 bp, Homo sapien
ctagacgaaagaagagtacaacatg

SEQ ID NO: 2974817 - DNA, 25 bp, Homo sapien
tttattaagggcatcgccaaggcca

SEQ ID NO: 2974818 - DNA, 25 bp, Homo sapien
tgaatgttaatctggaccaacaggt

SEQ ID NO: 2974819 - DNA, 25 bp, Homo sapien
tttcataaaagtaaccagtggtagc

SEQ ID NO: 2974820 - DNA, 25 bp, Homo sapien
agtcatcacaagtgtccattttctc

SEQ ID NO: 2974821 - DNA, 25 bp, Homo sapien
gtgatttctgaacactacccaagtc

SEQ ID NO: 2974822 - DNA, 25 bp, Homo sapien
gagcctggcactgcaacttgaaatg

SEQ ID NO: 2974823 - DNA, 25 bp, Homo sapien
aatgacggagaaggatcctcgagcc

SEQ ID NO: 2974824 - DNA, 25 bp, Homo sapien
taaaggaggtactgaacccaccaca

SEQ ID NO: 2974825 - DNA, 25 bp, Homo sapien
tgatggaaccattgggagagcttcc

SEQ ID NO: 2974826 - DNA, 25 bp, Homo sapien
tgagtcatacttcctgcaagtcaca

SEQ ID NO: 2974827 - DNA, 25 bp, Homo sapien
tccacggcctaataagacaaaattg

SEQ ID NO: 2974828 - DNA, 25 bp, Homo sapien
cattggaagcgtatgttggcacatc

SEQ ID NO: 2974829 - DNA, 25 bp, Homo sapien
gattcttggctcatctcgcactgta

SEQ ID NO: 2974830 - DNA, 25 bp, Homo sapien
accaccgtgctccagcctgggtgac

SEQ ID NO: 2974831 - DNA, 25 bp, Homo sapien
acaccaccgtgctccagcctgggtg

SEQ ID NO: 2974832 - DNA, 25 bp, Homo sapien
gatcacaccaccgtgctccagcctg

SEQ ID NO: 2974833 - DNA, 25 bp, Homo sapien
caccgtgctccagcctgggtgacag

SEQ ID NO: 2974834 - DNA, 25 bp, Homo sapien
gcgcctagtcaggtcggttgaaaat

SEQ ID NO: 2974835 - DNA, 25 bp, Homo sapien
taacgcagacgtgctgactcacact

SEQ ID NO: 2974836 - DNA, 25 bp, Homo sapien
caaaacagttagcagttgagccgta

SEQ ID NO: 2974837 - DNA, 25 bp, Homo sapien
tgctagcatactgaactcttgggag

SEQ ID NO: 2974838 - DNA, 25 bp, Homo sapien
ttaaattttactgacccatgaaata

SEQ ID NO: 2974839 - DNA, 25 bp, Homo sapien
tcttacatcaatccccaaaatttct

SEQ ID NO: 2974840 - DNA, 25 bp, Homo sapien
aaattttactgacccatgaaataca

SEQ ID NO: 2974841 - DNA, 25 bp, Homo sapien
aaaacagatgatcttacatcaatcc

SEQ ID NO: 2974842 - DNA, 25 bp, Homo sapien
aaaaaacaaagcaagtgcggtctgt

SEQ ID NO: 2974843 - DNA, 25 bp, Homo sapien
caagtgcggtctgttttcagaaagc

SEQ ID NO: 2974844 - DNA, 25 bp, Homo sapien
attcctaaatgctagtgcacaggtt

SEQ ID NO: 2974845 - DNA, 25 bp, Homo sapien
tagtgcacaggttcattgccaaatg

SEQ ID NO: 2974846 - DNA, 25 bp, Homo sapien
gagaaaagacgttaccatctataaa

SEQ ID NO: 2974847 - DNA, 25 bp, Homo sapien
tttaaaatcacagagtagtaaggag

SEQ ID NO: 2974848 - DNA, 25 bp, Homo sapien
tcacagagtagtaaggagaattaat

SEQ ID NO: 2974849 - DNA, 25 bp, Homo sapien
taaaatcacagagtagtaaggagaa

SEQ ID NO: 2974850 - DNA, 25 bp, Homo sapien
gactgtcgcgtaagacctctgctga

SEQ ID NO: 2974851 - DNA, 25 bp, Homo sapien
aaaacaggcttccaccattccaagg

SEQ ID NO: 2974852 - DNA, 25 bp, Homo sapien
gcctgcattccaaggaacgagctag

SEQ ID NO: 2974853 - DNA, 25 bp, Homo sapien
atggcaccatgtccgaggcaccaaa

SEQ ID NO: 2974854 - DNA, 25 bp, Homo sapien
aagatgtgtgtatcggcaccaccat

SEQ ID NO: 2974855 - DNA, 25 bp, Homo sapien
tctgagtcacgtttaacttctccca

SEQ ID NO: 2974856 - DNA, 25 bp, Homo sapien
tcaaaagatgtgtgtatcggcacca

SEQ ID NO: 2974857 - DNA, 25 bp, Homo sapien
aaaagcaattctctgagtcacgttt

SEQ ID NO: 2974858 - DNA, 25 bp, Homo sapien
gaagtctcccgtgcaccttcaggag

SEQ ID NO: 2974859 - DNA, 25 bp, Homo sapien
tgacttgcctgtgggctcactttca

SEQ ID NO: 2974860 - DNA, 25 bp, Homo sapien
gacagagcaaggcttcgtcttcaaa

SEQ ID NO: 2974861 - DNA, 25 bp, Homo sapien
cagtttgcattcacacagcccattg

SEQ ID NO: 2974862 - DNA, 25 bp, Homo sapien
gacccctgctctaattaacacaaag

SEQ ID NO: 2974863 - DNA, 25 bp, Homo sapien
caggcggtcacggtattgatgagaa

SEQ ID NO: 2974864 - DNA, 25 bp, Homo sapien
tggaactacagagtagccaataacc

SEQ ID NO: 2974865 - DNA, 25 bp, Homo sapien
gcacctccacaacgtcgctgatgtt

SEQ ID NO: 2974866 - DNA, 25 bp, Homo sapien
tctccgtgtaaagaataccaagttc

SEQ ID NO: 2974867 - DNA, 25 bp, Homo sapien
agacaaagaggaagcctaaagaaca

SEQ ID NO: 2974868 - DNA, 25 bp, Homo sapien
aacagccagatagccagcgtggtgg

SEQ ID NO: 2974869 - DNA, 25 bp, Homo sapien
aaagtcatgaattctccgtgtaaag

SEQ ID NO: 2974870 - DNA, 25 bp, Homo sapien
aaaaacagagtgaaagtgtgtgagc

SEQ ID NO: 2974871 - DNA, 25 bp, Homo sapien
cacctaggaatgctgggtaaaatat

SEQ ID NO: 2974872 - DNA, 25 bp, Homo sapien
aatatggcaacaaattaagataacg

SEQ ID NO: 2974873 - DNA, 25 bp, Homo sapien
taagataacgtaggggcggaatctc

SEQ ID NO: 2974874 - DNA, 25 bp, Homo sapien
cagaactcaatgtggtaaatgggat

SEQ ID NO: 2974875 - DNA, 25 bp, Homo sapien
gggcttcactgatgacacagcatag

SEQ ID NO: 2974876 - DNA, 25 bp, Homo sapien
tctgataacgggtaagtttatgggc

SEQ ID NO: 2974877 - DNA, 25 bp, Homo sapien
agtgatgcccggagaaccttgatgt

SEQ ID NO: 2974878 - DNA, 25 bp, Homo sapien
ttgcccacagcgccagtctcaaact

SEQ ID NO: 2974879 - DNA, 25 bp, Homo sapien
tgcaagctctgcctttcgggcttaa

SEQ ID NO: 2974880 - DNA, 25 bp, Homo sapien
agctctgcctttcgggcttaaacga

SEQ ID NO: 2974881 - DNA, 25 bp, Homo sapien
tgcgcctagccaaacacataaaata

SEQ ID NO: 2974882 - DNA, 25 bp, Homo sapien
taaagccccgaacatcagagaggag

SEQ ID NO: 2974883 - DNA, 25 bp, Homo sapien
gactggacaacatcgtgagacgcgc

SEQ ID NO: 2974884 - DNA, 25 bp, Homo sapien
cattggcatgtgaaatctcccggag

SEQ ID NO: 2974885 - DNA, 25 bp, Homo sapien
tgaagatcctaccacaaaaaagctg

SEQ ID NO: 2974886 - DNA, 25 bp, Homo sapien
tgaaagagaggatcaaggcaatcat

SEQ ID NO: 2974887 - DNA, 25 bp, Homo sapien
gtagttgaaagagaggatcaaggca

SEQ ID NO: 2974888 - DNA, 25 bp, Homo sapien
ttgaaagagaggatcaaggcaatca

SEQ ID NO: 2974889 - DNA, 25 bp, Homo sapien
gttgaaagagaggatcaaggcaatc

SEQ ID NO: 2974890 - DNA, 25 bp, Homo sapien
gcattgcctgacaaccaagaccaag

SEQ ID NO: 2974891 - DNA, 25 bp, Homo sapien
ccagggacggctttctacaagatca

SEQ ID NO: 2974892 - DNA, 25 bp, Homo sapien
tctcagctgcaattaattagggaca

SEQ ID NO: 2974893 - DNA, 25 bp, Homo sapien
tctctcacaggacaataaaagggca

SEQ ID NO: 2974894 - DNA, 25 bp, Homo sapien
gaggaggtaaccgagaccaggcttc

SEQ ID NO: 2974895 - DNA, 25 bp, Homo sapien
aataagctacggagtgatacggtgc

SEQ ID NO: 2974896 - DNA, 25 bp, Homo sapien
gctacacttggaaaggaagttctca

SEQ ID NO: 2974897 - DNA, 25 bp, Homo sapien
tctgagctcaaaacggagaccacag

SEQ ID NO: 2974898 - DNA, 25 bp, Homo sapien
gaactcccacgggtctgacggctgc

SEQ ID NO: 2974899 - DNA, 25 bp, Homo sapien
tgacggctgctgtcacaagagcctg

SEQ ID NO: 2974900 - DNA, 25 bp, Homo sapien
ctggtctgagtgtgctggcgatcca

SEQ ID NO: 2974901 - DNA, 25 bp, Homo sapien
agtgtgctggcgatccagccaggct

SEQ ID NO: 2974902 - DNA, 25 bp, Homo sapien
tgagcctctctatagctatggcact

SEQ ID NO: 2974903 - DNA, 25 bp, Homo sapien
tgaagacgtaggtccacacaaggac

SEQ ID NO: 2974904 - DNA, 25 bp, Homo sapien
taaacattagtgcaaagagggcacc

SEQ ID NO: 2974905 - DNA, 25 bp, Homo sapien
ctttagtgcaaaagcagatcagtgc

SEQ ID NO: 2974906 - DNA, 25 bp, Homo sapien
agagggaagatttaggttggtgcaa

SEQ ID NO: 2974907 - DNA, 25 bp, Homo sapien
gagggaagatttaggttggtgcaaa

SEQ ID NO: 2974908 - DNA, 25 bp, Homo sapien
ttgacaccgaggtaacctggcctgc

SEQ ID NO: 2974909 - DNA, 25 bp, Homo sapien
gctcagtaatgattgcttgacaccg

SEQ ID NO: 2974910 - DNA, 25 bp, Homo sapien
ggctctggtgaattgctcagtaatg

SEQ ID NO: 2974911 - DNA, 25 bp, Homo sapien
tttggatcgggagattttcagagaa

SEQ ID NO: 2974912 - DNA, 25 bp, Homo sapien
ttggaaataataaataattcaggga

SEQ ID NO: 2974913 - DNA, 25 bp, Homo sapien
tggaaataataaataattcagggaa

SEQ ID NO: 2974914 - DNA, 25 bp, Homo sapien
ataataaataattcagggaaagtca

SEQ ID NO: 2974915 - DNA, 25 bp, Homo sapien
taataaataattcagggaaagtcat

SEQ ID NO: 2974916 - DNA, 25 bp, Homo sapien
tagcagagaccgaaagctgtcccag

SEQ ID NO: 2974917 - DNA, 25 bp, Homo sapien
gatatgggccacttttggaccaggg

SEQ ID NO: 2974918 - DNA, 25 bp, Homo sapien
gtaaggattttgttcccagcctgct

SEQ ID NO: 2974919 - DNA, 25 bp, Homo sapien
catgtgcctatgtccctgctaaggg

SEQ ID NO: 2974920 - DNA, 25 bp, Homo sapien
tgtgaggacagaggcctatgggctg

SEQ ID NO: 2974921 - DNA, 25 bp, Homo sapien
gaggacagaggcctatgggctgtac

SEQ ID NO: 2974922 - DNA, 25 bp, Homo sapien
ttccataccacatctgtgaggacag

SEQ ID NO: 2974923 - DNA, 25 bp, Homo sapien
ctcttccataccacatctgtgagga

SEQ ID NO: 2974924 - DNA, 25 bp, Homo sapien
ctgctctcaggagggttaaaccaga

SEQ ID NO: 2974925 - DNA, 25 bp, Homo sapien
cagagtgaacccattatttccagga

SEQ ID NO: 2974926 - DNA, 25 bp, Homo sapien
ttcaatcaccatgtatgagtctggg

SEQ ID NO: 2974927 - DNA, 25 bp, Homo sapien
gttgaaaatcactgaagcgctccca

SEQ ID NO: 2974928 - DNA, 25 bp, Homo sapien
ggtcggcgtgagatacaggtcataa

SEQ ID NO: 2974929 - DNA, 25 bp, Homo sapien
cactttgtagactcgacctgaattc

SEQ ID NO: 2974930 - DNA, 25 bp, Homo sapien
taaaagagtaggcatgaataaccca

SEQ ID NO: 2974931 - DNA, 25 bp, Homo sapien
tgcagtagagaacccaggtaaaacc

SEQ ID NO: 2974932 - DNA, 25 bp, Homo sapien
tgtaaatctagtcacccaggtaaca

SEQ ID NO: 2974933 - DNA, 25 bp, Homo sapien
taacagggctccagttagcaacagc

SEQ ID NO: 2974934 - DNA, 25 bp, Homo sapien
tagcaacagcggaatgaaggtcagc

SEQ ID NO: 2974935 - DNA, 25 bp, Homo sapien
gcggaatgaaggtcagcctggttcc

SEQ ID NO: 2974936 - DNA, 25 bp, Homo sapien
gatatacattcaggactgtccacaa

SEQ ID NO: 2974937 - DNA, 25 bp, Homo sapien
taagttcctgtctatatcctaatga

SEQ ID NO: 2974938 - DNA, 25 bp, Homo sapien
taccaggagaaatgtacaatctaag

SEQ ID NO: 2974939 - DNA, 25 bp, Homo sapien
ctgtccacaaggcagaccacaaact

SEQ ID NO: 2974940 - DNA, 25 bp, Homo sapien
gatctgatttgggttctgcccaagc

SEQ ID NO: 2974941 - DNA, 25 bp, Homo sapien
ccaacagctggatctgatttgggtt

SEQ ID NO: 2974942 - DNA, 25 bp, Homo sapien
gatttgggttctgcccaagctaaga

SEQ ID NO: 2974943 - DNA, 25 bp, Homo sapien
gctggatctgatttgggttctgccc

SEQ ID NO: 2974944 - DNA, 25 bp, Homo sapien
tactgactgcgtgcccaatgttgca

SEQ ID NO: 2974945 - DNA, 25 bp, Homo sapien
caaatgagttctgatccggtctcaa

SEQ ID NO: 2974946 - DNA, 25 bp, Homo sapien
tcccacacaacgaggtactgactgc

SEQ ID NO: 2974947 - DNA, 25 bp, Homo sapien
tccagttgctccttatcccgaagtt

SEQ ID NO: 2974948 - DNA, 25 bp, Homo sapien
gaaaatttagcgtctgacttgggag

SEQ ID NO: 2974949 - DNA, 25 bp, Homo sapien
aaacactttgggtatgtgaatctac

SEQ ID NO: 2974950 - DNA, 25 bp, Homo sapien
aaatgcacactagatttggaagact

SEQ ID NO: 2974951 - DNA, 25 bp, Homo sapien
taaagatcaagtactgccaatgaaa

SEQ ID NO: 2974952 - DNA, 25 bp, Homo sapien
gcccaggaccaaagctatttgctat

SEQ ID NO: 2974953 - DNA, 25 bp, Homo sapien
tggccactgagcctttgaagtgtgg

SEQ ID NO: 2974954 - DNA, 25 bp, Homo sapien
cgttgttctattccacggctgggtc

SEQ ID NO: 2974955 - DNA, 25 bp, Homo sapien
aatactttgagagactgtgtaaccc

SEQ ID NO: 2974956 - DNA, 25 bp, Homo sapien
tttccccacacaccacgctgtacac

SEQ ID NO: 2974957 - DNA, 25 bp, Homo sapien
aaaacatcatgggatgcagatcttt

SEQ ID NO: 2974958 - DNA, 25 bp, Homo sapien
aaacatcatgggatgcagatctttc

SEQ ID NO: 2974959 - DNA, 25 bp, Homo sapien
acaccacgctgtacacttgatagag

SEQ ID NO: 2974960 - DNA, 25 bp, Homo sapien
gtggcgggacactcgagcccagaca

SEQ ID NO: 2974961 - DNA, 25 bp, Homo sapien
cccagacaccgagatggtcaagggc

SEQ ID NO: 2974962 - DNA, 25 bp, Homo sapien
cttcttcccctcctaaggaaatcag

SEQ ID NO: 2974963 - DNA, 25 bp, Homo sapien
ggcccactttgctggtcgtggccat

SEQ ID NO: 2974964 - DNA, 25 bp, Homo sapien
tatgaaaaacatatgggatcaaggt

SEQ ID NO: 2974965 - DNA, 25 bp, Homo sapien
gatcaaggtcagtgcatgacacaga

SEQ ID NO: 2974966 - DNA, 25 bp, Homo sapien
cagaaaagccattagccagacgcca

SEQ ID NO: 2974967 - DNA, 25 bp, Homo sapien
tgattcaccaacagccggtggaggg

SEQ ID NO: 2974968 - DNA, 25 bp, Homo sapien
tgtgcacctgtgcttgcaggaagtg

SEQ ID NO: 2974969 - DNA, 25 bp, Homo sapien
cacctgtgcttgcaggaagtgggca

SEQ ID NO: 2974970 - DNA, 25 bp, Homo sapien
tgtgtgcacctgtgcttgcaggaag

SEQ ID NO: 2974971 - DNA, 25 bp, Homo sapien
tgtgtgtgcacctgtgcttgcagga

SEQ ID NO: 2974972 - DNA, 25 bp, Homo sapien
tttttcatgtatgagctgttccatc

SEQ ID NO: 2974973 - DNA, 25 bp, Homo sapien
ccccagtggactttcgaagtggcaa

SEQ ID NO: 2974974 - DNA, 25 bp, Homo sapien
aaacgaatttgatggaaaagagaga

SEQ ID NO: 2974975 - DNA, 25 bp, Homo sapien
taatcatgtggagcaacatactata

SEQ ID NO: 2974976 - DNA, 25 bp, Homo sapien
ccaattccatgaagagtgtggagcc

SEQ ID NO: 2974977 - DNA, 25 bp, Homo sapien
agtccaaggacccaaaagtcacctg

SEQ ID NO: 2974978 - DNA, 25 bp, Homo sapien
caaggacccaaaagtcacctgtctt

SEQ ID NO: 2974979 - DNA, 25 bp, Homo sapien
tgtggagccttccagtccaaggacc

SEQ ID NO: 2974980 - DNA, 25 bp, Homo sapien
tctcaaaatgctcaactctcctgga

SEQ ID NO: 2974981 - DNA, 25 bp, Homo sapien
ccccatgagtggagccaaggctcat

SEQ ID NO: 2974982 - DNA, 25 bp, Homo sapien
gaacagggagcattagatatcatct

SEQ ID NO: 2974983 - DNA, 25 bp, Homo sapien
ggcctctgtcccctagaacaatggt

SEQ ID NO: 2974984 - DNA, 25 bp, Homo sapien
tgttgagatacacccgcttctcggt

SEQ ID NO: 2974985 - DNA, 25 bp, Homo sapien
aagggctcattctggacgacctcca

SEQ ID NO: 2974986 - DNA, 25 bp, Homo sapien
ccccggtcactctgttcatggctgt

SEQ ID NO: 2974987 - DNA, 25 bp, Homo sapien
gaactgcccattgccatggtgaggg

SEQ ID NO: 2974988 - DNA, 25 bp, Homo sapien
acctccctgcttaacaagacagttt

SEQ ID NO: 2974989 - DNA, 25 bp, Homo sapien
catcagggttatgtggacagtgtgc

SEQ ID NO: 2974990 - DNA, 25 bp, Homo sapien
tggacagcatcagggttatgtggac

SEQ ID NO: 2974991 - DNA, 25 bp, Homo sapien
ctccctgcttaacaagacagtttgt

SEQ ID NO: 2974992 - DNA, 25 bp, Homo sapien
gtagggataatagttccaagccttc

SEQ ID NO: 2974993 - DNA, 25 bp, Homo sapien
agccttctctgtcacataaaatatt

SEQ ID NO: 2974994 - DNA, 25 bp, Homo sapien
cagctctagcccaactaggcagttt

SEQ ID NO: 2974995 - DNA, 25 bp, Homo sapien
tattttggggacaacagctctagcc

SEQ ID NO: 2974996 - DNA, 25 bp, Homo sapien
actgctttatctggttggattcccc

SEQ ID NO: 2974997 - DNA, 25 bp, Homo sapien
tactgagtaacctccttgagtgctg

SEQ ID NO: 2974998 - DNA, 25 bp, Homo sapien
tcagttcagagcttatccagcccag

SEQ ID NO: 2974999 - DNA, 25 bp, Homo sapien
agcccagtggacaggtctgaggcca

SEQ ID NO: 2975000 - DNA, 25 bp, Homo sapien
gtctcagacctgtccattgagctgg

SEQ ID NO: 2975001 - DNA, 25 bp, Homo sapien
taattttcccgaactctgcctagct

SEQ ID NO: 2975002 - DNA, 25 bp, Homo sapien
ggaaggctcttggagtggtcccatc

SEQ ID NO: 2975003 - DNA, 25 bp, Homo sapien
tcctgagccaatcctaactgaggca

SEQ ID NO: 2975004 - DNA, 25 bp, Homo sapien
ggctcgtccatacaaccagttcatt

SEQ ID NO: 2975005 - DNA, 25 bp, Homo sapien
aataggctggtttgcaactggctcg

SEQ ID NO: 2975006 - DNA, 25 bp, Homo sapien
cagctagagcaagtggaaacgggat

SEQ ID NO: 2975007 - DNA, 25 bp, Homo sapien
caagggcagcggtacatctgtgaat

SEQ ID NO: 2975008 - DNA, 25 bp, Homo sapien
aggaacaaaatgaaatgtaagcaaa

SEQ ID NO: 2975009 - DNA, 25 bp, Homo sapien
acaaaatgaaatgtaagcaaaccaa

SEQ ID NO: 2975010 - DNA, 25 bp, Homo sapien
aaatgaaatgtaagcaaaccaaagt

SEQ ID NO: 2975011 - DNA, 25 bp, Homo sapien
gaacaaaatgaaatgtaagcaaacc

SEQ ID NO: 2975012 - DNA, 25 bp, Homo sapien
tagcttttggaagtgacgggtggat

SEQ ID NO: 2975013 - DNA, 25 bp, Homo sapien
tgtagcttttggaagtgacgggtgg

SEQ ID NO: 2975014 - DNA, 25 bp, Homo sapien
gtagcttttggaagtgacgggtgga

SEQ ID NO: 2975015 - DNA, 25 bp, Homo sapien
ttgtagcttttggaagtgacgggtg

SEQ ID NO: 2975016 - DNA, 25 bp, Homo sapien
tgcagggaacaaaaactctaccagg

SEQ ID NO: 2975017 - DNA, 25 bp, Homo sapien
cctaggcaatgtggacgagaaagct

SEQ ID NO: 2975018 - DNA, 25 bp, Homo sapien
gaaatgtcaccacgtgtcccaggct

SEQ ID NO: 2975019 - DNA, 25 bp, Homo sapien
tagatctaaagggtgcacgtccgct

SEQ ID NO: 2975020 - DNA, 25 bp, Homo sapien
gctttgaagttgtgagatagccacg

SEQ ID NO: 2975021 - DNA, 25 bp, Homo sapien
tggtgagttgcctgagccaaggacc

SEQ ID NO: 2975022 - DNA, 25 bp, Homo sapien
gaagaaccagctagaaaacgcgacc

SEQ ID NO: 2975023 - DNA, 25 bp, Homo sapien
gatagccacgtggataggacccaag

SEQ ID NO: 2975024 - DNA, 25 bp, Homo sapien
gaatgattatcccatgcatgctggc

SEQ ID NO: 2975025 - DNA, 25 bp, Homo sapien
gaatggtggtcatcaaagtcacccc

SEQ ID NO: 2975026 - DNA, 25 bp, Homo sapien
aatatgcgctgttccctaaagatcc

SEQ ID NO: 2975027 - DNA, 25 bp, Homo sapien
tatcaccgagggatctgtcaggagt

SEQ ID NO: 2975028 - DNA, 25 bp, Homo sapien
tgttgtcctcatacttggtttctat

SEQ ID NO: 2975029 - DNA, 25 bp, Homo sapien
aatggagaatttcggcagaaaggaa

SEQ ID NO: 2975030 - DNA, 25 bp, Homo sapien
cttggtttctatatgaatggagaat

SEQ ID NO: 2975031 - DNA, 25 bp, Homo sapien
gtcattgcttcctttgttgtcctca

SEQ ID NO: 2975032 - DNA, 25 bp, Homo sapien
gataaaccagattacagtggtccca

SEQ ID NO: 2975033 - DNA, 25 bp, Homo sapien
aataggtgataggtgcttctcttgc

SEQ ID NO: 2975034 - DNA, 25 bp, Homo sapien
caatctatagggatcacagtgaggc

SEQ ID NO: 2975035 - DNA, 25 bp, Homo sapien
cctaggagagtagtcaaaaaacctg

SEQ ID NO: 2975036 - DNA, 25 bp, Homo sapien
ctctttagtgtaacaagatggcagg

SEQ ID NO: 2975037 - DNA, 25 bp, Homo sapien
cacatttagggcctctttagtgtaa

SEQ ID NO: 2975038 - DNA, 25 bp, Homo sapien
ggtggcaactgggccaaaaacacat

SEQ ID NO: 2975039 - DNA, 25 bp, Homo sapien
tagggcctctttagtgtaacaagat

SEQ ID NO: 2975040 - DNA, 25 bp, Homo sapien
tgggccgtgtggtccaatggcctca

SEQ ID NO: 2975041 - DNA, 25 bp, Homo sapien
gggctgggccgtgtggtccaatggc

SEQ ID NO: 2975042 - DNA, 25 bp, Homo sapien
tgtggtccaatggcctcaggagcaa

SEQ ID NO: 2975043 - DNA, 25 bp, Homo sapien
gccgtgtggtccaatggcctcagga

SEQ ID NO: 2975044 - DNA, 25 bp, Homo sapien
tcctccttgacttgcggatggctgc

SEQ ID NO: 2975045 - DNA, 25 bp, Homo sapien
tacgtcttcacgtgttgcacccaaa

SEQ ID NO: 2975046 - DNA, 25 bp, Homo sapien
gcctagagtctctttatgtgcccaa

SEQ ID NO: 2975047 - DNA, 25 bp, Homo sapien
aatgctctagccagtggttttccaa

SEQ ID NO: 2975048 - DNA, 25 bp, Homo sapien
tctccaagagtccactctgaagtgg

SEQ ID NO: 2975049 - DNA, 25 bp, Homo sapien
ctctgaagtggttcccatgaggtat

SEQ ID NO: 2975050 - DNA, 25 bp, Homo sapien
tgtggatctccaagagtccactctg

SEQ ID NO: 2975051 - DNA, 25 bp, Homo sapien
tccactctgaagtggttcccatgag

SEQ ID NO: 2975052 - DNA, 25 bp, Homo sapien
catcaaaggatactacaagctggct

SEQ ID NO: 2975053 - DNA, 25 bp, Homo sapien
gaattcatcaacctcacgtgtctca

SEQ ID NO: 2975054 - DNA, 25 bp, Homo sapien
ccataaactgggtagtgtgtgaaca

SEQ ID NO: 2975055 - DNA, 25 bp, Homo sapien
gggtaatatcctctgttctcatgct

SEQ ID NO: 2975056 - DNA, 25 bp, Homo sapien
aagacccagattccagtcaatccag

SEQ ID NO: 2975057 - DNA, 25 bp, Homo sapien
caagacccagattccagtcaatcca

SEQ ID NO: 2975058 - DNA, 25 bp, Homo sapien
cccaagacccagattccagtcaatc

SEQ ID NO: 2975059 - DNA, 25 bp, Homo sapien
gattccagtcaatccaggctaccct

SEQ ID NO: 2975060 - DNA, 25 bp, Homo sapien
tctgagcagcccgaatatactattt

SEQ ID NO: 2975061 - DNA, 25 bp, Homo sapien
tacagttgccttctaagagcagaac

SEQ ID NO: 2975062 - DNA, 25 bp, Homo sapien
actgttgataccttggctgtcttca

SEQ ID NO: 2975063 - DNA, 25 bp, Homo sapien
gaactactactgtaagccatggccc

SEQ ID NO: 2975064 - DNA, 25 bp, Homo sapien
gcagtttcatgacaatgtgtccagg

SEQ ID NO: 2975065 - DNA, 25 bp, Homo sapien
gaggattgtccctttgtacgtgatc

SEQ ID NO: 2975066 - DNA, 25 bp, Homo sapien
cctcttgtaactccaaactcactgg

SEQ ID NO: 2975067 - DNA, 25 bp, Homo sapien
gtatcatttgataggcccacatttg

SEQ ID NO: 2975068 - DNA, 25 bp, Homo sapien
aaaaggggcacaggcgagcctgctt

SEQ ID NO: 2975069 - DNA, 25 bp, Homo sapien
caaaaaggccattagatggggccct

SEQ ID NO: 2975070 - DNA, 25 bp, Homo sapien
gggccctgccataatcactcaagtc

SEQ ID NO: 2975071 - DNA, 25 bp, Homo sapien
tcactcaagtcagcaagtggctctg

SEQ ID NO: 2975072 - DNA, 25 bp, Homo sapien
gatgtcctttggcacttgatctcag

SEQ ID NO: 2975073 - DNA, 25 bp, Homo sapien
catggaaaatccgtaaacggttcag

SEQ ID NO: 2975074 - DNA, 25 bp, Homo sapien
tccatgcagggagctatgctgagaa

SEQ ID NO: 2975075 - DNA, 25 bp, Homo sapien
taaacggttcaggacaaagacttgc

SEQ ID NO: 2975076 - DNA, 25 bp, Homo sapien
tgcaaaaccggggaaattcacgata

SEQ ID NO: 2975077 - DNA, 25 bp, Homo sapien
gccacaggccggagcaagctctgtt

SEQ ID NO: 2975078 - DNA, 25 bp, Homo sapien
cggcgtgagtccaaggtcttgcaga

SEQ ID NO: 2975079 - DNA, 25 bp, Homo sapien
ggatgaagatgcaaaaccggggaaa

SEQ ID NO: 2975080 - DNA, 25 bp, Homo sapien
ttagaaggttgacagaaaaacacga

SEQ ID NO: 2975081 - DNA, 25 bp, Homo sapien
ggttgacagaaaaacacgagccact

SEQ ID NO: 2975082 - DNA, 25 bp, Homo sapien
caactaacataatttagaaggttga

SEQ ID NO: 2975083 - DNA, 25 bp, Homo sapien
cataatttagaaggttgacagaaaa

SEQ ID NO: 2975084 - DNA, 25 bp, Homo sapien
gctgcatcctataactcctggggct

SEQ ID NO: 2975085 - DNA, 25 bp, Homo sapien
ctgcatcctataactcctggggctg

SEQ ID NO: 2975086 - DNA, 25 bp, Homo sapien
tgctgcatcctataactcctggggc

SEQ ID NO: 2975087 - DNA, 25 bp, Homo sapien
tctgctgcatcctataactcctggg

SEQ ID NO: 2975088 - DNA, 25 bp, Homo sapien
ctgtccatctgcagcggtcaagcta

SEQ ID NO: 2975089 - DNA, 25 bp, Homo sapien
cggtcaagctatgggcagtcagcac

SEQ ID NO: 2975090 - DNA, 25 bp, Homo sapien
gagagttgcttacaacagagcaccc

SEQ ID NO: 2975091 - DNA, 25 bp, Homo sapien
cacttagcctctgagagttgcttac

SEQ ID NO: 2975092 - DNA, 25 bp, Homo sapien
ctccagcattgacctcctaaaccag

SEQ ID NO: 2975093 - DNA, 25 bp, Homo sapien
agtgatcctccagcattgacctcct

SEQ ID NO: 2975094 - DNA, 25 bp, Homo sapien
tgacctcctaaaccagcactccttt

SEQ ID NO: 2975095 - DNA, 25 bp, Homo sapien
cctcccaaagccagcactcattttt

SEQ ID NO: 2975096 - DNA, 25 bp, Homo sapien
taccctgccagcgacagatgttagt

SEQ ID NO: 2975097 - DNA, 25 bp, Homo sapien
gatctgggctgggaagtaccctgcc

SEQ ID NO: 2975098 - DNA, 25 bp, Homo sapien
taataaagtgtcagttcgtccctca

SEQ ID NO: 2975099 - DNA, 25 bp, Homo sapien
ccctcactgggtagtagagaagatc

SEQ ID NO: 2975100 - DNA, 25 bp, Homo sapien
agcctcggtgttcggtgtgtgccat

SEQ ID NO: 2975101 - DNA, 25 bp, Homo sapien
cacagcctcggtgttcggtgtgtgc

SEQ ID NO: 2975102 - DNA, 25 bp, Homo sapien
cagcctcggtgttcggtgtgtgcca

SEQ ID NO: 2975103 - DNA, 25 bp, Homo sapien
ttcacagcctcggtgttcggtgtgt

SEQ ID NO: 2975104 - DNA, 25 bp, Homo sapien
tggcaccagcgacgcagaacggttt

SEQ ID NO: 2975105 - DNA, 25 bp, Homo sapien
tttggtgcaaagtagcctcagtccg

SEQ ID NO: 2975106 - DNA, 25 bp, Homo sapien
tctcaggagtctaggccaacacttc

SEQ ID NO: 2975107 - DNA, 25 bp, Homo sapien
ggtggtctctgggaactagaactgc

SEQ ID NO: 2975108 - DNA, 25 bp, Homo sapien
taacttcaggcgtggctcatctgcg

SEQ ID NO: 2975109 - DNA, 25 bp, Homo sapien
gaaccattttgtgccatgacctgaa

SEQ ID NO: 2975110 - DNA, 25 bp, Homo sapien
taaatgtggcgttcagaccggccga

SEQ ID NO: 2975111 - DNA, 25 bp, Homo sapien
tacggtaaaccctggctcatctggg

SEQ ID NO: 2975112 - DNA, 25 bp, Homo sapien
tatcattaggcctttggcgcagagg

SEQ ID NO: 2975113 - DNA, 25 bp, Homo sapien
cggatcgtcttagctgctgggtaaa

SEQ ID NO: 2975114 - DNA, 25 bp, Homo sapien
gaaccctttctggtggacaatatca

SEQ ID NO: 2975115 - DNA, 25 bp, Homo sapien
ccatcagggttaggccggatcgtct

SEQ ID NO: 2975116 - DNA, 25 bp, Homo sapien
ttatttaatccccatcaaacgctcc

SEQ ID NO: 2975117 - DNA, 25 bp, Homo sapien
tatttaatccccatcaaacgctcca

SEQ ID NO: 2975118 - DNA, 25 bp, Homo sapien
atttaatccccatcaaacgctccac

SEQ ID NO: 2975119 - DNA, 25 bp, Homo sapien
ccaaattcagcaaggagggaactca

SEQ ID NO: 2975120 - DNA, 25 bp, Homo sapien
cagagaactgcctactggtgccggg

SEQ ID NO: 2975121 - DNA, 25 bp, Homo sapien
gagacgccaggccaggaatatagct

SEQ ID NO: 2975122 - DNA, 25 bp, Homo sapien
tgtcgtgaagaaagaatccaacccc

SEQ ID NO: 2975123 - DNA, 25 bp, Homo sapien
tgctgggattacaggagtgagtctt

SEQ ID NO: 2975124 - DNA, 25 bp, Homo sapien
caggagtgagtctttttttaaatat

SEQ ID NO: 2975125 - DNA, 25 bp, Homo sapien
tgggattacaggagtgagtcttttt

SEQ ID NO: 2975126 - DNA, 25 bp, Homo sapien
gattacaggagtgagtcttttttta

SEQ ID NO: 2975127 - DNA, 25 bp, Homo sapien
tgacactggagtgctgtgaacttca

SEQ ID NO: 2975128 - DNA, 25 bp, Homo sapien
gacactggagtgctgtgaacttcat

SEQ ID NO: 2975129 - DNA, 25 bp, Homo sapien
ctgacactggagtgctgtgaacttc

SEQ ID NO: 2975130 - DNA, 25 bp, Homo sapien
tcatttaagggcacaatttcctttg

SEQ ID NO: 2975131 - DNA, 25 bp, Homo sapien
ttaagggcacaatttcctttgtaca

SEQ ID NO: 2975132 - DNA, 25 bp, Homo sapien
cttgatcatttaagggcacaatttc

SEQ ID NO: 2975133 - DNA, 25 bp, Homo sapien
aagggcacaatttcctttgtacaca

SEQ ID NO: 2975134 - DNA, 25 bp, Homo sapien
tagtagcgctctggaatttcatcgc

SEQ ID NO: 2975135 - DNA, 25 bp, Homo sapien
tagcgctctggaatttcatcgcagg

SEQ ID NO: 2975136 - DNA, 25 bp, Homo sapien
cgctctggaatttcatcgcaggcaa

SEQ ID NO: 2975137 - DNA, 25 bp, Homo sapien
tgtagtagcgctctggaatttcatc

SEQ ID NO: 2975138 - DNA, 25 bp, Homo sapien
tacgaaagcaaattgaatccacacg

SEQ ID NO: 2975139 - DNA, 25 bp, Homo sapien
ttaggaggcacttaagaaatagttg

SEQ ID NO: 2975140 - DNA, 25 bp, Homo sapien
gagatggcatcctcccaagttagga

SEQ ID NO: 2975141 - DNA, 25 bp, Homo sapien
aaagaaccagcaagatacgaaagca

SEQ ID NO: 2975142 - DNA, 25 bp, Homo sapien
agagccccattaagcactggcggac

SEQ ID NO: 2975143 - DNA, 25 bp, Homo sapien
gcacaatgctctgcgcatcatcaga

SEQ ID NO: 2975144 - DNA, 25 bp, Homo sapien
cggacttgacatgaaactataggat

SEQ ID NO: 2975145 - DNA, 25 bp, Homo sapien
caggagtgctttgcacaatgctctg

SEQ ID NO: 2975146 - DNA, 25 bp, Homo sapien
tagccctttgtggtccggctgccag

SEQ ID NO: 2975147 - DNA, 25 bp, Homo sapien
tccacggaggaggaattccacctgt

SEQ ID NO: 2975148 - DNA, 25 bp, Homo sapien
ggctcccagtggtacctatagccct

SEQ ID NO: 2975149 - DNA, 25 bp, Homo sapien
taagattttattgcaggctcccagt

SEQ ID NO: 2975150 - DNA, 25 bp, Homo sapien
tttatgactcttatgggcgggcagg

SEQ ID NO: 2975151 - DNA, 25 bp, Homo sapien
tgaagattgagaagctgcacgcgcc

SEQ ID NO: 2975152 - DNA, 25 bp, Homo sapien
taccgactggattcataacatgccg

SEQ ID NO: 2975153 - DNA, 25 bp, Homo sapien
tggcagcggcaagacactatgtatc

SEQ ID NO: 2975154 - DNA, 25 bp, Homo sapien
ggagtacagtggcaccatctttggc

SEQ ID NO: 2975155 - DNA, 25 bp, Homo sapien
agtacagtggcaccatctttggctc

SEQ ID NO: 2975156 - DNA, 25 bp, Homo sapien
ggtgcccgccaccatacgtggctaa

SEQ ID NO: 2975157 - DNA, 25 bp, Homo sapien
caggtgcccgccaccatacgtggct

SEQ ID NO: 2975158 - DNA, 25 bp, Homo sapien
ctgacgttcactgagatatgaagtc

SEQ ID NO: 2975159 - DNA, 25 bp, Homo sapien
caatcttattagctgacgttcactg

SEQ ID NO: 2975160 - DNA, 25 bp, Homo sapien
cttggaggcaatcttattagctgac

SEQ ID NO: 2975161 - DNA, 25 bp, Homo sapien
acgttcactgagatatgaagtctcc

SEQ ID NO: 2975162 - DNA, 25 bp, Homo sapien
ctggaaggtgcaaggagaagcccac

SEQ ID NO: 2975163 - DNA, 25 bp, Homo sapien
aagcccacaggagagcttggtccag

SEQ ID NO: 2975164 - DNA, 25 bp, Homo sapien
cccacaggagagcttggtccagctg

SEQ ID NO: 2975165 - DNA, 25 bp, Homo sapien
tggaaggtgcaaggagaagcccaca

SEQ ID NO: 2975166 - DNA, 25 bp, Homo sapien
aggcctcatccatctcgcactggga

SEQ ID NO: 2975167 - DNA, 25 bp, Homo sapien
aactgcgtcctcgttttggatagaa

SEQ ID NO: 2975168 - DNA, 25 bp, Homo sapien
tcgcactgggacaaggcagagcaaa

SEQ ID NO: 2975169 - DNA, 25 bp, Homo sapien
gagcagcccgtgtaaaactgcgtcc

SEQ ID NO: 2975170 - DNA, 25 bp, Homo sapien
tggcagatggcaaattggacccttg

SEQ ID NO: 2975171 - DNA, 25 bp, Homo sapien
ctagccagggttttataaattcatc

SEQ ID NO: 2975172 - DNA, 25 bp, Homo sapien
agttaaagcccatctgtatcgaggg

SEQ ID NO: 2975173 - DNA, 25 bp, Homo sapien
gatgctaccgattctctccaggctt

SEQ ID NO: 2975174 - DNA, 25 bp, Homo sapien
cttctctattaattttgccaggttg

SEQ ID NO: 2975175 - DNA, 25 bp, Homo sapien
ttccctccactcagaacagacgcaa

SEQ ID NO: 2975176 - DNA, 25 bp, Homo sapien
gaacagacgcaaccctacactgaag

SEQ ID NO: 2975177 - DNA, 25 bp, Homo sapien
catgtgtggtcacagagcacttccc

SEQ ID NO: 2975178 - DNA, 25 bp, Homo sapien
tacactgaagatcagggttccctga

SEQ ID NO: 2975179 - DNA, 25 bp, Homo sapien
ctccatgagaaccaggtactgcact

SEQ ID NO: 2975180 - DNA, 25 bp, Homo sapien
tgagaaccaggtactgcactgcctt

SEQ ID NO: 2975181 - DNA, 25 bp, Homo sapien
gaaccaggtactgcactgccttcca

SEQ ID NO: 2975182 - DNA, 25 bp, Homo sapien
catgagaaccaggtactgcactgcc

SEQ ID NO: 2975183 - DNA, 25 bp, Homo sapien
gcttgtaggagcacatgataggctg

SEQ ID NO: 2975184 - DNA, 25 bp, Homo sapien
gataggctgatgactatctctccag

SEQ ID NO: 2975185 - DNA, 25 bp, Homo sapien
gtgtacaaattgttccactctggtc

SEQ ID NO: 2975186 - DNA, 25 bp, Homo sapien
ttgtgtacaaattgttccactctgg

SEQ ID NO: 2975187 - DNA, 25 bp, Homo sapien
gtgctcacagataagccctttggct

SEQ ID NO: 2975188 - DNA, 25 bp, Homo sapien
tagatgagtccaataccaaactgag

SEQ ID NO: 2975189 - DNA, 25 bp, Homo sapien
ttctctgtctgggagtagatgagtc

SEQ ID NO: 2975190 - DNA, 25 bp, Homo sapien
agataagccctttggctgtttccca

SEQ ID NO: 2975191 - DNA, 25 bp, Homo sapien
ttgtagatcttttgggtggcaatta

SEQ ID NO: 2975192 - DNA, 25 bp, Homo sapien
tgtagatcttttgggtggcaattaa

SEQ ID NO: 2975193 - DNA, 25 bp, Homo sapien
atttgtagatcttttgggtggcaat

SEQ ID NO: 2975194 - DNA, 25 bp, Homo sapien
gtagatcttttgggtggcaattaac

SEQ ID NO: 2975195 - DNA, 25 bp, Homo sapien
gccagagtctgccattaccgtgagc

SEQ ID NO: 2975196 - DNA, 25 bp, Homo sapien
atcacatttcattctggctcctggc

SEQ ID NO: 2975197 - DNA, 25 bp, Homo sapien
gagtggcatgcttctctgttcaaga

SEQ ID NO: 2975198 - DNA, 25 bp, Homo sapien
cacccagggctctcatgtttgtgcc

SEQ ID NO: 2975199 - DNA, 25 bp, Homo sapien
actcatcaacccatgcaaaagcctg

SEQ ID NO: 2975200 - DNA, 25 bp, Homo sapien
tgcaaaagcctgtctatgtccaatc

SEQ ID NO: 2975201 - DNA, 25 bp, Homo sapien
caacccatgcaaaagcctgtctatg

SEQ ID NO: 2975202 - DNA, 25 bp, Homo sapien
ctgtctatgtccaatcagcagaatg

SEQ ID NO: 2975203 - DNA, 25 bp, Homo sapien
tctctgggagactacatgacaatgt

SEQ ID NO: 2975204 - DNA, 25 bp, Homo sapien
cttttgcggtatgagagcggcattc

SEQ ID NO: 2975205 - DNA, 25 bp, Homo sapien
gcccatagcttatagaaccatgcct

SEQ ID NO: 2975206 - DNA, 25 bp, Homo sapien
tgatctgcatttggacaaacccagg

SEQ ID NO: 2975207 - DNA, 25 bp, Homo sapien
tagcccatgctataagccagtagtt

SEQ ID NO: 2975208 - DNA, 25 bp, Homo sapien
tgagaaccagtgctagacgctatag

SEQ ID NO: 2975209 - DNA, 25 bp, Homo sapien
aacaagtaccctagggatgctgacg

SEQ ID NO: 2975210 - DNA, 25 bp, Homo sapien
taaaacaattgctgggctagaccct

SEQ ID NO: 2975211 - DNA, 25 bp, Homo sapien
tagtgtcgtctacagcagccagaac

SEQ ID NO: 2975212 - DNA, 25 bp, Homo sapien
tcaaagacattcgtgaggttcacct

SEQ ID NO: 2975213 - DNA, 25 bp, Homo sapien
tagacctgctctagggactccaggc

SEQ ID NO: 2975214 - DNA, 25 bp, Homo sapien
ggtgaactcaaccagctcatgcaac

SEQ ID NO: 2975215 - DNA, 25 bp, Homo sapien
gaaagtagccagtcctcgaagtgtg

SEQ ID NO: 2975216 - DNA, 25 bp, Homo sapien
tccagcaaaatggtagccatccttt

SEQ ID NO: 2975217 - DNA, 25 bp, Homo sapien
tacaaaaagcttagggtgactccat

SEQ ID NO: 2975218 - DNA, 25 bp, Homo sapien
cgaagtgtggtgtataccttttcca

SEQ ID NO: 2975219 - DNA, 25 bp, Homo sapien
ggcctttagaagtcagttgaacaca

SEQ ID NO: 2975220 - DNA, 25 bp, Homo sapien
catggaaactacaaatgcccttgaa

SEQ ID NO: 2975221 - DNA, 25 bp, Homo sapien
taatcctgttgactacatatgcagc

SEQ ID NO: 2975222 - DNA, 25 bp, Homo sapien
tgaacaaagcatctgcaagcgtgaa

SEQ ID NO: 2975223 - DNA, 25 bp, Homo sapien
tctcagggcgtgaggtcatactgca

SEQ ID NO: 2975224 - DNA, 25 bp, Homo sapien
gagtagaacgttctcctctgccagt

SEQ ID NO: 2975225 - DNA, 25 bp, Homo sapien
gactccttaagccagcaatactggg

SEQ ID NO: 2975226 - DNA, 25 bp, Homo sapien
aaatacattggtaaacagtcagccc

SEQ ID NO: 2975227 - DNA, 25 bp, Homo sapien
aatcaatttagtcagaaaaccatta

SEQ ID NO: 2975228 - DNA, 25 bp, Homo sapien
gttaatcctagagagatatccttaa

SEQ ID NO: 2975229 - DNA, 25 bp, Homo sapien
gagatatccttaatctattgttaaa

SEQ ID NO: 2975230 - DNA, 25 bp, Homo sapien
caatttagtcagaaaaccattatct

SEQ ID NO: 2975231 - DNA, 25 bp, Homo sapien
agcatcattagaagatcccattggg

SEQ ID NO: 2975232 - DNA, 25 bp, Homo sapien
gaaagatggtagctgagcagtagcc

SEQ ID NO: 2975233 - DNA, 25 bp, Homo sapien
tgtgggcagtaccatagcctgagat

SEQ ID NO: 2975234 - DNA, 25 bp, Homo sapien
gcctgagatctcctaaagcatcatt

SEQ ID NO: 2975235 - DNA, 25 bp, Homo sapien
catgcatgtttttctcgtattcccg

SEQ ID NO: 2975236 - DNA, 25 bp, Homo sapien
acttgtttgggcatgactctctatg

SEQ ID NO: 2975237 - DNA, 25 bp, Homo sapien
atgactctctatgtcatccacaggg

SEQ ID NO: 2975238 - DNA, 25 bp, Homo sapien
gggaggaatgctgattgcaaacttt

SEQ ID NO: 2975239 - DNA, 25 bp, Homo sapien
tgcatttgtgaaagggtgggcaaca

SEQ ID NO: 2975240 - DNA, 25 bp, Homo sapien
tgaaagggtgggcaacatgttttaa

SEQ ID NO: 2975241 - DNA, 25 bp, Homo sapien
atgtgcatttgtgaaagggtgggca

SEQ ID NO: 2975242 - DNA, 25 bp, Homo sapien
ttgtgaaagggtgggcaacatgttt

SEQ ID NO: 2975243 - DNA, 25 bp, Homo sapien
ggtgacactgcccaatttagatcca

SEQ ID NO: 2975244 - DNA, 25 bp, Homo sapien
ttctatggaaggttgcgaaccgggc

SEQ ID NO: 2975245 - DNA, 25 bp, Homo sapien
tctgcagcaacagggtctgggtgac

SEQ ID NO: 2975246 - DNA, 25 bp, Homo sapien
gaaataacctccacgtcaagcaact

SEQ ID NO: 2975247 - DNA, 25 bp, Homo sapien
tgtgcaacgaaataactgaggctct

SEQ ID NO: 2975248 - DNA, 25 bp, Homo sapien
tccaaagtgcaatcagaaggtcttc

SEQ ID NO: 2975249 - DNA, 25 bp, Homo sapien
gacatgaggactcaaggcggaaccc

SEQ ID NO: 2975250 - DNA, 25 bp, Homo sapien
cagcacatgagacttgcagggcaca

SEQ ID NO: 2975251 - DNA, 25 bp, Homo sapien
tccttaagaggatttcctgggaaca

SEQ ID NO: 2975252 - DNA, 25 bp, Homo sapien
ccgtgcccagcttaatctttaggtt

SEQ ID NO: 2975253 - DNA, 25 bp, Homo sapien
taagaggatttcctgggaacaatta

SEQ ID NO: 2975254 - DNA, 25 bp, Homo sapien
taggttttataacatctgagcaaac

SEQ ID NO: 2975255 - DNA, 25 bp, Homo sapien
tattggaagctacaccctgaaaaca

SEQ ID NO: 2975256 - DNA, 25 bp, Homo sapien
taagagaggcaaatagattcatcac

SEQ ID NO: 2975257 - DNA, 25 bp, Homo sapien
actatgggaaccctatcataaaggg

SEQ ID NO: 2975258 - DNA, 25 bp, Homo sapien
tatttggagctataattaactggtc

SEQ ID NO: 2975259 - DNA, 25 bp, Homo sapien
ttactcagatttgggccgacatggc

SEQ ID NO: 2975260 - DNA, 25 bp, Homo sapien
cttatctgaagagtgcatgccgggt

SEQ ID NO: 2975261 - DNA, 25 bp, Homo sapien
tggatggagcactagaaggcgcact

SEQ ID NO: 2975262 - DNA, 25 bp, Homo sapien
gccgatctttgggaacggacagaaa

SEQ ID NO: 2975263 - DNA, 25 bp, Homo sapien
tgctgtgtagcatacttagggaatc

SEQ ID NO: 2975264 - DNA, 25 bp, Homo sapien
tcctctctggcatacagctatgtgg

SEQ ID NO: 2975265 - DNA, 25 bp, Homo sapien
cagctaagtatgttatgcctgagag

SEQ ID NO: 2975266 - DNA, 25 bp, Homo sapien
gagtcagactaaccacaaaatagga

SEQ ID NO: 2975267 - DNA, 25 bp, Homo sapien
aaggtttccatatcgcagacagagg

SEQ ID NO: 2975268 - DNA, 25 bp, Homo sapien
tcttaatggaaaaactaggtgccag

SEQ ID NO: 2975269 - DNA, 25 bp, Homo sapien
tctaaggtctggtggtaggcaatct

SEQ ID NO: 2975270 - DNA, 25 bp, Homo sapien
taggtgccagatgtgtttaacagcc

SEQ ID NO: 2975271 - DNA, 25 bp, Homo sapien
tacatgtgagtggtacaggtacaac

SEQ ID NO: 2975272 - DNA, 25 bp, Homo sapien
caagaatgccgtgctatggccaaga

SEQ ID NO: 2975273 - DNA, 25 bp, Homo sapien
gatgcaaaaccgtaacagaagcctt

SEQ ID NO: 2975274 - DNA, 25 bp, Homo sapien
tcctatcgacgtaagccagccaatg

SEQ ID NO: 2975275 - DNA, 25 bp, Homo sapien
tctgcttacagtgcggaaagttggt

SEQ ID NO: 2975276 - DNA, 25 bp, Homo sapien
taaatcccaggtgcttaattcagcc

SEQ ID NO: 2975277 - DNA, 25 bp, Homo sapien
cgttaatgttgcttcactgaatggc

SEQ ID NO: 2975278 - DNA, 25 bp, Homo sapien
cctcaaatacgctccagggacaaag

SEQ ID NO: 2975279 - DNA, 25 bp, Homo sapien
gttttgtcgctctgctccacgccta

SEQ ID NO: 2975280 - DNA, 25 bp, Homo sapien
ggtctgttttgtcgctctgctccac

SEQ ID NO: 2975281 - DNA, 25 bp, Homo sapien
agaggatgactgtcctgccgctgtc

SEQ ID NO: 2975282 - DNA, 25 bp, Homo sapien
gtcgctctgctccacgcctaggagt

SEQ ID NO: 2975283 - DNA, 25 bp, Homo sapien
agctcgagctccgcgctcagaaagg

SEQ ID NO: 2975284 - DNA, 25 bp, Homo sapien
agtcggggcgctcccaaacctattg

SEQ ID NO: 2975285 - DNA, 25 bp, Homo sapien
tgctaagccttctccacgatctctt

SEQ ID NO: 2975286 - DNA, 25 bp, Homo sapien
tctgaagctgtgagaaacttgagct

SEQ ID NO: 2975287 - DNA, 25 bp, Homo sapien
agtcggaaatatgcctttacaggaa

SEQ ID NO: 2975288 - DNA, 25 bp, Homo sapien
ccctgcaagtcggaaatatgccttt

SEQ ID NO: 2975289 - DNA, 25 bp, Homo sapien
gacgctctgcccctgcaagtcggaa

SEQ ID NO: 2975290 - DNA, 25 bp, Homo sapien
acgtgcactcagacgctctgcccct

SEQ ID NO: 2975291 - DNA, 25 bp, Homo sapien
tccccaagggtttctgatcagaaac

SEQ ID NO: 2975292 - DNA, 25 bp, Homo sapien
tactttatccaggtttacatcttca

SEQ ID NO: 2975293 - DNA, 25 bp, Homo sapien
atactttatccaggtttacatcttc

SEQ ID NO: 2975294 - DNA, 25 bp, Homo sapien
actttatccaggtttacatcttcat

SEQ ID NO: 2975295 - DNA, 25 bp, Homo sapien
tgagtcgagatcgagccattccact

SEQ ID NO: 2975296 - DNA, 25 bp, Homo sapien
gcagtgagtcgagatcgagccattc

SEQ ID NO: 2975297 - DNA, 25 bp, Homo sapien
agtgagtcgagatcgagccattcca

SEQ ID NO: 2975298 - DNA, 25 bp, Homo sapien
agtcgagatcgagccattccactcc

SEQ ID NO: 2975299 - DNA, 25 bp, Homo sapien
gaaagtatcctatatacttctgctg

SEQ ID NO: 2975300 - DNA, 25 bp, Homo sapien
aagtatcctatatacttctgctgac

SEQ ID NO: 2975301 - DNA, 25 bp, Homo sapien
tgaaagtatcctatatacttctgct

SEQ ID NO: 2975302 - DNA, 25 bp, Homo sapien
gtatcctatatacttctgctgacaa

SEQ ID NO: 2975303 - DNA, 25 bp, Homo sapien
tgcaggttattgaactccccagatg

SEQ ID NO: 2975304 - DNA, 25 bp, Homo sapien
gatctcaatatagaggaagctgagg

SEQ ID NO: 2975305 - DNA, 25 bp, Homo sapien
ttgggactcgtgttctgaggaaaac

SEQ ID NO: 2975306 - DNA, 25 bp, Homo sapien
tgaaacatataccacaagcaatacg

SEQ ID NO: 2975307 - DNA, 25 bp, Homo sapien
ggatgtctgaatactacgaaaaact

SEQ ID NO: 2975308 - DNA, 25 bp, Homo sapien
aaacaggatgtctgaatactacgaa

SEQ ID NO: 2975309 - DNA, 25 bp, Homo sapien
tgtctgaatactacgaaaaactttg

SEQ ID NO: 2975310 - DNA, 25 bp, Homo sapien
tgaatactacgaaaaactttgtcca

SEQ ID NO: 2975311 - DNA, 25 bp, Homo sapien
gatgaatttccgatctacagatgca

SEQ ID NO: 2975312 - DNA, 25 bp, Homo sapien
cagagttttcgtcttgtccaagtaa

SEQ ID NO: 2975313 - DNA, 25 bp, Homo sapien
tctttataacagagttttcgtcttg

SEQ ID NO: 2975314 - DNA, 25 bp, Homo sapien
aaagagatgaatttccgatctacag

SEQ ID NO: 2975315 - DNA, 25 bp, Homo sapien
gagccagtgtgcttagtttattata

SEQ ID NO: 2975316 - DNA, 25 bp, Homo sapien
tgctctttcttgtgggccaactgaa

SEQ ID NO: 2975317 - DNA, 25 bp, Homo sapien
accttatgaaattgctctttcttgt

SEQ ID NO: 2975318 - DNA, 25 bp, Homo sapien
ccaactgaatttcggcagtttcatg

SEQ ID NO: 2975319 - DNA, 25 bp, Homo sapien
aactccatttcgagcgttaccagat

SEQ ID NO: 2975320 - DNA, 25 bp, Homo sapien
catttcgagcgttaccagatacaac

SEQ ID NO: 2975321 - DNA, 25 bp, Homo sapien
gagcgttaccagatacaacagcctt

SEQ ID NO: 2975322 - DNA, 25 bp, Homo sapien
tcgagcgttaccagatacaacagcc

SEQ ID NO: 2975323 - DNA, 25 bp, Homo sapien
gaaatgttgccaagaatccaatcct

SEQ ID NO: 2975324 - DNA, 25 bp, Homo sapien
cctgcaggctagtatgatggtgact

SEQ ID NO: 2975325 - DNA, 25 bp, Homo sapien
ggtacaccgtgaaggaaacatacaa

SEQ ID NO: 2975326 - DNA, 25 bp, Homo sapien
tcaagaagaattaggaaggcacaaa

SEQ ID NO: 2975327 - DNA, 25 bp, Homo sapien
aaaaagtattgtatgatgggccggg

SEQ ID NO: 2975328 - DNA, 25 bp, Homo sapien
acaaaaagtattgtatgatgggccg

SEQ ID NO: 2975329 - DNA, 25 bp, Homo sapien
caaaaagtattgtatgatgggccgg

SEQ ID NO: 2975330 - DNA, 25 bp, Homo sapien
aaaagtattgtatgatgggccgggc

SEQ ID NO: 2975331 - DNA, 25 bp, Homo sapien
gaaagcattgtacactaaaagttat

SEQ ID NO: 2975332 - DNA, 25 bp, Homo sapien
ggtgtgattactgcgcccggtccct

SEQ ID NO: 2975333 - DNA, 25 bp, Homo sapien
tactgcgcccggtccctaggaataa

SEQ ID NO: 2975334 - DNA, 25 bp, Homo sapien
aatttaaccaagtgaaagcattgta

SEQ ID NO: 2975335 - DNA, 25 bp, Homo sapien
ttcaagttctagccaggcaagaaga

SEQ ID NO: 2975336 - DNA, 25 bp, Homo sapien
tattcaagttctagccaggcaagaa

SEQ ID NO: 2975337 - DNA, 25 bp, Homo sapien
gctattcaagttctagccaggcaag

SEQ ID NO: 2975338 - DNA, 25 bp, Homo sapien
aacaagacatggaggcttattttca

SEQ ID NO: 2975339 - DNA, 25 bp, Homo sapien
tggtcccttgtggtaactcttttga

SEQ ID NO: 2975340 - DNA, 25 bp, Homo sapien
ccactggtcccttgtggtaactctt

SEQ ID NO: 2975341 - DNA, 25 bp, Homo sapien
attttatgttccatacagagaggca

SEQ ID NO: 2975342 - DNA, 25 bp, Homo sapien
tttatgttccatacagagaggcatt

SEQ ID NO: 2975343 - DNA, 25 bp, Homo sapien
atggaatcacagttagagattttcc

SEQ ID NO: 2975344 - DNA, 25 bp, Homo sapien
tccatgtagcataaacaaatgttct

SEQ ID NO: 2975345 - DNA, 25 bp, Homo sapien
gacacttcacacttgtatggaatca

SEQ ID NO: 2975346 - DNA, 25 bp, Homo sapien
tgcttgagttttccaagagcacctg

SEQ ID NO: 2975347 - DNA, 25 bp, Homo sapien
tggaatgttttgacttactttttgc

SEQ ID NO: 2975348 - DNA, 25 bp, Homo sapien
ctggaatgttttgacttactttttg

SEQ ID NO: 2975349 - DNA, 25 bp, Homo sapien
acaaaatgggacacgacatgagttc

SEQ ID NO: 2975350 - DNA, 25 bp, Homo sapien
ccacatccttgaggtgtctcccagt

SEQ ID NO: 2975351 - DNA, 25 bp, Homo sapien
tgagttctggaacccaagtccacat

SEQ ID NO: 2975352 - DNA, 25 bp, Homo sapien
agtttacaaaatgggacacgacatg

SEQ ID NO: 2975353 - DNA, 25 bp, Homo sapien
gctgtaaactcacttcaatttttcg

SEQ ID NO: 2975354 - DNA, 25 bp, Homo sapien
ggctgtaaactcacttcaatttttc

SEQ ID NO: 2975355 - DNA, 25 bp, Homo sapien
ctctggctgtaaactcacttcaatt

SEQ ID NO: 2975356 - DNA, 25 bp, Homo sapien
aatttccgtacttctacttcaatgt

SEQ ID NO: 2975357 - DNA, 25 bp, Homo sapien
atttccgtacttctacttcaatgtg

SEQ ID NO: 2975358 - DNA, 25 bp, Homo sapien
ttccgtacttctacttcaatgtgtt

SEQ ID NO: 2975359 - DNA, 25 bp, Homo sapien
tttccgtacttctacttcaatgtgt

SEQ ID NO: 2975360 - DNA, 25 bp, Homo sapien
tcaactgcagaacatttataagcct

SEQ ID NO: 2975361 - DNA, 25 bp, Homo sapien
gagtttcagaagattagaactataa

SEQ ID NO: 2975362 - DNA, 25 bp, Homo sapien
tcagaagaattatgcacgtacagtg

SEQ ID NO: 2975363 - DNA, 25 bp, Homo sapien
cagtgtggtacacacaaacagctac

SEQ ID NO: 2975364 - DNA, 25 bp, Homo sapien
ctgctgtagacagagttgtaacaac

SEQ ID NO: 2975365 - DNA, 25 bp, Homo sapien
tcttttttaaggcaatctccattaa

SEQ ID NO: 2975366 - DNA, 25 bp, Homo sapien
gagttgtaacaactgtacatctttc

SEQ ID NO: 2975367 - DNA, 25 bp, Homo sapien
tttttaaggcaatctccattaagtc

SEQ ID NO: 2975368 - DNA, 25 bp, Homo sapien
acagggcatgaagtgctctcctttg

SEQ ID NO: 2975369 - DNA, 25 bp, Homo sapien
cagggcatgaagtgctctcctttgt

SEQ ID NO: 2975370 - DNA, 25 bp, Homo sapien
gggcatgaagtgctctcctttgttt

SEQ ID NO: 2975371 - DNA, 25 bp, Homo sapien
cacagggcatgaagtgctctccttt

SEQ ID NO: 2975372 - DNA, 25 bp, Homo sapien
gatagagcttctgtgttagtatagc

SEQ ID NO: 2975373 - DNA, 25 bp, Homo sapien
taaaagagctctatcaccaaacact

SEQ ID NO: 2975374 - DNA, 25 bp, Homo sapien
tattgagttactccttggttactgc

SEQ ID NO: 2975375 - DNA, 25 bp, Homo sapien
cagagggatgctctatgtcaaagga

SEQ ID NO: 2975376 - DNA, 25 bp, Homo sapien
cgtgatatgctgtgctgggatgtct

SEQ ID NO: 2975377 - DNA, 25 bp, Homo sapien
aaatgtctcgctatatgctgaatga

SEQ ID NO: 2975378 - DNA, 25 bp, Homo sapien
atatgctgtgctgggatgtctttca

SEQ ID NO: 2975379 - DNA, 25 bp, Homo sapien
ggcagaagaaatgtctcgctatatg

SEQ ID NO: 2975380 - DNA, 25 bp, Homo sapien
tcaggtacaggaaatacaaatactt

SEQ ID NO: 2975381 - DNA, 25 bp, Homo sapien
caggtacaggaaatacaaatactta

SEQ ID NO: 2975382 - DNA, 25 bp, Homo sapien
gcctgcggagagcaagctggcccca

SEQ ID NO: 2975383 - DNA, 25 bp, Homo sapien
atggttgatcttgagcctgcggaga

SEQ ID NO: 2975384 - DNA, 25 bp, Homo sapien
ggatggttgatcttgagcctgcgga

SEQ ID NO: 2975385 - DNA, 25 bp, Homo sapien
agcctgcggagagcaagctggcccc

SEQ ID NO: 2975386 - DNA, 25 bp, Homo sapien
aagaacccgactaggcagattcaca

SEQ ID NO: 2975387 - DNA, 25 bp, Homo sapien
taaatggacaagaagagacggtttc

SEQ ID NO: 2975388 - DNA, 25 bp, Homo sapien
taacacctgttacccatctgattgg

SEQ ID NO: 2975389 - DNA, 25 bp, Homo sapien
gatcctcactgaagatttacaacag

SEQ ID NO: 2975390 - DNA, 25 bp, Homo sapien
taacttcaggttaattcactttaca

SEQ ID NO: 2975391 - DNA, 25 bp, Homo sapien
gaagatgaataggaaaaggaagtta

SEQ ID NO: 2975392 - DNA, 25 bp, Homo sapien
ctgaagatgaataggaaaaggaagt

SEQ ID NO: 2975393 - DNA, 25 bp, Homo sapien
taattcactttacaaagtccataaa

SEQ ID NO: 2975394 - DNA, 25 bp, Homo sapien
gcatccagaagtagacatatccaat

SEQ ID NO: 2975395 - DNA, 25 bp, Homo sapien
catccagaagtagacatatccaatc

SEQ ID NO: 2975396 - DNA, 25 bp, Homo sapien
atccagaagtagacatatccaatcc

SEQ ID NO: 2975397 - DNA, 25 bp, Homo sapien
ttgttgagctcagaataaacagata

SEQ ID NO: 2975398 - DNA, 25 bp, Homo sapien
tcttgttgagctcagaataaacaga

SEQ ID NO: 2975399 - DNA, 25 bp, Homo sapien
caatcttgttgagctcagaataaac

SEQ ID NO: 2975400 - DNA, 25 bp, Homo sapien
ttcaatcttgttgagctcagaataa

SEQ ID NO: 2975401 - DNA, 25 bp, Homo sapien
agagctccagcacttcaattgaata

SEQ ID NO: 2975402 - DNA, 25 bp, Homo sapien
gcacttcaattgaatataatcctct

SEQ ID NO: 2975403 - DNA, 25 bp, Homo sapien
agaagagctccagcacttcaattga

SEQ ID NO: 2975404 - DNA, 25 bp, Homo sapien
gctccagcacttcaattgaatataa

SEQ ID NO: 2975405 - DNA, 25 bp, Homo sapien
ctggatgaagcaagagttcacataa

SEQ ID NO: 2975406 - DNA, 25 bp, Homo sapien
ctttataaaatgtctatgaaggaga

SEQ ID NO: 2975407 - DNA, 25 bp, Homo sapien
gcaagagttcacataaaagagcttt

SEQ ID NO: 2975408 - DNA, 25 bp, Homo sapien
gaagcaagagttcacataaaagagc

SEQ ID NO: 2975409 - DNA, 25 bp, Homo sapien
gacacgtttctcttgacactgagat

SEQ ID NO: 2975410 - DNA, 25 bp, Homo sapien
cactgagatggtcgcaaacaaaaca

SEQ ID NO: 2975411 - DNA, 25 bp, Homo sapien
tcttgacactgagatggtcgcaaac

SEQ ID NO: 2975412 - DNA, 25 bp, Homo sapien
cgtttctcttgacactgagatggtc

SEQ ID NO: 2975413 - DNA, 25 bp, Homo sapien
atcagttaagtgatggtccaggtac

SEQ ID NO: 2975414 - DNA, 25 bp, Homo sapien
gttaagtgatggtccaggtactcac

SEQ ID NO: 2975415 - DNA, 25 bp, Homo sapien
cagttaagtgatggtccaggtactc

SEQ ID NO: 2975416 - DNA, 25 bp, Homo sapien
gcatcagttaagtgatggtccaggt

SEQ ID NO: 2975417 - DNA, 25 bp, Homo sapien
aaaattgcagaacctctccacacca

SEQ ID NO: 2975418 - DNA, 25 bp, Homo sapien
aacaggttcatgtgaaacctgcagt

SEQ ID NO: 2975419 - DNA, 25 bp, Homo sapien
cacatgataagaaattagactttta

SEQ ID NO: 2975420 - DNA, 25 bp, Homo sapien
acaccaatgtccacagcctagaaca

SEQ ID NO: 2975421 - DNA, 25 bp, Homo sapien
ctgtaaagctgggctgtagaatcac

SEQ ID NO: 2975422 - DNA, 25 bp, Homo sapien
ttctgtaaagctgggctgtagaatc

SEQ ID NO: 2975423 - DNA, 25 bp, Homo sapien
tgtaaagctgggctgtagaatcaca

SEQ ID NO: 2975424 - DNA, 25 bp, Homo sapien
tctgtaaagctgggctgtagaatca

SEQ ID NO: 2975425 - DNA, 25 bp, Homo sapien
aaacaatggaggagaacctgtttat

SEQ ID NO: 2975426 - DNA, 25 bp, Homo sapien
cattaatagaggctttaccctgttc

SEQ ID NO: 2975427 - DNA, 25 bp, Homo sapien
tcttttcattaaggcctactgagag

SEQ ID NO: 2975428 - DNA, 25 bp, Homo sapien
gaacctgtttattaacggccacatg

SEQ ID NO: 2975429 - DNA, 25 bp, Homo sapien
gaatagtactaagatgctgctgcta

SEQ ID NO: 2975430 - DNA, 25 bp, Homo sapien
tgaggttgtggatgcaatagctccc

SEQ ID NO: 2975431 - DNA, 25 bp, Homo sapien
gaaccatatcaacgagggaaaccca

SEQ ID NO: 2975432 - DNA, 25 bp, Homo sapien
gagatttgggcaggacatcggaacc

SEQ ID NO: 2975433 - DNA, 25 bp, Homo sapien
cataagaatggtttagttagcctta

SEQ ID NO: 2975434 - DNA, 25 bp, Homo sapien
cctgggagtggaggcgcatgcatgt

SEQ ID NO: 2975435 - DNA, 25 bp, Homo sapien
ataagaatggtttagttagccttat

SEQ ID NO: 2975436 - DNA, 25 bp, Homo sapien
tacataagaatggtttagttagcct

SEQ ID NO: 2975437 - DNA, 25 bp, Homo sapien
ccttctgtgcctggcgtttgatctc

SEQ ID NO: 2975438 - DNA, 25 bp, Homo sapien
accctgtgctcgaggttggctctca

SEQ ID NO: 2975439 - DNA, 25 bp, Homo sapien
tttgatctctgccaagtccttccac

SEQ ID NO: 2975440 - DNA, 25 bp, Homo sapien
tcagctgtagattcacaaccctgtg

SEQ ID NO: 2975441 - DNA, 25 bp, Homo sapien
cttggtcacaaagattctccttgac

SEQ ID NO: 2975442 - DNA, 25 bp, Homo sapien
aaagattctccttgacactgcgtgg

SEQ ID NO: 2975443 - DNA, 25 bp, Homo sapien
tctccttgacactgcgtggacactg

SEQ ID NO: 2975444 - DNA, 25 bp, Homo sapien
caagcaacgagaaaggagctcctga

SEQ ID NO: 2975445 - DNA, 25 bp, Homo sapien
ctgccactgaagccgctctcactgc

SEQ ID NO: 2975446 - DNA, 25 bp, Homo sapien
tgctgccactgaagccgctctcact

SEQ ID NO: 2975447 - DNA, 25 bp, Homo sapien
gctgccactgaagccgctctcactg

SEQ ID NO: 2975448 - DNA, 25 bp, Homo sapien
gccactgtggccttcgaaaacccag

SEQ ID NO: 2975449 - DNA, 25 bp, Homo sapien
tggccttcgaaaacccagctgtttc

SEQ ID NO: 2975450 - DNA, 25 bp, Homo sapien
ctgagagaagcttgtgccggccact

SEQ ID NO: 2975451 - DNA, 25 bp, Homo sapien
gtgccggccactcatgccactgtgg

SEQ ID NO: 2975452 - DNA, 25 bp, Homo sapien
tacaatgtctggtactcttgatatc

SEQ ID NO: 2975453 - DNA, 25 bp, Homo sapien
ttacaatgtctggtactcttgatat

SEQ ID NO: 2975454 - DNA, 25 bp, Homo sapien
tgtctccctgtatctggccgagtcc

SEQ ID NO: 2975455 - DNA, 25 bp, Homo sapien
tgggttgtgatgaggaggatcaggg

SEQ ID NO: 2975456 - DNA, 25 bp, Homo sapien
ttggaggcaccgctctagcccaggg

SEQ ID NO: 2975457 - DNA, 25 bp, Homo sapien
cagggggccgctcccattattgccg

SEQ ID NO: 2975458 - DNA, 25 bp, Homo sapien
ctaggtcaaatgaatagcgaaccat

SEQ ID NO: 2975459 - DNA, 25 bp, Homo sapien
gatttgcgtgattttgtggggttct

SEQ ID NO: 2975460 - DNA, 25 bp, Homo sapien
ctcttgatttgcgtgattttgtggg

SEQ ID NO: 2975461 - DNA, 25 bp, Homo sapien
tgatttgcgtgattttgtggggttc

SEQ ID NO: 2975462 - DNA, 25 bp, Homo sapien
aacctcttgatttgcgtgattttgt

SEQ ID NO: 2975463 - DNA, 25 bp, Homo sapien
ttaatgctgaatgtagtcctgtgtc

SEQ ID NO: 2975464 - DNA, 25 bp, Homo sapien
ccagcagcccttcttaggtgctttg

SEQ ID NO: 2975465 - DNA, 25 bp, Homo sapien
tgaatgtagtcctgtgtcatcagtt

SEQ ID NO: 2975466 - DNA, 25 bp, Homo sapien
cagcagcccttcttaggtgctttgt

SEQ ID NO: 2975467 - DNA, 25 bp, Homo sapien
ctgatcaaagttttctcttctctcc

SEQ ID NO: 2975468 - DNA, 25 bp, Homo sapien
ctctccctggttccaaaccctgatc

SEQ ID NO: 2975469 - DNA, 25 bp, Homo sapien
ccctggttccaaaccctgatcccat

SEQ ID NO: 2975470 - DNA, 25 bp, Homo sapien
cttctctccctggttccaaaccctg

SEQ ID NO: 2975471 - DNA, 25 bp, Homo sapien
aactggatgattaacgtcagtgacc

SEQ ID NO: 2975472 - DNA, 25 bp, Homo sapien
ctgtgactccacagcaagaaaactg

SEQ ID NO: 2975473 - DNA, 25 bp, Homo sapien
ggatgattaacgtcagtgacctcat

SEQ ID NO: 2975474 - DNA, 25 bp, Homo sapien
cctgtgactccacagcaagaaaact

SEQ ID NO: 2975475 - DNA, 25 bp, Homo sapien
tacttgagttacttcttttggctct

SEQ ID NO: 2975476 - DNA, 25 bp, Homo sapien
catacttgagttacttcttttggct

SEQ ID NO: 2975477 - DNA, 25 bp, Homo sapien
acttgagttacttcttttggctctg

SEQ ID NO: 2975478 - DNA, 25 bp, Homo sapien
tcatacttgagttacttcttttggc

SEQ ID NO: 2975479 - DNA, 25 bp, Homo sapien
ggttttagatttgctgtgcacgctg

SEQ ID NO: 2975480 - DNA, 25 bp, Homo sapien
cgctgaacgccatgaaaaatggact

SEQ ID NO: 2975481 - DNA, 25 bp, Homo sapien
tgccagacaatggttttagatttgc

SEQ ID NO: 2975482 - DNA, 25 bp, Homo sapien
cataaggaaatcaattacttgcctc

SEQ ID NO: 2975483 - DNA, 25 bp, Homo sapien
ctaagagattttaaatcctctcatc

SEQ ID NO: 2975484 - DNA, 25 bp, Homo sapien
taagagattttaaatcctctcatcc

SEQ ID NO: 2975485 - DNA, 25 bp, Homo sapien
agagattttaaatcctctcatcctc

SEQ ID NO: 2975486 - DNA, 25 bp, Homo sapien
aagagattttaaatcctctcatcct

SEQ ID NO: 2975487 - DNA, 25 bp, Homo sapien
gaagttgcttgtttacacttccgct

SEQ ID NO: 2975488 - DNA, 25 bp, Homo sapien
tgccccagtgaccactcgtgtctct

SEQ ID NO: 2975489 - DNA, 25 bp, Homo sapien
cactcgtgtctctctttagcacctc

SEQ ID NO: 2975490 - DNA, 25 bp, Homo sapien
gttgcttgtttacacttccgctcca

SEQ ID NO: 2975491 - DNA, 25 bp, Homo sapien
gttcctggaggcatatacagatttg

SEQ ID NO: 2975492 - DNA, 25 bp, Homo sapien
ggttcctggaggcatatacagattt

SEQ ID NO: 2975493 - DNA, 25 bp, Homo sapien
ttgctggggccccactccggatcgc

SEQ ID NO: 2975494 - DNA, 25 bp, Homo sapien
aatccgaattgctggggccccactc

SEQ ID NO: 2975495 - DNA, 25 bp, Homo sapien
agaaggctcaatccgaattgctggg

SEQ ID NO: 2975496 - DNA, 25 bp, Homo sapien
agggagaaggctcaatccgaattgc

SEQ ID NO: 2975497 - DNA, 25 bp, Homo sapien
ctgctgccgcggtgccgcgagcgga

SEQ ID NO: 2975498 - DNA, 25 bp, Homo sapien
cctgggcgagctcagccgcgtcttg

SEQ ID NO: 2975499 - DNA, 25 bp, Homo sapien
cccccctgggcgagctcagccgcgt

SEQ ID NO: 2975500 - DNA, 25 bp, Homo sapien
gagctcagccgcgtcttgggcgcca

SEQ ID NO: 2975501 - DNA, 25 bp, Homo sapien
ctcggcgtcgccgtcctcctcctcc

SEQ ID NO: 2975502 - DNA, 25 bp, Homo sapien
tcggcgtcgccgtcctcctcctcct

SEQ ID NO: 2975503 - DNA, 25 bp, Homo sapien
cggcgtcgccgtcctcctcctcctc

SEQ ID NO: 2975504 - DNA, 25 bp, Homo sapien
ggcgtcgccgtcctcctcctcctcc

SEQ ID NO: 2975505 - DNA, 25 bp, Homo sapien
ctcgtcgtcctcagaatcctgggtc

SEQ ID NO: 2975506 - DNA, 25 bp, Homo sapien
tcctcgtcgtcctcagaatcctggg

SEQ ID NO: 2975507 - DNA, 25 bp, Homo sapien
cgtcgtcctcagaatcctgggtctc

SEQ ID NO: 2975508 - DNA, 25 bp, Homo sapien
ctcctcgtcgtcctcagaatcctgg

SEQ ID NO: 2975509 - DNA, 25 bp, Homo sapien
tcctccggataatcggagtcatcgt

SEQ ID NO: 2975510 - DNA, 25 bp, Homo sapien
gaggtggggaaggagtctgcagcaa

SEQ ID NO: 2975511 - DNA, 25 bp, Homo sapien
gggaaggagtctgcagcaactgggc

SEQ ID NO: 2975512 - DNA, 25 bp, Homo sapien
gtggggaaggagtctgcagcaactg

SEQ ID NO: 2975513 - DNA, 25 bp, Homo sapien
gaaggagtctgcagcaactgggctg

SEQ ID NO: 2975514 - DNA, 25 bp, Homo sapien
ataattctgaatcggatgaataacc

SEQ ID NO: 2975515 - DNA, 25 bp, Homo sapien
gtgtgaaaacgcatttttttgtgcg

SEQ ID NO: 2975516 - DNA, 25 bp, Homo sapien
cagctaggggtgtgaaaacgcattt

SEQ ID NO: 2975517 - DNA, 25 bp, Homo sapien
cacacaggaccagataaggttcccc

SEQ ID NO: 2975518 - DNA, 25 bp, Homo sapien
aaaagtcgttgtgtaataaatctga

SEQ ID NO: 2975519 - DNA, 25 bp, Homo sapien
aaagtcgttgtgtaataaatctgat

SEQ ID NO: 2975520 - DNA, 25 bp, Homo sapien
aaaaagtcgttgtgtaataaatctg

SEQ ID NO: 2975521 - DNA, 25 bp, Homo sapien
aagtcgttgtgtaataaatctgata

SEQ ID NO: 2975522 - DNA, 25 bp, Homo sapien
gatcaaattgtccatcaaaaaccaa

SEQ ID NO: 2975523 - DNA, 25 bp, Homo sapien
tattacaagttcttatctactaaca

SEQ ID NO: 2975524 - DNA, 25 bp, Homo sapien
tagagattatgacacccactgtaga

SEQ ID NO: 2975525 - DNA, 25 bp, Homo sapien
aaactctgttacaggagctgcaggg

SEQ ID NO: 2975526 - DNA, 25 bp, Homo sapien
taaagagggtcctaacctgagcatg

SEQ ID NO: 2975527 - DNA, 25 bp, Homo sapien
gactaaaggtacatctctagcacat

SEQ ID NO: 2975528 - DNA, 25 bp, Homo sapien
cctgagcatgtaaatttgtgaccct

SEQ ID NO: 2975529 - DNA, 25 bp, Homo sapien
gaaacaccagcttaagtgactaaag

SEQ ID NO: 2975530 - DNA, 25 bp, Homo sapien
gctgaggaggagacgtgcacttata

SEQ ID NO: 2975531 - DNA, 25 bp, Homo sapien
gacgtgcacttatacagcattccta

SEQ ID NO: 2975532 - DNA, 25 bp, Homo sapien
ttatacagcattcctatcacaagta

SEQ ID NO: 2975533 - DNA, 25 bp, Homo sapien
caagtatactaaactcaatctatgc

SEQ ID NO: 2975534 - DNA, 25 bp, Homo sapien
gaactgttcggatgaactggtcaac

SEQ ID NO: 2975535 - DNA, 25 bp, Homo sapien
ggatgaactggtcaacagcactcat

SEQ ID NO: 2975536 - DNA, 25 bp, Homo sapien
ctgaactgttcggatgaactggtca

SEQ ID NO: 2975537 - DNA, 25 bp, Homo sapien
tgttcggatgaactggtcaacagca

SEQ ID NO: 2975538 - DNA, 25 bp, Homo sapien
tatctttcagatcagcaggtccaaa

SEQ ID NO: 2975539 - DNA, 25 bp, Homo sapien
tccaatataggagaacgaggccgat

SEQ ID NO: 2975540 - DNA, 25 bp, Homo sapien
tcaaaacagtgccaaagttccgcag

SEQ ID NO: 2975541 - DNA, 25 bp, Homo sapien
gttccgcagtacctcgtaaatggca

SEQ ID NO: 2975542 - DNA, 25 bp, Homo sapien
tttgtgctgtaataccaaattttct

SEQ ID NO: 2975543 - DNA, 25 bp, Homo sapien
taattctgcaagttggacctttgtg

SEQ ID NO: 2975544 - DNA, 25 bp, Homo sapien
ttagctgccgccagaaaggatttgt

SEQ ID NO: 2975545 - DNA, 25 bp, Homo sapien
ccatgtgtcggtggatttcttcacg

SEQ ID NO: 2975546 - DNA, 25 bp, Homo sapien
tcagtggtaagtcacgaggacacca

SEQ ID NO: 2975547 - DNA, 25 bp, Homo sapien
gacaccatgcactcttgataagaag

SEQ ID NO: 2975548 - DNA, 25 bp, Homo sapien
tggagaaacctgacgaacactgcct

SEQ ID NO: 2975549 - DNA, 25 bp, Homo sapien
cacccgctaagtgtggctgtttata

SEQ ID NO: 2975550 - DNA, 25 bp, Homo sapien
taagacggagattgtgttactgcaa

SEQ ID NO: 2975551 - DNA, 25 bp, Homo sapien
ggttctctgttgttgtactaaaaca

SEQ ID NO: 2975552 - DNA, 25 bp, Homo sapien
tcacattgccttttagaggactaaa

SEQ ID NO: 2975553 - DNA, 25 bp, Homo sapien
gaagtaagctggctgaaattaataa

SEQ ID NO: 2975554 - DNA, 25 bp, Homo sapien
gcttttaacattatcaatgtctccc

SEQ ID NO: 2975555 - DNA, 25 bp, Homo sapien
cttctgggcttttaacattatcaat

SEQ ID NO: 2975556 - DNA, 25 bp, Homo sapien
atctggtgttttgtcgtcactgtct

SEQ ID NO: 2975557 - DNA, 25 bp, Homo sapien
ttttgtcgtcactgtctttttcaag

SEQ ID NO: 2975558 - DNA, 25 bp, Homo sapien
tctgaagttgcatttgttgtgttgt

SEQ ID NO: 2975559 - DNA, 25 bp, Homo sapien
tcgccaagatttgctgacacagagt

SEQ ID NO: 2975560 - DNA, 25 bp, Homo sapien
gacacagagttacctttatccccaa

SEQ ID NO: 2975561 - DNA, 25 bp, Homo sapien
cagagggactagtctcttctgaagt

SEQ ID NO: 2975562 - DNA, 25 bp, Homo sapien
aaatgtgaattactggtcaacttac

SEQ ID NO: 2975563 - DNA, 25 bp, Homo sapien
taaatattacacgagcacatgcaaa

SEQ ID NO: 2975564 - DNA, 25 bp, Homo sapien
cataatactacggtttgaaatgcta

SEQ ID NO: 2975565 - DNA, 25 bp, Homo sapien
tgattttctaccataatactacggt

SEQ ID NO: 2975566 - DNA, 25 bp, Homo sapien
gattccaagtcaggataggtactgt

SEQ ID NO: 2975567 - DNA, 25 bp, Homo sapien
caacaaaaagtatccctgagtctag

SEQ ID NO: 2975568 - DNA, 25 bp, Homo sapien
tagggacagtgagagcccaacaaca

SEQ ID NO: 2975569 - DNA, 25 bp, Homo sapien
tgtgtaacataagcctcaaacattt

SEQ ID NO: 2975570 - DNA, 25 bp, Homo sapien
tgtctgtacatccttactagaaatg

SEQ ID NO: 2975571 - DNA, 25 bp, Homo sapien
ccagcccaggggattattttaagtg

SEQ ID NO: 2975572 - DNA, 25 bp, Homo sapien
tttaagtgactttggaatatgatat

SEQ ID NO: 2975573 - DNA, 25 bp, Homo sapien
caaaaagtcgtaaatgccattcagt

SEQ ID NO: 2975574 - DNA, 25 bp, Homo sapien
ctgttttccagattaggctggatgg

SEQ ID NO: 2975575 - DNA, 25 bp, Homo sapien
tggtagcactagtgttactgctctc

SEQ ID NO: 2975576 - DNA, 25 bp, Homo sapien
gtgttactgctctcacatgtcttgt

SEQ ID NO: 2975577 - DNA, 25 bp, Homo sapien
ggatggaggtagtggtagcactagt

SEQ ID NO: 2975578 - DNA, 25 bp, Homo sapien
cagctgccttagcagattcactctg

SEQ ID NO: 2975579 - DNA, 25 bp, Homo sapien
attcactctgggaagaatttagttc

SEQ ID NO: 2975580 - DNA, 25 bp, Homo sapien
tcagctgccttagcagattcactct

SEQ ID NO: 2975581 - DNA, 25 bp, Homo sapien
agctgccttagcagattcactctgg

SEQ ID NO: 2975582 - DNA, 25 bp, Homo sapien
taagcaattcacaggaagttcaaca

SEQ ID NO: 2975583 - DNA, 25 bp, Homo sapien
tacaattaagcagtagccatcactg

SEQ ID NO: 2975584 - DNA, 25 bp, Homo sapien
acttaaccacatgagtaagaatatg

SEQ ID NO: 2975585 - DNA, 25 bp, Homo sapien
gtatacgaaatacttttcaccattg

SEQ ID NO: 2975586 - DNA, 25 bp, Homo sapien
gctataatatttgcagcgtccctgt

SEQ ID NO: 2975587 - DNA, 25 bp, Homo sapien
tgctggaggcatcaatcgtagtacc

SEQ ID NO: 2975588 - DNA, 25 bp, Homo sapien
cctggccatagggttagaaacaata

SEQ ID NO: 2975589 - DNA, 25 bp, Homo sapien
tgtgagtacacacacgtgctgagct

SEQ ID NO: 2975590 - DNA, 25 bp, Homo sapien
tcttgggaccatctataaagtcctg

SEQ ID NO: 2975591 - DNA, 25 bp, Homo sapien
ctataaagtcctgtaatagatactt

SEQ ID NO: 2975592 - DNA, 25 bp, Homo sapien
ctatggtggttagttcttgggacca

SEQ ID NO: 2975593 - DNA, 25 bp, Homo sapien
ggagttttatgccaagatgttgaac

SEQ ID NO: 2975594 - DNA, 25 bp, Homo sapien
gcacaccactagctggccacagtga

SEQ ID NO: 2975595 - DNA, 25 bp, Homo sapien
ccagggctgcaaatcaagtatgttg

SEQ ID NO: 2975596 - DNA, 25 bp, Homo sapien
gcccttgaatggcaaagcaagtatc

SEQ ID NO: 2975597 - DNA, 25 bp, Homo sapien
taatcatatgattctgccagggctg

SEQ ID NO: 2975598 - DNA, 25 bp, Homo sapien
tgtcaaatgaataggccacaaagca

SEQ ID NO: 2975599 - DNA, 25 bp, Homo sapien
tatttgcttcatgtgcagcggctgc

SEQ ID NO: 2975600 - DNA, 25 bp, Homo sapien
ggtgatgattcgagttgagccagat

SEQ ID NO: 2975601 - DNA, 25 bp, Homo sapien
gctatctggattccgcaatctggtg

SEQ ID NO: 2975602 - DNA, 25 bp, Homo sapien
gagattcacttagctccccgttgga

SEQ ID NO: 2975603 - DNA, 25 bp, Homo sapien
tgaactctcctgctggagtcagaca

SEQ ID NO: 2975604 - DNA, 25 bp, Homo sapien
tctaattgggtgatagtcagtctca

SEQ ID NO: 2975605 - DNA, 25 bp, Homo sapien
tttggacccatggacagaaccgttc

SEQ ID NO: 2975606 - DNA, 25 bp, Homo sapien
gattgtggtagacgcgatacttccc

SEQ ID NO: 2975607 - DNA, 25 bp, Homo sapien
taaagccaatgcaaattctctgggt

SEQ ID NO: 2975608 - DNA, 25 bp, Homo sapien
tgggtttgctacacatctgaactgc

SEQ ID NO: 2975609 - DNA, 25 bp, Homo sapien
tctgaactgccttgatccaatttgc

SEQ ID NO: 2975610 - DNA, 25 bp, Homo sapien
aaattctctgggtttgctacacatc

SEQ ID NO: 2975611 - DNA, 25 bp, Homo sapien
acaactggtttaactgcacactcca

SEQ ID NO: 2975612 - DNA, 25 bp, Homo sapien
ggtagcatcacaactggtttaactg

SEQ ID NO: 2975613 - DNA, 25 bp, Homo sapien
ctggtatgtcctaaagattctcgcc

SEQ ID NO: 2975614 - DNA, 25 bp, Homo sapien
aaagattctcgccatattggtagca

SEQ ID NO: 2975615 - DNA, 25 bp, Homo sapien
gatctcttttgatcttcatcacaat

SEQ ID NO: 2975616 - DNA, 25 bp, Homo sapien
atctcttttgatcttcatcacaatc

SEQ ID NO: 2975617 - DNA, 25 bp, Homo sapien
agatctcttttgatcttcatcacaa

SEQ ID NO: 2975618 - DNA, 25 bp, Homo sapien
cagatctcttttgatcttcatcaca

SEQ ID NO: 2975619 - DNA, 25 bp, Homo sapien
tgaacatccagatcaaaatgtcttc

SEQ ID NO: 2975620 - DNA, 25 bp, Homo sapien
aaagctagcaacttctcctaggaag

SEQ ID NO: 2975621 - DNA, 25 bp, Homo sapien
ccttgagatgtatccctagctaatt

SEQ ID NO: 2975622 - DNA, 25 bp, Homo sapien
tacctttcaagcatatagcccttgc

SEQ ID NO: 2975623 - DNA, 25 bp, Homo sapien
tactacagccaagcatccaaagcgg

SEQ ID NO: 2975624 - DNA, 25 bp, Homo sapien
cacaatcaaggtatctggcgtgact

SEQ ID NO: 2975625 - DNA, 25 bp, Homo sapien
tctggcgtgactgcagcataaaaca

SEQ ID NO: 2975626 - DNA, 25 bp, Homo sapien
taaaacaggtctactacagccaagc

SEQ ID NO: 2975627 - DNA, 25 bp, Homo sapien
gcattacaggcaagcaagaccatgc

SEQ ID NO: 2975628 - DNA, 25 bp, Homo sapien
cgtgagctactgtgtgcagtattct

SEQ ID NO: 2975629 - DNA, 25 bp, Homo sapien
ctggcattacaggcaagcaagacca

SEQ ID NO: 2975630 - DNA, 25 bp, Homo sapien
ggcattacaggcaagcaagaccatg

SEQ ID NO: 2975631 - DNA, 25 bp, Homo sapien
tgctactacagctaaattcccatgc

SEQ ID NO: 2975632 - DNA, 25 bp, Homo sapien
catgctttccctttgtgatgtgcaa

SEQ ID NO: 2975633 - DNA, 25 bp, Homo sapien
tttgctaaggcagagatctaagtga

SEQ ID NO: 2975634 - DNA, 25 bp, Homo sapien
taagtgatatcttcccaaacatgct

SEQ ID NO: 2975635 - DNA, 25 bp, Homo sapien
ttcaattgatgtcatccggtgtaac

SEQ ID NO: 2975636 - DNA, 25 bp, Homo sapien
gaaatgtgtattttacccatgtcgc

SEQ ID NO: 2975637 - DNA, 25 bp, Homo sapien
ctgatgcttaactggaaatgtgtat

SEQ ID NO: 2975638 - DNA, 25 bp, Homo sapien
actggaaatgtgtattttacccatg

SEQ ID NO: 2975639 - DNA, 25 bp, Homo sapien
atgtgtattttacccatgtcgcttg

SEQ ID NO: 2975640 - DNA, 25 bp, Homo sapien
taaacatgagttttactaatccagc

SEQ ID NO: 2975641 - DNA, 25 bp, Homo sapien
taattcacattagtattgcctggca

SEQ ID NO: 2975642 - DNA, 25 bp, Homo sapien
ttaggaacaaacctataaacatgag

SEQ ID NO: 2975643 - DNA, 25 bp, Homo sapien
tccttctaacgactttctgtaattc

SEQ ID NO: 2975644 - DNA, 25 bp, Homo sapien
aatctgagacatcaaattcctgtga

SEQ ID NO: 2975645 - DNA, 25 bp, Homo sapien
ggctgaggcgtcttctaaaaaacaa

SEQ ID NO: 2975646 - DNA, 25 bp, Homo sapien
gttccattctacaatcttacggaaa

SEQ ID NO: 2975647 - DNA, 25 bp, Homo sapien
ggcggctgaggcgtcttctaaaaaa

SEQ ID NO: 2975648 - DNA, 25 bp, Homo sapien
gttgcagtgaggccagatacgccac

SEQ ID NO: 2975649 - DNA, 25 bp, Homo sapien
actttagttctagggtacgtgcgca

SEQ ID NO: 2975650 - DNA, 25 bp, Homo sapien
tgaggccagatacgccactgcactc

SEQ ID NO: 2975651 - DNA, 25 bp, Homo sapien
aggttgcagtgaggccagatacgcc

SEQ ID NO: 2975652 - DNA, 25 bp, Homo sapien
gagcagttcatctctatagagttcg

SEQ ID NO: 2975653 - DNA, 25 bp, Homo sapien
aatagcttatttataggccaggcgc

SEQ ID NO: 2975654 - DNA, 25 bp, Homo sapien
tggcaccctcgtgaaataatcggct

SEQ ID NO: 2975655 - DNA, 25 bp, Homo sapien
gacctgccagcgttctatcactctg

SEQ ID NO: 2975656 - DNA, 25 bp, Homo sapien
aggacctagcaaggtatatccattt

SEQ ID NO: 2975657 - DNA, 25 bp, Homo sapien
caaggacctagcaaggtatatccat

SEQ ID NO: 2975658 - DNA, 25 bp, Homo sapien
ccaaggacctagcaaggtatatcca

SEQ ID NO: 2975659 - DNA, 25 bp, Homo sapien
aaggacctagcaaggtatatccatt

SEQ ID NO: 2975660 - DNA, 25 bp, Homo sapien
agccatggcacctggacttaaaggc

SEQ ID NO: 2975661 - DNA, 25 bp, Homo sapien
ccatggcacctggacttaaaggcat

SEQ ID NO: 2975662 - DNA, 25 bp, Homo sapien
ggcacctggacttaaaggcattttc

SEQ ID NO: 2975663 - DNA, 25 bp, Homo sapien
catggcacctggacttaaaggcatt

SEQ ID NO: 2975664 - DNA, 25 bp, Homo sapien
cttctcagtaatctttgagatatcc

SEQ ID NO: 2975665 - DNA, 25 bp, Homo sapien
catctttttcagaatcaggctctat

SEQ ID NO: 2975666 - DNA, 25 bp, Homo sapien
tggtctgctccttttgcagcatctg

SEQ ID NO: 2975667 - DNA, 25 bp, Homo sapien
gcagcatctgaaccttttacctcat

SEQ ID NO: 2975668 - DNA, 25 bp, Homo sapien
gcagtacctttcctgtggtgggacc

SEQ ID NO: 2975669 - DNA, 25 bp, Homo sapien
tgatccagtgcattcttatcacccc

SEQ ID NO: 2975670 - DNA, 25 bp, Homo sapien
tcaagaaaacacaacgcagtacctt

SEQ ID NO: 2975671 - DNA, 25 bp, Homo sapien
tgggaccctgatccagtgcattctt

SEQ ID NO: 2975672 - DNA, 25 bp, Homo sapien
cactgtcagaatctaagagctcctt

SEQ ID NO: 2975673 - DNA, 25 bp, Homo sapien
ccaacttgattttttcgagtcgctg

SEQ ID NO: 2975674 - DNA, 25 bp, Homo sapien
ccttgcagggtttatcactgtcaga

SEQ ID NO: 2975675 - DNA, 25 bp, Homo sapien
gaactctcctgacaatttacatgtg

SEQ ID NO: 2975676 - DNA, 25 bp, Homo sapien
cacagtttccagtggactcaccaga

SEQ ID NO: 2975677 - DNA, 25 bp, Homo sapien
tttctgggctccgaatggagacatc

SEQ ID NO: 2975678 - DNA, 25 bp, Homo sapien
gcactggctagtttagagtcatcga

SEQ ID NO: 2975679 - DNA, 25 bp, Homo sapien
tactggcaaggtcagagactttttc

SEQ ID NO: 2975680 - DNA, 25 bp, Homo sapien
ctaatttcttctgctgacttggttt

SEQ ID NO: 2975681 - DNA, 25 bp, Homo sapien
tctaatttcttctgctgacttggtt

SEQ ID NO: 2975682 - DNA, 25 bp, Homo sapien
aatttcttctgctgacttggttttt

SEQ ID NO: 2975683 - DNA, 25 bp, Homo sapien
ttcttctgctgacttggttttttac

SEQ ID NO: 2975684 - DNA, 25 bp, Homo sapien
ggtattttttagctttatttgatca

SEQ ID NO: 2975685 - DNA, 25 bp, Homo sapien
ttttagctttatttgatcactacat

SEQ ID NO: 2975686 - DNA, 25 bp, Homo sapien
cactacatttattaactggtctctc

SEQ ID NO: 2975687 - DNA, 25 bp, Homo sapien
tttgatcactacatttattaactgg

SEQ ID NO: 2975688 - DNA, 25 bp, Homo sapien
cagactctcgattttcattattctt

SEQ ID NO: 2975689 - DNA, 25 bp, Homo sapien
ttcttttcagactctcgattttcat

SEQ ID NO: 2975690 - DNA, 25 bp, Homo sapien
atttgaaatgtacttgttctctgtc

SEQ ID NO: 2975691 - DNA, 25 bp, Homo sapien
ctgtcctttcttttcagactctcga

SEQ ID NO: 2975692 - DNA, 25 bp, Homo sapien
tactctactctcagaaatttctttc

SEQ ID NO: 2975693 - DNA, 25 bp, Homo sapien
tcagaaatttctttcaagcattcac

SEQ ID NO: 2975694 - DNA, 25 bp, Homo sapien
ctctcagaaatttctttcaagcatt

SEQ ID NO: 2975695 - DNA, 25 bp, Homo sapien
actctactctcagaaatttctttca

SEQ ID NO: 2975696 - DNA, 25 bp, Homo sapien
tatattattaacctttggttcaaca

SEQ ID NO: 2975697 - DNA, 25 bp, Homo sapien
tttaacagtcaatgatttaatatca

SEQ ID NO: 2975698 - DNA, 25 bp, Homo sapien
ctttaacagtcaatgatttaatatc

SEQ ID NO: 2975699 - DNA, 25 bp, Homo sapien
ttccatgatgacatcaccattaatg

SEQ ID NO: 2975700 - DNA, 25 bp, Homo sapien
ttaatgaatggccttatagcagatt

SEQ ID NO: 2975701 - DNA, 25 bp, Homo sapien
caccattaatgaatggccttatagc

SEQ ID NO: 2975702 - DNA, 25 bp, Homo sapien
cttccatgatgacatcaccattaat

SEQ ID NO: 2975703 - DNA, 25 bp, Homo sapien
gcagggtctcaaggctatctcggta

SEQ ID NO: 2975704 - DNA, 25 bp, Homo sapien
tccaagtgatgccaaaggtcggtct

SEQ ID NO: 2975705 - DNA, 25 bp, Homo sapien
tgtaaccagtgtgcctcccgtggtg

SEQ ID NO: 2975706 - DNA, 25 bp, Homo sapien
cggtctaggagaaggatatggccat

SEQ ID NO: 2975707 - DNA, 25 bp, Homo sapien
tggaggagccttggccgccatatca

SEQ ID NO: 2975708 - DNA, 25 bp, Homo sapien
cagctaaggactttactgtctgaag

SEQ ID NO: 2975709 - DNA, 25 bp, Homo sapien
aaccgtaacatcaggctcactccag

SEQ ID NO: 2975710 - DNA, 25 bp, Homo sapien
tcaaacttgcccacagtaaccgtaa

SEQ ID NO: 2975711 - DNA, 25 bp, Homo sapien
gaatgccataaggaccaacatctct

SEQ ID NO: 2975712 - DNA, 25 bp, Homo sapien
tattcagatcgaatgccataaggac

SEQ ID NO: 2975713 - DNA, 25 bp, Homo sapien
ttttcctgatacaatattcagatcg

SEQ ID NO: 2975714 - DNA, 25 bp, Homo sapien
gaactccaatgggacaaatgatttt

SEQ ID NO: 2975715 - DNA, 25 bp, Homo sapien
tctgctacccaggtttcaataataa

SEQ ID NO: 2975716 - DNA, 25 bp, Homo sapien
gcttgggcgtttctggtctctttgg

SEQ ID NO: 2975717 - DNA, 25 bp, Homo sapien
tctctttggccgcagtgcacttgat

SEQ ID NO: 2975718 - DNA, 25 bp, Homo sapien
taacagggccagtttgcttgggcgt

SEQ ID NO: 2975719 - DNA, 25 bp, Homo sapien
cctgttgctcaactgcttgtgcctt

SEQ ID NO: 2975720 - DNA, 25 bp, Homo sapien
gttgctcaactgcttgtgccttttc

SEQ ID NO: 2975721 - DNA, 25 bp, Homo sapien
agcctgttgctcaactgcttgtgcc

SEQ ID NO: 2975722 - DNA, 25 bp, Homo sapien
cttagcctgttgctcaactgcttgt

SEQ ID NO: 2975723 - DNA, 25 bp, Homo sapien
gatgggaggtcaagtgcttttgttt

SEQ ID NO: 2975724 - DNA, 25 bp, Homo sapien
ctgctgatgggaggtcaagtgcttt

SEQ ID NO: 2975725 - DNA, 25 bp, Homo sapien
cctgctgatgggaggtcaagtgctt

SEQ ID NO: 2975726 - DNA, 25 bp, Homo sapien
tggccttgcttaacccatgtagcaa

SEQ ID NO: 2975727 - DNA, 25 bp, Homo sapien
ttaacccatgtagcaaaggtttgat

SEQ ID NO: 2975728 - DNA, 25 bp, Homo sapien
ccttgcttaacccatgtagcaaagg

SEQ ID NO: 2975729 - DNA, 25 bp, Homo sapien
gatggtgctggttgtactgcttgtt

SEQ ID NO: 2975730 - DNA, 25 bp, Homo sapien
ctgccatagtgactggattgcctgt

SEQ ID NO: 2975731 - DNA, 25 bp, Homo sapien
cctgtgctggcaatggttgtagcag

SEQ ID NO: 2975732 - DNA, 25 bp, Homo sapien
gaacgtctgacctgtgctggcaatg

SEQ ID NO: 2975733 - DNA, 25 bp, Homo sapien
gattgcctgtaatttggaacgtctg

SEQ ID NO: 2975734 - DNA, 25 bp, Homo sapien
ggtacctgtacttgatggaatgata

SEQ ID NO: 2975735 - DNA, 25 bp, Homo sapien
tgggcctaattgtgactgttgctgt

SEQ ID NO: 2975736 - DNA, 25 bp, Homo sapien
acctgtacttgatggaatgataccc

SEQ ID NO: 2975737 - DNA, 25 bp, Homo sapien
ctggtacctgtacttgatggaatga

SEQ ID NO: 2975738 - DNA, 25 bp, Homo sapien
tccaaatcagtactctgtcacagat

SEQ ID NO: 2975739 - DNA, 25 bp, Homo sapien
cagattcagtaataggcaaaggaaa

SEQ ID NO: 2975740 - DNA, 25 bp, Homo sapien
tgcacagcacacttccgtgggtggt

SEQ ID NO: 2975741 - DNA, 25 bp, Homo sapien
gatttcttagcgagcctgcacagca

SEQ ID NO: 2975742 - DNA, 25 bp, Homo sapien
tggagtggtgttctaatcacggtca

SEQ ID NO: 2975743 - DNA, 25 bp, Homo sapien
tcataccagggcgaatctgaggccc

SEQ ID NO: 2975744 - DNA, 25 bp, Homo sapien
catcacaggtgttcgaataattgcc

SEQ ID NO: 2975745 - DNA, 25 bp, Homo sapien
aataattgcctttcctagtgttgac

SEQ ID NO: 2975746 - DNA, 25 bp, Homo sapien
cctagactggctgttgagatgtaaa

SEQ ID NO: 2975747 - DNA, 25 bp, Homo sapien
caaatgcagagaattacgtatttcc

SEQ ID NO: 2975748 - DNA, 25 bp, Homo sapien
tatatttctcgtatgtagtgccaaa

SEQ ID NO: 2975749 - DNA, 25 bp, Homo sapien
tgtaaaatgataatgctggatggat

SEQ ID NO: 2975750 - DNA, 25 bp, Homo sapien
ataaatgaacatctggcactgcatt

SEQ ID NO: 2975751 - DNA, 25 bp, Homo sapien
attacaggggagagtcacctagcct

SEQ ID NO: 2975752 - DNA, 25 bp, Homo sapien
aggggagagtcacctagcctggcca

SEQ ID NO: 2975753 - DNA, 25 bp, Homo sapien
gtattctcattaagagtaataaatg

SEQ ID NO: 2975754 - DNA, 25 bp, Homo sapien
agttgatacatagtttaattgtggc

SEQ ID NO: 2975755 - DNA, 25 bp, Homo sapien
tgtggcttactatgctcctattaat

SEQ ID NO: 2975756 - DNA, 25 bp, Homo sapien
tttacactttaatatgacatgttac

SEQ ID NO: 2975757 - DNA, 25 bp, Homo sapien
gacatgttacttaattcataaagat

SEQ ID NO: 2975758 - DNA, 25 bp, Homo sapien
gcggcagggttgggtagttcatcat

SEQ ID NO: 2975759 - DNA, 25 bp, Homo sapien
cagggttgggtagttcatcatacaa

SEQ ID NO: 2975760 - DNA, 25 bp, Homo sapien
gcagggttgggtagttcatcataca

SEQ ID NO: 2975761 - DNA, 25 bp, Homo sapien
cggcagggttgggtagttcatcata

SEQ ID NO: 2975762 - DNA, 25 bp, Homo sapien
gcataacatagtgtggccaaggtct

SEQ ID NO: 2975763 - DNA, 25 bp, Homo sapien
gagaactcctatatcccagtgctat

SEQ ID NO: 2975764 - DNA, 25 bp, Homo sapien
taatttctgactgtactccgagggt

SEQ ID NO: 2975765 - DNA, 25 bp, Homo sapien
gatcacctggtacagatacattgcc

SEQ ID NO: 2975766 - DNA, 25 bp, Homo sapien
ggttattccaattcacactactgcc

SEQ ID NO: 2975767 - DNA, 25 bp, Homo sapien
tagtcctggtatatgttgtaacacg

SEQ ID NO: 2975768 - DNA, 25 bp, Homo sapien
attttaaaaaatgcggccagactag

SEQ ID NO: 2975769 - DNA, 25 bp, Homo sapien
tattcaggcaactgcaaatagtatc

SEQ ID NO: 2975770 - DNA, 25 bp, Homo sapien
tttgagtcatcacttgctgaggagc

SEQ ID NO: 2975771 - DNA, 25 bp, Homo sapien
ccccctgatgatttgagtcatcact

SEQ ID NO: 2975772 - DNA, 25 bp, Homo sapien
ttgagtcatcacttgctgaggagca

SEQ ID NO: 2975773 - DNA, 25 bp, Homo sapien
ctgcccaggtgttgaggaaaccgtg

SEQ ID NO: 2975774 - DNA, 25 bp, Homo sapien
tgcccaggtgttgaggaaaccgtgt

SEQ ID NO: 2975775 - DNA, 25 bp, Homo sapien
ccaggtgttgaggaaaccgtgttag

SEQ ID NO: 2975776 - DNA, 25 bp, Homo sapien
caggtgttgaggaaaccgtgttagg

SEQ ID NO: 2975777 - DNA, 25 bp, Homo sapien
gctgaagactgtatatttgaagtgg

SEQ ID NO: 2975778 - DNA, 25 bp, Homo sapien
tggacgttgctgaagttaagctttt

SEQ ID NO: 2975779 - DNA, 25 bp, Homo sapien
gaggctgaagactgtatatttgaag

SEQ ID NO: 2975780 - DNA, 25 bp, Homo sapien
agtggacgttgctgaagttaagctt

SEQ ID NO: 2975781 - DNA, 25 bp, Homo sapien
gccctgtgttaactgagtaagttga

SEQ ID NO: 2975782 - DNA, 25 bp, Homo sapien
tactactgtcaaaccttgattgcca

SEQ ID NO: 2975783 - DNA, 25 bp, Homo sapien
gtaccatttggcattgcagcttgca

SEQ ID NO: 2975784 - DNA, 25 bp, Homo sapien
tgaggtatcaactgcaactgtccag

SEQ ID NO: 2975785 - DNA, 25 bp, Homo sapien
ggagtacagtcaccccttgaggtat

SEQ ID NO: 2975786 - DNA, 25 bp, Homo sapien
tgttgttgccaatggggtaaagagg

SEQ ID NO: 2975787 - DNA, 25 bp, Homo sapien
ctgttgttgccaatggggtaaagag

SEQ ID NO: 2975788 - DNA, 25 bp, Homo sapien
tgttgccaatggggtaaagaggaat

SEQ ID NO: 2975789 - DNA, 25 bp, Homo sapien
ttgttgccaatggggtaaagaggaa

SEQ ID NO: 2975790 - DNA, 25 bp, Homo sapien
taacatccgacatttccgataaacc

SEQ ID NO: 2975791 - DNA, 25 bp, Homo sapien
tagtaacatccgacatttccgataa

SEQ ID NO: 2975792 - DNA, 25 bp, Homo sapien
tagtagtaacatccgacatttccga

SEQ ID NO: 2975793 - DNA, 25 bp, Homo sapien
gtgtagtagtaacatccgacatttc

SEQ ID NO: 2975794 - DNA, 25 bp, Homo sapien
tctcctgttggcctctgttagccca

SEQ ID NO: 2975795 - DNA, 25 bp, Homo sapien
tggttctcctgttggcctctgttag

SEQ ID NO: 2975796 - DNA, 25 bp, Homo sapien
tcctgttggcctctgttagcccagc

SEQ ID NO: 2975797 - DNA, 25 bp, Homo sapien
tgttggcctctgttagcccagccac

SEQ ID NO: 2975798 - DNA, 25 bp, Homo sapien
cttgaggcatatccttccaaaggta

SEQ ID NO: 2975799 - DNA, 25 bp, Homo sapien
tggcttgaggcatatccttccaaag

SEQ ID NO: 2975800 - DNA, 25 bp, Homo sapien
ggcatatccttccaaaggtaaatac

SEQ ID NO: 2975801 - DNA, 25 bp, Homo sapien
tgaggcatatccttccaaaggtaaa

SEQ ID NO: 2975802 - DNA, 25 bp, Homo sapien
cttcgagacgttgtgaggctgacta

SEQ ID NO: 2975803 - DNA, 25 bp, Homo sapien
taagaatagggtacaaaagcttcga

SEQ ID NO: 2975804 - DNA, 25 bp, Homo sapien
agggagtctgtaagaatagggtaca

SEQ ID NO: 2975805 - DNA, 25 bp, Homo sapien
gaggctgactatgtcaactgttgag

SEQ ID NO: 2975806 - DNA, 25 bp, Homo sapien
caaggagtaagtgtgggcatagtta

SEQ ID NO: 2975807 - DNA, 25 bp, Homo sapien
tgggcatagttaccaagataaccat

SEQ ID NO: 2975808 - DNA, 25 bp, Homo sapien
gactgaatcagcacctacaaggctt

SEQ ID NO: 2975809 - DNA, 25 bp, Homo sapien
cctacaaggcttagcaaggagtaag

SEQ ID NO: 2975810 - DNA, 25 bp, Homo sapien
ttgcagcagaaggtcaacaaagtgg

SEQ ID NO: 2975811 - DNA, 25 bp, Homo sapien
gcagcagaaggtcaacaaagtggtt

SEQ ID NO: 2975812 - DNA, 25 bp, Homo sapien
tgcagcagaaggtcaacaaagtggt

SEQ ID NO: 2975813 - DNA, 25 bp, Homo sapien
cagcagaaggtcaacaaagtggttc

SEQ ID NO: 2975814 - DNA, 25 bp, Homo sapien
aaggaaatcttctgaagttgagaat

SEQ ID NO: 2975815 - DNA, 25 bp, Homo sapien
ctgaaggaaatcttctgaagttgag

SEQ ID NO: 2975816 - DNA, 25 bp, Homo sapien
tgaagttgagaattctggccaggcg

SEQ ID NO: 2975817 - DNA, 25 bp, Homo sapien
ctgaagttgagaattctggccaggc

SEQ ID NO: 2975818 - DNA, 25 bp, Homo sapien
ggggtgacagtttactctgcctttg

SEQ ID NO: 2975819 - DNA, 25 bp, Homo sapien
tggggtgacagtttactctgccttt

SEQ ID NO: 2975820 - DNA, 25 bp, Homo sapien
ctggggtgacagtttactctgcctt

SEQ ID NO: 2975821 - DNA, 25 bp, Homo sapien
tctggggtgacagtttactctgcct

SEQ ID NO: 2975822 - DNA, 25 bp, Homo sapien
acccacacttgatgactgagctggt

SEQ ID NO: 2975823 - DNA, 25 bp, Homo sapien
cccacacttgatgactgagctggtg

SEQ ID NO: 2975824 - DNA, 25 bp, Homo sapien
ggacccacacttgatgactgagctg

SEQ ID NO: 2975825 - DNA, 25 bp, Homo sapien
gacccacacttgatgactgagctgg

SEQ ID NO: 2975826 - DNA, 25 bp, Homo sapien
acttcaggctgagtctgaacttcag

SEQ ID NO: 2975827 - DNA, 25 bp, Homo sapien
cagttgtttgggtctgaacttcagg

SEQ ID NO: 2975828 - DNA, 25 bp, Homo sapien
cttcagaagggacatgggatgaaac

SEQ ID NO: 2975829 - DNA, 25 bp, Homo sapien
gaacttcaggctgagtctgaacttc

SEQ ID NO: 2975830 - DNA, 25 bp, Homo sapien
agactgtccttggacattactttga

SEQ ID NO: 2975831 - DNA, 25 bp, Homo sapien
gaggctgagactgtgctgcaacttg

SEQ ID NO: 2975832 - DNA, 25 bp, Homo sapien
ctttggacacgaacaggagactgtc

SEQ ID NO: 2975833 - DNA, 25 bp, Homo sapien
caacttggggcttggatgactgtgc

SEQ ID NO: 2975834 - DNA, 25 bp, Homo sapien
tagtctgaacctgggattgttgtcc

SEQ ID NO: 2975835 - DNA, 25 bp, Homo sapien
tatgtggttgaattggaatcggttg

SEQ ID NO: 2975836 - DNA, 25 bp, Homo sapien
aatcggttgtgaggttgtagtctga

SEQ ID NO: 2975837 - DNA, 25 bp, Homo sapien
tggacgtattcgagtctgtgatgga

SEQ ID NO: 2975838 - DNA, 25 bp, Homo sapien
taacttgatttaaagtttgtcctga

SEQ ID NO: 2975839 - DNA, 25 bp, Homo sapien
tcctgatgaaagagtttgagttgaa

SEQ ID NO: 2975840 - DNA, 25 bp, Homo sapien
aaagagtttgagttgaagactgtac

SEQ ID NO: 2975841 - DNA, 25 bp, Homo sapien
aacttgatttaaagtttgtcctgat

SEQ ID NO: 2975842 - DNA, 25 bp, Homo sapien
gagaacctggacttgttgttgcagc

SEQ ID NO: 2975843 - DNA, 25 bp, Homo sapien
gctgaaccctttgcaactgctcttg

SEQ ID NO: 2975844 - DNA, 25 bp, Homo sapien
accactttgctgagcctgtatctga

SEQ ID NO: 2975845 - DNA, 25 bp, Homo sapien
cactttgattagaagcttggagggt

SEQ ID NO: 2975846 - DNA, 25 bp, Homo sapien
gattagcggatagacagacagtgta

SEQ ID NO: 2975847 - DNA, 25 bp, Homo sapien
gtctcccctatacaaagattagcgg

SEQ ID NO: 2975848 - DNA, 25 bp, Homo sapien
taacctggctatccttctccaaagg

SEQ ID NO: 2975849 - DNA, 25 bp, Homo sapien
tgctgggtaccgtgctaggctaagc

SEQ ID NO: 2975850 - DNA, 25 bp, Homo sapien
caggacagaataaatccaaaagcgc

SEQ ID NO: 2975851 - DNA, 25 bp, Homo sapien
cttcaggacagaataaatccaaaag

SEQ ID NO: 2975852 - DNA, 25 bp, Homo sapien
ggacagaataaatccaaaagcgcat

SEQ ID NO: 2975853 - DNA, 25 bp, Homo sapien
tcaggacagaataaatccaaaagcg

SEQ ID NO: 2975854 - DNA, 25 bp, Homo sapien
attacagcattatgcttcatcacca

SEQ ID NO: 2975855 - DNA, 25 bp, Homo sapien
ttcagctggagtcatgctctttttc

SEQ ID NO: 2975856 - DNA, 25 bp, Homo sapien
taaatgttctattacagcattatgc

SEQ ID NO: 2975857 - DNA, 25 bp, Homo sapien
tctttcagctggagtcatgctcttt

SEQ ID NO: 2975858 - DNA, 25 bp, Homo sapien
agatccttgtccaggagtgctctct

SEQ ID NO: 2975859 - DNA, 25 bp, Homo sapien
tctcttcacgcttccgtttttttgc

SEQ ID NO: 2975860 - DNA, 25 bp, Homo sapien
tgtccaggagtgctctcttcttcag

SEQ ID NO: 2975861 - DNA, 25 bp, Homo sapien
tgctctcttcttcaggatctcggct

SEQ ID NO: 2975862 - DNA, 25 bp, Homo sapien
agaagaaaaggatgtgccctcttac

SEQ ID NO: 2975863 - DNA, 25 bp, Homo sapien
ggaaaaaagcagaacctcagatgtt

SEQ ID NO: 2975864 - DNA, 25 bp, Homo sapien
ctgcactgctttttactctatgtac

SEQ ID NO: 2975865 - DNA, 25 bp, Homo sapien
tatgtacacaaatgtaagttctaga

SEQ ID NO: 2975866 - DNA, 25 bp, Homo sapien
aaagctgtgtaattatgtgtaaatt

SEQ ID NO: 2975867 - DNA, 25 bp, Homo sapien
tgaaatgcttgagataacctacttc

SEQ ID NO: 2975868 - DNA, 25 bp, Homo sapien
aatgcttgagataacctacttctct

SEQ ID NO: 2975869 - DNA, 25 bp, Homo sapien
gcttgagataacctacttctcttta

SEQ ID NO: 2975870 - DNA, 25 bp, Homo sapien
caagcaattctccccacctcagact

SEQ ID NO: 2975871 - DNA, 25 bp, Homo sapien
ttctccccacctcagactcctaact

SEQ ID NO: 2975872 - DNA, 25 bp, Homo sapien
agcaattctccccacctcagactcc

SEQ ID NO: 2975873 - DNA, 25 bp, Homo sapien
ctccccacctcagactcctaactag

SEQ ID NO: 2975874 - DNA, 25 bp, Homo sapien
agggcaatggcatgatttcgcatca

SEQ ID NO: 2975875 - DNA, 25 bp, Homo sapien
ggagggcaatggcatgatttcgcat

SEQ ID NO: 2975876 - DNA, 25 bp, Homo sapien
ttggagggcaatggcatgatttcgc

SEQ ID NO: 2975877 - DNA, 25 bp, Homo sapien
gggcaatggcatgatttcgcatcac

SEQ ID NO: 2975878 - DNA, 25 bp, Homo sapien
cttaacatatttgccagaacttcca

SEQ ID NO: 2975879 - DNA, 25 bp, Homo sapien
gggttttgatgtaataatcatacca

SEQ ID NO: 2975880 - DNA, 25 bp, Homo sapien
ttggcttaacatatttgccagaact

SEQ ID NO: 2975881 - DNA, 25 bp, Homo sapien
tgtaataatcataccacacataaaa

SEQ ID NO: 2975882 - DNA, 25 bp, Homo sapien
tgtgtggcacactttaaatgatgct

SEQ ID NO: 2975883 - DNA, 25 bp, Homo sapien
ggcaactgaccaacttttttataca

SEQ ID NO: 2975884 - DNA, 25 bp, Homo sapien
tagaatgtggaacggaaacagtgtg

SEQ ID NO: 2975885 - DNA, 25 bp, Homo sapien
ggtctcaaactcaaagcaaattacc

SEQ ID NO: 2975886 - DNA, 25 bp, Homo sapien
tctcattccgtcatgcagtggtgtc

SEQ ID NO: 2975887 - DNA, 25 bp, Homo sapien
ttttgcagggtcacccatccctatg

SEQ ID NO: 2975888 - DNA, 25 bp, Homo sapien
taagtgaatccctgaagctacagtt

SEQ ID NO: 2975889 - DNA, 25 bp, Homo sapien
caaggatttgcctaaagataaggtc

SEQ ID NO: 2975890 - DNA, 25 bp, Homo sapien
tacatgcgcccgccaccacactcgg

SEQ ID NO: 2975891 - DNA, 25 bp, Homo sapien
agccaccgtgccgggcacgtttcct

SEQ ID NO: 2975892 - DNA, 25 bp, Homo sapien
ctacatgcgcccgccaccacactcg

SEQ ID NO: 2975893 - DNA, 25 bp, Homo sapien
gtgagccaccgtgccgggcacgttt

SEQ ID NO: 2975894 - DNA, 25 bp, Homo sapien
ccaagtggctaggaagagcgtccct

SEQ ID NO: 2975895 - DNA, 25 bp, Homo sapien
tgcaaacaagagttttcttatatct

SEQ ID NO: 2975896 - DNA, 25 bp, Homo sapien
tgaagactaggtaagaacaactaga

SEQ ID NO: 2975897 - DNA, 25 bp, Homo sapien
tcagcctaacgtgagagttttagtt

SEQ ID NO: 2975898 - DNA, 25 bp, Homo sapien
gagccaactgcatcaggtctttttc

SEQ ID NO: 2975899 - DNA, 25 bp, Homo sapien
ttaattttcaggtctctcttcagct

SEQ ID NO: 2975900 - DNA, 25 bp, Homo sapien
tgtggcctgagccaactgcatcagg

SEQ ID NO: 2975901 - DNA, 25 bp, Homo sapien
tttcttaattttcaggtctctcttc

SEQ ID NO: 2975902 - DNA, 25 bp, Homo sapien
aggagctggtgtcactggggggcag

SEQ ID NO: 2975903 - DNA, 25 bp, Homo sapien
gctggtgtcactggggggcagggtg

SEQ ID NO: 2975904 - DNA, 25 bp, Homo sapien
gagctggtgtcactggggggcaggg

SEQ ID NO: 2975905 - DNA, 25 bp, Homo sapien
ctggtgtcactggggggcagggtgc

SEQ ID NO: 2975906 - DNA, 25 bp, Homo sapien
ctgggaagcagcaggtaaggtgggc

SEQ ID NO: 2975907 - DNA, 25 bp, Homo sapien
cagcaggtaaggtgggcgtggacag

SEQ ID NO: 2975908 - DNA, 25 bp, Homo sapien
gtgggcgtggacagaaggcctgtgt

SEQ ID NO: 2975909 - DNA, 25 bp, Homo sapien
aggcctgtgtgttgcacagcaggtg

SEQ ID NO: 2975910 - DNA, 25 bp, Homo sapien
tcataaggcgttttacagatacagt

SEQ ID NO: 2975911 - DNA, 25 bp, Homo sapien
tctttttcttggactttgagctgga

SEQ ID NO: 2975912 - DNA, 25 bp, Homo sapien
agtaaagctttgtgtccttcttagt

SEQ ID NO: 2975913 - DNA, 25 bp, Homo sapien
ttagattcatcataaggcgttttac

SEQ ID NO: 2975914 - DNA, 25 bp, Homo sapien
cagatcccagaaaggatgctctcca

SEQ ID NO: 2975915 - DNA, 25 bp, Homo sapien
ctagcgtcaatggtaagaatatcac

SEQ ID NO: 2975916 - DNA, 25 bp, Homo sapien
tattcgcagggctttgaacagatcc

SEQ ID NO: 2975917 - DNA, 25 bp, Homo sapien
ttttgggcaacagtaatacacctcc

SEQ ID NO: 2975918 - DNA, 25 bp, Homo sapien
agcaggggcaggatcacggccccct

SEQ ID NO: 2975919 - DNA, 25 bp, Homo sapien
agagcaggggcaggatcacggcccc

SEQ ID NO: 2975920 - DNA, 25 bp, Homo sapien
aggggcaggatcacggccccctgca

SEQ ID NO: 2975921 - DNA, 25 bp, Homo sapien
gcagagcaggggcaggatcacggcc

SEQ ID NO: 2975922 - DNA, 25 bp, Homo sapien
ttttgagctgcatggtacttaaatc

SEQ ID NO: 2975923 - DNA, 25 bp, Homo sapien
tacagtacaattcctcactgctgcc

SEQ ID NO: 2975924 - DNA, 25 bp, Homo sapien
tttacaatcattacagatgtacaca

SEQ ID NO: 2975925 - DNA, 25 bp, Homo sapien
tacaatcattacagatgtacacatc

SEQ ID NO: 2975926 - DNA, 25 bp, Homo sapien
ttctgcagatacagtacaattcctc

SEQ ID NO: 2975927 - DNA, 25 bp, Homo sapien
tttctatgttacatattgaagaatc

SEQ ID NO: 2975928 - DNA, 25 bp, Homo sapien
tctatgttacatattgaagaatcaa

SEQ ID NO: 2975929 - DNA, 25 bp, Homo sapien
taatttctatgttacatattgaaga

SEQ ID NO: 2975930 - DNA, 25 bp, Homo sapien
gaagaatcaaatctaccattaaacc

SEQ ID NO: 2975931 - DNA, 25 bp, Homo sapien
taaggaacggagcaccctcttcaac

SEQ ID NO: 2975932 - DNA, 25 bp, Homo sapien
cccatggtaccaattctgacaccga

SEQ ID NO: 2975933 - DNA, 25 bp, Homo sapien
catggtaccaattctgacaccgatc

SEQ ID NO: 2975934 - DNA, 25 bp, Homo sapien
ctgtaaggaacggagcaccctcttc

SEQ ID NO: 2975935 - DNA, 25 bp, Homo sapien
tctgtcaacaggtgggatgggttca

SEQ ID NO: 2975936 - DNA, 25 bp, Homo sapien
gctggcattgcaatcgcttctgtca

SEQ ID NO: 2975937 - DNA, 25 bp, Homo sapien
tattctgggccctacatgatgagcc

SEQ ID NO: 2975938 - DNA, 25 bp, Homo sapien
caataatggtactcaaaggctggtc

SEQ ID NO: 2975939 - DNA, 25 bp, Homo sapien
taacaccataataatctggtgcatc

SEQ ID NO: 2975940 - DNA, 25 bp, Homo sapien
cctcagcctccttagtagctgggta

SEQ ID NO: 2975941 - DNA, 25 bp, Homo sapien
gcctctcaggttcaactgatttttg

SEQ ID NO: 2975942 - DNA, 25 bp, Homo sapien
caggcacccgccaccacacccagct

SEQ ID NO: 2975943 - DNA, 25 bp, Homo sapien
tccttagtagctgggtacaggcacc

SEQ ID NO: 2975944 - DNA, 25 bp, Homo sapien
catgactggattgataagtgtccac

SEQ ID NO: 2975945 - DNA, 25 bp, Homo sapien
tgtaatagtacaggcaatatgcaga

SEQ ID NO: 2975946 - DNA, 25 bp, Homo sapien
tactgtcttaccattcatgactgga

SEQ ID NO: 2975947 - DNA, 25 bp, Homo sapien
gacacttagctcctaacacggttgg

SEQ ID NO: 2975948 - DNA, 25 bp, Homo sapien
cagagctttaaggtttttccaatgt

SEQ ID NO: 2975949 - DNA, 25 bp, Homo sapien
tccgaagttctaacaagtatatatg

SEQ ID NO: 2975950 - DNA, 25 bp, Homo sapien
caatgtgaatattctccgaagttct

SEQ ID NO: 2975951 - DNA, 25 bp, Homo sapien
gtttactgtgcaagcagtcctggag

SEQ ID NO: 2975952 - DNA, 25 bp, Homo sapien
ccgtcagcttttcataatatcgtct

SEQ ID NO: 2975953 - DNA, 25 bp, Homo sapien
gagtcacttggattgtagtaacgac

SEQ ID NO: 2975954 - DNA, 25 bp, Homo sapien
gaatgattcgagaacttctgcacac

SEQ ID NO: 2975955 - DNA, 25 bp, Homo sapien
ggtcatatctgccacaaattccgtc

SEQ ID NO: 2975956 - DNA, 25 bp, Homo sapien
tcagaataccgaacccatctgctca

SEQ ID NO: 2975957 - DNA, 25 bp, Homo sapien
agagtgtgaagagttgaattaattc

SEQ ID NO: 2975958 - DNA, 25 bp, Homo sapien
taccataaactgcactggttgaatc

SEQ ID NO: 2975959 - DNA, 25 bp, Homo sapien
ggttgaatcgttagacagaatagta

SEQ ID NO: 2975960 - DNA, 25 bp, Homo sapien
tgtttaagccctgctatggcaagga

SEQ ID NO: 2975961 - DNA, 25 bp, Homo sapien
tgtcattatttacgttactacgaaa

SEQ ID NO: 2975962 - DNA, 25 bp, Homo sapien
tctatagggtgattctaaaagtcga

SEQ ID NO: 2975963 - DNA, 25 bp, Homo sapien
tatggcaaggagaaccaagctcact

SEQ ID NO: 2975964 - DNA, 25 bp, Homo sapien
taaccacgtggcaagaagacatcct

SEQ ID NO: 2975965 - DNA, 25 bp, Homo sapien
ggctccctatgatcaatccctttga

SEQ ID NO: 2975966 - DNA, 25 bp, Homo sapien
tctacctcacagttaccaccaaagg

SEQ ID NO: 2975967 - DNA, 25 bp, Homo sapien
tgaaccagaggaataaccacgatgt

SEQ ID NO: 2975968 - DNA, 25 bp, Homo sapien
tcacaactttcattagtaaaccaaa

SEQ ID NO: 2975969 - DNA, 25 bp, Homo sapien
cagttaccaggactaagtcaaagga

SEQ ID NO: 2975970 - DNA, 25 bp, Homo sapien
ggtaatcacgaggtacaataaaaca

SEQ ID NO: 2975971 - DNA, 25 bp, Homo sapien
taaatacattgttcaacatggctgc

SEQ ID NO: 2975972 - DNA, 25 bp, Homo sapien
cataatagctcactggaaaaagcca

SEQ ID NO: 2975973 - DNA, 25 bp, Homo sapien
gccaactggacaaatagaggcattt

SEQ ID NO: 2975974 - DNA, 25 bp, Homo sapien
gaagcattaccattgtggtgaaagg

SEQ ID NO: 2975975 - DNA, 25 bp, Homo sapien
ttggcaagcgaatagaaaagaacga

SEQ ID NO: 2975976 - DNA, 25 bp, Homo sapien
acaatgatgctttatgcggatgcca

SEQ ID NO: 2975977 - DNA, 25 bp, Homo sapien
caatgatgctttatgcggatgccaa

SEQ ID NO: 2975978 - DNA, 25 bp, Homo sapien
tatgcggatgccaaggtcagtcagt

SEQ ID NO: 2975979 - DNA, 25 bp, Homo sapien
tgctttatgcggatgccaaggtcag

SEQ ID NO: 2975980 - DNA, 25 bp, Homo sapien
ttaagaagctgtagactgcagtttg

SEQ ID NO: 2975981 - DNA, 25 bp, Homo sapien
agaagctgtagactgcagtttgttg

SEQ ID NO: 2975982 - DNA, 25 bp, Homo sapien
agactgcagtttgttgttatgagac

SEQ ID NO: 2975983 - DNA, 25 bp, Homo sapien
agctgtagactgcagtttgttgtta

SEQ ID NO: 2975984 - DNA, 25 bp, Homo sapien
tctagaggtcgtcttgtacttttac

SEQ ID NO: 2975985 - DNA, 25 bp, Homo sapien
tttacctacaggaatcatgataaga

SEQ ID NO: 2975986 - DNA, 25 bp, Homo sapien
gatacagatgattatatgtaaccgg

SEQ ID NO: 2975987 - DNA, 25 bp, Homo sapien
caataaactcattgttgattcccag

SEQ ID NO: 2975988 - DNA, 25 bp, Homo sapien
ttattttgtttcatatacatccata

SEQ ID NO: 2975989 - DNA, 25 bp, Homo sapien
agaaaaattatctccatttattttg

SEQ ID NO: 2975990 - DNA, 25 bp, Homo sapien
ttgtttcatatacatccatagttga

SEQ ID NO: 2975991 - DNA, 25 bp, Homo sapien
ttttgtttcatatacatccatagtt

SEQ ID NO: 2975992 - DNA, 25 bp, Homo sapien
tggagaaatccaggcacaattagac

SEQ ID NO: 2975993 - DNA, 25 bp, Homo sapien
cagataatcattagcgcacattcaa

SEQ ID NO: 2975994 - DNA, 25 bp, Homo sapien
caattagactcttctgcctttcatg

SEQ ID NO: 2975995 - DNA, 25 bp, Homo sapien
cattagcgcacattcaaagacacct

SEQ ID NO: 2975996 - DNA, 25 bp, Homo sapien
gaataacctgtacacctgagcctgt

SEQ ID NO: 2975997 - DNA, 25 bp, Homo sapien
gaatcgggaactgtagcaacatctt

SEQ ID NO: 2975998 - DNA, 25 bp, Homo sapien
gcctacaggtaggaaagttcttgct

SEQ ID NO: 2975999 - DNA, 25 bp, Homo sapien
tagaagctattaccacaatgcagtg

SEQ ID NO: 2976000 - DNA, 25 bp, Homo sapien
gccaaggaaatctattgatgcaaat

SEQ ID NO: 2976001 - DNA, 25 bp, Homo sapien
tacttttagccaaggaaatctattg

SEQ ID NO: 2976002 - DNA, 25 bp, Homo sapien
aatgtatttataagcccaaggcctg

SEQ ID NO: 2976003 - DNA, 25 bp, Homo sapien
aggattgtgaacttggcaggtaaag

SEQ ID NO: 2976004 - DNA, 25 bp, Homo sapien
gcctccctgctcctagtaatgtatg

SEQ ID NO: 2976005 - DNA, 25 bp, Homo sapien
tactaaagggcttacttcaggcaaa

SEQ ID NO: 2976006 - DNA, 25 bp, Homo sapien
caatgacggctcacaagcaagcgaa

SEQ ID NO: 2976007 - DNA, 25 bp, Homo sapien
taaagagtactaaagggccagtgtg

SEQ ID NO: 2976008 - DNA, 25 bp, Homo sapien
gcaagagacttggacgtcggcaaca

SEQ ID NO: 2976009 - DNA, 25 bp, Homo sapien
tggcatttctggaccgcaagagact

SEQ ID NO: 2976010 - DNA, 25 bp, Homo sapien
gcatagctgcaactgtaatctcgaa

SEQ ID NO: 2976011 - DNA, 25 bp, Homo sapien
catgtaatgggtcctccttcagaag

SEQ ID NO: 2976012 - DNA, 25 bp, Homo sapien
cagatcttaggggtgaccagcagag

SEQ ID NO: 2976013 - DNA, 25 bp, Homo sapien
gagacgcgcgtggccacagatctta

SEQ ID NO: 2976014 - DNA, 25 bp, Homo sapien
ggtgaggattggaagggagacgcgc

SEQ ID NO: 2976015 - DNA, 25 bp, Homo sapien
agcagagggcgctgctccaaggtga

SEQ ID NO: 2976016 - DNA, 25 bp, Homo sapien
tagggtgtaatatggccctcgtgga

SEQ ID NO: 2976017 - DNA, 25 bp, Homo sapien
tcgtggaggcccttgctgagtttag

SEQ ID NO: 2976018 - DNA, 25 bp, Homo sapien
gacatctgggaatcttagggtgtaa

SEQ ID NO: 2976019 - DNA, 25 bp, Homo sapien
gacataagtcaaaggtggttccaaa

SEQ ID NO: 2976020 - DNA, 25 bp, Homo sapien
tcccatctgggtcgcgtgagattag

SEQ ID NO: 2976021 - DNA, 25 bp, Homo sapien
tgagaagccggatcctgtggtgacc

SEQ ID NO: 2976022 - DNA, 25 bp, Homo sapien
gcctaatggataaggcatcagcctc

SEQ ID NO: 2976023 - DNA, 25 bp, Homo sapien
aaatcacttgcctctcggcgcgaga

SEQ ID NO: 2976024 - DNA, 25 bp, Homo sapien
tagtaggaagtgaatgatactgagc

SEQ ID NO: 2976025 - DNA, 25 bp, Homo sapien
caatgttattgtcatgatcaccagg

SEQ ID NO: 2976026 - DNA, 25 bp, Homo sapien
gccagaccagactcagtagtaggaa

SEQ ID NO: 2976027 - DNA, 25 bp, Homo sapien
ttgggcccccggcagaaatagtagc

SEQ ID NO: 2976028 - DNA, 25 bp, Homo sapien
gttcaaagggtccacctcgactcag

SEQ ID NO: 2976029 - DNA, 25 bp, Homo sapien
tcgactcagctcaaagaccgtgtgg

SEQ ID NO: 2976030 - DNA, 25 bp, Homo sapien
gcctgggcttccacgggaggcgatg

SEQ ID NO: 2976031 - DNA, 25 bp, Homo sapien
cggctgtagggcgactgcgttcaaa

SEQ ID NO: 2976032 - DNA, 25 bp, Homo sapien
ttgaatctgtgaagacgggcagctg

SEQ ID NO: 2976033 - DNA, 25 bp, Homo sapien
cttgaatctgtgaagacgggcagct

SEQ ID NO: 2976034 - DNA, 25 bp, Homo sapien
tcttgaatctgtgaagacgggcagc

SEQ ID NO: 2976035 - DNA, 25 bp, Homo sapien
tgttgcggttttcctgcagcggaga

SEQ ID NO: 2976036 - DNA, 25 bp, Homo sapien
cacattgacctctattctgcgacgc

SEQ ID NO: 2976037 - DNA, 25 bp, Homo sapien
gttgttgcggttttcctgcagcgga

SEQ ID NO: 2976038 - DNA, 25 bp, Homo sapien
ctggttgttgcggttttcctgcagc

SEQ ID NO: 2976039 - DNA, 25 bp, Homo sapien
tttccacattgctgctatttatgcc

SEQ ID NO: 2976040 - DNA, 25 bp, Homo sapien
ggagctgattttccacattgctgct

SEQ ID NO: 2976041 - DNA, 25 bp, Homo sapien
cagcttgagtagcttggagctgatt

SEQ ID NO: 2976042 - DNA, 25 bp, Homo sapien
cattgctgctatttatgcctttgac

SEQ ID NO: 2976043 - DNA, 25 bp, Homo sapien
aactgaatgggactacaatcagttc

SEQ ID NO: 2976044 - DNA, 25 bp, Homo sapien
aaactgaatgggactacaatcagtt

SEQ ID NO: 2976045 - DNA, 25 bp, Homo sapien
gagtgcccaagcagattcaaactga

SEQ ID NO: 2976046 - DNA, 25 bp, Homo sapien
actgaatgggactacaatcagttct

SEQ ID NO: 2976047 - DNA, 25 bp, Homo sapien
gccaacagagaaatgaatgctggga

SEQ ID NO: 2976048 - DNA, 25 bp, Homo sapien
tctaccacagccttggtttgttctg

SEQ ID NO: 2976049 - DNA, 25 bp, Homo sapien
ctaccacagccttggtttgttctga

SEQ ID NO: 2976050 - DNA, 25 bp, Homo sapien
gggatggcacctccatctaccacag

SEQ ID NO: 2976051 - DNA, 25 bp, Homo sapien
tttcctagagcccagacagcttgtt

SEQ ID NO: 2976052 - DNA, 25 bp, Homo sapien
gagcccagacagcttgttcactgat

SEQ ID NO: 2976053 - DNA, 25 bp, Homo sapien
tgcaatgtttcctagagcccagaca

SEQ ID NO: 2976054 - DNA, 25 bp, Homo sapien
ctgcaatgtttcctagagcccagac

SEQ ID NO: 2976055 - DNA, 25 bp, Homo sapien
tgctgcctttgtaaagacgacactt

SEQ ID NO: 2976056 - DNA, 25 bp, Homo sapien
aagacgacactttcattcctaataa

SEQ ID NO: 2976057 - DNA, 25 bp, Homo sapien
aaacttacttagatggccctctgct

SEQ ID NO: 2976058 - DNA, 25 bp, Homo sapien
ttcagtgactgaatgcaccagcaaa

SEQ ID NO: 2976059 - DNA, 25 bp, Homo sapien
aaccaagtctcggaacactgagcca

SEQ ID NO: 2976060 - DNA, 25 bp, Homo sapien
aagtctcggaacactgagccatcac

SEQ ID NO: 2976061 - DNA, 25 bp, Homo sapien
tgcaccgtacttaataaccaagtct

SEQ ID NO: 2976062 - DNA, 25 bp, Homo sapien
agtgggtcaactgcaccgtacttaa

SEQ ID NO: 2976063 - DNA, 25 bp, Homo sapien
ctgttttcaccaccatgccaattcg

SEQ ID NO: 2976064 - DNA, 25 bp, Homo sapien
accaccatgccaattcgttcatttg

SEQ ID NO: 2976065 - DNA, 25 bp, Homo sapien
tttcaccaccatgccaattcgttca

SEQ ID NO: 2976066 - DNA, 25 bp, Homo sapien
caccatgccaattcgttcatttgga

SEQ ID NO: 2976067 - DNA, 25 bp, Homo sapien
gtatctggtcctggcggccggctgt

SEQ ID NO: 2976068 - DNA, 25 bp, Homo sapien
gagagaacactgacaaggaatggga

SEQ ID NO: 2976069 - DNA, 25 bp, Homo sapien
tgtccacgtagcttccttctgaatg

SEQ ID NO: 2976070 - DNA, 25 bp, Homo sapien
cactgacaaggaatgggactaatcc

SEQ ID NO: 2976071 - DNA, 25 bp, Homo sapien
caacggttctattatgccacagtga

SEQ ID NO: 2976072 - DNA, 25 bp, Homo sapien
caactgttccaccactggtatagtt

SEQ ID NO: 2976073 - DNA, 25 bp, Homo sapien
ttaagaggttcatcaacggttctat

SEQ ID NO: 2976074 - DNA, 25 bp, Homo sapien
tggtatagttggtcacggcccacac

SEQ ID NO: 2976075 - DNA, 25 bp, Homo sapien
tgtatcaaaatcatgcgggcaactt

SEQ ID NO: 2976076 - DNA, 25 bp, Homo sapien
tacaatcagtagtagctcccaacct

SEQ ID NO: 2976077 - DNA, 25 bp, Homo sapien
ttttagcactacttcaactggagcc

SEQ ID NO: 2976078 - DNA, 25 bp, Homo sapien
caactggagccaaagatcttacaat

SEQ ID NO: 2976079 - DNA, 25 bp, Homo sapien
tctcaattaagcttaacgaagcctt

SEQ ID NO: 2976080 - DNA, 25 bp, Homo sapien
ctacagagaaatacttctcaattaa

SEQ ID NO: 2976081 - DNA, 25 bp, Homo sapien
attaagcttaacgaagccttataca

SEQ ID NO: 2976082 - DNA, 25 bp, Homo sapien
aagcttaacgaagccttatacacag

SEQ ID NO: 2976083 - DNA, 25 bp, Homo sapien
gcagcctacctgaagtctgtattta

SEQ ID NO: 2976084 - DNA, 25 bp, Homo sapien
gaaaagactgtattaggcccagagc

SEQ ID NO: 2976085 - DNA, 25 bp, Homo sapien
taagtattccaagcagcagcctacc

SEQ ID NO: 2976086 - DNA, 25 bp, Homo sapien
ctaggtcttgatctgcatattacac

SEQ ID NO: 2976087 - DNA, 25 bp, Homo sapien
cctgaacttggaaagtgtagccttc

SEQ ID NO: 2976088 - DNA, 25 bp, Homo sapien
ggaaattccacatagaaattagaaa

SEQ ID NO: 2976089 - DNA, 25 bp, Homo sapien
taggaaattccacatagaaattaga

SEQ ID NO: 2976090 - DNA, 25 bp, Homo sapien
ataggaaattccacatagaaattag

SEQ ID NO: 2976091 - DNA, 25 bp, Homo sapien
aggaaattccacatagaaattagaa

SEQ ID NO: 2976092 - DNA, 25 bp, Homo sapien
tctgacaaggtttccaatggctcct

SEQ ID NO: 2976093 - DNA, 25 bp, Homo sapien
ttttggcaagctccagcaagggtgg

SEQ ID NO: 2976094 - DNA, 25 bp, Homo sapien
tgaaaagcctggaacgcacgaactg

SEQ ID NO: 2976095 - DNA, 25 bp, Homo sapien
tttaagagggttcgatgcatacacc

SEQ ID NO: 2976096 - DNA, 25 bp, Homo sapien
tgtgggacttgcctctctgagacct

SEQ ID NO: 2976097 - DNA, 25 bp, Homo sapien
agactttccttctgcggcagcgaag

SEQ ID NO: 2976098 - DNA, 25 bp, Homo sapien
ttgccaaacgagatataagcccttg

SEQ ID NO: 2976099 - DNA, 25 bp, Homo sapien
gcttgcagggaaactgtgaactcct

SEQ ID NO: 2976100 - DNA, 25 bp, Homo sapien
aggacgttgcccctttgccacatgc

SEQ ID NO: 2976101 - DNA, 25 bp, Homo sapien
gagtccgcttccgtgggcccacttg

SEQ ID NO: 2976102 - DNA, 25 bp, Homo sapien
ttgccacatgcaaccagcttgctct

SEQ ID NO: 2976103 - DNA, 25 bp, Homo sapien
agtccgcttccgtgggcccacttgt

SEQ ID NO: 2976104 - DNA, 25 bp, Homo sapien
cttctttccccccagatactgtgag

SEQ ID NO: 2976105 - DNA, 25 bp, Homo sapien
gagtgtccaggacatatggactttt

SEQ ID NO: 2976106 - DNA, 25 bp, Homo sapien
ccccccagatactgtgagtgggaag

SEQ ID NO: 2976107 - DNA, 25 bp, Homo sapien
gacttttgagatctgcccagtgtca

SEQ ID NO: 2976108 - DNA, 25 bp, Homo sapien
ccaacagccataagccaattccatg

SEQ ID NO: 2976109 - DNA, 25 bp, Homo sapien
caacagccataagccaattccatgt

SEQ ID NO: 2976110 - DNA, 25 bp, Homo sapien
tatcattaatcgcttccagagatct

SEQ ID NO: 2976111 - DNA, 25 bp, Homo sapien
atcattaatcgcttccagagatctt

SEQ ID NO: 2976112 - DNA, 25 bp, Homo sapien
aattttatcattaatcgcttccaga

SEQ ID NO: 2976113 - DNA, 25 bp, Homo sapien
ttttatcattaatcgcttccagaga

SEQ ID NO: 2976114 - DNA, 25 bp, Homo sapien
cagtgtttatcctacatttatataa

SEQ ID NO: 2976115 - DNA, 25 bp, Homo sapien
cagaaataaatcactggctgggtgc

SEQ ID NO: 2976116 - DNA, 25 bp, Homo sapien
taagattagggaaagcagaattaca

SEQ ID NO: 2976117 - DNA, 25 bp, Homo sapien
ttaaaacatttcagtagagagctac

SEQ ID NO: 2976118 - DNA, 25 bp, Homo sapien
aaactatcaagtcctaagtatgatg

SEQ ID NO: 2976119 - DNA, 25 bp, Homo sapien
taaacattcaaactctagttataag

SEQ ID NO: 2976120 - DNA, 25 bp, Homo sapien
caaattccacaaaaactatcaagtc

SEQ ID NO: 2976121 - DNA, 25 bp, Homo sapien
cctaagtatgatgtgcaagagatta

SEQ ID NO: 2976122 - DNA, 25 bp, Homo sapien
ctccggctgagcaacagagggtgat

SEQ ID NO: 2976123 - DNA, 25 bp, Homo sapien
acagagggtgatcttgtctctaagt

SEQ ID NO: 2976124 - DNA, 25 bp, Homo sapien
gcactccggctgagcaacagagggt

SEQ ID NO: 2976125 - DNA, 25 bp, Homo sapien
cggctgagcaacagagggtgatctt

SEQ ID NO: 2976126 - DNA, 25 bp, Homo sapien
aacattctagaaatgtgctgcctca

SEQ ID NO: 2976127 - DNA, 25 bp, Homo sapien
gctgcctcatgtactcatttctttt

SEQ ID NO: 2976128 - DNA, 25 bp, Homo sapien
gtaagacaaacttagttgattctct

SEQ ID NO: 2976129 - DNA, 25 bp, Homo sapien
tctagaaatgtgctgcctcatgtac

SEQ ID NO: 2976130 - DNA, 25 bp, Homo sapien
tattagagtcacaaagtatcatcct

SEQ ID NO: 2976131 - DNA, 25 bp, Homo sapien
gtctggtagatttattagagtcaca

SEQ ID NO: 2976132 - DNA, 25 bp, Homo sapien
tccaccctcacggagttgtcatcac

SEQ ID NO: 2976133 - DNA, 25 bp, Homo sapien
ccttgttgctgaaatgatgagagat

SEQ ID NO: 2976134 - DNA, 25 bp, Homo sapien
tgagagatgtataatctccaccctc

SEQ ID NO: 2976135 - DNA, 25 bp, Homo sapien
aaatgatgagagatgtataatctcc

SEQ ID NO: 2976136 - DNA, 25 bp, Homo sapien
aactatgtcaacaattggatgtact

SEQ ID NO: 2976137 - DNA, 25 bp, Homo sapien
aaactatgtcaacaattggatgtac

SEQ ID NO: 2976138 - DNA, 25 bp, Homo sapien
actatgtcaacaattggatgtactc

SEQ ID NO: 2976139 - DNA, 25 bp, Homo sapien
ctatgtcaacaattggatgtactca

SEQ ID NO: 2976140 - DNA, 25 bp, Homo sapien
gtgaattgaaacaaagttaatccca

SEQ ID NO: 2976141 - DNA, 25 bp, Homo sapien
tgtgaattgaaacaaagttaatccc

SEQ ID NO: 2976142 - DNA, 25 bp, Homo sapien
ctgtgaattgaaacaaagttaatcc

SEQ ID NO: 2976143 - DNA, 25 bp, Homo sapien
gactgctccgagacctatgtgcaag

SEQ ID NO: 2976144 - DNA, 25 bp, Homo sapien
gaaacccttctccatgggcatgcct

SEQ ID NO: 2976145 - DNA, 25 bp, Homo sapien
aaagaggccgccgttctctgcagtg

SEQ ID NO: 2976146 - DNA, 25 bp, Homo sapien
gcattgagctgactactgagccgga

SEQ ID NO: 2976147 - DNA, 25 bp, Homo sapien
taagaaaaggactagggtgggcaca

SEQ ID NO: 2976148 - DNA, 25 bp, Homo sapien
attaataatgcttggctacttatat

SEQ ID NO: 2976149 - DNA, 25 bp, Homo sapien
tttcattaaagaacaactccctctc

SEQ ID NO: 2976150 - DNA, 25 bp, Homo sapien
tgctccctacttggtgatttgcccc

SEQ ID NO: 2976151 - DNA, 25 bp, Homo sapien
cacaccctgtgtattgtgctcccta

SEQ ID NO: 2976152 - DNA, 25 bp, Homo sapien
tcgagatttggccaatgcaatctgt

SEQ ID NO: 2976153 - DNA, 25 bp, Homo sapien
tgtttccacatgatgagattcaagg

SEQ ID NO: 2976154 - DNA, 25 bp, Homo sapien
cacagaatccaatcaaagattaggc

SEQ ID NO: 2976155 - DNA, 25 bp, Homo sapien
tgcaggtggctcataatgctaagtt

SEQ ID NO: 2976156 - DNA, 25 bp, Homo sapien
tatccttcctgcctcgtgattgcag

SEQ ID NO: 2976157 - DNA, 25 bp, Homo sapien
gaagatcagagacctctattggacc

SEQ ID NO: 2976158 - DNA, 25 bp, Homo sapien
ctattggacccaaaggaatactagt

SEQ ID NO: 2976159 - DNA, 25 bp, Homo sapien
taggttacggttctgggtacattca

SEQ ID NO: 2976160 - DNA, 25 bp, Homo sapien
cacagtcttaatgtggccctaataa

SEQ ID NO: 2976161 - DNA, 25 bp, Homo sapien
taggtgagtcaactcccggccttgg

SEQ ID NO: 2976162 - DNA, 25 bp, Homo sapien
ccaggcgggagtataagcccaagcc

SEQ ID NO: 2976163 - DNA, 25 bp, Homo sapien
caagtgcaggatccgggaagcttcc

SEQ ID NO: 2976164 - DNA, 25 bp, Homo sapien
gagaccgacatccagtaggtgagtc

SEQ ID NO: 2976165 - DNA, 25 bp, Homo sapien
tgcagaagctggagggccgccgcct

SEQ ID NO: 2976166 - DNA, 25 bp, Homo sapien
ctgcagaagctggagggccgccgcc

SEQ ID NO: 2976167 - DNA, 25 bp, Homo sapien
gcagaagctggagggccgccgcctg

SEQ ID NO: 2976168 - DNA, 25 bp, Homo sapien
agaagctggagggccgccgcctgga

SEQ ID NO: 2976169 - DNA, 25 bp, Homo sapien
gacgagtccaacttcagcgatgcac

SEQ ID NO: 2976170 - DNA, 25 bp, Homo sapien
aagaatcatgaactcgaggcggcgc

SEQ ID NO: 2976171 - DNA, 25 bp, Homo sapien
tgcctgatccgccatgggaaggagc

SEQ ID NO: 2976172 - DNA, 25 bp, Homo sapien
gaagcagttctacaaggcgagccaa

SEQ ID NO: 2976173 - DNA, 25 bp, Homo sapien
aagtaagtagaccagctcatttgtc

SEQ ID NO: 2976174 - DNA, 25 bp, Homo sapien
acaaagtaagtagaccagctcattt

SEQ ID NO: 2976175 - DNA, 25 bp, Homo sapien
atacaaagtaagtagaccagctcat

SEQ ID NO: 2976176 - DNA, 25 bp, Homo sapien
tttatatacaaagtaagtagaccag

SEQ ID NO: 2976177 - DNA, 25 bp, Homo sapien
taacaatggatggagaatatttggg

SEQ ID NO: 2976178 - DNA, 25 bp, Homo sapien
cttacccagcctcacttagcataat

SEQ ID NO: 2976179 - DNA, 25 bp, Homo sapien
tgttgttgcacctccatatctgcag

SEQ ID NO: 2976180 - DNA, 25 bp, Homo sapien
tttgagattatgctaccatccatgt

SEQ ID NO: 2976181 - DNA, 25 bp, Homo sapien
ggtattgggcttcatatcatgaatg

SEQ ID NO: 2976182 - DNA, 25 bp, Homo sapien
aagccaaaattgaagtagtcacatg

SEQ ID NO: 2976183 - DNA, 25 bp, Homo sapien
aattttggtattgggcttcatatca

SEQ ID NO: 2976184 - DNA, 25 bp, Homo sapien
caaaattgaagtagtcacatgtcct

SEQ ID NO: 2976185 - DNA, 25 bp, Homo sapien
catgagatgacttatgctcttttaa

SEQ ID NO: 2976186 - DNA, 25 bp, Homo sapien
taagtgtaagttctactcttaagta

SEQ ID NO: 2976187 - DNA, 25 bp, Homo sapien
gcagaggaagagaaccgtgttgaaa

SEQ ID NO: 2976188 - DNA, 25 bp, Homo sapien
gaactgccggcattaatatatctgt

SEQ ID NO: 2976189 - DNA, 25 bp, Homo sapien
ctagttctgacctatggcatgggca

SEQ ID NO: 2976190 - DNA, 25 bp, Homo sapien
taaggtacaaagaggccaagagact

SEQ ID NO: 2976191 - DNA, 25 bp, Homo sapien
taaactctgcatatgagcaggaatc

SEQ ID NO: 2976192 - DNA, 25 bp, Homo sapien
tgcaatttactaacagaactgagct

SEQ ID NO: 2976193 - DNA, 25 bp, Homo sapien
ggtataagacaaacctccatggcaa

SEQ ID NO: 2976194 - DNA, 25 bp, Homo sapien
ggcactgaagttgtgaaatcctgtt

SEQ ID NO: 2976195 - DNA, 25 bp, Homo sapien
tccatggcaaagaattatagagtcc

SEQ ID NO: 2976196 - DNA, 25 bp, Homo sapien
caaatacaagtccaaacgtttagag

SEQ ID NO: 2976197 - DNA, 25 bp, Homo sapien
gagccacctaaagaggtagaatcct

SEQ ID NO: 2976198 - DNA, 25 bp, Homo sapien
tccagagttccctcagtaggtggaa

SEQ ID NO: 2976199 - DNA, 25 bp, Homo sapien
ggtggaaccatctctaactcagcaa

SEQ ID NO: 2976200 - DNA, 25 bp, Homo sapien
tagggtgatagaaccctctctgacc

SEQ ID NO: 2976201 - DNA, 25 bp, Homo sapien
aaaaattctaacagcttcaggagtt

SEQ ID NO: 2976202 - DNA, 25 bp, Homo sapien
aacagcttcaggagttttctgaagg

SEQ ID NO: 2976203 - DNA, 25 bp, Homo sapien
taacagcttcaggagttttctgaag

SEQ ID NO: 2976204 - DNA, 25 bp, Homo sapien
actaaaaattctaacagcttcagga

SEQ ID NO: 2976205 - DNA, 25 bp, Homo sapien
gagaccagagaggaaacaagcccac

SEQ ID NO: 2976206 - DNA, 25 bp, Homo sapien
cttgaaggcgatggatggaagaact

SEQ ID NO: 2976207 - DNA, 25 bp, Homo sapien
ctgacacttgaaggcgatggatgga

SEQ ID NO: 2976208 - DNA, 25 bp, Homo sapien
tgtccaaccggaagccgcctgacac

SEQ ID NO: 2976209 - DNA, 25 bp, Homo sapien
ccagcttgggtttttgataggaatc

SEQ ID NO: 2976210 - DNA, 25 bp, Homo sapien
atctgtcctcttgccccaaactgca

SEQ ID NO: 2976211 - DNA, 25 bp, Homo sapien
atggcctgtggcgtccatctgtcct

SEQ ID NO: 2976212 - DNA, 25 bp, Homo sapien
catactttatttaacaccctgttag

SEQ ID NO: 2976213 - DNA, 25 bp, Homo sapien
ctctgggcaaacgagaaaaggatga

SEQ ID NO: 2976214 - DNA, 25 bp, Homo sapien
tcagccatggacaattactgtattt

SEQ ID NO: 2976215 - DNA, 25 bp, Homo sapien
tggcaaagttatcttcgggaagatg

SEQ ID NO: 2976216 - DNA, 25 bp, Homo sapien
ggtgccaccggtgagtcttctctgg

SEQ ID NO: 2976217 - DNA, 25 bp, Homo sapien
ctctctgtagggtgggcgctgtggc

SEQ ID NO: 2976218 - DNA, 25 bp, Homo sapien
tcctctctgtagggtgggcgctgtg

SEQ ID NO: 2976219 - DNA, 25 bp, Homo sapien
cctctctgtagggtgggcgctgtgg

SEQ ID NO: 2976220 - DNA, 25 bp, Homo sapien
cctgggatttctccggtccagccat

SEQ ID NO: 2976221 - DNA, 25 bp, Homo sapien
acctaactcaaaggcgagttctgta

SEQ ID NO: 2976222 - DNA, 25 bp, Homo sapien
agttctgtataaaggctcagggaag

SEQ ID NO: 2976223 - DNA, 25 bp, Homo sapien
gtaccacaatttgttattaattcag

SEQ ID NO: 2976224 - DNA, 25 bp, Homo sapien
tataatgccctaactagaatataca

SEQ ID NO: 2976225 - DNA, 25 bp, Homo sapien
ataaactgtgcatataccgagatta

SEQ ID NO: 2976226 - DNA, 25 bp, Homo sapien
aactgtgcatataccgagattacaa

SEQ ID NO: 2976227 - DNA, 25 bp, Homo sapien
tgtgcatataccgagattacaattt

SEQ ID NO: 2976228 - DNA, 25 bp, Homo sapien
tgcatataccgagattacaatttgg

SEQ ID NO: 2976229 - DNA, 25 bp, Homo sapien
ttccccacttctgaatctacctgat

SEQ ID NO: 2976230 - DNA, 25 bp, Homo sapien
cccacttctgaatctacctgatgct

SEQ ID NO: 2976231 - DNA, 25 bp, Homo sapien
cacttctgaatctacctgatgctgg

SEQ ID NO: 2976232 - DNA, 25 bp, Homo sapien
ggttctcaaccatgctccactcatg

SEQ ID NO: 2976233 - DNA, 25 bp, Homo sapien
acttcctgtacatgagtcgctgctg

SEQ ID NO: 2976234 - DNA, 25 bp, Homo sapien
tcttagtattgaaaccctgaaacgc

SEQ ID NO: 2976235 - DNA, 25 bp, Homo sapien
gcagggaattcttagtattgaaacc

SEQ ID NO: 2976236 - DNA, 25 bp, Homo sapien
cctgaaacgccgacttcctgtacat

SEQ ID NO: 2976237 - DNA, 25 bp, Homo sapien
gagccagaaaccgagtcccaagtct

SEQ ID NO: 2976238 - DNA, 25 bp, Homo sapien
aagtctcagctctaactgagtatta

SEQ ID NO: 2976239 - DNA, 25 bp, Homo sapien
ctcagctctaactgagtattatggg

SEQ ID NO: 2976240 - DNA, 25 bp, Homo sapien
tcaggagccagaaaccgagtcccaa

SEQ ID NO: 2976241 - DNA, 25 bp, Homo sapien
caccttctcaggactccagttgagt

SEQ ID NO: 2976242 - DNA, 25 bp, Homo sapien
ccttctcaggactccagttgagttg

SEQ ID NO: 2976243 - DNA, 25 bp, Homo sapien
accttctcaggactccagttgagtt

SEQ ID NO: 2976244 - DNA, 25 bp, Homo sapien
cttctcaggactccagttgagttgg

SEQ ID NO: 2976245 - DNA, 25 bp, Homo sapien
aggatgcttcgaccttgttctgatg

SEQ ID NO: 2976246 - DNA, 25 bp, Homo sapien
caggatgcttcgaccttgttctgat

SEQ ID NO: 2976247 - DNA, 25 bp, Homo sapien
ggatgcttcgaccttgttctgatgc

SEQ ID NO: 2976248 - DNA, 25 bp, Homo sapien
ataagatcaggtcgaatggtgggcc

SEQ ID NO: 2976249 - DNA, 25 bp, Homo sapien
tgcttacaggcacaggctttagagt

SEQ ID NO: 2976250 - DNA, 25 bp, Homo sapien
ccacaggaaataagatcaggtcgaa

SEQ ID NO: 2976251 - DNA, 25 bp, Homo sapien
tgggcctagtgcaagtgcttacagg

SEQ ID NO: 2976252 - DNA, 25 bp, Homo sapien
tggtctctgataccgtccacctcgg

SEQ ID NO: 2976253 - DNA, 25 bp, Homo sapien
tgttcttgccaaaggaagattggct

SEQ ID NO: 2976254 - DNA, 25 bp, Homo sapien
gcatccgcagccactggtctctgat

SEQ ID NO: 2976255 - DNA, 25 bp, Homo sapien
gcttggaatctctgctgctcttgga

SEQ ID NO: 2976256 - DNA, 25 bp, Homo sapien
gccaagtcacgggaagagccgagtt

SEQ ID NO: 2976257 - DNA, 25 bp, Homo sapien
gtcaccaggagtttgccactgggct

SEQ ID NO: 2976258 - DNA, 25 bp, Homo sapien
cagcagcttgacccaggtcaccagg

SEQ ID NO: 2976259 - DNA, 25 bp, Homo sapien
tgccactgggctgtccctaggctgg

SEQ ID NO: 2976260 - DNA, 25 bp, Homo sapien
tgcttggcagtgttcagcgcacatt

SEQ ID NO: 2976261 - DNA, 25 bp, Homo sapien
gtgcttggcagtgttcagcgcacat

SEQ ID NO: 2976262 - DNA, 25 bp, Homo sapien
gcttggcagtgttcagcgcacattc

SEQ ID NO: 2976263 - DNA, 25 bp, Homo sapien
cactggcaggatgtcagcccaggag

SEQ ID NO: 2976264 - DNA, 25 bp, Homo sapien
cattgttcgtcgttgctgttctggc

SEQ ID NO: 2976265 - DNA, 25 bp, Homo sapien
cattcccgcaggataggaacagtcg

SEQ ID NO: 2976266 - DNA, 25 bp, Homo sapien
tggggcttctttgtcggtctcctcc

SEQ ID NO: 2976267 - DNA, 25 bp, Homo sapien
tgcttgcaacttaggacccaatgaa

SEQ ID NO: 2976268 - DNA, 25 bp, Homo sapien
gatgtcctagttccagttagctgac

SEQ ID NO: 2976269 - DNA, 25 bp, Homo sapien
tacagcaaccagtctagaaagtcaa

SEQ ID NO: 2976270 - DNA, 25 bp, Homo sapien
ttggccaacctcttgaaagtaagcg

SEQ ID NO: 2976271 - DNA, 25 bp, Homo sapien
gcacctatggctgtaagaaagagaa

SEQ ID NO: 2976272 - DNA, 25 bp, Homo sapien
ggtgaattttacagcctacaatggc

SEQ ID NO: 2976273 - DNA, 25 bp, Homo sapien
tcggacaggcgaaaacggatgcttt

SEQ ID NO: 2976274 - DNA, 25 bp, Homo sapien
tataccccagcgtaaatcaggttgc

SEQ ID NO: 2976275 - DNA, 25 bp, Homo sapien
tatcccctagccaagagaacaattc

SEQ ID NO: 2976276 - DNA, 25 bp, Homo sapien
gaaatagctgcctggattctcagaa

SEQ ID NO: 2976277 - DNA, 25 bp, Homo sapien
caacacttctttgtccttgctggca

SEQ ID NO: 2976278 - DNA, 25 bp, Homo sapien
tcaaatgtgtattgtgtctcaccct

SEQ ID NO: 2976279 - DNA, 25 bp, Homo sapien
gaagtatcaattccctccattggag

SEQ ID NO: 2976280 - DNA, 25 bp, Homo sapien
ggaaaataatctgtctaccctctga

SEQ ID NO: 2976281 - DNA, 25 bp, Homo sapien
tacccactggtgaggattatgcaaa

SEQ ID NO: 2976282 - DNA, 25 bp, Homo sapien
tccacttatgagagcgaaggctagt

SEQ ID NO: 2976283 - DNA, 25 bp, Homo sapien
gattaccgaactagacatacacaca

SEQ ID NO: 2976284 - DNA, 25 bp, Homo sapien
agaatagagattaccgaactagaca

SEQ ID NO: 2976285 - DNA, 25 bp, Homo sapien
cactagtattggctaaggaaagaaa

SEQ ID NO: 2976286 - DNA, 25 bp, Homo sapien
tacactatcaggagacactagtatt

SEQ ID NO: 2976287 - DNA, 25 bp, Homo sapien
ctgggaggaagagacgcccgcaccc

SEQ ID NO: 2976288 - DNA, 25 bp, Homo sapien
tgggaggaagagacgcccgcacccc

SEQ ID NO: 2976289 - DNA, 25 bp, Homo sapien
gaggaagagacgcccgcaccccagg

SEQ ID NO: 2976290 - DNA, 25 bp, Homo sapien
gggaggaagagacgcccgcacccca

SEQ ID NO: 2976291 - DNA, 25 bp, Homo sapien
tcaggggccccaggaaattgttgtg

SEQ ID NO: 2976292 - DNA, 25 bp, Homo sapien
caggggccccaggaaattgttgtgc

SEQ ID NO: 2976293 - DNA, 25 bp, Homo sapien
gctggataagaaggggacccggcca

SEQ ID NO: 2976294 - DNA, 25 bp, Homo sapien
caggcgcggtgtctcgggctggata

SEQ ID NO: 2976295 - DNA, 25 bp, Homo sapien
ggcgcggtgtctcgggctggataag

SEQ ID NO: 2976296 - DNA, 25 bp, Homo sapien
gcggtgtctcgggctggataagaag

SEQ ID NO: 2976297 - DNA, 25 bp, Homo sapien
gggattcccagcgcagggacgccca

SEQ ID NO: 2976298 - DNA, 25 bp, Homo sapien
gcacagcccggccgggcttggaaaa

SEQ ID NO: 2976299 - DNA, 25 bp, Homo sapien
cagggcctttccccgcacagcccgg

SEQ ID NO: 2976300 - DNA, 25 bp, Homo sapien
aaaactccgagcgggattcccagcg

SEQ ID NO: 2976301 - DNA, 25 bp, Homo sapien
tgcacggaaccggagctggcaacgg

SEQ ID NO: 2976302 - DNA, 25 bp, Homo sapien
aagccggagaggctgcacggaaccg

SEQ ID NO: 2976303 - DNA, 25 bp, Homo sapien
agaggctgcacggaaccggagctgg

SEQ ID NO: 2976304 - DNA, 25 bp, Homo sapien
acggaaccggagctggcaacgggag

SEQ ID NO: 2976305 - DNA, 25 bp, Homo sapien
cggtggtcttctccggaagtgcatg

SEQ ID NO: 2976306 - DNA, 25 bp, Homo sapien
gagtcggtggtcttctccggaagtg

SEQ ID NO: 2976307 - DNA, 25 bp, Homo sapien
gtcggtggtcttctccggaagtgca

SEQ ID NO: 2976308 - DNA, 25 bp, Homo sapien
tcggtggtcttctccggaagtgcat

SEQ ID NO: 2976309 - DNA, 25 bp, Homo sapien
gctctcacaccgcaccccccccgaa

SEQ ID NO: 2976310 - DNA, 25 bp, Homo sapien
gtttagtccaagggcctcggtgtga

SEQ ID NO: 2976311 - DNA, 25 bp, Homo sapien
tctccggctctcacaccgcaccccc

SEQ ID NO: 2976312 - DNA, 25 bp, Homo sapien
tgcgggctgtccctgcccggtttag

SEQ ID NO: 2976313 - DNA, 25 bp, Homo sapien
tccattcttacactcagtgctggaa

SEQ ID NO: 2976314 - DNA, 25 bp, Homo sapien
gcttccattcttacactcagtgctg

SEQ ID NO: 2976315 - DNA, 25 bp, Homo sapien
aaggcttccattcttacactcagtg

SEQ ID NO: 2976316 - DNA, 25 bp, Homo sapien
cattcttacactcagtgctggaatt

SEQ ID NO: 2976317 - DNA, 25 bp, Homo sapien
caaggaggagggccgtggaggtcaa

SEQ ID NO: 2976318 - DNA, 25 bp, Homo sapien
ggagggccgtggaggtcaagaccac

SEQ ID NO: 2976319 - DNA, 25 bp, Homo sapien
gccgtggaggtcaagaccaccgagc

SEQ ID NO: 2976320 - DNA, 25 bp, Homo sapien
caacaaggaggagggccgtggaggt

SEQ ID NO: 2976321 - DNA, 25 bp, Homo sapien
gcgccagtccttgcgggtatactcg

SEQ ID NO: 2976322 - DNA, 25 bp, Homo sapien
agtccttgcgggtatactcgaaggg

SEQ ID NO: 2976323 - DNA, 25 bp, Homo sapien
cacgcggcgccagtccttgcgggta

SEQ ID NO: 2976324 - DNA, 25 bp, Homo sapien
cggcgccagtccttgcgggtatact

SEQ ID NO: 2976325 - DNA, 25 bp, Homo sapien
ctggcggcgcggcagtggcaggttg

SEQ ID NO: 2976326 - DNA, 25 bp, Homo sapien
gcaggttgtctcgtccgggcgttcc

SEQ ID NO: 2976327 - DNA, 25 bp, Homo sapien
gggaggtcatttgcccagcgcaggc

SEQ ID NO: 2976328 - DNA, 25 bp, Homo sapien
gcagtggcaggttgtctcgtccggg

SEQ ID NO: 2976329 - DNA, 25 bp, Homo sapien
cgtaggtgagcggctcgggggccga

SEQ ID NO: 2976330 - DNA, 25 bp, Homo sapien
tcacaagccggtagtcgtaggtgag

SEQ ID NO: 2976331 - DNA, 25 bp, Homo sapien
aggtgagcggctcgggggccgaggg

SEQ ID NO: 2976332 - DNA, 25 bp, Homo sapien
ctcacaagccggtagtcgtaggtga

SEQ ID NO: 2976333 - DNA, 25 bp, Homo sapien
gcgcaggccgcaagtacaggcaggc

SEQ ID NO: 2976334 - DNA, 25 bp, Homo sapien
tgcgcaggccgcaagtacaggcagg

SEQ ID NO: 2976335 - DNA, 25 bp, Homo sapien
ggctccgcgggggtgctgtcggggc

SEQ ID NO: 2976336 - DNA, 25 bp, Homo sapien
cgcggcgggccgtgcacatcctgga

SEQ ID NO: 2976337 - DNA, 25 bp, Homo sapien
tcccgcggcgggccgtgcacatcct

SEQ ID NO: 2976338 - DNA, 25 bp, Homo sapien
acatccaggaacccgccacactgca

SEQ ID NO: 2976339 - DNA, 25 bp, Homo sapien
caggaacccgccacactgcagcctt

SEQ ID NO: 2976340 - DNA, 25 bp, Homo sapien
ttgcaccgctcccgtttcgcggttg

SEQ ID NO: 2976341 - DNA, 25 bp, Homo sapien
agggactaggggcttgcaccgctcc

SEQ ID NO: 2976342 - DNA, 25 bp, Homo sapien
cttgggaatcgcagatgagggacta

SEQ ID NO: 2976343 - DNA, 25 bp, Homo sapien
caagtttgacaaataaagaccatca

SEQ ID NO: 2976344 - DNA, 25 bp, Homo sapien
gaagagcgctggcatccagccatcc

SEQ ID NO: 2976345 - DNA, 25 bp, Homo sapien
caggagctcgagtgaaagcggcaca

SEQ ID NO: 2976346 - DNA, 25 bp, Homo sapien
ggtgccgttttccaccctggccaca

SEQ ID NO: 2976347 - DNA, 25 bp, Homo sapien
gcgcgaaacaggaaacagccgtggt

SEQ ID NO: 2976348 - DNA, 25 bp, Homo sapien
tctcaggagatgtcaggacctgggc

SEQ ID NO: 2976349 - DNA, 25 bp, Homo sapien
cagccagggtcatctgtcttctcag

SEQ ID NO: 2976350 - DNA, 25 bp, Homo sapien
tctctggccaatgtcctagttcccc

SEQ ID NO: 2976351 - DNA, 25 bp, Homo sapien
acagtgaattagggccacaagtggg

SEQ ID NO: 2976352 - DNA, 25 bp, Homo sapien
cttgtttcatccctctcccgcagcg

SEQ ID NO: 2976353 - DNA, 25 bp, Homo sapien
aggatcggcttcagccgccctcttg

SEQ ID NO: 2976354 - DNA, 25 bp, Homo sapien
ctgcccctaatgtcggagccgagga

SEQ ID NO: 2976355 - DNA, 25 bp, Homo sapien
cagcgcggtcacgtgagatgcgcca

SEQ ID NO: 2976356 - DNA, 25 bp, Homo sapien
cttccacccgggcgctggtgcttgg

SEQ ID NO: 2976357 - DNA, 25 bp, Homo sapien
cgccccttccacccgggcgctggtg

SEQ ID NO: 2976358 - DNA, 25 bp, Homo sapien
ccccttccacccgggcgctggtgct

SEQ ID NO: 2976359 - DNA, 25 bp, Homo sapien
ccttccacccgggcgctggtgcttg

SEQ ID NO: 2976360 - DNA, 25 bp, Homo sapien
gccgcggtggtccgggccaggtggc

SEQ ID NO: 2976361 - DNA, 25 bp, Homo sapien
gggccaggtggccgccgccgccgcc

SEQ ID NO: 2976362 - DNA, 25 bp, Homo sapien
aaagtcttgccggttgttgcttcgg

SEQ ID NO: 2976363 - DNA, 25 bp, Homo sapien
cagataatcggaatcagcctcgtcc

SEQ ID NO: 2976364 - DNA, 25 bp, Homo sapien
tttcccaagcaaggcaaagcgatca

SEQ ID NO: 2976365 - DNA, 25 bp, Homo sapien
aatgagctaagatgcgcgttcctgc

SEQ ID NO: 2976366 - DNA, 25 bp, Homo sapien
agcctgagaggagactctgtataaa

SEQ ID NO: 2976367 - DNA, 25 bp, Homo sapien
gaggttgccatgagtcagaatcacg

SEQ ID NO: 2976368 - DNA, 25 bp, Homo sapien
catgagtcagaatcacgtcactgca

SEQ ID NO: 2976369 - DNA, 25 bp, Homo sapien
gcctgagaggagactctgtataaaa

SEQ ID NO: 2976370 - DNA, 25 bp, Homo sapien
tttcatggcgttcagcgtgcacagc

SEQ ID NO: 2976371 - DNA, 25 bp, Homo sapien
tcagtgtggattcagacctctcgac

SEQ ID NO: 2976372 - DNA, 25 bp, Homo sapien
gaagattccgtaagcttccagccac

SEQ ID NO: 2976373 - DNA, 25 bp, Homo sapien
gaggccaggcagtccatttttcatg

SEQ ID NO: 2976374 - DNA, 25 bp, Homo sapien
ccagctcctaggggggctgaggtga

SEQ ID NO: 2976375 - DNA, 25 bp, Homo sapien
gctgaggtgagaggacagcctgagc

SEQ ID NO: 2976376 - DNA, 25 bp, Homo sapien
ggtgagaggacagcctgagcctggg

SEQ ID NO: 2976377 - DNA, 25 bp, Homo sapien
tgaggtgagaggacagcctgagcct

SEQ ID NO: 2976378 - DNA, 25 bp, Homo sapien
tactggcagggtggcattctctcca

SEQ ID NO: 2976379 - DNA, 25 bp, Homo sapien
tctgatgggcactcaaagagcttaa

SEQ ID NO: 2976380 - DNA, 25 bp, Homo sapien
caatgtcgagttcacagcacagtgg

SEQ ID NO: 2976381 - DNA, 25 bp, Homo sapien
tcatatgctataaaactggagagcc

SEQ ID NO: 2976382 - DNA, 25 bp, Homo sapien
cccgctgtggatgtaggctgcttga

SEQ ID NO: 2976383 - DNA, 25 bp, Homo sapien
gggtgacccaaatgaaagcagcgaa

SEQ ID NO: 2976384 - DNA, 25 bp, Homo sapien
caggaagcattttgccgatgggcag

SEQ ID NO: 2976385 - DNA, 25 bp, Homo sapien
tgtggtccagtctcgccatgaaatc

SEQ ID NO: 2976386 - DNA, 25 bp, Homo sapien
aacaggccagcacacgcggaagcag

SEQ ID NO: 2976387 - DNA, 25 bp, Homo sapien
tgcagaagggcgtgcatgcagaggg

SEQ ID NO: 2976388 - DNA, 25 bp, Homo sapien
acaagctcttgacggggccaggata

SEQ ID NO: 2976389 - DNA, 25 bp, Homo sapien
actgaagacagcacaagctcttgac

SEQ ID NO: 2976390 - DNA, 25 bp, Homo sapien
ccatgaggcagcaagggcagctgcc

SEQ ID NO: 2976391 - DNA, 25 bp, Homo sapien
cagctgccaaggcttcagttaaccc

SEQ ID NO: 2976392 - DNA, 25 bp, Homo sapien
taacccaggacagaaacaggactcg

SEQ ID NO: 2976393 - DNA, 25 bp, Homo sapien
ggcttcagttaacccaggacagaaa

SEQ ID NO: 2976394 - DNA, 25 bp, Homo sapien
aagagacaggcggtagcaaaaaggg

SEQ ID NO: 2976395 - DNA, 25 bp, Homo sapien
gagagagggatagaggccaaaaaac

SEQ ID NO: 2976396 - DNA, 25 bp, Homo sapien
caggcggtagcaaaaagggagggtg

SEQ ID NO: 2976397 - DNA, 25 bp, Homo sapien
gagagggatagaggccaaaaaacac

SEQ ID NO: 2976398 - DNA, 25 bp, Homo sapien
atgactcacagagagtgatgtctgg

SEQ ID NO: 2976399 - DNA, 25 bp, Homo sapien
tgatgtctggtcaaacacaagcccc

SEQ ID NO: 2976400 - DNA, 25 bp, Homo sapien
gtctggtcaaacacaagcccctggg

SEQ ID NO: 2976401 - DNA, 25 bp, Homo sapien
cagagagtgatgtctggtcaaacac

SEQ ID NO: 2976402 - DNA, 25 bp, Homo sapien
atagcaagtatgtccccatgcaagg

SEQ ID NO: 2976403 - DNA, 25 bp, Homo sapien
gtaacctatccacagtttcaagaag

SEQ ID NO: 2976404 - DNA, 25 bp, Homo sapien
taagcatgtcccataaatttcatgg

SEQ ID NO: 2976405 - DNA, 25 bp, Homo sapien
tctctccaagggaaatcctagttcc

SEQ ID NO: 2976406 - DNA, 25 bp, Homo sapien
gcacccagccaataagatacatgtt

SEQ ID NO: 2976407 - DNA, 25 bp, Homo sapien
gaattgtagtatagatgtctcacta

SEQ ID NO: 2976408 - DNA, 25 bp, Homo sapien
ttgttgttttgaattgtagtataga

SEQ ID NO: 2976409 - DNA, 25 bp, Homo sapien
tgttttgaattgtagtatagatgtc

SEQ ID NO: 2976410 - DNA, 25 bp, Homo sapien
tcctggcacctgatagcaccagtgt

SEQ ID NO: 2976411 - DNA, 25 bp, Homo sapien
gctcctggcacctgatagcaccagt

SEQ ID NO: 2976412 - DNA, 25 bp, Homo sapien
gcacctgatagcaccagtgttctgt

SEQ ID NO: 2976413 - DNA, 25 bp, Homo sapien
tggcacctgatagcaccagtgttct

SEQ ID NO: 2976414 - DNA, 25 bp, Homo sapien
gagagcgtcgtcagagatgacactt

SEQ ID NO: 2976415 - DNA, 25 bp, Homo sapien
aaagagagcgtcgtcagagatgaca

SEQ ID NO: 2976416 - DNA, 25 bp, Homo sapien
tgaaaagagagcgtcgtcagagatg

SEQ ID NO: 2976417 - DNA, 25 bp, Homo sapien
gcgtcgtcagagatgacacttgcgt

SEQ ID NO: 2976418 - DNA, 25 bp, Homo sapien
tcagtgcagggaaccaacaaagaca

SEQ ID NO: 2976419 - DNA, 25 bp, Homo sapien
cagtgcagggaaccaacaaagacag

SEQ ID NO: 2976420 - DNA, 25 bp, Homo sapien
gtcagtgcagggaaccaacaaagac

SEQ ID NO: 2976421 - DNA, 25 bp, Homo sapien
ggtcagtgcagggaaccaacaaaga

SEQ ID NO: 2976422 - DNA, 25 bp, Homo sapien
tttcaatttcgcctttttcagactc

SEQ ID NO: 2976423 - DNA, 25 bp, Homo sapien
actgtagctcggtttgaaattttca

SEQ ID NO: 2976424 - DNA, 25 bp, Homo sapien
tttttcagactccaagggggatgga

SEQ ID NO: 2976425 - DNA, 25 bp, Homo sapien
tggaggatgctgtgatcctcttggt

SEQ ID NO: 2976426 - DNA, 25 bp, Homo sapien
gaagttgaacggcactgtacaagca

SEQ ID NO: 2976427 - DNA, 25 bp, Homo sapien
tacaaatgatcttttggaccacgtc

SEQ ID NO: 2976428 - DNA, 25 bp, Homo sapien
gaggctcgattcacctttaatggac

SEQ ID NO: 2976429 - DNA, 25 bp, Homo sapien
tgagaacccagtcaccctgagaaaa

SEQ ID NO: 2976430 - DNA, 25 bp, Homo sapien
ggatcgtttcctaactgactgccag

SEQ ID NO: 2976431 - DNA, 25 bp, Homo sapien
gcttattctcagaggcgatctggca

SEQ ID NO: 2976432 - DNA, 25 bp, Homo sapien
aagcaggtgcagtgaagagcctaag

SEQ ID NO: 2976433 - DNA, 25 bp, Homo sapien
taacacgagaagacattaagagggt

SEQ ID NO: 2976434 - DNA, 25 bp, Homo sapien
agagacccaagggagtcagctcacc

SEQ ID NO: 2976435 - DNA, 25 bp, Homo sapien
gtgatagtatttgtagatgggaact

SEQ ID NO: 2976436 - DNA, 25 bp, Homo sapien
tgttgagaccttacccccaatgtga

SEQ ID NO: 2976437 - DNA, 25 bp, Homo sapien
gagagtggaactcttatgaatagta

SEQ ID NO: 2976438 - DNA, 25 bp, Homo sapien
cagagccaagtagtgtacatgacca

SEQ ID NO: 2976439 - DNA, 25 bp, Homo sapien
gaccatgctttcgttcttgtagaac

SEQ ID NO: 2976440 - DNA, 25 bp, Homo sapien
gcaaacattgtgcactacagagcca

SEQ ID NO: 2976441 - DNA, 25 bp, Homo sapien
taggtagcatctgttagtttactgc

SEQ ID NO: 2976442 - DNA, 25 bp, Homo sapien
gtccctctttagttattaatttgca

SEQ ID NO: 2976443 - DNA, 25 bp, Homo sapien
actgccctcgctctgtgtcaaaaaa

SEQ ID NO: 2976444 - DNA, 25 bp, Homo sapien
cctgaggcataacagcttctccatg

SEQ ID NO: 2976445 - DNA, 25 bp, Homo sapien
tccatgctttctaggtggttccctg

SEQ ID NO: 2976446 - DNA, 25 bp, Homo sapien
gaatgaaccatagtctgtctgcatt

SEQ ID NO: 2976447 - DNA, 25 bp, Homo sapien
gttgcagaatgaaccatagtctgtc

SEQ ID NO: 2976448 - DNA, 25 bp, Homo sapien
cagaatgaaccatagtctgtctgca

SEQ ID NO: 2976449 - DNA, 25 bp, Homo sapien
tgcagaatgaaccatagtctgtctg

SEQ ID NO: 2976450 - DNA, 25 bp, Homo sapien
taaaaggtattcactagattttcag

SEQ ID NO: 2976451 - DNA, 25 bp, Homo sapien
tacgaggtgtctgaagcataaaagg

SEQ ID NO: 2976452 - DNA, 25 bp, Homo sapien
gagggtaaagactctctatacgagg

SEQ ID NO: 2976453 - DNA, 25 bp, Homo sapien
caactgcgagatgcttgagggtaaa

SEQ ID NO: 2976454 - DNA, 25 bp, Homo sapien
tattacttgacacgaagtctcgctc

SEQ ID NO: 2976455 - DNA, 25 bp, Homo sapien
attacttgacacgaagtctcgctct

SEQ ID NO: 2976456 - DNA, 25 bp, Homo sapien
tattattacttgacacgaagtctcg

SEQ ID NO: 2976457 - DNA, 25 bp, Homo sapien
ttattacttgacacgaagtctcgct

SEQ ID NO: 2976458 - DNA, 25 bp, Homo sapien
tctggtgggactttcggtctctctg

SEQ ID NO: 2976459 - DNA, 25 bp, Homo sapien
gtgggactttcggtctctctgggcc

SEQ ID NO: 2976460 - DNA, 25 bp, Homo sapien
tggtgggactttcggtctctctggg

SEQ ID NO: 2976461 - DNA, 25 bp, Homo sapien
tgggactttcggtctctctgggcct

SEQ ID NO: 2976462 - DNA, 25 bp, Homo sapien
gggccggcattagggctgagctagc

SEQ ID NO: 2976463 - DNA, 25 bp, Homo sapien
aggcaccgcggggccggcattaggg

SEQ ID NO: 2976464 - DNA, 25 bp, Homo sapien
ccggcattagggctgagctagctct

SEQ ID NO: 2976465 - DNA, 25 bp, Homo sapien
ccgcggggccggcattagggctgag

SEQ ID NO: 2976466 - DNA, 25 bp, Homo sapien
gtttgagaggcatcgccggcgtgac

SEQ ID NO: 2976467 - DNA, 25 bp, Homo sapien
cggttctcgagagccacagatgcgc

SEQ ID NO: 2976468 - DNA, 25 bp, Homo sapien
cttccagaatagagggtagcgaggg

SEQ ID NO: 2976469 - DNA, 25 bp, Homo sapien
aggttgacgtagagccgcagcgctc

SEQ ID NO: 2976470 - DNA, 25 bp, Homo sapien
ggcgccacgccccttacgccacgcg

SEQ ID NO: 2976471 - DNA, 25 bp, Homo sapien
cgcgccgctgcgtcgcgcacgccct

SEQ ID NO: 2976472 - DNA, 25 bp, Homo sapien
gccacgccccttacgccacgcgccg

SEQ ID NO: 2976473 - DNA, 25 bp, Homo sapien
gcgccgctgcgtcgcgcacgccctg

SEQ ID NO: 2976474 - DNA, 25 bp, Homo sapien
ccgcggcagccctcacgcgcatgcg

SEQ ID NO: 2976475 - DNA, 25 bp, Homo sapien
cgcggcagccctcacgcgcatgcgc

SEQ ID NO: 2976476 - DNA, 25 bp, Homo sapien
gcggcagccctcacgcgcatgcgca

SEQ ID NO: 2976477 - DNA, 25 bp, Homo sapien
cggcagccctcacgcgcatgcgcac

SEQ ID NO: 2976478 - DNA, 25 bp, Homo sapien
gacagcacccgcgaaccgccctgac

SEQ ID NO: 2976479 - DNA, 25 bp, Homo sapien
cagctctgacagcacccgcgaaccg

SEQ ID NO: 2976480 - DNA, 25 bp, Homo sapien
gcccagctctgacagcacccgcgaa

SEQ ID NO: 2976481 - DNA, 25 bp, Homo sapien
gctctgacagcacccgcgaaccgcc

SEQ ID NO: 2976482 - DNA, 25 bp, Homo sapien
aaaaccagaacatcacgggcaaacg

SEQ ID NO: 2976483 - DNA, 25 bp, Homo sapien
acatcacgggcaaacgggaaggagc

SEQ ID NO: 2976484 - DNA, 25 bp, Homo sapien
ggaggcctaggatgctttggtccca

SEQ ID NO: 2976485 - DNA, 25 bp, Homo sapien
aattcggtcactgcagtgggctgga

SEQ ID NO: 2976486 - DNA, 25 bp, Homo sapien
gaagaaagttgtggagtgtgacttc

SEQ ID NO: 2976487 - DNA, 25 bp, Homo sapien
ctggaagaaagttgtggagtgtgac

SEQ ID NO: 2976488 - DNA, 25 bp, Homo sapien
tggaagaaagttgtggagtgtgact

SEQ ID NO: 2976489 - DNA, 25 bp, Homo sapien
agaaagttgtggagtgtgacttcat

SEQ ID NO: 2976490 - DNA, 25 bp, Homo sapien
gaaggctcccatggaagcttttaac

SEQ ID NO: 2976491 - DNA, 25 bp, Homo sapien
gaaggaaggctcccatggaagcttt

SEQ ID NO: 2976492 - DNA, 25 bp, Homo sapien
cttgattaggaaggaaggctcccat

SEQ ID NO: 2976493 - DNA, 25 bp, Homo sapien
taggaaggaaggctcccatggaagc

SEQ ID NO: 2976494 - DNA, 25 bp, Homo sapien
gactaatcaaaagccagcctcacaa

SEQ ID NO: 2976495 - DNA, 25 bp, Homo sapien
gaatgggtccgatgttccaccacga

SEQ ID NO: 2976496 - DNA, 25 bp, Homo sapien
cattagggaagacatcagatgacta

SEQ ID NO: 2976497 - DNA, 25 bp, Homo sapien
cctcttgaatgggtccgatgttcca

SEQ ID NO: 2976498 - DNA, 25 bp, Homo sapien
aattccctgggcatagttgtgcaca

SEQ ID NO: 2976499 - DNA, 25 bp, Homo sapien
aaatactcatcgtttctaatgtgac

SEQ ID NO: 2976500 - DNA, 25 bp, Homo sapien
taatgtgactcaaagatcttcaaca

SEQ ID NO: 2976501 - DNA, 25 bp, Homo sapien
ctgaaatcagcttcgacatcatggc

SEQ ID NO: 2976502 - DNA, 25 bp, Homo sapien
gctgcgtttgtttggagagggtgtc

SEQ ID NO: 2976503 - DNA, 25 bp, Homo sapien
actgtatataaatgctgcgtttgtt

SEQ ID NO: 2976504 - DNA, 25 bp, Homo sapien
agtgtctgttcggagtgccgtatta

SEQ ID NO: 2976505 - DNA, 25 bp, Homo sapien
gaatgcaaggtaatgggtccaaaga

SEQ ID NO: 2976506 - DNA, 25 bp, Homo sapien
cattcattggtgttgctatgaaaca

SEQ ID NO: 2976507 - DNA, 25 bp, Homo sapien
tacaaaacttgtaccgccgcaatga

SEQ ID NO: 2976508 - DNA, 25 bp, Homo sapien
aagagcgccactgcaaaactgaacc

SEQ ID NO: 2976509 - DNA, 25 bp, Homo sapien
caataacctttatcattcattggtg

SEQ ID NO: 2976510 - DNA, 25 bp, Homo sapien
ctaaaggaacatcttgttacagaaa

SEQ ID NO: 2976511 - DNA, 25 bp, Homo sapien
taaaggaacatcttgttacagaaac

SEQ ID NO: 2976512 - DNA, 25 bp, Homo sapien
tctaaaggaacatcttgttacagaa

SEQ ID NO: 2976513 - DNA, 25 bp, Homo sapien
tgcatgaatttgtaggttgtgtgtg

SEQ ID NO: 2976514 - DNA, 25 bp, Homo sapien
catgaatttgtaggttgtgtgtgtt

SEQ ID NO: 2976515 - DNA, 25 bp, Homo sapien
gaatttgtaggttgtgtgtgttctc

SEQ ID NO: 2976516 - DNA, 25 bp, Homo sapien
ctgcatgaatttgtaggttgtgtgt

SEQ ID NO: 2976517 - DNA, 25 bp, Homo sapien
cagaaggcatcttcaggtttcttct

SEQ ID NO: 2976518 - DNA, 25 bp, Homo sapien
acagaaggcatcttcaggtttcttc

SEQ ID NO: 2976519 - DNA, 25 bp, Homo sapien
cacagaaggcatcttcaggtttctt

SEQ ID NO: 2976520 - DNA, 25 bp, Homo sapien
aagacaaaattccacgagtctcttg

SEQ ID NO: 2976521 - DNA, 25 bp, Homo sapien
caaaattccacgagtctcttgggta

SEQ ID NO: 2976522 - DNA, 25 bp, Homo sapien
agaggcctgtccaaagacaaaattc

SEQ ID NO: 2976523 - DNA, 25 bp, Homo sapien
ccacgagtctcttgggtaaagatca

SEQ ID NO: 2976524 - DNA, 25 bp, Homo sapien
taacaacaatgccaaaaacggaata

SEQ ID NO: 2976525 - DNA, 25 bp, Homo sapien
ctaacaacaatgccaaaaacggaat

SEQ ID NO: 2976526 - DNA, 25 bp, Homo sapien
caccaaaatcagtaagaaagtagtg

SEQ ID NO: 2976527 - DNA, 25 bp, Homo sapien
caagagtgcatgctggtagggccat

SEQ ID NO: 2976528 - DNA, 25 bp, Homo sapien
tgacccacgtctccaagagtgcatg

SEQ ID NO: 2976529 - DNA, 25 bp, Homo sapien
aatcagtaagaaagtagtgacccac

SEQ ID NO: 2976530 - DNA, 25 bp, Homo sapien
tagttgtcgaaaattgaatagtcac

SEQ ID NO: 2976531 - DNA, 25 bp, Homo sapien
caggatcgaagtagtaaaacactag

SEQ ID NO: 2976532 - DNA, 25 bp, Homo sapien
cactttgcctttatagtgcatgcta

SEQ ID NO: 2976533 - DNA, 25 bp, Homo sapien
tatttctggaatataatagttgtcg

SEQ ID NO: 2976534 - DNA, 25 bp, Homo sapien
tgtgtccgatctcatgggttaaagt

SEQ ID NO: 2976535 - DNA, 25 bp, Homo sapien
cagtgtcgcagtccaaatatgtgtc

SEQ ID NO: 2976536 - DNA, 25 bp, Homo sapien
gccactggcagtgtcgcagtccaaa

SEQ ID NO: 2976537 - DNA, 25 bp, Homo sapien
ccaagtggttggagccttgcatgag

SEQ ID NO: 2976538 - DNA, 25 bp, Homo sapien
cagcaaaataccatcaggcaagaga

SEQ ID NO: 2976539 - DNA, 25 bp, Homo sapien
aagcattggcttctagatcataggg

SEQ ID NO: 2976540 - DNA, 25 bp, Homo sapien
gaaagatgcgcacttcaacaaacca

SEQ ID NO: 2976541 - DNA, 25 bp, Homo sapien
gatcatagggtgacatattacccca

SEQ ID NO: 2976542 - DNA, 25 bp, Homo sapien
gagttgctccaggtgtgtcagaaga

SEQ ID NO: 2976543 - DNA, 25 bp, Homo sapien
gtgactgtgttctggagttgctcca

SEQ ID NO: 2976544 - DNA, 25 bp, Homo sapien
tcagaagattcatcatcaatccacc

SEQ ID NO: 2976545 - DNA, 25 bp, Homo sapien
tcggtaaattcccattatcctcgtg

SEQ ID NO: 2976546 - DNA, 25 bp, Homo sapien
catttttggagaacagccaggcatt

SEQ ID NO: 2976547 - DNA, 25 bp, Homo sapien
ttttggagaacagccaggcatttta

SEQ ID NO: 2976548 - DNA, 25 bp, Homo sapien
ggagaacagccaggcattttattat

SEQ ID NO: 2976549 - DNA, 25 bp, Homo sapien
tcatttttggagaacagccaggcat

SEQ ID NO: 2976550 - DNA, 25 bp, Homo sapien
taacatgcaagtagttatttatttc

SEQ ID NO: 2976551 - DNA, 25 bp, Homo sapien
tatttcaatcactcctatttgaagg

SEQ ID NO: 2976552 - DNA, 25 bp, Homo sapien
ttcaatcactcctatttgaaggtcc

SEQ ID NO: 2976553 - DNA, 25 bp, Homo sapien
catgcaagtagttatttatttcaat

SEQ ID NO: 2976554 - DNA, 25 bp, Homo sapien
agtagtttattccaatgaagtattc

SEQ ID NO: 2976555 - DNA, 25 bp, Homo sapien
tcagtagtttattccaatgaagtat

SEQ ID NO: 2976556 - DNA, 25 bp, Homo sapien
cagtagtttattccaatgaagtatt

SEQ ID NO: 2976557 - DNA, 25 bp, Homo sapien
attcaggtacttgaaagaaggttct

SEQ ID NO: 2976558 - DNA, 25 bp, Homo sapien
ttcttgggagacctaaacatatttg

SEQ ID NO: 2976559 - DNA, 25 bp, Homo sapien
taatgtgcttgctgccacagaccag

SEQ ID NO: 2976560 - DNA, 25 bp, Homo sapien
cagaccaggccagtaagatgagaag

SEQ ID NO: 2976561 - DNA, 25 bp, Homo sapien
gttaccgccagtcccagctttcttg

SEQ ID NO: 2976562 - DNA, 25 bp, Homo sapien
tgcacggcacgcagcagtggaggag

SEQ ID NO: 2976563 - DNA, 25 bp, Homo sapien
aggttaccctgggtcgctgacgcca

SEQ ID NO: 2976564 - DNA, 25 bp, Homo sapien
gcacacgtggctctcacacaggcag

SEQ ID NO: 2976565 - DNA, 25 bp, Homo sapien
gccgtcgcggtcctgactttccaag

SEQ ID NO: 2976566 - DNA, 25 bp, Homo sapien
caaccagttacagagtcattccaag

SEQ ID NO: 2976567 - DNA, 25 bp, Homo sapien
tgttgcaacctgtaagtaaacagca

SEQ ID NO: 2976568 - DNA, 25 bp, Homo sapien
gatatcatggtagccagagtaagcc

SEQ ID NO: 2976569 - DNA, 25 bp, Homo sapien
gagccatcatgtgcagcctaaactt

SEQ ID NO: 2976570 - DNA, 25 bp, Homo sapien
taagtgttcctctttggctcagaag

SEQ ID NO: 2976571 - DNA, 25 bp, Homo sapien
tcatatgtacgtcgccatcggcatc

SEQ ID NO: 2976572 - DNA, 25 bp, Homo sapien
cctgagcaatcgtttcggacaccgt

SEQ ID NO: 2976573 - DNA, 25 bp, Homo sapien
gaaggagtcttatggcagctaaccc

SEQ ID NO: 2976574 - DNA, 25 bp, Homo sapien
cccctccttggctgcgctcagcgct

SEQ ID NO: 2976575 - DNA, 25 bp, Homo sapien
ctcgcagcacatggtcggcggcggc

SEQ ID NO: 2976576 - DNA, 25 bp, Homo sapien
ttggctgcgctcagcgctcgcagca

SEQ ID NO: 2976577 - DNA, 25 bp, Homo sapien
agcgctcgcagcacatggtcggcgg

SEQ ID NO: 2976578 - DNA, 25 bp, Homo sapien
agcccaggcggcaggctggcgggcg

SEQ ID NO: 2976579 - DNA, 25 bp, Homo sapien
ctggcgggcgcgcgaccggcgcggc

SEQ ID NO: 2976580 - DNA, 25 bp, Homo sapien
aggctggcgggcgcgcgaccggcgc

SEQ ID NO: 2976581 - DNA, 25 bp, Homo sapien
ccaggcggcaggctggcgggcgcgc

SEQ ID NO: 2976582 - DNA, 25 bp, Homo sapien
tatttgcaagccagggtcatatctg

SEQ ID NO: 2976583 - DNA, 25 bp, Homo sapien
caggcaggccaactttacacaaagg

SEQ ID NO: 2976584 - DNA, 25 bp, Homo sapien
tataaacgtggacagagaacaggca

SEQ ID NO: 2976585 - DNA, 25 bp, Homo sapien
caaatgaccctatgcaagagggcta

SEQ ID NO: 2976586 - DNA, 25 bp, Homo sapien
tcacaggttgaaagagtcgcagcca

SEQ ID NO: 2976587 - DNA, 25 bp, Homo sapien
gtcgcagccaagagttagggaacct

SEQ ID NO: 2976588 - DNA, 25 bp, Homo sapien
gaccatgagccaatcccagtgctaa

SEQ ID NO: 2976589 - DNA, 25 bp, Homo sapien
gctaagccccttgcacgtgttaatt

SEQ ID NO: 2976590 - DNA, 25 bp, Homo sapien
cttgccagttctcccaaggtcctct

SEQ ID NO: 2976591 - DNA, 25 bp, Homo sapien
gcaccccttgccagttctcccaagg

SEQ ID NO: 2976592 - DNA, 25 bp, Homo sapien
ccttgccagttctcccaaggtcctc

SEQ ID NO: 2976593 - DNA, 25 bp, Homo sapien
ggctcagcaccccttgccagttctc

SEQ ID NO: 2976594 - DNA, 25 bp, Homo sapien
gatacatcgatactgcaccaaatgg

SEQ ID NO: 2976595 - DNA, 25 bp, Homo sapien
tgacagaaatcaatcatcggccgcc

SEQ ID NO: 2976596 - DNA, 25 bp, Homo sapien
tacttcagagttaatgacagacacc

SEQ ID NO: 2976597 - DNA, 25 bp, Homo sapien
tacaggagcagtcaactatgaagac

SEQ ID NO: 2976598 - DNA, 25 bp, Homo sapien
tgttgtcggaagcaactccccaacg

SEQ ID NO: 2976599 - DNA, 25 bp, Homo sapien
gaacatcaaagaaggagctcaggca

SEQ ID NO: 2976600 - DNA, 25 bp, Homo sapien
taaaccaggcatagtgcatacagcc

SEQ ID NO: 2976601 - DNA, 25 bp, Homo sapien
catcagctgctcacgtgttgtcgga

SEQ ID NO: 2976602 - DNA, 25 bp, Homo sapien
aataacaagaaggtcgggcagacct

SEQ ID NO: 2976603 - DNA, 25 bp, Homo sapien
aggtcgggcagacctttctggcaga

SEQ ID NO: 2976604 - DNA, 25 bp, Homo sapien
gcatcctcctagagaaccttgaaaa

SEQ ID NO: 2976605 - DNA, 25 bp, Homo sapien
gctgaaataacaagaaggtcgggca

SEQ ID NO: 2976606 - DNA, 25 bp, Homo sapien
catacagctatataagccaagcatt

SEQ ID NO: 2976607 - DNA, 25 bp, Homo sapien
ataagccaagcatttgattgcatct

SEQ ID NO: 2976608 - DNA, 25 bp, Homo sapien
ctccaaacatacagctatataagcc

SEQ ID NO: 2976609 - DNA, 25 bp, Homo sapien
ccaagcatttgattgcatctagccc

SEQ ID NO: 2976610 - DNA, 25 bp, Homo sapien
ttctcgcatctgcagaacacctgga

SEQ ID NO: 2976611 - DNA, 25 bp, Homo sapien
gtgactacaggatgagttctcgcat

SEQ ID NO: 2976612 - DNA, 25 bp, Homo sapien
gcttggctgtttgggactccatctg

SEQ ID NO: 2976613 - DNA, 25 bp, Homo sapien
cccgaataactgagtagcagatggt

SEQ ID NO: 2976614 - DNA, 25 bp, Homo sapien
gacggcagccaccactagagatttt

SEQ ID NO: 2976615 - DNA, 25 bp, Homo sapien
tctttggccactaagaaagtgaccc

SEQ ID NO: 2976616 - DNA, 25 bp, Homo sapien
tcaccgcagctcagtaaaatgactg

SEQ ID NO: 2976617 - DNA, 25 bp, Homo sapien
gactggtcgtgttcaataattagac

SEQ ID NO: 2976618 - DNA, 25 bp, Homo sapien
gtggtgaaggcaggattccgattgt

SEQ ID NO: 2976619 - DNA, 25 bp, Homo sapien
ggtggtgaaggcaggattccgattg

SEQ ID NO: 2976620 - DNA, 25 bp, Homo sapien
tcaaggttggcagtgtcctttgttt

SEQ ID NO: 2976621 - DNA, 25 bp, Homo sapien
ccaccccatgtcatcggccaaaata

SEQ ID NO: 2976622 - DNA, 25 bp, Homo sapien
cctccgaagccatcttatcaaggtt

SEQ ID NO: 2976623 - DNA, 25 bp, Homo sapien
gagaaactcactcccgccaacaaaa

SEQ ID NO: 2976624 - DNA, 25 bp, Homo sapien
ttaagtgctttgcacggccccttcc

SEQ ID NO: 2976625 - DNA, 25 bp, Homo sapien
taaattaactaaatcagcatgggtc

SEQ ID NO: 2976626 - DNA, 25 bp, Homo sapien
tctcaagaacgggagtaagacatcc

SEQ ID NO: 2976627 - DNA, 25 bp, Homo sapien
gatttcttcacgatgctatgctggc

SEQ ID NO: 2976628 - DNA, 25 bp, Homo sapien
catctgcctgttgtctgagcactga

SEQ ID NO: 2976629 - DNA, 25 bp, Homo sapien
ttgacttcggaagcacgtgaaactg

SEQ ID NO: 2976630 - DNA, 25 bp, Homo sapien
gagcactgactattgctaccatcag

SEQ ID NO: 2976631 - DNA, 25 bp, Homo sapien
ggataagccctgactttgacttcgg

SEQ ID NO: 2976632 - DNA, 25 bp, Homo sapien
ccctccagcatctaggcatgtagac

SEQ ID NO: 2976633 - DNA, 25 bp, Homo sapien
ttcatccctccagcatctaggcatg

SEQ ID NO: 2976634 - DNA, 25 bp, Homo sapien
gacttcatccctccagcatctaggc

SEQ ID NO: 2976635 - DNA, 25 bp, Homo sapien
catccctccagcatctaggcatgta

SEQ ID NO: 2976636 - DNA, 25 bp, Homo sapien
tcttccagtctggtgggaaagccat

SEQ ID NO: 2976637 - DNA, 25 bp, Homo sapien
cctgtttcttccagtctggtgggaa

SEQ ID NO: 2976638 - DNA, 25 bp, Homo sapien
tagcctgcatcgacactggcttcct

SEQ ID NO: 2976639 - DNA, 25 bp, Homo sapien
gtgggaaagccatagcctgcatcga

SEQ ID NO: 2976640 - DNA, 25 bp, Homo sapien
gcctggccttgaaaccaaatcttag

SEQ ID NO: 2976641 - DNA, 25 bp, Homo sapien
gtcccagaagatgggttcattccct

SEQ ID NO: 2976642 - DNA, 25 bp, Homo sapien
aaggcttgctaaagagacctgggcc

SEQ ID NO: 2976643 - DNA, 25 bp, Homo sapien
gaaattgcactgtgagatcccagtc

SEQ ID NO: 2976644 - DNA, 25 bp, Homo sapien
ttatcccagtgacgtaacccgcctg

SEQ ID NO: 2976645 - DNA, 25 bp, Homo sapien
gactgcaaagttgcgtgtgactcca

SEQ ID NO: 2976646 - DNA, 25 bp, Homo sapien
tggtctcgttgagcggaaggcctcc

SEQ ID NO: 2976647 - DNA, 25 bp, Homo sapien
tgtgactccattgcgaaggccaagc

SEQ ID NO: 2976648 - DNA, 25 bp, Homo sapien
caatttcctgtatagtggaggaggc

SEQ ID NO: 2976649 - DNA, 25 bp, Homo sapien
ggagctgaggatacttctgggaata

SEQ ID NO: 2976650 - DNA, 25 bp, Homo sapien
tacttctgggaatactgggctgtct

SEQ ID NO: 2976651 - DNA, 25 bp, Homo sapien
gagttagactaacaaacacagggag

SEQ ID NO: 2976652 - DNA, 25 bp, Homo sapien
gacacccaaggcatgcccacagggc

SEQ ID NO: 2976653 - DNA, 25 bp, Homo sapien
agacacccaaggcatgcccacaggg

SEQ ID NO: 2976654 - DNA, 25 bp, Homo sapien
tggccaacatcagcagcccgcagtt

SEQ ID NO: 2976655 - DNA, 25 bp, Homo sapien
gttcaagcaccgagacacctacggg

SEQ ID NO: 2976656 - DNA, 25 bp, Homo sapien
gctcctcggtctgcaaatgcgctca

SEQ ID NO: 2976657 - DNA, 25 bp, Homo sapien
tcgtctcagaaatgcccgcttcctg

SEQ ID NO: 2976658 - DNA, 25 bp, Homo sapien
agttggggtgataagagccgtggtg

SEQ ID NO: 2976659 - DNA, 25 bp, Homo sapien
gggtgataagagccgtggtgtccaa

SEQ ID NO: 2976660 - DNA, 25 bp, Homo sapien
taagagccgtggtgtccaagatgcc

SEQ ID NO: 2976661 - DNA, 25 bp, Homo sapien
ccgtggtgtccaagatgccatttgc

SEQ ID NO: 2976662 - DNA, 25 bp, Homo sapien
tccatagagatagggagagatactg

SEQ ID NO: 2976663 - DNA, 25 bp, Homo sapien
gaagtctgcaaaatagtcagagaat

SEQ ID NO: 2976664 - DNA, 25 bp, Homo sapien
gagaagccaccaaagctgagatcat

SEQ ID NO: 2976665 - DNA, 25 bp, Homo sapien
acagaacaattcagccgttttccat

SEQ ID NO: 2976666 - DNA, 25 bp, Homo sapien
gctatatgggattccaaagtagtaa

SEQ ID NO: 2976667 - DNA, 25 bp, Homo sapien
ggctatatgggattccaaagtagta

SEQ ID NO: 2976668 - DNA, 25 bp, Homo sapien
tggctatatgggattccaaagtagt

SEQ ID NO: 2976669 - DNA, 25 bp, Homo sapien
catggctatatgggattccaaagta

SEQ ID NO: 2976670 - DNA, 25 bp, Homo sapien
gacacgctggacaaggagggtggtt

SEQ ID NO: 2976671 - DNA, 25 bp, Homo sapien
gtggttgtagcctggagtatcagta

SEQ ID NO: 2976672 - DNA, 25 bp, Homo sapien
tggtccatcaccctgtggacacgct

SEQ ID NO: 2976673 - DNA, 25 bp, Homo sapien
tagcctggagtatcagtacagccca

SEQ ID NO: 2976674 - DNA, 25 bp, Homo sapien
tctcagcatacttctgggcaaggct

SEQ ID NO: 2976675 - DNA, 25 bp, Homo sapien
aagttcaccggctgctccacaatgt

SEQ ID NO: 2976676 - DNA, 25 bp, Homo sapien
gggccacgtcagtgtaacagtctct

SEQ ID NO: 2976677 - DNA, 25 bp, Homo sapien
cttgcacgctggatgaactgggttg

SEQ ID NO: 2976678 - DNA, 25 bp, Homo sapien
taaaaacgtccaatgtggctgagcg

SEQ ID NO: 2976679 - DNA, 25 bp, Homo sapien
tcttggagtccattgcccttgagga

SEQ ID NO: 2976680 - DNA, 25 bp, Homo sapien
tccctgctgagcttctaaaaacgtc

SEQ ID NO: 2976681 - DNA, 25 bp, Homo sapien
ttaattctgcccaagtggacagccg

SEQ ID NO: 2976682 - DNA, 25 bp, Homo sapien
gcaatttctgaagcccttaggagct

SEQ ID NO: 2976683 - DNA, 25 bp, Homo sapien
ttaagatgcaatttctgaagccctt

SEQ ID NO: 2976684 - DNA, 25 bp, Homo sapien
gatgcaatttctgaagcccttagga

SEQ ID NO: 2976685 - DNA, 25 bp, Homo sapien
atttctgaagcccttaggagctgct

SEQ ID NO: 2976686 - DNA, 25 bp, Homo sapien
catgtgtatgggcgaggggtggtcc

SEQ ID NO: 2976687 - DNA, 25 bp, Homo sapien
gctgtccacccttcatcatccatca

SEQ ID NO: 2976688 - DNA, 25 bp, Homo sapien
gtgtatgggcgaggggtggtcctgc

SEQ ID NO: 2976689 - DNA, 25 bp, Homo sapien
gggcgaggggtggtcctgctgtcca

SEQ ID NO: 2976690 - DNA, 25 bp, Homo sapien
agccttgctctatagccaactgtgc

SEQ ID NO: 2976691 - DNA, 25 bp, Homo sapien
tctgccgcctgggactgtgcttgca

SEQ ID NO: 2976692 - DNA, 25 bp, Homo sapien
aagacaggggcgtctgccttcccca

SEQ ID NO: 2976693 - DNA, 25 bp, Homo sapien
tcagttctctttgctatgcataaaa

SEQ ID NO: 2976694 - DNA, 25 bp, Homo sapien
agccacatagagcaggaagggcctc

SEQ ID NO: 2976695 - DNA, 25 bp, Homo sapien
atagagcaggaagggcctcccgctg

SEQ ID NO: 2976696 - DNA, 25 bp, Homo sapien
cagagccacatagagcaggaagggc

SEQ ID NO: 2976697 - DNA, 25 bp, Homo sapien
acatagagcaggaagggcctcccgc

SEQ ID NO: 2976698 - DNA, 25 bp, Homo sapien
cttctgccccgtggcgctgctggta

SEQ ID NO: 2976699 - DNA, 25 bp, Homo sapien
tgtccttgatctggcccaccagact

SEQ ID NO: 2976700 - DNA, 25 bp, Homo sapien
gagccctgcaccatacaggcttctg

SEQ ID NO: 2976701 - DNA, 25 bp, Homo sapien
ctgagtcacaggtaagggcacgtgc

SEQ ID NO: 2976702 - DNA, 25 bp, Homo sapien
tgcccgctagctcacacttctgagc

SEQ ID NO: 2976703 - DNA, 25 bp, Homo sapien
gggacccacactgcccgctagctca

SEQ ID NO: 2976704 - DNA, 25 bp, Homo sapien
caaaatccagtgaagggacccacac

SEQ ID NO: 2976705 - DNA, 25 bp, Homo sapien
cttgacgagtttgccaaaatccagt

SEQ ID NO: 2976706 - DNA, 25 bp, Homo sapien
agagacagggatggtccaaactgag

SEQ ID NO: 2976707 - DNA, 25 bp, Homo sapien
gagagacagggatggtccaaactga

SEQ ID NO: 2976708 - DNA, 25 bp, Homo sapien
tggtggctggtgagcaaatgtgtcc

SEQ ID NO: 2976709 - DNA, 25 bp, Homo sapien
aaaagatcgttgaacgctggcccca

SEQ ID NO: 2976710 - DNA, 25 bp, Homo sapien
ggcagctctagggagcggctcctac

SEQ ID NO: 2976711 - DNA, 25 bp, Homo sapien
tcgctattctccttggtcgccacaa

SEQ ID NO: 2976712 - DNA, 25 bp, Homo sapien
tagacagatgtggtcgttgcacaac

SEQ ID NO: 2976713 - DNA, 25 bp, Homo sapien
tagttgacaggaagccgctttggag

SEQ ID NO: 2976714 - DNA, 25 bp, Homo sapien
ggaatagttagttgacaggaagccg

SEQ ID NO: 2976715 - DNA, 25 bp, Homo sapien
tagttagttgacaggaagccgcttt

SEQ ID NO: 2976716 - DNA, 25 bp, Homo sapien
gaaggaggctgtggaatagttagtt

SEQ ID NO: 2976717 - DNA, 25 bp, Homo sapien
gagctgggcggctcggccaggaaag

SEQ ID NO: 2976718 - DNA, 25 bp, Homo sapien
agtccacacgcacggggtgaaaaga

SEQ ID NO: 2976719 - DNA, 25 bp, Homo sapien
ctgagctgggcggctcggccaggaa

SEQ ID NO: 2976720 - DNA, 25 bp, Homo sapien
tcagtccacacgcacggggtgaaaa

SEQ ID NO: 2976721 - DNA, 25 bp, Homo sapien
tctagaaacacagggcggcctggcc

SEQ ID NO: 2976722 - DNA, 25 bp, Homo sapien
gtagtatgtccccttgccaaggatg

SEQ ID NO: 2976723 - DNA, 25 bp, Homo sapien
gccaaggatgcctacagtgtactcg

SEQ ID NO: 2976724 - DNA, 25 bp, Homo sapien
ttgtttctaagtgtagtatgtcccc

SEQ ID NO: 2976725 - DNA, 25 bp, Homo sapien
ctctgattagatcactgccctctag

SEQ ID NO: 2976726 - DNA, 25 bp, Homo sapien
ggagtcctagctggtagtccaagtt

SEQ ID NO: 2976727 - DNA, 25 bp, Homo sapien
tgttagtaagaaaatcctggccagg

SEQ ID NO: 2976728 - DNA, 25 bp, Homo sapien
ttagctaagtgtggtagtcccagct

SEQ ID NO: 2976729 - DNA, 25 bp, Homo sapien
gtgagaggaggggaggcagctggtt

SEQ ID NO: 2976730 - DNA, 25 bp, Homo sapien
gaggggaggcagctggttcatccat

SEQ ID NO: 2976731 - DNA, 25 bp, Homo sapien
gaggaggggaggcagctggttcatc

SEQ ID NO: 2976732 - DNA, 25 bp, Homo sapien
tgtgagaggaggggaggcagctggt

SEQ ID NO: 2976733 - DNA, 25 bp, Homo sapien
cctccttcccaggtcgtctgcttgg

SEQ ID NO: 2976734 - DNA, 25 bp, Homo sapien
agtaagccagtgctgggacccggtg

SEQ ID NO: 2976735 - DNA, 25 bp, Homo sapien
tccttcccaggtcgtctgcttggct

SEQ ID NO: 2976736 - DNA, 25 bp, Homo sapien
taagccagtgctgggacccggtgcc

SEQ ID NO: 2976737 - DNA, 25 bp, Homo sapien
gaaaggcgacatgtggttaggccct

SEQ ID NO: 2976738 - DNA, 25 bp, Homo sapien
aaggcgacatgtggttaggccctgc

SEQ ID NO: 2976739 - DNA, 25 bp, Homo sapien
acttggaaaggcgacatgtggttag

SEQ ID NO: 2976740 - DNA, 25 bp, Homo sapien
aggacttggaaaggcgacatgtggt

SEQ ID NO: 2976741 - DNA, 25 bp, Homo sapien
ctctgaaggttgttcgtaggaaggg

SEQ ID NO: 2976742 - DNA, 25 bp, Homo sapien
aggctctgaaggttgttcgtaggaa

SEQ ID NO: 2976743 - DNA, 25 bp, Homo sapien
tgaaggttgttcgtaggaagggtgc

SEQ ID NO: 2976744 - DNA, 25 bp, Homo sapien
gctctgaaggttgttcgtaggaagg

SEQ ID NO: 2976745 - DNA, 25 bp, Homo sapien
gaggaccacaaagcagtctgaaaag

SEQ ID NO: 2976746 - DNA, 25 bp, Homo sapien
agcaaagaggaccacaaagcagtct

SEQ ID NO: 2976747 - DNA, 25 bp, Homo sapien
tttggagctgtttgctcgagttttc

SEQ ID NO: 2976748 - DNA, 25 bp, Homo sapien
tggagctgtttgctcgagttttctc

SEQ ID NO: 2976749 - DNA, 25 bp, Homo sapien
tctgaggctccgtctcctgttggcc

SEQ ID NO: 2976750 - DNA, 25 bp, Homo sapien
tacctacaaccccaggcagaatctc

SEQ ID NO: 2976751 - DNA, 25 bp, Homo sapien
tgactacagtgcagaatgtttctgt

SEQ ID NO: 2976752 - DNA, 25 bp, Homo sapien
ctctccattgactacagtgcagaat

SEQ ID NO: 2976753 - DNA, 25 bp, Homo sapien
ctggggggatatccgccctctaagg

SEQ ID NO: 2976754 - DNA, 25 bp, Homo sapien
agagttcaggctttcgcatgcacca

SEQ ID NO: 2976755 - DNA, 25 bp, Homo sapien
tgcgaagctggactttcccaagaaa

SEQ ID NO: 2976756 - DNA, 25 bp, Homo sapien
actttccccaatctgatatctgagg

SEQ ID NO: 2976757 - DNA, 25 bp, Homo sapien
aaagaggccctggtagccctgaggc

SEQ ID NO: 2976758 - DNA, 25 bp, Homo sapien
tatgggctggcttaacttctctacc

SEQ ID NO: 2976759 - DNA, 25 bp, Homo sapien
ctgcggaaataacaagactgagttg

SEQ ID NO: 2976760 - DNA, 25 bp, Homo sapien
agactgagttgtccccagctcttct

SEQ ID NO: 2976761 - DNA, 25 bp, Homo sapien
tcttctgactcgctccctgaccctg

SEQ ID NO: 2976762 - DNA, 25 bp, Homo sapien
gctgtgaccggccaaagagcacctc

SEQ ID NO: 2976763 - DNA, 25 bp, Homo sapien
ctcggagacgtccacaccatcaaag

SEQ ID NO: 2976764 - DNA, 25 bp, Homo sapien
tcaaagcgccgtccttgaggtaagc

SEQ ID NO: 2976765 - DNA, 25 bp, Homo sapien
ccttgaggtaagctggcctgggcca

SEQ ID NO: 2976766 - DNA, 25 bp, Homo sapien
agccatgcatttgtagggcgttgca

SEQ ID NO: 2976767 - DNA, 25 bp, Homo sapien
catgcatttgtagggcgttgcagag

SEQ ID NO: 2976768 - DNA, 25 bp, Homo sapien
caagaagccatgcatttgtagggcg

SEQ ID NO: 2976769 - DNA, 25 bp, Homo sapien
gaagccatgcatttgtagggcgttg

SEQ ID NO: 2976770 - DNA, 25 bp, Homo sapien
cacaaatagaccctttgatgtgtgg

SEQ ID NO: 2976771 - DNA, 25 bp, Homo sapien
aggacacttctgtacatttgagtca

SEQ ID NO: 2976772 - DNA, 25 bp, Homo sapien
gaccctttgatgtgtgggtccctca

SEQ ID NO: 2976773 - DNA, 25 bp, Homo sapien
acttccatgtgacccttagcaaaga

SEQ ID NO: 2976774 - DNA, 25 bp, Homo sapien
gctgatatagcatcccctgaaggtg

SEQ ID NO: 2976775 - DNA, 25 bp, Homo sapien
cttaagtcccacagggtgctgatat

SEQ ID NO: 2976776 - DNA, 25 bp, Homo sapien
cacagggtgctgatatagcatcccc

SEQ ID NO: 2976777 - DNA, 25 bp, Homo sapien
tatagcatcccctgaaggtgggctt

SEQ ID NO: 2976778 - DNA, 25 bp, Homo sapien
gcaaaactgtgggatggctcattct

SEQ ID NO: 2976779 - DNA, 25 bp, Homo sapien
caactgatatacgatgcacgcggac

SEQ ID NO: 2976780 - DNA, 25 bp, Homo sapien
gaggcaacttccaaaatccacgagg

SEQ ID NO: 2976781 - DNA, 25 bp, Homo sapien
tatttatgtggcgttaccagaggca

SEQ ID NO: 2976782 - DNA, 25 bp, Homo sapien
tctgatgcaggtgaccctcagctgt

SEQ ID NO: 2976783 - DNA, 25 bp, Homo sapien
ggttctgatgcaggtgaccctcagc

SEQ ID NO: 2976784 - DNA, 25 bp, Homo sapien
tccaagggttctgatgcaggtgacc

SEQ ID NO: 2976785 - DNA, 25 bp, Homo sapien
aagggttctgatgcaggtgaccctc

SEQ ID NO: 2976786 - DNA, 25 bp, Homo sapien
ggtggcagagcttactaatagaaaa

SEQ ID NO: 2976787 - DNA, 25 bp, Homo sapien
gggtggcagagcttactaatagaaa

SEQ ID NO: 2976788 - DNA, 25 bp, Homo sapien
tggcagaactcggtgactcatgcct

SEQ ID NO: 2976789 - DNA, 25 bp, Homo sapien
aagggtggcagagcttactaataga

SEQ ID NO: 2976790 - DNA, 25 bp, Homo sapien
cggtaatgtagaaggccttgtaacg

SEQ ID NO: 2976791 - DNA, 25 bp, Homo sapien
aatgtagaaggccttgtaacgctcc

SEQ ID NO: 2976792 - DNA, 25 bp, Homo sapien
aaggccttgtaacgctccaggcgga

SEQ ID NO: 2976793 - DNA, 25 bp, Homo sapien
cttgtaacgctccaggcggacagtc

SEQ ID NO: 2976794 - DNA, 25 bp, Homo sapien
caaactgcaaggcggcagcgaggct

SEQ ID NO: 2976795 - DNA, 25 bp, Homo sapien
gagatcaaactgcaaggcggcagcg

SEQ ID NO: 2976796 - DNA, 25 bp, Homo sapien
aactgcaaggcggcagcgaggctgg

SEQ ID NO: 2976797 - DNA, 25 bp, Homo sapien
gatcaaactgcaaggcggcagcgag

SEQ ID NO: 2976798 - DNA, 25 bp, Homo sapien
ggcattgcctcactcgggaagctca

SEQ ID NO: 2976799 - DNA, 25 bp, Homo sapien
ctcgggaagctcaaggggtcaggga

SEQ ID NO: 2976800 - DNA, 25 bp, Homo sapien
cattgcctcactcgggaagctcaag

SEQ ID NO: 2976801 - DNA, 25 bp, Homo sapien
cgtgcgcgagccgaagcaggacgag

SEQ ID NO: 2976802 - DNA, 25 bp, Homo sapien
catctataagaaacccacagccagg

SEQ ID NO: 2976803 - DNA, 25 bp, Homo sapien
ctcaatgtaataaaagccatctata

SEQ ID NO: 2976804 - DNA, 25 bp, Homo sapien
tataagaaacccacagccaggggga

SEQ ID NO: 2976805 - DNA, 25 bp, Homo sapien
aagccatctataagaaacccacagc

SEQ ID NO: 2976806 - DNA, 25 bp, Homo sapien
tgccaacatgcaactcaatacaagg

SEQ ID NO: 2976807 - DNA, 25 bp, Homo sapien
ggaccctgtaggatggaatgctcac

SEQ ID NO: 2976808 - DNA, 25 bp, Homo sapien
tactatatgatgagggcagatgcca

SEQ ID NO: 2976809 - DNA, 25 bp, Homo sapien
aaaactgagattaggatggttccac

SEQ ID NO: 2976810 - DNA, 25 bp, Homo sapien
tgctatagaaaaagcagttaagggt

SEQ ID NO: 2976811 - DNA, 25 bp, Homo sapien
tttgctatagaaaaagcagttaagg

SEQ ID NO: 2976812 - DNA, 25 bp, Homo sapien
ttgctatagaaaaagcagttaaggg

SEQ ID NO: 2976813 - DNA, 25 bp, Homo sapien
caaatgcctcgctaaccctgacagt

SEQ ID NO: 2976814 - DNA, 25 bp, Homo sapien
ccagtgatgatcctgtggtccaaaa

SEQ ID NO: 2976815 - DNA, 25 bp, Homo sapien
ctagagagggaatgacaacaaatgc

SEQ ID NO: 2976816 - DNA, 25 bp, Homo sapien
cctgtgttgtaaagacgagagctgc

SEQ ID NO: 2976817 - DNA, 25 bp, Homo sapien
gcggtatcgtcttccaggttgaaaa

SEQ ID NO: 2976818 - DNA, 25 bp, Homo sapien
tcctgagtgtaatctgcgctggaga

SEQ ID NO: 2976819 - DNA, 25 bp, Homo sapien
gcaatgtcttggaggacgtctgcaa

SEQ ID NO: 2976820 - DNA, 25 bp, Homo sapien
ggaaacttatgctgcagctcaggcc

SEQ ID NO: 2976821 - DNA, 25 bp, Homo sapien
tgcggcttgacagcggcaggcaatt

SEQ ID NO: 2976822 - DNA, 25 bp, Homo sapien
ttatgcggcttgacagcggcaggca

SEQ ID NO: 2976823 - DNA, 25 bp, Homo sapien
cagcggcaggcaatttggtagggat

SEQ ID NO: 2976824 - DNA, 25 bp, Homo sapien
ttgacagcggcaggcaatttggtag

SEQ ID NO: 2976825 - DNA, 25 bp, Homo sapien
ctcctcgtggaataaaaattggtct

SEQ ID NO: 2976826 - DNA, 25 bp, Homo sapien
actcctcctcgtggaataaaaattg

SEQ ID NO: 2976827 - DNA, 25 bp, Homo sapien
ctcctcctcgtggaataaaaattgg

SEQ ID NO: 2976828 - DNA, 25 bp, Homo sapien
agcccgtgtgcttcccattaaggca

SEQ ID NO: 2976829 - DNA, 25 bp, Homo sapien
agctcagctgctctcgggtcggcgt

SEQ ID NO: 2976830 - DNA, 25 bp, Homo sapien
gatatgcaaggctaactccaaaact

SEQ ID NO: 2976831 - DNA, 25 bp, Homo sapien
gcaggttaggttaaacaattgccca

SEQ ID NO: 2976832 - DNA, 25 bp, Homo sapien
tactcgagccctactgagacggaat

SEQ ID NO: 2976833 - DNA, 25 bp, Homo sapien
gagcaagagtcaggaaatcaggccc

SEQ ID NO: 2976834 - DNA, 25 bp, Homo sapien
tcagaagggcaaaacgaagcagtca

SEQ ID NO: 2976835 - DNA, 25 bp, Homo sapien
gctgccttaagaacgcgggtcatca

SEQ ID NO: 2976836 - DNA, 25 bp, Homo sapien
tggcagatggtgaggattatgactt

SEQ ID NO: 2976837 - DNA, 25 bp, Homo sapien
aagatggcagatggtgaggattatg

SEQ ID NO: 2976838 - DNA, 25 bp, Homo sapien
tagccactcaggaagttaaattgag

SEQ ID NO: 2976839 - DNA, 25 bp, Homo sapien
cagatggtgaggattatgacttgtc

SEQ ID NO: 2976840 - DNA, 25 bp, Homo sapien
tctagtgggcaagtgctctgcaccg

SEQ ID NO: 2976841 - DNA, 25 bp, Homo sapien
catgtcagagggagactgcgtccca

SEQ ID NO: 2976842 - DNA, 25 bp, Homo sapien
tctcagtggcaaacctctagtgggc

SEQ ID NO: 2976843 - DNA, 25 bp, Homo sapien
cctgaaagtagatcccaaggccaga

SEQ ID NO: 2976844 - DNA, 25 bp, Homo sapien
cagctttacaatggctcttctgaag

SEQ ID NO: 2976845 - DNA, 25 bp, Homo sapien
ttattgccagaataatacgtcctgg

SEQ ID NO: 2976846 - DNA, 25 bp, Homo sapien
tacgtcctggattgttctcagtggg

SEQ ID NO: 2976847 - DNA, 25 bp, Homo sapien
gtagcattgggaaccttttaacagc

SEQ ID NO: 2976848 - DNA, 25 bp, Homo sapien
aagaattacagccaaacaattacag

SEQ ID NO: 2976849 - DNA, 25 bp, Homo sapien
agaattacagccaaacaattacagt

SEQ ID NO: 2976850 - DNA, 25 bp, Homo sapien
gaagaattacagccaaacaattaca

SEQ ID NO: 2976851 - DNA, 25 bp, Homo sapien
aaataccaagatgagaatcatttag

SEQ ID NO: 2976852 - DNA, 25 bp, Homo sapien
catttagaatcatgggacttccttt

SEQ ID NO: 2976853 - DNA, 25 bp, Homo sapien
cactgatgatgccattggttcttga

SEQ ID NO: 2976854 - DNA, 25 bp, Homo sapien
tggttcttgagttgagagcaggcac

SEQ ID NO: 2976855 - DNA, 25 bp, Homo sapien
tattgagggagcgttccataccaca

SEQ ID NO: 2976856 - DNA, 25 bp, Homo sapien
tcctttaaagagcttggccagacag

SEQ ID NO: 2976857 - DNA, 25 bp, Homo sapien
tccatgaaagtcctgccaactgcag

SEQ ID NO: 2976858 - DNA, 25 bp, Homo sapien
cacttggtatctaacgcagctgtaa

SEQ ID NO: 2976859 - DNA, 25 bp, Homo sapien
ggaactgccatgcatgaaatacttc

SEQ ID NO: 2976860 - DNA, 25 bp, Homo sapien
aataatacccatctcccagggttgg

SEQ ID NO: 2976861 - DNA, 25 bp, Homo sapien
tgggtgccatccaagtcacctagac

SEQ ID NO: 2976862 - DNA, 25 bp, Homo sapien
ttcatcaagctaggagtaaacaaga

SEQ ID NO: 2976863 - DNA, 25 bp, Homo sapien
ctgactttgagttatctgcccattt

SEQ ID NO: 2976864 - DNA, 25 bp, Homo sapien
tcctgactttgagttatctgcccat

SEQ ID NO: 2976865 - DNA, 25 bp, Homo sapien
actgtcaaacctaaaggacacttgt

SEQ ID NO: 2976866 - DNA, 25 bp, Homo sapien
gtcaaacctaaaggacacttgtgac

SEQ ID NO: 2976867 - DNA, 25 bp, Homo sapien
cctggcaccatagggctgactcctt

SEQ ID NO: 2976868 - DNA, 25 bp, Homo sapien
ggcaccatagggctgactccttgag

SEQ ID NO: 2976869 - DNA, 25 bp, Homo sapien
caccatagggctgactccttgagct

SEQ ID NO: 2976870 - DNA, 25 bp, Homo sapien
gagcttcctccacgtactgacacat

SEQ ID NO: 2976871 - DNA, 25 bp, Homo sapien
cactttggcatatgcagctgcctga

SEQ ID NO: 2976872 - DNA, 25 bp, Homo sapien
cagctgcctgatggggataaacatt

SEQ ID NO: 2976873 - DNA, 25 bp, Homo sapien
ctttggcatatgcagctgcctgatg

SEQ ID NO: 2976874 - DNA, 25 bp, Homo sapien
agtctccactttggcatatgcagct

SEQ ID NO: 2976875 - DNA, 25 bp, Homo sapien
ctcaggttcccacatgaagtagtgg

SEQ ID NO: 2976876 - DNA, 25 bp, Homo sapien
cattccagtctgctcatctgagctg

SEQ ID NO: 2976877 - DNA, 25 bp, Homo sapien
ttgtgctggccttgtttatgactgt

SEQ ID NO: 2976878 - DNA, 25 bp, Homo sapien
ttcccacatgaagtagtgggtgttc

SEQ ID NO: 2976879 - DNA, 25 bp, Homo sapien
tgcgaggcatttccggggactccca

SEQ ID NO: 2976880 - DNA, 25 bp, Homo sapien
gtgcgaggcatttccggggactccc

SEQ ID NO: 2976881 - DNA, 25 bp, Homo sapien
gacttaagcccccatctgtggaaca

SEQ ID NO: 2976882 - DNA, 25 bp, Homo sapien
tcaggaatgccagcggaagtgggtg

SEQ ID NO: 2976883 - DNA, 25 bp, Homo sapien
cctatagatagaggctgacttaagc

SEQ ID NO: 2976884 - DNA, 25 bp, Homo sapien
attccagagtataaggtcagacaag

SEQ ID NO: 2976885 - DNA, 25 bp, Homo sapien
cctctctgggtgtcttgggtcgcct

SEQ ID NO: 2976886 - DNA, 25 bp, Homo sapien
tctctctccgcgcagctatcgtgcg

SEQ ID NO: 2976887 - DNA, 25 bp, Homo sapien
tgggtcgcctttgttcctccgcctg

SEQ ID NO: 2976888 - DNA, 25 bp, Homo sapien
cccttgacgcctctgccttttctcc

SEQ ID NO: 2976889 - DNA, 25 bp, Homo sapien
taggcgacagctccaccggaaacgg

SEQ ID NO: 2976890 - DNA, 25 bp, Homo sapien
ggctaggcgacagctccaccggaaa

SEQ ID NO: 2976891 - DNA, 25 bp, Homo sapien
tgcgatagcggctaggcgacagctc

SEQ ID NO: 2976892 - DNA, 25 bp, Homo sapien
gctccactctgcgatagcggctagg

SEQ ID NO: 2976893 - DNA, 25 bp, Homo sapien
ctgcgggtgcgaggcggcggcgtac

SEQ ID NO: 2976894 - DNA, 25 bp, Homo sapien
gcgaggctgcgggtgcgaggcggcg

SEQ ID NO: 2976895 - DNA, 25 bp, Homo sapien
gggcgcgaggctgcgggtgcgaggc

SEQ ID NO: 2976896 - DNA, 25 bp, Homo sapien
gcgggcgcgaggctgcgggtgcgag

SEQ ID NO: 2976897 - DNA, 25 bp, Homo sapien
ctgagcccccggccgaccccactca

SEQ ID NO: 2976898 - DNA, 25 bp, Homo sapien
tgagcccccggccgaccccactcac

SEQ ID NO: 2976899 - DNA, 25 bp, Homo sapien
tcgcctgagcccccggccgacccca

SEQ ID NO: 2976900 - DNA, 25 bp, Homo sapien
caggaaatgggggagggtgagcgaa

SEQ ID NO: 2976901 - DNA, 25 bp, Homo sapien
ttcaggaaatgggggagggtgagcg

SEQ ID NO: 2976902 - DNA, 25 bp, Homo sapien
cttcaggaaatgggggagggtgagc

SEQ ID NO: 2976903 - DNA, 25 bp, Homo sapien
ggaaatgggggagggtgagcgaaga

SEQ ID NO: 2976904 - DNA, 25 bp, Homo sapien
agacgatggcggaccccagtaaaat

SEQ ID NO: 2976905 - DNA, 25 bp, Homo sapien
accggcggacgagacgatggcggac

SEQ ID NO: 2976906 - DNA, 25 bp, Homo sapien
aagaagagccaggaccggcggacga

SEQ ID NO: 2976907 - DNA, 25 bp, Homo sapien
ccaggaccggcggacgagacgatgg

SEQ ID NO: 2976908 - DNA, 25 bp, Homo sapien
tactgctagcaatgacgagtcgtca

SEQ ID NO: 2976909 - DNA, 25 bp, Homo sapien
ggaaagatcactccgctatgaagag

SEQ ID NO: 2976910 - DNA, 25 bp, Homo sapien
caagaggaaattcaggagcccgact

SEQ ID NO: 2976911 - DNA, 25 bp, Homo sapien
gagacttcaagctacgccagtcgga

SEQ ID NO: 2976912 - DNA, 25 bp, Homo sapien
aactgttcctgattcagaccgcacc

SEQ ID NO: 2976913 - DNA, 25 bp, Homo sapien
tgtttgctttcctcgctctgctaaa

SEQ ID NO: 2976914 - DNA, 25 bp, Homo sapien
ttagaccagccaagttacggctccc

SEQ ID NO: 2976915 - DNA, 25 bp, Homo sapien
gctcccctagggtcatcttgagtaa

SEQ ID NO: 2976916 - DNA, 25 bp, Homo sapien
gtaaagagctattctaaagtgctac

SEQ ID NO: 2976917 - DNA, 25 bp, Homo sapien
aacagaccattagaaagttcgtggc

SEQ ID NO: 2976918 - DNA, 25 bp, Homo sapien
agttcgtggctccaagacaagcaca

SEQ ID NO: 2976919 - DNA, 25 bp, Homo sapien
cataaaggtcaacaacaagtagact

SEQ ID NO: 2976920 - DNA, 25 bp, Homo sapien
tgtaagcgaaagcaagtcagcacaa

SEQ ID NO: 2976921 - DNA, 25 bp, Homo sapien
tcctaacgtcacagagcaaaccact

SEQ ID NO: 2976922 - DNA, 25 bp, Homo sapien
cactggagtgaggatctgattagcc

SEQ ID NO: 2976923 - DNA, 25 bp, Homo sapien
tatcccatgggagtatcctaacgtc

SEQ ID NO: 2976924 - DNA, 25 bp, Homo sapien
caggatacagaattaccagggcaca

SEQ ID NO: 2976925 - DNA, 25 bp, Homo sapien
tcatgatgacgtgggaagtaggtaa

SEQ ID NO: 2976926 - DNA, 25 bp, Homo sapien
tcaggcccttaagggaatttcattc

SEQ ID NO: 2976927 - DNA, 25 bp, Homo sapien
tctgcagagacgggtgctgaagtca

SEQ ID NO: 2976928 - DNA, 25 bp, Homo sapien
gggactagggaataaaatatgtaca

SEQ ID NO: 2976929 - DNA, 25 bp, Homo sapien
taaattcattagacaactgattcac

SEQ ID NO: 2976930 - DNA, 25 bp, Homo sapien
caacagtgagagtcgataacctcag

SEQ ID NO: 2976931 - DNA, 25 bp, Homo sapien
actataaagcaaaatgtcaatctgg

SEQ ID NO: 2976932 - DNA, 25 bp, Homo sapien
gaatgccatgggtctctcaggtcga

SEQ ID NO: 2976933 - DNA, 25 bp, Homo sapien
tcacattctcgaaggctgcgtgcct

SEQ ID NO: 2976934 - DNA, 25 bp, Homo sapien
tatgcttctggacgtagagctcaca

SEQ ID NO: 2976935 - DNA, 25 bp, Homo sapien
gaatctttgagcagcgcttgaatgt

SEQ ID NO: 2976936 - DNA, 25 bp, Homo sapien
tagccaagtacagttagcatacagg

SEQ ID NO: 2976937 - DNA, 25 bp, Homo sapien
ttttcaaggcgcaacaagtcctgac

SEQ ID NO: 2976938 - DNA, 25 bp, Homo sapien
catatgccatatacgtaggtcacaa

SEQ ID NO: 2976939 - DNA, 25 bp, Homo sapien
caaaacgggaggagcattaactgcc

SEQ ID NO: 2976940 - DNA, 25 bp, Homo sapien
agagggatcaccttacagtgaccca

SEQ ID NO: 2976941 - DNA, 25 bp, Homo sapien
caaaaccggatctccaggaatgcac

SEQ ID NO: 2976942 - DNA, 25 bp, Homo sapien
gatggtttctattgatgtccaaaga

SEQ ID NO: 2976943 - DNA, 25 bp, Homo sapien
ggcaactacaagctttgaaactagc

SEQ ID NO: 2976944 - DNA, 25 bp, Homo sapien
gattctgaatctgttttgcctcctc

SEQ ID NO: 2976945 - DNA, 25 bp, Homo sapien
ctgcagattctgaatctgttttgcc

SEQ ID NO: 2976946 - DNA, 25 bp, Homo sapien
cagattctgaatctgttttgcctcc

SEQ ID NO: 2976947 - DNA, 25 bp, Homo sapien
gcagattctgaatctgttttgcctc

SEQ ID NO: 2976948 - DNA, 25 bp, Homo sapien
gacctcagcgctgatagcacctcgt

SEQ ID NO: 2976949 - DNA, 25 bp, Homo sapien
ctttctaacataggatgccgcatct

SEQ ID NO: 2976950 - DNA, 25 bp, Homo sapien
gaggagaaatctcatcctcccttga

SEQ ID NO: 2976951 - DNA, 25 bp, Homo sapien
atcttcctccgtgtagacctcagcg

SEQ ID NO: 2976952 - DNA, 25 bp, Homo sapien
cccaagaattgtacaggatggatga

SEQ ID NO: 2976953 - DNA, 25 bp, Homo sapien
ccaccaagtgggtcccaaaagcatc

SEQ ID NO: 2976954 - DNA, 25 bp, Homo sapien
tcaaaggagactagatgaccaccaa

SEQ ID NO: 2976955 - DNA, 25 bp, Homo sapien
ggatgaagttccaccctgttttgta

SEQ ID NO: 2976956 - DNA, 25 bp, Homo sapien
ctctcattatcatcaagatgtgaaa

SEQ ID NO: 2976957 - DNA, 25 bp, Homo sapien
ttggctaaagcggccattgtcttgt

SEQ ID NO: 2976958 - DNA, 25 bp, Homo sapien
ggctttggctaaagcggccattgtc

SEQ ID NO: 2976959 - DNA, 25 bp, Homo sapien
ctcattatcatcaagatgtgaaaac

SEQ ID NO: 2976960 - DNA, 25 bp, Homo sapien
cctgcgataaaggagaccgaaaaca

SEQ ID NO: 2976961 - DNA, 25 bp, Homo sapien
cacagtctctcctgcgataaaggag

SEQ ID NO: 2976962 - DNA, 25 bp, Homo sapien
taaaggagaccgaaaacatggcatc

SEQ ID NO: 2976963 - DNA, 25 bp, Homo sapien
gtctctcctgcgataaaggagaccg

SEQ ID NO: 2976964 - DNA, 25 bp, Homo sapien
acaatattgcatgctccagaggccc

SEQ ID NO: 2976965 - DNA, 25 bp, Homo sapien
caatattgcatgctccagaggccct

SEQ ID NO: 2976966 - DNA, 25 bp, Homo sapien
gatccatgttagtctatataggcaa

SEQ ID NO: 2976967 - DNA, 25 bp, Homo sapien
cttattttacagtggtactgtgaga

SEQ ID NO: 2976968 - DNA, 25 bp, Homo sapien
atatatacccactcataaaatgtca

SEQ ID NO: 2976969 - DNA, 25 bp, Homo sapien
ggcatttataacaaggacattagaa

SEQ ID NO: 2976970 - DNA, 25 bp, Homo sapien
tctccttgatcaatcacatagaagt

SEQ ID NO: 2976971 - DNA, 25 bp, Homo sapien
tccttgatcaatcacatagaagtta

SEQ ID NO: 2976972 - DNA, 25 bp, Homo sapien
cgtctctccttgatcaatcacatag

SEQ ID NO: 2976973 - DNA, 25 bp, Homo sapien
atccgtctctccttgatcaatcaca

SEQ ID NO: 2976974 - DNA, 25 bp, Homo sapien
tgacatacaagggatgtaatgaccc

SEQ ID NO: 2976975 - DNA, 25 bp, Homo sapien
cactattcttattgctcggaagcga

SEQ ID NO: 2976976 - DNA, 25 bp, Homo sapien
ctagctaatggctgggtctagaatc

SEQ ID NO: 2976977 - DNA, 25 bp, Homo sapien
gctcggaagcgatcaatacattggc

SEQ ID NO: 2976978 - DNA, 25 bp, Homo sapien
tattttctagatacaaacacttaaa

SEQ ID NO: 2976979 - DNA, 25 bp, Homo sapien
aaagtgcaagtgacatcaaaaaagt

SEQ ID NO: 2976980 - DNA, 25 bp, Homo sapien
ctaaagtgcaagtgacatcaaaaaa

SEQ ID NO: 2976981 - DNA, 25 bp, Homo sapien
taaaaggtcacaatcctgaactttg

SEQ ID NO: 2976982 - DNA, 25 bp, Homo sapien
tccataaatcaaagcaagttctcca

SEQ ID NO: 2976983 - DNA, 25 bp, Homo sapien
ggctgctctcggtgttccataaatc

SEQ ID NO: 2976984 - DNA, 25 bp, Homo sapien
ggtcgatgccccacaatttcacatt

SEQ ID NO: 2976985 - DNA, 25 bp, Homo sapien
gattcttctatagctgtctcggtcg

SEQ ID NO: 2976986 - DNA, 25 bp, Homo sapien
tgattttgtgccactgccaacccaa

SEQ ID NO: 2976987 - DNA, 25 bp, Homo sapien
tgatatccccaagacgtgtaattat

SEQ ID NO: 2976988 - DNA, 25 bp, Homo sapien
gcccaattcctagcatttgcaacca

SEQ ID NO: 2976989 - DNA, 25 bp, Homo sapien
cttccaaatacagtcgaaataccgg

SEQ ID NO: 2976990 - DNA, 25 bp, Homo sapien
taaggaattcctcatacatcttccg

SEQ ID NO: 2976991 - DNA, 25 bp, Homo sapien
aattcctcatacatcttccgctttc

SEQ ID NO: 2976992 - DNA, 25 bp, Homo sapien
atagagactttactaaggaattcct

SEQ ID NO: 2976993 - DNA, 25 bp, Homo sapien
tcttccgctttctcagtgtgcttcc

SEQ ID NO: 2976994 - DNA, 25 bp, Homo sapien
ttcggtagcccagtggctaggttaa

SEQ ID NO: 2976995 - DNA, 25 bp, Homo sapien
gagcaggattctcatactgcctgca

SEQ ID NO: 2976996 - DNA, 25 bp, Homo sapien
tgcagatagcccttagatccttact

SEQ ID NO: 2976997 - DNA, 25 bp, Homo sapien
gattctcatactgcctgcagatagc

SEQ ID NO: 2976998 - DNA, 25 bp, Homo sapien
ttccaatgcatcagctaccgtaaga

SEQ ID NO: 2976999 - DNA, 25 bp, Homo sapien
catcagctaccgtaagacgttccca

SEQ ID NO: 2977000 - DNA, 25 bp, Homo sapien
caatgcatcagctaccgtaagacgt

SEQ ID NO: 2977001 - DNA, 25 bp, Homo sapien
tgcaccacaatcttctgcccatctt

SEQ ID NO: 2977002 - DNA, 25 bp, Homo sapien
ctcttcattttctgaccgacgttgt

SEQ ID NO: 2977003 - DNA, 25 bp, Homo sapien
ctgaccgacgttgtagcacagcagc

SEQ ID NO: 2977004 - DNA, 25 bp, Homo sapien
cattttctgaccgacgttgtagcac

SEQ ID NO: 2977005 - DNA, 25 bp, Homo sapien
tttctgaccgacgttgtagcacagc

SEQ ID NO: 2977006 - DNA, 25 bp, Homo sapien
ccttaaagcagtgcacttctgagaa

SEQ ID NO: 2977007 - DNA, 25 bp, Homo sapien
tctcagagccaaaaaagactgcagt

SEQ ID NO: 2977008 - DNA, 25 bp, Homo sapien
caaagatgggtaacaggctaacttc

SEQ ID NO: 2977009 - DNA, 25 bp, Homo sapien
cactgagaggtgacttaaagaaacc

SEQ ID NO: 2977010 - DNA, 25 bp, Homo sapien
cagcacgaggacgattcatcagtag

SEQ ID NO: 2977011 - DNA, 25 bp, Homo sapien
gagcaacaactgtggcagcacgagg

SEQ ID NO: 2977012 - DNA, 25 bp, Homo sapien
cgttcaaatctaggtcggtccagct

SEQ ID NO: 2977013 - DNA, 25 bp, Homo sapien
gagcatgggccaagaacacgttcaa

SEQ ID NO: 2977014 - DNA, 25 bp, Homo sapien
taatgctccaaattgaaaatggtgc

SEQ ID NO: 2977015 - DNA, 25 bp, Homo sapien
taaagcagtttgcatgagtgaagca

SEQ ID NO: 2977016 - DNA, 25 bp, Homo sapien
cagtggccacttggcgctgcaagta

SEQ ID NO: 2977017 - DNA, 25 bp, Homo sapien
taaacagacaggaagctgcgatgcc

SEQ ID NO: 2977018 - DNA, 25 bp, Homo sapien
caggcagattagcttggcaaacaac

SEQ ID NO: 2977019 - DNA, 25 bp, Homo sapien
taattcaataggtgctgggatctgc

SEQ ID NO: 2977020 - DNA, 25 bp, Homo sapien
tgggatctgccctcaccaaaaagca

SEQ ID NO: 2977021 - DNA, 25 bp, Homo sapien
tacagaagggagtaaacagcaagcc

SEQ ID NO: 2977022 - DNA, 25 bp, Homo sapien
tcctcagaaatctaagagcatcaga

SEQ ID NO: 2977023 - DNA, 25 bp, Homo sapien
actgaatctagaaaaggtacacatg

SEQ ID NO: 2977024 - DNA, 25 bp, Homo sapien
tcatttttgcccacccgagtagact

SEQ ID NO: 2977025 - DNA, 25 bp, Homo sapien
tgatgtttccccattaagtctggga

SEQ ID NO: 2977026 - DNA, 25 bp, Homo sapien
cagcacttcatcactacacttaggg

SEQ ID NO: 2977027 - DNA, 25 bp, Homo sapien
ttttctacatatggcacaacacagc

SEQ ID NO: 2977028 - DNA, 25 bp, Homo sapien
gcactgtaacccagacctaaaagaa

SEQ ID NO: 2977029 - DNA, 25 bp, Homo sapien
ttaggtgtagtccagatgaagtcac

SEQ ID NO: 2977030 - DNA, 25 bp, Homo sapien
tttcagaaaatacgcctggagccag

SEQ ID NO: 2977031 - DNA, 25 bp, Homo sapien
ttggcagccttgatcccaggagagt

SEQ ID NO: 2977032 - DNA, 25 bp, Homo sapien
gagtgtcatagtcgacggcccagtg

SEQ ID NO: 2977033 - DNA, 25 bp, Homo sapien
catagtggcccatggacagcagagt

SEQ ID NO: 2977034 - DNA, 25 bp, Homo sapien
tccatgtttattagcctcgaggcaa

SEQ ID NO: 2977035 - DNA, 25 bp, Homo sapien
gagggattgtccttgctagcctgga

SEQ ID NO: 2977036 - DNA, 25 bp, Homo sapien
aaacttggtattggtggtgcctgca

SEQ ID NO: 2977037 - DNA, 25 bp, Homo sapien
tctagtttcctgatctgagagcgag

SEQ ID NO: 2977038 - DNA, 25 bp, Homo sapien
agaggggccacgttacccaagtcat

SEQ ID NO: 2977039 - DNA, 25 bp, Homo sapien
gccacgttacccaagtcatgctttc

SEQ ID NO: 2977040 - DNA, 25 bp, Homo sapien
cacgttacccaagtcatgctttcct

SEQ ID NO: 2977041 - DNA, 25 bp, Homo sapien
gggccacgttacccaagtcatgctt

SEQ ID NO: 2977042 - DNA, 25 bp, Homo sapien
tagggtctcctagagttcggcccca

SEQ ID NO: 2977043 - DNA, 25 bp, Homo sapien
gatctgcagcccacaggttagggtc

SEQ ID NO: 2977044 - DNA, 25 bp, Homo sapien
gcaactacatgccttgaaaattttg

SEQ ID NO: 2977045 - DNA, 25 bp, Homo sapien
tatgtattgagtccttagacagagc

SEQ ID NO: 2977046 - DNA, 25 bp, Homo sapien
cagggcgctggcagattccatttct

SEQ ID NO: 2977047 - DNA, 25 bp, Homo sapien
ctaagaagtccaataccagggcgct

SEQ ID NO: 2977048 - DNA, 25 bp, Homo sapien
aagtccaataccagggcgctggcag

SEQ ID NO: 2977049 - DNA, 25 bp, Homo sapien
gggcgctggcagattccatttctgg

SEQ ID NO: 2977050 - DNA, 25 bp, Homo sapien
aattgctaagtcaaagggtacactc

SEQ ID NO: 2977051 - DNA, 25 bp, Homo sapien
tatctcttaaatacccctgtcctag

SEQ ID NO: 2977052 - DNA, 25 bp, Homo sapien
gggtacactcattacacgttttgaa

SEQ ID NO: 2977053 - DNA, 25 bp, Homo sapien
cagttgtgcaaatcattctacagga

SEQ ID NO: 2977054 - DNA, 25 bp, Homo sapien
ggactccaggctcccgtttaggcca

SEQ ID NO: 2977055 - DNA, 25 bp, Homo sapien
caggctcccgtttaggccaccgaag

SEQ ID NO: 2977056 - DNA, 25 bp, Homo sapien
ccgtttaggccaccgaagctccatt

SEQ ID NO: 2977057 - DNA, 25 bp, Homo sapien
aggccaccgaagctccatttccagg

SEQ ID NO: 2977058 - DNA, 25 bp, Homo sapien
aagaagactgaggtcgtgaatatca

SEQ ID NO: 2977059 - DNA, 25 bp, Homo sapien
cagtaaagagactattccaggatcc

SEQ ID NO: 2977060 - DNA, 25 bp, Homo sapien
taagagggttaaggcacaggcaaca

SEQ ID NO: 2977061 - DNA, 25 bp, Homo sapien
ttaagaggtaatggatggctgggca

SEQ ID NO: 2977062 - DNA, 25 bp, Homo sapien
tgctaaagtaggaatttggatgaga

SEQ ID NO: 2977063 - DNA, 25 bp, Homo sapien
aaagtaggaatttggatgagagtcc

SEQ ID NO: 2977064 - DNA, 25 bp, Homo sapien
agctgtgccctggacagtgaatttg

SEQ ID NO: 2977065 - DNA, 25 bp, Homo sapien
cctggacagtgaatttggcagtgat

SEQ ID NO: 2977066 - DNA, 25 bp, Homo sapien
caagctcaagatgtatgcaaggctg

SEQ ID NO: 2977067 - DNA, 25 bp, Homo sapien
ctcctgaggctctaggcgagaatcc

SEQ ID NO: 2977068 - DNA, 25 bp, Homo sapien
tatcctaccacatgggtgactggtc

SEQ ID NO: 2977069 - DNA, 25 bp, Homo sapien
caaaggcccagctatcttctgagaa

SEQ ID NO: 2977070 - DNA, 25 bp, Homo sapien
cctggccgagcctagacatttttaa

SEQ ID NO: 2977071 - DNA, 25 bp, Homo sapien
gatcctaaaaacactctgaggcaag

SEQ ID NO: 2977072 - DNA, 25 bp, Homo sapien
tacttatcgatatgcagccttatcc

SEQ ID NO: 2977073 - DNA, 25 bp, Homo sapien
ccttacaggttatttgatacttatc

SEQ ID NO: 2977074 - DNA, 25 bp, Homo sapien
gggaaaggcaccagtgcttccagcc

SEQ ID NO: 2977075 - DNA, 25 bp, Homo sapien
ggcctcctgttgtcagggaaaggca

SEQ ID NO: 2977076 - DNA, 25 bp, Homo sapien
aatggccaaggacaatctgctggct

SEQ ID NO: 2977077 - DNA, 25 bp, Homo sapien
tggcttaggcctgtctccatctcag

SEQ ID NO: 2977078 - DNA, 25 bp, Homo sapien
tggaatggccaaggacaatctgctg

SEQ ID NO: 2977079 - DNA, 25 bp, Homo sapien
gctggcttaggcctgtctccatctc

SEQ ID NO: 2977080 - DNA, 25 bp, Homo sapien
ccccgaaccaagatggaaatgcaga

SEQ ID NO: 2977081 - DNA, 25 bp, Homo sapien
cagggaggcggagtcattagaagca

SEQ ID NO: 2977082 - DNA, 25 bp, Homo sapien
gtccaaccaatcactgatgccaggg

SEQ ID NO: 2977083 - DNA, 25 bp, Homo sapien
cattagaagcacgtggctcagagtg

SEQ ID NO: 2977084 - DNA, 25 bp, Homo sapien
gcttgccctggtcgctctaatatag

SEQ ID NO: 2977085 - DNA, 25 bp, Homo sapien
ggaatggtcacttgcccttggcatg

SEQ ID NO: 2977086 - DNA, 25 bp, Homo sapien
tctaatatagctgttgcagagccag

SEQ ID NO: 2977087 - DNA, 25 bp, Homo sapien
gattttccactatgtccagctgtaa

SEQ ID NO: 2977088 - DNA, 25 bp, Homo sapien
gtgcaaagcatacagccacaccaag

SEQ ID NO: 2977089 - DNA, 25 bp, Homo sapien
cagaacctccagatgagaaatcaac

SEQ ID NO: 2977090 - DNA, 25 bp, Homo sapien
caccaagctggacatctgacctaca

SEQ ID NO: 2977091 - DNA, 25 bp, Homo sapien
taaattcagctaagtccctgtgcaa

SEQ ID NO: 2977092 - DNA, 25 bp, Homo sapien
cagacggccattatcaggttttttc

SEQ ID NO: 2977093 - DNA, 25 bp, Homo sapien
tccagacggccattatcaggttttt

SEQ ID NO: 2977094 - DNA, 25 bp, Homo sapien
gtccagacggccattatcaggtttt

SEQ ID NO: 2977095 - DNA, 25 bp, Homo sapien
agacggccattatcaggttttttct

SEQ ID NO: 2977096 - DNA, 25 bp, Homo sapien
aaaatgtacattcctggccccacct

SEQ ID NO: 2977097 - DNA, 25 bp, Homo sapien
gccaatgttagacaatggatcctac

SEQ ID NO: 2977098 - DNA, 25 bp, Homo sapien
ccaaacttcaatgtgtgtcagaatc

SEQ ID NO: 2977099 - DNA, 25 bp, Homo sapien
tatgacacaagttggatggccaatg

SEQ ID NO: 2977100 - DNA, 25 bp, Homo sapien
gagtgggattggttaacagctccat

SEQ ID NO: 2977101 - DNA, 25 bp, Homo sapien
tgcagctctgccaatgattgaacaa

SEQ ID NO: 2977102 - DNA, 25 bp, Homo sapien
taaggtcatactcttcttgggctag

SEQ ID NO: 2977103 - DNA, 25 bp, Homo sapien
gctcctggccaatcactgagtaaca

SEQ ID NO: 2977104 - DNA, 25 bp, Homo sapien
ctgagtcgcacccttgcatgtgaca

SEQ ID NO: 2977105 - DNA, 25 bp, Homo sapien
tgtgacattgatcatctcgtgagca

SEQ ID NO: 2977106 - DNA, 25 bp, Homo sapien
ttttcgggcaatgggaatagaacaa

SEQ ID NO: 2977107 - DNA, 25 bp, Homo sapien
tgagcactggtttttcgggcaatgg

SEQ ID NO: 2977108 - DNA, 25 bp, Homo sapien
tatctccctccacatggaggcagga

SEQ ID NO: 2977109 - DNA, 25 bp, Homo sapien
aggacacgctctggccttgcccacc

SEQ ID NO: 2977110 - DNA, 25 bp, Homo sapien
tgcggcaaagcaagtgtaagaatct

SEQ ID NO: 2977111 - DNA, 25 bp, Homo sapien
ccctggaggctaagatggaattcag

SEQ ID NO: 2977112 - DNA, 25 bp, Homo sapien
gggagtaacttctttagcagggcag

SEQ ID NO: 2977113 - DNA, 25 bp, Homo sapien
tctgggtgccagacgttaatctggg

SEQ ID NO: 2977114 - DNA, 25 bp, Homo sapien
aggatcaaatcaggcggcagatatc

SEQ ID NO: 2977115 - DNA, 25 bp, Homo sapien
cccaatgcccatataaccagattat

SEQ ID NO: 2977116 - DNA, 25 bp, Homo sapien
caaatcaggcggcagatatcttacc

SEQ ID NO: 2977117 - DNA, 25 bp, Homo sapien
gcggcagatatcttacccaatgccc

SEQ ID NO: 2977118 - DNA, 25 bp, Homo sapien
tagacacgaacaaggaagtctccgt

SEQ ID NO: 2977119 - DNA, 25 bp, Homo sapien
cgaacaaggaagtctccgtggtgac

SEQ ID NO: 2977120 - DNA, 25 bp, Homo sapien
tgaaccatatagacacgaacaagga

SEQ ID NO: 2977121 - DNA, 25 bp, Homo sapien
acaaggaagtctccgtggtgacatg

SEQ ID NO: 2977122 - DNA, 25 bp, Homo sapien
aatgttcctcggaagacatctttaa

SEQ ID NO: 2977123 - DNA, 25 bp, Homo sapien
atgttcctcggaagacatctttaat

SEQ ID NO: 2977124 - DNA, 25 bp, Homo sapien
caaaatgttcctcggaagacatctt

SEQ ID NO: 2977125 - DNA, 25 bp, Homo sapien
aaaatgttcctcggaagacatcttt

SEQ ID NO: 2977126 - DNA, 25 bp, Homo sapien
gcatggcaattcatctgggacatta

SEQ ID NO: 2977127 - DNA, 25 bp, Homo sapien
gcagagaaggacaagtacaaggaag

SEQ ID NO: 2977128 - DNA, 25 bp, Homo sapien
tattggttagggcataaggttgagc

SEQ ID NO: 2977129 - DNA, 25 bp, Homo sapien
gatctatcatttaaacaggtgcagc

SEQ ID NO: 2977130 - DNA, 25 bp, Homo sapien
tagctccgaatcttccacctctccc

SEQ ID NO: 2977131 - DNA, 25 bp, Homo sapien
cctctagctccgaatcttccacctc

SEQ ID NO: 2977132 - DNA, 25 bp, Homo sapien
cacctctcccagttccatacttctt

SEQ ID NO: 2977133 - DNA, 25 bp, Homo sapien
cccagttccatacttctttgccaga

SEQ ID NO: 2977134 - DNA, 25 bp, Homo sapien
tgtaaatggctatcttttccctctg

SEQ ID NO: 2977135 - DNA, 25 bp, Homo sapien
caacaagggtcttctttcattgcaa

SEQ ID NO: 2977136 - DNA, 25 bp, Homo sapien
aaatactgatatgtctaggaagctg

SEQ ID NO: 2977137 - DNA, 25 bp, Homo sapien
tgaggcatctctccctgacttgtaa

SEQ ID NO: 2977138 - DNA, 25 bp, Homo sapien
tgctgatgtctgtgccagagacatg

SEQ ID NO: 2977139 - DNA, 25 bp, Homo sapien
gccagagacatggtaaattgataaa

SEQ ID NO: 2977140 - DNA, 25 bp, Homo sapien
tcagattgaggtacccattccggtt

SEQ ID NO: 2977141 - DNA, 25 bp, Homo sapien
cccattccggttactcttggctctg

SEQ ID NO: 2977142 - DNA, 25 bp, Homo sapien
ttaagccaatcatcggtgaccaggg

SEQ ID NO: 2977143 - DNA, 25 bp, Homo sapien
ggtgaggtcacatcatacaaaatgg

SEQ ID NO: 2977144 - DNA, 25 bp, Homo sapien
aagagatactctgattgggccggct

SEQ ID NO: 2977145 - DNA, 25 bp, Homo sapien
ccaagctcgctcctggaagagatac

SEQ ID NO: 2977146 - DNA, 25 bp, Homo sapien
aattctgttcaatggcagggcccac

SEQ ID NO: 2977147 - DNA, 25 bp, Homo sapien
taaattctgttcaatggcagggccc

SEQ ID NO: 2977148 - DNA, 25 bp, Homo sapien
ctgttcaatggcagggcccacttct

SEQ ID NO: 2977149 - DNA, 25 bp, Homo sapien
cataaattctgttcaatggcagggc

SEQ ID NO: 2977150 - DNA, 25 bp, Homo sapien
agttctatcacttcttatgtgagag

SEQ ID NO: 2977151 - DNA, 25 bp, Homo sapien
cacttcttatgtgagagatttccac

SEQ ID NO: 2977152 - DNA, 25 bp, Homo sapien
tctatcacttcttatgtgagagatt

SEQ ID NO: 2977153 - DNA, 25 bp, Homo sapien
tatcacttcttatgtgagagatttc

SEQ ID NO: 2977154 - DNA, 25 bp, Homo sapien
cactgacagatggacgacttaggca

SEQ ID NO: 2977155 - DNA, 25 bp, Homo sapien
tgttatttcgtacggctgcttgcca

SEQ ID NO: 2977156 - DNA, 25 bp, Homo sapien
gatttcccgagttcacagttgcaga

SEQ ID NO: 2977157 - DNA, 25 bp, Homo sapien
gagggcctctaacatgggactccag

SEQ ID NO: 2977158 - DNA, 25 bp, Homo sapien
taagaggccgtttttggcatagcgt

SEQ ID NO: 2977159 - DNA, 25 bp, Homo sapien
gcatagcgtgggagtctgtcactca

SEQ ID NO: 2977160 - DNA, 25 bp, Homo sapien
tcttcaagaatttatgcccgggtcc

SEQ ID NO: 2977161 - DNA, 25 bp, Homo sapien
atgacagcactggtccggaaccgag

SEQ ID NO: 2977162 - DNA, 25 bp, Homo sapien
cctagacgtttcataagagtttgca

SEQ ID NO: 2977163 - DNA, 25 bp, Homo sapien
gacttgaacggaagctgtgtttccc

SEQ ID NO: 2977164 - DNA, 25 bp, Homo sapien
aaaattctcctagacgtttcataag

SEQ ID NO: 2977165 - DNA, 25 bp, Homo sapien
tttgcagtatagcaaggatcttgac

SEQ ID NO: 2977166 - DNA, 25 bp, Homo sapien
ttcaagaagctatctggcagtcacc

SEQ ID NO: 2977167 - DNA, 25 bp, Homo sapien
tagtctgccatgaagtgctcaccga

SEQ ID NO: 2977168 - DNA, 25 bp, Homo sapien
cagcaggacccttaacaccgtggga

SEQ ID NO: 2977169 - DNA, 25 bp, Homo sapien
ttactgggccacaaggtagatcagg

SEQ ID NO: 2977170 - DNA, 25 bp, Homo sapien
gcccatctcgtaaatcacagtctga

SEQ ID NO: 2977171 - DNA, 25 bp, Homo sapien
aatgaatatgggcagactcccctga

SEQ ID NO: 2977172 - DNA, 25 bp, Homo sapien
ccctgaaattggcaggcattttcct

SEQ ID NO: 2977173 - DNA, 25 bp, Homo sapien
ttgcataattgacgcagttctgccc

SEQ ID NO: 2977174 - DNA, 25 bp, Homo sapien
catagcccaataactcttccccctg

SEQ ID NO: 2977175 - DNA, 25 bp, Homo sapien
cactgccctttgataggtgcccaga

SEQ ID NO: 2977176 - DNA, 25 bp, Homo sapien
cagaaaagcactgccctttgatagg

SEQ ID NO: 2977177 - DNA, 25 bp, Homo sapien
cagaccagaaaagcactgccctttg

SEQ ID NO: 2977178 - DNA, 25 bp, Homo sapien
gccctttgataggtgcccagagcca

SEQ ID NO: 2977179 - DNA, 25 bp, Homo sapien
ttcctactatgaagagcagggccct

SEQ ID NO: 2977180 - DNA, 25 bp, Homo sapien
catgccgctattcctactatgaaga

SEQ ID NO: 2977181 - DNA, 25 bp, Homo sapien
gtgaagatgtcccatgccgctattc

SEQ ID NO: 2977182 - DNA, 25 bp, Homo sapien
gaagatgtcccatgccgctattcct

SEQ ID NO: 2977183 - DNA, 25 bp, Homo sapien
gacctggcagtttgtgtataacttc

SEQ ID NO: 2977184 - DNA, 25 bp, Homo sapien
cttgtgcacgacctggcagtttgtg

SEQ ID NO: 2977185 - DNA, 25 bp, Homo sapien
tgtctctcctattgttctagccatg

SEQ ID NO: 2977186 - DNA, 25 bp, Homo sapien
ttctagccatgagctgctctattcc

SEQ ID NO: 2977187 - DNA, 25 bp, Homo sapien
gtcctgtggtccacttctgggtccc

SEQ ID NO: 2977188 - DNA, 25 bp, Homo sapien
tcaaaggatcatccagtccacttct

SEQ ID NO: 2977189 - DNA, 25 bp, Homo sapien
gtggtccacttccaggtcctgtggt

SEQ ID NO: 2977190 - DNA, 25 bp, Homo sapien
ccagtccacttctgggtcctgtggt

SEQ ID NO: 2977191 - DNA, 25 bp, Homo sapien
ggagtcttcttggaaccattgcccc

SEQ ID NO: 2977192 - DNA, 25 bp, Homo sapien
tcttggaaccattgccccataactc

SEQ ID NO: 2977193 - DNA, 25 bp, Homo sapien
tcttcttggaaccattgccccataa

SEQ ID NO: 2977194 - DNA, 25 bp, Homo sapien
tttcaatctcttgtccctatttata

SEQ ID NO: 2977195 - DNA, 25 bp, Homo sapien
tagaggtgacacttcattggaagcc

SEQ ID NO: 2977196 - DNA, 25 bp, Homo sapien
gaagtaaatggtgtggaagcccgga

SEQ ID NO: 2977197 - DNA, 25 bp, Homo sapien
gacacttcattggaagcccagatta

SEQ ID NO: 2977198 - DNA, 25 bp, Homo sapien
gaggaggagctaattctgatttggg

SEQ ID NO: 2977199 - DNA, 25 bp, Homo sapien
gcaataaatcaactcggggacacag

SEQ ID NO: 2977200 - DNA, 25 bp, Homo sapien
aagcaataaatcaactcggggacac

SEQ ID NO: 2977201 - DNA, 25 bp, Homo sapien
acaagcaataaatcaactcggggac

SEQ ID NO: 2977202 - DNA, 25 bp, Homo sapien
aataaatcaactcggggacacagac

SEQ ID NO: 2977203 - DNA, 25 bp, Homo sapien
tgggctgctggaaacattcaggaac

SEQ ID NO: 2977204 - DNA, 25 bp, Homo sapien
cccgttctccataacatcagctcct

SEQ ID NO: 2977205 - DNA, 25 bp, Homo sapien
ttaaattctgttatagtggtgcttc

SEQ ID NO: 2977206 - DNA, 25 bp, Homo sapien
ctgttatagtggtgcttcactctgg

SEQ ID NO: 2977207 - DNA, 25 bp, Homo sapien
aatagaggcttgagctgaatggccc

SEQ ID NO: 2977208 - DNA, 25 bp, Homo sapien
tccttccttatgagatgcccagctg

SEQ ID NO: 2977209 - DNA, 25 bp, Homo sapien
gaggtgctcccaacccatggaggtt

SEQ ID NO: 2977210 - DNA, 25 bp, Homo sapien
tgatgcaccacggaggaatagaggc

SEQ ID NO: 2977211 - DNA, 25 bp, Homo sapien
cctcctctccctgaatcataaagct

SEQ ID NO: 2977212 - DNA, 25 bp, Homo sapien
ctgccccaattttgcttaagtaagg

SEQ ID NO: 2977213 - DNA, 25 bp, Homo sapien
ttagccctgaagtctataccaagac

SEQ ID NO: 2977214 - DNA, 25 bp, Homo sapien
ttgactctccctcaagctatctggg

SEQ ID NO: 2977215 - DNA, 25 bp, Homo sapien
gacaacattgttctcagcaccttgg

SEQ ID NO: 2977216 - DNA, 25 bp, Homo sapien
cataaggaaccctctaccctggaag

SEQ ID NO: 2977217 - DNA, 25 bp, Homo sapien
cttatgcttattggccacatgtaca

SEQ ID NO: 2977218 - DNA, 25 bp, Homo sapien
gaatagcgctacaatgaatatacat

SEQ ID NO: 2977219 - DNA, 25 bp, Homo sapien
tcacccttagctaaactaagctctt

SEQ ID NO: 2977220 - DNA, 25 bp, Homo sapien
atccagtctatattgatggcattta

SEQ ID NO: 2977221 - DNA, 25 bp, Homo sapien
tgaaggatcatatcgcccacacctg

SEQ ID NO: 2977222 - DNA, 25 bp, Homo sapien
tatgatgaaaggtttcgggcatcct

SEQ ID NO: 2977223 - DNA, 25 bp, Homo sapien
tctcctacaagtgtctgcagaccat

SEQ ID NO: 2977224 - DNA, 25 bp, Homo sapien
tgatctcctgtgctgattcagccaa

SEQ ID NO: 2977225 - DNA, 25 bp, Homo sapien
gctggttgagccgtcttccctcgca

SEQ ID NO: 2977226 - DNA, 25 bp, Homo sapien
tttccgaagcatggactgacgtcat

SEQ ID NO: 2977227 - DNA, 25 bp, Homo sapien
gcaaacaactatttccgaagcatgg

SEQ ID NO: 2977228 - DNA, 25 bp, Homo sapien
gtcttccctcgcaaacaactatttc

SEQ ID NO: 2977229 - DNA, 25 bp, Homo sapien
gagggatagaatagtttgaaatgaa

SEQ ID NO: 2977230 - DNA, 25 bp, Homo sapien
ctttaaagagggatagaatagtttg

SEQ ID NO: 2977231 - DNA, 25 bp, Homo sapien
taaagagggatagaatagtttgaaa

SEQ ID NO: 2977232 - DNA, 25 bp, Homo sapien
gggatagaatagtttgaaatgaaac

SEQ ID NO: 2977233 - DNA, 25 bp, Homo sapien
cagatatgctgaacgtaacgcagtg

SEQ ID NO: 2977234 - DNA, 25 bp, Homo sapien
tgttactgccatgacccgaaattag

SEQ ID NO: 2977235 - DNA, 25 bp, Homo sapien
ggaccataacctgccattaggccat

SEQ ID NO: 2977236 - DNA, 25 bp, Homo sapien
attcagaatagcaggtggaaagccc

SEQ ID NO: 2977237 - DNA, 25 bp, Homo sapien
gctgtctatagagatgacgtagctt

SEQ ID NO: 2977238 - DNA, 25 bp, Homo sapien
agagacttggccatttcttatcctc

SEQ ID NO: 2977239 - DNA, 25 bp, Homo sapien
accaagagacttggccatttcttat

SEQ ID NO: 2977240 - DNA, 25 bp, Homo sapien
tagagatgacgtagcttctacttcc

SEQ ID NO: 2977241 - DNA, 25 bp, Homo sapien
aacagtactattgtttccaagactc

SEQ ID NO: 2977242 - DNA, 25 bp, Homo sapien
tgtcccttccttcgtagagccaaca

SEQ ID NO: 2977243 - DNA, 25 bp, Homo sapien
gcaattcaccaaatccaatggctca

SEQ ID NO: 2977244 - DNA, 25 bp, Homo sapien
caagactcaacgttgtcacccacac

SEQ ID NO: 2977245 - DNA, 25 bp, Homo sapien
ggccctgcactacccataagataat

SEQ ID NO: 2977246 - DNA, 25 bp, Homo sapien
aagataattgctttccacttccagc

SEQ ID NO: 2977247 - DNA, 25 bp, Homo sapien
tccaattccagaatgcgttctacaa

SEQ ID NO: 2977248 - DNA, 25 bp, Homo sapien
tacaagcttgatattcagtggccct

SEQ ID NO: 2977249 - DNA, 25 bp, Homo sapien
caactttcccagaagggacatctga

SEQ ID NO: 2977250 - DNA, 25 bp, Homo sapien
tgtctacaactttcccagaagggac

SEQ ID NO: 2977251 - DNA, 25 bp, Homo sapien
aactttcccagaagggacatctgag

SEQ ID NO: 2977252 - DNA, 25 bp, Homo sapien
tactcagatgctggaaatgcacgga

SEQ ID NO: 2977253 - DNA, 25 bp, Homo sapien
tgccggtcacaagctgtctagagac

SEQ ID NO: 2977254 - DNA, 25 bp, Homo sapien
tgcacggatgcactggaaacttgac

SEQ ID NO: 2977255 - DNA, 25 bp, Homo sapien
actgtactgtgcagggatgtgtgcc

SEQ ID NO: 2977256 - DNA, 25 bp, Homo sapien
gatggcaatgccagattgaagctgg

SEQ ID NO: 2977257 - DNA, 25 bp, Homo sapien
gcatcattacaggtagggagagatg

SEQ ID NO: 2977258 - DNA, 25 bp, Homo sapien
ggcagcaaagacccacagctctaca

SEQ ID NO: 2977259 - DNA, 25 bp, Homo sapien
ggagagatggcaatgccagattgaa

SEQ ID NO: 2977260 - DNA, 25 bp, Homo sapien
taacatatccacaggtaacaccatg

SEQ ID NO: 2977261 - DNA, 25 bp, Homo sapien
tgtagcaacagctcacatgactgag

SEQ ID NO: 2977262 - DNA, 25 bp, Homo sapien
ttatttctgtaagccaactgtgtgc

SEQ ID NO: 2977263 - DNA, 25 bp, Homo sapien
gacagaggcatttgactaagccaac

SEQ ID NO: 2977264 - DNA, 25 bp, Homo sapien
tactttcagtgaacgcttgctgctc

SEQ ID NO: 2977265 - DNA, 25 bp, Homo sapien
tgctctatggctggaaggacacatc

SEQ ID NO: 2977266 - DNA, 25 bp, Homo sapien
tagccacagtgagagcagatgttca

SEQ ID NO: 2977267 - DNA, 25 bp, Homo sapien
cagaacagaatataaggcagatgcc

SEQ ID NO: 2977268 - DNA, 25 bp, Homo sapien
gagaatgtccagcatcagagctgaa

SEQ ID NO: 2977269 - DNA, 25 bp, Homo sapien
tattaagacgtctcccttgctgcag

SEQ ID NO: 2977270 - DNA, 25 bp, Homo sapien
gaagggcagggctcttacctgtttc

SEQ ID NO: 2977271 - DNA, 25 bp, Homo sapien
tactgccatcagtcacacggatttg

SEQ ID NO: 2977272 - DNA, 25 bp, Homo sapien
tcccacacttgtcagggcccaaaat

SEQ ID NO: 2977273 - DNA, 25 bp, Homo sapien
aacatgccatctatggcacccaggt

SEQ ID NO: 2977274 - DNA, 25 bp, Homo sapien
tacacacccagcagggttgcaacag

SEQ ID NO: 2977275 - DNA, 25 bp, Homo sapien
ccaaaatccagagcgagctgaggtg

SEQ ID NO: 2977276 - DNA, 25 bp, Homo sapien
gggcaaattgcctcagacttctatc

SEQ ID NO: 2977277 - DNA, 25 bp, Homo sapien
gctcattgcccgcaaagtcagagtt

SEQ ID NO: 2977278 - DNA, 25 bp, Homo sapien
gccactaagtattgaccctacccag

SEQ ID NO: 2977279 - DNA, 25 bp, Homo sapien
gttgcccagattttcagaacttgct

SEQ ID NO: 2977280 - DNA, 25 bp, Homo sapien
aaattcaagacaaagttcaggctag

SEQ ID NO: 2977281 - DNA, 25 bp, Homo sapien
agagaatatgaagcaataaaaatga

SEQ ID NO: 2977282 - DNA, 25 bp, Homo sapien
gcactgtgaccagcacaagaatagt

SEQ ID NO: 2977283 - DNA, 25 bp, Homo sapien
ataaaaatgaaatcttacagcactg

SEQ ID NO: 2977284 - DNA, 25 bp, Homo sapien
tcaagactatatataagttcgaaca

SEQ ID NO: 2977285 - DNA, 25 bp, Homo sapien
tatatccatcattgtctactggcac

SEQ ID NO: 2977286 - DNA, 25 bp, Homo sapien
tgaattgtattcactggcataaaca

SEQ ID NO: 2977287 - DNA, 25 bp, Homo sapien
tgaacatatgattctggcctcaagc

SEQ ID NO: 2977288 - DNA, 25 bp, Homo sapien
atggccagtaacgttgagcatcttt

SEQ ID NO: 2977289 - DNA, 25 bp, Homo sapien
catcttttcgtgtgataactcgtca

SEQ ID NO: 2977290 - DNA, 25 bp, Homo sapien
tgatatttacagatatgctcagaga

SEQ ID NO: 2977291 - DNA, 25 bp, Homo sapien
tacagtaggtgctcatattcagatt

SEQ ID NO: 2977292 - DNA, 25 bp, Homo sapien
gagacggagtatcgatcatctcggc

SEQ ID NO: 2977293 - DNA, 25 bp, Homo sapien
gacggagtatcgatcatctcggctc

SEQ ID NO: 2977294 - DNA, 25 bp, Homo sapien
cggagtatcgatcatctcggctcac

SEQ ID NO: 2977295 - DNA, 25 bp, Homo sapien
tgagacggagtatcgatcatctcgg

SEQ ID NO: 2977296 - DNA, 25 bp, Homo sapien
ggagtagatctagtgtaaggcttga

SEQ ID NO: 2977297 - DNA, 25 bp, Homo sapien
ggattggatatcacttaaggtaagg

SEQ ID NO: 2977298 - DNA, 25 bp, Homo sapien
ggatatcacttaaggtaaggtcact

SEQ ID NO: 2977299 - DNA, 25 bp, Homo sapien
aggtcacttaagaaggctgggagta

SEQ ID NO: 2977300 - DNA, 25 bp, Homo sapien
ggagatcatcctcttggccaatgtc

SEQ ID NO: 2977301 - DNA, 25 bp, Homo sapien
tcttggccaatgtctattaacttcg

SEQ ID NO: 2977302 - DNA, 25 bp, Homo sapien
tgtagctgattccatagtgaggaga

SEQ ID NO: 2977303 - DNA, 25 bp, Homo sapien
ttaacttcgccagtgaattatgcat

SEQ ID NO: 2977304 - DNA, 25 bp, Homo sapien
tttctcactctcattcccgggatgc

SEQ ID NO: 2977305 - DNA, 25 bp, Homo sapien
atctctgctggattggccgtaaccc

SEQ ID NO: 2977306 - DNA, 25 bp, Homo sapien
tgaagtggcatggagattgaggtcc

SEQ ID NO: 2977307 - DNA, 25 bp, Homo sapien
ggagtgatctctgaagacctagggc

SEQ ID NO: 2977308 - DNA, 25 bp, Homo sapien
gactggtgtcctcgagatgaaattt

SEQ ID NO: 2977309 - DNA, 25 bp, Homo sapien
gggactggtgtcctcgagatgaaat

SEQ ID NO: 2977310 - DNA, 25 bp, Homo sapien
gggacgcggtggaggagggttgctg

SEQ ID NO: 2977311 - DNA, 25 bp, Homo sapien
cgcggtggaggagggttgctgtcca

SEQ ID NO: 2977312 - DNA, 25 bp, Homo sapien
tatatgttatacacaagtttgaaac

SEQ ID NO: 2977313 - DNA, 25 bp, Homo sapien
tatacacaagtttgaaacatatttc

SEQ ID NO: 2977314 - DNA, 25 bp, Homo sapien
ataaataatttcagtaagaacctga

SEQ ID NO: 2977315 - DNA, 25 bp, Homo sapien
gaacctgatcaagttgaacatgtat

SEQ ID NO: 2977316 - DNA, 25 bp, Homo sapien
tcatccacaacacgatttccttcct

SEQ ID NO: 2977317 - DNA, 25 bp, Homo sapien
tacatataagtggggttatgcacta

SEQ ID NO: 2977318 - DNA, 25 bp, Homo sapien
atccacaacacgatttccttccttt

SEQ ID NO: 2977319 - DNA, 25 bp, Homo sapien
tctacatataagtggggttatgcac

SEQ ID NO: 2977320 - DNA, 25 bp, Homo sapien
cagtttggtttcaggcaggatttcc

SEQ ID NO: 2977321 - DNA, 25 bp, Homo sapien
tatcacagcctgctccgatggcatg

SEQ ID NO: 2977322 - DNA, 25 bp, Homo sapien
taggagctcatctgcatcactggtg

SEQ ID NO: 2977323 - DNA, 25 bp, Homo sapien
gaacagtagtcacgtgggcacaata

SEQ ID NO: 2977324 - DNA, 25 bp, Homo sapien
tttctgtttttgcacagtgttgaga

SEQ ID NO: 2977325 - DNA, 25 bp, Homo sapien
acagtgttgagaagggctgcacaca

SEQ ID NO: 2977326 - DNA, 25 bp, Homo sapien
tctctttacagatcaggtttttctg

SEQ ID NO: 2977327 - DNA, 25 bp, Homo sapien
ttttgcacagtgttgagaagggctg

SEQ ID NO: 2977328 - DNA, 25 bp, Homo sapien
aaactcacatgcaggcagtgcagcc

SEQ ID NO: 2977329 - DNA, 25 bp, Homo sapien
ttggaggatatctgacaaaactcac

SEQ ID NO: 2977330 - DNA, 25 bp, Homo sapien
tggaggatatctgacaaaactcaca

SEQ ID NO: 2977331 - DNA, 25 bp, Homo sapien
cacctggaggtgtatgctgccgtca

SEQ ID NO: 2977332 - DNA, 25 bp, Homo sapien
ctcaggaaagcggacgcgaggctcg

SEQ ID NO: 2977333 - DNA, 25 bp, Homo sapien
cccatgctgacgttgagggaacacc

SEQ ID NO: 2977334 - DNA, 25 bp, Homo sapien
tgctgccgtcaaggggctcaggaaa

SEQ ID NO: 2977335 - DNA, 25 bp, Homo sapien
tagccataaaaaggtaatccctcta

SEQ ID NO: 2977336 - DNA, 25 bp, Homo sapien
tctggttgagagacagtatggattg

SEQ ID NO: 2977337 - DNA, 25 bp, Homo sapien
aatccctctatcctcttgtcttgga

SEQ ID NO: 2977338 - DNA, 25 bp, Homo sapien
taataatacacgtcaagaagtctat

SEQ ID NO: 2977339 - DNA, 25 bp, Homo sapien
tagctctgaacgaagtctaccttgg

SEQ ID NO: 2977340 - DNA, 25 bp, Homo sapien
gaacattaggctcaccttactcgga

SEQ ID NO: 2977341 - DNA, 25 bp, Homo sapien
ggttattgtccagcgtggttgcgca

SEQ ID NO: 2977342 - DNA, 25 bp, Homo sapien
tgcagatgccctagtgagtgcccct

SEQ ID NO: 2977343 - DNA, 25 bp, Homo sapien
tgcttccacttgtgagtattgttgg

SEQ ID NO: 2977344 - DNA, 25 bp, Homo sapien
tatccccagaagtaggtcctaaatg

SEQ ID NO: 2977345 - DNA, 25 bp, Homo sapien
tgaatatgaatgtgagggtatctct

SEQ ID NO: 2977346 - DNA, 25 bp, Homo sapien
ggtatctcttcgagagcttgctttc

SEQ ID NO: 2977347 - DNA, 25 bp, Homo sapien
ccccaacatgggtctattttgtgct

SEQ ID NO: 2977348 - DNA, 25 bp, Homo sapien
tgaagttatatggaagaagatagcc

SEQ ID NO: 2977349 - DNA, 25 bp, Homo sapien
ttcttagaactctgtaaagagcagg

SEQ ID NO: 2977350 - DNA, 25 bp, Homo sapien
tcaaaggtagtatcagtaggcatag

SEQ ID NO: 2977351 - DNA, 25 bp, Homo sapien
ccttcaacctggaggaatacagcct

SEQ ID NO: 2977352 - DNA, 25 bp, Homo sapien
cctggaggaatacagcctctctcag

SEQ ID NO: 2977353 - DNA, 25 bp, Homo sapien
cagcctctctcaggctaccttggag

SEQ ID NO: 2977354 - DNA, 25 bp, Homo sapien
tcaacctggaggaatacagcctctc

SEQ ID NO: 2977355 - DNA, 25 bp, Homo sapien
cccgtattatcacactgaaacttag

SEQ ID NO: 2977356 - DNA, 25 bp, Homo sapien
ttaacataaaattagaggcaaccag

SEQ ID NO: 2977357 - DNA, 25 bp, Homo sapien
tgggaaagattcttaatcagagcta

SEQ ID NO: 2977358 - DNA, 25 bp, Homo sapien
tatctcgggcctttttcaagttaga

SEQ ID NO: 2977359 - DNA, 25 bp, Homo sapien
cagtcttgaccttgtagcccattaa

SEQ ID NO: 2977360 - DNA, 25 bp, Homo sapien
tacccattgtcggaacaggtgcatt

SEQ ID NO: 2977361 - DNA, 25 bp, Homo sapien
caggaagagggtcaatccatgcaga

SEQ ID NO: 2977362 - DNA, 25 bp, Homo sapien
cactattcatactagcaggaagagg

SEQ ID NO: 2977363 - DNA, 25 bp, Homo sapien
catttccagtaagtaccgggtgacg

SEQ ID NO: 2977364 - DNA, 25 bp, Homo sapien
aagtcatagaccagaggtgcttcca

SEQ ID NO: 2977365 - DNA, 25 bp, Homo sapien
tagagaaccactagcatagaagagt

SEQ ID NO: 2977366 - DNA, 25 bp, Homo sapien
tattttactgctcacccattgtgga

SEQ ID NO: 2977367 - DNA, 25 bp, Homo sapien
aattgtgtttactttgttgtcaaga

SEQ ID NO: 2977368 - DNA, 25 bp, Homo sapien
tatatgataaatccttgaattcttt

SEQ ID NO: 2977369 - DNA, 25 bp, Homo sapien
gaattgcttgatagacaaaaggatg

SEQ ID NO: 2977370 - DNA, 25 bp, Homo sapien
tttaatgaggaactcaaactcagtc

SEQ ID NO: 2977371 - DNA, 25 bp, Homo sapien
taagtctcttggtgtttgaactggg

SEQ ID NO: 2977372 - DNA, 25 bp, Homo sapien
tagtattgccatgctcccaggtggc

SEQ ID NO: 2977373 - DNA, 25 bp, Homo sapien
tcaaggacatggacaaattttcagg

SEQ ID NO: 2977374 - DNA, 25 bp, Homo sapien
taaacaacatatacctggagctact

SEQ ID NO: 2977375 - DNA, 25 bp, Homo sapien
cctcccaggctcaatccttcaacct

SEQ ID NO: 2977376 - DNA, 25 bp, Homo sapien
aacctcagcctcctgagtagctggg

SEQ ID NO: 2977377 - DNA, 25 bp, Homo sapien
ggtgtgtgccatcacaccttgctaa

SEQ ID NO: 2977378 - DNA, 25 bp, Homo sapien
cccaggctcaatccttcaacctcag

SEQ ID NO: 2977379 - DNA, 25 bp, Homo sapien
tctgattggtttatgtgcccaccct

SEQ ID NO: 2977380 - DNA, 25 bp, Homo sapien
caaatgtaactctttagcagtcttg

SEQ ID NO: 2977381 - DNA, 25 bp, Homo sapien
caagttaatttatgctccaggatga

SEQ ID NO: 2977382 - DNA, 25 bp, Homo sapien
tggctgaatgagaggttttaatgac

SEQ ID NO: 2977383 - DNA, 25 bp, Homo sapien
atgccattacatcgcattaccacca

SEQ ID NO: 2977384 - DNA, 25 bp, Homo sapien
gccattacatcgcattaccaccatt

SEQ ID NO: 2977385 - DNA, 25 bp, Homo sapien
atgatgccattacatcgcattacca

SEQ ID NO: 2977386 - DNA, 25 bp, Homo sapien
gatgccattacatcgcattaccacc

SEQ ID NO: 2977387 - DNA, 25 bp, Homo sapien
aacagttaaacttgaggcaggccat

SEQ ID NO: 2977388 - DNA, 25 bp, Homo sapien
gtgagtgaactcctagatattgcca

SEQ ID NO: 2977389 - DNA, 25 bp, Homo sapien
ggtcttgtattaactcagctgctag

SEQ ID NO: 2977390 - DNA, 25 bp, Homo sapien
ggcacctgataagtcaaacccttca

SEQ ID NO: 2977391 - DNA, 25 bp, Homo sapien
cattcagtattactttacagtacat

SEQ ID NO: 2977392 - DNA, 25 bp, Homo sapien
ccattcagtattactttacagtaca

SEQ ID NO: 2977393 - DNA, 25 bp, Homo sapien
tccattcagtattactttacagtac

SEQ ID NO: 2977394 - DNA, 25 bp, Homo sapien
tgtaccatgttatgtaatgaccgta

SEQ ID NO: 2977395 - DNA, 25 bp, Homo sapien
tgtcacatttcagatgcacggcaga

SEQ ID NO: 2977396 - DNA, 25 bp, Homo sapien
gcagagttccgcatgtgtaaacacc

SEQ ID NO: 2977397 - DNA, 25 bp, Homo sapien
cagttctgcctaaactcgtctctgt

SEQ ID NO: 2977398 - DNA, 25 bp, Homo sapien
ccagtcttcgtggtatcattggtac

SEQ ID NO: 2977399 - DNA, 25 bp, Homo sapien
ggtactaggaggagaatcctcccca

SEQ ID NO: 2977400 - DNA, 25 bp, Homo sapien
tcttcctgccagtcttcgtggtatc

SEQ ID NO: 2977401 - DNA, 25 bp, Homo sapien
cgtggtatcattggtactaggagga

SEQ ID NO: 2977402 - DNA, 25 bp, Homo sapien
tttctctgcataggcgtgcggagtc

SEQ ID NO: 2977403 - DNA, 25 bp, Homo sapien
ggcaaatggattgtagcttgaaagt

SEQ ID NO: 2977404 - DNA, 25 bp, Homo sapien
caaatggattgtagcttgaaagtca

SEQ ID NO: 2977405 - DNA, 25 bp, Homo sapien
gtgcggagtccacagctggcaaatg

SEQ ID NO: 2977406 - DNA, 25 bp, Homo sapien
ggaagccagagatgcttagcacaat

SEQ ID NO: 2977407 - DNA, 25 bp, Homo sapien
agccagagatgcttagcacaattca

SEQ ID NO: 2977408 - DNA, 25 bp, Homo sapien
ccgctcacacatagtgggtacacag

SEQ ID NO: 2977409 - DNA, 25 bp, Homo sapien
cattctgtaccgctcacacatagtg

SEQ ID NO: 2977410 - DNA, 25 bp, Homo sapien
ggtaatgtagttctccggcggagtc

SEQ ID NO: 2977411 - DNA, 25 bp, Homo sapien
tgagtatcttagtgcgcagacgtcc

SEQ ID NO: 2977412 - DNA, 25 bp, Homo sapien
tctgatttaaggaaacgtggtcgcc

SEQ ID NO: 2977413 - DNA, 25 bp, Homo sapien
tgtgctgcagctacatgatgggcca

SEQ ID NO: 2977414 - DNA, 25 bp, Homo sapien
cttgaccgatgcagcagatggactt

SEQ ID NO: 2977415 - DNA, 25 bp, Homo sapien
gatgcagcagatggactttcaggga

SEQ ID NO: 2977416 - DNA, 25 bp, Homo sapien
gatggactttcagggaatcaagatg

SEQ ID NO: 2977417 - DNA, 25 bp, Homo sapien
cagcagatggactttcagggaatca

SEQ ID NO: 2977418 - DNA, 25 bp, Homo sapien
caatcttcatgcaagtggagtttct

SEQ ID NO: 2977419 - DNA, 25 bp, Homo sapien
tctcttctgtagctagttttgcaac

SEQ ID NO: 2977420 - DNA, 25 bp, Homo sapien
gggagcacaaaagactttgccttgc

SEQ ID NO: 2977421 - DNA, 25 bp, Homo sapien
aagatgcaagctgcaggcgtgcaat

SEQ ID NO: 2977422 - DNA, 25 bp, Homo sapien
tagctaaatactggcaccgcaacgg

SEQ ID NO: 2977423 - DNA, 25 bp, Homo sapien
ggcaaaaagagctcagtaatcctag

SEQ ID NO: 2977424 - DNA, 25 bp, Homo sapien
tttagacgctaccaacctgctctgt

SEQ ID NO: 2977425 - DNA, 25 bp, Homo sapien
tcgccaggcgaaaattgcatccatg

SEQ ID NO: 2977426 - DNA, 25 bp, Homo sapien
tacagctgactaaatacacgcagtt

SEQ ID NO: 2977427 - DNA, 25 bp, Homo sapien
gaacttccaacctattacagctgac

SEQ ID NO: 2977428 - DNA, 25 bp, Homo sapien
tgtcaatgaaacagtgcagtccctt

SEQ ID NO: 2977429 - DNA, 25 bp, Homo sapien
ccccaaatgggcagacataaaacat

SEQ ID NO: 2977430 - DNA, 25 bp, Homo sapien
gacagagctatacgccatctcagaa

SEQ ID NO: 2977431 - DNA, 25 bp, Homo sapien
ccgcagcttcgacatgggatcatga

SEQ ID NO: 2977432 - DNA, 25 bp, Homo sapien
gctgttctgctttggctggagagaa

SEQ ID NO: 2977433 - DNA, 25 bp, Homo sapien
gaattcattggtttaggccgggtgc

SEQ ID NO: 2977434 - DNA, 25 bp, Homo sapien
ggggatggctaaaagagtgagccac

SEQ ID NO: 2977435 - DNA, 25 bp, Homo sapien
ggatggctaaaagagtgagccacag

SEQ ID NO: 2977436 - DNA, 25 bp, Homo sapien
gatggctaaaagagtgagccacagg

SEQ ID NO: 2977437 - DNA, 25 bp, Homo sapien
gggatggctaaaagagtgagccaca

SEQ ID NO: 2977438 - DNA, 25 bp, Homo sapien
tgtcaggcaccataaacagtcagga

SEQ ID NO: 2977439 - DNA, 25 bp, Homo sapien
gatatccccagaaaaagtggagccc

SEQ ID NO: 2977440 - DNA, 25 bp, Homo sapien
aaagctaggctattcagtggtccca

SEQ ID NO: 2977441 - DNA, 25 bp, Homo sapien
aaaatggaatcttgctggcctgaac

SEQ ID NO: 2977442 - DNA, 25 bp, Homo sapien
tgtgatcaccggtcacaccacactt

SEQ ID NO: 2977443 - DNA, 25 bp, Homo sapien
gaagaagtaggccatgaactagggc

SEQ ID NO: 2977444 - DNA, 25 bp, Homo sapien
tttgtgttaagtacccgagtgtggc

SEQ ID NO: 2977445 - DNA, 25 bp, Homo sapien
tctttcatcgcagaatgcatcctgt

SEQ ID NO: 2977446 - DNA, 25 bp, Homo sapien
ttcctggactttggttcctctgatg

SEQ ID NO: 2977447 - DNA, 25 bp, Homo sapien
cttcctggactttggttcctctgat

SEQ ID NO: 2977448 - DNA, 25 bp, Homo sapien
tgttcgctagctttgactgcaccga

SEQ ID NO: 2977449 - DNA, 25 bp, Homo sapien
caaagcactcctctgatgttcctca

SEQ ID NO: 2977450 - DNA, 25 bp, Homo sapien
cactctgagagggtaagcacaaagc

SEQ ID NO: 2977451 - DNA, 25 bp, Homo sapien
ggtacacgagaggtcttgcacacac

SEQ ID NO: 2977452 - DNA, 25 bp, Homo sapien
tgcaagctcattgttccgaggaaat

SEQ ID NO: 2977453 - DNA, 25 bp, Homo sapien
tcaagttcggattgcagcaaacctc

SEQ ID NO: 2977454 - DNA, 25 bp, Homo sapien
ccaaagaccacacttcggcaaggag

SEQ ID NO: 2977455 - DNA, 25 bp, Homo sapien
ggacacccaggcgtgacattaatca

SEQ ID NO: 2977456 - DNA, 25 bp, Homo sapien
agagcagcacagtaagagaccagca

SEQ ID NO: 2977457 - DNA, 25 bp, Homo sapien
gaggcgactctggtgaggttttcga

SEQ ID NO: 2977458 - DNA, 25 bp, Homo sapien
gcagaggcgactctggtgaggtttt

SEQ ID NO: 2977459 - DNA, 25 bp, Homo sapien
ggcgactctggtgaggttttcgagg

SEQ ID NO: 2977460 - DNA, 25 bp, Homo sapien
cagtgttagaaaatactctgccttc

SEQ ID NO: 2977461 - DNA, 25 bp, Homo sapien
ccttgactatgtatataagttggac

SEQ ID NO: 2977462 - DNA, 25 bp, Homo sapien
cctagttgaaattgccagcctcctg

SEQ ID NO: 2977463 - DNA, 25 bp, Homo sapien
tctgccttcacgtttacatcaaata

SEQ ID NO: 2977464 - DNA, 25 bp, Homo sapien
catcctggccgacacggtgaaatcc

SEQ ID NO: 2977465 - DNA, 25 bp, Homo sapien
gaccatcctggccgacacggtgaaa

SEQ ID NO: 2977466 - DNA, 25 bp, Homo sapien
ccatcctggccgacacggtgaaatc

SEQ ID NO: 2977467 - DNA, 25 bp, Homo sapien
tcctggccgacacggtgaaatcctg

SEQ ID NO: 2977468 - DNA, 25 bp, Homo sapien
gaaaccaagggagagctgcatagaa

SEQ ID NO: 2977469 - DNA, 25 bp, Homo sapien
cacacctgggctgaaattacaagag

SEQ ID NO: 2977470 - DNA, 25 bp, Homo sapien
tttcctcatgcatggagatcctgtg

SEQ ID NO: 2977471 - DNA, 25 bp, Homo sapien
ggtaacttgatgttgatcacacctg

SEQ ID NO: 2977472 - DNA, 25 bp, Homo sapien
atgtctccattcaaagcgccacttc

SEQ ID NO: 2977473 - DNA, 25 bp, Homo sapien
gcttctcaaatacagactgtggtca

SEQ ID NO: 2977474 - DNA, 25 bp, Homo sapien
caagcaccaggtaggacagagcttc

SEQ ID NO: 2977475 - DNA, 25 bp, Homo sapien
gaagtctgtgagtgttaagaaccca

SEQ ID NO: 2977476 - DNA, 25 bp, Homo sapien
aaaagttaaggactaaatcatagca

SEQ ID NO: 2977477 - DNA, 25 bp, Homo sapien
actaaatcatagcaagatagcagag

SEQ ID NO: 2977478 - DNA, 25 bp, Homo sapien
taaggactaaatcatagcaagatag

SEQ ID NO: 2977479 - DNA, 25 bp, Homo sapien
tagcagagaaagagactgcggcaaa

SEQ ID NO: 2977480 - DNA, 25 bp, Homo sapien
ggtctgaggttgttcaaatgcttct

SEQ ID NO: 2977481 - DNA, 25 bp, Homo sapien
gtctgaggttgttcaaatgcttctt

SEQ ID NO: 2977482 - DNA, 25 bp, Homo sapien
tggtctgaggttgttcaaatgcttc

SEQ ID NO: 2977483 - DNA, 25 bp, Homo sapien
ttttgccatccaatgaggttatcga

SEQ ID NO: 2977484 - DNA, 25 bp, Homo sapien
tccaatgaggttatcgaaaaatgag

SEQ ID NO: 2977485 - DNA, 25 bp, Homo sapien
tgaggttatcgaaaaatgagttctt

SEQ ID NO: 2977486 - DNA, 25 bp, Homo sapien
tgccatccaatgaggttatcgaaaa

SEQ ID NO: 2977487 - DNA, 25 bp, Homo sapien
cttggagtctaaatctcgaggtggt

SEQ ID NO: 2977488 - DNA, 25 bp, Homo sapien
aagccttggagtctaaatctcgagg

SEQ ID NO: 2977489 - DNA, 25 bp, Homo sapien
gcaagccttggagtctaaatctcga

SEQ ID NO: 2977490 - DNA, 25 bp, Homo sapien
gccttggagtctaaatctcgaggtg

SEQ ID NO: 2977491 - DNA, 25 bp, Homo sapien
taggctccaggtcatctgccttcac

SEQ ID NO: 2977492 - DNA, 25 bp, Homo sapien
tataggctccaggtcatctgccttc

SEQ ID NO: 2977493 - DNA, 25 bp, Homo sapien
caggtcatctgccttcacctcaaag

SEQ ID NO: 2977494 - DNA, 25 bp, Homo sapien
ggtcatctgccttcacctcaaagtt

SEQ ID NO: 2977495 - DNA, 25 bp, Homo sapien
ttcactgccatgatctgcccgctgg

SEQ ID NO: 2977496 - DNA, 25 bp, Homo sapien
cgctgggcacgtgccgcatcttctc

SEQ ID NO: 2977497 - DNA, 25 bp, Homo sapien
ctccaccaccccgtacgcacctcgt

SEQ ID NO: 2977498 - DNA, 25 bp, Homo sapien
cgtacgcacctcgtcccagttccat

SEQ ID NO: 2977499 - DNA, 25 bp, Homo sapien
tggaaatgcatggaaaatttatggt

SEQ ID NO: 2977500 - DNA, 25 bp, Homo sapien
atggttactactctgaggatgaggc

SEQ ID NO: 2977501 - DNA, 25 bp, Homo sapien
aaatttatggttactactctgagga

SEQ ID NO: 2977502 - DNA, 25 bp, Homo sapien
atggaaaatttatggttactactct

SEQ ID NO: 2977503 - DNA, 25 bp, Homo sapien
ggacagtccaccgtcctcatggaaa

SEQ ID NO: 2977504 - DNA, 25 bp, Homo sapien
ggctatttactgtggctcggatccg

SEQ ID NO: 2977505 - DNA, 25 bp, Homo sapien
tcccgaaacagtgcgccataaaagg

SEQ ID NO: 2977506 - DNA, 25 bp, Homo sapien
tcagtagccgtttctgttcctggct

SEQ ID NO: 2977507 - DNA, 25 bp, Homo sapien
gcaaaccagtaggtagccaagcaga

SEQ ID NO: 2977508 - DNA, 25 bp, Homo sapien
gagttaggtctagatgcctcctcca

SEQ ID NO: 2977509 - DNA, 25 bp, Homo sapien
ggcctttactgataccactgtctag

SEQ ID NO: 2977510 - DNA, 25 bp, Homo sapien
cacaagtaggctagatgaagctcct

SEQ ID NO: 2977511 - DNA, 25 bp, Homo sapien
tattttccctaagatgtcctctgga

SEQ ID NO: 2977512 - DNA, 25 bp, Homo sapien
gcctttatcaataacttgtttgtag

SEQ ID NO: 2977513 - DNA, 25 bp, Homo sapien
gaattgtctggcctttatcaataac

SEQ ID NO: 2977514 - DNA, 25 bp, Homo sapien
tatctagtgatgtatccatgagctc

SEQ ID NO: 2977515 - DNA, 25 bp, Homo sapien
gagtctgccaaaccaaagcagtgct

SEQ ID NO: 2977516 - DNA, 25 bp, Homo sapien
catgtacgaatagtagctgtggccc

SEQ ID NO: 2977517 - DNA, 25 bp, Homo sapien
gagtcatttaacctagagtctgcca

SEQ ID NO: 2977518 - DNA, 25 bp, Homo sapien
tgaatagccatgaaggtagaagacc

SEQ ID NO: 2977519 - DNA, 25 bp, Homo sapien
tgacagacagcttactatgtaaatg

SEQ ID NO: 2977520 - DNA, 25 bp, Homo sapien
gacagacagcttactatgtaaatgt

SEQ ID NO: 2977521 - DNA, 25 bp, Homo sapien
gaatgacagacagcttactatgtaa

SEQ ID NO: 2977522 - DNA, 25 bp, Homo sapien
tgtgaatgacagacagcttactatg

SEQ ID NO: 2977523 - DNA, 25 bp, Homo sapien
gctggttgaagagataacaggccaa

SEQ ID NO: 2977524 - DNA, 25 bp, Homo sapien
tagagacggactccaggtgaaagag

SEQ ID NO: 2977525 - DNA, 25 bp, Homo sapien
gatgaactttatcaaaggaacagcc

SEQ ID NO: 2977526 - DNA, 25 bp, Homo sapien
caacaagctctcatgtgatggccaa

SEQ ID NO: 2977527 - DNA, 25 bp, Homo sapien
caagtagccactgattccaaaatcg

SEQ ID NO: 2977528 - DNA, 25 bp, Homo sapien
gatgagtacattagaaggcttgacg

SEQ ID NO: 2977529 - DNA, 25 bp, Homo sapien
tgcaacctgcatcaattgttttagc

SEQ ID NO: 2977530 - DNA, 25 bp, Homo sapien
catcttcacttgaccgagagcattg

SEQ ID NO: 2977531 - DNA, 25 bp, Homo sapien
ccagcatgatttgtcggcagtgaca

SEQ ID NO: 2977532 - DNA, 25 bp, Homo sapien
atgatttgtcggcagtgacattacc

SEQ ID NO: 2977533 - DNA, 25 bp, Homo sapien
tttgtcggcagtgacattaccagat

SEQ ID NO: 2977534 - DNA, 25 bp, Homo sapien
gtcggcagtgacattaccagatgcc

SEQ ID NO: 2977535 - DNA, 25 bp, Homo sapien
tatataactatgtctgtgccccacc

SEQ ID NO: 2977536 - DNA, 25 bp, Homo sapien
taaaaaagccctagagagatccctc

SEQ ID NO: 2977537 - DNA, 25 bp, Homo sapien
tttcaccgtgcgaggactaagcagg

SEQ ID NO: 2977538 - DNA, 25 bp, Homo sapien
tatgatcctgagaaacgtgagccct

SEQ ID NO: 2977539 - DNA, 25 bp, Homo sapien
gacttcacactgtatcccttctggt

SEQ ID NO: 2977540 - DNA, 25 bp, Homo sapien
tgagctctgggtttattctttcagg

SEQ ID NO: 2977541 - DNA, 25 bp, Homo sapien
gtgatgcccagactccaaatgtcag

SEQ ID NO: 2977542 - DNA, 25 bp, Homo sapien
ctgtatcccttctggttgagctctg

SEQ ID NO: 2977543 - DNA, 25 bp, Homo sapien
tagttcatgatgattggcatacact

SEQ ID NO: 2977544 - DNA, 25 bp, Homo sapien
gttcatgatgattggcatacactac

SEQ ID NO: 2977545 - DNA, 25 bp, Homo sapien
catagttcatgatgattggcataca

SEQ ID NO: 2977546 - DNA, 25 bp, Homo sapien
tcatagttcatgatgattggcatac

SEQ ID NO: 2977547 - DNA, 25 bp, Homo sapien
gagacaacagtttcaacagggctgc

SEQ ID NO: 2977548 - DNA, 25 bp, Homo sapien
aacttcaggatgtaaagctacgagg

SEQ ID NO: 2977549 - DNA, 25 bp, Homo sapien
tgacaagtaattcccagcctaagat

SEQ ID NO: 2977550 - DNA, 25 bp, Homo sapien
gctttagggaatcacccacgtttca

SEQ ID NO: 2977551 - DNA, 25 bp, Homo sapien
tgtgaggtaaagtcaacaaactctg

SEQ ID NO: 2977552 - DNA, 25 bp, Homo sapien
tcatagggaaatcgaaggatggcca

SEQ ID NO: 2977553 - DNA, 25 bp, Homo sapien
gagttgtggcgatggctcctctacc

SEQ ID NO: 2977554 - DNA, 25 bp, Homo sapien
tggagttccccatgaatcataggga

SEQ ID NO: 2977555 - DNA, 25 bp, Homo sapien
gcatgatggattcaaccccgatgga

SEQ ID NO: 2977556 - DNA, 25 bp, Homo sapien
gctttcggaatgaatgtatgcatga

SEQ ID NO: 2977557 - DNA, 25 bp, Homo sapien
tggaagaaattcatgagaactcatc

SEQ ID NO: 2977558 - DNA, 25 bp, Homo sapien
gcagagagggcatactccacaaatg

SEQ ID NO: 2977559 - DNA, 25 bp, Homo sapien
gatcattactatcaagccatgctag

SEQ ID NO: 2977560 - DNA, 25 bp, Homo sapien
gcagtgagtactcagaacggctccc

SEQ ID NO: 2977561 - DNA, 25 bp, Homo sapien
tcagtacctcaaacagccttcagag

SEQ ID NO: 2977562 - DNA, 25 bp, Homo sapien
ccaaatacgctaacctggctcaggg

SEQ ID NO: 2977563 - DNA, 25 bp, Homo sapien
tcatggcccctgattagaaagctca

SEQ ID NO: 2977564 - DNA, 25 bp, Homo sapien
gaaagtaccctagttgatccatcat

SEQ ID NO: 2977565 - DNA, 25 bp, Homo sapien
gaagggctatttggtacatccacag

SEQ ID NO: 2977566 - DNA, 25 bp, Homo sapien
tcaagcgtgcaattagctaactgcc

SEQ ID NO: 2977567 - DNA, 25 bp, Homo sapien
accacgaccgtctcctgccctcaac

SEQ ID NO: 2977568 - DNA, 25 bp, Homo sapien
tttctaagttcaagagctagtttac

SEQ ID NO: 2977569 - DNA, 25 bp, Homo sapien
tctttctaagttcaagagctagttt

SEQ ID NO: 2977570 - DNA, 25 bp, Homo sapien
taagcacattctcaccacgaccgtc

SEQ ID NO: 2977571 - DNA, 25 bp, Homo sapien
attttcattagacaaggatttcaga

SEQ ID NO: 2977572 - DNA, 25 bp, Homo sapien
taaaatctagaagccatatatattt

SEQ ID NO: 2977573 - DNA, 25 bp, Homo sapien
aaggatttcagaacctgtagaacac

SEQ ID NO: 2977574 - DNA, 25 bp, Homo sapien
cagaacctgtagaacactaaacata

SEQ ID NO: 2977575 - DNA, 25 bp, Homo sapien
ttagctctgggtatgtaggccgttc

SEQ ID NO: 2977576 - DNA, 25 bp, Homo sapien
tctgggtatgtaggccgttctttgg

SEQ ID NO: 2977577 - DNA, 25 bp, Homo sapien
cattagctctgggtatgtaggccgt

SEQ ID NO: 2977578 - DNA, 25 bp, Homo sapien
gtatgtaggccgttctttggaattc

SEQ ID NO: 2977579 - DNA, 25 bp, Homo sapien
cctcatcccttaagactatggtttt

SEQ ID NO: 2977580 - DNA, 25 bp, Homo sapien
catcccttaagactatggttttgaa

SEQ ID NO: 2977581 - DNA, 25 bp, Homo sapien
cacctcatcccttaagactatggtt

SEQ ID NO: 2977582 - DNA, 25 bp, Homo sapien
agcacctcatcccttaagactatgg

SEQ ID NO: 2977583 - DNA, 25 bp, Homo sapien
aagaaaacatggagatccgtgaaca

SEQ ID NO: 2977584 - DNA, 25 bp, Homo sapien
tccgtgaacatactacgaggaatag

SEQ ID NO: 2977585 - DNA, 25 bp, Homo sapien
catggagatccgtgaacatactacg

SEQ ID NO: 2977586 - DNA, 25 bp, Homo sapien
aacatactacgaggaatagacagac

SEQ ID NO: 2977587 - DNA, 25 bp, Homo sapien
caaatgaattaaataacctgacttg

SEQ ID NO: 2977588 - DNA, 25 bp, Homo sapien
atgaattaaataacctgacttgaag

SEQ ID NO: 2977589 - DNA, 25 bp, Homo sapien
ctgcaaatgaattaaataacctgac

SEQ ID NO: 2977590 - DNA, 25 bp, Homo sapien
tgaattaaataacctgacttgaagt

SEQ ID NO: 2977591 - DNA, 25 bp, Homo sapien
tgcttattagctttcccacatcctc

SEQ ID NO: 2977592 - DNA, 25 bp, Homo sapien
ccttttgttctgctagtggctatta

SEQ ID NO: 2977593 - DNA, 25 bp, Homo sapien
cagattatcttggtgactgcttcca

SEQ ID NO: 2977594 - DNA, 25 bp, Homo sapien
caaaacaggacatgccaaacctcag

SEQ ID NO: 2977595 - DNA, 25 bp, Homo sapien
tttggattcatgtagggtgaaaaat

SEQ ID NO: 2977596 - DNA, 25 bp, Homo sapien
ttggattcatgtagggtgaaaaatg

SEQ ID NO: 2977597 - DNA, 25 bp, Homo sapien
ctttggattcatgtagggtgaaaaa

SEQ ID NO: 2977598 - DNA, 25 bp, Homo sapien
ctctgagaggcagggttaaattatc

SEQ ID NO: 2977599 - DNA, 25 bp, Homo sapien
tctatactatagattccaaggcccc

SEQ ID NO: 2977600 - DNA, 25 bp, Homo sapien
tgtagtgaacttgcttcaccccgaa

SEQ ID NO: 2977601 - DNA, 25 bp, Homo sapien
tagggtcaaccgattaagtccactg

SEQ ID NO: 2977602 - DNA, 25 bp, Homo sapien
ttacacatggcaggagggacaaacg

SEQ ID NO: 2977603 - DNA, 25 bp, Homo sapien
taatcggacctagaccagagagaca

SEQ ID NO: 2977604 - DNA, 25 bp, Homo sapien
gaagtgtcacgctcattctgggcag

SEQ ID NO: 2977605 - DNA, 25 bp, Homo sapien
cagatggttccaatgtacacgaggg

SEQ ID NO: 2977606 - DNA, 25 bp, Homo sapien
tctcagagtgacaaagagatttcca

SEQ ID NO: 2977607 - DNA, 25 bp, Homo sapien
ctcagagtgacaaagagatttccac

SEQ ID NO: 2977608 - DNA, 25 bp, Homo sapien
ctctcagagtgacaaagagatttcc

SEQ ID NO: 2977609 - DNA, 25 bp, Homo sapien
caaaagttggttgattggcacttac

SEQ ID NO: 2977610 - DNA, 25 bp, Homo sapien
atacattgataggtgtagacagggc

SEQ ID NO: 2977611 - DNA, 25 bp, Homo sapien
tcttttgactttaccgtgtaagata

SEQ ID NO: 2977612 - DNA, 25 bp, Homo sapien
tttagtcttgtgaggctatcaggtc

SEQ ID NO: 2977613 - DNA, 25 bp, Homo sapien
gagaaagcttcggtcactggcagac

SEQ ID NO: 2977614 - DNA, 25 bp, Homo sapien
gaagacaagatttccactagaggct

SEQ ID NO: 2977615 - DNA, 25 bp, Homo sapien
tccctaggtgaagagcaaacattct

SEQ ID NO: 2977616 - DNA, 25 bp, Homo sapien
cataaattcaactagggccagcaac

SEQ ID NO: 2977617 - DNA, 25 bp, Homo sapien
tttctcaagaatagggacccaggac

SEQ ID NO: 2977618 - DNA, 25 bp, Homo sapien
tactagatgtgatgggaaatcccac

SEQ ID NO: 2977619 - DNA, 25 bp, Homo sapien
aacaatagggttcatttaggcagcc

SEQ ID NO: 2977620 - DNA, 25 bp, Homo sapien
taaactggagaaagctatggagcac

SEQ ID NO: 2977621 - DNA, 25 bp, Homo sapien
ctgcacccttataggaacttaaaat

SEQ ID NO: 2977622 - DNA, 25 bp, Homo sapien
tacagtttaggggagaaggactcca

SEQ ID NO: 2977623 - DNA, 25 bp, Homo sapien
gaaggcctgtcacttaagaatgatg

SEQ ID NO: 2977624 - DNA, 25 bp, Homo sapien
ccaaagtcagcataatagagttcat

SEQ ID NO: 2977625 - DNA, 25 bp, Homo sapien
tgcagctgttgaaaggtcaagtggt

SEQ ID NO: 2977626 - DNA, 25 bp, Homo sapien
tcttcgccttccagtctgcagggtc

SEQ ID NO: 2977627 - DNA, 25 bp, Homo sapien
gatggcatgctcctgataaacagtt

SEQ ID NO: 2977628 - DNA, 25 bp, Homo sapien
caagtggtttagcaagttcttgtct

SEQ ID NO: 2977629 - DNA, 25 bp, Homo sapien
catggccagagatctctttttccca

SEQ ID NO: 2977630 - DNA, 25 bp, Homo sapien
aagggaggaacacatggccagagat

SEQ ID NO: 2977631 - DNA, 25 bp, Homo sapien
ggaacacatggccagagatctcttt

SEQ ID NO: 2977632 - DNA, 25 bp, Homo sapien
caatcctcttgtcctacactttgca

SEQ ID NO: 2977633 - DNA, 25 bp, Homo sapien
cagcaccagtgaggccgcttgcatt

SEQ ID NO: 2977634 - DNA, 25 bp, Homo sapien
cagtgaggccgcttgcattgatgga

SEQ ID NO: 2977635 - DNA, 25 bp, Homo sapien
gctatccagagctgtccattcagca

SEQ ID NO: 2977636 - DNA, 25 bp, Homo sapien
cacggccaccttgatctgaatgcta

SEQ ID NO: 2977637 - DNA, 25 bp, Homo sapien
tctgacacagtcacccagacccctt

SEQ ID NO: 2977638 - DNA, 25 bp, Homo sapien
gacacagtcacccagaccccttgct

SEQ ID NO: 2977639 - DNA, 25 bp, Homo sapien
ccacattctgacacagtcacccaga

SEQ ID NO: 2977640 - DNA, 25 bp, Homo sapien
cccacattctgacacagtcacccag

SEQ ID NO: 2977641 - DNA, 25 bp, Homo sapien
actgtccgagttgacttccaatcag

SEQ ID NO: 2977642 - DNA, 25 bp, Homo sapien
cttccaatcaggatatcccagctgg

SEQ ID NO: 2977643 - DNA, 25 bp, Homo sapien
tgactgtccgagttgacttccaatc

SEQ ID NO: 2977644 - DNA, 25 bp, Homo sapien
acttccaatcaggatatcccagctg

SEQ ID NO: 2977645 - DNA, 25 bp, Homo sapien
gaggcagaaccaaaaagtgtgttca

SEQ ID NO: 2977646 - DNA, 25 bp, Homo sapien
cagaaccaaaaagtgtgttcaaccg

SEQ ID NO: 2977647 - DNA, 25 bp, Homo sapien
ggcagaaccaaaaagtgtgttcaac

SEQ ID NO: 2977648 - DNA, 25 bp, Homo sapien
gcagaggcagaaccaaaaagtgtgt

SEQ ID NO: 2977649 - DNA, 25 bp, Homo sapien
ggagtcaaattcaagcaaccccaag

SEQ ID NO: 2977650 - DNA, 25 bp, Homo sapien
gtcaaattcaagcaaccccaaggcc

SEQ ID NO: 2977651 - DNA, 25 bp, Homo sapien
caaggagtcaaattcaagcaacccc

SEQ ID NO: 2977652 - DNA, 25 bp, Homo sapien
ggcaaggagtcaaattcaagcaacc

SEQ ID NO: 2977653 - DNA, 25 bp, Homo sapien
gaatactgctgtccccgtaataata

SEQ ID NO: 2977654 - DNA, 25 bp, Homo sapien
gattgcaagagttgattttgttggt

SEQ ID NO: 2977655 - DNA, 25 bp, Homo sapien
ttgagaaggttcatgtgacattttc

SEQ ID NO: 2977656 - DNA, 25 bp, Homo sapien
cagaggtctcaaaaaccacccggca

SEQ ID NO: 2977657 - DNA, 25 bp, Homo sapien
ttagatcctgttttcttcctggatg

SEQ ID NO: 2977658 - DNA, 25 bp, Homo sapien
cctgcagcctctttgtgaaactggc

SEQ ID NO: 2977659 - DNA, 25 bp, Homo sapien
cactgttatcgtctcctcctcagga

SEQ ID NO: 2977660 - DNA, 25 bp, Homo sapien
gatgaagtgccgctgttaccaggtg

SEQ ID NO: 2977661 - DNA, 25 bp, Homo sapien
cacactcgagagtgaactgtgcact

SEQ ID NO: 2977662 - DNA, 25 bp, Homo sapien
agatatggcatggttggtcatactc

SEQ ID NO: 2977663 - DNA, 25 bp, Homo sapien
tctcatgagactcttggaagaatat

SEQ ID NO: 2977664 - DNA, 25 bp, Homo sapien
tatagtcgaacacactcgagagtga

SEQ ID NO: 2977665 - DNA, 25 bp, Homo sapien
atcatctgccaggggatacagcact

SEQ ID NO: 2977666 - DNA, 25 bp, Homo sapien
ggttggtccatgatggacgctcata

SEQ ID NO: 2977667 - DNA, 25 bp, Homo sapien
ttattgaagttattggttggtccat

SEQ ID NO: 2977668 - DNA, 25 bp, Homo sapien
ttattggttggtccatgatggacgc

SEQ ID NO: 2977669 - DNA, 25 bp, Homo sapien
catgggtggcctagacctaatgact

SEQ ID NO: 2977670 - DNA, 25 bp, Homo sapien
ttgagatgaccgcagccttggctga

SEQ ID NO: 2977671 - DNA, 25 bp, Homo sapien
tcttagtccaatagcccagcaggaa

SEQ ID NO: 2977672 - DNA, 25 bp, Homo sapien
gatcttgccccagttacgccttgag

SEQ ID NO: 2977673 - DNA, 25 bp, Homo sapien
gatttttcgacctggttgtcctgta

SEQ ID NO: 2977674 - DNA, 25 bp, Homo sapien
gaagaagttgccagatttttcgacc

SEQ ID NO: 2977675 - DNA, 25 bp, Homo sapien
gccagatttttcgacctggttgtcc

SEQ ID NO: 2977676 - DNA, 25 bp, Homo sapien
cctggttgtcctgtagttctgacca

SEQ ID NO: 2977677 - DNA, 25 bp, Homo sapien
tgtcatggaacattaagctttccct

SEQ ID NO: 2977678 - DNA, 25 bp, Homo sapien
tgcagaccactgtgtcatcccttaa

SEQ ID NO: 2977679 - DNA, 25 bp, Homo sapien
tcaaggtggctgtagcggatccaag

SEQ ID NO: 2977680 - DNA, 25 bp, Homo sapien
gatccaagccagaatcaggtaacag

SEQ ID NO: 2977681 - DNA, 25 bp, Homo sapien
tttctttgcttaattgatcagaggt

SEQ ID NO: 2977682 - DNA, 25 bp, Homo sapien
cagtccgttagatccttagtagtta

SEQ ID NO: 2977683 - DNA, 25 bp, Homo sapien
caaagcccaaattacccctgataag

SEQ ID NO: 2977684 - DNA, 25 bp, Homo sapien
tgctgcctgcaattggggatccttg

SEQ ID NO: 2977685 - DNA, 25 bp, Homo sapien
ccctgataaggtcatggaaaaattc

SEQ ID NO: 2977686 - DNA, 25 bp, Homo sapien
gctgacaagctcagcgagggccgtc

SEQ ID NO: 2977687 - DNA, 25 bp, Homo sapien
ggctgctctggtcccaatctgttaa

SEQ ID NO: 2977688 - DNA, 25 bp, Homo sapien
tactagaaatgctacatataggtgc

SEQ ID NO: 2977689 - DNA, 25 bp, Homo sapien
tcagcaaaggtgcatcttccacagc

SEQ ID NO: 2977690 - DNA, 25 bp, Homo sapien
tccttctaccaggactgatccttaa

SEQ ID NO: 2977691 - DNA, 25 bp, Homo sapien
tcaaaggatttgaatcaagtattag

SEQ ID NO: 2977692 - DNA, 25 bp, Homo sapien
agctccttctaccaggactgatcct

SEQ ID NO: 2977693 - DNA, 25 bp, Homo sapien
ttgaatcaagtattaggaaattgca

SEQ ID NO: 2977694 - DNA, 25 bp, Homo sapien
agacttaaggatgtgacaaaccagg

SEQ ID NO: 2977695 - DNA, 25 bp, Homo sapien
ttaaggatgtgacaaaccaggagat

SEQ ID NO: 2977696 - DNA, 25 bp, Homo sapien
gatgtgacaaaccaggagataccca

SEQ ID NO: 2977697 - DNA, 25 bp, Homo sapien
aaggatgtgacaaaccaggagatac

SEQ ID NO: 2977698 - DNA, 25 bp, Homo sapien
gggtagtcacttacaagtggtggca

SEQ ID NO: 2977699 - DNA, 25 bp, Homo sapien
gactgctctgggtacaccagcatcc

SEQ ID NO: 2977700 - DNA, 25 bp, Homo sapien
cagcatcctcgcttggtctgcacga

SEQ ID NO: 2977701 - DNA, 25 bp, Homo sapien
tgttccagtggcttggcttgcccga

SEQ ID NO: 2977702 - DNA, 25 bp, Homo sapien
tctccccactgtgcatctgcaaatc

SEQ ID NO: 2977703 - DNA, 25 bp, Homo sapien
cccgcttctgaattaacctgtcctg

SEQ ID NO: 2977704 - DNA, 25 bp, Homo sapien
tttcccgcttctgaattaacctgtc

SEQ ID NO: 2977705 - DNA, 25 bp, Homo sapien
aatttcccgcttctgaattaacctg

SEQ ID NO: 2977706 - DNA, 25 bp, Homo sapien
tcccgcttctgaattaacctgtcct

SEQ ID NO: 2977707 - DNA, 25 bp, Homo sapien
aatcttgatctgtccacacttggac

SEQ ID NO: 2977708 - DNA, 25 bp, Homo sapien
cagggcaagaagccctctggccaga

SEQ ID NO: 2977709 - DNA, 25 bp, Homo sapien
tttgcagctgggagacgggtatcct

SEQ ID NO: 2977710 - DNA, 25 bp, Homo sapien
tggtcacagggctacaaatcttgat

SEQ ID NO: 2977711 - DNA, 25 bp, Homo sapien
cagcccaagaggtaaaagttcaaag

SEQ ID NO: 2977712 - DNA, 25 bp, Homo sapien
tgtgctgtcctggtaccatcacaca

SEQ ID NO: 2977713 - DNA, 25 bp, Homo sapien
acacagcccaagaggtaaaagttca

SEQ ID NO: 2977714 - DNA, 25 bp, Homo sapien
taatactttgttatagattgagtac

SEQ ID NO: 2977715 - DNA, 25 bp, Homo sapien
atgaggagattctttgccaatgttc

SEQ ID NO: 2977716 - DNA, 25 bp, Homo sapien
caacacgccatgaggagattctttg

SEQ ID NO: 2977717 - DNA, 25 bp, Homo sapien
gaggagattctttgccaatgttcat

SEQ ID NO: 2977718 - DNA, 25 bp, Homo sapien
ccatctttcccaacacgccatgagg

SEQ ID NO: 2977719 - DNA, 25 bp, Homo sapien
tgaattaggaaggagtcgctactct

SEQ ID NO: 2977720 - DNA, 25 bp, Homo sapien
ttaatttcatccgttctactctgat

SEQ ID NO: 2977721 - DNA, 25 bp, Homo sapien
tctaggtagcagttgattgatcttg

SEQ ID NO: 2977722 - DNA, 25 bp, Homo sapien
ggaaggagtcgctactctttgatat

SEQ ID NO: 2977723 - DNA, 25 bp, Homo sapien
tatgcctagacagctattctagcac

SEQ ID NO: 2977724 - DNA, 25 bp, Homo sapien
tctgcatatgcctagacagctattc

SEQ ID NO: 2977725 - DNA, 25 bp, Homo sapien
agattcttagagtttgagatcttac

SEQ ID NO: 2977726 - DNA, 25 bp, Homo sapien
aattatatggctgttagtgtgcagc

SEQ ID NO: 2977727 - DNA, 25 bp, Homo sapien
ttcttcttgacaactcatcaaaaca

SEQ ID NO: 2977728 - DNA, 25 bp, Homo sapien
gaaaaaatgtgataactccccagaa

SEQ ID NO: 2977729 - DNA, 25 bp, Homo sapien
agaaactaattaaggcagcacacca

SEQ ID NO: 2977730 - DNA, 25 bp, Homo sapien
gaaatgttatgtgtaagtcctcact

SEQ ID NO: 2977731 - DNA, 25 bp, Homo sapien
gatatgaaatcaaatctccttagag

SEQ ID NO: 2977732 - DNA, 25 bp, Homo sapien
ctttgctggagtaacaagttagcgt

SEQ ID NO: 2977733 - DNA, 25 bp, Homo sapien
aagttagcgttccaacttcctagag

SEQ ID NO: 2977734 - DNA, 25 bp, Homo sapien
acaagttagcgttccaacttcctag

SEQ ID NO: 2977735 - DNA, 25 bp, Homo sapien
tggagtaacaagttagcgttccaac

SEQ ID NO: 2977736 - DNA, 25 bp, Homo sapien
tgctggcaaccactgtaactttcac

SEQ ID NO: 2977737 - DNA, 25 bp, Homo sapien
ctgaaaacgggttttcactcaatgc

SEQ ID NO: 2977738 - DNA, 25 bp, Homo sapien
aagtggtctgactgttttagtgctg

SEQ ID NO: 2977739 - DNA, 25 bp, Homo sapien
caatgcagcctctaagtgtttaaga

SEQ ID NO: 2977740 - DNA, 25 bp, Homo sapien
tgggctggcgctgcctttagaagga

SEQ ID NO: 2977741 - DNA, 25 bp, Homo sapien
ctgggctggcgctgcctttagaagg

SEQ ID NO: 2977742 - DNA, 25 bp, Homo sapien
gggctggcgctgcctttagaaggag

SEQ ID NO: 2977743 - DNA, 25 bp, Homo sapien
gaatatagcttttgagctttgttcc

SEQ ID NO: 2977744 - DNA, 25 bp, Homo sapien
tatagcttttgagctttgttccaag

SEQ ID NO: 2977745 - DNA, 25 bp, Homo sapien
aatatagcttttgagctttgttcca

SEQ ID NO: 2977746 - DNA, 25 bp, Homo sapien
ctgaatatagcttttgagctttgtt

SEQ ID NO: 2977747 - DNA, 25 bp, Homo sapien
tgccagtgtccaaggtaccaatatt

SEQ ID NO: 2977748 - DNA, 25 bp, Homo sapien
gccagtgtccaaggtaccaatattc

SEQ ID NO: 2977749 - DNA, 25 bp, Homo sapien
atttgcgttgcctcactgcctgtgt

SEQ ID NO: 2977750 - DNA, 25 bp, Homo sapien
tgttctcacctttaagcagcccagc

SEQ ID NO: 2977751 - DNA, 25 bp, Homo sapien
agcagcccagctgatcagagctcct

SEQ ID NO: 2977752 - DNA, 25 bp, Homo sapien
gctcctcttccatttgcgttgcctc

SEQ ID NO: 2977753 - DNA, 25 bp, Homo sapien
cagtagcattgatagtgcatggaaa

SEQ ID NO: 2977754 - DNA, 25 bp, Homo sapien
tcttcagtagcattgatagtgcatg

SEQ ID NO: 2977755 - DNA, 25 bp, Homo sapien
tagcattgatagtgcatggaaagga

SEQ ID NO: 2977756 - DNA, 25 bp, Homo sapien
tcagtagcattgatagtgcatggaa

SEQ ID NO: 2977757 - DNA, 25 bp, Homo sapien
agacatatactttcagggctgcatc

SEQ ID NO: 2977758 - DNA, 25 bp, Homo sapien
cactcttggtactggaaatgtcacc

SEQ ID NO: 2977759 - DNA, 25 bp, Homo sapien
aagatcctcagctgattcacatgcg

SEQ ID NO: 2977760 - DNA, 25 bp, Homo sapien
taaatggacccataaccttgctcag

SEQ ID NO: 2977761 - DNA, 25 bp, Homo sapien
tcaaagtcagaatgttcaagtttat

SEQ ID NO: 2977762 - DNA, 25 bp, Homo sapien
aaagtcagaatgttcaagtttattc

SEQ ID NO: 2977763 - DNA, 25 bp, Homo sapien
caaagtcagaatgttcaagtttatt

SEQ ID NO: 2977764 - DNA, 25 bp, Homo sapien
cttcaaagtcagaatgttcaagttt

SEQ ID NO: 2977765 - DNA, 25 bp, Homo sapien
catctgtgatcaaccaagggctggc

SEQ ID NO: 2977766 - DNA, 25 bp, Homo sapien
tagctgggagttggatgctctaagc

SEQ ID NO: 2977767 - DNA, 25 bp, Homo sapien
gagtcactcatgcttctgggtgtta

SEQ ID NO: 2977768 - DNA, 25 bp, Homo sapien
gcttatctcactggactcggctaga

SEQ ID NO: 2977769 - DNA, 25 bp, Homo sapien
taattttaccgatgccttgagtcac

SEQ ID NO: 2977770 - DNA, 25 bp, Homo sapien
ttccagggtctgaatgtgaagacag

SEQ ID NO: 2977771 - DNA, 25 bp, Homo sapien
tgcccacagttagatgaatgaacaa

SEQ ID NO: 2977772 - DNA, 25 bp, Homo sapien
tactgcattcttccactcatacgag

SEQ ID NO: 2977773 - DNA, 25 bp, Homo sapien
tggtactcagtgattaaggtacaag

SEQ ID NO: 2977774 - DNA, 25 bp, Homo sapien
ggcacttaatatatagtgcctgaca

SEQ ID NO: 2977775 - DNA, 25 bp, Homo sapien
tgattaaggtacaagtggaaaggta

SEQ ID NO: 2977776 - DNA, 25 bp, Homo sapien
ccccttacttgctagcagtgtgatc

SEQ ID NO: 2977777 - DNA, 25 bp, Homo sapien
gggctggcaatcaatagttgtttct

SEQ ID NO: 2977778 - DNA, 25 bp, Homo sapien
aaaccaagacgaataatgcttctga

SEQ ID NO: 2977779 - DNA, 25 bp, Homo sapien
atgcttctgaaaacttccgaatggt

SEQ ID NO: 2977780 - DNA, 25 bp, Homo sapien
aaacttccgaatggtagatagagat

SEQ ID NO: 2977781 - DNA, 25 bp, Homo sapien
tatgggagtccacatatttccattt

SEQ ID NO: 2977782 - DNA, 25 bp, Homo sapien
ccaagatgttggtttggcaaggcgt

SEQ ID NO: 2977783 - DNA, 25 bp, Homo sapien
agcacgtcttctatgggagtccaca

SEQ ID NO: 2977784 - DNA, 25 bp, Homo sapien
ttatgtgcttgtagcacgtcttcta

SEQ ID NO: 2977785 - DNA, 25 bp, Homo sapien
ggcttaactgaccccaattggccaa

SEQ ID NO: 2977786 - DNA, 25 bp, Homo sapien
atattactaatggctggtgtcaggg

SEQ ID NO: 2977787 - DNA, 25 bp, Homo sapien
actgaccccaattggccaaactcat

SEQ ID NO: 2977788 - DNA, 25 bp, Homo sapien
tactaatggctggtgtcaggggagg

SEQ ID NO: 2977789 - DNA, 25 bp, Homo sapien
tcagcaggagaactaacaggaggta

SEQ ID NO: 2977790 - DNA, 25 bp, Homo sapien
gctatgcaggaatcggagacgtcca

SEQ ID NO: 2977791 - DNA, 25 bp, Homo sapien
cagttgagagttgtagatgaagcca

SEQ ID NO: 2977792 - DNA, 25 bp, Homo sapien
tcattgttaacgtctgatggccaac

SEQ ID NO: 2977793 - DNA, 25 bp, Homo sapien
actattaacagacgggctaagtgtc

SEQ ID NO: 2977794 - DNA, 25 bp, Homo sapien
gatttttaccagttgggagagccca

SEQ ID NO: 2977795 - DNA, 25 bp, Homo sapien
tctccacactattaacagacgggct

SEQ ID NO: 2977796 - DNA, 25 bp, Homo sapien
tattacttacaacctcatccctgaa

SEQ ID NO: 2977797 - DNA, 25 bp, Homo sapien
ttcccatcctttgacctaatcaggg

SEQ ID NO: 2977798 - DNA, 25 bp, Homo sapien
cctttgacctaatcagggctttgat

SEQ ID NO: 2977799 - DNA, 25 bp, Homo sapien
tttgcaggccgtgagggagaggctg

SEQ ID NO: 2977800 - DNA, 25 bp, Homo sapien
catcctttgacctaatcagggcttt

SEQ ID NO: 2977801 - DNA, 25 bp, Homo sapien
gcttccacgggaaaactgcttctcc

SEQ ID NO: 2977802 - DNA, 25 bp, Homo sapien
ttctccccagcagattcaaggactc

SEQ ID NO: 2977803 - DNA, 25 bp, Homo sapien
gaatcttagggactcaaaggcttcc

SEQ ID NO: 2977804 - DNA, 25 bp, Homo sapien
gatggagcaaggtctcctgagtgaa

SEQ ID NO: 2977805 - DNA, 25 bp, Homo sapien
gagacatccagatagcaaccacagg

SEQ ID NO: 2977806 - DNA, 25 bp, Homo sapien
aaccacaggtctttcgtattgagga

SEQ ID NO: 2977807 - DNA, 25 bp, Homo sapien
tgggagacagtcctagaacacaacg

SEQ ID NO: 2977808 - DNA, 25 bp, Homo sapien
tccaagatcacccaagagcggaggt

SEQ ID NO: 2977809 - DNA, 25 bp, Homo sapien
gacatgccggactgttaattaccta

SEQ ID NO: 2977810 - DNA, 25 bp, Homo sapien
taagtgagccaaagaacaacatgcc

SEQ ID NO: 2977811 - DNA, 25 bp, Homo sapien
taaattagtctcatgagagccacac

SEQ ID NO: 2977812 - DNA, 25 bp, Homo sapien
gaaggtgggttagccagtgactcaa

SEQ ID NO: 2977813 - DNA, 25 bp, Homo sapien
gctgacccggagatgaatcacacta

SEQ ID NO: 2977814 - DNA, 25 bp, Homo sapien
taagccagttctatgttgtgcgtgc

SEQ ID NO: 2977815 - DNA, 25 bp, Homo sapien
gggacaggccttttggtataagcca

SEQ ID NO: 2977816 - DNA, 25 bp, Homo sapien
tccaaatggaggaatgggactctca

SEQ ID NO: 2977817 - DNA, 25 bp, Homo sapien
aaagaagtccgagagccagtgcaaa

SEQ ID NO: 2977818 - DNA, 25 bp, Homo sapien
ctatgtctgtgggtacgtgggttac

SEQ ID NO: 2977819 - DNA, 25 bp, Homo sapien
ccagtgctcaaagtttggaggccca

SEQ ID NO: 2977820 - DNA, 25 bp, Homo sapien
tagaaacatcgggacctcaagaaac

SEQ ID NO: 2977821 - DNA, 25 bp, Homo sapien
cattggcttggtgtgtgcggatttc

SEQ ID NO: 2977822 - DNA, 25 bp, Homo sapien
tggcttggtgtgtgcggatttctcc

SEQ ID NO: 2977823 - DNA, 25 bp, Homo sapien
gcttggtgtgtgcggatttctccat

SEQ ID NO: 2977824 - DNA, 25 bp, Homo sapien
ttggcttggtgtgtgcggatttctc

SEQ ID NO: 2977825 - DNA, 25 bp, Homo sapien
tgcaggggtgtaaaacttctgtcac

SEQ ID NO: 2977826 - DNA, 25 bp, Homo sapien
tactgactagtttatctgagtggta

SEQ ID NO: 2977827 - DNA, 25 bp, Homo sapien
cacttttactgactagtttatctga

SEQ ID NO: 2977828 - DNA, 25 bp, Homo sapien
tatctgagtggtaattaggcttcct

SEQ ID NO: 2977829 - DNA, 25 bp, Homo sapien
tctggccttgttgacctcaaattgt

SEQ ID NO: 2977830 - DNA, 25 bp, Homo sapien
cactcttcaatagccacatctaagg

SEQ ID NO: 2977831 - DNA, 25 bp, Homo sapien
ccaagcttgagtttgaggactacca

SEQ ID NO: 2977832 - DNA, 25 bp, Homo sapien
ctaaggaatgaccttgatcataacc

SEQ ID NO: 2977833 - DNA, 25 bp, Homo sapien
tggaaataccgcaagaacagtgttt

SEQ ID NO: 2977834 - DNA, 25 bp, Homo sapien
tccattggtggctactttaactgtc

SEQ ID NO: 2977835 - DNA, 25 bp, Homo sapien
tgtttccactgagcataccgcaagt

SEQ ID NO: 2977836 - DNA, 25 bp, Homo sapien
gcagcactcagtaatcctacagtaa

SEQ ID NO: 2977837 - DNA, 25 bp, Homo sapien
gactttgcctttcttgacatcttca

SEQ ID NO: 2977838 - DNA, 25 bp, Homo sapien
tcttgactttgcctttcttgacatc

SEQ ID NO: 2977839 - DNA, 25 bp, Homo sapien
ctgtcttgactttgcctttcttgac

SEQ ID NO: 2977840 - DNA, 25 bp, Homo sapien
actttgcctttcttgacatcttcat

SEQ ID NO: 2977841 - DNA, 25 bp, Homo sapien
cagggtgtcttgcagctgtgctgct

SEQ ID NO: 2977842 - DNA, 25 bp, Homo sapien
aagacaagcaaagctcagagccaga

SEQ ID NO: 2977843 - DNA, 25 bp, Homo sapien
gccagaagcagggtgtcttgcagct

SEQ ID NO: 2977844 - DNA, 25 bp, Homo sapien
ctgaagacaagcaaagctcagagcc

SEQ ID NO: 2977845 - DNA, 25 bp, Homo sapien
gctgccaaagaacccagttgaactt

SEQ ID NO: 2977846 - DNA, 25 bp, Homo sapien
accgctccctgcagggtccgtgtag

SEQ ID NO: 2977847 - DNA, 25 bp, Homo sapien
tccgtgtagacttcggctgccaaag

SEQ ID NO: 2977848 - DNA, 25 bp, Homo sapien
tccctgcagggtccgtgtagacttc

SEQ ID NO: 2977849 - DNA, 25 bp, Homo sapien
gctggctccgaagatggaagattgg

SEQ ID NO: 2977850 - DNA, 25 bp, Homo sapien
ggtccaatgaaaaacacttcagaca

SEQ ID NO: 2977851 - DNA, 25 bp, Homo sapien
tgcaggtagcctctaggatctggaa

SEQ ID NO: 2977852 - DNA, 25 bp, Homo sapien
cttgattttggtccaatgaaaaaca

SEQ ID NO: 2977853 - DNA, 25 bp, Homo sapien
aatagtcttgatggctgaacacgga

SEQ ID NO: 2977854 - DNA, 25 bp, Homo sapien
ggccaagtgagggaatttagatctt

SEQ ID NO: 2977855 - DNA, 25 bp, Homo sapien
aagacaggagattggctggaaatag

SEQ ID NO: 2977856 - DNA, 25 bp, Homo sapien
gggaatttagatcttgatatgtgag

SEQ ID NO: 2977857 - DNA, 25 bp, Homo sapien
agaagtgaaaaaaccagatgtttgg

SEQ ID NO: 2977858 - DNA, 25 bp, Homo sapien
ctgctagatatttcacttcccaaca

SEQ ID NO: 2977859 - DNA, 25 bp, Homo sapien
tctgtccttgtttcagaagtgaaaa

SEQ ID NO: 2977860 - DNA, 25 bp, Homo sapien
agccctgctagatatttcacttccc

SEQ ID NO: 2977861 - DNA, 25 bp, Homo sapien
catcattctgtaacgtaaggtgttt

SEQ ID NO: 2977862 - DNA, 25 bp, Homo sapien
gtcatcattctgtaacgtaaggtgt

SEQ ID NO: 2977863 - DNA, 25 bp, Homo sapien
tcatcattctgtaacgtaaggtgtt

SEQ ID NO: 2977864 - DNA, 25 bp, Homo sapien
atatcatggaaggaagaaaaaggtg

SEQ ID NO: 2977865 - DNA, 25 bp, Homo sapien
tatatcatggaaggaagaaaaaggt

SEQ ID NO: 2977866 - DNA, 25 bp, Homo sapien
ctatatcatggaaggaagaaaaagg

SEQ ID NO: 2977867 - DNA, 25 bp, Homo sapien
tcatggctttgtttccgcatattgc

SEQ ID NO: 2977868 - DNA, 25 bp, Homo sapien
gtgagccctctcctcatgatcaata

SEQ ID NO: 2977869 - DNA, 25 bp, Homo sapien
cttaagtacatttcttgtcagattc

SEQ ID NO: 2977870 - DNA, 25 bp, Homo sapien
attgcttccccaactacttctccgg

SEQ ID NO: 2977871 - DNA, 25 bp, Homo sapien
aagtgcaaaggacaatgggtattca

SEQ ID NO: 2977872 - DNA, 25 bp, Homo sapien
tttcctctagtttcccaaatcagaa

SEQ ID NO: 2977873 - DNA, 25 bp, Homo sapien
gacaatgggtattcatctccatata

SEQ ID NO: 2977874 - DNA, 25 bp, Homo sapien
aaaggacaatgggtattcatctcca

SEQ ID NO: 2977875 - DNA, 25 bp, Homo sapien
ggtttttggttccagtgagatcttc

SEQ ID NO: 2977876 - DNA, 25 bp, Homo sapien
gttctgagaaaggctagaagtccaa

SEQ ID NO: 2977877 - DNA, 25 bp, Homo sapien
tgcatatggtctccttctcactgtg

SEQ ID NO: 2977878 - DNA, 25 bp, Homo sapien
ccttcctgctttgcatatggtctcc

SEQ ID NO: 2977879 - DNA, 25 bp, Homo sapien
agatacttcgctatcttcagaccag

SEQ ID NO: 2977880 - DNA, 25 bp, Homo sapien
gatccttaacgaactgtgaacaatc

SEQ ID NO: 2977881 - DNA, 25 bp, Homo sapien
caatcagttgagatacttcgctatc

SEQ ID NO: 2977882 - DNA, 25 bp, Homo sapien
attgtagaacaaagagtaagatcct

SEQ ID NO: 2977883 - DNA, 25 bp, Homo sapien
tcttattaaagttatctcaattaag

SEQ ID NO: 2977884 - DNA, 25 bp, Homo sapien
agttatctcaattaagtcgttttct

SEQ ID NO: 2977885 - DNA, 25 bp, Homo sapien
tctcaattaagtcgttttctccaaa

SEQ ID NO: 2977886 - DNA, 25 bp, Homo sapien
tattaaagttatctcaattaagtcg

SEQ ID NO: 2977887 - DNA, 25 bp, Homo sapien
tgcgaagtctaatggaaaggatatt

SEQ ID NO: 2977888 - DNA, 25 bp, Homo sapien
tatcctaatccactcaactttcatg

SEQ ID NO: 2977889 - DNA, 25 bp, Homo sapien
tccactcaactttcatggatataat

SEQ ID NO: 2977890 - DNA, 25 bp, Homo sapien
tcatggatataatgcgaagtctaat

SEQ ID NO: 2977891 - DNA, 25 bp, Homo sapien
atttttagatgtagcagctgaagta

SEQ ID NO: 2977892 - DNA, 25 bp, Homo sapien
aagaaaatgaatgcctcagatgcaa

SEQ ID NO: 2977893 - DNA, 25 bp, Homo sapien
caggaagtggatgataaaagaaaat

SEQ ID NO: 2977894 - DNA, 25 bp, Homo sapien
ggaagtggatgataaaagaaaatga

SEQ ID NO: 2977895 - DNA, 25 bp, Homo sapien
aaatgaatgcctcagatgcaattgg

SEQ ID NO: 2977896 - DNA, 25 bp, Homo sapien
gttatctctggctcagaaaagtact

SEQ ID NO: 2977897 - DNA, 25 bp, Homo sapien
gctccggttaatctctgttatcccc

SEQ ID NO: 2977898 - DNA, 25 bp, Homo sapien
tatctctggctcagaaaagtacttt

SEQ ID NO: 2977899 - DNA, 25 bp, Homo sapien
tactttttctgctccggttaatctc

SEQ ID NO: 2977900 - DNA, 25 bp, Homo sapien
tctctgactgcttaaatgctaatac

SEQ ID NO: 2977901 - DNA, 25 bp, Homo sapien
gcttaaatgctaatacattcatctt

SEQ ID NO: 2977902 - DNA, 25 bp, Homo sapien
gactgcttaaatgctaatacattca

SEQ ID NO: 2977903 - DNA, 25 bp, Homo sapien
ttattctctgactgcttaaatgcta

SEQ ID NO: 2977904 - DNA, 25 bp, Homo sapien
tcacagcacttcaacctgggtggca

SEQ ID NO: 2977905 - DNA, 25 bp, Homo sapien
tactcaaaaggctgatgctggagga

SEQ ID NO: 2977906 - DNA, 25 bp, Homo sapien
gagctatgatcgcatcacagcactt

SEQ ID NO: 2977907 - DNA, 25 bp, Homo sapien
actcaaaaggctgatgctggaggat

SEQ ID NO: 2977908 - DNA, 25 bp, Homo sapien
gaaaaaacaccacagcgcatgcatg

SEQ ID NO: 2977909 - DNA, 25 bp, Homo sapien
gaaaaggccagttcattgcattagg

SEQ ID NO: 2977910 - DNA, 25 bp, Homo sapien
cgaggcactgccaactggttaggtt

SEQ ID NO: 2977911 - DNA, 25 bp, Homo sapien
ttcggaaaatccatcacagagtacg

SEQ ID NO: 2977912 - DNA, 25 bp, Homo sapien
caaaatctagacatttccaatgagt

SEQ ID NO: 2977913 - DNA, 25 bp, Homo sapien
tttccccacatcaggtatttttcaa

SEQ ID NO: 2977914 - DNA, 25 bp, Homo sapien
ccaatgagtctgtatatcttcttgt

SEQ ID NO: 2977915 - DNA, 25 bp, Homo sapien
ggaagccagcagaggaattttccat

SEQ ID NO: 2977916 - DNA, 25 bp, Homo sapien
ccacagagaatctatgagctaggtg

SEQ ID NO: 2977917 - DNA, 25 bp, Homo sapien
cacagagaatctatgagctaggtgc

SEQ ID NO: 2977918 - DNA, 25 bp, Homo sapien
aaagaaaagctccagacaccaagaa

SEQ ID NO: 2977919 - DNA, 25 bp, Homo sapien
tgtcagagaattcgtggcatccaga

SEQ ID NO: 2977920 - DNA, 25 bp, Homo sapien
gttaaaatctgacataaagagtggc

SEQ ID NO: 2977921 - DNA, 25 bp, Homo sapien
tcttcaggatctggctcttactagc

SEQ ID NO: 2977922 - DNA, 25 bp, Homo sapien
gagtggctagtctacatttcccata

SEQ ID NO: 2977923 - DNA, 25 bp, Homo sapien
tacacaactcgagaaacagtgccca

SEQ ID NO: 2977924 - DNA, 25 bp, Homo sapien
taactctgctcgctctatacccctg

SEQ ID NO: 2977925 - DNA, 25 bp, Homo sapien
tctatacccctgtgcttctgttgca

SEQ ID NO: 2977926 - DNA, 25 bp, Homo sapien
gctgccctaacagagcacaaccaaa

SEQ ID NO: 2977927 - DNA, 25 bp, Homo sapien
gtgaaataaatgaggatagcgtggc

SEQ ID NO: 2977928 - DNA, 25 bp, Homo sapien
actgaagtggcttagaccccaaaat

SEQ ID NO: 2977929 - DNA, 25 bp, Homo sapien
tagcgtggccccaagcatacggcat

SEQ ID NO: 2977930 - DNA, 25 bp, Homo sapien
atgaggatagcgtggccccaagcat

SEQ ID NO: 2977931 - DNA, 25 bp, Homo sapien
catagactgatgaactccacactcc

SEQ ID NO: 2977932 - DNA, 25 bp, Homo sapien
catttacttgcatagactgatgaac

SEQ ID NO: 2977933 - DNA, 25 bp, Homo sapien
tccacactccccgattaaatgtaaa

SEQ ID NO: 2977934 - DNA, 25 bp, Homo sapien
gctgtcacaggacatggaatgttaa

SEQ ID NO: 2977935 - DNA, 25 bp, Homo sapien
gttaagaattgagataaagtgccag

SEQ ID NO: 2977936 - DNA, 25 bp, Homo sapien
taaagtgagaggcaacacagcagtt

SEQ ID NO: 2977937 - DNA, 25 bp, Homo sapien
aagtgccagtctgccagttagaatc

SEQ ID NO: 2977938 - DNA, 25 bp, Homo sapien
gccagttagaatcctgtgtctcact

SEQ ID NO: 2977939 - DNA, 25 bp, Homo sapien
tctgcaagtattggtagcgggcacc

SEQ ID NO: 2977940 - DNA, 25 bp, Homo sapien
actagatgccagtatgaccccaaac

SEQ ID NO: 2977941 - DNA, 25 bp, Homo sapien
tgccagatgtcccttggtgagcaaa

SEQ ID NO: 2977942 - DNA, 25 bp, Homo sapien
gaaggtgtcctgattggtctcgtag

SEQ ID NO: 2977943 - DNA, 25 bp, Homo sapien
gcctttccggatacattcaccacag

SEQ ID NO: 2977944 - DNA, 25 bp, Homo sapien
ccggatacattcaccacagacaaag

SEQ ID NO: 2977945 - DNA, 25 bp, Homo sapien
cttctttgcctttccggatacattc

SEQ ID NO: 2977946 - DNA, 25 bp, Homo sapien
gatgagaaaccccacaggagaatct

SEQ ID NO: 2977947 - DNA, 25 bp, Homo sapien
catcttgtaagagcaccgtagctga

SEQ ID NO: 2977948 - DNA, 25 bp, Homo sapien
cttggccctgttagtacccttctga

SEQ ID NO: 2977949 - DNA, 25 bp, Homo sapien
tcttgtaagagcaccgtagctgagc

SEQ ID NO: 2977950 - DNA, 25 bp, Homo sapien
tcatcttgtaagagcaccgtagctg

SEQ ID NO: 2977951 - DNA, 25 bp, Homo sapien
gatgaagtgcagatctgaaccccat

SEQ ID NO: 2977952 - DNA, 25 bp, Homo sapien
agtgcagatctgaaccccatgtcct

SEQ ID NO: 2977953 - DNA, 25 bp, Homo sapien
tgcagatctgaaccccatgtccttt

SEQ ID NO: 2977954 - DNA, 25 bp, Homo sapien
tgaagtgcagatctgaaccccatgt

SEQ ID NO: 2977955 - DNA, 25 bp, Homo sapien
ttccctgacctcaactgcgtgactg

SEQ ID NO: 2977956 - DNA, 25 bp, Homo sapien
gaccagcagagattgggctcaccag

SEQ ID NO: 2977957 - DNA, 25 bp, Homo sapien
tccctgacctcaactgcgtgactga

SEQ ID NO: 2977958 - DNA, 25 bp, Homo sapien
tgcgtgactgaccagcagagattgg

SEQ ID NO: 2977959 - DNA, 25 bp, Homo sapien
gttattggctgatgtctcaattccc

SEQ ID NO: 2977960 - DNA, 25 bp, Homo sapien
tcgtagaccagaaactccctggata

SEQ ID NO: 2977961 - DNA, 25 bp, Homo sapien
ttaagctgttgcaatgaaaattcag

SEQ ID NO: 2977962 - DNA, 25 bp, Homo sapien
gatagtgtctacaacttctttgacc

SEQ ID NO: 2977963 - DNA, 25 bp, Homo sapien
tctttcaagtgtagacccaaatggg

SEQ ID NO: 2977964 - DNA, 25 bp, Homo sapien
tgcccagaggaactacaagtattgc

SEQ ID NO: 2977965 - DNA, 25 bp, Homo sapien
tggtgtttctgaatgccaggttacc

SEQ ID NO: 2977966 - DNA, 25 bp, Homo sapien
tgggagctgctttggttgaacctaa

SEQ ID NO: 2977967 - DNA, 25 bp, Homo sapien
taatggccttcagctacgtaaatgt

SEQ ID NO: 2977968 - DNA, 25 bp, Homo sapien
ggtccatgtcgaagtttgttattca

SEQ ID NO: 2977969 - DNA, 25 bp, Homo sapien
gatgctgaggtttggttcaggtata

SEQ ID NO: 2977970 - DNA, 25 bp, Homo sapien
tcctcaggactgataacggagttca

SEQ ID NO: 2977971 - DNA, 25 bp, Homo sapien
ccctgttgcagataccagcttataa

SEQ ID NO: 2977972 - DNA, 25 bp, Homo sapien
gaatggactgataaaatctgcctct

SEQ ID NO: 2977973 - DNA, 25 bp, Homo sapien
cagcttattttatagactcaagttc

SEQ ID NO: 2977974 - DNA, 25 bp, Homo sapien
tctgaacaatcataagttctactga

SEQ ID NO: 2977975 - DNA, 25 bp, Homo sapien
tgtgtccctgtgttattgttttctt

SEQ ID NO: 2977976 - DNA, 25 bp, Homo sapien
tttaaatgatacattaagttcttgg

SEQ ID NO: 2977977 - DNA, 25 bp, Homo sapien
taaatgatacattaagttcttggat

SEQ ID NO: 2977978 - DNA, 25 bp, Homo sapien
gatacattaagttcttggatacatg

SEQ ID NO: 2977979 - DNA, 25 bp, Homo sapien
aatgatacattaagttcttggatac

SEQ ID NO: 2977980 - DNA, 25 bp, Homo sapien
ggaatacagccagaccattgtttaa

SEQ ID NO: 2977981 - DNA, 25 bp, Homo sapien
tctgtgataggtagagatcttcacc

SEQ ID NO: 2977982 - DNA, 25 bp, Homo sapien
tacacgcagccctcttttaaaacaa

SEQ ID NO: 2977983 - DNA, 25 bp, Homo sapien
ggccctctctctaaagtatttccta

SEQ ID NO: 2977984 - DNA, 25 bp, Homo sapien
ggatttcccagctcaagtcaaagtg

SEQ ID NO: 2977985 - DNA, 25 bp, Homo sapien
ttttagcatccatggtataataggc

SEQ ID NO: 2977986 - DNA, 25 bp, Homo sapien
taaaactgcaacatcaaaatcatct

SEQ ID NO: 2977987 - DNA, 25 bp, Homo sapien
atggtataataggccaaaggatttc

SEQ ID NO: 2977988 - DNA, 25 bp, Homo sapien
gggagcacgctacaattgaaccctt

SEQ ID NO: 2977989 - DNA, 25 bp, Homo sapien
tcaaggcagaacatgcagctcttac

SEQ ID NO: 2977990 - DNA, 25 bp, Homo sapien
gatactttcacggacatccttaggc

SEQ ID NO: 2977991 - DNA, 25 bp, Homo sapien
tgccaaagttgctaatctcgtttcc

SEQ ID NO: 2977992 - DNA, 25 bp, Homo sapien
tgtgcccttagggatccaggtgagt

SEQ ID NO: 2977993 - DNA, 25 bp, Homo sapien
ctttgctgtgcccttagggatccag

SEQ ID NO: 2977994 - DNA, 25 bp, Homo sapien
agggatccaggtgagttttgtagta

SEQ ID NO: 2977995 - DNA, 25 bp, Homo sapien
tttgtagtagtaagaattctagact

SEQ ID NO: 2977996 - DNA, 25 bp, Homo sapien
cggtcaagggcatacagagggctct

SEQ ID NO: 2977997 - DNA, 25 bp, Homo sapien
cctatggccccagagaatttctcgg

SEQ ID NO: 2977998 - DNA, 25 bp, Homo sapien
caaaaaggcccctgtgaaagaatgg

SEQ ID NO: 2977999 - DNA, 25 bp, Homo sapien
tataatgtgctctggcgggtagcct

SEQ ID NO: 2978000 - DNA, 25 bp, Homo sapien
tattgacaaggcaaacatcagcggt

SEQ ID NO: 2978001 - DNA, 25 bp, Homo sapien
tcagcggtagcagagtcaacaaagc

SEQ ID NO: 2978002 - DNA, 25 bp, Homo sapien
tatgctcgctgaaaccaagacggtc

SEQ ID NO: 2978003 - DNA, 25 bp, Homo sapien
tagcaacggtttctctccaagggtc

SEQ ID NO: 2978004 - DNA, 25 bp, Homo sapien
tatcagggtggctgtgtattcgcct

SEQ ID NO: 2978005 - DNA, 25 bp, Homo sapien
gagaagtgggttgcaacctctccct

SEQ ID NO: 2978006 - DNA, 25 bp, Homo sapien
tcaactgaagaacaggggcatctgc

SEQ ID NO: 2978007 - DNA, 25 bp, Homo sapien
ttgcctttggccatggatgtatcag

SEQ ID NO: 2978008 - DNA, 25 bp, Homo sapien
gaactctgttgccatgcacgtggga

SEQ ID NO: 2978009 - DNA, 25 bp, Homo sapien
aacctgagggtagacaagttcactc

SEQ ID NO: 2978010 - DNA, 25 bp, Homo sapien
tagccaaatggcgatgtggtcccag

SEQ ID NO: 2978011 - DNA, 25 bp, Homo sapien
gcttaggtttcgcagatccgcactt

SEQ ID NO: 2978012 - DNA, 25 bp, Homo sapien
aactagctggtattgtggacggcgc

SEQ ID NO: 2978013 - DNA, 25 bp, Homo sapien
tcgtaaggcctccttgagtcgctga

SEQ ID NO: 2978014 - DNA, 25 bp, Homo sapien
ttcaaggaaaggttctgtgcgagtc

SEQ ID NO: 2978015 - DNA, 25 bp, Homo sapien
tgtgtaggagaggtgaaactgacaa

SEQ ID NO: 2978016 - DNA, 25 bp, Homo sapien
ctaaaatcagaacaattagagagta

SEQ ID NO: 2978017 - DNA, 25 bp, Homo sapien
aatcagaacaattagagagtaatga

SEQ ID NO: 2978018 - DNA, 25 bp, Homo sapien
agaacaattagagagtaatgatttt

SEQ ID NO: 2978019 - DNA, 25 bp, Homo sapien
aaaatcagaacaattagagagtaat

SEQ ID NO: 2978020 - DNA, 25 bp, Homo sapien
ctctcgccttgtccgccctcagtct

SEQ ID NO: 2978021 - DNA, 25 bp, Homo sapien
ccaccgcccggcacgctttgctgat

SEQ ID NO: 2978022 - DNA, 25 bp, Homo sapien
agggtggacggctcgttccctctcg

SEQ ID NO: 2978023 - DNA, 25 bp, Homo sapien
cgcctaggcttctccgaagggtgga

SEQ ID NO: 2978024 - DNA, 25 bp, Homo sapien
ctcccgactgttcgcgaattactta

SEQ ID NO: 2978025 - DNA, 25 bp, Homo sapien
aagtgcggccactgcagcgccgctt

SEQ ID NO: 2978026 - DNA, 25 bp, Homo sapien
cttggctgtttgttctcccgactgt

SEQ ID NO: 2978027 - DNA, 25 bp, Homo sapien
ccccaggattgagacgcgcgcaagt

SEQ ID NO: 2978028 - DNA, 25 bp, Homo sapien
tgccagcgccgggtagagacctttg

SEQ ID NO: 2978029 - DNA, 25 bp, Homo sapien
attgttcgtcggtcccggcgcgtct

SEQ ID NO: 2978030 - DNA, 25 bp, Homo sapien
acctttgccgcaggggcaggattgt

SEQ ID NO: 2978031 - DNA, 25 bp, Homo sapien
caggattgttcgtcggtcccggcgc

SEQ ID NO: 2978032 - DNA, 25 bp, Homo sapien
ctactccgtctggagccccacacac

SEQ ID NO: 2978033 - DNA, 25 bp, Homo sapien
ttgtaaaaagcgagtgagccaaagc

SEQ ID NO: 2978034 - DNA, 25 bp, Homo sapien
cgccgggaaggctgcgcgctggcca

SEQ ID NO: 2978035 - DNA, 25 bp, Homo sapien
gtacagaggcatgtaagatccagtg

SEQ ID NO: 2978036 - DNA, 25 bp, Homo sapien
aaaagcgagtgagccaaagcaaacc

SEQ ID NO: 2978037 - DNA, 25 bp, Homo sapien
ctgggagccttgtggttctaccaag

SEQ ID NO: 2978038 - DNA, 25 bp, Homo sapien
tttaatgactcagctgacatccaga

SEQ ID NO: 2978039 - DNA, 25 bp, Homo sapien
tttgaatgttcggtgaagacacaca

SEQ ID NO: 2978040 - DNA, 25 bp, Homo sapien
ctgtctactgacatgcagagttact

SEQ ID NO: 2978041 - DNA, 25 bp, Homo sapien
tggaaaacagtctgagtttttgcaa

SEQ ID NO: 2978042 - DNA, 25 bp, Homo sapien
cgtgaagctgttgacctcggacaca

SEQ ID NO: 2978043 - DNA, 25 bp, Homo sapien
aagatgtctgcgaggtaccgttgcc

SEQ ID NO: 2978044 - DNA, 25 bp, Homo sapien
gatgcagcccacgattgactggaac

SEQ ID NO: 2978045 - DNA, 25 bp, Homo sapien
taagagctacggcactgtgtcgtca

SEQ ID NO: 2978046 - DNA, 25 bp, Homo sapien
tagttttgcaggcacggcattcaga

SEQ ID NO: 2978047 - DNA, 25 bp, Homo sapien
agatattcatggtgagtcccctccg

SEQ ID NO: 2978048 - DNA, 25 bp, Homo sapien
tgggcctctgaccaacagaccgtgt

SEQ ID NO: 2978049 - DNA, 25 bp, Homo sapien
gcttgacccatcttgaccagtaccg

SEQ ID NO: 2978050 - DNA, 25 bp, Homo sapien
gcaaagtacttatgagctcagtctc

SEQ ID NO: 2978051 - DNA, 25 bp, Homo sapien
gagtgggaaacagacattgcctgga

SEQ ID NO: 2978052 - DNA, 25 bp, Homo sapien
gagggaatccttagggcaagcaaag

SEQ ID NO: 2978053 - DNA, 25 bp, Homo sapien
gatgagctggagctttcactgtcac

SEQ ID NO: 2978054 - DNA, 25 bp, Homo sapien
tggcccctctcaattctcatgtctt

SEQ ID NO: 2978055 - DNA, 25 bp, Homo sapien
tatgggcgctaaaagtcaagttgag

SEQ ID NO: 2978056 - DNA, 25 bp, Homo sapien
ggaaaaacccacctctcaatgattc

SEQ ID NO: 2978057 - DNA, 25 bp, Homo sapien
aaacatatcattcaacctctggccc

SEQ ID NO: 2978058 - DNA, 25 bp, Homo sapien
ttttgcctcgtggttcaaaatgtgg

SEQ ID NO: 2978059 - DNA, 25 bp, Homo sapien
aatttttgcctcgtggttcaaaatg

SEQ ID NO: 2978060 - DNA, 25 bp, Homo sapien
ttgcctcgtggttcaaaatgtggac

SEQ ID NO: 2978061 - DNA, 25 bp, Homo sapien
gcctcgtggttcaaaatgtggactt

SEQ ID NO: 2978062 - DNA, 25 bp, Homo sapien
ttattcagactcagctccgccacta

SEQ ID NO: 2978063 - DNA, 25 bp, Homo sapien
gctccgccactaaactggccaggca

SEQ ID NO: 2978064 - DNA, 25 bp, Homo sapien
tccgccactaaactggccaggcagg

SEQ ID NO: 2978065 - DNA, 25 bp, Homo sapien
cagctccgccactaaactggccagg

SEQ ID NO: 2978066 - DNA, 25 bp, Homo sapien
cccatcacttaacccctggagtgca

SEQ ID NO: 2978067 - DNA, 25 bp, Homo sapien
ttcgtatccaggtatgcagaaaagt

SEQ ID NO: 2978068 - DNA, 25 bp, Homo sapien
ctcttctctgttcgtatccaggtat

SEQ ID NO: 2978069 - DNA, 25 bp, Homo sapien
cactctttcctatcaccccatcact

SEQ ID NO: 2978070 - DNA, 25 bp, Homo sapien
ttgcttctagatttccaaatgccag

SEQ ID NO: 2978071 - DNA, 25 bp, Homo sapien
aaatgccagtgtcttgatgctccct

SEQ ID NO: 2978072 - DNA, 25 bp, Homo sapien
catcattagtttttctcagaaaagc

SEQ ID NO: 2978073 - DNA, 25 bp, Homo sapien
tgatgctccctgtagttgaatggta

SEQ ID NO: 2978074 - DNA, 25 bp, Homo sapien
cattaatcatgtctggtaaccctgc

SEQ ID NO: 2978075 - DNA, 25 bp, Homo sapien
agagtccgttctattaccatcagca

SEQ ID NO: 2978076 - DNA, 25 bp, Homo sapien
gtcatctgttagcttctctccaggg

SEQ ID NO: 2978077 - DNA, 25 bp, Homo sapien
cacatggcaaagttctgctgcactg

SEQ ID NO: 2978078 - DNA, 25 bp, Homo sapien
acaacttggaatggatttgaggcaa

SEQ ID NO: 2978079 - DNA, 25 bp, Homo sapien
ccataagcagattttctttaagtgc

SEQ ID NO: 2978080 - DNA, 25 bp, Homo sapien
actggaaaacaaatatacaacttgg

SEQ ID NO: 2978081 - DNA, 25 bp, Homo sapien
tggatttgaggcaaattctgccata

SEQ ID NO: 2978082 - DNA, 25 bp, Homo sapien
gaatactgaatcaaagggcttcctt

SEQ ID NO: 2978083 - DNA, 25 bp, Homo sapien
aatactgaatcaaagggcttccttg

SEQ ID NO: 2978084 - DNA, 25 bp, Homo sapien
atactgaatcaaagggcttccttgc

SEQ ID NO: 2978085 - DNA, 25 bp, Homo sapien
tgatgtatctatcctcttcttctct

SEQ ID NO: 2978086 - DNA, 25 bp, Homo sapien
catctcagtgatgtatctatcctct

SEQ ID NO: 2978087 - DNA, 25 bp, Homo sapien
ccaggtcagcactggagaaagcgtt

SEQ ID NO: 2978088 - DNA, 25 bp, Homo sapien
gctccaagttctcatcaaacagaat

SEQ ID NO: 2978089 - DNA, 25 bp, Homo sapien
caatttttgcatagcctaaagcctg

SEQ ID NO: 2978090 - DNA, 25 bp, Homo sapien
ttttgcatagcctaaagcctgattc

SEQ ID NO: 2978091 - DNA, 25 bp, Homo sapien
tgcatagcctaaagcctgattcttc

SEQ ID NO: 2978092 - DNA, 25 bp, Homo sapien
tgctgaacaatttttgcatagccta

SEQ ID NO: 2978093 - DNA, 25 bp, Homo sapien
gcaagcttgctttgttgtagcccaa

SEQ ID NO: 2978094 - DNA, 25 bp, Homo sapien
tttgcaagcttgctttgttgtagcc

SEQ ID NO: 2978095 - DNA, 25 bp, Homo sapien
tatgcaactctttaccaaattcagg

SEQ ID NO: 2978096 - DNA, 25 bp, Homo sapien
gggatacaaccatcagtttgcaagc

SEQ ID NO: 2978097 - DNA, 25 bp, Homo sapien
gcaggcaatttgtgagtctgaattc

SEQ ID NO: 2978098 - DNA, 25 bp, Homo sapien
tgcacataaccacctgaaccccagg

SEQ ID NO: 2978099 - DNA, 25 bp, Homo sapien
ttctggtctttttcacctccataaa

SEQ ID NO: 2978100 - DNA, 25 bp, Homo sapien
gaactgtctcatactcttgcttctg

SEQ ID NO: 2978101 - DNA, 25 bp, Homo sapien
tatctagcaaatttgagccacgaag

SEQ ID NO: 2978102 - DNA, 25 bp, Homo sapien
tgcccttcgaacactctaaaataaa

SEQ ID NO: 2978103 - DNA, 25 bp, Homo sapien
ggtccccgacttaacataggtgcaa

SEQ ID NO: 2978104 - DNA, 25 bp, Homo sapien
tgagcctacagcaagcaagctcggg

SEQ ID NO: 2978105 - DNA, 25 bp, Homo sapien
gttctcttacacacttgggccaaaa

SEQ ID NO: 2978106 - DNA, 25 bp, Homo sapien
cctttcagttctcttacacacttgg

SEQ ID NO: 2978107 - DNA, 25 bp, Homo sapien
tgggccaaaaatgaatttgctcttc

SEQ ID NO: 2978108 - DNA, 25 bp, Homo sapien
cttcttcatcacaatcatccaataa

SEQ ID NO: 2978109 - DNA, 25 bp, Homo sapien
tgccattgctctcaccatcacccca

SEQ ID NO: 2978110 - DNA, 25 bp, Homo sapien
catgccattgctctcaccatcaccc

SEQ ID NO: 2978111 - DNA, 25 bp, Homo sapien
cacattcctgggcttcatgccattg

SEQ ID NO: 2978112 - DNA, 25 bp, Homo sapien
tgggcttcatgccattgctctcacc

SEQ ID NO: 2978113 - DNA, 25 bp, Homo sapien
ctaccgttgaaccacaatcaataaa

SEQ ID NO: 2978114 - DNA, 25 bp, Homo sapien
tgcaaaacttcccgattagacttgg

SEQ ID NO: 2978115 - DNA, 25 bp, Homo sapien
acttgggagtgttgcattcactgat

SEQ ID NO: 2978116 - DNA, 25 bp, Homo sapien
taccgttgaaccacaatcaataaac

SEQ ID NO: 2978117 - DNA, 25 bp, Homo sapien
tctgacagcagacgggcattatccc

SEQ ID NO: 2978118 - DNA, 25 bp, Homo sapien
tcctttttagacgaacacgatctgt

SEQ ID NO: 2978119 - DNA, 25 bp, Homo sapien
ttttcaaaaagacgggcactgcaag

SEQ ID NO: 2978120 - DNA, 25 bp, Homo sapien
cacgatctgttatcccactagggcc

SEQ ID NO: 2978121 - DNA, 25 bp, Homo sapien
aaagcaatgcttgataagttgatga

SEQ ID NO: 2978122 - DNA, 25 bp, Homo sapien
tcatcccaattattgtgacccagga

SEQ ID NO: 2978123 - DNA, 25 bp, Homo sapien
ttattgtgacccaggatcccaaagc

SEQ ID NO: 2978124 - DNA, 25 bp, Homo sapien
cactgtcctctatgcctctctctga

SEQ ID NO: 2978125 - DNA, 25 bp, Homo sapien
gtgcagctgctagcggatgcatgat

SEQ ID NO: 2978126 - DNA, 25 bp, Homo sapien
ggcatacaggagcagttccaggcca

SEQ ID NO: 2978127 - DNA, 25 bp, Homo sapien
caaatagcagtgcagctgctagcgg

SEQ ID NO: 2978128 - DNA, 25 bp, Homo sapien
cgcatagacatttgctaatgccaaa

SEQ ID NO: 2978129 - DNA, 25 bp, Homo sapien
tctgatagatcaaaattaatcttac

SEQ ID NO: 2978130 - DNA, 25 bp, Homo sapien
ccctgagagcgtaagtatattctga

SEQ ID NO: 2978131 - DNA, 25 bp, Homo sapien
aggtactgccctgagagcgtaagta

SEQ ID NO: 2978132 - DNA, 25 bp, Homo sapien
tctcagctgtccgtgtaacaggtac

SEQ ID NO: 2978133 - DNA, 25 bp, Homo sapien
ctagaagacagcaactatccacttg

SEQ ID NO: 2978134 - DNA, 25 bp, Homo sapien
catggaccaactgggaagcatgagt

SEQ ID NO: 2978135 - DNA, 25 bp, Homo sapien
aataagatccactgttggcatggac

SEQ ID NO: 2978136 - DNA, 25 bp, Homo sapien
tctgcctctttcatggcaatggacc

SEQ ID NO: 2978137 - DNA, 25 bp, Homo sapien
gtgaaatctagtgcatcaaagccag

SEQ ID NO: 2978138 - DNA, 25 bp, Homo sapien
ccagtgaaatctagtgcatcaaagc

SEQ ID NO: 2978139 - DNA, 25 bp, Homo sapien
cagtgaaatctagtgcatcaaagcc

SEQ ID NO: 2978140 - DNA, 25 bp, Homo sapien
tccagtgaaatctagtgcatcaaag

SEQ ID NO: 2978141 - DNA, 25 bp, Homo sapien
ttctaaataactgctcaactttcct

SEQ ID NO: 2978142 - DNA, 25 bp, Homo sapien
tcctgtacaaccctctattctttga

SEQ ID NO: 2978143 - DNA, 25 bp, Homo sapien
taactgctcaactttcctaacccaa

SEQ ID NO: 2978144 - DNA, 25 bp, Homo sapien
ccagctcgtgtgctcatttctaaat

SEQ ID NO: 2978145 - DNA, 25 bp, Homo sapien
caaaaatcctggaatttcaataatt

SEQ ID NO: 2978146 - DNA, 25 bp, Homo sapien
aatcctggaatttcaataattgtaa

SEQ ID NO: 2978147 - DNA, 25 bp, Homo sapien
aaatcctggaatttcaataattgta

SEQ ID NO: 2978148 - DNA, 25 bp, Homo sapien
tttcaaaaatcctggaatttcaata

SEQ ID NO: 2978149 - DNA, 25 bp, Homo sapien
caattctcacagccactattaccat

SEQ ID NO: 2978150 - DNA, 25 bp, Homo sapien
acaattctcacagccactattacca

SEQ ID NO: 2978151 - DNA, 25 bp, Homo sapien
tcacaattctcacagccactattac

SEQ ID NO: 2978152 - DNA, 25 bp, Homo sapien
cacaattctcacagccactattacc

SEQ ID NO: 2978153 - DNA, 25 bp, Homo sapien
cttctcggttatcaaatttggccca

SEQ ID NO: 2978154 - DNA, 25 bp, Homo sapien
tggcccaaccaaagcctagttctac

SEQ ID NO: 2978155 - DNA, 25 bp, Homo sapien
ttggcccaaccaaagcctagttcta

SEQ ID NO: 2978156 - DNA, 25 bp, Homo sapien
tcggttatcaaatttggcccaacca

SEQ ID NO: 2978157 - DNA, 25 bp, Homo sapien
ctatggtcgtcttatcatctttgtg

SEQ ID NO: 2978158 - DNA, 25 bp, Homo sapien
ggaattccttgtttgatataaggca

SEQ ID NO: 2978159 - DNA, 25 bp, Homo sapien
tgttcctgagggtgctaggctcatc

SEQ ID NO: 2978160 - DNA, 25 bp, Homo sapien
tgatcctgttcaccttctttaagag

SEQ ID NO: 2978161 - DNA, 25 bp, Homo sapien
cagacatggctaaatagcctgcatg

SEQ ID NO: 2978162 - DNA, 25 bp, Homo sapien
aatgtaacatcagactatacagaca

SEQ ID NO: 2978163 - DNA, 25 bp, Homo sapien
catggctaaatagcctgcatggtcc

SEQ ID NO: 2978164 - DNA, 25 bp, Homo sapien
taacatcagactatacagacatggc

SEQ ID NO: 2978165 - DNA, 25 bp, Homo sapien
tagggggctgagtcatggatatttc

SEQ ID NO: 2978166 - DNA, 25 bp, Homo sapien
atttctttgtccaaaagagcaggtt

SEQ ID NO: 2978167 - DNA, 25 bp, Homo sapien
tttccaaacaagttccacacatatg

SEQ ID NO: 2978168 - DNA, 25 bp, Homo sapien
ttgtccaaaagagcaggtttccaaa

SEQ ID NO: 2978169 - DNA, 25 bp, Homo sapien
taggaaggacaaaattccacatgga

SEQ ID NO: 2978170 - DNA, 25 bp, Homo sapien
tccacatggaggacaagatgcattt

SEQ ID NO: 2978171 - DNA, 25 bp, Homo sapien
aaagaccactggagatgagcactgc

SEQ ID NO: 2978172 - DNA, 25 bp, Homo sapien
tatagtaggcacaatgaaagattac

SEQ ID NO: 2978173 - DNA, 25 bp, Homo sapien
tacggtatctatctcagtcacactg

SEQ ID NO: 2978174 - DNA, 25 bp, Homo sapien
ggtatctatctcagtcacactgaca

SEQ ID NO: 2978175 - DNA, 25 bp, Homo sapien
cactgacattgttctgatcactctg

SEQ ID NO: 2978176 - DNA, 25 bp, Homo sapien
gatcactctgccttccatcaacatt

SEQ ID NO: 2978177 - DNA, 25 bp, Homo sapien
ggaggacggtacattgatgatccat

SEQ ID NO: 2978178 - DNA, 25 bp, Homo sapien
cattgatgatccatgggttgctgct

SEQ ID NO: 2978179 - DNA, 25 bp, Homo sapien
attgatgatccatgggttgctgctc

SEQ ID NO: 2978180 - DNA, 25 bp, Homo sapien
tctggaggaggacggtacattgatg

SEQ ID NO: 2978181 - DNA, 25 bp, Homo sapien
tgccagtggttaaagctgcttcaga

SEQ ID NO: 2978182 - DNA, 25 bp, Homo sapien
tgaatatctgctggactgccagtgg

SEQ ID NO: 2978183 - DNA, 25 bp, Homo sapien
tggactgccagtggttaaagctgct

SEQ ID NO: 2978184 - DNA, 25 bp, Homo sapien
tcagtgaatatctgctggactgcca

SEQ ID NO: 2978185 - DNA, 25 bp, Homo sapien
ctcttttctggagcatgacagctat

SEQ ID NO: 2978186 - DNA, 25 bp, Homo sapien
tgacttgctgctcaatatgggcctt

SEQ ID NO: 2978187 - DNA, 25 bp, Homo sapien
tttgcctcgcgtagccctagcagtt

SEQ ID NO: 2978188 - DNA, 25 bp, Homo sapien
gacagctattgaggaacctggttgc

SEQ ID NO: 2978189 - DNA, 25 bp, Homo sapien
tgaaagccatagtacatggctggtt

SEQ ID NO: 2978190 - DNA, 25 bp, Homo sapien
tctgcatagcatatggctgtgtttg

SEQ ID NO: 2978191 - DNA, 25 bp, Homo sapien
cacaaaggtcgaagcataggtggct

SEQ ID NO: 2978192 - DNA, 25 bp, Homo sapien
cacaggttgtagctcctctgaatcc

SEQ ID NO: 2978193 - DNA, 25 bp, Homo sapien
tctctggagtttcagtcactttaat

SEQ ID NO: 2978194 - DNA, 25 bp, Homo sapien
tctctctggagtttcagtcacttta

SEQ ID NO: 2978195 - DNA, 25 bp, Homo sapien
ctttgaacagctctattctctctgg

SEQ ID NO: 2978196 - DNA, 25 bp, Homo sapien
ggagtttcagtcactttaatcctca

SEQ ID NO: 2978197 - DNA, 25 bp, Homo sapien
cacaggatcaggaaacttggtaaga

SEQ ID NO: 2978198 - DNA, 25 bp, Homo sapien
ggaaacttggtaagatggtacatat

SEQ ID NO: 2978199 - DNA, 25 bp, Homo sapien
atcaggaaacttggtaagatggtac

SEQ ID NO: 2978200 - DNA, 25 bp, Homo sapien
caggatcaggaaacttggtaagatg

SEQ ID NO: 2978201 - DNA, 25 bp, Homo sapien
aaaggatctggaaagctaaactggt

SEQ ID NO: 2978202 - DNA, 25 bp, Homo sapien
gaaattcctcaaggtactgcaactc

SEQ ID NO: 2978203 - DNA, 25 bp, Homo sapien
ctgatgccccacaggagcgagtagt

SEQ ID NO: 2978204 - DNA, 25 bp, Homo sapien
taccaatgaaggacaagaatgtcag

SEQ ID NO: 2978205 - DNA, 25 bp, Homo sapien
tcaaacaatgtcgtaagtaccaatg

SEQ ID NO: 2978206 - DNA, 25 bp, Homo sapien
tctgaagtttggctcgtattacagc

SEQ ID NO: 2978207 - DNA, 25 bp, Homo sapien
ggctcgtattacagcaagatggcta

SEQ ID NO: 2978208 - DNA, 25 bp, Homo sapien
gaagtttggctcgtattacagcaag

SEQ ID NO: 2978209 - DNA, 25 bp, Homo sapien
gccatctataggtttccttatgtga

SEQ ID NO: 2978210 - DNA, 25 bp, Homo sapien
tttaagtatattgctggtctttgct

SEQ ID NO: 2978211 - DNA, 25 bp, Homo sapien
gaagtttaatttaagtatattgctg

SEQ ID NO: 2978212 - DNA, 25 bp, Homo sapien
tgaagtgttgctatgaggcagctga

SEQ ID NO: 2978213 - DNA, 25 bp, Homo sapien
tgtgaagtgttgctatgaggcagct

SEQ ID NO: 2978214 - DNA, 25 bp, Homo sapien
gcattcgatcactgttagcatcctt

SEQ ID NO: 2978215 - DNA, 25 bp, Homo sapien
tcatttaggtaagcacggcaaagca

SEQ ID NO: 2978216 - DNA, 25 bp, Homo sapien
aaagcaccatgagcattcgatcact

SEQ ID NO: 2978217 - DNA, 25 bp, Homo sapien
aataagatcatttaggtaagcacgg

SEQ ID NO: 2978218 - DNA, 25 bp, Homo sapien
tctccatctagagtcatgggaaagc

SEQ ID NO: 2978219 - DNA, 25 bp, Homo sapien
gcccaactctccatctagagtcatg

SEQ ID NO: 2978220 - DNA, 25 bp, Homo sapien
ctagagtcatgggaaagcgacgccg

SEQ ID NO: 2978221 - DNA, 25 bp, Homo sapien
gcaggtagaaactcaagggcccgcc

SEQ ID NO: 2978222 - DNA, 25 bp, Homo sapien
ggaagtgctgtgtcactgttggcaa

SEQ ID NO: 2978223 - DNA, 25 bp, Homo sapien
cactcccattcaaactaataactgg

SEQ ID NO: 2978224 - DNA, 25 bp, Homo sapien
ggtgtggccaatttcaacagcccag

SEQ ID NO: 2978225 - DNA, 25 bp, Homo sapien
aactggaggaagactcaagcaggaa

SEQ ID NO: 2978226 - DNA, 25 bp, Homo sapien
cctgtgcatggaccccaaatggctt

SEQ ID NO: 2978227 - DNA, 25 bp, Homo sapien
tgatgggcctgtgcatggaccccaa

SEQ ID NO: 2978228 - DNA, 25 bp, Homo sapien
gtgcatcttggcaccaccatacatc

SEQ ID NO: 2978229 - DNA, 25 bp, Homo sapien
atcttggcaccaccatacatcaagc

SEQ ID NO: 2978230 - DNA, 25 bp, Homo sapien
gtctgagggtgaggtccaccacatt

SEQ ID NO: 2978231 - DNA, 25 bp, Homo sapien
caccacattttcaacttgcctttgt

SEQ ID NO: 2978232 - DNA, 25 bp, Homo sapien
ctggtctgagggtgaggtccaccac

SEQ ID NO: 2978233 - DNA, 25 bp, Homo sapien
cacattttcaacttgcctttgtttt

SEQ ID NO: 2978234 - DNA, 25 bp, Homo sapien
gaatctgatccagttaacagtggct

SEQ ID NO: 2978235 - DNA, 25 bp, Homo sapien
ggaatctgatccagttaacagtggc

SEQ ID NO: 2978236 - DNA, 25 bp, Homo sapien
aatctgatccagttaacagtggctg

SEQ ID NO: 2978237 - DNA, 25 bp, Homo sapien
gataggtattttgacaccattgcca

SEQ ID NO: 2978238 - DNA, 25 bp, Homo sapien
gggataccccataccaatccttgtg

SEQ ID NO: 2978239 - DNA, 25 bp, Homo sapien
gaataaattctgctagggatacccc

SEQ ID NO: 2978240 - DNA, 25 bp, Homo sapien
tatgtaaacttagcacgtgtctgaa

SEQ ID NO: 2978241 - DNA, 25 bp, Homo sapien
ggatgctaatggcatacagaatgat

SEQ ID NO: 2978242 - DNA, 25 bp, Homo sapien
tatatccaccaaacagatccataga

SEQ ID NO: 2978243 - DNA, 25 bp, Homo sapien
gaatgatagcgatacagaattaagt

SEQ ID NO: 2978244 - DNA, 25 bp, Homo sapien
actgaaatataagagttcacagcct

SEQ ID NO: 2978245 - DNA, 25 bp, Homo sapien
tcttcctggtctttctttaccatca

SEQ ID NO: 2978246 - DNA, 25 bp, Homo sapien
tcctcttcctggtctttctttacca

SEQ ID NO: 2978247 - DNA, 25 bp, Homo sapien
tcatcctcttcctggtctttcttta

SEQ ID NO: 2978248 - DNA, 25 bp, Homo sapien
cttcctggtctttctttaccatcat

SEQ ID NO: 2978249 - DNA, 25 bp, Homo sapien
acaccaggtatcgaaaagcgtaaga

SEQ ID NO: 2978250 - DNA, 25 bp, Homo sapien
aatacaccaggtatcgaaaagcgta

SEQ ID NO: 2978251 - DNA, 25 bp, Homo sapien
tacaccaggtatcgaaaagcgtaag

SEQ ID NO: 2978252 - DNA, 25 bp, Homo sapien
aaatacaccaggtatcgaaaagcgt

SEQ ID NO: 2978253 - DNA, 25 bp, Homo sapien
ggtccacaactactagatctaacaa

SEQ ID NO: 2978254 - DNA, 25 bp, Homo sapien
ctactagatctaacaagctagaagt

SEQ ID NO: 2978255 - DNA, 25 bp, Homo sapien
caagctagaagtatgaggatagtta

SEQ ID NO: 2978256 - DNA, 25 bp, Homo sapien
tcacaggtccacaactactagatct

SEQ ID NO: 2978257 - DNA, 25 bp, Homo sapien
tgttactgctttccacgcactattt

SEQ ID NO: 2978258 - DNA, 25 bp, Homo sapien
tgttctacagtgatggcacttgcaa

SEQ ID NO: 2978259 - DNA, 25 bp, Homo sapien
cttgctggtaagagttcggtcatga

SEQ ID NO: 2978260 - DNA, 25 bp, Homo sapien
gcatgcccttgtagagactcagaaa

SEQ ID NO: 2978261 - DNA, 25 bp, Homo sapien
ctagcaaagtgcctaacggagaaac

SEQ ID NO: 2978262 - DNA, 25 bp, Homo sapien
gcaaagtgcctaacggagaaacaat

SEQ ID NO: 2978263 - DNA, 25 bp, Homo sapien
ataatcggttccatgtgttcagggc

SEQ ID NO: 2978264 - DNA, 25 bp, Homo sapien
tgcagtgccagataatcggttccat

SEQ ID NO: 2978265 - DNA, 25 bp, Homo sapien
gccatttatctgtatgagttcctgt

SEQ ID NO: 2978266 - DNA, 25 bp, Homo sapien
tgtatgagttcctgtaccagaatgt

SEQ ID NO: 2978267 - DNA, 25 bp, Homo sapien
ttcctgtaccagaatgtaagtagcc

SEQ ID NO: 2978268 - DNA, 25 bp, Homo sapien
cctgtaccagaatgtaagtagccat

SEQ ID NO: 2978269 - DNA, 25 bp, Homo sapien
ctgagccctaggcttttggcaacgg

SEQ ID NO: 2978270 - DNA, 25 bp, Homo sapien
acggatttcaaccttgatttgctgg

SEQ ID NO: 2978271 - DNA, 25 bp, Homo sapien
ttttggcaacggatttcaaccttga

SEQ ID NO: 2978272 - DNA, 25 bp, Homo sapien
taggcttttggcaacggatttcaac

SEQ ID NO: 2978273 - DNA, 25 bp, Homo sapien
tgaacaactccccagattccctgag

SEQ ID NO: 2978274 - DNA, 25 bp, Homo sapien
gaagatatctgtcagagttccagac

SEQ ID NO: 2978275 - DNA, 25 bp, Homo sapien
gatgaaagctcccaggtcagtagcc

SEQ ID NO: 2978276 - DNA, 25 bp, Homo sapien
cagtagcctctgaaaagtgtagttt

SEQ ID NO: 2978277 - DNA, 25 bp, Homo sapien
gagcaggcgtggaccatgaaggaga

SEQ ID NO: 2978278 - DNA, 25 bp, Homo sapien
ctcagcaggctgtcaagtcggagac

SEQ ID NO: 2978279 - DNA, 25 bp, Homo sapien
ctgtcaagtcggagactgagtgcct

SEQ ID NO: 2978280 - DNA, 25 bp, Homo sapien
cttctactgaccctgcttctgtggt

SEQ ID NO: 2978281 - DNA, 25 bp, Homo sapien
catgacatgtcatggcattggtcat

SEQ ID NO: 2978282 - DNA, 25 bp, Homo sapien
atgacggtatcaggggcaatggcac

SEQ ID NO: 2978283 - DNA, 25 bp, Homo sapien
gtgtccaaatcatctcatgacatgt

SEQ ID NO: 2978284 - DNA, 25 bp, Homo sapien
caatggcaccaaccaagctggcaaa

SEQ ID NO: 2978285 - DNA, 25 bp, Homo sapien
taagtttactgcaactggagcctct

SEQ ID NO: 2978286 - DNA, 25 bp, Homo sapien
ttagaacttggcagggaaatcctta

SEQ ID NO: 2978287 - DNA, 25 bp, Homo sapien
tcttgtctctaagccagatcagggt

SEQ ID NO: 2978288 - DNA, 25 bp, Homo sapien
ggtagtcctgacacataacttttga

SEQ ID NO: 2978289 - DNA, 25 bp, Homo sapien
aactaacgggagctctcaatttggc

SEQ ID NO: 2978290 - DNA, 25 bp, Homo sapien
gaatcaagatgggtcatgggctcat

SEQ ID NO: 2978291 - DNA, 25 bp, Homo sapien
tagtctatcaaaacctcatcaggca

SEQ ID NO: 2978292 - DNA, 25 bp, Homo sapien
tgttgtgtggaactcagcgtcccaa

SEQ ID NO: 2978293 - DNA, 25 bp, Homo sapien
ctgacagaaatgggcttggcaccat

SEQ ID NO: 2978294 - DNA, 25 bp, Homo sapien
cctgtttctgtcctagagtatgggc

SEQ ID NO: 2978295 - DNA, 25 bp, Homo sapien
cctagagtatgggccatgcagaact

SEQ ID NO: 2978296 - DNA, 25 bp, Homo sapien
acatccagaagcaaccgaggctgag

SEQ ID NO: 2978297 - DNA, 25 bp, Homo sapien
ttatacacgcgtgccactatgtaca

SEQ ID NO: 2978298 - DNA, 25 bp, Homo sapien
cagaagcaaccgaggctgagtgtcg

SEQ ID NO: 2978299 - DNA, 25 bp, Homo sapien
aatgaggcgataatagacacatcca

SEQ ID NO: 2978300 - DNA, 25 bp, Homo sapien
gatcatgagaaatgtagggatcttg

SEQ ID NO: 2978301 - DNA, 25 bp, Homo sapien
tgtagggatcttgaccagaccaggt

SEQ ID NO: 2978302 - DNA, 25 bp, Homo sapien
gttccaatgcctggcttactcttag

SEQ ID NO: 2978303 - DNA, 25 bp, Homo sapien
cttagtggggagttttaagtgatca

SEQ ID NO: 2978304 - DNA, 25 bp, Homo sapien
tccctgttctgggagtgttgctatc

SEQ ID NO: 2978305 - DNA, 25 bp, Homo sapien
ctgggagtgttgctatctgcttcca

SEQ ID NO: 2978306 - DNA, 25 bp, Homo sapien
gccctgcagcaatttcaccctcaag

SEQ ID NO: 2978307 - DNA, 25 bp, Homo sapien
ttcaccctcaagcttttcaaaccag

SEQ ID NO: 2978308 - DNA, 25 bp, Homo sapien
ctgctgggtcactgttatccaaaaa

SEQ ID NO: 2978309 - DNA, 25 bp, Homo sapien
aaaacctggcaatcatacagattat

SEQ ID NO: 2978310 - DNA, 25 bp, Homo sapien
caaaaaacctggcaatcatacagat

SEQ ID NO: 2978311 - DNA, 25 bp, Homo sapien
gtcactgttatccaaaaaacctggc

SEQ ID NO: 2978312 - DNA, 25 bp, Homo sapien
ttactgttcttaacgggaccatatc

SEQ ID NO: 2978313 - DNA, 25 bp, Homo sapien
ccaatagcttaatttaggttgtgct

SEQ ID NO: 2978314 - DNA, 25 bp, Homo sapien
ggaccatatcccttttccaatagct

SEQ ID NO: 2978315 - DNA, 25 bp, Homo sapien
taggttgtgctgaaattcctattaa

SEQ ID NO: 2978316 - DNA, 25 bp, Homo sapien
tgagcctagaggtcatgtgcacata

SEQ ID NO: 2978317 - DNA, 25 bp, Homo sapien
gacataagcatctacatttttgagc

SEQ ID NO: 2978318 - DNA, 25 bp, Homo sapien
caagggaggctctcgtacttcctga

SEQ ID NO: 2978319 - DNA, 25 bp, Homo sapien
tctctaggagagtggttaaaacaag

SEQ ID NO: 2978320 - DNA, 25 bp, Homo sapien
cacaaacacaatagcatcggcgtct

SEQ ID NO: 2978321 - DNA, 25 bp, Homo sapien
caggaccaccgttcttgagcaataa

SEQ ID NO: 2978322 - DNA, 25 bp, Homo sapien
tcttggaaggcttgaatcgcaccca

SEQ ID NO: 2978323 - DNA, 25 bp, Homo sapien
tataacccagcacctttcgaaatgg

SEQ ID NO: 2978324 - DNA, 25 bp, Homo sapien
agttcctttccgcaaaattagattg

SEQ ID NO: 2978325 - DNA, 25 bp, Homo sapien
aaattagattgatgatacatccacc

SEQ ID NO: 2978326 - DNA, 25 bp, Homo sapien
atgatacatccacctttgctttcca

SEQ ID NO: 2978327 - DNA, 25 bp, Homo sapien
ctccctcttggaagaagtcagttcc

SEQ ID NO: 2978328 - DNA, 25 bp, Homo sapien
gaatgtggatcaggtttggtggcct

SEQ ID NO: 2978329 - DNA, 25 bp, Homo sapien
ggaatgtggatcaggtttggtggcc

SEQ ID NO: 2978330 - DNA, 25 bp, Homo sapien
ctaggggaatgtggatcaggtttgg

SEQ ID NO: 2978331 - DNA, 25 bp, Homo sapien
ggggaatgtggatcaggtttggtgg

SEQ ID NO: 2978332 - DNA, 25 bp, Homo sapien
gatctgggttgttacttctgggacc

SEQ ID NO: 2978333 - DNA, 25 bp, Homo sapien
atctgggttgttacttctgggacca

SEQ ID NO: 2978334 - DNA, 25 bp, Homo sapien
aggatctgggttgttacttctggga

SEQ ID NO: 2978335 - DNA, 25 bp, Homo sapien
ctgggttgttacttctgggaccagc

SEQ ID NO: 2978336 - DNA, 25 bp, Homo sapien
aagtcctttgtctgaaactgcccag

SEQ ID NO: 2978337 - DNA, 25 bp, Homo sapien
tttaaaggaatattgcattctagca

SEQ ID NO: 2978338 - DNA, 25 bp, Homo sapien
agacatcaaaataagggccagataa

SEQ ID NO: 2978339 - DNA, 25 bp, Homo sapien
agggccagataaaggcggaagtcct

SEQ ID NO: 2978340 - DNA, 25 bp, Homo sapien
cagcagtcagtctttactaaatttt

SEQ ID NO: 2978341 - DNA, 25 bp, Homo sapien
actgattttctagatgttctgcact

SEQ ID NO: 2978342 - DNA, 25 bp, Homo sapien
gttccagcagtcagtctttactaaa

SEQ ID NO: 2978343 - DNA, 25 bp, Homo sapien
tttctagatgttctgcactcgacat

SEQ ID NO: 2978344 - DNA, 25 bp, Homo sapien
cagctgcagataatttaggggaaac

SEQ ID NO: 2978345 - DNA, 25 bp, Homo sapien
gctccccttggagtgtaattcagaa

SEQ ID NO: 2978346 - DNA, 25 bp, Homo sapien
tctttggctaggacagaccttatga

SEQ ID NO: 2978347 - DNA, 25 bp, Homo sapien
ttattctgctgcctaactgacagag

SEQ ID NO: 2978348 - DNA, 25 bp, Homo sapien
taaggcatccgatctcaggtcagct

SEQ ID NO: 2978349 - DNA, 25 bp, Homo sapien
ctgttgaactcagttatatcacttt

SEQ ID NO: 2978350 - DNA, 25 bp, Homo sapien
ttgagggagctaggaatttctcctc

SEQ ID NO: 2978351 - DNA, 25 bp, Homo sapien
ggcggatgtaggaaaacgcaggttg

SEQ ID NO: 2978352 - DNA, 25 bp, Homo sapien
agctggtccccgtaggaggttgtct

SEQ ID NO: 2978353 - DNA, 25 bp, Homo sapien
tgtaggaaaacgcaggttgttcgtg

SEQ ID NO: 2978354 - DNA, 25 bp, Homo sapien
cggatgtaggaaaacgcaggttgtt

SEQ ID NO: 2978355 - DNA, 25 bp, Homo sapien
gctctctggagtagggccagaaaga

SEQ ID NO: 2978356 - DNA, 25 bp, Homo sapien
cccataaacagtatgcagactgagt

SEQ ID NO: 2978357 - DNA, 25 bp, Homo sapien
gggcaatattaacatagctctctgg

SEQ ID NO: 2978358 - DNA, 25 bp, Homo sapien
aagcagcaagcaacccataaacagt

SEQ ID NO: 2978359 - DNA, 25 bp, Homo sapien
tcagctttcacagctactgttctaa

SEQ ID NO: 2978360 - DNA, 25 bp, Homo sapien
tgggcctctagaacctgacagttat

SEQ ID NO: 2978361 - DNA, 25 bp, Homo sapien
tttcagtcttgggataaactcagct

SEQ ID NO: 2978362 - DNA, 25 bp, Homo sapien
ggttgccttaatagcacattcatta

SEQ ID NO: 2978363 - DNA, 25 bp, Homo sapien
tccaggtaatggatttaggatcacg

SEQ ID NO: 2978364 - DNA, 25 bp, Homo sapien
tatgtccaatttgcagactttcaac

SEQ ID NO: 2978365 - DNA, 25 bp, Homo sapien
taggatcacgggaggtgttacctgc

SEQ ID NO: 2978366 - DNA, 25 bp, Homo sapien
gggcaggcgtagaattttattaggc

SEQ ID NO: 2978367 - DNA, 25 bp, Homo sapien
gttcctccggctattgtaacaggca

SEQ ID NO: 2978368 - DNA, 25 bp, Homo sapien
cctccggctattgtaacaggcagcc

SEQ ID NO: 2978369 - DNA, 25 bp, Homo sapien
tcctccggctattgtaacaggcagc

SEQ ID NO: 2978370 - DNA, 25 bp, Homo sapien
atgttcctccggctattgtaacagg

SEQ ID NO: 2978371 - DNA, 25 bp, Homo sapien
cttgagggggtccaattcatggtca

SEQ ID NO: 2978372 - DNA, 25 bp, Homo sapien
aatagctggtccaattggtgggtga

SEQ ID NO: 2978373 - DNA, 25 bp, Homo sapien
ggtccaattggtgggtgaccatgca

SEQ ID NO: 2978374 - DNA, 25 bp, Homo sapien
agctttcctgtaaggtcctagccat

SEQ ID NO: 2978375 - DNA, 25 bp, Homo sapien
ttcaatgcctgccaccgcatgttct

SEQ ID NO: 2978376 - DNA, 25 bp, Homo sapien
tcaatgcctgccaccgcatgttctt

SEQ ID NO: 2978377 - DNA, 25 bp, Homo sapien
cagtccttatgttggacagccttcc

SEQ ID NO: 2978378 - DNA, 25 bp, Homo sapien
ctccgcccagtccttatgttggaca

SEQ ID NO: 2978379 - DNA, 25 bp, Homo sapien
tcacgtggttttcggacatgaaatt

SEQ ID NO: 2978380 - DNA, 25 bp, Homo sapien
cttcacgtggttttcggacatgaaa

SEQ ID NO: 2978381 - DNA, 25 bp, Homo sapien
gtggttttcggacatgaaattctac

SEQ ID NO: 2978382 - DNA, 25 bp, Homo sapien
acgtggttttcggacatgaaattct

SEQ ID NO: 2978383 - DNA, 25 bp, Homo sapien
cgcctgggagcccatgagcatcctg

SEQ ID NO: 2978384 - DNA, 25 bp, Homo sapien
ctcctacaatgagatttcgtttgtt

SEQ ID NO: 2978385 - DNA, 25 bp, Homo sapien
caatgagatttcgtttgttgtgtct

SEQ ID NO: 2978386 - DNA, 25 bp, Homo sapien
acgctgtcgcctgggagcccatgag

SEQ ID NO: 2978387 - DNA, 25 bp, Homo sapien
taccctgtgttgtgtctaggatcct

SEQ ID NO: 2978388 - DNA, 25 bp, Homo sapien
catagcagaaaacaagttctcctcc

SEQ ID NO: 2978389 - DNA, 25 bp, Homo sapien
agcagaaaacaagttctcctccagt

SEQ ID NO: 2978390 - DNA, 25 bp, Homo sapien
agtttatcaacagaggagagttctt

SEQ ID NO: 2978391 - DNA, 25 bp, Homo sapien
tttatcaacagaggagagttcttta

SEQ ID NO: 2978392 - DNA, 25 bp, Homo sapien
cactgttggcaaaggctagagaatg

SEQ ID NO: 2978393 - DNA, 25 bp, Homo sapien
actgttggcaaaggctagagaatgt

SEQ ID NO: 2978394 - DNA, 25 bp, Homo sapien
gcactgttggcaaaggctagagaat

SEQ ID NO: 2978395 - DNA, 25 bp, Homo sapien
tcatacatcatcagagcaatgcctg

SEQ ID NO: 2978396 - DNA, 25 bp, Homo sapien
atacatcatcagagcaatgcctggc

SEQ ID NO: 2978397 - DNA, 25 bp, Homo sapien
catacatcatcagagcaatgcctgg

SEQ ID NO: 2978398 - DNA, 25 bp, Homo sapien
taagctgaaacagacgcccatggga

SEQ ID NO: 2978399 - DNA, 25 bp, Homo sapien
gccttggaggagttatcagcatgat

SEQ ID NO: 2978400 - DNA, 25 bp, Homo sapien
gggttgtaaccagtcactctgacag

SEQ ID NO: 2978401 - DNA, 25 bp, Homo sapien
gatgtggcctgtatctaagctgaaa

SEQ ID NO: 2978402 - DNA, 25 bp, Homo sapien
ttctggagtaagagaatgagtgccc

SEQ ID NO: 2978403 - DNA, 25 bp, Homo sapien
tctgcaactccaatgagcttagtta

SEQ ID NO: 2978404 - DNA, 25 bp, Homo sapien
gattctgaatgccaagccgggcttt

SEQ ID NO: 2978405 - DNA, 25 bp, Homo sapien
gagtgcccaaggaagacataactat

SEQ ID NO: 2978406 - DNA, 25 bp, Homo sapien
ttctcttctacagcaaaacgttttg

SEQ ID NO: 2978407 - DNA, 25 bp, Homo sapien
tctgcaatgacttaactcccgattc

SEQ ID NO: 2978408 - DNA, 25 bp, Homo sapien
tcttcaatcttgtaatcagagccac

SEQ ID NO: 2978409 - DNA, 25 bp, Homo sapien
tatatgtccataagtactcccatga

SEQ ID NO: 2978410 - DNA, 25 bp, Homo sapien
tagaacggttcgtttcagcaaagct

SEQ ID NO: 2978411 - DNA, 25 bp, Homo sapien
tgtagaacggttcgtttcagcaaag

SEQ ID NO: 2978412 - DNA, 25 bp, Homo sapien
tctgtagaacggttcgtttcagcaa

SEQ ID NO: 2978413 - DNA, 25 bp, Homo sapien
ccttctgtagaacggttcgtttcag

SEQ ID NO: 2978414 - DNA, 25 bp, Homo sapien
tcactctcctccacaactagctgag

SEQ ID NO: 2978415 - DNA, 25 bp, Homo sapien
tcttcactctcctccacaactagct

SEQ ID NO: 2978416 - DNA, 25 bp, Homo sapien
tctcctccacaactagctgagtatt

SEQ ID NO: 2978417 - DNA, 25 bp, Homo sapien
actctcctccacaactagctgagta

SEQ ID NO: 2978418 - DNA, 25 bp, Homo sapien
gggcacccggatggctattccattc

SEQ ID NO: 2978419 - DNA, 25 bp, Homo sapien
tccagctgccttgatttagttcccc

SEQ ID NO: 2978420 - DNA, 25 bp, Homo sapien
ccggatggctattccattcgcagca

SEQ ID NO: 2978421 - DNA, 25 bp, Homo sapien
tattccattcgcagcatccagagga

SEQ ID NO: 2978422 - DNA, 25 bp, Homo sapien
tttcagctcttcaatagtaagaggg

SEQ ID NO: 2978423 - DNA, 25 bp, Homo sapien
tcttcaatagtaagagggcattgcc

SEQ ID NO: 2978424 - DNA, 25 bp, Homo sapien
tgtcatgttgagctttcagctcttc

SEQ ID NO: 2978425 - DNA, 25 bp, Homo sapien
gtttttgtcatgttgagctttcagc

SEQ ID NO: 2978426 - DNA, 25 bp, Homo sapien
cttcttgcattgtcatttgtcaaag

SEQ ID NO: 2978427 - DNA, 25 bp, Homo sapien
tcatttgtcaaagtcgcaataaggg

SEQ ID NO: 2978428 - DNA, 25 bp, Homo sapien
gcattgtcatttgtcaaagtcgcaa

SEQ ID NO: 2978429 - DNA, 25 bp, Homo sapien
tgtcatttgtcaaagtcgcaataag

SEQ ID NO: 2978430 - DNA, 25 bp, Homo sapien
tgtgccacatgcaattgccacagct

SEQ ID NO: 2978431 - DNA, 25 bp, Homo sapien
ttaattgtgtacatcctgtgccaca

SEQ ID NO: 2978432 - DNA, 25 bp, Homo sapien
tcctataccctgtcatttaagcatc

SEQ ID NO: 2978433 - DNA, 25 bp, Homo sapien
tcccaatagatcattttatagagca

SEQ ID NO: 2978434 - DNA, 25 bp, Homo sapien
agaggtgccaaatctgctgtggaca

SEQ ID NO: 2978435 - DNA, 25 bp, Homo sapien
ctgataacagaaagcggcgtggact

SEQ ID NO: 2978436 - DNA, 25 bp, Homo sapien
gtcttgttaccgctcgtttcagagg

SEQ ID NO: 2978437 - DNA, 25 bp, Homo sapien
cagaaagcggcgtggactgtgtctt

SEQ ID NO: 2978438 - DNA, 25 bp, Homo sapien
tgctttcatgaagggtgttgttatg

SEQ ID NO: 2978439 - DNA, 25 bp, Homo sapien
tcctggatgatacagcgtgtaattc

SEQ ID NO: 2978440 - DNA, 25 bp, Homo sapien
aatcaagatctctaacattgctttc

SEQ ID NO: 2978441 - DNA, 25 bp, Homo sapien
ggcctctcgggttaaaatcaagatc

SEQ ID NO: 2978442 - DNA, 25 bp, Homo sapien
gtcactgctgcctgtttattgtgtt

SEQ ID NO: 2978443 - DNA, 25 bp, Homo sapien
tgtcactgctgcctgtttattgtgt

SEQ ID NO: 2978444 - DNA, 25 bp, Homo sapien
taggtttctggaatcatatacttca

SEQ ID NO: 2978445 - DNA, 25 bp, Homo sapien
tgctgtagacattaggtttctggaa

SEQ ID NO: 2978446 - DNA, 25 bp, Homo sapien
gacattaggtttctggaatcatata

SEQ ID NO: 2978447 - DNA, 25 bp, Homo sapien
tctggaatcatatacttcatgctgt

SEQ ID NO: 2978448 - DNA, 25 bp, Homo sapien
caaattgtcataagcagtcaacgtt

SEQ ID NO: 2978449 - DNA, 25 bp, Homo sapien
tattggcgacaaattgtcataagca

SEQ ID NO: 2978450 - DNA, 25 bp, Homo sapien
tgtcgctttgcgaacagaggctgca

SEQ ID NO: 2978451 - DNA, 25 bp, Homo sapien
ttctccatgtcgctttgcgaacaga

SEQ ID NO: 2978452 - DNA, 25 bp, Homo sapien
tctttcctcaagcacgtccacagga

SEQ ID NO: 2978453 - DNA, 25 bp, Homo sapien
tctattgagcgcactccagtgtggc

SEQ ID NO: 2978454 - DNA, 25 bp, Homo sapien
atatatttctattgagcgcactcca

SEQ ID NO: 2978455 - DNA, 25 bp, Homo sapien
ccagtgtggcttctaacaatatggc

SEQ ID NO: 2978456 - DNA, 25 bp, Homo sapien
gctataagaggatgccagattttta

SEQ ID NO: 2978457 - DNA, 25 bp, Homo sapien
atttttatgttcgttagcctccctg

SEQ ID NO: 2978458 - DNA, 25 bp, Homo sapien
atgttcgttagcctccctgggttgt

SEQ ID NO: 2978459 - DNA, 25 bp, Homo sapien
gatagctataagaggatgccagatt

SEQ ID NO: 2978460 - DNA, 25 bp, Homo sapien
tctccaagtgcgttggcttttccca

SEQ ID NO: 2978461 - DNA, 25 bp, Homo sapien
tcaggtactcccaggtatgctgtcc

SEQ ID NO: 2978462 - DNA, 25 bp, Homo sapien
aaagatttccacaagtcaggtactc

SEQ ID NO: 2978463 - DNA, 25 bp, Homo sapien
catttgtggcctcgaaagaattcca

SEQ ID NO: 2978464 - DNA, 25 bp, Homo sapien
aagcaaggttgccagaacgaagcct

SEQ ID NO: 2978465 - DNA, 25 bp, Homo sapien
gaaagccacaagaatttgtcagtca

SEQ ID NO: 2978466 - DNA, 25 bp, Homo sapien
ttggagaaagccacaagaatttgtc

SEQ ID NO: 2978467 - DNA, 25 bp, Homo sapien
aaggttgccagaacgaagcctggct

SEQ ID NO: 2978468 - DNA, 25 bp, Homo sapien
tcaccatggctgagcacattgctca

SEQ ID NO: 2978469 - DNA, 25 bp, Homo sapien
gcacattgctcagacatctcacagt

SEQ ID NO: 2978470 - DNA, 25 bp, Homo sapien
tgagcacattgctcagacatctcac

SEQ ID NO: 2978471 - DNA, 25 bp, Homo sapien
gacatctcacagtgcacagaggaga

SEQ ID NO: 2978472 - DNA, 25 bp, Homo sapien
aagcacaggcctttctaccaagtct

SEQ ID NO: 2978473 - DNA, 25 bp, Homo sapien
cagcaacaattggaaagtgcatgtg

SEQ ID NO: 2978474 - DNA, 25 bp, Homo sapien
gtttccatggagataagtaagccat

SEQ ID NO: 2978475 - DNA, 25 bp, Homo sapien
ggaagtttgatcctaggatctggca

SEQ ID NO: 2978476 - DNA, 25 bp, Homo sapien
tgtgtatgtgtgaagttccttgaag

SEQ ID NO: 2978477 - DNA, 25 bp, Homo sapien
tttgtgtatgtgtgaagttccttga

SEQ ID NO: 2978478 - DNA, 25 bp, Homo sapien
tgtatgtgtgaagttccttgaagat

SEQ ID NO: 2978479 - DNA, 25 bp, Homo sapien
gtgtatgtgtgaagttccttgaaga

SEQ ID NO: 2978480 - DNA, 25 bp, Homo sapien
tggcctcaccaacgtgtcttgcata

SEQ ID NO: 2978481 - DNA, 25 bp, Homo sapien
atttcatttcttcatggagcggatt

SEQ ID NO: 2978482 - DNA, 25 bp, Homo sapien
catggttggtaatattcatggaagc

SEQ ID NO: 2978483 - DNA, 25 bp, Homo sapien
gagcggattggaagtggcctcacca

SEQ ID NO: 2978484 - DNA, 25 bp, Homo sapien
tatagcttgatacaatgatatcagc

SEQ ID NO: 2978485 - DNA, 25 bp, Homo sapien
tacaatgatatcagccaggatatat

SEQ ID NO: 2978486 - DNA, 25 bp, Homo sapien
gcttgatacaatgatatcagccagg

SEQ ID NO: 2978487 - DNA, 25 bp, Homo sapien
gatacaatgatatcagccaggatat

SEQ ID NO: 2978488 - DNA, 25 bp, Homo sapien
tgttgctgatggtgtaccagcacgt

SEQ ID NO: 2978489 - DNA, 25 bp, Homo sapien
atctaaacttgtatgaagaaagtct

SEQ ID NO: 2978490 - DNA, 25 bp, Homo sapien
aacttctttgctgaaacggcttggt

SEQ ID NO: 2978491 - DNA, 25 bp, Homo sapien
taccagcacgttctgatcccatttt

SEQ ID NO: 2978492 - DNA, 25 bp, Homo sapien
tccttgcacaggggccatactaatc

SEQ ID NO: 2978493 - DNA, 25 bp, Homo sapien
atcttctctgtattgtttcttttct

SEQ ID NO: 2978494 - DNA, 25 bp, Homo sapien
atggaacacttgatgaatttggatg

SEQ ID NO: 2978495 - DNA, 25 bp, Homo sapien
gaacacttgatgaatttggatgtca

SEQ ID NO: 2978496 - DNA, 25 bp, Homo sapien
tatgtaaatagcagttgcaaaaaag

SEQ ID NO: 2978497 - DNA, 25 bp, Homo sapien
gatttattaaaaatccgtgaatgct

SEQ ID NO: 2978498 - DNA, 25 bp, Homo sapien
gattttatgtaaatagcagttgcaa

SEQ ID NO: 2978499 - DNA, 25 bp, Homo sapien
taaaaatccgtgaatgcttttagat

SEQ ID NO: 2978500 - DNA, 25 bp, Homo sapien
tcagaagtagacagtaatgttttgc

SEQ ID NO: 2978501 - DNA, 25 bp, Homo sapien
cgatcaggtctatcattttcagaag

SEQ ID NO: 2978502 - DNA, 25 bp, Homo sapien
agtagacagtaatgttttgcttgct

SEQ ID NO: 2978503 - DNA, 25 bp, Homo sapien
ccgacttccgatcaggtctatcatt

SEQ ID NO: 2978504 - DNA, 25 bp, Homo sapien
taacatgtttggctgagaaaatcaa

SEQ ID NO: 2978505 - DNA, 25 bp, Homo sapien
ttaagcacaggtctagactgagtaa

SEQ ID NO: 2978506 - DNA, 25 bp, Homo sapien
caggtctagactgagtaacatgttt

SEQ ID NO: 2978507 - DNA, 25 bp, Homo sapien
tgagtaacatgtttggctgagaaaa

SEQ ID NO: 2978508 - DNA, 25 bp, Homo sapien
aaggtgcaacttgacaattgaccac

SEQ ID NO: 2978509 - DNA, 25 bp, Homo sapien
cactcggctttagataggcatgaga

SEQ ID NO: 2978510 - DNA, 25 bp, Homo sapien
tatacatacgggaccatcccctttc

SEQ ID NO: 2978511 - DNA, 25 bp, Homo sapien
gggtgagttcttatacatacgggac

SEQ ID NO: 2978512 - DNA, 25 bp, Homo sapien
tcaagccaccggaaatctgccgtga

SEQ ID NO: 2978513 - DNA, 25 bp, Homo sapien
tgaagtttctactaaaggcacagct

SEQ ID NO: 2978514 - DNA, 25 bp, Homo sapien
ctaaaagagcagaatgtcaagccac

SEQ ID NO: 2978515 - DNA, 25 bp, Homo sapien
tctcttctgtgggacacttcctgac

SEQ ID NO: 2978516 - DNA, 25 bp, Homo sapien
gtgtacctgagaactgcaatgctgc

SEQ ID NO: 2978517 - DNA, 25 bp, Homo sapien
atgcctcggttgtcctgtgtgtacc

SEQ ID NO: 2978518 - DNA, 25 bp, Homo sapien
cctcggttgtcctgtgtgtacctga

SEQ ID NO: 2978519 - DNA, 25 bp, Homo sapien
tgcaatgctgcctctgttattgttt

SEQ ID NO: 2978520 - DNA, 25 bp, Homo sapien
gcaattcatttgaggatcctttaca

SEQ ID NO: 2978521 - DNA, 25 bp, Homo sapien
ggccatgtgggtgccaactctgagc

SEQ ID NO: 2978522 - DNA, 25 bp, Homo sapien
gccaactctgagctatatgccttca

SEQ ID NO: 2978523 - DNA, 25 bp, Homo sapien
catatggcctgaagtatatgtggca

SEQ ID NO: 2978524 - DNA, 25 bp, Homo sapien
catcaggaaagaccacactaggagt

SEQ ID NO: 2978525 - DNA, 25 bp, Homo sapien
gaacttctaagcatgccttcatcag

SEQ ID NO: 2978526 - DNA, 25 bp, Homo sapien
gactgcctgatcaaaggaacttcta

SEQ ID NO: 2978527 - DNA, 25 bp, Homo sapien
tcccatccaggatcattctaggcac

SEQ ID NO: 2978528 - DNA, 25 bp, Homo sapien
cctggggtactgtcttctctcagag

SEQ ID NO: 2978529 - DNA, 25 bp, Homo sapien
aaatcccgcagaataaaaggaagtg

SEQ ID NO: 2978530 - DNA, 25 bp, Homo sapien
tgcctctcccataccagattcccaa

SEQ ID NO: 2978531 - DNA, 25 bp, Homo sapien
tgtcctggggtactgtcttctctca

SEQ ID NO: 2978532 - DNA, 25 bp, Homo sapien
cttcagttgagaattatcagcactg

SEQ ID NO: 2978533 - DNA, 25 bp, Homo sapien
ttcagttgagaattatcagcactga

SEQ ID NO: 2978534 - DNA, 25 bp, Homo sapien
caccacgtgacaagttgccggcaga

SEQ ID NO: 2978535 - DNA, 25 bp, Homo sapien
gacttgtctgggaatcagttgctgg

SEQ ID NO: 2978536 - DNA, 25 bp, Homo sapien
tcaccacgtgacaagttgccggcag

SEQ ID NO: 2978537 - DNA, 25 bp, Homo sapien
cagagacttgtctgggaatcagttg

SEQ ID NO: 2978538 - DNA, 25 bp, Homo sapien
ggctctcttgccgtagggtttggat

SEQ ID NO: 2978539 - DNA, 25 bp, Homo sapien
tgcacctccagtaatcatggctctc

SEQ ID NO: 2978540 - DNA, 25 bp, Homo sapien
ggaaagcaagtatcctaaggcttcc

SEQ ID NO: 2978541 - DNA, 25 bp, Homo sapien
cagttacccactggaccttcatgaa

SEQ ID NO: 2978542 - DNA, 25 bp, Homo sapien
ctaacaagccaaaagaatatttctg

SEQ ID NO: 2978543 - DNA, 25 bp, Homo sapien
caagccaaaagaatatttctgagtg

SEQ ID NO: 2978544 - DNA, 25 bp, Homo sapien
taacaagccaaaagaatatttctga

SEQ ID NO: 2978545 - DNA, 25 bp, Homo sapien
aacaagccaaaagaatatttctgag

SEQ ID NO: 2978546 - DNA, 25 bp, Homo sapien
tttcatggtctggtaaaaagtagtg

SEQ ID NO: 2978547 - DNA, 25 bp, Homo sapien
ttgatctgtcactgttcattttaaa

SEQ ID NO: 2978548 - DNA, 25 bp, Homo sapien
aaaattgatctgtcactgttcattt

SEQ ID NO: 2978549 - DNA, 25 bp, Homo sapien
aattgatctgtcactgttcatttta

SEQ ID NO: 2978550 - DNA, 25 bp, Homo sapien
tttccgtcaaataatcatcccagtc

SEQ ID NO: 2978551 - DNA, 25 bp, Homo sapien
cttgatccaggttctaacttgattt

SEQ ID NO: 2978552 - DNA, 25 bp, Homo sapien
ttccctttccgtcaaataatcatcc

SEQ ID NO: 2978553 - DNA, 25 bp, Homo sapien
tagagctttccctttccgtcaaata

SEQ ID NO: 2978554 - DNA, 25 bp, Homo sapien
taatgggcccttgtacaagtcaaga

SEQ ID NO: 2978555 - DNA, 25 bp, Homo sapien
gggcccttgtacaagtcaagaatgt

SEQ ID NO: 2978556 - DNA, 25 bp, Homo sapien
aatgggcccttgtacaagtcaagaa

SEQ ID NO: 2978557 - DNA, 25 bp, Homo sapien
tgtacaagtcaagaatgtgacacat

SEQ ID NO: 2978558 - DNA, 25 bp, Homo sapien
tgcttgctgacttttgaccagaggt

SEQ ID NO: 2978559 - DNA, 25 bp, Homo sapien
cttgctgacttttgaccagaggttc

SEQ ID NO: 2978560 - DNA, 25 bp, Homo sapien
gcttgctgacttttgaccagaggtt

SEQ ID NO: 2978561 - DNA, 25 bp, Homo sapien
ttgcttgctgacttttgaccagagg

SEQ ID NO: 2978562 - DNA, 25 bp, Homo sapien
ccttccagggtttgtgacagtctag

SEQ ID NO: 2978563 - DNA, 25 bp, Homo sapien
ctcctacttccttccagggtttgtg

SEQ ID NO: 2978564 - DNA, 25 bp, Homo sapien
tgtctttctcttccccgactcctac

SEQ ID NO: 2978565 - DNA, 25 bp, Homo sapien
taacaaccccagagatttttctgtc

SEQ ID NO: 2978566 - DNA, 25 bp, Homo sapien
ccttctcgccgtcccttccttcata

SEQ ID NO: 2978567 - DNA, 25 bp, Homo sapien
ccgtcccttccttcataatacacca

SEQ ID NO: 2978568 - DNA, 25 bp, Homo sapien
gattcctgattgactcaccaggaag

SEQ ID NO: 2978569 - DNA, 25 bp, Homo sapien
cagattcctgattgactcaccagga

SEQ ID NO: 2978570 - DNA, 25 bp, Homo sapien
ttccctttgggtcctctccatttgc

SEQ ID NO: 2978571 - DNA, 25 bp, Homo sapien
tgaattccctttgggtcctctccat

SEQ ID NO: 2978572 - DNA, 25 bp, Homo sapien
attccctttgggtcctctccatttg

SEQ ID NO: 2978573 - DNA, 25 bp, Homo sapien
ttgaattccctttgggtcctctcca

SEQ ID NO: 2978574 - DNA, 25 bp, Homo sapien
ctgtgtttcgtgtgtcgaatcttgc

SEQ ID NO: 2978575 - DNA, 25 bp, Homo sapien
tgcattggtaacatgacgtttattt

SEQ ID NO: 2978576 - DNA, 25 bp, Homo sapien
ttcgtgtgtcgaatcttgcattggt

SEQ ID NO: 2978577 - DNA, 25 bp, Homo sapien
gctgaacctcatcatggtctgtgtt

SEQ ID NO: 2978578 - DNA, 25 bp, Homo sapien
gctgaccttgcccttcataaatctt

SEQ ID NO: 2978579 - DNA, 25 bp, Homo sapien
tgaccttgcccttcataaatcttca

SEQ ID NO: 2978580 - DNA, 25 bp, Homo sapien
ctgaccttgcccttcataaatcttc

SEQ ID NO: 2978581 - DNA, 25 bp, Homo sapien
tgctgaccttgcccttcataaatct

SEQ ID NO: 2978582 - DNA, 25 bp, Homo sapien
ataaacttagttccacgcctcctgt

SEQ ID NO: 2978583 - DNA, 25 bp, Homo sapien
ccgtcggcagctagtttaatgttga

SEQ ID NO: 2978584 - DNA, 25 bp, Homo sapien
tgtctctcatccgtcggcagctagt

SEQ ID NO: 2978585 - DNA, 25 bp, Homo sapien
taatgttgaccagagtgatcagagc

SEQ ID NO: 2978586 - DNA, 25 bp, Homo sapien
ccttaagcagagcttgatgtgtgga

SEQ ID NO: 2978587 - DNA, 25 bp, Homo sapien
atcttcctcgcccatacaagggcaa

SEQ ID NO: 2978588 - DNA, 25 bp, Homo sapien
ctcgcccatacaagggcaaaggtct

SEQ ID NO: 2978589 - DNA, 25 bp, Homo sapien
ggtcttgtgtagcttccttaagcag

SEQ ID NO: 2978590 - DNA, 25 bp, Homo sapien
caaatcaggttatgcgtacagtcaa

SEQ ID NO: 2978591 - DNA, 25 bp, Homo sapien
cagtcaaagcaatagggagttagtc

SEQ ID NO: 2978592 - DNA, 25 bp, Homo sapien
gagtcactggcctgaacatcacttt

SEQ ID NO: 2978593 - DNA, 25 bp, Homo sapien
catatgagattgacccctaaaacga

SEQ ID NO: 2978594 - DNA, 25 bp, Homo sapien
aaatgatgcaactggtatgacactt

SEQ ID NO: 2978595 - DNA, 25 bp, Homo sapien
gaaatgatgcaactggtatgacact

SEQ ID NO: 2978596 - DNA, 25 bp, Homo sapien
acccagttccctttgagtgatgttg

SEQ ID NO: 2978597 - DNA, 25 bp, Homo sapien
cagttccctttgagtgatgttggga

SEQ ID NO: 2978598 - DNA, 25 bp, Homo sapien
ccatagcgcctcgttgcacccagtt

SEQ ID NO: 2978599 - DNA, 25 bp, Homo sapien
ttgcacccagttccctttgagtgat

SEQ ID NO: 2978600 - DNA, 25 bp, Homo sapien
gccagcaatcctccggtaactgtca

SEQ ID NO: 2978601 - DNA, 25 bp, Homo sapien
gttggttaataagcaagactgcagc

SEQ ID NO: 2978602 - DNA, 25 bp, Homo sapien
agccagcaatcctccggtaactgtc

SEQ ID NO: 2978603 - DNA, 25 bp, Homo sapien
ctgtgttggttaataagcaagactg

SEQ ID NO: 2978604 - DNA, 25 bp, Homo sapien
ccaatgtggccttctaattcctcag

SEQ ID NO: 2978605 - DNA, 25 bp, Homo sapien
gccaatgtggccttctaattcctca

SEQ ID NO: 2978606 - DNA, 25 bp, Homo sapien
agccaatgtggccttctaattcctc

SEQ ID NO: 2978607 - DNA, 25 bp, Homo sapien
aagccaatgtggccttctaattcct

SEQ ID NO: 2978608 - DNA, 25 bp, Homo sapien
tcttcttggtgctgacttctagcct

SEQ ID NO: 2978609 - DNA, 25 bp, Homo sapien
tctagcctttcctcctttagtgtct

SEQ ID NO: 2978610 - DNA, 25 bp, Homo sapien
tgacttctagcctttcctcctttag

SEQ ID NO: 2978611 - DNA, 25 bp, Homo sapien
ggtgctgacttctagcctttcctcc

SEQ ID NO: 2978612 - DNA, 25 bp, Homo sapien
ttctgttatagctgaaattcctgaa

SEQ ID NO: 2978613 - DNA, 25 bp, Homo sapien
gagaatgacaattcagagtctgtct

SEQ ID NO: 2978614 - DNA, 25 bp, Homo sapien
aggtctcatcttgggagaatgacaa

SEQ ID NO: 2978615 - DNA, 25 bp, Homo sapien
cttgggagaatgacaattcagagtc

SEQ ID NO: 2978616 - DNA, 25 bp, Homo sapien
aaagcagggatctggatcctgctca

SEQ ID NO: 2978617 - DNA, 25 bp, Homo sapien
atgggataaagcagggatctggatc

SEQ ID NO: 2978618 - DNA, 25 bp, Homo sapien
gctcaggcaggttgtaaaggattct

SEQ ID NO: 2978619 - DNA, 25 bp, Homo sapien
cctgctcaggcaggttgtaaaggat

SEQ ID NO: 2978620 - DNA, 25 bp, Homo sapien
tgaacctttggtcgctttgcccttg

SEQ ID NO: 2978621 - DNA, 25 bp, Homo sapien
cccttgtcgcgctgtaactgctgca

SEQ ID NO: 2978622 - DNA, 25 bp, Homo sapien
ccacgggagatcgaaaggtctgaac

SEQ ID NO: 2978623 - DNA, 25 bp, Homo sapien
gctagtctaggatgccttgccaagt

SEQ ID NO: 2978624 - DNA, 25 bp, Homo sapien
caatattccttttcttctctctttt

SEQ ID NO: 2978625 - DNA, 25 bp, Homo sapien
tcaatattccttttcttctctcttt

SEQ ID NO: 2978626 - DNA, 25 bp, Homo sapien
cctattaacttggtgtgtttcataa

SEQ ID NO: 2978627 - DNA, 25 bp, Homo sapien
tcataaactgtgtcagagcagaaat

SEQ ID NO: 2978628 - DNA, 25 bp, Homo sapien
ctctcctattaacttggtgtgtttc

SEQ ID NO: 2978629 - DNA, 25 bp, Homo sapien
tgtgtcagagcagaaattatttgac

SEQ ID NO: 2978630 - DNA, 25 bp, Homo sapien
tcatgacgttgctcttgtgacctct

SEQ ID NO: 2978631 - DNA, 25 bp, Homo sapien
ccttcatgacgttgctcttgtgacc

SEQ ID NO: 2978632 - DNA, 25 bp, Homo sapien
atccttcatgacgttgctcttgtga

SEQ ID NO: 2978633 - DNA, 25 bp, Homo sapien
ctctgactcgtttcaccatcaatcc

SEQ ID NO: 2978634 - DNA, 25 bp, Homo sapien
ccaggataatcaaggcatcgacata

SEQ ID NO: 2978635 - DNA, 25 bp, Homo sapien
caccaggataatcaaggcatcgaca

SEQ ID NO: 2978636 - DNA, 25 bp, Homo sapien
caggataatcaaggcatcgacatat

SEQ ID NO: 2978637 - DNA, 25 bp, Homo sapien
taacaccaggataatcaaggcatcg

SEQ ID NO: 2978638 - DNA, 25 bp, Homo sapien
gctttccactattattggaatgatt

SEQ ID NO: 2978639 - DNA, 25 bp, Homo sapien
tgattttcatgtctaacgtttttct

SEQ ID NO: 2978640 - DNA, 25 bp, Homo sapien
tttcatgtctaacgtttttctccat

SEQ ID NO: 2978641 - DNA, 25 bp, Homo sapien
gtttagtgatctgtctaatttggat

SEQ ID NO: 2978642 - DNA, 25 bp, Homo sapien
gccattacccaagtcactaccagtg

SEQ ID NO: 2978643 - DNA, 25 bp, Homo sapien
taccagtgtcgccatcaacatcaac

SEQ ID NO: 2978644 - DNA, 25 bp, Homo sapien
aggcttgctaccactactactgcca

SEQ ID NO: 2978645 - DNA, 25 bp, Homo sapien
tgatcccatggttcccaggcttgct

SEQ ID NO: 2978646 - DNA, 25 bp, Homo sapien
aagatcagacaatgtttgtggcttc

SEQ ID NO: 2978647 - DNA, 25 bp, Homo sapien
cagcaagatcagacaatgtttgtgg

SEQ ID NO: 2978648 - DNA, 25 bp, Homo sapien
ttattgcctccacaaagcttccaca

SEQ ID NO: 2978649 - DNA, 25 bp, Homo sapien
tattgcctccacaaagcttccacat

SEQ ID NO: 2978650 - DNA, 25 bp, Homo sapien
tcctctggaagtgtatgtcataaag

SEQ ID NO: 2978651 - DNA, 25 bp, Homo sapien
cctctgcgtactttctgctgctgga

SEQ ID NO: 2978652 - DNA, 25 bp, Homo sapien
tcataaagtaatgggcctgaccctc

SEQ ID NO: 2978653 - DNA, 25 bp, Homo sapien
ctttctggcgaggtgtggatgtcac

SEQ ID NO: 2978654 - DNA, 25 bp, Homo sapien
ctctgagtgcattccactgggtgga

SEQ ID NO: 2978655 - DNA, 25 bp, Homo sapien
tagctagttcaagtgtagactctgg

SEQ ID NO: 2978656 - DNA, 25 bp, Homo sapien
ggaatccacattctatggtagctag

SEQ ID NO: 2978657 - DNA, 25 bp, Homo sapien
gattgtaatgctatgctctgagtgc

SEQ ID NO: 2978658 - DNA, 25 bp, Homo sapien
ttgagggtggatccagttatgttcc

SEQ ID NO: 2978659 - DNA, 25 bp, Homo sapien
ttatctagcatccttgccactcagt

SEQ ID NO: 2978660 - DNA, 25 bp, Homo sapien
tccttgccactcagtatttgacttt

SEQ ID NO: 2978661 - DNA, 25 bp, Homo sapien
ggtggatccagttatgttccttgca

SEQ ID NO: 2978662 - DNA, 25 bp, Homo sapien
ttgcagtaaaccatggatgggcttc

SEQ ID NO: 2978663 - DNA, 25 bp, Homo sapien
agatattgaggattgtccttgatcc

SEQ ID NO: 2978664 - DNA, 25 bp, Homo sapien
cttgaattgcagtaaaccatggatg

SEQ ID NO: 2978665 - DNA, 25 bp, Homo sapien
gatattgaggattgtccttgatcca

SEQ ID NO: 2978666 - DNA, 25 bp, Homo sapien
gcaattggcagtctggcacgtagaa

SEQ ID NO: 2978667 - DNA, 25 bp, Homo sapien
gctgttgggtaggtgatatctccat

SEQ ID NO: 2978668 - DNA, 25 bp, Homo sapien
cacataaagccggtaaaactgcaat

SEQ ID NO: 2978669 - DNA, 25 bp, Homo sapien
gatatctccattcacataaagccgg

SEQ ID NO: 2978670 - DNA, 25 bp, Homo sapien
aggaaggtaatctttggcatctctg

SEQ ID NO: 2978671 - DNA, 25 bp, Homo sapien
tcctcaaatattccagccctctagc

SEQ ID NO: 2978672 - DNA, 25 bp, Homo sapien
gaagaaatgcctgatctctctaatt

SEQ ID NO: 2978673 - DNA, 25 bp, Homo sapien
gcacatcccattgttagcaccatct

SEQ ID NO: 2978674 - DNA, 25 bp, Homo sapien
tctcactaggcttcttgttggctga

SEQ ID NO: 2978675 - DNA, 25 bp, Homo sapien
tcaggattacccagaagaccatggc

SEQ ID NO: 2978676 - DNA, 25 bp, Homo sapien
accaagccctttgcttatgtgaagg

SEQ ID NO: 2978677 - DNA, 25 bp, Homo sapien
ggaggccacatccttacgcgacctt

SEQ ID NO: 2978678 - DNA, 25 bp, Homo sapien
caaacacctgaagtccttctacgta

SEQ ID NO: 2978679 - DNA, 25 bp, Homo sapien
cagtgtgacaagaacgtgccagaat

SEQ ID NO: 2978680 - DNA, 25 bp, Homo sapien
cttctacgtaatcttcataggtgcc

SEQ ID NO: 2978681 - DNA, 25 bp, Homo sapien
ccttgaccacctcagtgttagtggg

SEQ ID NO: 2978682 - DNA, 25 bp, Homo sapien
cagcaccgtaaggacgagctctgcc

SEQ ID NO: 2978683 - DNA, 25 bp, Homo sapien
agcaccgtaaggacgagctctgccc

SEQ ID NO: 2978684 - DNA, 25 bp, Homo sapien
tatgtggcaggatcctagatgtgtc

SEQ ID NO: 2978685 - DNA, 25 bp, Homo sapien
cctagatgtgtctattgttaagacc

SEQ ID NO: 2978686 - DNA, 25 bp, Homo sapien
gcaggatcctagatgtgtctattgt

SEQ ID NO: 2978687 - DNA, 25 bp, Homo sapien
tagaatatgtggcaggatcctagat

SEQ ID NO: 2978688 - DNA, 25 bp, Homo sapien
ggagattttagtagccaggccagct

SEQ ID NO: 2978689 - DNA, 25 bp, Homo sapien
ttttagtagccaggccagcttttat

SEQ ID NO: 2978690 - DNA, 25 bp, Homo sapien
taggaggagattttagtagccaggc

SEQ ID NO: 2978691 - DNA, 25 bp, Homo sapien
gaggagattttagtagccaggccag

SEQ ID NO: 2978692 - DNA, 25 bp, Homo sapien
tggtgcatggaactgaagaacaatt

SEQ ID NO: 2978693 - DNA, 25 bp, Homo sapien
cttagcattggtgcatggaactgaa

SEQ ID NO: 2978694 - DNA, 25 bp, Homo sapien
ttggtgcatggaactgaagaacaat

SEQ ID NO: 2978695 - DNA, 25 bp, Homo sapien
agcattggtgcatggaactgaagaa

SEQ ID NO: 2978696 - DNA, 25 bp, Homo sapien
ttagcagtgtaaaccacttcagatg

SEQ ID NO: 2978697 - DNA, 25 bp, Homo sapien
ttcagatgttcgaggcttcttggtc

SEQ ID NO: 2978698 - DNA, 25 bp, Homo sapien
gggtaccaccaacatactctcctag

SEQ ID NO: 2978699 - DNA, 25 bp, Homo sapien
tcttggtctgggtaccaccaacata

SEQ ID NO: 2978700 - DNA, 25 bp, Homo sapien
gcacttgcgcaactgtaatataagt

SEQ ID NO: 2978701 - DNA, 25 bp, Homo sapien
gacttttgcacagtgatactgctct

SEQ ID NO: 2978702 - DNA, 25 bp, Homo sapien
ctgctctttgtctacaacattttga

SEQ ID NO: 2978703 - DNA, 25 bp, Homo sapien
tctcaactgtagcacttgcgcaact

SEQ ID NO: 2978704 - DNA, 25 bp, Homo sapien
catcttccacatcagcgagcgttgg

SEQ ID NO: 2978705 - DNA, 25 bp, Homo sapien
cgtcgctgatcttccagaactctga

SEQ ID NO: 2978706 - DNA, 25 bp, Homo sapien
gagctgattgcctcccgatgaagca

SEQ ID NO: 2978707 - DNA, 25 bp, Homo sapien
ttctctgccaaggtgaaggcggcaa

SEQ ID NO: 2978708 - DNA, 25 bp, Homo sapien
tggagttcattgagattcctaattt

SEQ ID NO: 2978709 - DNA, 25 bp, Homo sapien
gagtggtagtctttggtaatgattc

SEQ ID NO: 2978710 - DNA, 25 bp, Homo sapien
tatataatgtgtctaagagtggtag

SEQ ID NO: 2978711 - DNA, 25 bp, Homo sapien
gttcattgagattcctaattttcag

SEQ ID NO: 2978712 - DNA, 25 bp, Homo sapien
tttgtaccttcaaagcagttagtct

SEQ ID NO: 2978713 - DNA, 25 bp, Homo sapien
cttgctttgtaccttcaaagcagtt

SEQ ID NO: 2978714 - DNA, 25 bp, Homo sapien
gcagttagtctttctcttaataata

SEQ ID NO: 2978715 - DNA, 25 bp, Homo sapien
ccttcaaagcagttagtctttctct

SEQ ID NO: 2978716 - DNA, 25 bp, Homo sapien
gcatctgtgtagtttcactttgaca

SEQ ID NO: 2978717 - DNA, 25 bp, Homo sapien
cgtgcatctgtgtagtttcactttg

SEQ ID NO: 2978718 - DNA, 25 bp, Homo sapien
ttcgtgcatctgtgtagtttcactt

SEQ ID NO: 2978719 - DNA, 25 bp, Homo sapien
cattcgtgcatctgtgtagtttcac

SEQ ID NO: 2978720 - DNA, 25 bp, Homo sapien
ctattttacataactggcttcgtgg

SEQ ID NO: 2978721 - DNA, 25 bp, Homo sapien
gcttcgtggtccaggaatgcttctt

SEQ ID NO: 2978722 - DNA, 25 bp, Homo sapien
tcaccaaactgaagtgctacgagga

SEQ ID NO: 2978723 - DNA, 25 bp, Homo sapien
tgcttctttttctcgacaatcacca

SEQ ID NO: 2978724 - DNA, 25 bp, Homo sapien
aagaatgtgtacttcatgatggtca

SEQ ID NO: 2978725 - DNA, 25 bp, Homo sapien
cagtctcttctgagaacctccaagg

SEQ ID NO: 2978726 - DNA, 25 bp, Homo sapien
ccaaggaaagcatcaagaagaatgt

SEQ ID NO: 2978727 - DNA, 25 bp, Homo sapien
catgatggtcagtttgccctgcatc

SEQ ID NO: 2978728 - DNA, 25 bp, Homo sapien
gaacagaggcataattcccagtgga

SEQ ID NO: 2978729 - DNA, 25 bp, Homo sapien
tagagggttgttggtgagtcactcc

SEQ ID NO: 2978730 - DNA, 25 bp, Homo sapien
caaggaactcacacaatgggcagat

SEQ ID NO: 2978731 - DNA, 25 bp, Homo sapien
cagatgtccgaactccactggccat

SEQ ID NO: 2978732 - DNA, 25 bp, Homo sapien
aatctctgagttctggatgctggtg

SEQ ID NO: 2978733 - DNA, 25 bp, Homo sapien
atctctgagttctggatgctggtga

SEQ ID NO: 2978734 - DNA, 25 bp, Homo sapien
tatcaaaagcctggtgttgatttcc

SEQ ID NO: 2978735 - DNA, 25 bp, Homo sapien
cttcttatcaaaagcctggtgttga

SEQ ID NO: 2978736 - DNA, 25 bp, Homo sapien
tcaaaagcctggtgttgatttccaa

SEQ ID NO: 2978737 - DNA, 25 bp, Homo sapien
cttggcttcttatcaaaagcctggt

SEQ ID NO: 2978738 - DNA, 25 bp, Homo sapien
ctgcttcccagccatatcttcaaag

SEQ ID NO: 2978739 - DNA, 25 bp, Homo sapien
ttcaaagccagtactcttctcctgc

SEQ ID NO: 2978740 - DNA, 25 bp, Homo sapien
catgatccgtgcacattctgtatct

SEQ ID NO: 2978741 - DNA, 25 bp, Homo sapien
caaagccagtactcttctcctgcat

SEQ ID NO: 2978742 - DNA, 25 bp, Homo sapien
ctgaaacagaataaggtggcacaca

SEQ ID NO: 2978743 - DNA, 25 bp, Homo sapien
cggcgggcaggtctccgcaacaggt

SEQ ID NO: 2978744 - DNA, 25 bp, Homo sapien
gaaacagaataaggtggcacacaat

SEQ ID NO: 2978745 - DNA, 25 bp, Homo sapien
gcaggtctccgcaacaggtgcaggc

SEQ ID NO: 2978746 - DNA, 25 bp, Homo sapien
attgaagtaggccaatgggcaggct

SEQ ID NO: 2978747 - DNA, 25 bp, Homo sapien
tgaatgccggtgactttgacttctt

SEQ ID NO: 2978748 - DNA, 25 bp, Homo sapien
taggccaatgggcaggcttttcagg

SEQ ID NO: 2978749 - DNA, 25 bp, Homo sapien
tatgtgttcctgttgaatgccggtg

SEQ ID NO: 2978750 - DNA, 25 bp, Homo sapien
cacacatatcaatcatcctttgaca

SEQ ID NO: 2978751 - DNA, 25 bp, Homo sapien
gctccacacatatcaatcatccttt

SEQ ID NO: 2978752 - DNA, 25 bp, Homo sapien
catatcaatcatcctttgacaagat

SEQ ID NO: 2978753 - DNA, 25 bp, Homo sapien
gctgctccacacatatcaatcatcc

SEQ ID NO: 2978754 - DNA, 25 bp, Homo sapien
tgaactctgcaaaggcttggtgaaa

SEQ ID NO: 2978755 - DNA, 25 bp, Homo sapien
agtcttcatatcattgacttgttcc

SEQ ID NO: 2978756 - DNA, 25 bp, Homo sapien
cttcatatcattgacttgttccatg

SEQ ID NO: 2978757 - DNA, 25 bp, Homo sapien
ttcatatcattgacttgttccatga

SEQ ID NO: 2978758 - DNA, 25 bp, Homo sapien
gtcttcatatcattgacttgttcca

SEQ ID NO: 2978759 - DNA, 25 bp, Homo sapien
cttcatctgggaagaggtttccctt

SEQ ID NO: 2978760 - DNA, 25 bp, Homo sapien
ctgtgtgagttgttcacttcatctg

SEQ ID NO: 2978761 - DNA, 25 bp, Homo sapien
ttgcatagaaaatcacctcccctag

SEQ ID NO: 2978762 - DNA, 25 bp, Homo sapien
cataatacctgatttgaggtctgtg

SEQ ID NO: 2978763 - DNA, 25 bp, Homo sapien
tctgactaccctgccatgacaggtg

SEQ ID NO: 2978764 - DNA, 25 bp, Homo sapien
tgtcctttaagatttacctcttcca

SEQ ID NO: 2978765 - DNA, 25 bp, Homo sapien
ttccaggaaggctgtctgactaccc

SEQ ID NO: 2978766 - DNA, 25 bp, Homo sapien
ggaaggctgtctgactaccctgcca

SEQ ID NO: 2978767 - DNA, 25 bp, Homo sapien
caacaaatgcgagccatgaggtgtc

SEQ ID NO: 2978768 - DNA, 25 bp, Homo sapien
cctgactttctcgaagagctctggg

SEQ ID NO: 2978769 - DNA, 25 bp, Homo sapien
tgtctatgtgctctacagccgggcc

SEQ ID NO: 2978770 - DNA, 25 bp, Homo sapien
tcatggaggtgcagtcaaacttgct

SEQ ID NO: 2978771 - DNA, 25 bp, Homo sapien
tgtctgatcattagtctgctggcac

SEQ ID NO: 2978772 - DNA, 25 bp, Homo sapien
tgatcattagtctgctggcactcag

SEQ ID NO: 2978773 - DNA, 25 bp, Homo sapien
gggtaactgtctgatcattagtctg

SEQ ID NO: 2978774 - DNA, 25 bp, Homo sapien
tgatgggtaactgtctgatcattag

SEQ ID NO: 2978775 - DNA, 25 bp, Homo sapien
ggtactgacaacaatccaaggtgag

SEQ ID NO: 2978776 - DNA, 25 bp, Homo sapien
ccaaggtgagatatcaatgctagcc

SEQ ID NO: 2978777 - DNA, 25 bp, Homo sapien
tgtcgaggaaccaacacattgagtc

SEQ ID NO: 2978778 - DNA, 25 bp, Homo sapien
taaaccacgatcagcagctcttgac

SEQ ID NO: 2978779 - DNA, 25 bp, Homo sapien
ctgtgggtctaatatagattctgtg

SEQ ID NO: 2978780 - DNA, 25 bp, Homo sapien
ggtctaatatagattctgtgcattc

SEQ ID NO: 2978781 - DNA, 25 bp, Homo sapien
gtgggtctaatatagattctgtgca

SEQ ID NO: 2978782 - DNA, 25 bp, Homo sapien
ctaatatagattctgtgcattcatc

SEQ ID NO: 2978783 - DNA, 25 bp, Homo sapien
aagactgtagggtgaatgtggtttt

SEQ ID NO: 2978784 - DNA, 25 bp, Homo sapien
tagaagtcgatggtattaaatccgc

SEQ ID NO: 2978785 - DNA, 25 bp, Homo sapien
ttatacactgtagaagtcgatggta

SEQ ID NO: 2978786 - DNA, 25 bp, Homo sapien
ttaaatccgctcaagaagtaagaga

SEQ ID NO: 2978787 - DNA, 25 bp, Homo sapien
agtcagaggctaagtcacgaaaaac

SEQ ID NO: 2978788 - DNA, 25 bp, Homo sapien
tatcaaaggcaacgggaatcagtct

SEQ ID NO: 2978789 - DNA, 25 bp, Homo sapien
gtggcaatattacatcaggtcctgg

SEQ ID NO: 2978790 - DNA, 25 bp, Homo sapien
tgacatccgactctgaacggcagcg

SEQ ID NO: 2978791 - DNA, 25 bp, Homo sapien
ccctagcggttgattgcgaggagca

SEQ ID NO: 2978792 - DNA, 25 bp, Homo sapien
gagagaagacaccacctacaaacca

SEQ ID NO: 2978793 - DNA, 25 bp, Homo sapien
gaggcttccccagctacgtgaacct

SEQ ID NO: 2978794 - DNA, 25 bp, Homo sapien
tacaaaccaggaagtaggctctcgc

SEQ ID NO: 2978795 - DNA, 25 bp, Homo sapien
gccagatgcgtaatccactggagtc

SEQ ID NO: 2978796 - DNA, 25 bp, Homo sapien
tgtcaagaccaggagttgaactatg

SEQ ID NO: 2978797 - DNA, 25 bp, Homo sapien
gtcaagaccaggagttgaactatgt

SEQ ID NO: 2978798 - DNA, 25 bp, Homo sapien
tcaagaccaggagttgaactatgtc

SEQ ID NO: 2978799 - DNA, 25 bp, Homo sapien
gaagcagaacatcattaatggtctt

SEQ ID NO: 2978800 - DNA, 25 bp, Homo sapien
gaacatcattaatggtcttcatcct

SEQ ID NO: 2978801 - DNA, 25 bp, Homo sapien
tggaagcagaacatcattaatggtc

SEQ ID NO: 2978802 - DNA, 25 bp, Homo sapien
cagaacatcattaatggtcttcatc

SEQ ID NO: 2978803 - DNA, 25 bp, Homo sapien
tcaaagcatacaagctgagaaggca

SEQ ID NO: 2978804 - DNA, 25 bp, Homo sapien
tgcaccaggcaaatcagtatggttg

SEQ ID NO: 2978805 - DNA, 25 bp, Homo sapien
catcacacagtttctgcaagtcagg

SEQ ID NO: 2978806 - DNA, 25 bp, Homo sapien
ggaaggaaggtctcagtttctcacc

SEQ ID NO: 2978807 - DNA, 25 bp, Homo sapien
tgagaacaccatggccaaattcaag

SEQ ID NO: 2978808 - DNA, 25 bp, Homo sapien
agggcagcattaaccaccgacccag

SEQ ID NO: 2978809 - DNA, 25 bp, Homo sapien
cttattagccttgtgggtaagggca

SEQ ID NO: 2978810 - DNA, 25 bp, Homo sapien
tctaaggtgacttggtgctcaggag

SEQ ID NO: 2978811 - DNA, 25 bp, Homo sapien
aaagtagactcagagagagggttca

SEQ ID NO: 2978812 - DNA, 25 bp, Homo sapien
cagatttgaagactttttgcctcca

SEQ ID NO: 2978813 - DNA, 25 bp, Homo sapien
caggtgaggtccagtattggcattc

SEQ ID NO: 2978814 - DNA, 25 bp, Homo sapien
tccctaaggaaattctagacaaggc

SEQ ID NO: 2978815 - DNA, 25 bp, Homo sapien
aaacatgacttatcacaaccctgac

SEQ ID NO: 2978816 - DNA, 25 bp, Homo sapien
catgacttatcacaaccctgacaca

SEQ ID NO: 2978817 - DNA, 25 bp, Homo sapien
gtttaaacatgacttatcacaaccc

SEQ ID NO: 2978818 - DNA, 25 bp, Homo sapien
gacttatcacaaccctgacacatct

SEQ ID NO: 2978819 - DNA, 25 bp, Homo sapien
gattaacgatgccataataagcagc

SEQ ID NO: 2978820 - DNA, 25 bp, Homo sapien
tgtcccagtctcaatcccatgttaa

SEQ ID NO: 2978821 - DNA, 25 bp, Homo sapien
gctacttggtgaacgtatatacact

SEQ ID NO: 2978822 - DNA, 25 bp, Homo sapien
tctgaagtcagttatcacgggtagg

SEQ ID NO: 2978823 - DNA, 25 bp, Homo sapien
atttgcacccacttaaggccccagt

SEQ ID NO: 2978824 - DNA, 25 bp, Homo sapien
tctgaaggaccacaccagcattttc

SEQ ID NO: 2978825 - DNA, 25 bp, Homo sapien
tcttgtagagcagtcaatgtattgg

SEQ ID NO: 2978826 - DNA, 25 bp, Homo sapien
ctggcagaatatctgaaggaccaca

SEQ ID NO: 2978827 - DNA, 25 bp, Homo sapien
ggtttccatgtcctttggcttctgg

SEQ ID NO: 2978828 - DNA, 25 bp, Homo sapien
tctggttgagttcactcagtggaga

SEQ ID NO: 2978829 - DNA, 25 bp, Homo sapien
gacatcaatgggtttccatgtcctt

SEQ ID NO: 2978830 - DNA, 25 bp, Homo sapien
cctttggcttctggttgagttcact

SEQ ID NO: 2978831 - DNA, 25 bp, Homo sapien
ggcttttcatttagagactacagga

SEQ ID NO: 2978832 - DNA, 25 bp, Homo sapien
tattctatgaggaccaggattgtga

SEQ ID NO: 2978833 - DNA, 25 bp, Homo sapien
tgctgcaatgtagaaaggtatcacc

SEQ ID NO: 2978834 - DNA, 25 bp, Homo sapien
tgtacccaacaaaggcacagtgtct

SEQ ID NO: 2978835 - DNA, 25 bp, Homo sapien
caccagggactgacgtggttcaggt

SEQ ID NO: 2978836 - DNA, 25 bp, Homo sapien
cattcctcaaggtgtgtatgaaaaa

SEQ ID NO: 2978837 - DNA, 25 bp, Homo sapien
agattgccaagcgattcctccagga

SEQ ID NO: 2978838 - DNA, 25 bp, Homo sapien
tatgaaaaatagtgtccaccaggga

SEQ ID NO: 2978839 - DNA, 25 bp, Homo sapien
tgctttccccttttcggacattgat

SEQ ID NO: 2978840 - DNA, 25 bp, Homo sapien
gatgaaaacattgggggctggcgag

SEQ ID NO: 2978841 - DNA, 25 bp, Homo sapien
agcggatgatgctgattgttctatc

SEQ ID NO: 2978842 - DNA, 25 bp, Homo sapien
tttcggacattgattccaatgtcag

SEQ ID NO: 2978843 - DNA, 25 bp, Homo sapien
ttttgtctgttccgttgcagagctt

SEQ ID NO: 2978844 - DNA, 25 bp, Homo sapien
cacagttttgtctgttccgttgcag

SEQ ID NO: 2978845 - DNA, 25 bp, Homo sapien
cgtggagaagtaaacaacttgggtg

SEQ ID NO: 2978846 - DNA, 25 bp, Homo sapien
tggagaagtaaacaacttgggtgga

SEQ ID NO: 2978847 - DNA, 25 bp, Homo sapien
gaggctgccccatgtgtgcgaaaga

SEQ ID NO: 2978848 - DNA, 25 bp, Homo sapien
aaatgacccaatagtgagcacgcag

SEQ ID NO: 2978849 - DNA, 25 bp, Homo sapien
gatttgtcagtgctacctaaggcta

SEQ ID NO: 2978850 - DNA, 25 bp, Homo sapien
cctaaggctaggtcaggacaaaagc

SEQ ID NO: 2978851 - DNA, 25 bp, Homo sapien
ccattttgcggttttcttcttcagc

SEQ ID NO: 2978852 - DNA, 25 bp, Homo sapien
aattaaattagaattgggcagtctc

SEQ ID NO: 2978853 - DNA, 25 bp, Homo sapien
ttgaagtccgctgagtgatgccctg

SEQ ID NO: 2978854 - DNA, 25 bp, Homo sapien
catgaaacgatttgctccacgggca

SEQ ID NO: 2978855 - DNA, 25 bp, Homo sapien
ttgtcttcacccaccacaatggcag

SEQ ID NO: 2978856 - DNA, 25 bp, Homo sapien
tgcatggagcttgggaaacttcaca

SEQ ID NO: 2978857 - DNA, 25 bp, Homo sapien
ggctcagttgctagggtcaaccaat

SEQ ID NO: 2978858 - DNA, 25 bp, Homo sapien
gaagatcacaggtaatgactgccag

SEQ ID NO: 2978859 - DNA, 25 bp, Homo sapien
tatttgaaaagggatactacacttc

SEQ ID NO: 2978860 - DNA, 25 bp, Homo sapien
tagggctaagatttccaactggtct

SEQ ID NO: 2978861 - DNA, 25 bp, Homo sapien
ggatactacacttccaggataattc

SEQ ID NO: 2978862 - DNA, 25 bp, Homo sapien
aactggctgctgtaattgtctggtg

SEQ ID NO: 2978863 - DNA, 25 bp, Homo sapien
tatgacgtagaagtacctaatgaca

SEQ ID NO: 2978864 - DNA, 25 bp, Homo sapien
ctgtttatctgatatgacgtagaag

SEQ ID NO: 2978865 - DNA, 25 bp, Homo sapien
gtacctaatgacagcacttcaacat

SEQ ID NO: 2978866 - DNA, 25 bp, Homo sapien
cttagtgcttgtgtctgaattctgt

SEQ ID NO: 2978867 - DNA, 25 bp, Homo sapien
gaggcagtcaagagctttttgggct

SEQ ID NO: 2978868 - DNA, 25 bp, Homo sapien
ggttggaggcagtcaagagcttttt

SEQ ID NO: 2978869 - DNA, 25 bp, Homo sapien
gggctgaaagatggtagtccatttg

SEQ ID NO: 2978870 - DNA, 25 bp, Homo sapien
agctttttgggctgaaagatggtag

SEQ ID NO: 2978871 - DNA, 25 bp, Homo sapien
tgtaaagaccttcgacaggcttcct

SEQ ID NO: 2978872 - DNA, 25 bp, Homo sapien
accttcgacaggcttccttgtggga

SEQ ID NO: 2978873 - DNA, 25 bp, Homo sapien
taaagaccttcgacaggcttccttg

SEQ ID NO: 2978874 - DNA, 25 bp, Homo sapien
agagtttgtttagagtgagtttgga

SEQ ID NO: 2978875 - DNA, 25 bp, Homo sapien
gatacacaatttatccgactcataa

SEQ ID NO: 2978876 - DNA, 25 bp, Homo sapien
tctggatacacaatttatccgactc

SEQ ID NO: 2978877 - DNA, 25 bp, Homo sapien
tacacaatttatccgactcataaag

SEQ ID NO: 2978878 - DNA, 25 bp, Homo sapien
aatttatccgactcataaagtgtcc

SEQ ID NO: 2978879 - DNA, 25 bp, Homo sapien
cagcttgtattctttaactattaat

SEQ ID NO: 2978880 - DNA, 25 bp, Homo sapien
taactattaatggtgaagatgcagg

SEQ ID NO: 2978881 - DNA, 25 bp, Homo sapien
tttaactattaatggtgaagatgca

SEQ ID NO: 2978882 - DNA, 25 bp, Homo sapien
tctttaactattaatggtgaagatg

SEQ ID NO: 2978883 - DNA, 25 bp, Homo sapien
atgttggctgtttctctgcagccca

SEQ ID NO: 2978884 - DNA, 25 bp, Homo sapien
ggtagacaggtctatggagatgaga

SEQ ID NO: 2978885 - DNA, 25 bp, Homo sapien
catccccacggccttgcaagctggg

SEQ ID NO: 2978886 - DNA, 25 bp, Homo sapien
aactctctgaacatccccacggcct

SEQ ID NO: 2978887 - DNA, 25 bp, Homo sapien
cagtcccaaactgcaaacatgccgt

SEQ ID NO: 2978888 - DNA, 25 bp, Homo sapien
gaaggagacgtttccagagactggt

SEQ ID NO: 2978889 - DNA, 25 bp, Homo sapien
cagccaggacgacgaaggagacgtt

SEQ ID NO: 2978890 - DNA, 25 bp, Homo sapien
tccagagactggtggttctgcagtc

SEQ ID NO: 2978891 - DNA, 25 bp, Homo sapien
cttctttctgcaaaccgtgctgctg

SEQ ID NO: 2978892 - DNA, 25 bp, Homo sapien
tctttctgcaaaccgtgctgctgtt

SEQ ID NO: 2978893 - DNA, 25 bp, Homo sapien
ttcttctttctgcaaaccgtgctgc

SEQ ID NO: 2978894 - DNA, 25 bp, Homo sapien
tctgcaaaccgtgctgctgtttgtt

SEQ ID NO: 2978895 - DNA, 25 bp, Homo sapien
ggtgcaatttcgaaggtaacggtca

SEQ ID NO: 2978896 - DNA, 25 bp, Homo sapien
cctctaagagatcccattgggtggg

SEQ ID NO: 2978897 - DNA, 25 bp, Homo sapien
aagtgtccccatcaagccacggaaa

SEQ ID NO: 2978898 - DNA, 25 bp, Homo sapien
gatcttaatcagagaaagtgtcccc

SEQ ID NO: 2978899 - DNA, 25 bp, Homo sapien
tgcagtctcaggtaccgaccaaaga

SEQ ID NO: 2978900 - DNA, 25 bp, Homo sapien
atgcagtctcaggtaccgaccaaag

SEQ ID NO: 2978901 - DNA, 25 bp, Homo sapien
tatgcagtctcaggtaccgaccaaa

SEQ ID NO: 2978902 - DNA, 25 bp, Homo sapien
aagtcagagaccagaccagctggct

SEQ ID NO: 2978903 - DNA, 25 bp, Homo sapien
gcggctgtaacacagcagggcgccc

SEQ ID NO: 2978904 - DNA, 25 bp, Homo sapien
ggtacggaccggagcccaagtcaga

SEQ ID NO: 2978905 - DNA, 25 bp, Homo sapien
ctgccctggtgacctggccgggtct

SEQ ID NO: 2978906 - DNA, 25 bp, Homo sapien
ctgcagaccaagaggcccgtttcag

SEQ ID NO: 2978907 - DNA, 25 bp, Homo sapien
gcagaccaagaggcccgtttcagtt

SEQ ID NO: 2978908 - DNA, 25 bp, Homo sapien
cagaccaagaggcccgtttcagttt

SEQ ID NO: 2978909 - DNA, 25 bp, Homo sapien
tgcagaccaagaggcccgtttcagt

SEQ ID NO: 2978910 - DNA, 25 bp, Homo sapien
gcttgtgcattcctgcgtgtgtatt

SEQ ID NO: 2978911 - DNA, 25 bp, Homo sapien
ctgtggaatcccgactccgctaaaa

SEQ ID NO: 2978912 - DNA, 25 bp, Homo sapien
agcgacagttgcgaacacgcgatgc

SEQ ID NO: 2978913 - DNA, 25 bp, Homo sapien
cacacgggagcccgactttgggaag

SEQ ID NO: 2978914 - DNA, 25 bp, Homo sapien
ctggcgaattaaggaccacaacctc

SEQ ID NO: 2978915 - DNA, 25 bp, Homo sapien
tggcgaattaaggaccacaacctcc

SEQ ID NO: 2978916 - DNA, 25 bp, Homo sapien
cacaacctccctatccaaacttcct

SEQ ID NO: 2978917 - DNA, 25 bp, Homo sapien
atccaaacttccttagcaaaagtgg

SEQ ID NO: 2978918 - DNA, 25 bp, Homo sapien
tgaacaggcgacttaaaaatggact

SEQ ID NO: 2978919 - DNA, 25 bp, Homo sapien
tcctgaaaacttatgaacaggcgac

SEQ ID NO: 2978920 - DNA, 25 bp, Homo sapien
tgcaataagatactaatatgtagag

SEQ ID NO: 2978921 - DNA, 25 bp, Homo sapien
tagagttttacatcataaacgacgg

SEQ ID NO: 2978922 - DNA, 25 bp, Homo sapien
tccggggttgaaactggcgagtctc

SEQ ID NO: 2978923 - DNA, 25 bp, Homo sapien
gagtctccgcgccactgaagtttcc

SEQ ID NO: 2978924 - DNA, 25 bp, Homo sapien
ctaccgcggcgagcacttaggaagg

SEQ ID NO: 2978925 - DNA, 25 bp, Homo sapien
tgaagtttccagtcagtttcgagct

SEQ ID NO: 2978926 - DNA, 25 bp, Homo sapien
ccggggaagctggcgcgtcggccgg

SEQ ID NO: 2978927 - DNA, 25 bp, Homo sapien
cggatgcggagcaagcggctcccgg

SEQ ID NO: 2978928 - DNA, 25 bp, Homo sapien
gcccggatgcggagcaagcggctcc

SEQ ID NO: 2978929 - DNA, 25 bp, Homo sapien
ctgcccggatgcggagcaagcggct

SEQ ID NO: 2978930 - DNA, 25 bp, Homo sapien
tcggggactcgaggcgcgggctcct

SEQ ID NO: 2978931 - DNA, 25 bp, Homo sapien
ctcggggactcgaggcgcgggctcc

SEQ ID NO: 2978932 - DNA, 25 bp, Homo sapien
actcgaggcgcgggctcctctcccc

SEQ ID NO: 2978933 - DNA, 25 bp, Homo sapien
gggactcgaggcgcgggctcctctc

SEQ ID NO: 2978934 - DNA, 25 bp, Homo sapien
ttctcggtgtccgagccggagcccg

SEQ ID NO: 2978935 - DNA, 25 bp, Homo sapien
agcccgcggagtcctcggacatggt

SEQ ID NO: 2978936 - DNA, 25 bp, Homo sapien
tctccttcttcagatcgggctcgcc

SEQ ID NO: 2978937 - DNA, 25 bp, Homo sapien
gctcgtcggtcatcttcatgaaggg

SEQ ID NO: 2978938 - DNA, 25 bp, Homo sapien
tcgccgggggagtgcacctcgctca

SEQ ID NO: 2978939 - DNA, 25 bp, Homo sapien
ctgcccgttcttcaccgacttcctc

SEQ ID NO: 2978940 - DNA, 25 bp, Homo sapien
tcggcctgcagcgccttgaagatgg

SEQ ID NO: 2978941 - DNA, 25 bp, Homo sapien
cgttgggggagatgtgcgtctgctc

SEQ ID NO: 2978942 - DNA, 25 bp, Homo sapien
ttggagatgacgtcgctgctcagct

SEQ ID NO: 2978943 - DNA, 25 bp, Homo sapien
aactcgttgacatcgaaggtctcga

SEQ ID NO: 2978944 - DNA, 25 bp, Homo sapien
cgatgtccacgtcgcggaagtcgat

SEQ ID NO: 2978945 - DNA, 25 bp, Homo sapien
tagctgcccgtgtaggtgacctggc

SEQ ID NO: 2978946 - DNA, 25 bp, Homo sapien
tgctcagcgtggtcagcgtgtgcgc

SEQ ID NO: 2978947 - DNA, 25 bp, Homo sapien
ctcgctgctcagcgtggtcagcgtg

SEQ ID NO: 2978948 - DNA, 25 bp, Homo sapien
tgctgtgggggcgccgcctgcggct

SEQ ID NO: 2978949 - DNA, 25 bp, Homo sapien
ctcagcgtggtcagcgtgtgcgcct

SEQ ID NO: 2978950 - DNA, 25 bp, Homo sapien
agtgctgctgctgctcgctgtagtg

SEQ ID NO: 2978951 - DNA, 25 bp, Homo sapien
tgctgctgctgctcgctgtagtggc

SEQ ID NO: 2978952 - DNA, 25 bp, Homo sapien
gctgctgctgctcgctgtagtggct

SEQ ID NO: 2978953 - DNA, 25 bp, Homo sapien
gctgctgctcgctgtagtggctggg

SEQ ID NO: 2978954 - DNA, 25 bp, Homo sapien
tgtgtagacgggttgttcccagtgc

SEQ ID NO: 2978955 - DNA, 25 bp, Homo sapien
tgccgcgtggctgtagtaggagctg

SEQ ID NO: 2978956 - DNA, 25 bp, Homo sapien
caaggtcgagtgagctgtgtgtaga

SEQ ID NO: 2978957 - DNA, 25 bp, Homo sapien
ttctggtggtcggtgtagtcgtact

SEQ ID NO: 2978958 - DNA, 25 bp, Homo sapien
cagatgaccataccctttgaggaaa

SEQ ID NO: 2978959 - DNA, 25 bp, Homo sapien
ctctggttgcaagaaaagctagggc

SEQ ID NO: 2978960 - DNA, 25 bp, Homo sapien
tgtttcccagcagcaccgttttaag

SEQ ID NO: 2978961 - DNA, 25 bp, Homo sapien
tataaggcagcccaaaggtctgtgg

SEQ ID NO: 2978962 - DNA, 25 bp, Homo sapien
tctcccagttggctctaatgagttg

SEQ ID NO: 2978963 - DNA, 25 bp, Homo sapien
cccagttggctctaatgagttgcat

SEQ ID NO: 2978964 - DNA, 25 bp, Homo sapien
tgttctcccagttggctctaatgag

SEQ ID NO: 2978965 - DNA, 25 bp, Homo sapien
gcctgttctcccagttggctctaat

SEQ ID NO: 2978966 - DNA, 25 bp, Homo sapien
tctttgactctgttgggcagacagg

SEQ ID NO: 2978967 - DNA, 25 bp, Homo sapien
ctctgttgggcagacaggaaaaagc

SEQ ID NO: 2978968 - DNA, 25 bp, Homo sapien
catcctctttgactctgttgggcag

SEQ ID NO: 2978969 - DNA, 25 bp, Homo sapien
tccccggttagcctcatcctctttg

SEQ ID NO: 2978970 - DNA, 25 bp, Homo sapien
ttcttcacagagcttggcacgtccc

SEQ ID NO: 2978971 - DNA, 25 bp, Homo sapien
ggaccagcataatcagcttcttcac

SEQ ID NO: 2978972 - DNA, 25 bp, Homo sapien
cagctggacctagaggaccagcata

SEQ ID NO: 2978973 - DNA, 25 bp, Homo sapien
cctagaggaccagcataatcagctt

SEQ ID NO: 2978974 - DNA, 25 bp, Homo sapien
tcatgttcagtgaggacttcagaaa

SEQ ID NO: 2978975 - DNA, 25 bp, Homo sapien
ggtcagatgtgtgctcatgttcagt

SEQ ID NO: 2978976 - DNA, 25 bp, Homo sapien
atttcagggactttcaaaattggct

SEQ ID NO: 2978977 - DNA, 25 bp, Homo sapien
ccagctgggtgatgaaatccactga

SEQ ID NO: 2978978 - DNA, 25 bp, Homo sapien
aagtcagcagcaggttaagatggca

SEQ ID NO: 2978979 - DNA, 25 bp, Homo sapien
tattcgtgcagcatgactgttcttt

SEQ ID NO: 2978980 - DNA, 25 bp, Homo sapien
ttcttcgatctcatgtaagttcccc

SEQ ID NO: 2978981 - DNA, 25 bp, Homo sapien
cattttccaatgaccgatcgaccag

SEQ ID NO: 2978982 - DNA, 25 bp, Homo sapien
agcaaaattcaaacatcgcgcaggc

SEQ ID NO: 2978983 - DNA, 25 bp, Homo sapien
aaattcaaacatcgcgcaggctcca

SEQ ID NO: 2978984 - DNA, 25 bp, Homo sapien
gccaccgcgaagaaagatcaagagt

SEQ ID NO: 2978985 - DNA, 25 bp, Homo sapien
agctgccaccgcgaagaaagatcaa

SEQ ID NO: 2978986 - DNA, 25 bp, Homo sapien
ggattttgcaaataaagtcgtatgg

SEQ ID NO: 2978987 - DNA, 25 bp, Homo sapien
accatccgtctttgttgatggcaca

SEQ ID NO: 2978988 - DNA, 25 bp, Homo sapien
ccagagggtccaaccatccgtcttt

SEQ ID NO: 2978989 - DNA, 25 bp, Homo sapien
taaagtcgtatggaaggtagccaga

SEQ ID NO: 2978990 - DNA, 25 bp, Homo sapien
ccgcccatctccacattgataaggg

SEQ ID NO: 2978991 - DNA, 25 bp, Homo sapien
cccatctccacattgataaggggtt

SEQ ID NO: 2978992 - DNA, 25 bp, Homo sapien
ttagtcttccccgcccatctccaca

SEQ ID NO: 2978993 - DNA, 25 bp, Homo sapien
tagtcttccccgcccatctccacat

SEQ ID NO: 2978994 - DNA, 25 bp, Homo sapien
gggattgtccctacctgctttaaca

SEQ ID NO: 2978995 - DNA, 25 bp, Homo sapien
taggactggatctagtacttggaga

SEQ ID NO: 2978996 - DNA, 25 bp, Homo sapien
cctctggcatatctctgaaagttgg

SEQ ID NO: 2978997 - DNA, 25 bp, Homo sapien
gacaccagttcgttctaacattaaa

SEQ ID NO: 2978998 - DNA, 25 bp, Homo sapien
cagagacaggagctggtgcctggct

SEQ ID NO: 2978999 - DNA, 25 bp, Homo sapien
gctggtgcctggctctctagctcca

SEQ ID NO: 2979000 - DNA, 25 bp, Homo sapien
ctggtgcctggctctctagctccat

SEQ ID NO: 2979001 - DNA, 25 bp, Homo sapien
ggagctggtgcctggctctctagct

SEQ ID NO: 2979002 - DNA, 25 bp, Homo sapien
tattaatcgtaaccaacaataaatg

SEQ ID NO: 2979003 - DNA, 25 bp, Homo sapien
tgagctttttgcacgggtcaggcat

SEQ ID NO: 2979004 - DNA, 25 bp, Homo sapien
ctggaacagagttttaccaatggtt

SEQ ID NO: 2979005 - DNA, 25 bp, Homo sapien
taaatgagctttttgcacgggtcag

SEQ ID NO: 2979006 - DNA, 25 bp, Homo sapien
cagtttgtcaatagtgccttcaggt

SEQ ID NO: 2979007 - DNA, 25 bp, Homo sapien
agtttgtcaatagtgccttcaggtg

SEQ ID NO: 2979008 - DNA, 25 bp, Homo sapien
caaaagaaagtagctgaagccggga

SEQ ID NO: 2979009 - DNA, 25 bp, Homo sapien
tttgatgacattacacaaggccggg

SEQ ID NO: 2979010 - DNA, 25 bp, Homo sapien
aagcatatagttgatgagcccaggc

SEQ ID NO: 2979011 - DNA, 25 bp, Homo sapien
tttcgatggtcttatcagaggacgc

SEQ ID NO: 2979012 - DNA, 25 bp, Homo sapien
atgctaactgttgaggcttttgttg

SEQ ID NO: 2979013 - DNA, 25 bp, Homo sapien
tgaatgctaactgttgaggcttttg

SEQ ID NO: 2979014 - DNA, 25 bp, Homo sapien
cttgaatgctaactgttgaggcttt

SEQ ID NO: 2979015 - DNA, 25 bp, Homo sapien
gaatgctaactgttgaggcttttgt

SEQ ID NO: 2979016 - DNA, 25 bp, Homo sapien
gggctccagcttggtcattgctcaa

SEQ ID NO: 2979017 - DNA, 25 bp, Homo sapien
gaatgtccactcttaaggtaggtac

SEQ ID NO: 2979018 - DNA, 25 bp, Homo sapien
agaaactcagagaaagccagggcct

SEQ ID NO: 2979019 - DNA, 25 bp, Homo sapien
tcaaaagcctccttttgaatgtcca

SEQ ID NO: 2979020 - DNA, 25 bp, Homo sapien
gggtttggcactgccttgaaggatc

SEQ ID NO: 2979021 - DNA, 25 bp, Homo sapien
tgaattcccaacagggggtttggca

SEQ ID NO: 2979022 - DNA, 25 bp, Homo sapien
gttgctattgttcccccgcagagta

SEQ ID NO: 2979023 - DNA, 25 bp, Homo sapien
tgaaggatcacattactggctactg

SEQ ID NO: 2979024 - DNA, 25 bp, Homo sapien
gaaggacttgaaaatgtccacggtc

SEQ ID NO: 2979025 - DNA, 25 bp, Homo sapien
cttgaaaatgtccacggtcttggaa

SEQ ID NO: 2979026 - DNA, 25 bp, Homo sapien
ttagaaggacttgaaaatgtccacg

SEQ ID NO: 2979027 - DNA, 25 bp, Homo sapien
aatgtccacggtcttggaatttggg

SEQ ID NO: 2979028 - DNA, 25 bp, Homo sapien
agtgaccacaccttagccaggcttg

SEQ ID NO: 2979029 - DNA, 25 bp, Homo sapien
caggcttgccaagatccctgtaggg

SEQ ID NO: 2979030 - DNA, 25 bp, Homo sapien
agagagtcagtctcccaacttggct

SEQ ID NO: 2979031 - DNA, 25 bp, Homo sapien
ccatcaccaggagagttgaagatcc

SEQ ID NO: 2979032 - DNA, 25 bp, Homo sapien
atccatgatgaaactctttatcagc

SEQ ID NO: 2979033 - DNA, 25 bp, Homo sapien
gatggccaaatccacccggattaat

SEQ ID NO: 2979034 - DNA, 25 bp, Homo sapien
acccggattaatgtgcggccggtcg

SEQ ID NO: 2979035 - DNA, 25 bp, Homo sapien
cgcccctttgggagagcgtgtctgc

SEQ ID NO: 2979036 - DNA, 25 bp, Homo sapien
tgtgaggacgtctgtgtccgcccct

SEQ ID NO: 2979037 - DNA, 25 bp, Homo sapien
ttcaataaggtgaactgtgcaggag

SEQ ID NO: 2979038 - DNA, 25 bp, Homo sapien
caaatctagggtatatggccatgac

SEQ ID NO: 2979039 - DNA, 25 bp, Homo sapien
tggaggccttgccaagactggagct

SEQ ID NO: 2979040 - DNA, 25 bp, Homo sapien
caaatagcaactctcagacacccgg

SEQ ID NO: 2979041 - DNA, 25 bp, Homo sapien
tctttagaaagttcaagctgggacc

SEQ ID NO: 2979042 - DNA, 25 bp, Homo sapien
tagtggaagttaccaagtagacttg

SEQ ID NO: 2979043 - DNA, 25 bp, Homo sapien
tttccccgaaatatgcagtcctcat

SEQ ID NO: 2979044 - DNA, 25 bp, Homo sapien
tgcaggacctctggctcatcaaatt

SEQ ID NO: 2979045 - DNA, 25 bp, Homo sapien
cagagaccaggtttgagtatctaac

SEQ ID NO: 2979046 - DNA, 25 bp, Homo sapien
gccactaacagcaaatgggtcatag

SEQ ID NO: 2979047 - DNA, 25 bp, Homo sapien
tggccactaacagcaaatgggtcat

SEQ ID NO: 2979048 - DNA, 25 bp, Homo sapien
ggccactaacagcaaatgggtcata

SEQ ID NO: 2979049 - DNA, 25 bp, Homo sapien
cactaacagcaaatgggtcatagtt

SEQ ID NO: 2979050 - DNA, 25 bp, Homo sapien
tgctttcttgacagtttcctcttct

SEQ ID NO: 2979051 - DNA, 25 bp, Homo sapien
tcttcggaggttgctttcttgacag

SEQ ID NO: 2979052 - DNA, 25 bp, Homo sapien
gctttcttgacagtttcctcttctc

SEQ ID NO: 2979053 - DNA, 25 bp, Homo sapien
cccctcttcggaggttgctttcttg

SEQ ID NO: 2979054 - DNA, 25 bp, Homo sapien
tagactgccagtagtagtggaggcc

SEQ ID NO: 2979055 - DNA, 25 bp, Homo sapien
tttcatggatggttcatggatgtcc

SEQ ID NO: 2979056 - DNA, 25 bp, Homo sapien
gtagagggagctgataataacaaac

SEQ ID NO: 2979057 - DNA, 25 bp, Homo sapien
aggtgcagtgtagtttatagactgc

SEQ ID NO: 2979058 - DNA, 25 bp, Homo sapien
ttgaatatgaataagcgctacaggg

SEQ ID NO: 2979059 - DNA, 25 bp, Homo sapien
gggtttgcaaatgacgccaagattt

SEQ ID NO: 2979060 - DNA, 25 bp, Homo sapien
tctggtggtctctgaggttgaccct

SEQ ID NO: 2979061 - DNA, 25 bp, Homo sapien
gaccctaatgcgaattgtttcatct

SEQ ID NO: 2979062 - DNA, 25 bp, Homo sapien
gatcagaatctcacttgtcagagtt

SEQ ID NO: 2979063 - DNA, 25 bp, Homo sapien
aggatcagaatctcacttgtcagag

SEQ ID NO: 2979064 - DNA, 25 bp, Homo sapien
ggatcagaatctcacttgtcagagt

SEQ ID NO: 2979065 - DNA, 25 bp, Homo sapien
caggatcagaatctcacttgtcaga

SEQ ID NO: 2979066 - DNA, 25 bp, Homo sapien
ttggcccagtgaatacccatacagg

SEQ ID NO: 2979067 - DNA, 25 bp, Homo sapien
catgcagaaagattggcccagtgaa

SEQ ID NO: 2979068 - DNA, 25 bp, Homo sapien
atgcagaaagattggcccagtgaat

SEQ ID NO: 2979069 - DNA, 25 bp, Homo sapien
ggcccagtgaatacccatacaggga

SEQ ID NO: 2979070 - DNA, 25 bp, Homo sapien
ctggctctattctggagccacagaa

SEQ ID NO: 2979071 - DNA, 25 bp, Homo sapien
caagaagacgctcttacaaatgaac

SEQ ID NO: 2979072 - DNA, 25 bp, Homo sapien
gctctattctggagccacagaagac

SEQ ID NO: 2979073 - DNA, 25 bp, Homo sapien
tggctctattctggagccacagaag

SEQ ID NO: 2979074 - DNA, 25 bp, Homo sapien
ggggcgggaaggtggatgagcaggt

SEQ ID NO: 2979075 - DNA, 25 bp, Homo sapien
ttctcatcttttctggggccaaacg

SEQ ID NO: 2979076 - DNA, 25 bp, Homo sapien
ggcgggaaggtggatgagcaggtca

SEQ ID NO: 2979077 - DNA, 25 bp, Homo sapien
ctcatcttttctggggccaaacgcc

SEQ ID NO: 2979078 - DNA, 25 bp, Homo sapien
taattaaatttccagttccaacaga

SEQ ID NO: 2979079 - DNA, 25 bp, Homo sapien
aacagaactgccatgtggttttcac

SEQ ID NO: 2979080 - DNA, 25 bp, Homo sapien
gttccaacagaactgccatgtggtt

SEQ ID NO: 2979081 - DNA, 25 bp, Homo sapien
tccaacagaactgccatgtggtttt

SEQ ID NO: 2979082 - DNA, 25 bp, Homo sapien
aatccctagcggcagcttctgtgcc

SEQ ID NO: 2979083 - DNA, 25 bp, Homo sapien
tcctctatggccactttcacaggct

SEQ ID NO: 2979084 - DNA, 25 bp, Homo sapien
gggaagacaaatccctagcggcagc

SEQ ID NO: 2979085 - DNA, 25 bp, Homo sapien
tctatggccactttcacaggctgag

SEQ ID NO: 2979086 - DNA, 25 bp, Homo sapien
tactgagattgtcacgatggccact

SEQ ID NO: 2979087 - DNA, 25 bp, Homo sapien
tgggttcgtgcaccagatcttctgc

SEQ ID NO: 2979088 - DNA, 25 bp, Homo sapien
gatggccacttctgcgtccatcgca

SEQ ID NO: 2979089 - DNA, 25 bp, Homo sapien
tcagcatccctacttgagagttggt

SEQ ID NO: 2979090 - DNA, 25 bp, Homo sapien
cctaatgggagtgtgcacggactca

SEQ ID NO: 2979091 - DNA, 25 bp, Homo sapien
taaggccaaggcttctgccaaggac

SEQ ID NO: 2979092 - DNA, 25 bp, Homo sapien
gctcctgacatctcgtgggaagagg

SEQ ID NO: 2979093 - DNA, 25 bp, Homo sapien
tggccatacatacgttcagtccttg

SEQ ID NO: 2979094 - DNA, 25 bp, Homo sapien
aaagtcaggctgtccacaagagagg

SEQ ID NO: 2979095 - DNA, 25 bp, Homo sapien
tgagcttgcactgggattggaggaa

SEQ ID NO: 2979096 - DNA, 25 bp, Homo sapien
ggagagatactctgcatgtctgaag

SEQ ID NO: 2979097 - DNA, 25 bp, Homo sapien
cgtgcctacgtactgcagaaagcag

SEQ ID NO: 2979098 - DNA, 25 bp, Homo sapien
acctggtggcctcgtgctctcagga

SEQ ID NO: 2979099 - DNA, 25 bp, Homo sapien
tagtgcagatgtctggtcggcccag

SEQ ID NO: 2979100 - DNA, 25 bp, Homo sapien
ggtcactatattgatcatgttgatg

SEQ ID NO: 2979101 - DNA, 25 bp, Homo sapien
tcctcttatcttaggcacacgggaa

SEQ ID NO: 2979102 - DNA, 25 bp, Homo sapien
attacagacatctgccacaaaaccc

SEQ ID NO: 2979103 - DNA, 25 bp, Homo sapien
acagacatctgccacaaaacccggc

SEQ ID NO: 2979104 - DNA, 25 bp, Homo sapien
gacatctgccacaaaacccggctaa

SEQ ID NO: 2979105 - DNA, 25 bp, Homo sapien
acatctgccacaaaacccggctaat

SEQ ID NO: 2979106 - DNA, 25 bp, Homo sapien
ggagagcccgagacgatgacatttt

SEQ ID NO: 2979107 - DNA, 25 bp, Homo sapien
gagcagcacaaatcggctcagctgg

SEQ ID NO: 2979108 - DNA, 25 bp, Homo sapien
cacgtgtgcgcctttccgtctggaa

SEQ ID NO: 2979109 - DNA, 25 bp, Homo sapien
aagactgtagtgtctgctccggcca

SEQ ID NO: 2979110 - DNA, 25 bp, Homo sapien
gaaccaggctcgcactctggagatc

SEQ ID NO: 2979111 - DNA, 25 bp, Homo sapien
tgggcaactttgtcccgaaccaggc

SEQ ID NO: 2979112 - DNA, 25 bp, Homo sapien
gtggctcacaccactaggttgggca

SEQ ID NO: 2979113 - DNA, 25 bp, Homo sapien
tctggagatccttgagcggttcctc

SEQ ID NO: 2979114 - DNA, 25 bp, Homo sapien
tccttgggaatgaacagtagactgg

SEQ ID NO: 2979115 - DNA, 25 bp, Homo sapien
gacattacttatgcagaaagcggca

SEQ ID NO: 2979116 - DNA, 25 bp, Homo sapien
tgaacacacgtgagctatgcagcag

SEQ ID NO: 2979117 - DNA, 25 bp, Homo sapien
tggactcccgggaacatttctggca

SEQ ID NO: 2979118 - DNA, 25 bp, Homo sapien
ccccagtgggtgaatggcaatagag

SEQ ID NO: 2979119 - DNA, 25 bp, Homo sapien
cataggagccaaggtcgggtcttcc

SEQ ID NO: 2979120 - DNA, 25 bp, Homo sapien
ttgtcagaagccatggaccaacagt

SEQ ID NO: 2979121 - DNA, 25 bp, Homo sapien
gctctgatgtcaagggctatggcac

SEQ ID NO: 2979122 - DNA, 25 bp, Homo sapien
tatgatccagataattaaggccggg

SEQ ID NO: 2979123 - DNA, 25 bp, Homo sapien
ccaagaaggtaacactatgatccag

SEQ ID NO: 2979124 - DNA, 25 bp, Homo sapien
tgcaaggcacgatgtataaatcagc

SEQ ID NO: 2979125 - DNA, 25 bp, Homo sapien
taacagttggttacatgggccaggg

SEQ ID NO: 2979126 - DNA, 25 bp, Homo sapien
gaagaggtggaaaccttgccagaac

SEQ ID NO: 2979127 - DNA, 25 bp, Homo sapien
gctcagtcagtgtgctgtgcagcag

SEQ ID NO: 2979128 - DNA, 25 bp, Homo sapien
caagcgaggagcagaatgcaaacat

SEQ ID NO: 2979129 - DNA, 25 bp, Homo sapien
tgccagaacaggtctccaaagtttc

SEQ ID NO: 2979130 - DNA, 25 bp, Homo sapien
gctggaattccccactagtgacgac

SEQ ID NO: 2979131 - DNA, 25 bp, Homo sapien
tgcccagctgtctcgattgggtcac

SEQ ID NO: 2979132 - DNA, 25 bp, Homo sapien
cctgcacaggttgcatttcgggaaa

SEQ ID NO: 2979133 - DNA, 25 bp, Homo sapien
tagtgacgacttctcctcgcaggtg

SEQ ID NO: 2979134 - DNA, 25 bp, Homo sapien
tgctcctacgctcagacatatctgg

SEQ ID NO: 2979135 - DNA, 25 bp, Homo sapien
tttgtgatcccggtcatccgcggac

SEQ ID NO: 2979136 - DNA, 25 bp, Homo sapien
tgccgaggctgcagaatagaatctc

SEQ ID NO: 2979137 - DNA, 25 bp, Homo sapien
cagagatttagtaccttgcacatgt

SEQ ID NO: 2979138 - DNA, 25 bp, Homo sapien
ccttgggaataagggtgggcttcat

SEQ ID NO: 2979139 - DNA, 25 bp, Homo sapien
tcataaggataattaccatttgacc

SEQ ID NO: 2979140 - DNA, 25 bp, Homo sapien
ttactgtgaagcaatcccgttgctg

SEQ ID NO: 2979141 - DNA, 25 bp, Homo sapien
gaagacattttgtggatgtcattaa

SEQ ID NO: 2979142 - DNA, 25 bp, Homo sapien
tccctttgagctgggccaatttcta

SEQ ID NO: 2979143 - DNA, 25 bp, Homo sapien
tagatactgccttctggacgccagg

SEQ ID NO: 2979144 - DNA, 25 bp, Homo sapien
gtgatcatcaacaccacatgtggtt

SEQ ID NO: 2979145 - DNA, 25 bp, Homo sapien
gggcaatctggtccctttgagctgg

SEQ ID NO: 2979146 - DNA, 25 bp, Homo sapien
agaatccacgccccgttgccctgct

SEQ ID NO: 2979147 - DNA, 25 bp, Homo sapien
tgcttcagggatgtgacctttcttc

SEQ ID NO: 2979148 - DNA, 25 bp, Homo sapien
tttaagagaatccacgccccgttgc

SEQ ID NO: 2979149 - DNA, 25 bp, Homo sapien
gctgcttcagggatgtgacctttct

SEQ ID NO: 2979150 - DNA, 25 bp, Homo sapien
ttaaactgattgtggttgtagccac

SEQ ID NO: 2979151 - DNA, 25 bp, Homo sapien
taaactgattgtggttgtagccaca

SEQ ID NO: 2979152 - DNA, 25 bp, Homo sapien
cattaaactgattgtggttgtagcc

SEQ ID NO: 2979153 - DNA, 25 bp, Homo sapien
ctcattaaactgattgtggttgtag

SEQ ID NO: 2979154 - DNA, 25 bp, Homo sapien
tgctcccgggcggtgtccgcaacaa

SEQ ID NO: 2979155 - DNA, 25 bp, Homo sapien
aggcctgagtggcaaagctccagcc

SEQ ID NO: 2979156 - DNA, 25 bp, Homo sapien
gagcagaaggtcttgacctcaaagc

SEQ ID NO: 2979157 - DNA, 25 bp, Homo sapien
cggtgtccgcaacaagaggcttccg

SEQ ID NO: 2979158 - DNA, 25 bp, Homo sapien
acccacagagccatacatgccaaag

SEQ ID NO: 2979159 - DNA, 25 bp, Homo sapien
caggagtgcagagcggccagaggcc

SEQ ID NO: 2979160 - DNA, 25 bp, Homo sapien
agagccatacatgccaaaggtgggc

SEQ ID NO: 2979161 - DNA, 25 bp, Homo sapien
ttctccccgactgccaggagtgcag

SEQ ID NO: 2979162 - DNA, 25 bp, Homo sapien
tctgtgcaatcctgtgcgtatggtc

SEQ ID NO: 2979163 - DNA, 25 bp, Homo sapien
taagcccagggtaatttcaacagtc

SEQ ID NO: 2979164 - DNA, 25 bp, Homo sapien
gcgtatggtcttgctctcagtgcag

SEQ ID NO: 2979165 - DNA, 25 bp, Homo sapien
tggaaatctgagctgagtattggct

SEQ ID NO: 2979166 - DNA, 25 bp, Homo sapien
caggagagttcggagcattggttga

SEQ ID NO: 2979167 - DNA, 25 bp, Homo sapien
tgcaggagagttcggagcattggtt

SEQ ID NO: 2979168 - DNA, 25 bp, Homo sapien
gcgtgcaggagagttcggagcattg

SEQ ID NO: 2979169 - DNA, 25 bp, Homo sapien
cgtgcaggagagttcggagcattgg

SEQ ID NO: 2979170 - DNA, 25 bp, Homo sapien
tcacaggtagagaccttcggtgtta

SEQ ID NO: 2979171 - DNA, 25 bp, Homo sapien
gatcccttgccatgagaactggacc

SEQ ID NO: 2979172 - DNA, 25 bp, Homo sapien
gttaataggcagatcccttgccatg

SEQ ID NO: 2979173 - DNA, 25 bp, Homo sapien
tgagaactggacctaggttcaaggt

SEQ ID NO: 2979174 - DNA, 25 bp, Homo sapien
tgaagaaccaactgagaccatgtcc

SEQ ID NO: 2979175 - DNA, 25 bp, Homo sapien
ttgtatgaagaaccaactgagacca

SEQ ID NO: 2979176 - DNA, 25 bp, Homo sapien
caggatggtagggttgtatgaagaa

SEQ ID NO: 2979177 - DNA, 25 bp, Homo sapien
accatgtccttctgagtgttgtgga

SEQ ID NO: 2979178 - DNA, 25 bp, Homo sapien
tattaactgactgatgctgttgact

SEQ ID NO: 2979179 - DNA, 25 bp, Homo sapien
tgttgactggtttagccaatctgca

SEQ ID NO: 2979180 - DNA, 25 bp, Homo sapien
tctgcattcagagcttttgcgtctg

SEQ ID NO: 2979181 - DNA, 25 bp, Homo sapien
ttttgcgtctggttacttcgttggc

SEQ ID NO: 2979182 - DNA, 25 bp, Homo sapien
tcatcaggctctcggaccttagggc

SEQ ID NO: 2979183 - DNA, 25 bp, Homo sapien
catacacacctgacaatagcttgag

SEQ ID NO: 2979184 - DNA, 25 bp, Homo sapien
gaacactgtcgttcattgcagccgt

SEQ ID NO: 2979185 - DNA, 25 bp, Homo sapien
gaaggctcgtgttctccatcctcaa

SEQ ID NO: 2979186 - DNA, 25 bp, Homo sapien
tctggtcttgctggtatggagcaat

SEQ ID NO: 2979187 - DNA, 25 bp, Homo sapien
gagcaattggacgtcttcttccttg

SEQ ID NO: 2979188 - DNA, 25 bp, Homo sapien
aggaacctggaacagaatcctgggt

SEQ ID NO: 2979189 - DNA, 25 bp, Homo sapien
cctgttggaaatccttaggcacaga

SEQ ID NO: 2979190 - DNA, 25 bp, Homo sapien
ggatggtccagctcctaagatgtcc

SEQ ID NO: 2979191 - DNA, 25 bp, Homo sapien
gggcctcgacaactcatgaactctg

SEQ ID NO: 2979192 - DNA, 25 bp, Homo sapien
ttagcatcttaagtaggagggtcac

SEQ ID NO: 2979193 - DNA, 25 bp, Homo sapien
cactcttgtgtcgttgagtccctga

SEQ ID NO: 2979194 - DNA, 25 bp, Homo sapien
tgcctggtctcaaagtcactgtttc

SEQ ID NO: 2979195 - DNA, 25 bp, Homo sapien
ggccaggactctgtccggccaggtc

SEQ ID NO: 2979196 - DNA, 25 bp, Homo sapien
ccaggtccccgacttgttctaaatg

SEQ ID NO: 2979197 - DNA, 25 bp, Homo sapien
tcctggcctgattgccaaaggggag

SEQ ID NO: 2979198 - DNA, 25 bp, Homo sapien
gtgggcagtagaggccaacagggaa

SEQ ID NO: 2979199 - DNA, 25 bp, Homo sapien
ggtgggcagtagaggccaacaggga

SEQ ID NO: 2979200 - DNA, 25 bp, Homo sapien
gggtgggcagtagaggccaacaggg

SEQ ID NO: 2979201 - DNA, 25 bp, Homo sapien
ctgggtgggcagtagaggccaacag

SEQ ID NO: 2979202 - DNA, 25 bp, Homo sapien
gatccaaacaactcagaggtcccac

SEQ ID NO: 2979203 - DNA, 25 bp, Homo sapien
ttctctcccatatcaatgggcagtc

SEQ ID NO: 2979204 - DNA, 25 bp, Homo sapien
ggcagtcctgctcggtgacccagat

SEQ ID NO: 2979205 - DNA, 25 bp, Homo sapien
tctcccatatcaatgggcagtcctg

SEQ ID NO: 2979206 - DNA, 25 bp, Homo sapien
ctgcggcttaagagcttcttgggcc

SEQ ID NO: 2979207 - DNA, 25 bp, Homo sapien
accaccgggtgggtgtgctttgtct

SEQ ID NO: 2979208 - DNA, 25 bp, Homo sapien
tctccctttcttagtgggttgggca

SEQ ID NO: 2979209 - DNA, 25 bp, Homo sapien
gttgggcaggcgcaaaaatagatcc

SEQ ID NO: 2979210 - DNA, 25 bp, Homo sapien
cacagagggagtggcgatgccactt

SEQ ID NO: 2979211 - DNA, 25 bp, Homo sapien
tcttccgctcccagaccaatggccc

SEQ ID NO: 2979212 - DNA, 25 bp, Homo sapien
cttccgctcccagaccaatggccca

SEQ ID NO: 2979213 - DNA, 25 bp, Homo sapien
ttccgctcccagaccaatggcccag

SEQ ID NO: 2979214 - DNA, 25 bp, Homo sapien
tttctcccaaggttgagtgtgtttc

SEQ ID NO: 2979215 - DNA, 25 bp, Homo sapien
ctcccaaggttgagtgtgtttctga

SEQ ID NO: 2979216 - DNA, 25 bp, Homo sapien
gtttctgagtgatcccgccaggctc

SEQ ID NO: 2979217 - DNA, 25 bp, Homo sapien
gagtgtgtttctgagtgatcccgcc

SEQ ID NO: 2979218 - DNA, 25 bp, Homo sapien
tgataatgtcaaacgccacggtgcc

SEQ ID NO: 2979219 - DNA, 25 bp, Homo sapien
tagaatgacatcgatggtggtgata

SEQ ID NO: 2979220 - DNA, 25 bp, Homo sapien
gactgattctgaacaaccgtgactc

SEQ ID NO: 2979221 - DNA, 25 bp, Homo sapien
gccacggtgccacatctcagggact

SEQ ID NO: 2979222 - DNA, 25 bp, Homo sapien
aaggagcacacggtaggtgcccaga

SEQ ID NO: 2979223 - DNA, 25 bp, Homo sapien
gccttccagctagagccttgagagt

SEQ ID NO: 2979224 - DNA, 25 bp, Homo sapien
cctttcttcactgctcatcctggga

SEQ ID NO: 2979225 - DNA, 25 bp, Homo sapien
ccagctagagccttgagagtgggat

SEQ ID NO: 2979226 - DNA, 25 bp, Homo sapien
gtctggcactgaggaaccactccgt

SEQ ID NO: 2979227 - DNA, 25 bp, Homo sapien
tattaaactcctatgtgcttgcggg

SEQ ID NO: 2979228 - DNA, 25 bp, Homo sapien
taggatcataggagtaaaagaccca

SEQ ID NO: 2979229 - DNA, 25 bp, Homo sapien
gaacaacttggcactgtggcattag

SEQ ID NO: 2979230 - DNA, 25 bp, Homo sapien
gaaccactaggtggtgtatggctcc

SEQ ID NO: 2979231 - DNA, 25 bp, Homo sapien
ggaggagagggctcttctatcttgg

SEQ ID NO: 2979232 - DNA, 25 bp, Homo sapien
gtgttgagctgggaaccactaggtg

SEQ ID NO: 2979233 - DNA, 25 bp, Homo sapien
gggctcttctatcttggttggaggt

SEQ ID NO: 2979234 - DNA, 25 bp, Homo sapien
ggtgccggggcctcggatgaacttg

SEQ ID NO: 2979235 - DNA, 25 bp, Homo sapien
gtgccggggcctcggatgaacttgc

SEQ ID NO: 2979236 - DNA, 25 bp, Homo sapien
gcagctgttggagcttctgcctggc

SEQ ID NO: 2979237 - DNA, 25 bp, Homo sapien
agctgttggagcttctgcctggcca

SEQ ID NO: 2979238 - DNA, 25 bp, Homo sapien
gatgtatcctccgtgtttatgctgc

SEQ ID NO: 2979239 - DNA, 25 bp, Homo sapien
aattatcttttataggcctgggtgt

SEQ ID NO: 2979240 - DNA, 25 bp, Homo sapien
ctgggtgtgatgtatcctccgtgtt

SEQ ID NO: 2979241 - DNA, 25 bp, Homo sapien
cttttataggcctgggtgtgatgta

SEQ ID NO: 2979242 - DNA, 25 bp, Homo sapien
ctaatgggtacggacaccgtattca

SEQ ID NO: 2979243 - DNA, 25 bp, Homo sapien
cggacaccgtattcaatgggtatcc

SEQ ID NO: 2979244 - DNA, 25 bp, Homo sapien
gtacggacaccgtattcaatgggta

SEQ ID NO: 2979245 - DNA, 25 bp, Homo sapien
tgggtacggacaccgtattcaatgg

SEQ ID NO: 2979246 - DNA, 25 bp, Homo sapien
gcagcgttcaaccacagtgacatca

SEQ ID NO: 2979247 - DNA, 25 bp, Homo sapien
tgggagcagcgttcaaccacagtga

SEQ ID NO: 2979248 - DNA, 25 bp, Homo sapien
gttcaaccacagtgacatcatgatc

SEQ ID NO: 2979249 - DNA, 25 bp, Homo sapien
ctgccaggggatgctcggcctctgt

SEQ ID NO: 2979250 - DNA, 25 bp, Homo sapien
cagagctgtaaggaccaagggtgtc

SEQ ID NO: 2979251 - DNA, 25 bp, Homo sapien
agccgtgaccgcttcgacagggacc

SEQ ID NO: 2979252 - DNA, 25 bp, Homo sapien
ccaagggtgtctggcggtgagccgt

SEQ ID NO: 2979253 - DNA, 25 bp, Homo sapien
ctgaagcagtgtttcttttcatggg

SEQ ID NO: 2979254 - DNA, 25 bp, Homo sapien
tgggatgttcctcctagcatagacg

SEQ ID NO: 2979255 - DNA, 25 bp, Homo sapien
tcctcctagcatagacggcaaaaat

SEQ ID NO: 2979256 - DNA, 25 bp, Homo sapien
tgttcctcctagcatagacggcaaa

SEQ ID NO: 2979257 - DNA, 25 bp, Homo sapien
gatgttcctcctagcatagacggca

SEQ ID NO: 2979258 - DNA, 25 bp, Homo sapien
caagtgatataaatcccatggggtg

SEQ ID NO: 2979259 - DNA, 25 bp, Homo sapien
ttttctgaacaagtgatataaatcc

SEQ ID NO: 2979260 - DNA, 25 bp, Homo sapien
ttctgaacaagtgatataaatccca

SEQ ID NO: 2979261 - DNA, 25 bp, Homo sapien
gtttttctgaacaagtgatataaat

SEQ ID NO: 2979262 - DNA, 25 bp, Homo sapien
caggtggtcactggtaaattgcaca

SEQ ID NO: 2979263 - DNA, 25 bp, Homo sapien
tggtcactggtaaattgcacaaggc

SEQ ID NO: 2979264 - DNA, 25 bp, Homo sapien
gggccctgtggcttgccaggtggtc

SEQ ID NO: 2979265 - DNA, 25 bp, Homo sapien
attgcacaaggcttactccagtggt

SEQ ID NO: 2979266 - DNA, 25 bp, Homo sapien
gaacatgaggcaggtgatggaaccc

SEQ ID NO: 2979267 - DNA, 25 bp, Homo sapien
tttgaggagatcttgaatgatccac

SEQ ID NO: 2979268 - DNA, 25 bp, Homo sapien
tcttgaatgatccactgaggaacat

SEQ ID NO: 2979269 - DNA, 25 bp, Homo sapien
aatgatccactgaggaacatgaggc

SEQ ID NO: 2979270 - DNA, 25 bp, Homo sapien
ctgcagactgctgagtttgagaccc

SEQ ID NO: 2979271 - DNA, 25 bp, Homo sapien
tgcagactgctgagtttgagacccc

SEQ ID NO: 2979272 - DNA, 25 bp, Homo sapien
attcctgtttgctacctggtcctgc

SEQ ID NO: 2979273 - DNA, 25 bp, Homo sapien
ttcagtggtgacaaggaggaagcag

SEQ ID NO: 2979274 - DNA, 25 bp, Homo sapien
ctgcagccacgtggctgtggacagc

SEQ ID NO: 2979275 - DNA, 25 bp, Homo sapien
tgcagccacgtggctgtggacagct

SEQ ID NO: 2979276 - DNA, 25 bp, Homo sapien
gccacgtggctgtggacagctgcat

SEQ ID NO: 2979277 - DNA, 25 bp, Homo sapien
cagccacgtggctgtggacagctgc

SEQ ID NO: 2979278 - DNA, 25 bp, Homo sapien
ggctgtgtttggagcgggcaaccac

SEQ ID NO: 2979279 - DNA, 25 bp, Homo sapien
gctgtgtttggagcgggcaaccaca

SEQ ID NO: 2979280 - DNA, 25 bp, Homo sapien
gtgtttggagcgggcaaccacaacc

SEQ ID NO: 2979281 - DNA, 25 bp, Homo sapien
tttggagcgggcaaccacaaccaca

SEQ ID NO: 2979282 - DNA, 25 bp, Homo sapien
gattaggaaacgtgtcaatgtgagg

SEQ ID NO: 2979283 - DNA, 25 bp, Homo sapien
ccagaggattaggaaacgtgtcaat

SEQ ID NO: 2979284 - DNA, 25 bp, Homo sapien
ctaagtttggctccgaggtggtgac

SEQ ID NO: 2979285 - DNA, 25 bp, Homo sapien
ttgctctgcgtttgccagaggatta

SEQ ID NO: 2979286 - DNA, 25 bp, Homo sapien
ctttttcccaccaaagcttgcaaag

SEQ ID NO: 2979287 - DNA, 25 bp, Homo sapien
ccaccaaagcttgcaaagtctctaa

SEQ ID NO: 2979288 - DNA, 25 bp, Homo sapien
cccaccaaagcttgcaaagtctcta

SEQ ID NO: 2979289 - DNA, 25 bp, Homo sapien
tcccaccaaagcttgcaaagtctct

SEQ ID NO: 2979290 - DNA, 25 bp, Homo sapien
gggcctgcgatgaaacttgcactct

SEQ ID NO: 2979291 - DNA, 25 bp, Homo sapien
ttgaggaggtaagcagaggccagac

SEQ ID NO: 2979292 - DNA, 25 bp, Homo sapien
agttccagggttgaggaggtaagca

SEQ ID NO: 2979293 - DNA, 25 bp, Homo sapien
cagaccgccctggaagtttgcgtaa

SEQ ID NO: 2979294 - DNA, 25 bp, Homo sapien
tgaatgcggtagctgtgtccccggc

SEQ ID NO: 2979295 - DNA, 25 bp, Homo sapien
tggtctctgaatgcggtagctgtgt

SEQ ID NO: 2979296 - DNA, 25 bp, Homo sapien
tttggatgcagggtgtgattcttag

SEQ ID NO: 2979297 - DNA, 25 bp, Homo sapien
agccaggttaatgggacaatcttcc

SEQ ID NO: 2979298 - DNA, 25 bp, Homo sapien
aacgcccttttgatccaagattgag

SEQ ID NO: 2979299 - DNA, 25 bp, Homo sapien
caagattgagtaagagacattggca

SEQ ID NO: 2979300 - DNA, 25 bp, Homo sapien
gacctgatgtcagaggcggagaact

SEQ ID NO: 2979301 - DNA, 25 bp, Homo sapien
acagcacgatgctaacagctggacc

SEQ ID NO: 2979302 - DNA, 25 bp, Homo sapien
tcagaggatacccaactccatggca

SEQ ID NO: 2979303 - DNA, 25 bp, Homo sapien
ggcagagcctactactttcacggtc

SEQ ID NO: 2979304 - DNA, 25 bp, Homo sapien
tactttcacggtcatgtccccactg

SEQ ID NO: 2979305 - DNA, 25 bp, Homo sapien
gcctactactttcacggtcatgtcc

SEQ ID NO: 2979306 - DNA, 25 bp, Homo sapien
ccaggatggagatctgcaagtcaat

SEQ ID NO: 2979307 - DNA, 25 bp, Homo sapien
cgttggttttatgcacggtttgaag

SEQ ID NO: 2979308 - DNA, 25 bp, Homo sapien
ataactagcaaggcttcaaagcatt

SEQ ID NO: 2979309 - DNA, 25 bp, Homo sapien
tgcacggtttgaagcggagaccctt

SEQ ID NO: 2979310 - DNA, 25 bp, Homo sapien
gttcagtggcacaaagcacatttat

SEQ ID NO: 2979311 - DNA, 25 bp, Homo sapien
tatccccatgaaacaatcatttccc

SEQ ID NO: 2979312 - DNA, 25 bp, Homo sapien
tgcctggcccccatgttaaccaggt

SEQ ID NO: 2979313 - DNA, 25 bp, Homo sapien
acatttatactgttgcacaaccatc

SEQ ID NO: 2979314 - DNA, 25 bp, Homo sapien
cccctgagcttcgaagaagagctct

SEQ ID NO: 2979315 - DNA, 25 bp, Homo sapien
ggcattgaggagcaggtccaaatgg

SEQ ID NO: 2979316 - DNA, 25 bp, Homo sapien
cagctgtggcgagggaggtgtcagc

SEQ ID NO: 2979317 - DNA, 25 bp, Homo sapien
cttgctgtgggtctcacactcttcc

SEQ ID NO: 2979318 - DNA, 25 bp, Homo sapien
aactgtgctatccattctgggtcct

SEQ ID NO: 2979319 - DNA, 25 bp, Homo sapien
tctgatctggcagtcataaccctta

SEQ ID NO: 2979320 - DNA, 25 bp, Homo sapien
ttctgggtcctcttagccaggggtg

SEQ ID NO: 2979321 - DNA, 25 bp, Homo sapien
cataacccttatcccgttccttgag

SEQ ID NO: 2979322 - DNA, 25 bp, Homo sapien
ttgccagtttctagaccatccaagt

SEQ ID NO: 2979323 - DNA, 25 bp, Homo sapien
tggccgtattgactctggccgcccg

SEQ ID NO: 2979324 - DNA, 25 bp, Homo sapien
ctgggcattgtaccaccggctgatg

SEQ ID NO: 2979325 - DNA, 25 bp, Homo sapien
taccaccggctgatgcgattttcct

SEQ ID NO: 2979326 - DNA, 25 bp, Homo sapien
ttcgctgttgggatcctgtttcaca

SEQ ID NO: 2979327 - DNA, 25 bp, Homo sapien
gctgttgggatcctgtttcacagtg

SEQ ID NO: 2979328 - DNA, 25 bp, Homo sapien
gggttcgctgttgggatcctgtttc

SEQ ID NO: 2979329 - DNA, 25 bp, Homo sapien
tgccagggttcgctgttgggatcct

SEQ ID NO: 2979330 - DNA, 25 bp, Homo sapien
gccagcaggagtcatcggacaatgt

SEQ ID NO: 2979331 - DNA, 25 bp, Homo sapien
tccgaacctgtgtggtcagaatcac

SEQ ID NO: 2979332 - DNA, 25 bp, Homo sapien
gggcctgtttagccccttcaggctg

SEQ ID NO: 2979333 - DNA, 25 bp, Homo sapien
cagaatcacacaggacaaaccaggg

SEQ ID NO: 2979334 - DNA, 25 bp, Homo sapien
gttctccatgcaggacggtgccctg

SEQ ID NO: 2979335 - DNA, 25 bp, Homo sapien
tctcgcctgttctttcatagcagag

SEQ ID NO: 2979336 - DNA, 25 bp, Homo sapien
cctgttctttcatagcagagggagc

SEQ ID NO: 2979337 - DNA, 25 bp, Homo sapien
tcgcctgttctttcatagcagaggg

SEQ ID NO: 2979338 - DNA, 25 bp, Homo sapien
agagggagccgcttagcacaaggga

SEQ ID NO: 2979339 - DNA, 25 bp, Homo sapien
actatctggagtggcctttactgtg

SEQ ID NO: 2979340 - DNA, 25 bp, Homo sapien
ggtcatgtaaaccagagatgccctg

SEQ ID NO: 2979341 - DNA, 25 bp, Homo sapien
ctgcctctgcaagtgagtgtcatca

SEQ ID NO: 2979342 - DNA, 25 bp, Homo sapien
tgtgaatggcctcgagttgccgtag

SEQ ID NO: 2979343 - DNA, 25 bp, Homo sapien
tctcagtggacacacggcttccagt

SEQ ID NO: 2979344 - DNA, 25 bp, Homo sapien
catttgtgatagctatagctgggaa

SEQ ID NO: 2979345 - DNA, 25 bp, Homo sapien
tgctgagcaatctttagagaacatc

SEQ ID NO: 2979346 - DNA, 25 bp, Homo sapien
tgggctcattacaccgcgtattggg

SEQ ID NO: 2979347 - DNA, 25 bp, Homo sapien
tgactctgttgtgaggttccccaga

SEQ ID NO: 2979348 - DNA, 25 bp, Homo sapien
cgtgcagtaatgctcacccctagac

SEQ ID NO: 2979349 - DNA, 25 bp, Homo sapien
acctctggccagtagcttgggtgcg

SEQ ID NO: 2979350 - DNA, 25 bp, Homo sapien
acattgattgactctcccctggtca

SEQ ID NO: 2979351 - DNA, 25 bp, Homo sapien
aatgcggttaaccaaggagctgaag

SEQ ID NO: 2979352 - DNA, 25 bp, Homo sapien
gaagcggtccgggtttctcattcca

SEQ ID NO: 2979353 - DNA, 25 bp, Homo sapien
ccaggaatgcggttaaccaaggagc

SEQ ID NO: 2979354 - DNA, 25 bp, Homo sapien
gactgctgggcgctttgggctttcc

SEQ ID NO: 2979355 - DNA, 25 bp, Homo sapien
aagcctttctggtttacctccactg

SEQ ID NO: 2979356 - DNA, 25 bp, Homo sapien
cctccactggtctgggcccccgcat

SEQ ID NO: 2979357 - DNA, 25 bp, Homo sapien
ctccccttgttcttttgtgtctgcc

SEQ ID NO: 2979358 - DNA, 25 bp, Homo sapien
tcctccccttgttcttttgtgtctg

SEQ ID NO: 2979359 - DNA, 25 bp, Homo sapien
cctccccttgttcttttgtgtctgc

SEQ ID NO: 2979360 - DNA, 25 bp, Homo sapien
ctcctccccttgttcttttgtgtct

SEQ ID NO: 2979361 - DNA, 25 bp, Homo sapien
ctgaaagcataccgcttctgtatcc

SEQ ID NO: 2979362 - DNA, 25 bp, Homo sapien
tgaaagcataccgcttctgtatcca

SEQ ID NO: 2979363 - DNA, 25 bp, Homo sapien
gaaagcataccgcttctgtatccat

SEQ ID NO: 2979364 - DNA, 25 bp, Homo sapien
cttgagtctggaactgaaagcatac

SEQ ID NO: 2979365 - DNA, 25 bp, Homo sapien
ggcgtttggcaagcagctttccggc

SEQ ID NO: 2979366 - DNA, 25 bp, Homo sapien
gcaagcagctttccggcgaggactg

SEQ ID NO: 2979367 - DNA, 25 bp, Homo sapien
gctgacgctggtacgcgtttggcca

SEQ ID NO: 2979368 - DNA, 25 bp, Homo sapien
aggactgggccacccgtcaggctga

SEQ ID NO: 2979369 - DNA, 25 bp, Homo sapien
ccttcagcctctagcgctgccaagc

SEQ ID NO: 2979370 - DNA, 25 bp, Homo sapien
gttctcggccgttgtccttcagcct

SEQ ID NO: 2979371 - DNA, 25 bp, Homo sapien
cctgggcgttctcggccgttgtcct

SEQ ID NO: 2979372 - DNA, 25 bp, Homo sapien
gggcgttctcggccgttgtccttca

SEQ ID NO: 2979373 - DNA, 25 bp, Homo sapien
acacggtggtcagcgaccaccccat

SEQ ID NO: 2979374 - DNA, 25 bp, Homo sapien
gacacggtggtcagcgaccacccca

SEQ ID NO: 2979375 - DNA, 25 bp, Homo sapien
gggacacggtggtcagcgaccaccc

SEQ ID NO: 2979376 - DNA, 25 bp, Homo sapien
ctgggacacggtggtcagcgaccac

SEQ ID NO: 2979377 - DNA, 25 bp, Homo sapien
tgcgcggggaagaaaggcgaggagc

SEQ ID NO: 2979378 - DNA, 25 bp, Homo sapien
gggatctttggttggcgctggcgat

SEQ ID NO: 2979379 - DNA, 25 bp, Homo sapien
acgagtaggcgggatgcgctcgctt

SEQ ID NO: 2979380 - DNA, 25 bp, Homo sapien
atgcgctcgcttggtcctccgggcg

SEQ ID NO: 2979381 - DNA, 25 bp, Homo sapien
ttcctctccagcaatcccaccgtgg

SEQ ID NO: 2979382 - DNA, 25 bp, Homo sapien
cagtgattttgtgatttcatcttgc

SEQ ID NO: 2979383 - DNA, 25 bp, Homo sapien
tcctgtcacagcctcagtgattttg

SEQ ID NO: 2979384 - DNA, 25 bp, Homo sapien
cacgcccaacctgatgccttctttt

SEQ ID NO: 2979385 - DNA, 25 bp, Homo sapien
tcggagacttgtacatggggccaac

SEQ ID NO: 2979386 - DNA, 25 bp, Homo sapien
acctcatcggagacttgtacatggg

SEQ ID NO: 2979387 - DNA, 25 bp, Homo sapien
gagacttgtacatggggccaacccc

SEQ ID NO: 2979388 - DNA, 25 bp, Homo sapien
gacctcatcggagacttgtacatgg

SEQ ID NO: 2979389 - DNA, 25 bp, Homo sapien
tttgagcggcttccaccttcgttcc

SEQ ID NO: 2979390 - DNA, 25 bp, Homo sapien
gtttcatcaactgaagcagtttgca

SEQ ID NO: 2979391 - DNA, 25 bp, Homo sapien
cagattattaatgtaccagttgttg

SEQ ID NO: 2979392 - DNA, 25 bp, Homo sapien
tattacaattgagaaaagtttcatc

SEQ ID NO: 2979393 - DNA, 25 bp, Homo sapien
cacatgtcgaagagggcacagtgga

SEQ ID NO: 2979394 - DNA, 25 bp, Homo sapien
ccctgaggctttaagcctgggtggc

SEQ ID NO: 2979395 - DNA, 25 bp, Homo sapien
cctgaggctttaagcctgggtggcc

SEQ ID NO: 2979396 - DNA, 25 bp, Homo sapien
ctgaggctttaagcctgggtggcca

SEQ ID NO: 2979397 - DNA, 25 bp, Homo sapien
gccgcataagggagcgtttgttctg

SEQ ID NO: 2979398 - DNA, 25 bp, Homo sapien
acaaaccgagagacgccgtgggagc

SEQ ID NO: 2979399 - DNA, 25 bp, Homo sapien
gcagctgtctccgacaaaccgagag

SEQ ID NO: 2979400 - DNA, 25 bp, Homo sapien
catagcgtgctttgggcagctgtct

SEQ ID NO: 2979401 - DNA, 25 bp, Homo sapien
tacactcattgggtcatgcttcatt

SEQ ID NO: 2979402 - DNA, 25 bp, Homo sapien
ttgcagaaggcccttctgtgagtac

SEQ ID NO: 2979403 - DNA, 25 bp, Homo sapien
tgcgctgggctacactcattgggtc

SEQ ID NO: 2979404 - DNA, 25 bp, Homo sapien
tcatttttgcagaaggcccttctgt

SEQ ID NO: 2979405 - DNA, 25 bp, Homo sapien
agccacgacgctgagtaggagatgg

SEQ ID NO: 2979406 - DNA, 25 bp, Homo sapien
ctgagggtagccacgacgctgagta

SEQ ID NO: 2979407 - DNA, 25 bp, Homo sapien
ggtagccacgacgctgagtaggaga

SEQ ID NO: 2979408 - DNA, 25 bp, Homo sapien
tagccacgacgctgagtaggagatg

SEQ ID NO: 2979409 - DNA, 25 bp, Homo sapien
ttcacaatcctgggcttcacgaggg

SEQ ID NO: 2979410 - DNA, 25 bp, Homo sapien
gtttttcacaatcctgggcttcacg

SEQ ID NO: 2979411 - DNA, 25 bp, Homo sapien
tgtttttcacaatcctgggcttcac

SEQ ID NO: 2979412 - DNA, 25 bp, Homo sapien
ttttcacaatcctgggcttcacgag

SEQ ID NO: 2979413 - DNA, 25 bp, Homo sapien
tgttactcctataactaatgttgag

SEQ ID NO: 2979414 - DNA, 25 bp, Homo sapien
actaatgttgagcagcccttgaact

SEQ ID NO: 2979415 - DNA, 25 bp, Homo sapien
ttgttactcctataactaatgttga

SEQ ID NO: 2979416 - DNA, 25 bp, Homo sapien
aactaatgttgagcagcccttgaac

SEQ ID NO: 2979417 - DNA, 25 bp, Homo sapien
gaaatccagaccgttctcatgggtg

SEQ ID NO: 2979418 - DNA, 25 bp, Homo sapien
gagagagactccacttttcactgga

SEQ ID NO: 2979419 - DNA, 25 bp, Homo sapien
ggaattttctccgactgcctgatga

SEQ ID NO: 2979420 - DNA, 25 bp, Homo sapien
gctggtaaatctcgctgtagggcac

SEQ ID NO: 2979421 - DNA, 25 bp, Homo sapien
tccagcctgatgcagcccggttggg

SEQ ID NO: 2979422 - DNA, 25 bp, Homo sapien
ttgggggaattgcatgggtagatca

SEQ ID NO: 2979423 - DNA, 25 bp, Homo sapien
cttccagcctgatgcagcccggttg

SEQ ID NO: 2979424 - DNA, 25 bp, Homo sapien
catgacccttccagcctgatgcagc

SEQ ID NO: 2979425 - DNA, 25 bp, Homo sapien
ctggttgtgctccacggtggcccct

SEQ ID NO: 2979426 - DNA, 25 bp, Homo sapien
ctcctggttgtgctccacggtggcc

SEQ ID NO: 2979427 - DNA, 25 bp, Homo sapien
ccacggtggcccctgtgggaaccat

SEQ ID NO: 2979428 - DNA, 25 bp, Homo sapien
ttgtgctccacggtggcccctgtgg

SEQ ID NO: 2979429 - DNA, 25 bp, Homo sapien
cagattatgatcagccttggcaggg

SEQ ID NO: 2979430 - DNA, 25 bp, Homo sapien
cctggatggacaagcagcatggcgc

SEQ ID NO: 2979431 - DNA, 25 bp, Homo sapien
gggatcatcctcagaattagaggca

SEQ ID NO: 2979432 - DNA, 25 bp, Homo sapien
tctgtataagagatgacaatgccga

SEQ ID NO: 2979433 - DNA, 25 bp, Homo sapien
tctgtgggctctgtcactgaagatt

SEQ ID NO: 2979434 - DNA, 25 bp, Homo sapien
gggcagatggttcggcctccttctg

SEQ ID NO: 2979435 - DNA, 25 bp, Homo sapien
atgaaaacgggcagatggttcggcc

SEQ ID NO: 2979436 - DNA, 25 bp, Homo sapien
gggctctgtcactgaagattcattt

SEQ ID NO: 2979437 - DNA, 25 bp, Homo sapien
tattgggcctcatatgcttgactgt

SEQ ID NO: 2979438 - DNA, 25 bp, Homo sapien
ccaggtgaccggtatgatgagaagt

SEQ ID NO: 2979439 - DNA, 25 bp, Homo sapien
aggtgtcagcgtctggatcttctct

SEQ ID NO: 2979440 - DNA, 25 bp, Homo sapien
tacaggctttgctttgaatggaccc

SEQ ID NO: 2979441 - DNA, 25 bp, Homo sapien
ttaggagctagtcccacataaacca

SEQ ID NO: 2979442 - DNA, 25 bp, Homo sapien
aaccatttccagttggtaatgggat

SEQ ID NO: 2979443 - DNA, 25 bp, Homo sapien
ccagttggtaatgggattttatgag

SEQ ID NO: 2979444 - DNA, 25 bp, Homo sapien
ctggttaggagctagtcccacataa

SEQ ID NO: 2979445 - DNA, 25 bp, Homo sapien
taagatggaagttgcaccgtgccta

SEQ ID NO: 2979446 - DNA, 25 bp, Homo sapien
cagagaggtcagttccaaagtcaga

SEQ ID NO: 2979447 - DNA, 25 bp, Homo sapien
ggtatgatcgtctctcagtcctgaa

SEQ ID NO: 2979448 - DNA, 25 bp, Homo sapien
gaaacggcaccacgtgatgttccct

SEQ ID NO: 2979449 - DNA, 25 bp, Homo sapien
cataatgcaaattgtgctttctgat

SEQ ID NO: 2979450 - DNA, 25 bp, Homo sapien
tagttctacataatgcaaattgtgc

SEQ ID NO: 2979451 - DNA, 25 bp, Homo sapien
tgatggacaagacctcataactgtg

SEQ ID NO: 2979452 - DNA, 25 bp, Homo sapien
tgattggttgagattaactggtgtg

SEQ ID NO: 2979453 - DNA, 25 bp, Homo sapien
tcaatggattccaggagcaaggcca

SEQ ID NO: 2979454 - DNA, 25 bp, Homo sapien
aatgagtcgaactagaccagaagcc

SEQ ID NO: 2979455 - DNA, 25 bp, Homo sapien
gacaaaaactcttgagctgcaacag

SEQ ID NO: 2979456 - DNA, 25 bp, Homo sapien
caaggccatttgtcgcgctttccaa

SEQ ID NO: 2979457 - DNA, 25 bp, Homo sapien
aattcaagacaagccggggaaatat

SEQ ID NO: 2979458 - DNA, 25 bp, Homo sapien
aaaggtagatttcattgagaaggtg

SEQ ID NO: 2979459 - DNA, 25 bp, Homo sapien
tggtagcacatgccttggtcttcag

SEQ ID NO: 2979460 - DNA, 25 bp, Homo sapien
tagttacttattgctgcgtaacgga

SEQ ID NO: 2979461 - DNA, 25 bp, Homo sapien
gatagtggtggccgcgataaaccag

SEQ ID NO: 2979462 - DNA, 25 bp, Homo sapien
atgatagtggtggccgcgataaacc

SEQ ID NO: 2979463 - DNA, 25 bp, Homo sapien
gatgatagtggtggccgcgataaac

SEQ ID NO: 2979464 - DNA, 25 bp, Homo sapien
tgatagtggtggccgcgataaacca

SEQ ID NO: 2979465 - DNA, 25 bp, Homo sapien
ttccccaagactgtgtctgccagcc

SEQ ID NO: 2979466 - DNA, 25 bp, Homo sapien
tggcctcggtccagaaagatggagt

SEQ ID NO: 2979467 - DNA, 25 bp, Homo sapien
tgcctggcctcggtccagaaagatg

SEQ ID NO: 2979468 - DNA, 25 bp, Homo sapien
ctcccggggaggaaatatcgtaatg

SEQ ID NO: 2979469 - DNA, 25 bp, Homo sapien
atatcgtaatggatgtccatggagg

SEQ ID NO: 2979470 - DNA, 25 bp, Homo sapien
tttccaaagagaaccaaggaactgc

SEQ ID NO: 2979471 - DNA, 25 bp, Homo sapien
ccaaagagaaccaaggaactgcata

SEQ ID NO: 2979472 - DNA, 25 bp, Homo sapien
gagaaccaaggaactgcataccagc

SEQ ID NO: 2979473 - DNA, 25 bp, Homo sapien
aaagagaaccaaggaactgcatacc

SEQ ID NO: 2979474 - DNA, 25 bp, Homo sapien
tataaatccactgtccaaggcggaa

SEQ ID NO: 2979475 - DNA, 25 bp, Homo sapien
caggcccgcgtagaacaaggcgttt

SEQ ID NO: 2979476 - DNA, 25 bp, Homo sapien
actgtgataacggagcttgtgtggc

SEQ ID NO: 2979477 - DNA, 25 bp, Homo sapien
gaaaggcaacattgttcctggacaa

SEQ ID NO: 2979478 - DNA, 25 bp, Homo sapien
tcaagcttcgtggaaagttcctcat

SEQ ID NO: 2979479 - DNA, 25 bp, Homo sapien
ttcaagcttcgtggaaagttcctca

SEQ ID NO: 2979480 - DNA, 25 bp, Homo sapien
cttcaagcttcgtggaaagttcctc

SEQ ID NO: 2979481 - DNA, 25 bp, Homo sapien
cagacgctggcccatgggagagtca

SEQ ID NO: 2979482 - DNA, 25 bp, Homo sapien
caacttggagaagagcggcggcttt

SEQ ID NO: 2979483 - DNA, 25 bp, Homo sapien
cccgtattggagctattaaactgtc

SEQ ID NO: 2979484 - DNA, 25 bp, Homo sapien
tgtcacgggaaacacgttactcagc

SEQ ID NO: 2979485 - DNA, 25 bp, Homo sapien
ctggaatgttccagggcgaaacttt

SEQ ID NO: 2979486 - DNA, 25 bp, Homo sapien
gccccgaatatgtgcatgggctgga

SEQ ID NO: 2979487 - DNA, 25 bp, Homo sapien
ccatgaagccccgaatatgtgcatg

SEQ ID NO: 2979488 - DNA, 25 bp, Homo sapien
tgaagccccgaatatgtgcatgggc

SEQ ID NO: 2979489 - DNA, 25 bp, Homo sapien
ccgctgtacccagttgaccaagcca

SEQ ID NO: 2979490 - DNA, 25 bp, Homo sapien
tcaccgctgtacccagttgaccaag

SEQ ID NO: 2979491 - DNA, 25 bp, Homo sapien
tcaatgccgcgttttccctcacctt

SEQ ID NO: 2979492 - DNA, 25 bp, Homo sapien
aaccctgccgtcactctcaatgccg

SEQ ID NO: 2979493 - DNA, 25 bp, Homo sapien
tcttcacagatgtcagaagcgccct

SEQ ID NO: 2979494 - DNA, 25 bp, Homo sapien
cctttggtccgtggccactggatca

SEQ ID NO: 2979495 - DNA, 25 bp, Homo sapien
ggtaattcagtagttctccttcgtg

SEQ ID NO: 2979496 - DNA, 25 bp, Homo sapien
gaagcgccctgatgctgtgcttcca

SEQ ID NO: 2979497 - DNA, 25 bp, Homo sapien
gatttttatgtcttccctcttctta

SEQ ID NO: 2979498 - DNA, 25 bp, Homo sapien
agtcgatttttatgtcttccctctt

SEQ ID NO: 2979499 - DNA, 25 bp, Homo sapien
ttatgtcttccctcttcttaaaaga

SEQ ID NO: 2979500 - DNA, 25 bp, Homo sapien
tatgtcttccctcttcttaaaagaa

SEQ ID NO: 2979501 - DNA, 25 bp, Homo sapien
gatgatggaacaataccctcaagac

SEQ ID NO: 2979502 - DNA, 25 bp, Homo sapien
tagcgaccagctgaggcaatacagt

SEQ ID NO: 2979503 - DNA, 25 bp, Homo sapien
gccaagcaggttatctggaaggtta

SEQ ID NO: 2979504 - DNA, 25 bp, Homo sapien
ctcaagacattgagcaggccaggca

SEQ ID NO: 2979505 - DNA, 25 bp, Homo sapien
cttgattgtcggctgttattgacct

SEQ ID NO: 2979506 - DNA, 25 bp, Homo sapien
tgttgccggtgtctatggagaccca

SEQ ID NO: 2979507 - DNA, 25 bp, Homo sapien
gacctgttgccggtgtctatggaga

SEQ ID NO: 2979508 - DNA, 25 bp, Homo sapien
tgtcggctgttattgacctgttgcc

SEQ ID NO: 2979509 - DNA, 25 bp, Homo sapien
caccaggaaataactgggagcagct

SEQ ID NO: 2979510 - DNA, 25 bp, Homo sapien
caccaccaggaaataactgggagca

SEQ ID NO: 2979511 - DNA, 25 bp, Homo sapien
ctttcccaccaccaggaaataactg

SEQ ID NO: 2979512 - DNA, 25 bp, Homo sapien
ccaccaccaggaaataactgggagc

SEQ ID NO: 2979513 - DNA, 25 bp, Homo sapien
cttgttccatagatgcggtcagagt

SEQ ID NO: 2979514 - DNA, 25 bp, Homo sapien
gttggatggctatgtggttaaaggg

SEQ ID NO: 2979515 - DNA, 25 bp, Homo sapien
tccatagatgcggtcagagtcctgg

SEQ ID NO: 2979516 - DNA, 25 bp, Homo sapien
aggtgatgagatggctgttggttgg

SEQ ID NO: 2979517 - DNA, 25 bp, Homo sapien
gcagagaccgtggaagccatagatg

SEQ ID NO: 2979518 - DNA, 25 bp, Homo sapien
tgggcactgaccgttagcttcatgt

SEQ ID NO: 2979519 - DNA, 25 bp, Homo sapien
tggaaccggatataagcaggtgagc

SEQ ID NO: 2979520 - DNA, 25 bp, Homo sapien
tagcagcccacaggaaatcaggcac

SEQ ID NO: 2979521 - DNA, 25 bp, Homo sapien
ttcacagagggacgaacattcagct

SEQ ID NO: 2979522 - DNA, 25 bp, Homo sapien
ttgcggccacttttgccaacaggag

SEQ ID NO: 2979523 - DNA, 25 bp, Homo sapien
gctgctagcagctcagcgattcctg

SEQ ID NO: 2979524 - DNA, 25 bp, Homo sapien
tatccgccgactgtagatcattact

SEQ ID NO: 2979525 - DNA, 25 bp, Homo sapien
tctctttctgtcactctccttggct

SEQ ID NO: 2979526 - DNA, 25 bp, Homo sapien
tgtcactctccttggctgactcctt

SEQ ID NO: 2979527 - DNA, 25 bp, Homo sapien
tctttctgtcactctccttggctga

SEQ ID NO: 2979528 - DNA, 25 bp, Homo sapien
ttctgtcactctccttggctgactc

SEQ ID NO: 2979529 - DNA, 25 bp, Homo sapien
gaatacgtttattcaggctccgtcc

SEQ ID NO: 2979530 - DNA, 25 bp, Homo sapien
cagtgcagtttacgaagcaggccca

SEQ ID NO: 2979531 - DNA, 25 bp, Homo sapien
tattaaacactaaagcccgagtgtg

SEQ ID NO: 2979532 - DNA, 25 bp, Homo sapien
cagatcccaatgataacagtgcagt

SEQ ID NO: 2979533 - DNA, 25 bp, Homo sapien
gctttcacagccaattacaaaacca

SEQ ID NO: 2979534 - DNA, 25 bp, Homo sapien
cgtgtgccctttgccctaacaagta

SEQ ID NO: 2979535 - DNA, 25 bp, Homo sapien
tgacttgaattttgaggtggcctcc

SEQ ID NO: 2979536 - DNA, 25 bp, Homo sapien
aaccattcttcatttcgtgtgccct

SEQ ID NO: 2979537 - DNA, 25 bp, Homo sapien
tgtaccagtgtgctctcctgaggac

SEQ ID NO: 2979538 - DNA, 25 bp, Homo sapien
taaatggataatctgcccacccggc

SEQ ID NO: 2979539 - DNA, 25 bp, Homo sapien
tgtctttgtattccagaagggtgcg

SEQ ID NO: 2979540 - DNA, 25 bp, Homo sapien
gcagcgcttcaggtctgtccatggt

SEQ ID NO: 2979541 - DNA, 25 bp, Homo sapien
aggcctctgttgactgaccagagcc

SEQ ID NO: 2979542 - DNA, 25 bp, Homo sapien
ggttgcctctgctgtattctccaag

SEQ ID NO: 2979543 - DNA, 25 bp, Homo sapien
ctcctttcttatgatgggtgatttg

SEQ ID NO: 2979544 - DNA, 25 bp, Homo sapien
tcttatgatgggtgatttgtactca

SEQ ID NO: 2979545 - DNA, 25 bp, Homo sapien
ggtgatttgtactcatggactgtgt

SEQ ID NO: 2979546 - DNA, 25 bp, Homo sapien
tcagactgctgtgtggttgatcctg

SEQ ID NO: 2979547 - DNA, 25 bp, Homo sapien
cagctccacggggagggtgtatttc

SEQ ID NO: 2979548 - DNA, 25 bp, Homo sapien
tgtgtggttgatcctggaagcccag

SEQ ID NO: 2979549 - DNA, 25 bp, Homo sapien
tatttccaagaatctgtagcagtgg

SEQ ID NO: 2979550 - DNA, 25 bp, Homo sapien
ctgtggtcacgtctgtcctttctcc

SEQ ID NO: 2979551 - DNA, 25 bp, Homo sapien
ctggatgtacctgcttctcttcaag

SEQ ID NO: 2979552 - DNA, 25 bp, Homo sapien
ctcttcaaggccatccagggagaat

SEQ ID NO: 2979553 - DNA, 25 bp, Homo sapien
caaggccatccagggagaattaggc

SEQ ID NO: 2979554 - DNA, 25 bp, Homo sapien
tggatgtacctgcttctcttcaagg

SEQ ID NO: 2979555 - DNA, 25 bp, Homo sapien
tctgcccctgtgtcattcagctcaa

SEQ ID NO: 2979556 - DNA, 25 bp, Homo sapien
tcacgaacaaccattttctgcccct

SEQ ID NO: 2979557 - DNA, 25 bp, Homo sapien
tgtgtcattcagctcaactttcaat

SEQ ID NO: 2979558 - DNA, 25 bp, Homo sapien
gaacaaccattttctgcccctgtgt

SEQ ID NO: 2979559 - DNA, 25 bp, Homo sapien
caaggccgttcttggtatggtcgtt

SEQ ID NO: 2979560 - DNA, 25 bp, Homo sapien
cctcagggtgagctctgacaactct

SEQ ID NO: 2979561 - DNA, 25 bp, Homo sapien
tgagtatagaggaactcctccatcc

SEQ ID NO: 2979562 - DNA, 25 bp, Homo sapien
tatggtcgttcttgtctctccgcct

SEQ ID NO: 2979563 - DNA, 25 bp, Homo sapien
tcaccccatgcctgcatagcgtcca

SEQ ID NO: 2979564 - DNA, 25 bp, Homo sapien
ctcaccccatgcctgcatagcgtcc

SEQ ID NO: 2979565 - DNA, 25 bp, Homo sapien
caccccatgcctgcatagcgtccat

SEQ ID NO: 2979566 - DNA, 25 bp, Homo sapien
ctggccggcttctgcccgcccgtta

SEQ ID NO: 2979567 - DNA, 25 bp, Homo sapien
tctgcccgcccgttagcacccagct

SEQ ID NO: 2979568 - DNA, 25 bp, Homo sapien
ggcatctttacgggaaacatctctc

SEQ ID NO: 2979569 - DNA, 25 bp, Homo sapien
catctttacgggaaacatctctcat

SEQ ID NO: 2979570 - DNA, 25 bp, Homo sapien
ggaaacgtggcacacaacctccacc

SEQ ID NO: 2979571 - DNA, 25 bp, Homo sapien
ttggaggagacagtggagcggtgtc

SEQ ID NO: 2979572 - DNA, 25 bp, Homo sapien
cagtggagcggtgtcagagagcagt

SEQ ID NO: 2979573 - DNA, 25 bp, Homo sapien
cagggtgggagcctttggaggagac

SEQ ID NO: 2979574 - DNA, 25 bp, Homo sapien
caaagtgtgccctgttgcttagaga

SEQ ID NO: 2979575 - DNA, 25 bp, Homo sapien
tgcctcctggtagttccaaagtgtg

SEQ ID NO: 2979576 - DNA, 25 bp, Homo sapien
gagggaccaattgctctgccctgat

SEQ ID NO: 2979577 - DNA, 25 bp, Homo sapien
tgggctctaccttgcgagggaccaa

SEQ ID NO: 2979578 - DNA, 25 bp, Homo sapien
gacttgtgtagcaggctcgagagca

SEQ ID NO: 2979579 - DNA, 25 bp, Homo sapien
gcaggctcgagagcatcatgatgtc

SEQ ID NO: 2979580 - DNA, 25 bp, Homo sapien
gactgaagtgggttgcgagttgtgc

SEQ ID NO: 2979581 - DNA, 25 bp, Homo sapien
gagttgtgccgggacttgtgtagca

SEQ ID NO: 2979582 - DNA, 25 bp, Homo sapien
gtattaggaagcaaagtttccaata

SEQ ID NO: 2979583 - DNA, 25 bp, Homo sapien
tggccaggtattggctagaacatgg

SEQ ID NO: 2979584 - DNA, 25 bp, Homo sapien
aggtattggctagaacatggtttaa

SEQ ID NO: 2979585 - DNA, 25 bp, Homo sapien
attggctagaacatggtttaataca

SEQ ID NO: 2979586 - DNA, 25 bp, Homo sapien
tcctttataagtctaagcctggctc

SEQ ID NO: 2979587 - DNA, 25 bp, Homo sapien
tggagtcttagtctcaccctgggac

SEQ ID NO: 2979588 - DNA, 25 bp, Homo sapien
tcccatgggctatcagctgtgtcat

SEQ ID NO: 2979589 - DNA, 25 bp, Homo sapien
gaattcctaagtcttaatgagccca

SEQ ID NO: 2979590 - DNA, 25 bp, Homo sapien
ttttttcaaataaggattgaggcca

SEQ ID NO: 2979591 - DNA, 25 bp, Homo sapien
ttcaaataaggattgaggccaggtg

SEQ ID NO: 2979592 - DNA, 25 bp, Homo sapien
ttttcaaataaggattgaggccagg

SEQ ID NO: 2979593 - DNA, 25 bp, Homo sapien
tattttttcaaataaggattgaggc

SEQ ID NO: 2979594 - DNA, 25 bp, Homo sapien
aggtcttgcccgtgagcgtgacagc

SEQ ID NO: 2979595 - DNA, 25 bp, Homo sapien
gctggaggaggatcgcactgctcat

SEQ ID NO: 2979596 - DNA, 25 bp, Homo sapien
tatacacaacgttccaggtgaggtc

SEQ ID NO: 2979597 - DNA, 25 bp, Homo sapien
aaatactgggtatctctggttctgc

SEQ ID NO: 2979598 - DNA, 25 bp, Homo sapien
ctctgggcttcttgttactttcact

SEQ ID NO: 2979599 - DNA, 25 bp, Homo sapien
gtcccagatgcttccagatggacac

SEQ ID NO: 2979600 - DNA, 25 bp, Homo sapien
tgtcccagatgcttccagatggaca

SEQ ID NO: 2979601 - DNA, 25 bp, Homo sapien
ctgtcccagatgcttccagatggac

SEQ ID NO: 2979602 - DNA, 25 bp, Homo sapien
tctgtcccagatgcttccagatgga

SEQ ID NO: 2979603 - DNA, 25 bp, Homo sapien
ccaacaccaggtcttggctgcttgc

SEQ ID NO: 2979604 - DNA, 25 bp, Homo sapien
gaccaacaccaggtcttggctgctt

SEQ ID NO: 2979605 - DNA, 25 bp, Homo sapien
tctggggctgtatgagaccaacacc

SEQ ID NO: 2979606 - DNA, 25 bp, Homo sapien
tgagaccaacaccaggtcttggctg

SEQ ID NO: 2979607 - DNA, 25 bp, Homo sapien
caattggccacaaatctgcaggaga

SEQ ID NO: 2979608 - DNA, 25 bp, Homo sapien
aattggccacaaatctgcaggagag

SEQ ID NO: 2979609 - DNA, 25 bp, Homo sapien
ttggccacaaatctgcaggagagcg

SEQ ID NO: 2979610 - DNA, 25 bp, Homo sapien
ggccacaaatctgcaggagagcgtg

SEQ ID NO: 2979611 - DNA, 25 bp, Homo sapien
cccctccctcctggtgtcagctttg

SEQ ID NO: 2979612 - DNA, 25 bp, Homo sapien
tcccctccctcctggtgtcagcttt

SEQ ID NO: 2979613 - DNA, 25 bp, Homo sapien
gctgcactgggtcatctctgtgatt

SEQ ID NO: 2979614 - DNA, 25 bp, Homo sapien
tcagtcataaagatggcgctgcact

SEQ ID NO: 2979615 - DNA, 25 bp, Homo sapien
agtcataaagatggcgctgcactgg

SEQ ID NO: 2979616 - DNA, 25 bp, Homo sapien
gcgctgcactgggtcatctctgtga

SEQ ID NO: 2979617 - DNA, 25 bp, Homo sapien
gatgtcttccaagctaaagactttc

SEQ ID NO: 2979618 - DNA, 25 bp, Homo sapien
tgtcttccaagctaaagactttctg

SEQ ID NO: 2979619 - DNA, 25 bp, Homo sapien
gtcttccaagctaaagactttctga

SEQ ID NO: 2979620 - DNA, 25 bp, Homo sapien
atgtcttccaagctaaagactttct

SEQ ID NO: 2979621 - DNA, 25 bp, Homo sapien
aagaattgctgtgttttgatggtac

SEQ ID NO: 2979622 - DNA, 25 bp, Homo sapien
tgacacaagtggataagaattgctg

SEQ ID NO: 2979623 - DNA, 25 bp, Homo sapien
gataagaattgctgtgttttgatgg

SEQ ID NO: 2979624 - DNA, 25 bp, Homo sapien
caagtggataagaattgctgtgttt

SEQ ID NO: 2979625 - DNA, 25 bp, Homo sapien
tattgagcttctgtggtccgtatct

SEQ ID NO: 2979626 - DNA, 25 bp, Homo sapien
tttgatagcaaattaaggccctccc

SEQ ID NO: 2979627 - DNA, 25 bp, Homo sapien
tacaatatagatagctaaggaactc

SEQ ID NO: 2979628 - DNA, 25 bp, Homo sapien
tagcaggaatgagacttaaagaaca

SEQ ID NO: 2979629 - DNA, 25 bp, Homo sapien
cgttgatttgcccattgctataatc

SEQ ID NO: 2979630 - DNA, 25 bp, Homo sapien
cagttcgttgatttgcccattgcta

SEQ ID NO: 2979631 - DNA, 25 bp, Homo sapien
ccccagttcgttgatttgcccattg

SEQ ID NO: 2979632 - DNA, 25 bp, Homo sapien
tcctttccccagttcgttgatttgc

SEQ ID NO: 2979633 - DNA, 25 bp, Homo sapien
tccaggcccctgcagtggaattcca

SEQ ID NO: 2979634 - DNA, 25 bp, Homo sapien
gtagagacgtccatcacttcccatg

SEQ ID NO: 2979635 - DNA, 25 bp, Homo sapien
tgtgggtcaatgagcaaagcccttt

SEQ ID NO: 2979636 - DNA, 25 bp, Homo sapien
agtggaattccagctgccgaggcca

SEQ ID NO: 2979637 - DNA, 25 bp, Homo sapien
gaacttttgaggtgttgtctaacca

SEQ ID NO: 2979638 - DNA, 25 bp, Homo sapien
tctcccatgtgacttgtaggaactt

SEQ ID NO: 2979639 - DNA, 25 bp, Homo sapien
ggtgttgtctaaccagactcctcat

SEQ ID NO: 2979640 - DNA, 25 bp, Homo sapien
gctttcctttgccattgtggagctc

SEQ ID NO: 2979641 - DNA, 25 bp, Homo sapien
gcagccctgatctccggtgcaagag

SEQ ID NO: 2979642 - DNA, 25 bp, Homo sapien
gaagggtggtctccatgttctcgta

SEQ ID NO: 2979643 - DNA, 25 bp, Homo sapien
acactttaacaaggcaggtttccag

SEQ ID NO: 2979644 - DNA, 25 bp, Homo sapien
taagcaggtggaagataagacacat

SEQ ID NO: 2979645 - DNA, 25 bp, Homo sapien
tggaactggatcacctgagtggagt

SEQ ID NO: 2979646 - DNA, 25 bp, Homo sapien
ctggagtaaggagcagttgactctg

SEQ ID NO: 2979647 - DNA, 25 bp, Homo sapien
tttaaggggaatggaactggatcac

SEQ ID NO: 2979648 - DNA, 25 bp, Homo sapien
ctgcatggacccatttaaggggaat

SEQ ID NO: 2979649 - DNA, 25 bp, Homo sapien
ttgttggctttatctgcagtaggag

SEQ ID NO: 2979650 - DNA, 25 bp, Homo sapien
gtggttgttggctttatctgcagta

SEQ ID NO: 2979651 - DNA, 25 bp, Homo sapien
atgtggttgttggctttatctgcag

SEQ ID NO: 2979652 - DNA, 25 bp, Homo sapien
ggttgttggctttatctgcagtagg

SEQ ID NO: 2979653 - DNA, 25 bp, Homo sapien
cctacgccccgctttggtgactgcc

SEQ ID NO: 2979654 - DNA, 25 bp, Homo sapien
gactgccccatgctgtgcaccgcag

SEQ ID NO: 2979655 - DNA, 25 bp, Homo sapien
caccgcagtctgtggcgtgggatat

SEQ ID NO: 2979656 - DNA, 25 bp, Homo sapien
tgggatatgggtgcagactgtttcc

SEQ ID NO: 2979657 - DNA, 25 bp, Homo sapien
atcaaaagcccctctacgctattca

SEQ ID NO: 2979658 - DNA, 25 bp, Homo sapien
tcaaaagcccctctacgctattcat

SEQ ID NO: 2979659 - DNA, 25 bp, Homo sapien
tctgggaagcagatcaatttctcag

SEQ ID NO: 2979660 - DNA, 25 bp, Homo sapien
taaaggcattcgaagaagtccttga

SEQ ID NO: 2979661 - DNA, 25 bp, Homo sapien
caggcaatgaatttccgcagtaata

SEQ ID NO: 2979662 - DNA, 25 bp, Homo sapien
ccacccggctctccgaaagtgaatt

SEQ ID NO: 2979663 - DNA, 25 bp, Homo sapien
tgtgaccacgtttgtgcttgtccac

SEQ ID NO: 2979664 - DNA, 25 bp, Homo sapien
gccttcggtgtcacactctccaaat

SEQ ID NO: 2979665 - DNA, 25 bp, Homo sapien
tccaaatcctgaccctaagtgcagc

SEQ ID NO: 2979666 - DNA, 25 bp, Homo sapien
gattcagtatcaccagttgatcccc

SEQ ID NO: 2979667 - DNA, 25 bp, Homo sapien
cgtggaagaactctcgccttcggtg

SEQ ID NO: 2979668 - DNA, 25 bp, Homo sapien
tcccattcactttccttgccctcac

SEQ ID NO: 2979669 - DNA, 25 bp, Homo sapien
tagtcccattcactttccttgccct

SEQ ID NO: 2979670 - DNA, 25 bp, Homo sapien
ctagtcccattcactttccttgccc

SEQ ID NO: 2979671 - DNA, 25 bp, Homo sapien
gtcccattcactttccttgccctca

SEQ ID NO: 2979672 - DNA, 25 bp, Homo sapien
gatctgggtgaagttctcctctagg

SEQ ID NO: 2979673 - DNA, 25 bp, Homo sapien
ttaggttgacttacacagtggaagc

SEQ ID NO: 2979674 - DNA, 25 bp, Homo sapien
tcctctaggcttggtttaggttgac

SEQ ID NO: 2979675 - DNA, 25 bp, Homo sapien
ctctctttggaaaacgagatctggg

SEQ ID NO: 2979676 - DNA, 25 bp, Homo sapien
gctctcttggacccagggctgccac

SEQ ID NO: 2979677 - DNA, 25 bp, Homo sapien
ctcttggacccagggctgccacgtg

SEQ ID NO: 2979678 - DNA, 25 bp, Homo sapien
tgggtggttggtaccaggaattgga

SEQ ID NO: 2979679 - DNA, 25 bp, Homo sapien
ctgggtggttggtaccaggaattgg

SEQ ID NO: 2979680 - DNA, 25 bp, Homo sapien
cctctaagtgttttatggtactatt

SEQ ID NO: 2979681 - DNA, 25 bp, Homo sapien
catacatactctaccgttggttaga

SEQ ID NO: 2979682 - DNA, 25 bp, Homo sapien
gaatccataaaccaatttggaggaa

SEQ ID NO: 2979683 - DNA, 25 bp, Homo sapien
tttatcagtgttttgtggtcttcat

SEQ ID NO: 2979684 - DNA, 25 bp, Homo sapien
gggaaactgaaagaccattagtcac

SEQ ID NO: 2979685 - DNA, 25 bp, Homo sapien
tgtgaccttatgcatgacctgtagc

SEQ ID NO: 2979686 - DNA, 25 bp, Homo sapien
gattcccaatgggtttcctccacac

SEQ ID NO: 2979687 - DNA, 25 bp, Homo sapien
tatgcatgacctgtagcccttcaga

SEQ ID NO: 2979688 - DNA, 25 bp, Homo sapien
agcttcctcgaaatgctgttgatca

SEQ ID NO: 2979689 - DNA, 25 bp, Homo sapien
tcattaaaatcggggggcgctgtgc

SEQ ID NO: 2979690 - DNA, 25 bp, Homo sapien
tcaagcttcctcgaaatgctgttga

SEQ ID NO: 2979691 - DNA, 25 bp, Homo sapien
taaaatcggggggcgctgtgccatt

SEQ ID NO: 2979692 - DNA, 25 bp, Homo sapien
tgtttcctttcgttctcatgaacaa

SEQ ID NO: 2979693 - DNA, 25 bp, Homo sapien
ctaagtgttcaatgataacagagat

SEQ ID NO: 2979694 - DNA, 25 bp, Homo sapien
cagagttggcgtgccctaagtgttc

SEQ ID NO: 2979695 - DNA, 25 bp, Homo sapien
catgaacaagtgctgttggcacctt

SEQ ID NO: 2979696 - DNA, 25 bp, Homo sapien
tcttccgacttcgttctcaccgttg

SEQ ID NO: 2979697 - DNA, 25 bp, Homo sapien
cgacttcgttctcaccgttgggcat

SEQ ID NO: 2979698 - DNA, 25 bp, Homo sapien
tcttttcttccgacttcgttctcac

SEQ ID NO: 2979699 - DNA, 25 bp, Homo sapien
tccgacttcgttctcaccgttgggc

SEQ ID NO: 2979700 - DNA, 25 bp, Homo sapien
catcctggggttgagctattgttga

SEQ ID NO: 2979701 - DNA, 25 bp, Homo sapien
caatagcagatccttccagtgtggg

SEQ ID NO: 2979702 - DNA, 25 bp, Homo sapien
tgcctggctgtagaaagcctctggg

SEQ ID NO: 2979703 - DNA, 25 bp, Homo sapien
ttcaagctatatgctgcatcctggg

SEQ ID NO: 2979704 - DNA, 25 bp, Homo sapien
ttgctgcttgcttttcgcagcttgg

SEQ ID NO: 2979705 - DNA, 25 bp, Homo sapien
tgctgcttgcttttcgcagcttggt

SEQ ID NO: 2979706 - DNA, 25 bp, Homo sapien
ctgcttgcttttcgcagcttggttt

SEQ ID NO: 2979707 - DNA, 25 bp, Homo sapien
tgttgctgcttgcttttcgcagctt

SEQ ID NO: 2979708 - DNA, 25 bp, Homo sapien
cggagttaatgggttttgatcttga

SEQ ID NO: 2979709 - DNA, 25 bp, Homo sapien
ttttgatcttgagtcgttgcggttg

SEQ ID NO: 2979710 - DNA, 25 bp, Homo sapien
gcggttggccaacatcgactgagca

SEQ ID NO: 2979711 - DNA, 25 bp, Homo sapien
gactgagcacccacgcgtttatagt

SEQ ID NO: 2979712 - DNA, 25 bp, Homo sapien
tgctttgaatatggaggagatccca

SEQ ID NO: 2979713 - DNA, 25 bp, Homo sapien
gagggaagccctggatagaatcagt

SEQ ID NO: 2979714 - DNA, 25 bp, Homo sapien
cagaacctcactacttggcagaaag

SEQ ID NO: 2979715 - DNA, 25 bp, Homo sapien
gaattcttgctgtcgatgtgagagg

SEQ ID NO: 2979716 - DNA, 25 bp, Homo sapien
caggtaggcctatgtcagaattctt

SEQ ID NO: 2979717 - DNA, 25 bp, Homo sapien
ggaggtctgaagtccacagtgattt

SEQ ID NO: 2979718 - DNA, 25 bp, Homo sapien
gctatcaatctaaaagtgctctaaa

SEQ ID NO: 2979719 - DNA, 25 bp, Homo sapien
gtatcaattgtaccactgtggtgtg

SEQ ID NO: 2979720 - DNA, 25 bp, Homo sapien
tagccctgttcattagtggccacaa

SEQ ID NO: 2979721 - DNA, 25 bp, Homo sapien
ggccacaaattttctagtgctgggt

SEQ ID NO: 2979722 - DNA, 25 bp, Homo sapien
ggaggcgtaccttttattcagagac

SEQ ID NO: 2979723 - DNA, 25 bp, Homo sapien
gattcatctcggacttcagctttgg

SEQ ID NO: 2979724 - DNA, 25 bp, Homo sapien
ggacctacagtcactgagaatggat

SEQ ID NO: 2979725 - DNA, 25 bp, Homo sapien
aggtccctttgggtatgacttccat

SEQ ID NO: 2979726 - DNA, 25 bp, Homo sapien
agaatggatgctgggaggtcccttt

SEQ ID NO: 2979727 - DNA, 25 bp, Homo sapien
gggggacctacagtcactgagaatg

SEQ ID NO: 2979728 - DNA, 25 bp, Homo sapien
ggggctgctttcttagcagctagat

SEQ ID NO: 2979729 - DNA, 25 bp, Homo sapien
tctccttcaaacataggaggggctg

SEQ ID NO: 2979730 - DNA, 25 bp, Homo sapien
agtggagccagactgccgagtcttc

SEQ ID NO: 2979731 - DNA, 25 bp, Homo sapien
agatctttgcgttttgtatcagtgg

SEQ ID NO: 2979732 - DNA, 25 bp, Homo sapien
acattttgctaaaggctgtgggaga

SEQ ID NO: 2979733 - DNA, 25 bp, Homo sapien
caaagaagtgggcagtagagcgaac

SEQ ID NO: 2979734 - DNA, 25 bp, Homo sapien
tgcagtttctccgggaacagaggaa

SEQ ID NO: 2979735 - DNA, 25 bp, Homo sapien
gggagatactcctattatgaaaaca

SEQ ID NO: 2979736 - DNA, 25 bp, Homo sapien
catggcaaccagacacctacagcta

SEQ ID NO: 2979737 - DNA, 25 bp, Homo sapien
tacagctagttgtactggtggtgat

SEQ ID NO: 2979738 - DNA, 25 bp, Homo sapien
atcaggtctgtcttgtttgagtgag

SEQ ID NO: 2979739 - DNA, 25 bp, Homo sapien
ctgtcttgtttgagtgagtttgtac

SEQ ID NO: 2979740 - DNA, 25 bp, Homo sapien
tactggggtttgttcgctgtcttct

SEQ ID NO: 2979741 - DNA, 25 bp, Homo sapien
tgctgtagacaccttcatgcaccat

SEQ ID NO: 2979742 - DNA, 25 bp, Homo sapien
gaacagatgtctgcttgctgtagac

SEQ ID NO: 2979743 - DNA, 25 bp, Homo sapien
tggccacacccccaggcattgtgta

SEQ ID NO: 2979744 - DNA, 25 bp, Homo sapien
gggcagctctcgtgttcgtattctc

SEQ ID NO: 2979745 - DNA, 25 bp, Homo sapien
ggtaaaggggcactgtcccactcca

SEQ ID NO: 2979746 - DNA, 25 bp, Homo sapien
tgttcgtattctctagtggacaggt

SEQ ID NO: 2979747 - DNA, 25 bp, Homo sapien
tattctctagtggacaggtgagttg

SEQ ID NO: 2979748 - DNA, 25 bp, Homo sapien
gaatatgcgcctgtcactgaaacgg

SEQ ID NO: 2979749 - DNA, 25 bp, Homo sapien
atatgcgcctgtcactgaaacggac

SEQ ID NO: 2979750 - DNA, 25 bp, Homo sapien
tcagaatatgcgcctgtcactgaaa

SEQ ID NO: 2979751 - DNA, 25 bp, Homo sapien
agaatatgcgcctgtcactgaaacg

SEQ ID NO: 2979752 - DNA, 25 bp, Homo sapien
ctgtgcaggtaagctggcccttttc

SEQ ID NO: 2979753 - DNA, 25 bp, Homo sapien
gcacatatttttcaggggttacaaa

SEQ ID NO: 2979754 - DNA, 25 bp, Homo sapien
tgctgagttgaccaggggacattcc

SEQ ID NO: 2979755 - DNA, 25 bp, Homo sapien
cttgctgactgtcctgtgcaggtaa

SEQ ID NO: 2979756 - DNA, 25 bp, Homo sapien
ctcaggttatctgcccatcttggct

SEQ ID NO: 2979757 - DNA, 25 bp, Homo sapien
caggttatctgcccatcttggcttc

SEQ ID NO: 2979758 - DNA, 25 bp, Homo sapien
attcttgcatctcagcctcctgtgt

SEQ ID NO: 2979759 - DNA, 25 bp, Homo sapien
tgcccatcttggcttcccatagtgc

SEQ ID NO: 2979760 - DNA, 25 bp, Homo sapien
gcttgcttctctagaaagccctctg

SEQ ID NO: 2979761 - DNA, 25 bp, Homo sapien
gagatctgggccatgtgcttgcttc

SEQ ID NO: 2979762 - DNA, 25 bp, Homo sapien
ctctagaaagccctctggggccagt

SEQ ID NO: 2979763 - DNA, 25 bp, Homo sapien
ctgagatctgggccatgtgcttgct

SEQ ID NO: 2979764 - DNA, 25 bp, Homo sapien
ctcctactctttggcctagaaagct

SEQ ID NO: 2979765 - DNA, 25 bp, Homo sapien
gagctccttgactggttctatggct

SEQ ID NO: 2979766 - DNA, 25 bp, Homo sapien
agagctccttgactggttctatggc

SEQ ID NO: 2979767 - DNA, 25 bp, Homo sapien
ctgctgctcctactctttggcctag

SEQ ID NO: 2979768 - DNA, 25 bp, Homo sapien
tagcggagccagcttgttggctttg

SEQ ID NO: 2979769 - DNA, 25 bp, Homo sapien
ttgtagcggagccagcttgttggct

SEQ ID NO: 2979770 - DNA, 25 bp, Homo sapien
tcttcttgctcccttgtagcggagc

SEQ ID NO: 2979771 - DNA, 25 bp, Homo sapien
tgctcccttgtagcggagccagctt

SEQ ID NO: 2979772 - DNA, 25 bp, Homo sapien
taatcatggccagagttgaccacac

SEQ ID NO: 2979773 - DNA, 25 bp, Homo sapien
cgttgtaattagagcgacgaaggtc

SEQ ID NO: 2979774 - DNA, 25 bp, Homo sapien
aagggcagcaacttcacaaatgggc

SEQ ID NO: 2979775 - DNA, 25 bp, Homo sapien
cagtaattcgggtcctcgttgtaat

SEQ ID NO: 2979776 - DNA, 25 bp, Homo sapien
ctccgggtagatgctcagctgggaa

SEQ ID NO: 2979777 - DNA, 25 bp, Homo sapien
cagctgggaatatgaatcgtgtgtc

SEQ ID NO: 2979778 - DNA, 25 bp, Homo sapien
tagatgctcagctgggaatatgaat

SEQ ID NO: 2979779 - DNA, 25 bp, Homo sapien
gaatatgaatcgtgtgtcctgaggg

SEQ ID NO: 2979780 - DNA, 25 bp, Homo sapien
ctgcgtcccacagcttggaggtgca

SEQ ID NO: 2979781 - DNA, 25 bp, Homo sapien
tggacgtcgactggtcccagctgtc

SEQ ID NO: 2979782 - DNA, 25 bp, Homo sapien
tggagtccaagattcagtcctagga

SEQ ID NO: 2979783 - DNA, 25 bp, Homo sapien
tggtccccttgctgtagccacgtca

SEQ ID NO: 2979784 - DNA, 25 bp, Homo sapien
ttgcgagcgcgcgcgcatgggtggc

SEQ ID NO: 2979785 - DNA, 25 bp, Homo sapien
gagcgcgcgcgcatgggtggctgcg

SEQ ID NO: 2979786 - DNA, 25 bp, Homo sapien
cgagcgcgcgcgcatgggtggctgc

SEQ ID NO: 2979787 - DNA, 25 bp, Homo sapien
tgcgagcgcgcgcgcatgggtggct

SEQ ID NO: 2979788 - DNA, 25 bp, Homo sapien
cctcgcccgcagacccccggcgcca

SEQ ID NO: 2979789 - DNA, 25 bp, Homo sapien
cggcgccaagcctcagactggggct

SEQ ID NO: 2979790 - DNA, 25 bp, Homo sapien
tcgcccgcagacccccggcgccaag

SEQ ID NO: 2979791 - DNA, 25 bp, Homo sapien
ggcgccaagcctcagactggggctc

SEQ ID NO: 2979792 - DNA, 25 bp, Homo sapien
cggtctccgacacccagcggctgtc

SEQ ID NO: 2979793 - DNA, 25 bp, Homo sapien
agcagcttggctagcgcctggcgcc

SEQ ID NO: 2979794 - DNA, 25 bp, Homo sapien
gcaatccgctagctccggtctccga

SEQ ID NO: 2979795 - DNA, 25 bp, Homo sapien
gctcctcgaccctcttgtgccggct

SEQ ID NO: 2979796 - DNA, 25 bp, Homo sapien
cagctggcatctcacggcctcgctc

SEQ ID NO: 2979797 - DNA, 25 bp, Homo sapien
tcggatctccgggtgcgctcccgca

SEQ ID NO: 2979798 - DNA, 25 bp, Homo sapien
agcccctctttctccgctctgcgcc

SEQ ID NO: 2979799 - DNA, 25 bp, Homo sapien
ctcgcgccaggtctcttttgtaggg

SEQ ID NO: 2979800 - DNA, 25 bp, Homo sapien
ctagtggttggtttcctctgaacca

SEQ ID NO: 2979801 - DNA, 25 bp, Homo sapien
gtttcctctgaaccatgtccaggct

SEQ ID NO: 2979802 - DNA, 25 bp, Homo sapien
tggttggtttcctctgaaccatgtc

SEQ ID NO: 2979803 - DNA, 25 bp, Homo sapien
gttggtttcctctgaaccatgtcca

SEQ ID NO: 2979804 - DNA, 25 bp, Homo sapien
agccagcccagagatcttattctca

SEQ ID NO: 2979805 - DNA, 25 bp, Homo sapien
caccttaatggaccctggaggccaa

SEQ ID NO: 2979806 - DNA, 25 bp, Homo sapien
ttcagtcttaggctagttccagcca

SEQ ID NO: 2979807 - DNA, 25 bp, Homo sapien
ttattctcaccttaatggaccctgg

SEQ ID NO: 2979808 - DNA, 25 bp, Homo sapien
ttagaggagcccactcggattccag

SEQ ID NO: 2979809 - DNA, 25 bp, Homo sapien
tgcttgtcaggtcatagtacggctc

SEQ ID NO: 2979810 - DNA, 25 bp, Homo sapien
atggtgatcatcttggccgtccggg

SEQ ID NO: 2979811 - DNA, 25 bp, Homo sapien
ttgaatatgtagaagggaagccagc

SEQ ID NO: 2979812 - DNA, 25 bp, Homo sapien
tctccgtggtctcattcagccggga

SEQ ID NO: 2979813 - DNA, 25 bp, Homo sapien
ctctgggtctccgtggtctcattca

SEQ ID NO: 2979814 - DNA, 25 bp, Homo sapien
tgcttactgtcactccgctccccat

SEQ ID NO: 2979815 - DNA, 25 bp, Homo sapien
gtggtctcattcagccgggatttgt

SEQ ID NO: 2979816 - DNA, 25 bp, Homo sapien
tctattctagaagccaggtgtgagg

SEQ ID NO: 2979817 - DNA, 25 bp, Homo sapien
caaacaccgttctctgaattggact

SEQ ID NO: 2979818 - DNA, 25 bp, Homo sapien
ggagcccattgccagtagacagagc

SEQ ID NO: 2979819 - DNA, 25 bp, Homo sapien
tgcatttcagtgttcgctttaaggg

SEQ ID NO: 2979820 - DNA, 25 bp, Homo sapien
cagcacagcagtatctccgagaggt

SEQ ID NO: 2979821 - DNA, 25 bp, Homo sapien
tacaatagtccttgcagagcggctc

SEQ ID NO: 2979822 - DNA, 25 bp, Homo sapien
cacggtaagtccatttctgcgggca

SEQ ID NO: 2979823 - DNA, 25 bp, Homo sapien
tggcaaggcccgtgcaagagagatc

SEQ ID NO: 2979824 - DNA, 25 bp, Homo sapien
tctggttgcagggtcatgggtacta

SEQ ID NO: 2979825 - DNA, 25 bp, Homo sapien
cacgcccggcctgtagaattagtct

SEQ ID NO: 2979826 - DNA, 25 bp, Homo sapien
tcacacttcgctaaacatggctgct

SEQ ID NO: 2979827 - DNA, 25 bp, Homo sapien
gctaaagcttcatctacacgtccag

SEQ ID NO: 2979828 - DNA, 25 bp, Homo sapien
gctatgtatgaaccccacttaagtt

SEQ ID NO: 2979829 - DNA, 25 bp, Homo sapien
tgctatgtatgaaccccacttaagt

SEQ ID NO: 2979830 - DNA, 25 bp, Homo sapien
taaatttgtgtaagcaaatagactc

SEQ ID NO: 2979831 - DNA, 25 bp, Homo sapien
taagcaaatagactccagttcactg

SEQ ID NO: 2979832 - DNA, 25 bp, Homo sapien
gtctagaagcctcatccactggccc

SEQ ID NO: 2979833 - DNA, 25 bp, Homo sapien
agcctcatccactggcccgcgtgtt

SEQ ID NO: 2979834 - DNA, 25 bp, Homo sapien
cgagttttggcaagaaacacttgta

SEQ ID NO: 2979835 - DNA, 25 bp, Homo sapien
gggctgcgagttttggcaagaaaca

SEQ ID NO: 2979836 - DNA, 25 bp, Homo sapien
tgtgatcagcctgtgcacttttcca

SEQ ID NO: 2979837 - DNA, 25 bp, Homo sapien
ccagcacggtgctcctcatctaggg

SEQ ID NO: 2979838 - DNA, 25 bp, Homo sapien
tcagccactcttctttagcaaggcc

SEQ ID NO: 2979839 - DNA, 25 bp, Homo sapien
taatttgctagaccttcagccactc

SEQ ID NO: 2979840 - DNA, 25 bp, Homo sapien
gcccggaacatgcattttaacagtc

SEQ ID NO: 2979841 - DNA, 25 bp, Homo sapien
ggccaaaggtcatgtgtgccttaca

SEQ ID NO: 2979842 - DNA, 25 bp, Homo sapien
ggcttgccagctattgggattctta

SEQ ID NO: 2979843 - DNA, 25 bp, Homo sapien
ggctgcccatgggaatgttcccaga

SEQ ID NO: 2979844 - DNA, 25 bp, Homo sapien
tgttgttactataagttccactgct

SEQ ID NO: 2979845 - DNA, 25 bp, Homo sapien
caaaaatgtgggatgagacaagtga

SEQ ID NO: 2979846 - DNA, 25 bp, Homo sapien
gcaactggagccctgtcactgaata

SEQ ID NO: 2979847 - DNA, 25 bp, Homo sapien
tgtgtccagggctaaaacagtctta

SEQ ID NO: 2979848 - DNA, 25 bp, Homo sapien
tccaggcctagcaggatcaggagat

SEQ ID NO: 2979849 - DNA, 25 bp, Homo sapien
gatgaacttagtatccccactgtcg

SEQ ID NO: 2979850 - DNA, 25 bp, Homo sapien
caatgtattctttgtaaggatctgg

SEQ ID NO: 2979851 - DNA, 25 bp, Homo sapien
caggtagtcccagagagctggtcgt

SEQ ID NO: 2979852 - DNA, 25 bp, Homo sapien
tcctctcttaagacaagcagatttc

SEQ ID NO: 2979853 - DNA, 25 bp, Homo sapien
agcagatttccttcggggtccttgg

SEQ ID NO: 2979854 - DNA, 25 bp, Homo sapien
gaaaaagatatcagcgtactcagca

SEQ ID NO: 2979855 - DNA, 25 bp, Homo sapien
gaactgatagcccagcctactggga

SEQ ID NO: 2979856 - DNA, 25 bp, Homo sapien
aggacccctcccaggaactgatagc

SEQ ID NO: 2979857 - DNA, 25 bp, Homo sapien
tatgttacacgagaaccatttagct

SEQ ID NO: 2979858 - DNA, 25 bp, Homo sapien
ccagaatgctttggcaagacgatga

SEQ ID NO: 2979859 - DNA, 25 bp, Homo sapien
aatgctttggcaagacgatgaagct

SEQ ID NO: 2979860 - DNA, 25 bp, Homo sapien
gaatgctttggcaagacgatgaagc

SEQ ID NO: 2979861 - DNA, 25 bp, Homo sapien
agaatgctttggcaagacgatgaag

SEQ ID NO: 2979862 - DNA, 25 bp, Homo sapien
tgagactctgccttcagcaaacagc

SEQ ID NO: 2979863 - DNA, 25 bp, Homo sapien
gagactctgccttcagcaaacagcc

SEQ ID NO: 2979864 - DNA, 25 bp, Homo sapien
taaggtggctgcgtttttggcacgt

SEQ ID NO: 2979865 - DNA, 25 bp, Homo sapien
tggacgaagggtcattctctgataa

SEQ ID NO: 2979866 - DNA, 25 bp, Homo sapien
gctgaatcttgtacctgggccctga

SEQ ID NO: 2979867 - DNA, 25 bp, Homo sapien
ctgaagagtgaacctgctgaatctt

SEQ ID NO: 2979868 - DNA, 25 bp, Homo sapien
ccttgcggcgtagggagtatcattc

SEQ ID NO: 2979869 - DNA, 25 bp, Homo sapien
aaatgatgcaatgtgcgcagcggcc

SEQ ID NO: 2979870 - DNA, 25 bp, Homo sapien
tattccagtttaacccgcaagagcc

SEQ ID NO: 2979871 - DNA, 25 bp, Homo sapien
gaagatttcacccacaccagtgtcg

SEQ ID NO: 2979872 - DNA, 25 bp, Homo sapien
tcgccaggttggctgcgaaactgtg

SEQ ID NO: 2979873 - DNA, 25 bp, Homo sapien
aagtgaggtcgccagagaggtgagg

SEQ ID NO: 2979874 - DNA, 25 bp, Homo sapien
cccgcggactgacggcgttggcgca

SEQ ID NO: 2979875 - DNA, 25 bp, Homo sapien
ctctgtggagttaggtgtcgggatc

SEQ ID NO: 2979876 - DNA, 25 bp, Homo sapien
cctccgccatcttcgttgggggcgg

SEQ ID NO: 2979877 - DNA, 25 bp, Homo sapien
ggtgcactcgtcagcccccggcgat

SEQ ID NO: 2979878 - DNA, 25 bp, Homo sapien
gcgatctacctacgcccttttagtc

SEQ ID NO: 2979879 - DNA, 25 bp, Homo sapien
tccgccatcttcgttgggggcggaa

SEQ ID NO: 2979880 - DNA, 25 bp, Homo sapien
agagccgcagggtcgcgcagatcca

SEQ ID NO: 2979881 - DNA, 25 bp, Homo sapien
gtgctcgatctcggcccgaacctgg

SEQ ID NO: 2979882 - DNA, 25 bp, Homo sapien
tccgctccatgcgtctcgaaaagag

SEQ ID NO: 2979883 - DNA, 25 bp, Homo sapien
tccagccgcttcagcgcgggtgagg

SEQ ID NO: 2979884 - DNA, 25 bp, Homo sapien
atcaggtcgcggtaccgttcgccca

SEQ ID NO: 2979885 - DNA, 25 bp, Homo sapien
atggtgtcggccgcctcgatcaggt

SEQ ID NO: 2979886 - DNA, 25 bp, Homo sapien
gtccactagccccacggcgcagcgg

SEQ ID NO: 2979887 - DNA, 25 bp, Homo sapien
gcgcagcggcgcatctggccgatgg

SEQ ID NO: 2979888 - DNA, 25 bp, Homo sapien
gccggggcgcggccgagccggcctg

SEQ ID NO: 2979889 - DNA, 25 bp, Homo sapien
ggggcgcggccgagccggcctggcg

SEQ ID NO: 2979890 - DNA, 25 bp, Homo sapien
gctgggcccgcggtggccggggcgc

SEQ ID NO: 2979891 - DNA, 25 bp, Homo sapien
cggcctggcggaggcgggcgcagta

SEQ ID NO: 2979892 - DNA, 25 bp, Homo sapien
tgcaaggccaggggctccgggaccc

SEQ ID NO: 2979893 - DNA, 25 bp, Homo sapien
ctgcaaggccaggggctccgggacc

SEQ ID NO: 2979894 - DNA, 25 bp, Homo sapien
tcagcagccgcatatgtgcaaggaa

SEQ ID NO: 2979895 - DNA, 25 bp, Homo sapien
gaatggcatttccagaacggatcag

SEQ ID NO: 2979896 - DNA, 25 bp, Homo sapien
ggaaagcgcctgaagaaactgttga

SEQ ID NO: 2979897 - DNA, 25 bp, Homo sapien
tccgctaaaattgaaaggagcccag

SEQ ID NO: 2979898 - DNA, 25 bp, Homo sapien
ttgtgtctaatcaatagcgtttggg

SEQ ID NO: 2979899 - DNA, 25 bp, Homo sapien
agaacacgggataaggagaacctga

SEQ ID NO: 2979900 - DNA, 25 bp, Homo sapien
aagaacacgggataaggagaacctg

SEQ ID NO: 2979901 - DNA, 25 bp, Homo sapien
tcctcattgtgtctaatcaatagcg

SEQ ID NO: 2979902 - DNA, 25 bp, Homo sapien
tatttcctcgaccaggttgtaagct

SEQ ID NO: 2979903 - DNA, 25 bp, Homo sapien
gaagcatgactcagttacagcaaag

SEQ ID NO: 2979904 - DNA, 25 bp, Homo sapien
tccagtctactgaccaggatttctg

SEQ ID NO: 2979905 - DNA, 25 bp, Homo sapien
gctcagatagcatgaacaagttcca

SEQ ID NO: 2979906 - DNA, 25 bp, Homo sapien
taagatcccatggtttttcctacac

SEQ ID NO: 2979907 - DNA, 25 bp, Homo sapien
catcaaagcccagtgtagaagagtt

SEQ ID NO: 2979908 - DNA, 25 bp, Homo sapien
caaaacttctattaagctgggttca

SEQ ID NO: 2979909 - DNA, 25 bp, Homo sapien
tagaagagttgccagagtcaggagt

SEQ ID NO: 2979910 - DNA, 25 bp, Homo sapien
taaaccagaagaacgaacaaaagca

SEQ ID NO: 2979911 - DNA, 25 bp, Homo sapien
accagaagaacgaacaaaagcaatc

SEQ ID NO: 2979912 - DNA, 25 bp, Homo sapien
aaccagaagaacgaacaaaagcaat

SEQ ID NO: 2979913 - DNA, 25 bp, Homo sapien
ccagaagaacgaacaaaagcaatct

SEQ ID NO: 2979914 - DNA, 25 bp, Homo sapien
gtagaacttctcctgggatggctgc

SEQ ID NO: 2979915 - DNA, 25 bp, Homo sapien
acttctcctgggatggctgctgtgg

SEQ ID NO: 2979916 - DNA, 25 bp, Homo sapien
gctgtagaacttctcctgggatggc

SEQ ID NO: 2979917 - DNA, 25 bp, Homo sapien
aacttctcctgggatggctgctgtg

SEQ ID NO: 2979918 - DNA, 25 bp, Homo sapien
tttctaagagtagcttgatctgggc

SEQ ID NO: 2979919 - DNA, 25 bp, Homo sapien
ttctaagagtagcttgatctgggca

SEQ ID NO: 2979920 - DNA, 25 bp, Homo sapien
tctaagagtagcttgatctgggcag

SEQ ID NO: 2979921 - DNA, 25 bp, Homo sapien
ctaagagtagcttgatctgggcagc

SEQ ID NO: 2979922 - DNA, 25 bp, Homo sapien
gacgggactgtatcgggaactagaa

SEQ ID NO: 2979923 - DNA, 25 bp, Homo sapien
gccacctgccggatgagtataggaa

SEQ ID NO: 2979924 - DNA, 25 bp, Homo sapien
tatcgggaactagaagaatccagct

SEQ ID NO: 2979925 - DNA, 25 bp, Homo sapien
gagacactgagaggcttccatcgag

SEQ ID NO: 2979926 - DNA, 25 bp, Homo sapien
agaagtttctgaatagttgcctttc

SEQ ID NO: 2979927 - DNA, 25 bp, Homo sapien
gcttggcgaggagaactctcttcta

SEQ ID NO: 2979928 - DNA, 25 bp, Homo sapien
tgaatagttgcctttctggccagca

SEQ ID NO: 2979929 - DNA, 25 bp, Homo sapien
taagagcattatagagcacagggcc

SEQ ID NO: 2979930 - DNA, 25 bp, Homo sapien
ggtggccagcaactccactaatgag

SEQ ID NO: 2979931 - DNA, 25 bp, Homo sapien
gagcaaatctgagccttgataccag

SEQ ID NO: 2979932 - DNA, 25 bp, Homo sapien
tgagcttgcttcagagtggtggcca

SEQ ID NO: 2979933 - DNA, 25 bp, Homo sapien
caaagtgtagaaaagggcatgagct

SEQ ID NO: 2979934 - DNA, 25 bp, Homo sapien
tggctggaactcgacgatggatgct

SEQ ID NO: 2979935 - DNA, 25 bp, Homo sapien
atccatttctgcagcgtgtctttca

SEQ ID NO: 2979936 - DNA, 25 bp, Homo sapien
ttcaggtattcctgactgatgggat

SEQ ID NO: 2979937 - DNA, 25 bp, Homo sapien
tggatgctggcaggtgtttaaacca

SEQ ID NO: 2979938 - DNA, 25 bp, Homo sapien
gactcattggtaagtaactcccaca

SEQ ID NO: 2979939 - DNA, 25 bp, Homo sapien
ccagctgtgattggtggactcattg

SEQ ID NO: 2979940 - DNA, 25 bp, Homo sapien
taatcggtcaaggaacagttgctgc

SEQ ID NO: 2979941 - DNA, 25 bp, Homo sapien
tcttcacgtacatgagcaggttggt

SEQ ID NO: 2979942 - DNA, 25 bp, Homo sapien
catcggaaggcaggtcattaggact

SEQ ID NO: 2979943 - DNA, 25 bp, Homo sapien
tgctttcatggagaggccgctactg

SEQ ID NO: 2979944 - DNA, 25 bp, Homo sapien
tactggagatggagtcaaagccttc

SEQ ID NO: 2979945 - DNA, 25 bp, Homo sapien
tgcttgatgcatgccacggactgag

SEQ ID NO: 2979946 - DNA, 25 bp, Homo sapien
ctgtgcagggagtcggatcttggat

SEQ ID NO: 2979947 - DNA, 25 bp, Homo sapien
tggccagaactgagccagcatcatc

SEQ ID NO: 2979948 - DNA, 25 bp, Homo sapien
ctagaagtaatgactgggtgaatcc

SEQ ID NO: 2979949 - DNA, 25 bp, Homo sapien
ctagctcatcccagctggtggctgt

SEQ ID NO: 2979950 - DNA, 25 bp, Homo sapien
aaacaggaaggactgtacataccag

SEQ ID NO: 2979951 - DNA, 25 bp, Homo sapien
ggcagctactacttgaaccatacag

SEQ ID NO: 2979952 - DNA, 25 bp, Homo sapien
ttcttcggagagtttctcataggca

SEQ ID NO: 2979953 - DNA, 25 bp, Homo sapien
ggcatggcctccaacccgattaatt

SEQ ID NO: 2979954 - DNA, 25 bp, Homo sapien
atgtcacctttggcaaggcatggcc

SEQ ID NO: 2979955 - DNA, 25 bp, Homo sapien
gatgtgaactgctcaaacccaagac

SEQ ID NO: 2979956 - DNA, 25 bp, Homo sapien
ggctgggtgatccttaacagtttga

SEQ ID NO: 2979957 - DNA, 25 bp, Homo sapien
tcttagcgaagatctgctgaccctt

SEQ ID NO: 2979958 - DNA, 25 bp, Homo sapien
acagcgctgggtgctactcctaaga

SEQ ID NO: 2979959 - DNA, 25 bp, Homo sapien
gaggctcattagagaagacttactg

SEQ ID NO: 2979960 - DNA, 25 bp, Homo sapien
gagtttcagcttgctatttcagaag

SEQ ID NO: 2979961 - DNA, 25 bp, Homo sapien
gatggttttaatgctcatatggcca

SEQ ID NO: 2979962 - DNA, 25 bp, Homo sapien
cctcagatgctgtaaatggttgttc

SEQ ID NO: 2979963 - DNA, 25 bp, Homo sapien
ctgcagcgcccggttctgggtgact

SEQ ID NO: 2979964 - DNA, 25 bp, Homo sapien
ggctgtcagaacaatgttgaggtaa

SEQ ID NO: 2979965 - DNA, 25 bp, Homo sapien
agtctggcttgctccggccactctt

SEQ ID NO: 2979966 - DNA, 25 bp, Homo sapien
ggtaacgcagatcataaagcagctg

SEQ ID NO: 2979967 - DNA, 25 bp, Homo sapien
gaagagaccgccttgacatagctcc

SEQ ID NO: 2979968 - DNA, 25 bp, Homo sapien
gagtccacctatttcacttgaccat

SEQ ID NO: 2979969 - DNA, 25 bp, Homo sapien
cagcaggcggccattatttaacttg

SEQ ID NO: 2979970 - DNA, 25 bp, Homo sapien
gggaataagagtccacctatttcac

SEQ ID NO: 2979971 - DNA, 25 bp, Homo sapien
ttgaccattgcatttatccagcagg

SEQ ID NO: 2979972 - DNA, 25 bp, Homo sapien
actgatgatagtgcttaagtcaccc

SEQ ID NO: 2979973 - DNA, 25 bp, Homo sapien
gctggcttagtacgtttgtcactga

SEQ ID NO: 2979974 - DNA, 25 bp, Homo sapien
ggttttattctacttagttgctggc

SEQ ID NO: 2979975 - DNA, 25 bp, Homo sapien
tcctactgctgtagaaatcttggag

SEQ ID NO: 2979976 - DNA, 25 bp, Homo sapien
gcgtgaaaacgtccaggtcaaatgg

SEQ ID NO: 2979977 - DNA, 25 bp, Homo sapien
caaatggatcaatgagggcttccag

SEQ ID NO: 2979978 - DNA, 25 bp, Homo sapien
ttccaggtggtcagtcactttctca

SEQ ID NO: 2979979 - DNA, 25 bp, Homo sapien
ggcgatgaaggttgctgttgaggtg

SEQ ID NO: 2979980 - DNA, 25 bp, Homo sapien
ttcttgggagttgaacgtactgctc

SEQ ID NO: 2979981 - DNA, 25 bp, Homo sapien
taccagtcaccaatccaaacagaac

SEQ ID NO: 2979982 - DNA, 25 bp, Homo sapien
actggatgccagtggcaggatgtta

SEQ ID NO: 2979983 - DNA, 25 bp, Homo sapien
tctgtaccagtcaccaatccaaaca

SEQ ID NO: 2979984 - DNA, 25 bp, Homo sapien
gcctcccgaagtgccccgcagaagc

SEQ ID NO: 2979985 - DNA, 25 bp, Homo sapien
agtgccccgcagaagcctcttggca

SEQ ID NO: 2979986 - DNA, 25 bp, Homo sapien
cgaagtgccccgcagaagcctcttg

SEQ ID NO: 2979987 - DNA, 25 bp, Homo sapien
gtgccccgcagaagcctcttggcag

SEQ ID NO: 2979988 - DNA, 25 bp, Homo sapien
taggcacctgccaccaggccagcta

SEQ ID NO: 2979989 - DNA, 25 bp, Homo sapien
ataggcacctgccaccaggccagct

SEQ ID NO: 2979990 - DNA, 25 bp, Homo sapien
ctataggcacctgccaccaggccag

SEQ ID NO: 2979991 - DNA, 25 bp, Homo sapien
actataggcacctgccaccaggcca

SEQ ID NO: 2979992 - DNA, 25 bp, Homo sapien
caagaggaaagaatttagtagcaca

SEQ ID NO: 2979993 - DNA, 25 bp, Homo sapien
aacaagaggaaagaatttagtagca

SEQ ID NO: 2979994 - DNA, 25 bp, Homo sapien
tttagtagcacaaacaggcagctct

SEQ ID NO: 2979995 - DNA, 25 bp, Homo sapien
gaaagaatttagtagcacaaacagg

SEQ ID NO: 2979996 - DNA, 25 bp, Homo sapien
ggttgatttagcctttcgagtgctt

SEQ ID NO: 2979997 - DNA, 25 bp, Homo sapien
ctgagcttttgtttcgatgtttctg

SEQ ID NO: 2979998 - DNA, 25 bp, Homo sapien
cctttcgagtgcttgtcatgctcag

SEQ ID NO: 2979999 - DNA, 25 bp, Homo sapien
gagcttttgtttcgatgtttctggt

SEQ ID NO: 2980000 - DNA, 25 bp, Homo sapien
tttaaaagggagctgatcatgggtg

SEQ ID NO: 2980001 - DNA, 25 bp, Homo sapien
gtacaatgatagtgccgggttggca

SEQ ID NO: 2980002 - DNA, 25 bp, Homo sapien
tattgcgccgccattaaaagcagca

SEQ ID NO: 2980003 - DNA, 25 bp, Homo sapien
tacttggtagtgtcagcgggcatct

SEQ ID NO: 2980004 - DNA, 25 bp, Homo sapien
gtgtattaacaagaaaatgtcaaac

SEQ ID NO: 2980005 - DNA, 25 bp, Homo sapien
ctgaaatgaaacgtgtattaacaag

SEQ ID NO: 2980006 - DNA, 25 bp, Homo sapien
tgtattaacaagaaaatgtcaaact

SEQ ID NO: 2980007 - DNA, 25 bp, Homo sapien
tgaaacgtgtattaacaagaaaatg

SEQ ID NO: 2980008 - DNA, 25 bp, Homo sapien
ctgcaggcttaacagttggcatcgt

SEQ ID NO: 2980009 - DNA, 25 bp, Homo sapien
acatagcccatgcttagggactgga

SEQ ID NO: 2980010 - DNA, 25 bp, Homo sapien
tttgaagaggacacggaacagcatg

SEQ ID NO: 2980011 - DNA, 25 bp, Homo sapien
gaagcacgatggctctagtcagagg

SEQ ID NO: 2980012 - DNA, 25 bp, Homo sapien
acagcctgctaacctaatgtgggca

SEQ ID NO: 2980013 - DNA, 25 bp, Homo sapien
taatgaaggtgcagacgtgttgtct

SEQ ID NO: 2980014 - DNA, 25 bp, Homo sapien
tagtcatactagagagccagccaag

SEQ ID NO: 2980015 - DNA, 25 bp, Homo sapien
gacaagctgtctgaacaaggagcca

SEQ ID NO: 2980016 - DNA, 25 bp, Homo sapien
gaactgtcgggtcaccagctgtgga

SEQ ID NO: 2980017 - DNA, 25 bp, Homo sapien
aatgtggtagtatttatttagggag

SEQ ID NO: 2980018 - DNA, 25 bp, Homo sapien
atgtggtagtatttatttagggaga

SEQ ID NO: 2980019 - DNA, 25 bp, Homo sapien
taatgtggtagtatttatttaggga

SEQ ID NO: 2980020 - DNA, 25 bp, Homo sapien
ataatgtggtagtatttatttaggg

SEQ ID NO: 2980021 - DNA, 25 bp, Homo sapien
gactgtcagtgaagcacactcccta

SEQ ID NO: 2980022 - DNA, 25 bp, Homo sapien
tgtaagctacctgaactgatgtcta

SEQ ID NO: 2980023 - DNA, 25 bp, Homo sapien
cagactttagtaggaaacatggcac

SEQ ID NO: 2980024 - DNA, 25 bp, Homo sapien
gccttttaaaaatgcgggatcttca

SEQ ID NO: 2980025 - DNA, 25 bp, Homo sapien
aatgactcatacattcccttggagg

SEQ ID NO: 2980026 - DNA, 25 bp, Homo sapien
gaaaaagttaggcacgctcatgtac

SEQ ID NO: 2980027 - DNA, 25 bp, Homo sapien
tgtgtcctgcagttacagaatacca

SEQ ID NO: 2980028 - DNA, 25 bp, Homo sapien
gagtagcctctccaagatgactaaa

SEQ ID NO: 2980029 - DNA, 25 bp, Homo sapien
gactttacctagttgtaagcagaca

SEQ ID NO: 2980030 - DNA, 25 bp, Homo sapien
tttcttatgtgtagactttacctag

SEQ ID NO: 2980031 - DNA, 25 bp, Homo sapien
cagaaccaatgtctttgcctaaggg

SEQ ID NO: 2980032 - DNA, 25 bp, Homo sapien
aatgtggatgtattaaacggctaag

SEQ ID NO: 2980033 - DNA, 25 bp, Homo sapien
ggtttgagtcttgttaatgatggca

SEQ ID NO: 2980034 - DNA, 25 bp, Homo sapien
aatggcctcggcaccatcacaagtc

SEQ ID NO: 2980035 - DNA, 25 bp, Homo sapien
aagtcttggtttgagtcttgttaat

SEQ ID NO: 2980036 - DNA, 25 bp, Homo sapien
ggtatgtgaccatagctccaatggc

SEQ ID NO: 2980037 - DNA, 25 bp, Homo sapien
taagtaaatacagttgcagctggct

SEQ ID NO: 2980038 - DNA, 25 bp, Homo sapien
tatactaggttaggagacgcctttg

SEQ ID NO: 2980039 - DNA, 25 bp, Homo sapien
catgattcgcaaggtgcaagtggcc

SEQ ID NO: 2980040 - DNA, 25 bp, Homo sapien
aaacaaagcgttctgcgcggtgggt

SEQ ID NO: 2980041 - DNA, 25 bp, Homo sapien
aactgattgtagttcttgccttgat

SEQ ID NO: 2980042 - DNA, 25 bp, Homo sapien
tttcttagagtagcatcacccttgt

SEQ ID NO: 2980043 - DNA, 25 bp, Homo sapien
gctattatagtacgaaatagatata

SEQ ID NO: 2980044 - DNA, 25 bp, Homo sapien
cagaaatcttccctaatctgtttaa

SEQ ID NO: 2980045 - DNA, 25 bp, Homo sapien
gcatcacccttgtgctattatagta

SEQ ID NO: 2980046 - DNA, 25 bp, Homo sapien
gattgtgtgacactccctaagcctc

SEQ ID NO: 2980047 - DNA, 25 bp, Homo sapien
caatttgatgctggtttcactctca

SEQ ID NO: 2980048 - DNA, 25 bp, Homo sapien
cctggtccatctatagattgtgtga

SEQ ID NO: 2980049 - DNA, 25 bp, Homo sapien
ggtctgctcaatgcaagttaataca

SEQ ID NO: 2980050 - DNA, 25 bp, Homo sapien
ctttgtatattgttgagagagattc

SEQ ID NO: 2980051 - DNA, 25 bp, Homo sapien
tcttcaagacaggactctttgtata

SEQ ID NO: 2980052 - DNA, 25 bp, Homo sapien
tggccagagccttcataaatttatc

SEQ ID NO: 2980053 - DNA, 25 bp, Homo sapien
gatcttcaagacaggactctttgta

SEQ ID NO: 2980054 - DNA, 25 bp, Homo sapien
gagagacgacgtctcactatatggc

SEQ ID NO: 2980055 - DNA, 25 bp, Homo sapien
catgcctggctagaattcccttcct

SEQ ID NO: 2980056 - DNA, 25 bp, Homo sapien
tttggagagacgacgtctcactata

SEQ ID NO: 2980057 - DNA, 25 bp, Homo sapien
accatgcctggctagaattcccttc

SEQ ID NO: 2980058 - DNA, 25 bp, Homo sapien
tatctgccagttttgaagcctgaga

SEQ ID NO: 2980059 - DNA, 25 bp, Homo sapien
gaaaacaagattagaggctaccatg

SEQ ID NO: 2980060 - DNA, 25 bp, Homo sapien
aagattacttctatggtgttggcca

SEQ ID NO: 2980061 - DNA, 25 bp, Homo sapien
cagtcaagggtatggtaggtctaac

SEQ ID NO: 2980062 - DNA, 25 bp, Homo sapien
tttcattatcttgttgtgaaaagag

SEQ ID NO: 2980063 - DNA, 25 bp, Homo sapien
cattatcttgttgtgaaaagagctc

SEQ ID NO: 2980064 - DNA, 25 bp, Homo sapien
tacttttcattatcttgttgtgaaa

SEQ ID NO: 2980065 - DNA, 25 bp, Homo sapien
ttacttttcattatcttgttgtgaa

SEQ ID NO: 2980066 - DNA, 25 bp, Homo sapien
cggaattaggagcaagatctttaga

SEQ ID NO: 2980067 - DNA, 25 bp, Homo sapien
ttacagacatgccatcggaattagg

SEQ ID NO: 2980068 - DNA, 25 bp, Homo sapien
atttggtcccatagtgaaaacctag

SEQ ID NO: 2980069 - DNA, 25 bp, Homo sapien
taaagcctctccttgtatagaaaag

SEQ ID NO: 2980070 - DNA, 25 bp, Homo sapien
agctgccatgagcgagcgcctccgt

SEQ ID NO: 2980071 - DNA, 25 bp, Homo sapien
tgttccctctcttcgcggagcggcg

SEQ ID NO: 2980072 - DNA, 25 bp, Homo sapien
ccctttccattcgtcgcctgaggat

SEQ ID NO: 2980073 - DNA, 25 bp, Homo sapien
cgcctccgtcccaggtgagagggaa

SEQ ID NO: 2980074 - DNA, 25 bp, Homo sapien
agtagtggtggtacgggtccgactg

SEQ ID NO: 2980075 - DNA, 25 bp, Homo sapien
gcgcggagcagacgccggaagtagt

SEQ ID NO: 2980076 - DNA, 25 bp, Homo sapien
cagtcggtgcggttgggatggtgcc

SEQ ID NO: 2980077 - DNA, 25 bp, Homo sapien
ctgcgcagccgcgagagggcggtac

SEQ ID NO: 2980078 - DNA, 25 bp, Homo sapien
cgagcccgcctcttcccgtgggcgg

SEQ ID NO: 2980079 - DNA, 25 bp, Homo sapien
ctagtcgctcctcccgctccgagcc

SEQ ID NO: 2980080 - DNA, 25 bp, Homo sapien
tcctcccgctccgagcccgcctctt

SEQ ID NO: 2980081 - DNA, 25 bp, Homo sapien
ctccgagcccgcctcttcccgtggg

SEQ ID NO: 2980082 - DNA, 25 bp, Homo sapien
ttggctgtgaacaggcgagcgcttc

SEQ ID NO: 2980083 - DNA, 25 bp, Homo sapien
tggctgtgaacaggcgagcgcttct

SEQ ID NO: 2980084 - DNA, 25 bp, Homo sapien
gtgaacaggcgagcgcttctgccac

SEQ ID NO: 2980085 - DNA, 25 bp, Homo sapien
gctgtgaacaggcgagcgcttctgc

SEQ ID NO: 2980086 - DNA, 25 bp, Homo sapien
tgaatttatttgaaacctggcttga

SEQ ID NO: 2980087 - DNA, 25 bp, Homo sapien
taattgaatttatttgaaacctggc

SEQ ID NO: 2980088 - DNA, 25 bp, Homo sapien
aatttatttgaaacctggcttgact

SEQ ID NO: 2980089 - DNA, 25 bp, Homo sapien
tttgaaacctggcttgacttttata

SEQ ID NO: 2980090 - DNA, 25 bp, Homo sapien
cggaagacctgaaagcccaggcggc

SEQ ID NO: 2980091 - DNA, 25 bp, Homo sapien
gcccaggcggccccggcgacaagcc

SEQ ID NO: 2980092 - DNA, 25 bp, Homo sapien
gaagacctgaaagcccaggcggccc

SEQ ID NO: 2980093 - DNA, 25 bp, Homo sapien
ctcggaagacctgaaagcccaggcg

SEQ ID NO: 2980094 - DNA, 25 bp, Homo sapien
aacccgcccttgcaagctccccaca

SEQ ID NO: 2980095 - DNA, 25 bp, Homo sapien
caaacccgcccttgcaagctcccca

SEQ ID NO: 2980096 - DNA, 25 bp, Homo sapien
gctcctgggtcagggacagccgttc

SEQ ID NO: 2980097 - DNA, 25 bp, Homo sapien
tcctgggtcagggacagccgttccc

SEQ ID NO: 2980098 - DNA, 25 bp, Homo sapien
cagctcctgggtcagggacagccgt

SEQ ID NO: 2980099 - DNA, 25 bp, Homo sapien
gggtcggcccggcagctcctgggtc

SEQ ID NO: 2980100 - DNA, 25 bp, Homo sapien
gctgcgttaccagcctgcccacctc

SEQ ID NO: 2980101 - DNA, 25 bp, Homo sapien
cctcctcccgctgcgttaccagcct

SEQ ID NO: 2980102 - DNA, 25 bp, Homo sapien
tagttccactaatcctcaccctcac

SEQ ID NO: 2980103 - DNA, 25 bp, Homo sapien
ggacctcaatagttccactaatcct

SEQ ID NO: 2980104 - DNA, 25 bp, Homo sapien
ccgatcaccgttcccgagtgtggca

SEQ ID NO: 2980105 - DNA, 25 bp, Homo sapien
cctccaggaggatgctagttttgtg

SEQ ID NO: 2980106 - DNA, 25 bp, Homo sapien
ggcagaatgaaacgtgaatgtcagc

SEQ ID NO: 2980107 - DNA, 25 bp, Homo sapien
gcttctcccggatccccatgcttcc

SEQ ID NO: 2980108 - DNA, 25 bp, Homo sapien
tgtaaaaacctagcactgagcctgg

SEQ ID NO: 2980109 - DNA, 25 bp, Homo sapien
tttctataaagttccagagggcagg

SEQ ID NO: 2980110 - DNA, 25 bp, Homo sapien
tacacactaacaggatgaaagccac

SEQ ID NO: 2980111 - DNA, 25 bp, Homo sapien
caacccaccttatcctgtacgaagt

SEQ ID NO: 2980112 - DNA, 25 bp, Homo sapien
ttaatcgtttaaatggcttcttaca

SEQ ID NO: 2980113 - DNA, 25 bp, Homo sapien
cttacagtatggcaagtgggatttt

SEQ ID NO: 2980114 - DNA, 25 bp, Homo sapien
ttacagtatggcaagtgggatttta

SEQ ID NO: 2980115 - DNA, 25 bp, Homo sapien
gcttcttacagtaaggacacacttc

SEQ ID NO: 2980116 - DNA, 25 bp, Homo sapien
tgtagctggcttggactgataaact

SEQ ID NO: 2980117 - DNA, 25 bp, Homo sapien
ccaatttgagatcaccagaggtagt

SEQ ID NO: 2980118 - DNA, 25 bp, Homo sapien
gccaaccagtaaagacgctccagct

SEQ ID NO: 2980119 - DNA, 25 bp, Homo sapien
tatctgcctttgtagtagctgctct

SEQ ID NO: 2980120 - DNA, 25 bp, Homo sapien
tgggctgaacataaagggctctggc

SEQ ID NO: 2980121 - DNA, 25 bp, Homo sapien
ccagagataactgtccctcgggact

SEQ ID NO: 2980122 - DNA, 25 bp, Homo sapien
tggtaagtcgtctccctcggaatga

SEQ ID NO: 2980123 - DNA, 25 bp, Homo sapien
taactgtaacatcagtagggactcc

SEQ ID NO: 2980124 - DNA, 25 bp, Homo sapien
tccaaggtaaccaggatagagctct

SEQ ID NO: 2980125 - DNA, 25 bp, Homo sapien
ccctagtccaaggtaaccaggatag

SEQ ID NO: 2980126 - DNA, 25 bp, Homo sapien
aggtaaccaggatagagctctggaa

SEQ ID NO: 2980127 - DNA, 25 bp, Homo sapien
tagtccaaggtaaccaggatagagc

SEQ ID NO: 2980128 - DNA, 25 bp, Homo sapien
ctgggtcattgcattccaacactga

SEQ ID NO: 2980129 - DNA, 25 bp, Homo sapien
cttctgggtcattgcattccaacac

SEQ ID NO: 2980130 - DNA, 25 bp, Homo sapien
tgtgagagtctttccccctggggac

SEQ ID NO: 2980131 - DNA, 25 bp, Homo sapien
ggactgataagttgtggcttctggg

SEQ ID NO: 2980132 - DNA, 25 bp, Homo sapien
gatgggacagatggcaattgaaaat

SEQ ID NO: 2980133 - DNA, 25 bp, Homo sapien
caggacaactttatatgcagtctac

SEQ ID NO: 2980134 - DNA, 25 bp, Homo sapien
tggcatgcctaggtgaaaataaact

SEQ ID NO: 2980135 - DNA, 25 bp, Homo sapien
ccttataaattcaaaaggcagagag

SEQ ID NO: 2980136 - DNA, 25 bp, Homo sapien
tcaacgttcagtctttcgccccaag

SEQ ID NO: 2980137 - DNA, 25 bp, Homo sapien
tgttaaccgattccagccatcagca

SEQ ID NO: 2980138 - DNA, 25 bp, Homo sapien
taatcaaggtgagtttcaacgttca

SEQ ID NO: 2980139 - DNA, 25 bp, Homo sapien
tcagcaaaaggagcctctaggaagc

SEQ ID NO: 2980140 - DNA, 25 bp, Homo sapien
tcctggctccttgggccttggtctt

SEQ ID NO: 2980141 - DNA, 25 bp, Homo sapien
gactgtcaggaacttcctggctcct

SEQ ID NO: 2980142 - DNA, 25 bp, Homo sapien
gaacttcctggctccttgggccttg

SEQ ID NO: 2980143 - DNA, 25 bp, Homo sapien
tcaaatgactgtcaggaacttcctg

SEQ ID NO: 2980144 - DNA, 25 bp, Homo sapien
actagagaggtggtctcataactaa

SEQ ID NO: 2980145 - DNA, 25 bp, Homo sapien
aagatgagattcagcagagaaaagc

SEQ ID NO: 2980146 - DNA, 25 bp, Homo sapien
tatgctactttacaatcaccctgcc

SEQ ID NO: 2980147 - DNA, 25 bp, Homo sapien
gaggtggtctcataactaaagatga

SEQ ID NO: 2980148 - DNA, 25 bp, Homo sapien
tgcaaaaaggtctagacgttaggcc

SEQ ID NO: 2980149 - DNA, 25 bp, Homo sapien
ccctttaggaagagataataccagt

SEQ ID NO: 2980150 - DNA, 25 bp, Homo sapien
tacaggtctcctgtcaaaataagca

SEQ ID NO: 2980151 - DNA, 25 bp, Homo sapien
gcatgaaagcaccaatggccactac

SEQ ID NO: 2980152 - DNA, 25 bp, Homo sapien
caacaggtttagcaagtgtggtaaa

SEQ ID NO: 2980153 - DNA, 25 bp, Homo sapien
ttaaacaccgacaacaggtttagca

SEQ ID NO: 2980154 - DNA, 25 bp, Homo sapien
cgacaacaggtttagcaagtgtggt

SEQ ID NO: 2980155 - DNA, 25 bp, Homo sapien
caggtttagcaagtgtggtaaaagt

SEQ ID NO: 2980156 - DNA, 25 bp, Homo sapien
gcagaaccagaaaagagggcttatg

SEQ ID NO: 2980157 - DNA, 25 bp, Homo sapien
acatttcctatttatgttcagtgca

SEQ ID NO: 2980158 - DNA, 25 bp, Homo sapien
cttgcccacagtcaacatgcctgtt

SEQ ID NO: 2980159 - DNA, 25 bp, Homo sapien
tcaccctatcgctattattggccag

SEQ ID NO: 2980160 - DNA, 25 bp, Homo sapien
ggatccacggctaagcctcaggaag

SEQ ID NO: 2980161 - DNA, 25 bp, Homo sapien
acatccagtgccgaaggatccacgg

SEQ ID NO: 2980162 - DNA, 25 bp, Homo sapien
ccctggccaggtgattgatgcgcat

SEQ ID NO: 2980163 - DNA, 25 bp, Homo sapien
gaagagcatattctaaacaggtgca

SEQ ID NO: 2980164 - DNA, 25 bp, Homo sapien
gctcccaagagcctcattagagaga

SEQ ID NO: 2980165 - DNA, 25 bp, Homo sapien
ggttccaaactccttatatgagttg

SEQ ID NO: 2980166 - DNA, 25 bp, Homo sapien
gagttgagcttcgttccaacaaaga

SEQ ID NO: 2980167 - DNA, 25 bp, Homo sapien
gaagttggaggttgtaagtccggca

SEQ ID NO: 2980168 - DNA, 25 bp, Homo sapien
ccttgcttaacagcccgaagagaaa

SEQ ID NO: 2980169 - DNA, 25 bp, Homo sapien
ctctttagccttgcttaacagcccg

SEQ ID NO: 2980170 - DNA, 25 bp, Homo sapien
tagccttgcttaacagcccgaagag

SEQ ID NO: 2980171 - DNA, 25 bp, Homo sapien
tttagccttgcttaacagcccgaag

SEQ ID NO: 2980172 - DNA, 25 bp, Homo sapien
tcagacgtctgaaactccagctaca

SEQ ID NO: 2980173 - DNA, 25 bp, Homo sapien
cagctacaacacaggacgaagtatc

SEQ ID NO: 2980174 - DNA, 25 bp, Homo sapien
tatggtggtgttgcacctgatccag

SEQ ID NO: 2980175 - DNA, 25 bp, Homo sapien
gaagtatcctgtgaagagcatcgtg

SEQ ID NO: 2980176 - DNA, 25 bp, Homo sapien
tcattcaccagggcatgccagatac

SEQ ID NO: 2980177 - DNA, 25 bp, Homo sapien
aacccagaaaccccaggcaatagct

SEQ ID NO: 2980178 - DNA, 25 bp, Homo sapien
ccagaaaccccaggcaatagctcat

SEQ ID NO: 2980179 - DNA, 25 bp, Homo sapien
aaaccccaggcaatagctcattcac

SEQ ID NO: 2980180 - DNA, 25 bp, Homo sapien
tggtttcaatgccaaaaaggtgctc

SEQ ID NO: 2980181 - DNA, 25 bp, Homo sapien
gacttagtgcaagctgaaacttgga

SEQ ID NO: 2980182 - DNA, 25 bp, Homo sapien
aaaagcaccttccattggagcaggg

SEQ ID NO: 2980183 - DNA, 25 bp, Homo sapien
aaaggtgctcttaggcaccaaggaa

SEQ ID NO: 2980184 - DNA, 25 bp, Homo sapien
ttcatcgttatcttgtacttttaca

SEQ ID NO: 2980185 - DNA, 25 bp, Homo sapien
cagaattcatcgttatcttgtactt

SEQ ID NO: 2980186 - DNA, 25 bp, Homo sapien
ttcagaattcatcgttatcttgtac

SEQ ID NO: 2980187 - DNA, 25 bp, Homo sapien
gccttcagaattcatcgttatcttg

SEQ ID NO: 2980188 - DNA, 25 bp, Homo sapien
tgcaggacgatcagaaaggcacttc

SEQ ID NO: 2980189 - DNA, 25 bp, Homo sapien
gggcctctccatttatgcaggacga

SEQ ID NO: 2980190 - DNA, 25 bp, Homo sapien
gaaatgactcttggttttgggcctc

SEQ ID NO: 2980191 - DNA, 25 bp, Homo sapien
caaatgtaaggatccgagaggccac

SEQ ID NO: 2980192 - DNA, 25 bp, Homo sapien
aagtatgtattgcagtcgtctccac

SEQ ID NO: 2980193 - DNA, 25 bp, Homo sapien
tatcaagatctggtcaagggcccca

SEQ ID NO: 2980194 - DNA, 25 bp, Homo sapien
tgtacgccctttgctgttccagagc

SEQ ID NO: 2980195 - DNA, 25 bp, Homo sapien
ttccagagctttaagtgatgtccag

SEQ ID NO: 2980196 - DNA, 25 bp, Homo sapien
cagagaattctaggatacagggata

SEQ ID NO: 2980197 - DNA, 25 bp, Homo sapien
catacaagtcaacacatgctggctg

SEQ ID NO: 2980198 - DNA, 25 bp, Homo sapien
gatgccacctaaccaaatgagcagg

SEQ ID NO: 2980199 - DNA, 25 bp, Homo sapien
cacaaagctctttcggcagggaaga

SEQ ID NO: 2980200 - DNA, 25 bp, Homo sapien
tccaaacatgttttagagcggcaat

SEQ ID NO: 2980201 - DNA, 25 bp, Homo sapien
cgccacaccaatgcatggaggtact

SEQ ID NO: 2980202 - DNA, 25 bp, Homo sapien
ttttagagcggcaatccccagtcgt

SEQ ID NO: 2980203 - DNA, 25 bp, Homo sapien
cagggcaggggtcggcacaattttt

SEQ ID NO: 2980204 - DNA, 25 bp, Homo sapien
caaatgctcctgataaccttgaggg

SEQ ID NO: 2980205 - DNA, 25 bp, Homo sapien
acagggcacgaaggcactagagaga

SEQ ID NO: 2980206 - DNA, 25 bp, Homo sapien
cactacacttaggtgttacagggca

SEQ ID NO: 2980207 - DNA, 25 bp, Homo sapien
acagggcaattcagtgggcaacaca

SEQ ID NO: 2980208 - DNA, 25 bp, Homo sapien
gacagggcagaacacgacttttacc

SEQ ID NO: 2980209 - DNA, 25 bp, Homo sapien
gaagtgtgcttcctcgtcatgctga

SEQ ID NO: 2980210 - DNA, 25 bp, Homo sapien
taagcgttgcttcttacctagcggg

SEQ ID NO: 2980211 - DNA, 25 bp, Homo sapien
tatgcaccttgcaggaagattcggg

SEQ ID NO: 2980212 - DNA, 25 bp, Homo sapien
tttattatgaagagtggcggaagta

SEQ ID NO: 2980213 - DNA, 25 bp, Homo sapien
ggaagtagtatgtagatgccccata

SEQ ID NO: 2980214 - DNA, 25 bp, Homo sapien
tggcggaagtagtatgtagatgccc

SEQ ID NO: 2980215 - DNA, 25 bp, Homo sapien
gtagatgccccataaagtataaaag

SEQ ID NO: 2980216 - DNA, 25 bp, Homo sapien
cacctctgccacttcggctttgcgg

SEQ ID NO: 2980217 - DNA, 25 bp, Homo sapien
ccacttcggctttgcggacaggccg

SEQ ID NO: 2980218 - DNA, 25 bp, Homo sapien
cacttcggctttgcggacaggccgg

SEQ ID NO: 2980219 - DNA, 25 bp, Homo sapien
tctgccacttcggctttgcggacag

SEQ ID NO: 2980220 - DNA, 25 bp, Homo sapien
caacctccgcttcctaggtgcaagc

SEQ ID NO: 2980221 - DNA, 25 bp, Homo sapien
aacctccgcttcctaggtgcaagcg

SEQ ID NO: 2980222 - DNA, 25 bp, Homo sapien
gcaacctccgcttcctaggtgcaag

SEQ ID NO: 2980223 - DNA, 25 bp, Homo sapien
gacatccgtggcaaagacaccagct

SEQ ID NO: 2980224 - DNA, 25 bp, Homo sapien
caaaattcacagtggcgattagcgg

SEQ ID NO: 2980225 - DNA, 25 bp, Homo sapien
tagctattaacaactgaggaaggcc

SEQ ID NO: 2980226 - DNA, 25 bp, Homo sapien
tatgagccctgaggttgactgccgg

SEQ ID NO: 2980227 - DNA, 25 bp, Homo sapien
gtgtgtccgaggctactggaactct

SEQ ID NO: 2980228 - DNA, 25 bp, Homo sapien
tactggaactctaaccagatttgca

SEQ ID NO: 2980229 - DNA, 25 bp, Homo sapien
catgtttactctggcagcatcctgg

SEQ ID NO: 2980230 - DNA, 25 bp, Homo sapien
cttcgcgtccttaaatgtggtcatg

SEQ ID NO: 2980231 - DNA, 25 bp, Homo sapien
gctgactgttcataggagccaactc

SEQ ID NO: 2980232 - DNA, 25 bp, Homo sapien
tgactgttcataggagccaactcat

SEQ ID NO: 2980233 - DNA, 25 bp, Homo sapien
gactgttcataggagccaactcata

SEQ ID NO: 2980234 - DNA, 25 bp, Homo sapien
aggctgactgttcataggagccaac

SEQ ID NO: 2980235 - DNA, 25 bp, Homo sapien
gatctgctcaccaacccagaagttg

SEQ ID NO: 2980236 - DNA, 25 bp, Homo sapien
ctggcacctcgatctgctcaccaac

SEQ ID NO: 2980237 - DNA, 25 bp, Homo sapien
gaagagctgcatgaggatgcgtggg

SEQ ID NO: 2980238 - DNA, 25 bp, Homo sapien
accttcctggcacctcgatctgctc

SEQ ID NO: 2980239 - DNA, 25 bp, Homo sapien
tgggtggtgtggctaatgggatgcg

SEQ ID NO: 2980240 - DNA, 25 bp, Homo sapien
ctcaatagttctacccgcaaggatg

SEQ ID NO: 2980241 - DNA, 25 bp, Homo sapien
gatgtgctgggtggtgtggctaatg

SEQ ID NO: 2980242 - DNA, 25 bp, Homo sapien
gttctacccgcaaggatgtgctggg

SEQ ID NO: 2980243 - DNA, 25 bp, Homo sapien
agacatggcatgaaatctgggacct

SEQ ID NO: 2980244 - DNA, 25 bp, Homo sapien
gggccatcaaagtagaggatgttca

SEQ ID NO: 2980245 - DNA, 25 bp, Homo sapien
tgggaccttgccctttcttcaggaa

SEQ ID NO: 2980246 - DNA, 25 bp, Homo sapien
cactgtcttgtagcttggaggctgg

SEQ ID NO: 2980247 - DNA, 25 bp, Homo sapien
gcttccggtcactccctagtcttgg

SEQ ID NO: 2980248 - DNA, 25 bp, Homo sapien
gatgtccttgagtcactggctcctc

SEQ ID NO: 2980249 - DNA, 25 bp, Homo sapien
aatcaagtgaagttgccggatgtcc

SEQ ID NO: 2980250 - DNA, 25 bp, Homo sapien
tgtgctgttctaattcccaggaggt

SEQ ID NO: 2980251 - DNA, 25 bp, Homo sapien
gctctgtgccaggatggcagtgctg

SEQ ID NO: 2980252 - DNA, 25 bp, Homo sapien
gatggcagtgctggcatccaaagcc

SEQ ID NO: 2980253 - DNA, 25 bp, Homo sapien
ccaggatggcagtgctggcatccaa

SEQ ID NO: 2980254 - DNA, 25 bp, Homo sapien
tgccaggatggcagtgctggcatcc

SEQ ID NO: 2980255 - DNA, 25 bp, Homo sapien
tgggttgatgccagagataaggcct

SEQ ID NO: 2980256 - DNA, 25 bp, Homo sapien
actgtctgtgcgcaggtgtggccaa

SEQ ID NO: 2980257 - DNA, 25 bp, Homo sapien
gactgattgatttctgcggcccgga

SEQ ID NO: 2980258 - DNA, 25 bp, Homo sapien
gagaagggttgagcaatctcgccct

SEQ ID NO: 2980259 - DNA, 25 bp, Homo sapien
tctgtctgtggtagccgccttcgcg

SEQ ID NO: 2980260 - DNA, 25 bp, Homo sapien
acgggcaaccgcctctgtctgtggt

SEQ ID NO: 2980261 - DNA, 25 bp, Homo sapien
cctctgtctgtggtagccgccttcg

SEQ ID NO: 2980262 - DNA, 25 bp, Homo sapien
cgaggtaggcgacgggcaaccgcct

SEQ ID NO: 2980263 - DNA, 25 bp, Homo sapien
tagaaacagcgttggcaaacttggt

SEQ ID NO: 2980264 - DNA, 25 bp, Homo sapien
ttcggtaaagggatttggccagtca

SEQ ID NO: 2980265 - DNA, 25 bp, Homo sapien
aagggatttggccagtcacagggaa

SEQ ID NO: 2980266 - DNA, 25 bp, Homo sapien
cttggtgttgtttacttccgtagca

SEQ ID NO: 2980267 - DNA, 25 bp, Homo sapien
tccaaagaggtttgctgagcgcttc

SEQ ID NO: 2980268 - DNA, 25 bp, Homo sapien
taacgcccataaagagtgagtgaaa

SEQ ID NO: 2980269 - DNA, 25 bp, Homo sapien
gcacgtctcatatactcttttctta

SEQ ID NO: 2980270 - DNA, 25 bp, Homo sapien
tgagcgcttctaccacaaagggtgg

SEQ ID NO: 2980271 - DNA, 25 bp, Homo sapien
tcacctggtgcactaagatattcca

SEQ ID NO: 2980272 - DNA, 25 bp, Homo sapien
gacacctacgtgtacatgcgggatg

SEQ ID NO: 2980273 - DNA, 25 bp, Homo sapien
cctttgcctttaatgaatcacctgg

SEQ ID NO: 2980274 - DNA, 25 bp, Homo sapien
tagcaaagagactcctgaactccct

SEQ ID NO: 2980275 - DNA, 25 bp, Homo sapien
tgtggaaatagcctgagtgtctgtg

SEQ ID NO: 2980276 - DNA, 25 bp, Homo sapien
ggataacggtatggaagttccgcag

SEQ ID NO: 2980277 - DNA, 25 bp, Homo sapien
gaaggtgttcaacatcgctcagcat

SEQ ID NO: 2980278 - DNA, 25 bp, Homo sapien
gagatatcccatcacacctgcaagg

SEQ ID NO: 2980279 - DNA, 25 bp, Homo sapien
agccagcgcatccagcctgaaattt

SEQ ID NO: 2980280 - DNA, 25 bp, Homo sapien
gccagcgcatccagcctgaaatttt

SEQ ID NO: 2980281 - DNA, 25 bp, Homo sapien
gagccagcgcatccagcctgaaatt

SEQ ID NO: 2980282 - DNA, 25 bp, Homo sapien
ctgtgaagtcaaccactgacagtca

SEQ ID NO: 2980283 - DNA, 25 bp, Homo sapien
cagtcatctatgagctatcatttca

SEQ ID NO: 2980284 - DNA, 25 bp, Homo sapien
tcctagatggtgttatgtattttga

SEQ ID NO: 2980285 - DNA, 25 bp, Homo sapien
gaaagcacaaagtccggctgtctct

SEQ ID NO: 2980286 - DNA, 25 bp, Homo sapien
tcccaaaatttgagagctgtagaca

SEQ ID NO: 2980287 - DNA, 25 bp, Homo sapien
tgaacccaacttacagtaatttcag

SEQ ID NO: 2980288 - DNA, 25 bp, Homo sapien
caaattaccataatctcaggctgga

SEQ ID NO: 2980289 - DNA, 25 bp, Homo sapien
ttgagagctgtagacaatgacaaat

SEQ ID NO: 2980290 - DNA, 25 bp, Homo sapien
tgcacagaattctgttgtttggagg

SEQ ID NO: 2980291 - DNA, 25 bp, Homo sapien
gtagttctcaaagatcgctcaggcg

SEQ ID NO: 2980292 - DNA, 25 bp, Homo sapien
gagggacaatcgtttctttaagcag

SEQ ID NO: 2980293 - DNA, 25 bp, Homo sapien
aaagatcgctcaggcgccgtctgct

SEQ ID NO: 2980294 - DNA, 25 bp, Homo sapien
gctagtgtatgacgtgcagacattt

SEQ ID NO: 2980295 - DNA, 25 bp, Homo sapien
ccctcggcaccctgaccagtaccat

SEQ ID NO: 2980296 - DNA, 25 bp, Homo sapien
ctagctagtgtatgacgtgcagaca

SEQ ID NO: 2980297 - DNA, 25 bp, Homo sapien
tagtgtatgacgtgcagacatttct

SEQ ID NO: 2980298 - DNA, 25 bp, Homo sapien
ttctgcaggctcaacgggagactcc

SEQ ID NO: 2980299 - DNA, 25 bp, Homo sapien
tactcggctcttataatgtcagggc

SEQ ID NO: 2980300 - DNA, 25 bp, Homo sapien
gaaatccattcaggaacagctgcgg

SEQ ID NO: 2980301 - DNA, 25 bp, Homo sapien
tctttcccggctaatgaagcgcttg

SEQ ID NO: 2980302 - DNA, 25 bp, Homo sapien
gacacacatgtgactgggtacctct

SEQ ID NO: 2980303 - DNA, 25 bp, Homo sapien
tggtgaggtcaagcccctaaggaca

SEQ ID NO: 2980304 - DNA, 25 bp, Homo sapien
aatgctggtgttaagtcagagccac

SEQ ID NO: 2980305 - DNA, 25 bp, Homo sapien
taaatgggtaaacatgcgctgctca

SEQ ID NO: 2980306 - DNA, 25 bp, Homo sapien
ttgttacacgccacaaagcgctggt

SEQ ID NO: 2980307 - DNA, 25 bp, Homo sapien
actgtaactgcggaaagggccatag

SEQ ID NO: 2980308 - DNA, 25 bp, Homo sapien
cctgccagggactagaatgggctga

SEQ ID NO: 2980309 - DNA, 25 bp, Homo sapien
tgggttctctgccaaccatgagagc

SEQ ID NO: 2980310 - DNA, 25 bp, Homo sapien
gaaataaaagcttcgaccatcaggg

SEQ ID NO: 2980311 - DNA, 25 bp, Homo sapien
cgggaaataaaagcttcgaccatca

SEQ ID NO: 2980312 - DNA, 25 bp, Homo sapien
ccgtagagagattgatctgctgtac

SEQ ID NO: 2980313 - DNA, 25 bp, Homo sapien
cagtgggagcagatgagccgtagag

SEQ ID NO: 2980314 - DNA, 25 bp, Homo sapien
ttgcttgatggagcgctgcactgcc

SEQ ID NO: 2980315 - DNA, 25 bp, Homo sapien
cataccagccgaaggggataccgat

SEQ ID NO: 2980316 - DNA, 25 bp, Homo sapien
gcatgagggttacacagagggctgg

SEQ ID NO: 2980317 - DNA, 25 bp, Homo sapien
tgtgtccttggctgcgggaccaggg

SEQ ID NO: 2980318 - DNA, 25 bp, Homo sapien
gaaaggagcccttatgagctgggtc

SEQ ID NO: 2980319 - DNA, 25 bp, Homo sapien
caatagatccaactttgggagataa

SEQ ID NO: 2980320 - DNA, 25 bp, Homo sapien
tatgagctgggtcaatagatccaac

SEQ ID NO: 2980321 - DNA, 25 bp, Homo sapien
agcccgatgaaaggagcccttatga

SEQ ID NO: 2980322 - DNA, 25 bp, Homo sapien
gggtgtacggtgtagccacaactca

SEQ ID NO: 2980323 - DNA, 25 bp, Homo sapien
gtacggtgtagccacaactcagcac

SEQ ID NO: 2980324 - DNA, 25 bp, Homo sapien
ttggcagcttgatggccgagaccac

SEQ ID NO: 2980325 - DNA, 25 bp, Homo sapien
gccgagaccacatttgccaggaaag

SEQ ID NO: 2980326 - DNA, 25 bp, Homo sapien
gggatgggaagcgtggagggtcaga

SEQ ID NO: 2980327 - DNA, 25 bp, Homo sapien
ggatgggaagcgtggagggtcagac

SEQ ID NO: 2980328 - DNA, 25 bp, Homo sapien
tctgcatcaaggtgcacttgcccag

SEQ ID NO: 2980329 - DNA, 25 bp, Homo sapien
cctgtgtcgattgccggaagagtct

SEQ ID NO: 2980330 - DNA, 25 bp, Homo sapien
gatattttcctctgaagagtggttc

SEQ ID NO: 2980331 - DNA, 25 bp, Homo sapien
ccttgtgttaataactcctgtgtcg

SEQ ID NO: 2980332 - DNA, 25 bp, Homo sapien
ctggccacctcctaacttgtctgat

SEQ ID NO: 2980333 - DNA, 25 bp, Homo sapien
tggccacctcctaacttgtctgatc

SEQ ID NO: 2980334 - DNA, 25 bp, Homo sapien
gagctgacagcttcagcggctggca

SEQ ID NO: 2980335 - DNA, 25 bp, Homo sapien
tcagcggctggcatggatgacgcat

SEQ ID NO: 2980336 - DNA, 25 bp, Homo sapien
gacgtgtctcttcaggaggcagccg

SEQ ID NO: 2980337 - DNA, 25 bp, Homo sapien
caacaacgggaaggctgatggcgtc

SEQ ID NO: 2980338 - DNA, 25 bp, Homo sapien
cagggcaagggctctcgagttgaga

SEQ ID NO: 2980339 - DNA, 25 bp, Homo sapien
tacggctcctctccaaacagttcat

SEQ ID NO: 2980340 - DNA, 25 bp, Homo sapien
tagggtgctcgaggaacccagaacc

SEQ ID NO: 2980341 - DNA, 25 bp, Homo sapien
tctgagcctctcctctacggctcct

SEQ ID NO: 2980342 - DNA, 25 bp, Homo sapien
ggcagagtgaccaggagcgaggctg

SEQ ID NO: 2980343 - DNA, 25 bp, Homo sapien
gccaggtccccaaaagcttgggcag

SEQ ID NO: 2980344 - DNA, 25 bp, Homo sapien
gaacctatgggttgtgtggtttctg

SEQ ID NO: 2980345 - DNA, 25 bp, Homo sapien
gagctcacagaacctatgggttgtg

SEQ ID NO: 2980346 - DNA, 25 bp, Homo sapien
tcacagaacctatgggttgtgtggt

SEQ ID NO: 2980347 - DNA, 25 bp, Homo sapien
gcatatgctctgctgcgatttgaga

SEQ ID NO: 2980348 - DNA, 25 bp, Homo sapien
tgtttccagtaagaaggcgtagccc

SEQ ID NO: 2980349 - DNA, 25 bp, Homo sapien
acatgccccacacccgaggaggaga

SEQ ID NO: 2980350 - DNA, 25 bp, Homo sapien
ctcggagctcctcggccctaatgag

SEQ ID NO: 2980351 - DNA, 25 bp, Homo sapien
aggaggagagctctcggagctcctc

SEQ ID NO: 2980352 - DNA, 25 bp, Homo sapien
tgtgtccatctctggacccggattt

SEQ ID NO: 2980353 - DNA, 25 bp, Homo sapien
cttccaggacagtcattccaaggct

SEQ ID NO: 2980354 - DNA, 25 bp, Homo sapien
atttcaggtccaaggatctgcttcc

SEQ ID NO: 2980355 - DNA, 25 bp, Homo sapien
tgtggatgaaattccttcactcttc

SEQ ID NO: 2980356 - DNA, 25 bp, Homo sapien
ggcttcctgacagccgcgtgatggc

SEQ ID NO: 2980357 - DNA, 25 bp, Homo sapien
tgaggaggcttcctgacagccgcgt

SEQ ID NO: 2980358 - DNA, 25 bp, Homo sapien
aggaggcttcctgacagccgcgtga

SEQ ID NO: 2980359 - DNA, 25 bp, Homo sapien
gaggcttcctgacagccgcgtgatg

SEQ ID NO: 2980360 - DNA, 25 bp, Homo sapien
tattgacagatgaagtccggaagcc

SEQ ID NO: 2980361 - DNA, 25 bp, Homo sapien
aagaagtgtacagtgccaggcccac

SEQ ID NO: 2980362 - DNA, 25 bp, Homo sapien
ttttctgtggtgcaagggctactgg

SEQ ID NO: 2980363 - DNA, 25 bp, Homo sapien
tgcattcatagcacgtaccccacgt

SEQ ID NO: 2980364 - DNA, 25 bp, Homo sapien
tgaaggaccccccatcacagctgag

SEQ ID NO: 2980365 - DNA, 25 bp, Homo sapien
gaaggaccccccatcacagctgagg

SEQ ID NO: 2980366 - DNA, 25 bp, Homo sapien
ggcccctgtgtcagagaccactggc

SEQ ID NO: 2980367 - DNA, 25 bp, Homo sapien
tgtgtcagagaccactggctgagct

SEQ ID NO: 2980368 - DNA, 25 bp, Homo sapien
ctctggtggcgactccctccagctt

SEQ ID NO: 2980369 - DNA, 25 bp, Homo sapien
cctgggctctggtggcgactccctc

SEQ ID NO: 2980370 - DNA, 25 bp, Homo sapien
gcccagagccgggagatactttcat

SEQ ID NO: 2980371 - DNA, 25 bp, Homo sapien
gtgaccatcagcacacgttggggtc

SEQ ID NO: 2980372 - DNA, 25 bp, Homo sapien
ttgtctcaaagtcttgaccttgtga

SEQ ID NO: 2980373 - DNA, 25 bp, Homo sapien
ggcttgtctcaaagtcttgaccttg

SEQ ID NO: 2980374 - DNA, 25 bp, Homo sapien
aggtgcgcaccaccaggtacagcta

SEQ ID NO: 2980375 - DNA, 25 bp, Homo sapien
ggtgcgcaccaccaggtacagctaa

SEQ ID NO: 2980376 - DNA, 25 bp, Homo sapien
tcaggagcttttggggttccccaga

SEQ ID NO: 2980377 - DNA, 25 bp, Homo sapien
cagaactcagggcatcataaaagct

SEQ ID NO: 2980378 - DNA, 25 bp, Homo sapien
ctgagcctttgcaggtgcaatgtca

SEQ ID NO: 2980379 - DNA, 25 bp, Homo sapien
cataaaagctcacagtgactgagcc

SEQ ID NO: 2980380 - DNA, 25 bp, Homo sapien
ggacaccccagatccacatctgggt

SEQ ID NO: 2980381 - DNA, 25 bp, Homo sapien
ttctccagctcacgtccaggggggt

SEQ ID NO: 2980382 - DNA, 25 bp, Homo sapien
gactgagttctctggaccctccttg

SEQ ID NO: 2980383 - DNA, 25 bp, Homo sapien
catcccccacgtaggaatcagcaga

SEQ ID NO: 2980384 - DNA, 25 bp, Homo sapien
gtcctctactggaaggccggcatag

SEQ ID NO: 2980385 - DNA, 25 bp, Homo sapien
gttcggcaaatatttatcgactgcc

SEQ ID NO: 2980386 - DNA, 25 bp, Homo sapien
cggcataggggccaggaaccttgtt

SEQ ID NO: 2980387 - DNA, 25 bp, Homo sapien
aatatttatcgactgcctcttcctc

SEQ ID NO: 2980388 - DNA, 25 bp, Homo sapien
aacattctggcagtggttagatgag

SEQ ID NO: 2980389 - DNA, 25 bp, Homo sapien
ttagatgagggatacagcttggtgc

SEQ ID NO: 2980390 - DNA, 25 bp, Homo sapien
gatacagcttggtgcttccactggc

SEQ ID NO: 2980391 - DNA, 25 bp, Homo sapien
cagtggttagatgagggatacagct

SEQ ID NO: 2980392 - DNA, 25 bp, Homo sapien
tgcaccggcggttcctcgactttgg

SEQ ID NO: 2980393 - DNA, 25 bp, Homo sapien
tccagacagtggtgtcagcggtgtc

SEQ ID NO: 2980394 - DNA, 25 bp, Homo sapien
tttgggagtgctacgaaggatccga

SEQ ID NO: 2980395 - DNA, 25 bp, Homo sapien
gaggtgtgatctgcgctgcccgctt

SEQ ID NO: 2980396 - DNA, 25 bp, Homo sapien
gctgctcggccagccgctggggctg

SEQ ID NO: 2980397 - DNA, 25 bp, Homo sapien
gcccctggctgctcggccagccgct

SEQ ID NO: 2980398 - DNA, 25 bp, Homo sapien
ggggctgggggtgcttcgctgcgcg

SEQ ID NO: 2980399 - DNA, 25 bp, Homo sapien
gctgggggtgcttcgctgcgcgggc

SEQ ID NO: 2980400 - DNA, 25 bp, Homo sapien
gcccctcgccttccgggcgcgctgc

SEQ ID NO: 2980401 - DNA, 25 bp, Homo sapien
cctcgccttccgggcgcgctgccgg

SEQ ID NO: 2980402 - DNA, 25 bp, Homo sapien
tcgcccctcgccttccgggcgcgct

SEQ ID NO: 2980403 - DNA, 25 bp, Homo sapien
tctttctccctgctcgcccctcgcc

SEQ ID NO: 2980404 - DNA, 25 bp, Homo sapien
gaggtcggcgatcgccgggcgtccg

SEQ ID NO: 2980405 - DNA, 25 bp, Homo sapien
ggctctccgtgcgtcttcccgagag

SEQ ID NO: 2980406 - DNA, 25 bp, Homo sapien
ctctctggacgccgagcccgggaag

SEQ ID NO: 2980407 - DNA, 25 bp, Homo sapien
ggtctccatcctcgggccggcagga

SEQ ID NO: 2980408 - DNA, 25 bp, Homo sapien
cactgtggcaaaagatggagggtct

SEQ ID NO: 2980409 - DNA, 25 bp, Homo sapien
tcaaggaccagaaagactaggcagc

SEQ ID NO: 2980410 - DNA, 25 bp, Homo sapien
tatcagacacgcagggtagacttct

SEQ ID NO: 2980411 - DNA, 25 bp, Homo sapien
gatatatttgcggtggctatgccta

SEQ ID NO: 2980412 - DNA, 25 bp, Homo sapien
gatgcagccctttctgctatctggc

SEQ ID NO: 2980413 - DNA, 25 bp, Homo sapien
cctctgtgatgtaaacggagatgca

SEQ ID NO: 2980414 - DNA, 25 bp, Homo sapien
gtgatgtaaacggagatgcagccct

SEQ ID NO: 2980415 - DNA, 25 bp, Homo sapien
tctgtgatgtaaacggagatgcagc

SEQ ID NO: 2980416 - DNA, 25 bp, Homo sapien
tagggtgttcgctttctccttctcc

SEQ ID NO: 2980417 - DNA, 25 bp, Homo sapien
atctccaaagttgcactcagtccaa

SEQ ID NO: 2980418 - DNA, 25 bp, Homo sapien
catcatctccaaagttgcactcagt

SEQ ID NO: 2980419 - DNA, 25 bp, Homo sapien
tcaaggcacagtagggtgttcgctt

SEQ ID NO: 2980420 - DNA, 25 bp, Homo sapien
ttgtctgttctagggtatcagagga

SEQ ID NO: 2980421 - DNA, 25 bp, Homo sapien
tgttctagggtatcagaggaagtat

SEQ ID NO: 2980422 - DNA, 25 bp, Homo sapien
ggatgttgtctgttctagggtatca

SEQ ID NO: 2980423 - DNA, 25 bp, Homo sapien
tagggtatcagaggaagtatttgca

SEQ ID NO: 2980424 - DNA, 25 bp, Homo sapien
cctcttctgtaagacggggccctag

SEQ ID NO: 2980425 - DNA, 25 bp, Homo sapien
tcttctgtaagacggggccctagtg

SEQ ID NO: 2980426 - DNA, 25 bp, Homo sapien
cagcagtgggaccttattaatgggc

SEQ ID NO: 2980427 - DNA, 25 bp, Homo sapien
ccttattaatgggcttccctggtca

SEQ ID NO: 2980428 - DNA, 25 bp, Homo sapien
ctggccccagaggacctctgacttg

SEQ ID NO: 2980429 - DNA, 25 bp, Homo sapien
acctctgacttgcttgctctccagg

SEQ ID NO: 2980430 - DNA, 25 bp, Homo sapien
actggccccagaggacctctgactt

SEQ ID NO: 2980431 - DNA, 25 bp, Homo sapien
cactggccccagaggacctctgact

SEQ ID NO: 2980432 - DNA, 25 bp, Homo sapien
tctcggtagtcttctagggctggag

SEQ ID NO: 2980433 - DNA, 25 bp, Homo sapien
tagcctaaagtgagctagctgggat

SEQ ID NO: 2980434 - DNA, 25 bp, Homo sapien
aggcacctcctttctagtatctcgg

SEQ ID NO: 2980435 - DNA, 25 bp, Homo sapien
cagtcttttggggacaaggcacctc

SEQ ID NO: 2980436 - DNA, 25 bp, Homo sapien
cttcttcatgcatgtgatgacctta

SEQ ID NO: 2980437 - DNA, 25 bp, Homo sapien
ttcttcatgcatgtgatgaccttat

SEQ ID NO: 2980438 - DNA, 25 bp, Homo sapien
tcttcatgcatgtgatgaccttatc

SEQ ID NO: 2980439 - DNA, 25 bp, Homo sapien
cttcatgcatgtgatgaccttatcc

SEQ ID NO: 2980440 - DNA, 25 bp, Homo sapien
acgccctccctgacttggacaaggg

SEQ ID NO: 2980441 - DNA, 25 bp, Homo sapien
tgaccctgtgctatgctggaaatag

SEQ ID NO: 2980442 - DNA, 25 bp, Homo sapien
tgctatgctggaaatagcactcgag

SEQ ID NO: 2980443 - DNA, 25 bp, Homo sapien
gagccagacgccctccctgacttgg

SEQ ID NO: 2980444 - DNA, 25 bp, Homo sapien
cacttcagaacccatttagtttgct

SEQ ID NO: 2980445 - DNA, 25 bp, Homo sapien
ctcttcgatcattagaaccagagca

SEQ ID NO: 2980446 - DNA, 25 bp, Homo sapien
cattagaaccagagcattttttaaa

SEQ ID NO: 2980447 - DNA, 25 bp, Homo sapien
cccacttcagaacccatttagtttg

SEQ ID NO: 2980448 - DNA, 25 bp, Homo sapien
gtagcttctctgcagtcaacaggca

SEQ ID NO: 2980449 - DNA, 25 bp, Homo sapien
ggcctgagtaggtcggtagcttctc

SEQ ID NO: 2980450 - DNA, 25 bp, Homo sapien
cagccttggttccagccttcaccag

SEQ ID NO: 2980451 - DNA, 25 bp, Homo sapien
cagccacaaaccctgaggcaagtgc

SEQ ID NO: 2980452 - DNA, 25 bp, Homo sapien
ttccagcccggccaggcagtggatg

SEQ ID NO: 2980453 - DNA, 25 bp, Homo sapien
ggcagtggatgtgggttctccacca

SEQ ID NO: 2980454 - DNA, 25 bp, Homo sapien
cccatcctgttccagcccggccagg

SEQ ID NO: 2980455 - DNA, 25 bp, Homo sapien
gtggatgtgggttctccaccatctg

SEQ ID NO: 2980456 - DNA, 25 bp, Homo sapien
gctgctctttctaagctcatccaga

SEQ ID NO: 2980457 - DNA, 25 bp, Homo sapien
tgctgctctttctaagctcatccag

SEQ ID NO: 2980458 - DNA, 25 bp, Homo sapien
catgctgctctttctaagctcatcc

SEQ ID NO: 2980459 - DNA, 25 bp, Homo sapien
gctctttctaagctcatccagactc

SEQ ID NO: 2980460 - DNA, 25 bp, Homo sapien
ggagcaatatacaagggaccagaga

SEQ ID NO: 2980461 - DNA, 25 bp, Homo sapien
cctcaggcacacgaatatagatgca

SEQ ID NO: 2980462 - DNA, 25 bp, Homo sapien
caagggaccagagagtatatctatc

SEQ ID NO: 2980463 - DNA, 25 bp, Homo sapien
gggacgcacatacaacagccatgca

SEQ ID NO: 2980464 - DNA, 25 bp, Homo sapien
tgctgaagcttccataagtgcctct

SEQ ID NO: 2980465 - DNA, 25 bp, Homo sapien
tattcttgttgcacctactcaggcg

SEQ ID NO: 2980466 - DNA, 25 bp, Homo sapien
taaatggattgaaaggtttgtctac

SEQ ID NO: 2980467 - DNA, 25 bp, Homo sapien
gaagcttccataagtgcctctgtat

SEQ ID NO: 2980468 - DNA, 25 bp, Homo sapien
gcacagattaatgggactgcctaga

SEQ ID NO: 2980469 - DNA, 25 bp, Homo sapien
caaaaatcgtttccacagtatccca

SEQ ID NO: 2980470 - DNA, 25 bp, Homo sapien
aaagagctcaatccttctccatagg

SEQ ID NO: 2980471 - DNA, 25 bp, Homo sapien
gcaagaaaggaattgatccctgctg

SEQ ID NO: 2980472 - DNA, 25 bp, Homo sapien
tctgttattgtgttgataccaaacc

SEQ ID NO: 2980473 - DNA, 25 bp, Homo sapien
gaaatacgtagtctcagtcaccaag

SEQ ID NO: 2980474 - DNA, 25 bp, Homo sapien
gataccaaaccagaacaggtcagtg

SEQ ID NO: 2980475 - DNA, 25 bp, Homo sapien
caggtcagtgcgcttcctgtgcaac

SEQ ID NO: 2980476 - DNA, 25 bp, Homo sapien
ccagcctccaaaacctgattgccat

SEQ ID NO: 2980477 - DNA, 25 bp, Homo sapien
tgcatgaaccacacccgcccagcgc

SEQ ID NO: 2980478 - DNA, 25 bp, Homo sapien
cccgcccagcgccagcctccaaaac

SEQ ID NO: 2980479 - DNA, 25 bp, Homo sapien
atgaaccacacccgcccagcgccag

SEQ ID NO: 2980480 - DNA, 25 bp, Homo sapien
tgacatcacagggccgtcgccacgg

SEQ ID NO: 2980481 - DNA, 25 bp, Homo sapien
ccgtcgccacggaaacgggcagtga

SEQ ID NO: 2980482 - DNA, 25 bp, Homo sapien
tcacagggccgtcgccacggaaacg

SEQ ID NO: 2980483 - DNA, 25 bp, Homo sapien
gccgtcgccacggaaacgggcagtg

SEQ ID NO: 2980484 - DNA, 25 bp, Homo sapien
cagaacccatgctgcgatgagggag

SEQ ID NO: 2980485 - DNA, 25 bp, Homo sapien
tcatagttcttggaaggtgcagggc

SEQ ID NO: 2980486 - DNA, 25 bp, Homo sapien
ggtcgctgaaatagccgccacgttg

SEQ ID NO: 2980487 - DNA, 25 bp, Homo sapien
cctgagctgactagggtgtgccttc

SEQ ID NO: 2980488 - DNA, 25 bp, Homo sapien
tgacatccgctgatctgcttgctgg

SEQ ID NO: 2980489 - DNA, 25 bp, Homo sapien
gaaactaaggcctgcgtggccctgg

SEQ ID NO: 2980490 - DNA, 25 bp, Homo sapien
gtaattgagccacctgaagtccaag

SEQ ID NO: 2980491 - DNA, 25 bp, Homo sapien
cagctgggctatgggaatcctcttg

SEQ ID NO: 2980492 - DNA, 25 bp, Homo sapien
taatgctttcaaatggtctcaggct

SEQ ID NO: 2980493 - DNA, 25 bp, Homo sapien
catggcctgagaatagggtctatat

SEQ ID NO: 2980494 - DNA, 25 bp, Homo sapien
ggtccatgctctaatagaagacagg

SEQ ID NO: 2980495 - DNA, 25 bp, Homo sapien
tataccctgggtactcaattaatgc

SEQ ID NO: 2980496 - DNA, 25 bp, Homo sapien
catctgtaggtacttcacggagccc

SEQ ID NO: 2980497 - DNA, 25 bp, Homo sapien
cagagtctgcgtgtgtgaatttgca

SEQ ID NO: 2980498 - DNA, 25 bp, Homo sapien
gctgtttcagttgagtaattgggcc

SEQ ID NO: 2980499 - DNA, 25 bp, Homo sapien
ttgggccaactctaaaaaggtcatc

SEQ ID NO: 2980500 - DNA, 25 bp, Homo sapien
ttgtttcaagatagcagcccaccag

SEQ ID NO: 2980501 - DNA, 25 bp, Homo sapien
taattagcactgaaacgaagccatc

SEQ ID NO: 2980502 - DNA, 25 bp, Homo sapien
caaagagggccctaggtgatacctg

SEQ ID NO: 2980503 - DNA, 25 bp, Homo sapien
tgagtccaatatacagccagggccc

SEQ ID NO: 2980504 - DNA, 25 bp, Homo sapien
tagctgtgcatgcaagatattcaac

SEQ ID NO: 2980505 - DNA, 25 bp, Homo sapien
ttcaaccttgaaatctcagcttctt

SEQ ID NO: 2980506 - DNA, 25 bp, Homo sapien
cagcttctttgagtgaaaatatttc

SEQ ID NO: 2980507 - DNA, 25 bp, Homo sapien
agatttaggatactttataaagcac

SEQ ID NO: 2980508 - DNA, 25 bp, Homo sapien
tcttttgagcgtgaggaaaatgttc

SEQ ID NO: 2980509 - DNA, 25 bp, Homo sapien
tggagggtgataactaaagtctaca

SEQ ID NO: 2980510 - DNA, 25 bp, Homo sapien
tgaatcgtacgttttaaatgggcga

SEQ ID NO: 2980511 - DNA, 25 bp, Homo sapien
ggttgcacatatctgaggacttact

SEQ ID NO: 2980512 - DNA, 25 bp, Homo sapien
gaaggcacaggtcttttttggcaat

SEQ ID NO: 2980513 - DNA, 25 bp, Homo sapien
tggcaattcttaacctctcagtaac

SEQ ID NO: 2980514 - DNA, 25 bp, Homo sapien
tggtctcttggcagaaggaggagag

SEQ ID NO: 2980515 - DNA, 25 bp, Homo sapien
ggcagcccttagctcttcggaggca

SEQ ID NO: 2980516 - DNA, 25 bp, Homo sapien
tcttctgtcctggagcaactcccat

SEQ ID NO: 2980517 - DNA, 25 bp, Homo sapien
tcccatccccaagggatctcttctg

SEQ ID NO: 2980518 - DNA, 25 bp, Homo sapien
ttctggggtttcaagctcttcacga

SEQ ID NO: 2980519 - DNA, 25 bp, Homo sapien
gggtttcaagctcttcacgaagctt

SEQ ID NO: 2980520 - DNA, 25 bp, Homo sapien
acgctgcagggacagaccagaaggc

SEQ ID NO: 2980521 - DNA, 25 bp, Homo sapien
gaagccatacatgcggagaaggtct

SEQ ID NO: 2980522 - DNA, 25 bp, Homo sapien
cataattgtagcatgtcaggacatc

SEQ ID NO: 2980523 - DNA, 25 bp, Homo sapien
ccttaggaagttcatggtctgcttg

SEQ ID NO: 2980524 - DNA, 25 bp, Homo sapien
tcatccagtccatgtgaagcaggaa

SEQ ID NO: 2980525 - DNA, 25 bp, Homo sapien
gaacagggaacacataattgcatgg

SEQ ID NO: 2980526 - DNA, 25 bp, Homo sapien
gatacagtctgtcccctgatcaagc

SEQ ID NO: 2980527 - DNA, 25 bp, Homo sapien
gaaatatgtaggcacacaccaggat

SEQ ID NO: 2980528 - DNA, 25 bp, Homo sapien
gagttctgttccctggcggtttctc

SEQ ID NO: 2980529 - DNA, 25 bp, Homo sapien
ggtatttgctcatccctgcagtctg

SEQ ID NO: 2980530 - DNA, 25 bp, Homo sapien
tgtggtttgcgcctcctggaccaag

SEQ ID NO: 2980531 - DNA, 25 bp, Homo sapien
atgactcacccctttcaaggaaact

SEQ ID NO: 2980532 - DNA, 25 bp, Homo sapien
taataattgggtgccgctgcttaaa

SEQ ID NO: 2980533 - DNA, 25 bp, Homo sapien
ctgtgctgacagagttataataatt

SEQ ID NO: 2980534 - DNA, 25 bp, Homo sapien
cagagttataataattgggtgccgc

SEQ ID NO: 2980535 - DNA, 25 bp, Homo sapien
tgggtgccgctgcttaaactcatca

SEQ ID NO: 2980536 - DNA, 25 bp, Homo sapien
atcaaaatgagtgggtgtaatgctg

SEQ ID NO: 2980537 - DNA, 25 bp, Homo sapien
atatcaaaatgagtgggtgtaatgc

SEQ ID NO: 2980538 - DNA, 25 bp, Homo sapien
tatcaaaatgagtgggtgtaatgct

SEQ ID NO: 2980539 - DNA, 25 bp, Homo sapien
aattggttccggctgatttgatgac

SEQ ID NO: 2980540 - DNA, 25 bp, Homo sapien
cagtcttaattggttccggctgatt

SEQ ID NO: 2980541 - DNA, 25 bp, Homo sapien
gttcagtcttaattggttccggctg

SEQ ID NO: 2980542 - DNA, 25 bp, Homo sapien
tcttaattggttccggctgatttga

SEQ ID NO: 2980543 - DNA, 25 bp, Homo sapien
acctccatgcctttaataggcacca

SEQ ID NO: 2980544 - DNA, 25 bp, Homo sapien
cacctccatgcctttaataggcacc

SEQ ID NO: 2980545 - DNA, 25 bp, Homo sapien
tgggcgaattaagcctggaagtaaa

SEQ ID NO: 2980546 - DNA, 25 bp, Homo sapien
actctgggtacactagaggagagga

SEQ ID NO: 2980547 - DNA, 25 bp, Homo sapien
tcttcaaagactctgggtacactag

SEQ ID NO: 2980548 - DNA, 25 bp, Homo sapien
gagtaagttgtaacggatggagtaa

SEQ ID NO: 2980549 - DNA, 25 bp, Homo sapien
tcttcctggctccagccattcccct

SEQ ID NO: 2980550 - DNA, 25 bp, Homo sapien
ctttgcctgtggctctcaggcagct

SEQ ID NO: 2980551 - DNA, 25 bp, Homo sapien
gcctgtggctctcaggcagctcttc

SEQ ID NO: 2980552 - DNA, 25 bp, Homo sapien
tggctctcaggcagctcttcctggc

SEQ ID NO: 2980553 - DNA, 25 bp, Homo sapien
ccatgctctgtcttcctttcgcctc

SEQ ID NO: 2980554 - DNA, 25 bp, Homo sapien
aggtgggtgtttcctccaacttctg

SEQ ID NO: 2980555 - DNA, 25 bp, Homo sapien
tgagcatccatgctctgtcttcctt

SEQ ID NO: 2980556 - DNA, 25 bp, Homo sapien
gtgcccaggtgggtgtttcctccaa

SEQ ID NO: 2980557 - DNA, 25 bp, Homo sapien
taggctgctttgatgggggtctcac

SEQ ID NO: 2980558 - DNA, 25 bp, Homo sapien
ctaggctgctttgatgggggtctca

SEQ ID NO: 2980559 - DNA, 25 bp, Homo sapien
tcctgtgctgcctgctcgcatgtgg

SEQ ID NO: 2980560 - DNA, 25 bp, Homo sapien
cagcctttcttgagtaatctgacaa

SEQ ID NO: 2980561 - DNA, 25 bp, Homo sapien
catcccctgttagtaggagcggtaa

SEQ ID NO: 2980562 - DNA, 25 bp, Homo sapien
gagcggtaacaggttttcctctgag

SEQ ID NO: 2980563 - DNA, 25 bp, Homo sapien
caacaggcaaactggggaggaggca

SEQ ID NO: 2980564 - DNA, 25 bp, Homo sapien
aacaggcaaactggggaggaggcaa

SEQ ID NO: 2980565 - DNA, 25 bp, Homo sapien
gggaagttgccaatatggcactgcc

SEQ ID NO: 2980566 - DNA, 25 bp, Homo sapien
catgggaagttgccaatatggcact

SEQ ID NO: 2980567 - DNA, 25 bp, Homo sapien
gtaagtggaggacatgggaagttgc

SEQ ID NO: 2980568 - DNA, 25 bp, Homo sapien
taagtggaggacatgggaagttgcc

SEQ ID NO: 2980569 - DNA, 25 bp, Homo sapien
acaagggaggtttccaatttgtctg

SEQ ID NO: 2980570 - DNA, 25 bp, Homo sapien
cacaagggaggtttccaatttgtct

SEQ ID NO: 2980571 - DNA, 25 bp, Homo sapien
tcccgtccaaatggctctcttctcc

SEQ ID NO: 2980572 - DNA, 25 bp, Homo sapien
ccatcttcccgtccaaatggctctc

SEQ ID NO: 2980573 - DNA, 25 bp, Homo sapien
ttgcccccgatgcagggagacaagc

SEQ ID NO: 2980574 - DNA, 25 bp, Homo sapien
gcaggctgcttgaagctcaagatca

SEQ ID NO: 2980575 - DNA, 25 bp, Homo sapien
taaaatccatcttgcccccgatgca

SEQ ID NO: 2980576 - DNA, 25 bp, Homo sapien
caggctgcttgaagctcaagatcac

SEQ ID NO: 2980577 - DNA, 25 bp, Homo sapien
tgttttcatcggaaaatgctggacc

SEQ ID NO: 2980578 - DNA, 25 bp, Homo sapien
gctcccgctgggtggatcttgtttt

SEQ ID NO: 2980579 - DNA, 25 bp, Homo sapien
cagaagctcccgctgggtggatctt

SEQ ID NO: 2980580 - DNA, 25 bp, Homo sapien
ggatcttgttttcatcggaaaatgc

SEQ ID NO: 2980581 - DNA, 25 bp, Homo sapien
atacagggagacctgctccagccgt

SEQ ID NO: 2980582 - DNA, 25 bp, Homo sapien
gctggccggttctgcagctctgtgc

SEQ ID NO: 2980583 - DNA, 25 bp, Homo sapien
tctggcagataaccccatacaggga

SEQ ID NO: 2980584 - DNA, 25 bp, Homo sapien
ggcagcttgtcaccgaggccttggc

SEQ ID NO: 2980585 - DNA, 25 bp, Homo sapien
gccagcttccatctgtaaatgaagt

SEQ ID NO: 2980586 - DNA, 25 bp, Homo sapien
tcggtcagtcccctgggcctgtttc

SEQ ID NO: 2980587 - DNA, 25 bp, Homo sapien
agggtcggtcagtcccctgggcctg

SEQ ID NO: 2980588 - DNA, 25 bp, Homo sapien
gttctttgttctctggggctgcagc

SEQ ID NO: 2980589 - DNA, 25 bp, Homo sapien
ctcctggttacccttagtaccagtg

SEQ ID NO: 2980590 - DNA, 25 bp, Homo sapien
cttagtaccagtgttctttgttctc

SEQ ID NO: 2980591 - DNA, 25 bp, Homo sapien
gctgcagctgggcccagacaagcat

SEQ ID NO: 2980592 - DNA, 25 bp, Homo sapien
cattatgtagaaagtcccaatgttt

SEQ ID NO: 2980593 - DNA, 25 bp, Homo sapien
tataggttgaatatcccctacccaa

SEQ ID NO: 2980594 - DNA, 25 bp, Homo sapien
taagccacatttcgctagattaaag

SEQ ID NO: 2980595 - DNA, 25 bp, Homo sapien
tttttctgtcttgtctaagccacat

SEQ ID NO: 2980596 - DNA, 25 bp, Homo sapien
taaagtcccaggtcggtagctgctg

SEQ ID NO: 2980597 - DNA, 25 bp, Homo sapien
ttatgttctctgcataggagcaccc

SEQ ID NO: 2980598 - DNA, 25 bp, Homo sapien
gctgctgggaagaccgttttatcct

SEQ ID NO: 2980599 - DNA, 25 bp, Homo sapien
ttggagagaagccagcgccgaatgt

SEQ ID NO: 2980600 - DNA, 25 bp, Homo sapien
gtgcaccagcatgcttcaaatgggt

SEQ ID NO: 2980601 - DNA, 25 bp, Homo sapien
tcaggtgggtggagactttgacccc

SEQ ID NO: 2980602 - DNA, 25 bp, Homo sapien
cagcatgcttcaaatgggtgtcagg

SEQ ID NO: 2980603 - DNA, 25 bp, Homo sapien
tccccgcctccacggtgggcagctt

SEQ ID NO: 2980604 - DNA, 25 bp, Homo sapien
ggcggccccgcgcacccgctagtgt

SEQ ID NO: 2980605 - DNA, 25 bp, Homo sapien
gctgcgtccacgcggacagagcaag

SEQ ID NO: 2980606 - DNA, 25 bp, Homo sapien
tgcgtccacgcggacagagcaagga

SEQ ID NO: 2980607 - DNA, 25 bp, Homo sapien
cgcacccgctagtgtctgaaccggg

SEQ ID NO: 2980608 - DNA, 25 bp, Homo sapien
agccccagtgggacgcgggagccgg

SEQ ID NO: 2980609 - DNA, 25 bp, Homo sapien
gagccccagtgggacgcgggagccg

SEQ ID NO: 2980610 - DNA, 25 bp, Homo sapien
gacagcgtctctcgtagccattgaa

SEQ ID NO: 2980611 - DNA, 25 bp, Homo sapien
cagcgtctctcgtagccattgaagt

SEQ ID NO: 2980612 - DNA, 25 bp, Homo sapien
gagacagcgtctctcgtagccattg

SEQ ID NO: 2980613 - DNA, 25 bp, Homo sapien
gcgtctctcgtagccattgaagtca

SEQ ID NO: 2980614 - DNA, 25 bp, Homo sapien
tctgaggacgacagggcaaagttcc

SEQ ID NO: 2980615 - DNA, 25 bp, Homo sapien
tacagctggtgtctgaggacgacag

SEQ ID NO: 2980616 - DNA, 25 bp, Homo sapien
aatgcaagggtgatggggtacagct

SEQ ID NO: 2980617 - DNA, 25 bp, Homo sapien
gggtacagctggtgtctgaggacga

SEQ ID NO: 2980618 - DNA, 25 bp, Homo sapien
cagcactcattagtacctgcaccag

SEQ ID NO: 2980619 - DNA, 25 bp, Homo sapien
gcactcattagtacctgcaccagag

SEQ ID NO: 2980620 - DNA, 25 bp, Homo sapien
catcggtactgcgtggctgctcgca

SEQ ID NO: 2980621 - DNA, 25 bp, Homo sapien
tacagaactgccgtcacggtccaca

SEQ ID NO: 2980622 - DNA, 25 bp, Homo sapien
gttgtggtagaccagaccctcagag

SEQ ID NO: 2980623 - DNA, 25 bp, Homo sapien
accagaccctcagaggagattgtag

SEQ ID NO: 2980624 - DNA, 25 bp, Homo sapien
tagaccagaccctcagaggagattg

SEQ ID NO: 2980625 - DNA, 25 bp, Homo sapien
tggtagaccagaccctcagaggaga

SEQ ID NO: 2980626 - DNA, 25 bp, Homo sapien
tgatggcttctggtcacttggtgag

SEQ ID NO: 2980627 - DNA, 25 bp, Homo sapien
ggcttctggtcacttggtgagctgc

SEQ ID NO: 2980628 - DNA, 25 bp, Homo sapien
tcatgatggcttctggtcacttggt

SEQ ID NO: 2980629 - DNA, 25 bp, Homo sapien
ggtcacttggtgagctgctgcaatc

SEQ ID NO: 2980630 - DNA, 25 bp, Homo sapien
tacaatttgccagttatagaagaaa

SEQ ID NO: 2980631 - DNA, 25 bp, Homo sapien
tacttatcggccgttccactacaat

SEQ ID NO: 2980632 - DNA, 25 bp, Homo sapien
tatcataatatggccctagggaatg

SEQ ID NO: 2980633 - DNA, 25 bp, Homo sapien
gttccactacaattatcttccgcgt

SEQ ID NO: 2980634 - DNA, 25 bp, Homo sapien
ctgcatatcttgtatcatctccaag

SEQ ID NO: 2980635 - DNA, 25 bp, Homo sapien
ttggcaagcttcttaacgacaggag

SEQ ID NO: 2980636 - DNA, 25 bp, Homo sapien
atcatctccaagttggcaagcttct

SEQ ID NO: 2980637 - DNA, 25 bp, Homo sapien
caagcttcttaacgacaggagtcat

SEQ ID NO: 2980638 - DNA, 25 bp, Homo sapien
tgccgctgcaggactgtgctgctgg

SEQ ID NO: 2980639 - DNA, 25 bp, Homo sapien
ctgccgctgcaggactgtgctgctg

SEQ ID NO: 2980640 - DNA, 25 bp, Homo sapien
gccgctgcaggactgtgctgctggg

SEQ ID NO: 2980641 - DNA, 25 bp, Homo sapien
tgtccacatccaagcttgtctggga

SEQ ID NO: 2980642 - DNA, 25 bp, Homo sapien
tgctgcttgaatgtggactccgggt

SEQ ID NO: 2980643 - DNA, 25 bp, Homo sapien
catctcgaatggttccagcatggga

SEQ ID NO: 2980644 - DNA, 25 bp, Homo sapien
gaggcaatcttcactccctgcaggg

SEQ ID NO: 2980645 - DNA, 25 bp, Homo sapien
cagattccggatgcagcgtttaggt

SEQ ID NO: 2980646 - DNA, 25 bp, Homo sapien
tcagattccggatgcagcgtttagg

SEQ ID NO: 2980647 - DNA, 25 bp, Homo sapien
gatgcagcgtttaggtggtgaacca

SEQ ID NO: 2980648 - DNA, 25 bp, Homo sapien
ttaggtggtgaaccactgccgccag

SEQ ID NO: 2980649 - DNA, 25 bp, Homo sapien
gaagttttcattgctatgcagagca

SEQ ID NO: 2980650 - DNA, 25 bp, Homo sapien
caggctggactacccatagacttcc

SEQ ID NO: 2980651 - DNA, 25 bp, Homo sapien
atatttggcaggacaccactgggtg

SEQ ID NO: 2980652 - DNA, 25 bp, Homo sapien
caggcagagggaattatagttcaga

SEQ ID NO: 2980653 - DNA, 25 bp, Homo sapien
gctgtgcccactggttccatctccc

SEQ ID NO: 2980654 - DNA, 25 bp, Homo sapien
tccaccagctgtgcccactggttcc

SEQ ID NO: 2980655 - DNA, 25 bp, Homo sapien
atcagtgcccttctccaccagctgt

SEQ ID NO: 2980656 - DNA, 25 bp, Homo sapien
accagctgtgcccactggttccatc

SEQ ID NO: 2980657 - DNA, 25 bp, Homo sapien
ctggtcctgaatatcggagctgcca

SEQ ID NO: 2980658 - DNA, 25 bp, Homo sapien
caaatccaattgaatcatcttcttt

SEQ ID NO: 2980659 - DNA, 25 bp, Homo sapien
tcctgaatatcggagctgccaaatc

SEQ ID NO: 2980660 - DNA, 25 bp, Homo sapien
tgaatatcggagctgccaaatccaa

SEQ ID NO: 2980661 - DNA, 25 bp, Homo sapien
tctcatccttctctttcctctcccc

SEQ ID NO: 2980662 - DNA, 25 bp, Homo sapien
accagtttctcatccttctctttcc

SEQ ID NO: 2980663 - DNA, 25 bp, Homo sapien
tcatccttctctttcctctccccat

SEQ ID NO: 2980664 - DNA, 25 bp, Homo sapien
tttctcatccttctctttcctctcc

SEQ ID NO: 2980665 - DNA, 25 bp, Homo sapien
ctgagcatgcgtggcactaaaggct

SEQ ID NO: 2980666 - DNA, 25 bp, Homo sapien
agactcacgggggtatcactgagca

SEQ ID NO: 2980667 - DNA, 25 bp, Homo sapien
gaagtcctcaccgtcagactcacgg

SEQ ID NO: 2980668 - DNA, 25 bp, Homo sapien
ccaggtcagatgcaattgccgaagt

SEQ ID NO: 2980669 - DNA, 25 bp, Homo sapien
cctggcgtccttgccgacgtttaat

SEQ ID NO: 2980670 - DNA, 25 bp, Homo sapien
atgagggccgactggagctctgaca

SEQ ID NO: 2980671 - DNA, 25 bp, Homo sapien
gggccgactggagctctgacatcca

SEQ ID NO: 2980672 - DNA, 25 bp, Homo sapien
aatttagcgtaagctgcaggatgag

SEQ ID NO: 2980673 - DNA, 25 bp, Homo sapien
tgggccaatcgcatcagcatcagtg

SEQ ID NO: 2980674 - DNA, 25 bp, Homo sapien
gcagtgtggtcagtccatgggccaa

SEQ ID NO: 2980675 - DNA, 25 bp, Homo sapien
tgtgcccatgcaatatcccatccgg

SEQ ID NO: 2980676 - DNA, 25 bp, Homo sapien
ggtctgtcacactccaaagtctgcg

SEQ ID NO: 2980677 - DNA, 25 bp, Homo sapien
gaacgttattatgcgctgtgacgat

SEQ ID NO: 2980678 - DNA, 25 bp, Homo sapien
tgcgggaatgaacgttattatgcgc

SEQ ID NO: 2980679 - DNA, 25 bp, Homo sapien
caagcagtcacaacaatgcgggaat

SEQ ID NO: 2980680 - DNA, 25 bp, Homo sapien
agtcaggcacggtgagcaggaccaa

SEQ ID NO: 2980681 - DNA, 25 bp, Homo sapien
tgcctttggattcaggccccccaca

SEQ ID NO: 2980682 - DNA, 25 bp, Homo sapien
ggttccagaactggtatccagccag

SEQ ID NO: 2980683 - DNA, 25 bp, Homo sapien
gaagaggatagagaggtggaagcac

SEQ ID NO: 2980684 - DNA, 25 bp, Homo sapien
gaggaagagcgtggagtccatccca

SEQ ID NO: 2980685 - DNA, 25 bp, Homo sapien
ttggacccactgatgataggtaccc

SEQ ID NO: 2980686 - DNA, 25 bp, Homo sapien
tttggacccactgatgataggtacc

SEQ ID NO: 2980687 - DNA, 25 bp, Homo sapien
tcctcttcacaagtccccggcaagg

SEQ ID NO: 2980688 - DNA, 25 bp, Homo sapien
ctcctcttcacaagtccccggcaag

SEQ ID NO: 2980689 - DNA, 25 bp, Homo sapien
gcagcttcctatagccgcagggcat

SEQ ID NO: 2980690 - DNA, 25 bp, Homo sapien
taaactaatggagcttggaacgtcc

SEQ ID NO: 2980691 - DNA, 25 bp, Homo sapien
gaccctcaaggtcaaaggatgctaa

SEQ ID NO: 2980692 - DNA, 25 bp, Homo sapien
ggaacgtcctccaaatagtctgcca

SEQ ID NO: 2980693 - DNA, 25 bp, Homo sapien
ccagttggatgtgtgctcagtagca

SEQ ID NO: 2980694 - DNA, 25 bp, Homo sapien
tcatccacgatggtagggagtgcag

SEQ ID NO: 2980695 - DNA, 25 bp, Homo sapien
gacgtcccgcatttgaggtccctgg

SEQ ID NO: 2980696 - DNA, 25 bp, Homo sapien
gaactcagcggcaaggtctggacac

SEQ ID NO: 2980697 - DNA, 25 bp, Homo sapien
gagcatgagctctaggcccgttaag

SEQ ID NO: 2980698 - DNA, 25 bp, Homo sapien
ggaattagacttggcagacccagtg

SEQ ID NO: 2980699 - DNA, 25 bp, Homo sapien
cccaaaccagtggtcagttcataca

SEQ ID NO: 2980700 - DNA, 25 bp, Homo sapien
gtctctgaagcttggacgagtcgat

SEQ ID NO: 2980701 - DNA, 25 bp, Homo sapien
caattcggaattagacttggcagac

SEQ ID NO: 2980702 - DNA, 25 bp, Homo sapien
caataacttgattcccttgcccttg

SEQ ID NO: 2980703 - DNA, 25 bp, Homo sapien
gaacacctgtcgcaataacttgatt

SEQ ID NO: 2980704 - DNA, 25 bp, Homo sapien
attatttcgggagcccgaacacctg

SEQ ID NO: 2980705 - DNA, 25 bp, Homo sapien
ggagcccgaacacctgtcgcaataa

SEQ ID NO: 2980706 - DNA, 25 bp, Homo sapien
gcaagtgctctgtttgttcagggac

SEQ ID NO: 2980707 - DNA, 25 bp, Homo sapien
gaggagactgcgaatccacaataaa

SEQ ID NO: 2980708 - DNA, 25 bp, Homo sapien
ccactcgtaggggtgattagttcct

SEQ ID NO: 2980709 - DNA, 25 bp, Homo sapien
ggggagatttaccatctgaagggca

SEQ ID NO: 2980710 - DNA, 25 bp, Homo sapien
cgaaaggagtggtcggttctgtttg

SEQ ID NO: 2980711 - DNA, 25 bp, Homo sapien
cgcccgagctgcagcgaccatgttg

SEQ ID NO: 2980712 - DNA, 25 bp, Homo sapien
agctgcagcgaccatgttgcagagg

SEQ ID NO: 2980713 - DNA, 25 bp, Homo sapien
tgtttgttcatctctcgtttctgcc

SEQ ID NO: 2980714 - DNA, 25 bp, Homo sapien
tgggcactggcctgctcggtgtctc

SEQ ID NO: 2980715 - DNA, 25 bp, Homo sapien
tatgagactcagagcttggtgggca

SEQ ID NO: 2980716 - DNA, 25 bp, Homo sapien
gggctcggcttgcacctgacatatg

SEQ ID NO: 2980717 - DNA, 25 bp, Homo sapien
tgcacctgacatatgagactcagag

SEQ ID NO: 2980718 - DNA, 25 bp, Homo sapien
tgtgcgcccatctgaccattaggtt

SEQ ID NO: 2980719 - DNA, 25 bp, Homo sapien
cggcgatggctttgctgtgcgccca

SEQ ID NO: 2980720 - DNA, 25 bp, Homo sapien
taaacttggtacaaactggaagtgc

SEQ ID NO: 2980721 - DNA, 25 bp, Homo sapien
ccctcttctgcgctctgatgttggc

SEQ ID NO: 2980722 - DNA, 25 bp, Homo sapien
gagaggagaaatgcggccaagttca

SEQ ID NO: 2980723 - DNA, 25 bp, Homo sapien
gctcggcgaccaggttaaaacctga

SEQ ID NO: 2980724 - DNA, 25 bp, Homo sapien
gtagtggtgcagtcccatttgctga

SEQ ID NO: 2980725 - DNA, 25 bp, Homo sapien
caagttcatgagctgctcggcgacc

SEQ ID NO: 2980726 - DNA, 25 bp, Homo sapien
tgatgagtcattcctcaaaggtctg

SEQ ID NO: 2980727 - DNA, 25 bp, Homo sapien
tccccacctgggtataagtgatgag

SEQ ID NO: 2980728 - DNA, 25 bp, Homo sapien
taaggtgcttgtctggtctatgagc

SEQ ID NO: 2980729 - DNA, 25 bp, Homo sapien
caaaagctctcaatcatgtgccacc

SEQ ID NO: 2980730 - DNA, 25 bp, Homo sapien
tgcatggtgttttggtgggccacgc

SEQ ID NO: 2980731 - DNA, 25 bp, Homo sapien
ctttttggatcccagcctattttca

SEQ ID NO: 2980732 - DNA, 25 bp, Homo sapien
gtgggccacgctcagtgggtttcct

SEQ ID NO: 2980733 - DNA, 25 bp, Homo sapien
ctgaggagctgtgcacagtcttatt

SEQ ID NO: 2980734 - DNA, 25 bp, Homo sapien
catatgatttcgtccctttggttaa

SEQ ID NO: 2980735 - DNA, 25 bp, Homo sapien
tttgtgtcatgtggcatctcttctg

SEQ ID NO: 2980736 - DNA, 25 bp, Homo sapien
gggcactcattagcttttacacagc

SEQ ID NO: 2980737 - DNA, 25 bp, Homo sapien
ctctaaaggcccagtaagatgtttt

SEQ ID NO: 2980738 - DNA, 25 bp, Homo sapien
tccaagaagggcgttgcaaacaggt

SEQ ID NO: 2980739 - DNA, 25 bp, Homo sapien
ctgtgctgtccaagaagggcgttgc

SEQ ID NO: 2980740 - DNA, 25 bp, Homo sapien
agaagggcgttgcaaacaggtaagt

SEQ ID NO: 2980741 - DNA, 25 bp, Homo sapien
gctgtccaagaagggcgttgcaaac

SEQ ID NO: 2980742 - DNA, 25 bp, Homo sapien
ggtcttcagcaaggatgggcaacat

SEQ ID NO: 2980743 - DNA, 25 bp, Homo sapien
aacatggccatttcaacactggttc

SEQ ID NO: 2980744 - DNA, 25 bp, Homo sapien
catggggtgtttcatccacaggttc

SEQ ID NO: 2980745 - DNA, 25 bp, Homo sapien
ctgggtggtcttcagcaaggatggg

SEQ ID NO: 2980746 - DNA, 25 bp, Homo sapien
gaccatagaccagtgggagcaaacc

SEQ ID NO: 2980747 - DNA, 25 bp, Homo sapien
gtttgggacatagaggagaccatag

SEQ ID NO: 2980748 - DNA, 25 bp, Homo sapien
aggacggtaacaggtcaaggctgct

SEQ ID NO: 2980749 - DNA, 25 bp, Homo sapien
cttgtgctcagtagcctgagaagga

SEQ ID NO: 2980750 - DNA, 25 bp, Homo sapien
ctgtgaggccatccctcatcttaat

SEQ ID NO: 2980751 - DNA, 25 bp, Homo sapien
tgggctcatccaaatctcgtttgct

SEQ ID NO: 2980752 - DNA, 25 bp, Homo sapien
cctcatcttaatgggctcatccaaa

SEQ ID NO: 2980753 - DNA, 25 bp, Homo sapien
ccaaatctcgtttgctaatgaggaa

SEQ ID NO: 2980754 - DNA, 25 bp, Homo sapien
ttggaaaaagaggaatggaggtaga

SEQ ID NO: 2980755 - DNA, 25 bp, Homo sapien
gtgttcccatgtcgcaggaatcgca

SEQ ID NO: 2980756 - DNA, 25 bp, Homo sapien
tgcgtgttcccatgtcgcaggaatc

SEQ ID NO: 2980757 - DNA, 25 bp, Homo sapien
tcccatgtcgcaggaatcgcaacat

SEQ ID NO: 2980758 - DNA, 25 bp, Homo sapien
gcagctgcgtgttcccatgtcgcag

SEQ ID NO: 2980759 - DNA, 25 bp, Homo sapien
tcattgacctaagtggtaagaagcc

SEQ ID NO: 2980760 - DNA, 25 bp, Homo sapien
tgtgcgaatctagactcaatgctgg

SEQ ID NO: 2980761 - DNA, 25 bp, Homo sapien
gatgtacctgcttgttaaaaaggga

SEQ ID NO: 2980762 - DNA, 25 bp, Homo sapien
ggaagtggctgtcattgacctaagt

SEQ ID NO: 2980763 - DNA, 25 bp, Homo sapien
gaggaaactgggtacggtgcctgcc

SEQ ID NO: 2980764 - DNA, 25 bp, Homo sapien
aactgggtacggtgcctgccgagga

SEQ ID NO: 2980765 - DNA, 25 bp, Homo sapien
gtacggtgcctgccgaggatcaaga

SEQ ID NO: 2980766 - DNA, 25 bp, Homo sapien
agcaagcagcaaccggggaaaagga

SEQ ID NO: 2980767 - DNA, 25 bp, Homo sapien
ctggcagtggattgccccagattac

SEQ ID NO: 2980768 - DNA, 25 bp, Homo sapien
ccgacaccctccacgcggacctggg

SEQ ID NO: 2980769 - DNA, 25 bp, Homo sapien
agtcctcggcgttaacacggcgcgg

SEQ ID NO: 2980770 - DNA, 25 bp, Homo sapien
gctctcccccgaaatatcggcccca

SEQ ID NO: 2980771 - DNA, 25 bp, Homo sapien
gaaatatcggccccatcgcactccc

SEQ ID NO: 2980772 - DNA, 25 bp, Homo sapien
aaagagacacgtctcccggcgatgg

SEQ ID NO: 2980773 - DNA, 25 bp, Homo sapien
gcgatggcccagtccaccagcttct

SEQ ID NO: 2980774 - DNA, 25 bp, Homo sapien
aggaagcgggtgaacagagaggaaa

SEQ ID NO: 2980775 - DNA, 25 bp, Homo sapien
gatccttgggaggctctctcgccct

SEQ ID NO: 2980776 - DNA, 25 bp, Homo sapien
ttggcatcctttcgtcgggctgtga

SEQ ID NO: 2980777 - DNA, 25 bp, Homo sapien
tcctttcgtcgggctgtgagcagga

SEQ ID NO: 2980778 - DNA, 25 bp, Homo sapien
atttggcatcctttcgtcgggctgt

SEQ ID NO: 2980779 - DNA, 25 bp, Homo sapien
gcatcctttcgtcgggctgtgagca

SEQ ID NO: 2980780 - DNA, 25 bp, Homo sapien
cacaggatcacgaggtaaacgacca

SEQ ID NO: 2980781 - DNA, 25 bp, Homo sapien
tatgtacaagctgggaaacagacct

SEQ ID NO: 2980782 - DNA, 25 bp, Homo sapien
gataccttctgacactggccagcga

SEQ ID NO: 2980783 - DNA, 25 bp, Homo sapien
cctgcaggtagagttgggcttcaaa

SEQ ID NO: 2980784 - DNA, 25 bp, Homo sapien
tggcagctgctcaacaatgtgtatt

SEQ ID NO: 2980785 - DNA, 25 bp, Homo sapien
ctcaacaatgtgtatttactgaatg

SEQ ID NO: 2980786 - DNA, 25 bp, Homo sapien
aactgtacaattatgctttgttgcc

SEQ ID NO: 2980787 - DNA, 25 bp, Homo sapien
actgaactgtacaattatgctttgt

SEQ ID NO: 2980788 - DNA, 25 bp, Homo sapien
tagcagacccacttgtatggggtat

SEQ ID NO: 2980789 - DNA, 25 bp, Homo sapien
acccacttgtatggggtatccagag

SEQ ID NO: 2980790 - DNA, 25 bp, Homo sapien
gcaatagcagacccacttgtatggg

SEQ ID NO: 2980791 - DNA, 25 bp, Homo sapien
aaggtcaaatatgcaatagcagacc

SEQ ID NO: 2980792 - DNA, 25 bp, Homo sapien
cctgcctaagcctcctggagtagct

SEQ ID NO: 2980793 - DNA, 25 bp, Homo sapien
gggattacaggcgtgcaccaccaca

SEQ ID NO: 2980794 - DNA, 25 bp, Homo sapien
accaccacacccagctaattttttg

SEQ ID NO: 2980795 - DNA, 25 bp, Homo sapien
ctcctgcctaagcctcctggagtag

SEQ ID NO: 2980796 - DNA, 25 bp, Homo sapien
cagtaccatccctctgtgcaaacag

SEQ ID NO: 2980797 - DNA, 25 bp, Homo sapien
gggtacactgaacacaacattacag

SEQ ID NO: 2980798 - DNA, 25 bp, Homo sapien
ctaccggagaccagaatcaggaatt

SEQ ID NO: 2980799 - DNA, 25 bp, Homo sapien
gaaaacagatgtgacacagtccatg

SEQ ID NO: 2980800 - DNA, 25 bp, Homo sapien
ctgctgcatcgaactttaaacttca

SEQ ID NO: 2980801 - DNA, 25 bp, Homo sapien
tgctgcatcgaactttaaacttcac

SEQ ID NO: 2980802 - DNA, 25 bp, Homo sapien
gctaaagagagcacacaaggttcag

SEQ ID NO: 2980803 - DNA, 25 bp, Homo sapien
cagaaattagatccaccagcgaagt

SEQ ID NO: 2980804 - DNA, 25 bp, Homo sapien
caacctcgaagggtcgtgaacagga

SEQ ID NO: 2980805 - DNA, 25 bp, Homo sapien
tctaaccgctcttctggctaaggaa

SEQ ID NO: 2980806 - DNA, 25 bp, Homo sapien
taatataatacagttccaatcagtg

SEQ ID NO: 2980807 - DNA, 25 bp, Homo sapien
aatacagttccaatcagtgtgtctg

SEQ ID NO: 2980808 - DNA, 25 bp, Homo sapien
taatacagttccaatcagtgtgtct

SEQ ID NO: 2980809 - DNA, 25 bp, Homo sapien
tataatacagttccaatcagtgtgt

SEQ ID NO: 2980810 - DNA, 25 bp, Homo sapien
taccctgacagcaagccaatgaaag

SEQ ID NO: 2980811 - DNA, 25 bp, Homo sapien
tcaagattagggatgcaccgggcac

SEQ ID NO: 2980812 - DNA, 25 bp, Homo sapien
aaaacagatggcctcatttgccgac

SEQ ID NO: 2980813 - DNA, 25 bp, Homo sapien
caagtcagtcaagttagcgagtggt

SEQ ID NO: 2980814 - DNA, 25 bp, Homo sapien
ccgagtgctacccacaagctgaacg

SEQ ID NO: 2980815 - DNA, 25 bp, Homo sapien
gcccgagtgctacccacaagctgaa

SEQ ID NO: 2980816 - DNA, 25 bp, Homo sapien
gagtgctacccacaagctgaacgac

SEQ ID NO: 2980817 - DNA, 25 bp, Homo sapien
gtgctacccacaagctgaacgacag

SEQ ID NO: 2980818 - DNA, 25 bp, Homo sapien
ctgaaggtgctgttcacgggctgca

SEQ ID NO: 2980819 - DNA, 25 bp, Homo sapien
accagggagcgatgtagtccacgcg

SEQ ID NO: 2980820 - DNA, 25 bp, Homo sapien
tggtaactctcgtcgccggggctga

SEQ ID NO: 2980821 - DNA, 25 bp, Homo sapien
acgtgcgggacgctgtgcagccaca

SEQ ID NO: 2980822 - DNA, 25 bp, Homo sapien
ccagagccagacttccggtcctggc

SEQ ID NO: 2980823 - DNA, 25 bp, Homo sapien
agagccagacttccggtcctggccc

SEQ ID NO: 2980824 - DNA, 25 bp, Homo sapien
tggcccaccacgctcatctcctact

SEQ ID NO: 2980825 - DNA, 25 bp, Homo sapien
cggtcctggcccaccacgctcatct

SEQ ID NO: 2980826 - DNA, 25 bp, Homo sapien
tcctgggaaccctacctaggtgctg

SEQ ID NO: 2980827 - DNA, 25 bp, Homo sapien
ctcctgggaaccctacctaggtgct

SEQ ID NO: 2980828 - DNA, 25 bp, Homo sapien
cacggccgtccaggtgatgcagcag

SEQ ID NO: 2980829 - DNA, 25 bp, Homo sapien
agtggcatgcacagaccaggtaagc

SEQ ID NO: 2980830 - DNA, 25 bp, Homo sapien
agccacaaggaagatgaggttcagg

SEQ ID NO: 2980831 - DNA, 25 bp, Homo sapien
tgctgcttggtctgcaccgcatcgt

SEQ ID NO: 2980832 - DNA, 25 bp, Homo sapien
agaaggtgtggttggcatcgtccaa

SEQ ID NO: 2980833 - DNA, 25 bp, Homo sapien
tggtacgccccatcgttggtctcgc

SEQ ID NO: 2980834 - DNA, 25 bp, Homo sapien
catcgtccaaggagtacatcagctg

SEQ ID NO: 2980835 - DNA, 25 bp, Homo sapien
cagagcatcgatcccagagaaggtg

SEQ ID NO: 2980836 - DNA, 25 bp, Homo sapien
tctgcgctacgctgggagttcctag

SEQ ID NO: 2980837 - DNA, 25 bp, Homo sapien
gcttttgaagagcacaggcagggct

SEQ ID NO: 2980838 - DNA, 25 bp, Homo sapien
tcagcaaggccgattagattccact

SEQ ID NO: 2980839 - DNA, 25 bp, Homo sapien
tctcggaggccaacggtgttctctg

SEQ ID NO: 2980840 - DNA, 25 bp, Homo sapien
gttgtggcactagccgcagcacacc

SEQ ID NO: 2980841 - DNA, 25 bp, Homo sapien
gagaaacagactctatgttgctacc

SEQ ID NO: 2980842 - DNA, 25 bp, Homo sapien
tgttgctaccttgaccttgtatccc

SEQ ID NO: 2980843 - DNA, 25 bp, Homo sapien
tgaacgctgagtgaaggcaggacaa

SEQ ID NO: 2980844 - DNA, 25 bp, Homo sapien
tccacacgggcagtcctgagagctg

SEQ ID NO: 2980845 - DNA, 25 bp, Homo sapien
tgtagtactccacgtagccagtctg

SEQ ID NO: 2980846 - DNA, 25 bp, Homo sapien
ggtcggatagcttggtcagctccat

SEQ ID NO: 2980847 - DNA, 25 bp, Homo sapien
tgcccgccatctgctgtatgaactt

SEQ ID NO: 2980848 - DNA, 25 bp, Homo sapien
aggagacacttggagcgcttggcca

SEQ ID NO: 2980849 - DNA, 25 bp, Homo sapien
acacttggagcgcttggccagtccc

SEQ ID NO: 2980850 - DNA, 25 bp, Homo sapien
tccaggataaagagcaggaggtagg

SEQ ID NO: 2980851 - DNA, 25 bp, Homo sapien
cttggagcgcttggccagtcccagg

SEQ ID NO: 2980852 - DNA, 25 bp, Homo sapien
agggatgcccaactgaggagcaggc

SEQ ID NO: 2980853 - DNA, 25 bp, Homo sapien
cggccagggatgcccaactgaggag

SEQ ID NO: 2980854 - DNA, 25 bp, Homo sapien
gggatgcccaactgaggagcaggct

SEQ ID NO: 2980855 - DNA, 25 bp, Homo sapien
agcggccagggatgcccaactgagg

SEQ ID NO: 2980856 - DNA, 25 bp, Homo sapien
agcggcaagctggaagccaccgctg

SEQ ID NO: 2980857 - DNA, 25 bp, Homo sapien
tgactcgcagtgctgaccacgaggg

SEQ ID NO: 2980858 - DNA, 25 bp, Homo sapien
gacacctcctgactcgcagtgctga

SEQ ID NO: 2980859 - DNA, 25 bp, Homo sapien
tcctgactcgcagtgctgaccacga

SEQ ID NO: 2980860 - DNA, 25 bp, Homo sapien
cccagacacctcctgactcgcagtg

SEQ ID NO: 2980861 - DNA, 25 bp, Homo sapien
cccgtgaccctagcatgatgacgat

SEQ ID NO: 2980862 - DNA, 25 bp, Homo sapien
gtgtgcattactcatgccatggtga

SEQ ID NO: 2980863 - DNA, 25 bp, Homo sapien
gagtttccctgcatacgtcctctct

SEQ ID NO: 2980864 - DNA, 25 bp, Homo sapien
gatgacgatgaatgcacaggaagcc

SEQ ID NO: 2980865 - DNA, 25 bp, Homo sapien
agtacttactcagtgccgtgcaggg

SEQ ID NO: 2980866 - DNA, 25 bp, Homo sapien
gaaaatcaggtatcaggacagcggg

SEQ ID NO: 2980867 - DNA, 25 bp, Homo sapien
taagtgattgctaaggcccatgcgg

SEQ ID NO: 2980868 - DNA, 25 bp, Homo sapien
gctatgatcaagtgctacagggacg

SEQ ID NO: 2980869 - DNA, 25 bp, Homo sapien
cgttcaggatgaaggtgtcaggagc

SEQ ID NO: 2980870 - DNA, 25 bp, Homo sapien
caggagccacacagaagtcactggt

SEQ ID NO: 2980871 - DNA, 25 bp, Homo sapien
tgatctggccctccgtgacgttcag

SEQ ID NO: 2980872 - DNA, 25 bp, Homo sapien
ctgtgctgatctggccctccgtgac

SEQ ID NO: 2980873 - DNA, 25 bp, Homo sapien
gcaatacaggtagtagcgagtcacc

SEQ ID NO: 2980874 - DNA, 25 bp, Homo sapien
ctgcaatacaggtagtagcgagtca

SEQ ID NO: 2980875 - DNA, 25 bp, Homo sapien
caatacaggtagtagcgagtcacct

SEQ ID NO: 2980876 - DNA, 25 bp, Homo sapien
tgcaatacaggtagtagcgagtcac

SEQ ID NO: 2980877 - DNA, 25 bp, Homo sapien
aagtgcgcgctggaaggtggtcagg

SEQ ID NO: 2980878 - DNA, 25 bp, Homo sapien
agccccgcgacctggatctgcatgg

SEQ ID NO: 2980879 - DNA, 25 bp, Homo sapien
ccgcgacctggatctgcatggtggt

SEQ ID NO: 2980880 - DNA, 25 bp, Homo sapien
atctgcatggtggtaagtgcgcgct

SEQ ID NO: 2980881 - DNA, 25 bp, Homo sapien
cctcggcagtccaccatggcggtca

SEQ ID NO: 2980882 - DNA, 25 bp, Homo sapien
caggagctggattgcaagcaggtct

SEQ ID NO: 2980883 - DNA, 25 bp, Homo sapien
ctctgaggagttcagcaggagctgg

SEQ ID NO: 2980884 - DNA, 25 bp, Homo sapien
agccctcggcagtccaccatggcgg

SEQ ID NO: 2980885 - DNA, 25 bp, Homo sapien
aaccagagacgggggcactgaagct

SEQ ID NO: 2980886 - DNA, 25 bp, Homo sapien
ctgggcactaagaagctggctctga

SEQ ID NO: 2980887 - DNA, 25 bp, Homo sapien
tgtgagctgggcactaagaagctgg

SEQ ID NO: 2980888 - DNA, 25 bp, Homo sapien
tgagctgggcactaagaagctggct

SEQ ID NO: 2980889 - DNA, 25 bp, Homo sapien
tggagaaggcgagggcggccaggaa

SEQ ID NO: 2980890 - DNA, 25 bp, Homo sapien
gatgccagcaagagcgtccagataa

SEQ ID NO: 2980891 - DNA, 25 bp, Homo sapien
aggccaaggtacagcaagccctgga

SEQ ID NO: 2980892 - DNA, 25 bp, Homo sapien
gcaagccctggaggccgtcgtagca

SEQ ID NO: 2980893 - DNA, 25 bp, Homo sapien
tggagatggtctgggccgggggctg

SEQ ID NO: 2980894 - DNA, 25 bp, Homo sapien
tactcggagacaggggcgttggaga

SEQ ID NO: 2980895 - DNA, 25 bp, Homo sapien
tgtgagccgccatgcgccaggcttg

SEQ ID NO: 2980896 - DNA, 25 bp, Homo sapien
tgaagctgtcccctcgggggactgt

SEQ ID NO: 2980897 - DNA, 25 bp, Homo sapien
cccgattagtggcacgttctcgtag

SEQ ID NO: 2980898 - DNA, 25 bp, Homo sapien
ggctctcccgattagtggcacgttc

SEQ ID NO: 2980899 - DNA, 25 bp, Homo sapien
ggaggctctcccgattagtggcacg

SEQ ID NO: 2980900 - DNA, 25 bp, Homo sapien
cacgttctcgtagcgtgggttccta

SEQ ID NO: 2980901 - DNA, 25 bp, Homo sapien
catttaaaaggtgctgacttttagg

SEQ ID NO: 2980902 - DNA, 25 bp, Homo sapien
taaaaggtgctgacttttaggctgg

SEQ ID NO: 2980903 - DNA, 25 bp, Homo sapien
ttaaaaggtgctgacttttaggctg

SEQ ID NO: 2980904 - DNA, 25 bp, Homo sapien
ggaaactgattcccgtagtgcctca

SEQ ID NO: 2980905 - DNA, 25 bp, Homo sapien
ccgccacagacaggtaggtggctct

SEQ ID NO: 2980906 - DNA, 25 bp, Homo sapien
ctcaggtgctcatccgccacagaca

SEQ ID NO: 2980907 - DNA, 25 bp, Homo sapien
tgattcccgtagtgcctcaggtgct

SEQ ID NO: 2980908 - DNA, 25 bp, Homo sapien
ttggtttctattaaagaaacgcagc

SEQ ID NO: 2980909 - DNA, 25 bp, Homo sapien
taaagaaacgcagcttgtatttgca

SEQ ID NO: 2980910 - DNA, 25 bp, Homo sapien
aggcctctcgggctccagatgcctt

SEQ ID NO: 2980911 - DNA, 25 bp, Homo sapien
tggggctttggtcgggaatcccagc

SEQ ID NO: 2980912 - DNA, 25 bp, Homo sapien
ggcccgcgtggtgagtcttctgcac

SEQ ID NO: 2980913 - DNA, 25 bp, Homo sapien
tctcttgatggtggtgcctgacctg

SEQ ID NO: 2980914 - DNA, 25 bp, Homo sapien
tcatcgttgtgggaccagagagaac

SEQ ID NO: 2980915 - DNA, 25 bp, Homo sapien
tgacaagaggcagagtcatcgttgt

SEQ ID NO: 2980916 - DNA, 25 bp, Homo sapien
tgtcagcaggggtgcgaacttctta

SEQ ID NO: 2980917 - DNA, 25 bp, Homo sapien
gggtgcgaacttcttaaagagcatc

SEQ ID NO: 2980918 - DNA, 25 bp, Homo sapien
tctgatttgggctgttctggtgtca

SEQ ID NO: 2980919 - DNA, 25 bp, Homo sapien
taaagagcatctcctgatcagccct

SEQ ID NO: 2980920 - DNA, 25 bp, Homo sapien
tgcaaaagtagtgacctaaccaggg

SEQ ID NO: 2980921 - DNA, 25 bp, Homo sapien
tagcttgggacaggatgcctcactg

SEQ ID NO: 2980922 - DNA, 25 bp, Homo sapien
aacttacttggagacaacagggagg

SEQ ID NO: 2980923 - DNA, 25 bp, Homo sapien
tgatgtaggcatttggctagtcccc

SEQ ID NO: 2980924 - DNA, 25 bp, Homo sapien
caggtggttcttccaaaacagaagc

SEQ ID NO: 2980925 - DNA, 25 bp, Homo sapien
gcatgtgacgcggatataccaaagt

SEQ ID NO: 2980926 - DNA, 25 bp, Homo sapien
tataagcaaaggtttgcccacctgg

SEQ ID NO: 2980927 - DNA, 25 bp, Homo sapien
gaagcaacactttgacgtcgcagag

SEQ ID NO: 2980928 - DNA, 25 bp, Homo sapien
acaagtggtttatttctcttccagg

SEQ ID NO: 2980929 - DNA, 25 bp, Homo sapien
tttctcttccaggtgaggccgcatg

SEQ ID NO: 2980930 - DNA, 25 bp, Homo sapien
gtacaagtggtttatttctcttcca

SEQ ID NO: 2980931 - DNA, 25 bp, Homo sapien
tctcttccaggtgaggccgcatgta

SEQ ID NO: 2980932 - DNA, 25 bp, Homo sapien
gagcaatatttgactaaccagaggc

SEQ ID NO: 2980933 - DNA, 25 bp, Homo sapien
tgttcttgccaagggacatactcca

SEQ ID NO: 2980934 - DNA, 25 bp, Homo sapien
tctagagctctgagcaatatttgac

SEQ ID NO: 2980935 - DNA, 25 bp, Homo sapien
aaaagtcattcgtagtccgtgtcca

SEQ ID NO: 2980936 - DNA, 25 bp, Homo sapien
ttcaatccacggtcgcggctccggt

SEQ ID NO: 2980937 - DNA, 25 bp, Homo sapien
ggtgctcctcaaacggcggcgttta

SEQ ID NO: 2980938 - DNA, 25 bp, Homo sapien
gtctctggggaagcgttcaatccac

SEQ ID NO: 2980939 - DNA, 25 bp, Homo sapien
cggtgctcctcaaacggcggcgttt

SEQ ID NO: 2980940 - DNA, 25 bp, Homo sapien
gtgtgcccctagaagcatgtgccag

SEQ ID NO: 2980941 - DNA, 25 bp, Homo sapien
gcaccagaccagtgggtcctggccg

SEQ ID NO: 2980942 - DNA, 25 bp, Homo sapien
ccagaccagtgggtcctggccgctg

SEQ ID NO: 2980943 - DNA, 25 bp, Homo sapien
tacaaggcaccagaccagtgggtcc

SEQ ID NO: 2980944 - DNA, 25 bp, Homo sapien
ttagttattgcagttgctctctgag

SEQ ID NO: 2980945 - DNA, 25 bp, Homo sapien
tatgctaagcattaccctgtttagt

SEQ ID NO: 2980946 - DNA, 25 bp, Homo sapien
cctgagtgccgactatatgctaagc

SEQ ID NO: 2980947 - DNA, 25 bp, Homo sapien
tgtccagaagctgcatccgcattaa

SEQ ID NO: 2980948 - DNA, 25 bp, Homo sapien
tgatcgagcactggatgcccgtgtc

SEQ ID NO: 2980949 - DNA, 25 bp, Homo sapien
tggcggtccgagaaattgcactgct

SEQ ID NO: 2980950 - DNA, 25 bp, Homo sapien
catgatgtcgatgttcagctcggcc

SEQ ID NO: 2980951 - DNA, 25 bp, Homo sapien
tcgtgttccgacatgctgatcgagc

SEQ ID NO: 2980952 - DNA, 25 bp, Homo sapien
ctccatctcaaaccgctctgagttg

SEQ ID NO: 2980953 - DNA, 25 bp, Homo sapien
ttccggaaacggatggtctgctcca

SEQ ID NO: 2980954 - DNA, 25 bp, Homo sapien
gagccgagctgcatgatggcgttaa

SEQ ID NO: 2980955 - DNA, 25 bp, Homo sapien
catggttaactccccgggtctccat

SEQ ID NO: 2980956 - DNA, 25 bp, Homo sapien
tcttcatagatgtcaatggcattgt

SEQ ID NO: 2980957 - DNA, 25 bp, Homo sapien
cattgttctgcttgatgcagtgctc

SEQ ID NO: 2980958 - DNA, 25 bp, Homo sapien
cattgatggttttagctgaagggtc

SEQ ID NO: 2980959 - DNA, 25 bp, Homo sapien
tccatggcctcctcgtcattgaaat

SEQ ID NO: 2980960 - DNA, 25 bp, Homo sapien
tcatgcccacaggtgcccgctgaaa

SEQ ID NO: 2980961 - DNA, 25 bp, Homo sapien
ccaggtcccagatgtatgaatcgct

SEQ ID NO: 2980962 - DNA, 25 bp, Homo sapien
aaatccaagcaggagtatgccactg

SEQ ID NO: 2980963 - DNA, 25 bp, Homo sapien
gtgtggcagccctcttgatttcctg

SEQ ID NO: 2980964 - DNA, 25 bp, Homo sapien
cacgagtggagacgatggcttcaga

SEQ ID NO: 2980965 - DNA, 25 bp, Homo sapien
tcagagcaagttcaggcttgttggg

SEQ ID NO: 2980966 - DNA, 25 bp, Homo sapien
gggttgaactccaacgtcacgagtg

SEQ ID NO: 2980967 - DNA, 25 bp, Homo sapien
tagcagccacccaggagtacgtggg

SEQ ID NO: 2980968 - DNA, 25 bp, Homo sapien
gactcaatggtggatagctccgcca

SEQ ID NO: 2980969 - DNA, 25 bp, Homo sapien
ctgcccatccgtggaagctgagaag

SEQ ID NO: 2980970 - DNA, 25 bp, Homo sapien
gatggtgccatacacagggtctcgg

SEQ ID NO: 2980971 - DNA, 25 bp, Homo sapien
tcttcgactgcagccagatggtgcc

SEQ ID NO: 2980972 - DNA, 25 bp, Homo sapien
ggtgatgtccaagatcacaacttca

SEQ ID NO: 2980973 - DNA, 25 bp, Homo sapien
tgggctcgctcatctttcggatgtc

SEQ ID NO: 2980974 - DNA, 25 bp, Homo sapien
caagatcacaacttcagtgggctcg

SEQ ID NO: 2980975 - DNA, 25 bp, Homo sapien
cacaacttcagtgggctcgctcatc

SEQ ID NO: 2980976 - DNA, 25 bp, Homo sapien
tggaaggagtgacacaggaggggaa

SEQ ID NO: 2980977 - DNA, 25 bp, Homo sapien
gtggaaggagtgacacaggagggga

SEQ ID NO: 2980978 - DNA, 25 bp, Homo sapien
ctgtggaaggagtgacacaggaggg

SEQ ID NO: 2980979 - DNA, 25 bp, Homo sapien
gaaggagtgacacaggaggggaaga

SEQ ID NO: 2980980 - DNA, 25 bp, Homo sapien
tgtcttcagaccaaatgcgggctgt

SEQ ID NO: 2980981 - DNA, 25 bp, Homo sapien
ccttgcggttgcaggagatgacgat

SEQ ID NO: 2980982 - DNA, 25 bp, Homo sapien
catgatggacgattcccggctgtct

SEQ ID NO: 2980983 - DNA, 25 bp, Homo sapien
cagtcgccaaccgtcaggaagttct

SEQ ID NO: 2980984 - DNA, 25 bp, Homo sapien
ttcaagctgagggtgggatcgcact

SEQ ID NO: 2980985 - DNA, 25 bp, Homo sapien
cagggttccgtccatcctggtggta

SEQ ID NO: 2980986 - DNA, 25 bp, Homo sapien
catgaagtcccagatatccagggtt

SEQ ID NO: 2980987 - DNA, 25 bp, Homo sapien
tgggatcgcactgctcgaacatgaa

SEQ ID NO: 2980988 - DNA, 25 bp, Homo sapien
aggcagaagagggcctcgtcacaca

SEQ ID NO: 2980989 - DNA, 25 bp, Homo sapien
tgcacccggaggcagaagagggcct

SEQ ID NO: 2980990 - DNA, 25 bp, Homo sapien
ctgcacccggaggcagaagagggcc

SEQ ID NO: 2980991 - DNA, 25 bp, Homo sapien
cggaggcagaagagggcctcgtcac

SEQ ID NO: 2980992 - DNA, 25 bp, Homo sapien
ggtagagagcccaggcgagacctcc

SEQ ID NO: 2980993 - DNA, 25 bp, Homo sapien
cccaggcgagacctccagcagggtg

SEQ ID NO: 2980994 - DNA, 25 bp, Homo sapien
aagaggctacgttcttctcattcct

SEQ ID NO: 2980995 - DNA, 25 bp, Homo sapien
cgcaggcgatgagacacccattgtc

SEQ ID NO: 2980996 - DNA, 25 bp, Homo sapien
agccgcatctcccggtgcctggcct

SEQ ID NO: 2980997 - DNA, 25 bp, Homo sapien
tccaggatcttctctcgccgggtct

SEQ ID NO: 2980998 - DNA, 25 bp, Homo sapien
ctcgccgggtctcacgctcaaacat

SEQ ID NO: 2980999 - DNA, 25 bp, Homo sapien
aggatcttctctcgccgggtctcac

SEQ ID NO: 2981000 - DNA, 25 bp, Homo sapien
cgaagatgatgtcgaagaactcctc

SEQ ID NO: 2981001 - DNA, 25 bp, Homo sapien
agctcctcatcggtctgctcctcat

SEQ ID NO: 2981002 - DNA, 25 bp, Homo sapien
gccttgctgaccagcgcctccaggt

SEQ ID NO: 2981003 - DNA, 25 bp, Homo sapien
aggcactggcgtcagctttatggcg

SEQ ID NO: 2981004 - DNA, 25 bp, Homo sapien
ctgaagcctgggtcgctgagcaccc

SEQ ID NO: 2981005 - DNA, 25 bp, Homo sapien
aaagcagccaaatggctgaagcctg

SEQ ID NO: 2981006 - DNA, 25 bp, Homo sapien
tgaaccccacgaggaccaaagcagc

SEQ ID NO: 2981007 - DNA, 25 bp, Homo sapien
aagacagcacagaagtgttggtgtt

SEQ ID NO: 2981008 - DNA, 25 bp, Homo sapien
cctccaccacctggtcttcttctgg

SEQ ID NO: 2981009 - DNA, 25 bp, Homo sapien
catccccttcttcccccgctgcttc

SEQ ID NO: 2981010 - DNA, 25 bp, Homo sapien
ggtcttcttctggacttggttgctg

SEQ ID NO: 2981011 - DNA, 25 bp, Homo sapien
tcttccacttcttcatccccttctt

SEQ ID NO: 2981012 - DNA, 25 bp, Homo sapien
tagcgccgcagtcgaaggctgactt

SEQ ID NO: 2981013 - DNA, 25 bp, Homo sapien
gcacacagggatagcgccgcagtcg

SEQ ID NO: 2981014 - DNA, 25 bp, Homo sapien
cacacagggatagcgccgcagtcga

SEQ ID NO: 2981015 - DNA, 25 bp, Homo sapien
gggatagcgccgcagtcgaaggctg

SEQ ID NO: 2981016 - DNA, 25 bp, Homo sapien
gaggctcctgtcgtggcaatgtgtc

SEQ ID NO: 2981017 - DNA, 25 bp, Homo sapien
tctgttcctgatttgtaggtggacg

SEQ ID NO: 2981018 - DNA, 25 bp, Homo sapien
gccatggccatgcaagtctggttga

SEQ ID NO: 2981019 - DNA, 25 bp, Homo sapien
gaaagcattcaggtgcagcagaaca

SEQ ID NO: 2981020 - DNA, 25 bp, Homo sapien
ttgaagcacacgcatctgccgctgt

SEQ ID NO: 2981021 - DNA, 25 bp, Homo sapien
gtgtcagttcgctaactcctgcgcg

SEQ ID NO: 2981022 - DNA, 25 bp, Homo sapien
tgccctttagggagcgccccagcag

SEQ ID NO: 2981023 - DNA, 25 bp, Homo sapien
gaaccgctgcgcgacgatgtgtgcc

SEQ ID NO: 2981024 - DNA, 25 bp, Homo sapien
gttgctggtccttggagtccccgct

SEQ ID NO: 2981025 - DNA, 25 bp, Homo sapien
gctggtccttggagtccccgctgtc

SEQ ID NO: 2981026 - DNA, 25 bp, Homo sapien
ttgctggtccttggagtccccgctg

SEQ ID NO: 2981027 - DNA, 25 bp, Homo sapien
tggtccttggagtccccgctgtcct

SEQ ID NO: 2981028 - DNA, 25 bp, Homo sapien
ggcagttaggtcaagccctccctgc

SEQ ID NO: 2981029 - DNA, 25 bp, Homo sapien
tgagagagccgagattcatctgcgc

SEQ ID NO: 2981030 - DNA, 25 bp, Homo sapien
ggaaagttgctctgaagagtcccgg

SEQ ID NO: 2981031 - DNA, 25 bp, Homo sapien
tggtcccttcttgacacccatcctg

SEQ ID NO: 2981032 - DNA, 25 bp, Homo sapien
agctctgccacgctgatgggccgga

SEQ ID NO: 2981033 - DNA, 25 bp, Homo sapien
cactttatgggcgatgagggtagct

SEQ ID NO: 2981034 - DNA, 25 bp, Homo sapien
ctgatgggccggacccgaagcgcca

SEQ ID NO: 2981035 - DNA, 25 bp, Homo sapien
ggcgatgagggtagctccttcctcc

SEQ ID NO: 2981036 - DNA, 25 bp, Homo sapien
ggtgagctgagccatctgagcagac

SEQ ID NO: 2981037 - DNA, 25 bp, Homo sapien
caggtgagctgagccatctgagcag

SEQ ID NO: 2981038 - DNA, 25 bp, Homo sapien
tgagctgagccatctgagcagacct

SEQ ID NO: 2981039 - DNA, 25 bp, Homo sapien
tgagcagacctctgccctgcagctc

SEQ ID NO: 2981040 - DNA, 25 bp, Homo sapien
tggctctacagcaccccgggagcag

SEQ ID NO: 2981041 - DNA, 25 bp, Homo sapien
agaggggggtggcagcaggtaaatg

SEQ ID NO: 2981042 - DNA, 25 bp, Homo sapien
ctggctctacagcaccccgggagca

SEQ ID NO: 2981043 - DNA, 25 bp, Homo sapien
ccgggagcagaggggggtggcagca

SEQ ID NO: 2981044 - DNA, 25 bp, Homo sapien
gcctgggacagagcaaagagccaca

SEQ ID NO: 2981045 - DNA, 25 bp, Homo sapien
ctgggacagagcaaagagccacagg

SEQ ID NO: 2981046 - DNA, 25 bp, Homo sapien
gatctccactcgcagctgagagggc

SEQ ID NO: 2981047 - DNA, 25 bp, Homo sapien
tggggatctccactcgcagctgaga

SEQ ID NO: 2981048 - DNA, 25 bp, Homo sapien
ctgcaaggtccccagagggaggccc

SEQ ID NO: 2981049 - DNA, 25 bp, Homo sapien
tccccagagggaggcccacggtcac

SEQ ID NO: 2981050 - DNA, 25 bp, Homo sapien
gtccccagagggaggcccacggtca

SEQ ID NO: 2981051 - DNA, 25 bp, Homo sapien
caaggtccccagagggaggcccacg

SEQ ID NO: 2981052 - DNA, 25 bp, Homo sapien
gaagtcaaaggccacgtcgaacagg

SEQ ID NO: 2981053 - DNA, 25 bp, Homo sapien
gcccgcaggatgtcgtcgggatcct

SEQ ID NO: 2981054 - DNA, 25 bp, Homo sapien
aggtaggacttctcccgggagcgat

SEQ ID NO: 2981055 - DNA, 25 bp, Homo sapien
gatgtcgtcgggatcctccattggg

SEQ ID NO: 2981056 - DNA, 25 bp, Homo sapien
gctcttggtggtggcctgatacacc

SEQ ID NO: 2981057 - DNA, 25 bp, Homo sapien
gcctgagatgacgccctcgatgagg

SEQ ID NO: 2981058 - DNA, 25 bp, Homo sapien
gacgccctcgatgaggctcttggtg

SEQ ID NO: 2981059 - DNA, 25 bp, Homo sapien
ggctcttggtggtggcctgatacac

SEQ ID NO: 2981060 - DNA, 25 bp, Homo sapien
gggcattgcggtcctcgcccacagt

SEQ ID NO: 2981061 - DNA, 25 bp, Homo sapien
aggggcattgcggtcctcgcccaca

SEQ ID NO: 2981062 - DNA, 25 bp, Homo sapien
ttgcggtcctcgcccacagtctggg

SEQ ID NO: 2981063 - DNA, 25 bp, Homo sapien
cccacagtctgggcattccccttac

SEQ ID NO: 2981064 - DNA, 25 bp, Homo sapien
tcctcgatggcacggaagaggtcgt

SEQ ID NO: 2981065 - DNA, 25 bp, Homo sapien
cgttgagggtctgaacatagatgcc

SEQ ID NO: 2981066 - DNA, 25 bp, Homo sapien
attgctggtctcctcgatggcacgg

SEQ ID NO: 2981067 - DNA, 25 bp, Homo sapien
ggtaggacatggagacctcatactc

SEQ ID NO: 2981068 - DNA, 25 bp, Homo sapien
atcacccccttagagtcctcccgca

SEQ ID NO: 2981069 - DNA, 25 bp, Homo sapien
ggtgatgccggccacctggatcacc

SEQ ID NO: 2981070 - DNA, 25 bp, Homo sapien
ccttggcattgatggtggagacttc

SEQ ID NO: 2981071 - DNA, 25 bp, Homo sapien
caggtcccggatcatctcattgtag

SEQ ID NO: 2981072 - DNA, 25 bp, Homo sapien
agatgttcttgacccggctgcgctg

SEQ ID NO: 2981073 - DNA, 25 bp, Homo sapien
tgcgctggcgcacggtcacctgcag

SEQ ID NO: 2981074 - DNA, 25 bp, Homo sapien
gccagccaggtcgatcatgaacagg

SEQ ID NO: 2981075 - DNA, 25 bp, Homo sapien
cggtcacctgcagtaccgcgtggga

SEQ ID NO: 2981076 - DNA, 25 bp, Homo sapien
cttgctgtcgcgatagttgatgtac

SEQ ID NO: 2981077 - DNA, 25 bp, Homo sapien
tcagggcgttgatgcagttgcccag

SEQ ID NO: 2981078 - DNA, 25 bp, Homo sapien
tcatacgctgcccacgattctgtgt

SEQ ID NO: 2981079 - DNA, 25 bp, Homo sapien
gatgtacttgttgctacccttgtcg

SEQ ID NO: 2981080 - DNA, 25 bp, Homo sapien
ggtgttccgggactcctcgaaggca

SEQ ID NO: 2981081 - DNA, 25 bp, Homo sapien
ctagtcttaatgttcttggcccggc

SEQ ID NO: 2981082 - DNA, 25 bp, Homo sapien
ggactgatgtgagcgatcatcactg

SEQ ID NO: 2981083 - DNA, 25 bp, Homo sapien
tcgaaggcactgctcgcaggactga

SEQ ID NO: 2981084 - DNA, 25 bp, Homo sapien
gggctcaccgctcctgcatgaacat

SEQ ID NO: 2981085 - DNA, 25 bp, Homo sapien
tcctccacccgttgttgaagggcca

SEQ ID NO: 2981086 - DNA, 25 bp, Homo sapien
tcagtggcttcctaatgcctgcggg

SEQ ID NO: 2981087 - DNA, 25 bp, Homo sapien
catcccactccagttgaagacctgt

SEQ ID NO: 2981088 - DNA, 25 bp, Homo sapien
cgaggcctgcctgcagggcctttct

SEQ ID NO: 2981089 - DNA, 25 bp, Homo sapien
cctgcctgcagggcctttcttcccc

SEQ ID NO: 2981090 - DNA, 25 bp, Homo sapien
gaggcctgcctgcagggcctttctt

SEQ ID NO: 2981091 - DNA, 25 bp, Homo sapien
ggcctgcctgcagggcctttcttcc

SEQ ID NO: 2981092 - DNA, 25 bp, Homo sapien
tggagcggaggggatgcagtcaccc

SEQ ID NO: 2981093 - DNA, 25 bp, Homo sapien
cagggaacacgtatggagcggaggg

SEQ ID NO: 2981094 - DNA, 25 bp, Homo sapien
gagcggaggggatgcagtcacccca

SEQ ID NO: 2981095 - DNA, 25 bp, Homo sapien
ctgcagggaacacgtatggagcgga

SEQ ID NO: 2981096 - DNA, 25 bp, Homo sapien
tcaatcttgcgcttgagtcgctgga

SEQ ID NO: 2981097 - DNA, 25 bp, Homo sapien
atctcgccccgcaggtcagcgatga

SEQ ID NO: 2981098 - DNA, 25 bp, Homo sapien
gcccagtctgctcatcaatcttgcg

SEQ ID NO: 2981099 - DNA, 25 bp, Homo sapien
taggagacgttcaggaggttctgct

SEQ ID NO: 2981100 - DNA, 25 bp, Homo sapien
tctggacctccatggcgcggttctc

SEQ ID NO: 2981101 - DNA, 25 bp, Homo sapien
ccggcgatggtgagcaggtgtcggg

SEQ ID NO: 2981102 - DNA, 25 bp, Homo sapien
tggcgagctgctcccgaagctgtcc

SEQ ID NO: 2981103 - DNA, 25 bp, Homo sapien
tgtcgggaggtgtcaatctggacct

SEQ ID NO: 2981104 - DNA, 25 bp, Homo sapien
tgtgtctgagtccttctcgctgtcg

SEQ ID NO: 2981105 - DNA, 25 bp, Homo sapien
ccaggatgtctggttggtcatcacc

SEQ ID NO: 2981106 - DNA, 25 bp, Homo sapien
gccacctcgggtggctccaggatgt

SEQ ID NO: 2981107 - DNA, 25 bp, Homo sapien
tgcttgcgcagttgcttctgctcgt

SEQ ID NO: 2981108 - DNA, 25 bp, Homo sapien
gggaatgtgacgcatagagaagtta

SEQ ID NO: 2981109 - DNA, 25 bp, Homo sapien
gagcttagcaaagtcacacaggatt

SEQ ID NO: 2981110 - DNA, 25 bp, Homo sapien
gaagttaaagagcttagcaaagtca

SEQ ID NO: 2981111 - DNA, 25 bp, Homo sapien
tgagttcccaagtctcacggctacc

SEQ ID NO: 2981112 - DNA, 25 bp, Homo sapien
gcatctcggtgttctccacctcgag

SEQ ID NO: 2981113 - DNA, 25 bp, Homo sapien
gcagcgcgtgcgactgcatctcggt

SEQ ID NO: 2981114 - DNA, 25 bp, Homo sapien
tggataatctcgtcgcagagactgc

SEQ ID NO: 2981115 - DNA, 25 bp, Homo sapien
gatgatctgccgctggccctggata

SEQ ID NO: 2981116 - DNA, 25 bp, Homo sapien
agggctcagtgagtgccagcggccc

SEQ ID NO: 2981117 - DNA, 25 bp, Homo sapien
gctcagatgcgcgggggcgtgggcc

SEQ ID NO: 2981118 - DNA, 25 bp, Homo sapien
gtggctcagatgcgcgggggcgtgg

SEQ ID NO: 2981119 - DNA, 25 bp, Homo sapien
gcagggctcagtgagtgccagcggc

SEQ ID NO: 2981120 - DNA, 25 bp, Homo sapien
cgtagagctcttccaggcgctgcgg

SEQ ID NO: 2981121 - DNA, 25 bp, Homo sapien
agagctcttccaggcgctgcgggac

SEQ ID NO: 2981122 - DNA, 25 bp, Homo sapien
tagagctcttccaggcgctgcggga

SEQ ID NO: 2981123 - DNA, 25 bp, Homo sapien
ttcgtagagctcttccaggcgctgc

SEQ ID NO: 2981124 - DNA, 25 bp, Homo sapien
aggccacttggtccatgatggtggc

SEQ ID NO: 2981125 - DNA, 25 bp, Homo sapien
tggaggccacttggtccatgatggt

SEQ ID NO: 2981126 - DNA, 25 bp, Homo sapien
acttggtccatgatggtggcctgct

SEQ ID NO: 2981127 - DNA, 25 bp, Homo sapien
gtccatgatggtggcctgctccagg

SEQ ID NO: 2981128 - DNA, 25 bp, Homo sapien
tctccaggtcagaatctggggtcag

SEQ ID NO: 2981129 - DNA, 25 bp, Homo sapien
tgggcatcagagctcaatgtcttca

SEQ ID NO: 2981130 - DNA, 25 bp, Homo sapien
ccaggtcagaatctggggtcagtga

SEQ ID NO: 2981131 - DNA, 25 bp, Homo sapien
tgaggttcctgctggggtaattttg

SEQ ID NO: 2981132 - DNA, 25 bp, Homo sapien
cgtcaccaggctgccgagctggatg

SEQ ID NO: 2981133 - DNA, 25 bp, Homo sapien
agccttgaacacgtggtggccttca

SEQ ID NO: 2981134 - DNA, 25 bp, Homo sapien
ttttgcctgccaggccccagtacca

SEQ ID NO: 2981135 - DNA, 25 bp, Homo sapien
agtaccagccttgaacacgtggtgg

SEQ ID NO: 2981136 - DNA, 25 bp, Homo sapien
ctttgtgggacaaggggatctccga

SEQ ID NO: 2981137 - DNA, 25 bp, Homo sapien
ctgctgtcaggggaagagttgatcc

SEQ ID NO: 2981138 - DNA, 25 bp, Homo sapien
gatctccgacaggttctcactgctg

SEQ ID NO: 2981139 - DNA, 25 bp, Homo sapien
ggaagagttgatccagctgcccagg

SEQ ID NO: 2981140 - DNA, 25 bp, Homo sapien
tcctcactggcagcatgctgtagtg

SEQ ID NO: 2981141 - DNA, 25 bp, Homo sapien
cacttggtgccagtcaggatctcct

SEQ ID NO: 2981142 - DNA, 25 bp, Homo sapien
gtcgccctcgctcagtgagtgcagg

SEQ ID NO: 2981143 - DNA, 25 bp, Homo sapien
ggtgacctcgaaggatcgggacctc

SEQ ID NO: 2981144 - DNA, 25 bp, Homo sapien
gacacccacccctgcgcctcgcctc

SEQ ID NO: 2981145 - DNA, 25 bp, Homo sapien
cacccacccctgcgcctcgcctcac

SEQ ID NO: 2981146 - DNA, 25 bp, Homo sapien
acacccacccctgcgcctcgcctca

SEQ ID NO: 2981147 - DNA, 25 bp, Homo sapien
tgggtgcctgcacactggcatcctg

SEQ ID NO: 2981148 - DNA, 25 bp, Homo sapien
gagtttgactttggccaaaggtagc

SEQ ID NO: 2981149 - DNA, 25 bp, Homo sapien
aaaggtagcgtgacctttcccagat

SEQ ID NO: 2981150 - DNA, 25 bp, Homo sapien
tccgagatgcgctccgcctgatggg

SEQ ID NO: 2981151 - DNA, 25 bp, Homo sapien
tgctttcctccgttaccaaggccga

SEQ ID NO: 2981152 - DNA, 25 bp, Homo sapien
tgagatcctgagcttacttcctggt

SEQ ID NO: 2981153 - DNA, 25 bp, Homo sapien
tatgccgggagcatccatctttgcc

SEQ ID NO: 2981154 - DNA, 25 bp, Homo sapien
taatacgtgaagtgcctgtcggcgc

SEQ ID NO: 2981155 - DNA, 25 bp, Homo sapien
gactggccaccaagtacggcgtgtc

SEQ ID NO: 2981156 - DNA, 25 bp, Homo sapien
ggcgcaactccgagtacctggttga

SEQ ID NO: 2981157 - DNA, 25 bp, Homo sapien
caagttcttcgacgtcaacggcagc

SEQ ID NO: 2981158 - DNA, 25 bp, Homo sapien
aactggagctgttccacgcgctgga

SEQ ID NO: 2981159 - DNA, 25 bp, Homo sapien
caacgccagcgatgtggttctgcgg

SEQ ID NO: 2981160 - DNA, 25 bp, Homo sapien
aggcggtgctccagcgcttgcagga

SEQ ID NO: 2981161 - DNA, 25 bp, Homo sapien
gcaccgatgaggtccgggtattcca

SEQ ID NO: 2981162 - DNA, 25 bp, Homo sapien
gagctgctgcggcagggcaacgcca

SEQ ID NO: 2981163 - DNA, 25 bp, Homo sapien
tcacccatgcaggtgagcgggcagt

SEQ ID NO: 2981164 - DNA, 25 bp, Homo sapien
tggagcggcaggtcgtcccagccct

SEQ ID NO: 2981165 - DNA, 25 bp, Homo sapien
ggccatgctgaccttggtgggcctg

SEQ ID NO: 2981166 - DNA, 25 bp, Homo sapien
cggacagctccacggactcatctgt

SEQ ID NO: 2981167 - DNA, 25 bp, Homo sapien
tttccaccaatccatggaggaggct

SEQ ID NO: 2981168 - DNA, 25 bp, Homo sapien
gagcccctcgcctattctgcagaga

SEQ ID NO: 2981169 - DNA, 25 bp, Homo sapien
tttccagggagaggcacggctagcc

SEQ ID NO: 2981170 - DNA, 25 bp, Homo sapien
cagagagcctgaaactttccaggga

SEQ ID NO: 2981171 - DNA, 25 bp, Homo sapien
acccatgcagtggtgcacggggcag

SEQ ID NO: 2981172 - DNA, 25 bp, Homo sapien
tggagcgcagagctagaaggtggcc

SEQ ID NO: 2981173 - DNA, 25 bp, Homo sapien
tgcatctgctctatgcccagccctg

SEQ ID NO: 2981174 - DNA, 25 bp, Homo sapien
tgggcaggggtcacccatgcagtgg

SEQ ID NO: 2981175 - DNA, 25 bp, Homo sapien
ttctgtacccaggacagcagtgatg

SEQ ID NO: 2981176 - DNA, 25 bp, Homo sapien
gccttattcggaggtcccagcttcc

SEQ ID NO: 2981177 - DNA, 25 bp, Homo sapien
gctgagacaagaatgctggcttttc

SEQ ID NO: 2981178 - DNA, 25 bp, Homo sapien
ctgtgacctgtggagacctcagcca

SEQ ID NO: 2981179 - DNA, 25 bp, Homo sapien
tgtcagcatcgccagctgtacctct

SEQ ID NO: 2981180 - DNA, 25 bp, Homo sapien
caagtggttgtttgccccaggatcc

SEQ ID NO: 2981181 - DNA, 25 bp, Homo sapien
ccttggctctccaagtggttgtttg

SEQ ID NO: 2981182 - DNA, 25 bp, Homo sapien
ccaggatccttacgcagacactgag

SEQ ID NO: 2981183 - DNA, 25 bp, Homo sapien
tctctcgtccctcaagccccatgct

SEQ ID NO: 2981184 - DNA, 25 bp, Homo sapien
tctcgtccctcaagccccatgctct

SEQ ID NO: 2981185 - DNA, 25 bp, Homo sapien
tcgtccctcaagccccatgctctgg

SEQ ID NO: 2981186 - DNA, 25 bp, Homo sapien
ctctcgtccctcaagccccatgctc

SEQ ID NO: 2981187 - DNA, 25 bp, Homo sapien
ggctcagcccgctgacgtggggcgt

SEQ ID NO: 2981188 - DNA, 25 bp, Homo sapien
ctgcgatctctggccagtggctttc

SEQ ID NO: 2981189 - DNA, 25 bp, Homo sapien
agatgacagggatgacgccagccac

SEQ ID NO: 2981190 - DNA, 25 bp, Homo sapien
atgacagggatgacgccagccacac

SEQ ID NO: 2981191 - DNA, 25 bp, Homo sapien
acagggatgacgccagccacacacg

SEQ ID NO: 2981192 - DNA, 25 bp, Homo sapien
gatgacagggatgacgccagccaca

SEQ ID NO: 2981193 - DNA, 25 bp, Homo sapien
caggaacacgccacaagggatgaaa

SEQ ID NO: 2981194 - DNA, 25 bp, Homo sapien
tgatgatatccgaggctgtgagcgc

SEQ ID NO: 2981195 - DNA, 25 bp, Homo sapien
tgtggtagagcatgacgaagacccg

SEQ ID NO: 2981196 - DNA, 25 bp, Homo sapien
gacagtggcccggaaagtcttgctg

SEQ ID NO: 2981197 - DNA, 25 bp, Homo sapien
aggcttcgccgccatgccctctggc

SEQ ID NO: 2981198 - DNA, 25 bp, Homo sapien
ctggctgtgatgccaaagtgcaggg

SEQ ID NO: 2981199 - DNA, 25 bp, Homo sapien
agggcaggtaggcatcgtggatgac

SEQ ID NO: 2981200 - DNA, 25 bp, Homo sapien
tctggctgtgatgccaaagtgcagg

SEQ ID NO: 2981201 - DNA, 25 bp, Homo sapien
tacacttctgcccctgtggggagtc

SEQ ID NO: 2981202 - DNA, 25 bp, Homo sapien
ctacacttctgcccctgtggggagt

SEQ ID NO: 2981203 - DNA, 25 bp, Homo sapien
cctgtggggagtcccggaggctcca

SEQ ID NO: 2981204 - DNA, 25 bp, Homo sapien
tggggagtcccggaggctccatcac

SEQ ID NO: 2981205 - DNA, 25 bp, Homo sapien
tgttgccatccatggagacacagat

SEQ ID NO: 2981206 - DNA, 25 bp, Homo sapien
ttcccgtgcccgcttctgtagggca

SEQ ID NO: 2981207 - DNA, 25 bp, Homo sapien
tcttcatccatggaactttgtgctt

SEQ ID NO: 2981208 - DNA, 25 bp, Homo sapien
ttccctgatactgggttctctcctg

SEQ ID NO: 2981209 - DNA, 25 bp, Homo sapien
ggaggcaagtttaagaattgtggat

SEQ ID NO: 2981210 - DNA, 25 bp, Homo sapien
aacggactaatgcagtgatgcacac

SEQ ID NO: 2981211 - DNA, 25 bp, Homo sapien
accagggaggcaagtttaagaattg

SEQ ID NO: 2981212 - DNA, 25 bp, Homo sapien
gaaaacggactaatgcagtgatgca

SEQ ID NO: 2981213 - DNA, 25 bp, Homo sapien
tagccgcgctattctgggagtgtga

SEQ ID NO: 2981214 - DNA, 25 bp, Homo sapien
gggtctatacttcaggcctcggatg

SEQ ID NO: 2981215 - DNA, 25 bp, Homo sapien
ccccggcagtgcttgaggcttgact

SEQ ID NO: 2981216 - DNA, 25 bp, Homo sapien
tgagggtcttaatagcagccgtggt

SEQ ID NO: 2981217 - DNA, 25 bp, Homo sapien
tgagacacacttcaggcacagttcg

SEQ ID NO: 2981218 - DNA, 25 bp, Homo sapien
aaattgggaagcgaatccaggctgg

SEQ ID NO: 2981219 - DNA, 25 bp, Homo sapien
gaggttcgccttttgcacgcacggt

SEQ ID NO: 2981220 - DNA, 25 bp, Homo sapien
tccccgaggtacagtgtttagcgcg

SEQ ID NO: 2981221 - DNA, 25 bp, Homo sapien
gactcgtactttccggctggtgagg

SEQ ID NO: 2981222 - DNA, 25 bp, Homo sapien
cctgccggcgtgtgggttgttgctg

SEQ ID NO: 2981223 - DNA, 25 bp, Homo sapien
agtttctggccctgccggcgtgtgg

SEQ ID NO: 2981224 - DNA, 25 bp, Homo sapien
aggctgagccgactcgtactttccg

SEQ ID NO: 2981225 - DNA, 25 bp, Homo sapien
aggcagggctccttgctttcggcga

SEQ ID NO: 2981226 - DNA, 25 bp, Homo sapien
gctggagcctgcatcaccgttacat

SEQ ID NO: 2981227 - DNA, 25 bp, Homo sapien
tacgtgcgctccgtttacacaggaa

SEQ ID NO: 2981228 - DNA, 25 bp, Homo sapien
cattcagggcgctaatcgggcgccc

SEQ ID NO: 2981229 - DNA, 25 bp, Homo sapien
cagggcactcttcagggaggttccc

SEQ ID NO: 2981230 - DNA, 25 bp, Homo sapien
ccagggcactcttcagggaggttcc

SEQ ID NO: 2981231 - DNA, 25 bp, Homo sapien
accagggcactcttcagggaggttc

SEQ ID NO: 2981232 - DNA, 25 bp, Homo sapien
gctcccaggccaggctctggttggg

SEQ ID NO: 2981233 - DNA, 25 bp, Homo sapien
cctggctcccaggccaggctctggt

SEQ ID NO: 2981234 - DNA, 25 bp, Homo sapien
cccaggccaggctctggttgggtcc

SEQ ID NO: 2981235 - DNA, 25 bp, Homo sapien
tggctcccaggccaggctctggttg

SEQ ID NO: 2981236 - DNA, 25 bp, Homo sapien
gaggcagtcccaggcacatcaccaa

SEQ ID NO: 2981237 - DNA, 25 bp, Homo sapien
agaggcagtcccaggcacatcacca

SEQ ID NO: 2981238 - DNA, 25 bp, Homo sapien
tgagcacaaacgtggtgacaatgcc

SEQ ID NO: 2981239 - DNA, 25 bp, Homo sapien
ccccagagcggtcacacaggttgta

SEQ ID NO: 2981240 - DNA, 25 bp, Homo sapien
gtttcttggtgtcctgcacaaaggg

SEQ ID NO: 2981241 - DNA, 25 bp, Homo sapien
cagcaggctccgtttcttggtgtcc

SEQ ID NO: 2981242 - DNA, 25 bp, Homo sapien
tgacgtagaagaggacgaaggccca

SEQ ID NO: 2981243 - DNA, 25 bp, Homo sapien
cccatatggcaacggaggtggctgt

SEQ ID NO: 2981244 - DNA, 25 bp, Homo sapien
cagcagcatgacgtagatgagtgcc

SEQ ID NO: 2981245 - DNA, 25 bp, Homo sapien
caaagtccatgttggcgatggcaca

SEQ ID NO: 2981246 - DNA, 25 bp, Homo sapien
tctcatagcccacgccccgggtggg

SEQ ID NO: 2981247 - DNA, 25 bp, Homo sapien
tgttctccacgaacatgctctgacc

SEQ ID NO: 2981248 - DNA, 25 bp, Homo sapien
caggatggtctcatagcccacgccc

SEQ ID NO: 2981249 - DNA, 25 bp, Homo sapien
aggccttgttctccacgaacatgct

SEQ ID NO: 2981250 - DNA, 25 bp, Homo sapien
ccctggcaagtttccagaactattt

SEQ ID NO: 2981251 - DNA, 25 bp, Homo sapien
ctgtggccccctggcaagtttccag

SEQ ID NO: 2981252 - DNA, 25 bp, Homo sapien
cactcccagggtgtttgaggagggc

SEQ ID NO: 2981253 - DNA, 25 bp, Homo sapien
tttagctccagggatacttccttgt

SEQ ID NO: 2981254 - DNA, 25 bp, Homo sapien
tctaacccaggagtggccaacttgg

SEQ ID NO: 2981255 - DNA, 25 bp, Homo sapien
ggtaaatacatctgagagccctcgg

SEQ ID NO: 2981256 - DNA, 25 bp, Homo sapien
caggaacagtttgaagatcccaggg

SEQ ID NO: 2981257 - DNA, 25 bp, Homo sapien
acagatgcatgggagtgaacaacac

SEQ ID NO: 2981258 - DNA, 25 bp, Homo sapien
cattgtacccgctgtatggtgacac

SEQ ID NO: 2981259 - DNA, 25 bp, Homo sapien
tgtacccgctgtatggtgacaccgg

SEQ ID NO: 2981260 - DNA, 25 bp, Homo sapien
agcagctgcccattgtacccgctgt

SEQ ID NO: 2981261 - DNA, 25 bp, Homo sapien
gctgtatggtgacaccggcctctta

SEQ ID NO: 2981262 - DNA, 25 bp, Homo sapien
aactttgtgcatcagggccatctca

SEQ ID NO: 2981263 - DNA, 25 bp, Homo sapien
cggaactttgtgcatcagggccatc

SEQ ID NO: 2981264 - DNA, 25 bp, Homo sapien
ggaactttgtgcatcagggccatct

SEQ ID NO: 2981265 - DNA, 25 bp, Homo sapien
ctttgtgcatcagggccatctcagt

SEQ ID NO: 2981266 - DNA, 25 bp, Homo sapien
tgccgacgccctgaacggatgctaa

SEQ ID NO: 2981267 - DNA, 25 bp, Homo sapien
gcagatctgcgctggatagtgcccc

SEQ ID NO: 2981268 - DNA, 25 bp, Homo sapien
tacctgttccggctcctatgctgga

SEQ ID NO: 2981269 - DNA, 25 bp, Homo sapien
tagccctatgggaaagagctgccac

SEQ ID NO: 2981270 - DNA, 25 bp, Homo sapien
cagcccgcagggtcgagttggcact

SEQ ID NO: 2981271 - DNA, 25 bp, Homo sapien
tctgggccgagtacatgtcttcagc

SEQ ID NO: 2981272 - DNA, 25 bp, Homo sapien
ggatgatgtcgtaagctccttcgga

SEQ ID NO: 2981273 - DNA, 25 bp, Homo sapien
ctgagagttcttgccgtctttcggc

SEQ ID NO: 2981274 - DNA, 25 bp, Homo sapien
tcagtcccacacgtaggggtttcta

SEQ ID NO: 2981275 - DNA, 25 bp, Homo sapien
caccccgagaacactatttggctgg

SEQ ID NO: 2981276 - DNA, 25 bp, Homo sapien
tcttgaggttgcaggaatctccaga

SEQ ID NO: 2981277 - DNA, 25 bp, Homo sapien
tccagagaaacataggcgctgccca

SEQ ID NO: 2981278 - DNA, 25 bp, Homo sapien
ggttggctcctcgactccacaaaca

SEQ ID NO: 2981279 - DNA, 25 bp, Homo sapien
ttattaggcacccttgttcctcaca

SEQ ID NO: 2981280 - DNA, 25 bp, Homo sapien
tatttattaggcacccttgttcctc

SEQ ID NO: 2981281 - DNA, 25 bp, Homo sapien
attaggcacccttgttcctcacaga

SEQ ID NO: 2981282 - DNA, 25 bp, Homo sapien
tgtatttattaggcacccttgttcc

SEQ ID NO: 2981283 - DNA, 25 bp, Homo sapien
ggcctctctgggtcagttcgcttac

SEQ ID NO: 2981284 - DNA, 25 bp, Homo sapien
tggcctctctgggtcagttcgctta

SEQ ID NO: 2981285 - DNA, 25 bp, Homo sapien
tcagagtcttaggaaaacctggttg

SEQ ID NO: 2981286 - DNA, 25 bp, Homo sapien
acctggttggtgttggcctggcctc

SEQ ID NO: 2981287 - DNA, 25 bp, Homo sapien
gggccacggagagaggctgctggac

SEQ ID NO: 2981288 - DNA, 25 bp, Homo sapien
ccagggtgggccacggagagaggct

SEQ ID NO: 2981289 - DNA, 25 bp, Homo sapien
gggtgggccacggagagaggctgct

SEQ ID NO: 2981290 - DNA, 25 bp, Homo sapien
ggccacggagagaggctgctggacg

SEQ ID NO: 2981291 - DNA, 25 bp, Homo sapien
cgagagaggcctagactccagttca

SEQ ID NO: 2981292 - DNA, 25 bp, Homo sapien
gaaggcaatctgaaccacagcttgg

SEQ ID NO: 2981293 - DNA, 25 bp, Homo sapien
tgaaccagcgccagcatatccaggt

SEQ ID NO: 2981294 - DNA, 25 bp, Homo sapien
caggtgctgcccaagatgaggtaga

SEQ ID NO: 2981295 - DNA, 25 bp, Homo sapien
tactctgcagggattgctcgcccaa

SEQ ID NO: 2981296 - DNA, 25 bp, Homo sapien
tggacttcgacaggcaacacagaga

SEQ ID NO: 2981297 - DNA, 25 bp, Homo sapien
cagtgggtactcctgaatacaggca

SEQ ID NO: 2981298 - DNA, 25 bp, Homo sapien
taagctagaccaagggcagcgtgag

SEQ ID NO: 2981299 - DNA, 25 bp, Homo sapien
tcctggagccggtcagaaaatgcag

SEQ ID NO: 2981300 - DNA, 25 bp, Homo sapien
gacctctccctgtagtgactccgta

SEQ ID NO: 2981301 - DNA, 25 bp, Homo sapien
tccgtagcttgcaggactgatcccc

SEQ ID NO: 2981302 - DNA, 25 bp, Homo sapien
taagactccctagaaacggcacgtc

SEQ ID NO: 2981303 - DNA, 25 bp, Homo sapien
cacaggcggcacttgcagcagctcc

SEQ ID NO: 2981304 - DNA, 25 bp, Homo sapien
agaagcaacagagcccaaggcagcc

SEQ ID NO: 2981305 - DNA, 25 bp, Homo sapien
agagaagcaacagagcccaaggcag

SEQ ID NO: 2981306 - DNA, 25 bp, Homo sapien
gggacccagagaagcaacagagccc

SEQ ID NO: 2981307 - DNA, 25 bp, Homo sapien
ctgggacccagagaagcaacagagc

SEQ ID NO: 2981308 - DNA, 25 bp, Homo sapien
ggcccgccacggtcctgcatttgct

SEQ ID NO: 2981309 - DNA, 25 bp, Homo sapien
gggcccgccacggtcctgcatttgc

SEQ ID NO: 2981310 - DNA, 25 bp, Homo sapien
ccgccacggtcctgcatttgctcag

SEQ ID NO: 2981311 - DNA, 25 bp, Homo sapien
ccacggtcctgcatttgctcagagc

SEQ ID NO: 2981312 - DNA, 25 bp, Homo sapien
cctcgacaacgggatcatgaaagtc

SEQ ID NO: 2981313 - DNA, 25 bp, Homo sapien
aagtctcggagccatggtgtatcca

SEQ ID NO: 2981314 - DNA, 25 bp, Homo sapien
acggacacctcaacctcgacaacgg

SEQ ID NO: 2981315 - DNA, 25 bp, Homo sapien
caacgggatcatgaaagtctcggag

SEQ ID NO: 2981316 - DNA, 25 bp, Homo sapien
ttggccgcagtgatacttgcaggtg

SEQ ID NO: 2981317 - DNA, 25 bp, Homo sapien
aggtcttggccgcagtgatacttgc

SEQ ID NO: 2981318 - DNA, 25 bp, Homo sapien
caaacagggtagtggatgatacagg

SEQ ID NO: 2981319 - DNA, 25 bp, Homo sapien
gaaatgcagttgtgattgttgaggt

SEQ ID NO: 2981320 - DNA, 25 bp, Homo sapien
tgtgagttcaccacctcctcagttt

SEQ ID NO: 2981321 - DNA, 25 bp, Homo sapien
cagtttcctcctggatgctggcact

SEQ ID NO: 2981322 - DNA, 25 bp, Homo sapien
ctcagtttcctcctggatgctggca

SEQ ID NO: 2981323 - DNA, 25 bp, Homo sapien
atgctggcactgtgggtggcaccca

SEQ ID NO: 2981324 - DNA, 25 bp, Homo sapien
ccaacagaagcagcaacaatgccag

SEQ ID NO: 2981325 - DNA, 25 bp, Homo sapien
accaacagaagcagcaacaatgcca

SEQ ID NO: 2981326 - DNA, 25 bp, Homo sapien
tgggacagctctgaatggtcaccag

SEQ ID NO: 2981327 - DNA, 25 bp, Homo sapien
gcagctccagatttgcgtagtgcag

SEQ ID NO: 2981328 - DNA, 25 bp, Homo sapien
ccagatttgcgtagtgcagctcact

SEQ ID NO: 2981329 - DNA, 25 bp, Homo sapien
agctccagatttgcgtagtgcagct

SEQ ID NO: 2981330 - DNA, 25 bp, Homo sapien
cagcagctccagatttgcgtagtgc

SEQ ID NO: 2981331 - DNA, 25 bp, Homo sapien
cacactgtaatctgaatctggttcc

SEQ ID NO: 2981332 - DNA, 25 bp, Homo sapien
ttagaatcaaacaccaccgaggcat

SEQ ID NO: 2981333 - DNA, 25 bp, Homo sapien
ggcctctgagcagctatcctgttgg

SEQ ID NO: 2981334 - DNA, 25 bp, Homo sapien
accgaggcatagtgaagttcttccc

SEQ ID NO: 2981335 - DNA, 25 bp, Homo sapien
aggtgaacagatctccgctttggca

SEQ ID NO: 2981336 - DNA, 25 bp, Homo sapien
tgatcttgatctttagtgggtcccc

SEQ ID NO: 2981337 - DNA, 25 bp, Homo sapien
tctgttggtcactgttgtcgagggc

SEQ ID NO: 2981338 - DNA, 25 bp, Homo sapien
tgacaaagctattggcaggtgccac

SEQ ID NO: 2981339 - DNA, 25 bp, Homo sapien
tttagggcattgttgtgtaatccca

SEQ ID NO: 2981340 - DNA, 25 bp, Homo sapien
tcaatgtcccatagataagcagaac

SEQ ID NO: 2981341 - DNA, 25 bp, Homo sapien
tactcaccaagcaggaaagacatgc

SEQ ID NO: 2981342 - DNA, 25 bp, Homo sapien
gacatgcataagcttcacctgaaag

SEQ ID NO: 2981343 - DNA, 25 bp, Homo sapien
gagtgtcgtaccttggattcccggc

SEQ ID NO: 2981344 - DNA, 25 bp, Homo sapien
tcgtaccttggattcccggccaatg

SEQ ID NO: 2981345 - DNA, 25 bp, Homo sapien
ccgatgagtgtcgtaccttggattc

SEQ ID NO: 2981346 - DNA, 25 bp, Homo sapien
cactccgatgagtgtcgtaccttgg

SEQ ID NO: 2981347 - DNA, 25 bp, Homo sapien
gcagagaagacgatctgttacccat

SEQ ID NO: 2981348 - DNA, 25 bp, Homo sapien
gagtgcagagaagacgatctgttac

SEQ ID NO: 2981349 - DNA, 25 bp, Homo sapien
tggtttttgtgcgtttacatgatta

SEQ ID NO: 2981350 - DNA, 25 bp, Homo sapien
cgtttacatgattatgtgggttttc

SEQ ID NO: 2981351 - DNA, 25 bp, Homo sapien
ccccgggtccaggagtgcagaatat

SEQ ID NO: 2981352 - DNA, 25 bp, Homo sapien
tcagacctgggtgaaaactccattg

SEQ ID NO: 2981353 - DNA, 25 bp, Homo sapien
tagattctggacctatcatgcccac

SEQ ID NO: 2981354 - DNA, 25 bp, Homo sapien
gaatagtggactaagccccaggctg

SEQ ID NO: 2981355 - DNA, 25 bp, Homo sapien
tgatatcccagtacctctttagggc

SEQ ID NO: 2981356 - DNA, 25 bp, Homo sapien
cactgatcttgtatctgctgccgct

SEQ ID NO: 2981357 - DNA, 25 bp, Homo sapien
acctctttagggcactgatcttgta

SEQ ID NO: 2981358 - DNA, 25 bp, Homo sapien
tgccgctcccagtacctctttaggg

SEQ ID NO: 2981359 - DNA, 25 bp, Homo sapien
tatggtgaaattgtcttccgctccc

SEQ ID NO: 2981360 - DNA, 25 bp, Homo sapien
ggagctctgcctgtttatggtgaaa

SEQ ID NO: 2981361 - DNA, 25 bp, Homo sapien
catctttccccaggaggtcgtgtgt

SEQ ID NO: 2981362 - DNA, 25 bp, Homo sapien
gaaagcagatttgggcatggagtcc

SEQ ID NO: 2981363 - DNA, 25 bp, Homo sapien
ttatatttgagtacagctttggctg

SEQ ID NO: 2981364 - DNA, 25 bp, Homo sapien
catttgtcaatgaaccttagggttg

SEQ ID NO: 2981365 - DNA, 25 bp, Homo sapien
caaggttactttgtgttgtagcaca

SEQ ID NO: 2981366 - DNA, 25 bp, Homo sapien
gaggaagcatcaaacctttttccca

SEQ ID NO: 2981367 - DNA, 25 bp, Homo sapien
catgcccatattcattaaatagcaa

SEQ ID NO: 2981368 - DNA, 25 bp, Homo sapien
tgcccatattcattaaatagcaatc

SEQ ID NO: 2981369 - DNA, 25 bp, Homo sapien
tattcattaaatagcaatcaagttt

SEQ ID NO: 2981370 - DNA, 25 bp, Homo sapien
ccatattcattaaatagcaatcaag

SEQ ID NO: 2981371 - DNA, 25 bp, Homo sapien
tttaaggcactggaatgacagcggc

SEQ ID NO: 2981372 - DNA, 25 bp, Homo sapien
tgcacaaaagtttgggcacaccttg

SEQ ID NO: 2981373 - DNA, 25 bp, Homo sapien
gattcaagtccctgaagggcaccag

SEQ ID NO: 2981374 - DNA, 25 bp, Homo sapien
tgcggtgttgacttccgagcttgga

SEQ ID NO: 2981375 - DNA, 25 bp, Homo sapien
caatgagatgtcttacagtggggct

SEQ ID NO: 2981376 - DNA, 25 bp, Homo sapien
agaggcaatgagatgtcttacagtg

SEQ ID NO: 2981377 - DNA, 25 bp, Homo sapien
aggcaatgagatgtcttacagtggg

SEQ ID NO: 2981378 - DNA, 25 bp, Homo sapien
atgagatgtcttacagtggggctgc

SEQ ID NO: 2981379 - DNA, 25 bp, Homo sapien
tcagagtgatttcagagtggcttca

SEQ ID NO: 2981380 - DNA, 25 bp, Homo sapien
tcgggcgtcagcagaacaagtagat

SEQ ID NO: 2981381 - DNA, 25 bp, Homo sapien
caagaggaggctaacgagaaaaggc

SEQ ID NO: 2981382 - DNA, 25 bp, Homo sapien
acaagtagattacaacagcagccag

SEQ ID NO: 2981383 - DNA, 25 bp, Homo sapien
ccacaccagtaggtgtcagtgtcgg

SEQ ID NO: 2981384 - DNA, 25 bp, Homo sapien
tcacttcaacttggaccccaaggtc

SEQ ID NO: 2981385 - DNA, 25 bp, Homo sapien
gtgtcggacctccagagcatcttca

SEQ ID NO: 2981386 - DNA, 25 bp, Homo sapien
taggtgtcagtgtcggacctccaga

SEQ ID NO: 2981387 - DNA, 25 bp, Homo sapien
gttgtcttaggttcagattgttttc

SEQ ID NO: 2981388 - DNA, 25 bp, Homo sapien
gtacagctgtgtccattgtcccagg

SEQ ID NO: 2981389 - DNA, 25 bp, Homo sapien
tggtaagagccgtgggctgggtgct

SEQ ID NO: 2981390 - DNA, 25 bp, Homo sapien
ccaggtgcagctgcgtctgttgtct

SEQ ID NO: 2981391 - DNA, 25 bp, Homo sapien
tgagccaacacctgccaccctggtc

SEQ ID NO: 2981392 - DNA, 25 bp, Homo sapien
gcaaagtcatgccacccggaggctg

SEQ ID NO: 2981393 - DNA, 25 bp, Homo sapien
gatgccaagagtgagcagcctcttc

SEQ ID NO: 2981394 - DNA, 25 bp, Homo sapien
tgcctggtccccaaccagggaagcc

SEQ ID NO: 2981395 - DNA, 25 bp, Homo sapien
gccccttcagggagatcgggagcag

SEQ ID NO: 2981396 - DNA, 25 bp, Homo sapien
gctcacttgcagcacagtgcagagc

SEQ ID NO: 2981397 - DNA, 25 bp, Homo sapien
cttagcactgctcacttgcagcaca

SEQ ID NO: 2981398 - DNA, 25 bp, Homo sapien
gtgggagctgcggttccccggctca

SEQ ID NO: 2981399 - DNA, 25 bp, Homo sapien
gtatctctgacagggtcatcctgga

SEQ ID NO: 2981400 - DNA, 25 bp, Homo sapien
gggcctctgcaactgaacgatagtc

SEQ ID NO: 2981401 - DNA, 25 bp, Homo sapien
gcatcctgcatttgttgttgcacag

SEQ ID NO: 2981402 - DNA, 25 bp, Homo sapien
aaagggcgaagcttgggttgaatca

SEQ ID NO: 2981403 - DNA, 25 bp, Homo sapien
gaacctgtggcattaagaccacccc

SEQ ID NO: 2981404 - DNA, 25 bp, Homo sapien
tggaacctgtggcattaagaccacc

SEQ ID NO: 2981405 - DNA, 25 bp, Homo sapien
ctggaacctgtggcattaagaccac

SEQ ID NO: 2981406 - DNA, 25 bp, Homo sapien
cctgtggcattaagaccacccccat

SEQ ID NO: 2981407 - DNA, 25 bp, Homo sapien
cacatgaccgcaagaagttaaggac

SEQ ID NO: 2981408 - DNA, 25 bp, Homo sapien
tcacacgtttgcagaggcgaagtcc

SEQ ID NO: 2981409 - DNA, 25 bp, Homo sapien
tattagtcgtgcaaactcgggcaaa

SEQ ID NO: 2981410 - DNA, 25 bp, Homo sapien
cagtagatgggtcttaggtgtcccc

SEQ ID NO: 2981411 - DNA, 25 bp, Homo sapien
ggtgatccctgcgtatttcattcag

SEQ ID NO: 2981412 - DNA, 25 bp, Homo sapien
ttgggtccggctggtgatccctgcg

SEQ ID NO: 2981413 - DNA, 25 bp, Homo sapien
ctggcagggacgcaagatttgggtc

SEQ ID NO: 2981414 - DNA, 25 bp, Homo sapien
ggctggtgatccctgcgtatttcat

SEQ ID NO: 2981415 - DNA, 25 bp, Homo sapien
agttctgagatcctgtccgctccaa

SEQ ID NO: 2981416 - DNA, 25 bp, Homo sapien
ccctgcctcttaggactccaggatg

SEQ ID NO: 2981417 - DNA, 25 bp, Homo sapien
aggaacagcgactccgccgttgtgc

SEQ ID NO: 2981418 - DNA, 25 bp, Homo sapien
cgggaccagagttctgagatcctgt

SEQ ID NO: 2981419 - DNA, 25 bp, Homo sapien
cgcttccaggagctcggttcgagct

SEQ ID NO: 2981420 - DNA, 25 bp, Homo sapien
gggccgggccgcatccgttttcagc

SEQ ID NO: 2981421 - DNA, 25 bp, Homo sapien
cactggacagttccccgcagcggcc

SEQ ID NO: 2981422 - DNA, 25 bp, Homo sapien
gttcgagctccgctgggtgcggcag

SEQ ID NO: 2981423 - DNA, 25 bp, Homo sapien
cttatgcaggacgtggtcgttgaag

SEQ ID NO: 2981424 - DNA, 25 bp, Homo sapien
tatgcaggacgtggtcgttgaagtc

SEQ ID NO: 2981425 - DNA, 25 bp, Homo sapien
cagctcctccctggtaggaatcggg

SEQ ID NO: 2981426 - DNA, 25 bp, Homo sapien
taggaatcgggtctctgcaggtcca

SEQ ID NO: 2981427 - DNA, 25 bp, Homo sapien
ctgttatcctgagagaggctactat

SEQ ID NO: 2981428 - DNA, 25 bp, Homo sapien
ggagacctgcattactgaaaactga

SEQ ID NO: 2981429 - DNA, 25 bp, Homo sapien
aacaactatcttagggggagacctg

SEQ ID NO: 2981430 - DNA, 25 bp, Homo sapien
gtgatggattttgaattaaaactgt

SEQ ID NO: 2981431 - DNA, 25 bp, Homo sapien
ctcccagctgggaactacattgcct

SEQ ID NO: 2981432 - DNA, 25 bp, Homo sapien
cattcgcactcgcagtctctacaga

SEQ ID NO: 2981433 - DNA, 25 bp, Homo sapien
ctggttaagagataggaggatgtcc

SEQ ID NO: 2981434 - DNA, 25 bp, Homo sapien
tacattgcctgagtgagttaacaag

SEQ ID NO: 2981435 - DNA, 25 bp, Homo sapien
tgtgttcatgtagccctgggctgac

SEQ ID NO: 2981436 - DNA, 25 bp, Homo sapien
tcatgtagccctgggctgacacgcc

SEQ ID NO: 2981437 - DNA, 25 bp, Homo sapien
gttcatgtagccctgggctgacacg

SEQ ID NO: 2981438 - DNA, 25 bp, Homo sapien
ttcatgtagccctgggctgacacgc

SEQ ID NO: 2981439 - DNA, 25 bp, Homo sapien
caagggattacccacacaatcagga

SEQ ID NO: 2981440 - DNA, 25 bp, Homo sapien
tgtggcatctgggagctatctggtc

SEQ ID NO: 2981441 - DNA, 25 bp, Homo sapien
ccaggaggttttggcattcgccgcc

SEQ ID NO: 2981442 - DNA, 25 bp, Homo sapien
gctgcttttggtggccgcctcactc

SEQ ID NO: 2981443 - DNA, 25 bp, Homo sapien
tgggccagtagttccctgcttgcat

SEQ ID NO: 2981444 - DNA, 25 bp, Homo sapien
agtaggagcttccttcgtgttctca

SEQ ID NO: 2981445 - DNA, 25 bp, Homo sapien
cttccttcgtgttctcaggacaaag

SEQ ID NO: 2981446 - DNA, 25 bp, Homo sapien
ggacaaagcgcctcttgtcagtggg

SEQ ID NO: 2981447 - DNA, 25 bp, Homo sapien
cccggattcttgacctactttatgg

SEQ ID NO: 2981448 - DNA, 25 bp, Homo sapien
ccggattcttgacctactttatggt

SEQ ID NO: 2981449 - DNA, 25 bp, Homo sapien
cactatgccctgctgattgtgtggt

SEQ ID NO: 2981450 - DNA, 25 bp, Homo sapien
caaggcactggtaggctcaggatct

SEQ ID NO: 2981451 - DNA, 25 bp, Homo sapien
tgaggacccactcctcagggaggac

SEQ ID NO: 2981452 - DNA, 25 bp, Homo sapien
tggtgaggacccactcctcagggag

SEQ ID NO: 2981453 - DNA, 25 bp, Homo sapien
tttcagagctggtattttcggccat

SEQ ID NO: 2981454 - DNA, 25 bp, Homo sapien
gtattaactggaggtatttcagagc

SEQ ID NO: 2981455 - DNA, 25 bp, Homo sapien
gaaagtattaactggaggtatttca

SEQ ID NO: 2981456 - DNA, 25 bp, Homo sapien
tatttcagagctggtattttcggcc

SEQ ID NO: 2981457 - DNA, 25 bp, Homo sapien
aaggagccggggatgaacttgccct

SEQ ID NO: 2981458 - DNA, 25 bp, Homo sapien
ttcccacaccactgtcacccaccag

SEQ ID NO: 2981459 - DNA, 25 bp, Homo sapien
gaacttgccctgatcgaactgaacc

SEQ ID NO: 2981460 - DNA, 25 bp, Homo sapien
tgccctgatcgaactgaaccagcag

SEQ ID NO: 2981461 - DNA, 25 bp, Homo sapien
caggctgtagcgcaatggcatgata

SEQ ID NO: 2981462 - DNA, 25 bp, Homo sapien
ggctgtagcgcaatggcatgatatt

SEQ ID NO: 2981463 - DNA, 25 bp, Homo sapien
ctgtagcgcaatggcatgatattgg

SEQ ID NO: 2981464 - DNA, 25 bp, Homo sapien
ccacgcctggcaaacgtttttgtat

SEQ ID NO: 2981465 - DNA, 25 bp, Homo sapien
cgaggaggagccaaataaattcatg

SEQ ID NO: 2981466 - DNA, 25 bp, Homo sapien
tgaagtcgtagatcattttgagcag

SEQ ID NO: 2981467 - DNA, 25 bp, Homo sapien
agatcattttgagcagagctgccag

SEQ ID NO: 2981468 - DNA, 25 bp, Homo sapien
cagagctgccaggatatcccaggca

SEQ ID NO: 2981469 - DNA, 25 bp, Homo sapien
ctgtggtcgcttgcttgcccctggg

SEQ ID NO: 2981470 - DNA, 25 bp, Homo sapien
tgcggaagagttcccgtagtcgctg

SEQ ID NO: 2981471 - DNA, 25 bp, Homo sapien
gcttcggacatgagccacatccagc

SEQ ID NO: 2981472 - DNA, 25 bp, Homo sapien
tagtcgctgcgcaccgcgacagcag

SEQ ID NO: 2981473 - DNA, 25 bp, Homo sapien
tgctgttccctgagggcacgcagag

SEQ ID NO: 2981474 - DNA, 25 bp, Homo sapien
tgttccctgagggcacgcagagccg

SEQ ID NO: 2981475 - DNA, 25 bp, Homo sapien
ttccctgagggcacgcagagccgca

SEQ ID NO: 2981476 - DNA, 25 bp, Homo sapien
gctgttccctgagggcacgcagagc

SEQ ID NO: 2981477 - DNA, 25 bp, Homo sapien
tcgccccctcgacgacaccggctcg

SEQ ID NO: 2981478 - DNA, 25 bp, Homo sapien
gccccctcgacgacaccggctcgga

SEQ ID NO: 2981479 - DNA, 25 bp, Homo sapien
cgtcgccccctcgacgacaccggct

SEQ ID NO: 2981480 - DNA, 25 bp, Homo sapien
gtcgccccctcgacgacaccggctc

SEQ ID NO: 2981481 - DNA, 25 bp, Homo sapien
ctggacgagaggtgagcagtgccgg

SEQ ID NO: 2981482 - DNA, 25 bp, Homo sapien
cttgcccgtgaggtcgtagctcgga

SEQ ID NO: 2981483 - DNA, 25 bp, Homo sapien
ccgtgaggtcgtagctcggactgca

SEQ ID NO: 2981484 - DNA, 25 bp, Homo sapien
gggcctcgccatcccgggtggcaac

SEQ ID NO: 2981485 - DNA, 25 bp, Homo sapien
tggcaacggcgcctggcgtgcccgt

SEQ ID NO: 2981486 - DNA, 25 bp, Homo sapien
caggaaggccccgtctttgaattgg

SEQ ID NO: 2981487 - DNA, 25 bp, Homo sapien
tggctatgaaggttccggacaggaa

SEQ ID NO: 2981488 - DNA, 25 bp, Homo sapien
gaaacatgttttgccgacgcctgtg

SEQ ID NO: 2981489 - DNA, 25 bp, Homo sapien
cctgaagtctatgccgacggtggct

SEQ ID NO: 2981490 - DNA, 25 bp, Homo sapien
tcactctcacgccatccacagtcac

SEQ ID NO: 2981491 - DNA, 25 bp, Homo sapien
gcttcactctcacgccatccacagt

SEQ ID NO: 2981492 - DNA, 25 bp, Homo sapien
agcttcactctcacgccatccacag

SEQ ID NO: 2981493 - DNA, 25 bp, Homo sapien
gcagcttcactctcacgccatccac

SEQ ID NO: 2981494 - DNA, 25 bp, Homo sapien
ggtgacgcttcggaaccgttcctgc

SEQ ID NO: 2981495 - DNA, 25 bp, Homo sapien
ctgagcatctctgtaataagcatgg

SEQ ID NO: 2981496 - DNA, 25 bp, Homo sapien
taagcatgggtgacgcttcggaacc

SEQ ID NO: 2981497 - DNA, 25 bp, Homo sapien
gcatctctgtaataagcatgggtga

SEQ ID NO: 2981498 - DNA, 25 bp, Homo sapien
tgtcgaaagaagatttgttggtgat

SEQ ID NO: 2981499 - DNA, 25 bp, Homo sapien
gatgttgtcgaaagaagatttgttg

SEQ ID NO: 2981500 - DNA, 25 bp, Homo sapien
gaaagaagatttgttggtgatgtca

SEQ ID NO: 2981501 - DNA, 25 bp, Homo sapien
cctgatgttgtcgaaagaagatttg

SEQ ID NO: 2981502 - DNA, 25 bp, Homo sapien
cttgttgcctagcagcatgatcacc

SEQ ID NO: 2981503 - DNA, 25 bp, Homo sapien
tgggcatactcatgaatctcagtga

SEQ ID NO: 2981504 - DNA, 25 bp, Homo sapien
ttgttgcctagcagcatgatcacca

SEQ ID NO: 2981505 - DNA, 25 bp, Homo sapien
atgatcaccacgtccctctgggcat

SEQ ID NO: 2981506 - DNA, 25 bp, Homo sapien
tgacctgggaccctgttcactctgc

SEQ ID NO: 2981507 - DNA, 25 bp, Homo sapien
tgggcaccccttgatttctcaggca

SEQ ID NO: 2981508 - DNA, 25 bp, Homo sapien
gctctgggatctcacctttggtaaa

SEQ ID NO: 2981509 - DNA, 25 bp, Homo sapien
tatgtctgacccctgagctggaggc

SEQ ID NO: 2981510 - DNA, 25 bp, Homo sapien
ctggccaaggtctctccgtcttcgg

SEQ ID NO: 2981511 - DNA, 25 bp, Homo sapien
ccgtcttcggaacggatcactcttt

SEQ ID NO: 2981512 - DNA, 25 bp, Homo sapien
ggccaaggtctctccgtcttcggaa

SEQ ID NO: 2981513 - DNA, 25 bp, Homo sapien
gaacggatcactctttcgctgctca

SEQ ID NO: 2981514 - DNA, 25 bp, Homo sapien
tgcccgggagagagtgtcctcaggg

SEQ ID NO: 2981515 - DNA, 25 bp, Homo sapien
cccgggagagagtgtcctcagggcc

SEQ ID NO: 2981516 - DNA, 25 bp, Homo sapien
gcccgggagagagtgtcctcagggc

SEQ ID NO: 2981517 - DNA, 25 bp, Homo sapien
ctgcccgggagagagtgtcctcagg

SEQ ID NO: 2981518 - DNA, 25 bp, Homo sapien
gctaactccacattcatgccagtct

SEQ ID NO: 2981519 - DNA, 25 bp, Homo sapien
ttggcgatggccagaaaggctaact

SEQ ID NO: 2981520 - DNA, 25 bp, Homo sapien
attcatgccagtcttggcgctggtc

SEQ ID NO: 2981521 - DNA, 25 bp, Homo sapien
tggagtgtgccgccctgccccgcac

SEQ ID NO: 2981522 - DNA, 25 bp, Homo sapien
gccctactggattcctggagtgtgc

SEQ ID NO: 2981523 - DNA, 25 bp, Homo sapien
tactggattcctggagtgtgccgcc

SEQ ID NO: 2981524 - DNA, 25 bp, Homo sapien
cctactggattcctggagtgtgccg

SEQ ID NO: 2981525 - DNA, 25 bp, Homo sapien
tcttctgggactctacatagtctcg

SEQ ID NO: 2981526 - DNA, 25 bp, Homo sapien
tctacatagtctcggatctggaagc

SEQ ID NO: 2981527 - DNA, 25 bp, Homo sapien
gatgcccggcccggtatttcagttc

SEQ ID NO: 2981528 - DNA, 25 bp, Homo sapien
aagctgggctcatccgcctgatgcc

SEQ ID NO: 2981529 - DNA, 25 bp, Homo sapien
catcctgtgtgcctccagagcctcc

SEQ ID NO: 2981530 - DNA, 25 bp, Homo sapien
gggaaggctgcatcctgtgtgcctc

SEQ ID NO: 2981531 - DNA, 25 bp, Homo sapien
ggctgcatcctgtgtgcctccagag

SEQ ID NO: 2981532 - DNA, 25 bp, Homo sapien
gaaggctgcatcctgtgtgcctcca

SEQ ID NO: 2981533 - DNA, 25 bp, Homo sapien
ctcttggaataagccaggcctggga

SEQ ID NO: 2981534 - DNA, 25 bp, Homo sapien
tcttggaataagccaggcctgggag

SEQ ID NO: 2981535 - DNA, 25 bp, Homo sapien
tgcacaggcaggaaggtagctaagc

SEQ ID NO: 2981536 - DNA, 25 bp, Homo sapien
ggagaccgcaggaactcaagtagga

SEQ ID NO: 2981537 - DNA, 25 bp, Homo sapien
ctgagggtgcgatggagtcattacc

SEQ ID NO: 2981538 - DNA, 25 bp, Homo sapien
tatagctccctgctaggaagcggct

SEQ ID NO: 2981539 - DNA, 25 bp, Homo sapien
catggtgccttctgcgtgtaatccc

SEQ ID NO: 2981540 - DNA, 25 bp, Homo sapien
gagctgcatgcctgccaaaggattg

SEQ ID NO: 2981541 - DNA, 25 bp, Homo sapien
ggataagacacatctagcctgggca

SEQ ID NO: 2981542 - DNA, 25 bp, Homo sapien
tgcttgaagaaatcgcctgtggagc

SEQ ID NO: 2981543 - DNA, 25 bp, Homo sapien
taactcggaaatgggtgacctccca

SEQ ID NO: 2981544 - DNA, 25 bp, Homo sapien
taaagatgcctgcaggtcatgacct

SEQ ID NO: 2981545 - DNA, 25 bp, Homo sapien
gaaagcaaatgcagtagcctcagaa

SEQ ID NO: 2981546 - DNA, 25 bp, Homo sapien
ttatcgggcccaaactggagccgct

SEQ ID NO: 2981547 - DNA, 25 bp, Homo sapien
tcttcccgtccagcgaaccgggagc

SEQ ID NO: 2981548 - DNA, 25 bp, Homo sapien
ggcgtctgagcgtcccagagtccgc

SEQ ID NO: 2981549 - DNA, 25 bp, Homo sapien
ctgcgacgggtcagcggcgcgactt

SEQ ID NO: 2981550 - DNA, 25 bp, Homo sapien
agagaggaccacagaccaatccccg

SEQ ID NO: 2981551 - DNA, 25 bp, Homo sapien
gccccggccgctgcgtccgcgctca

SEQ ID NO: 2981552 - DNA, 25 bp, Homo sapien
ccccggccgctgcgtccgcgctcat

SEQ ID NO: 2981553 - DNA, 25 bp, Homo sapien
tccccgtgcaggtggaagccgtagc

SEQ ID NO: 2981554 - DNA, 25 bp, Homo sapien
caggtggaagccgtagccgttcgga

SEQ ID NO: 2981555 - DNA, 25 bp, Homo sapien
ccaacttgcccttctccccgtgcag

SEQ ID NO: 2981556 - DNA, 25 bp, Homo sapien
ttctccccgtgcaggtggaagccgt

SEQ ID NO: 2981557 - DNA, 25 bp, Homo sapien
agccgggctccaccagccggatgta

SEQ ID NO: 2981558 - DNA, 25 bp, Homo sapien
cgggctccaccagccggatgtactg

SEQ ID NO: 2981559 - DNA, 25 bp, Homo sapien
gcgagccgggctccaccagccggat

SEQ ID NO: 2981560 - DNA, 25 bp, Homo sapien
ggctccaccagccggatgtactggc

SEQ ID NO: 2981561 - DNA, 25 bp, Homo sapien
cgttttcgccgttcacctccaccag

SEQ ID NO: 2981562 - DNA, 25 bp, Homo sapien
tccacgttttcgccgttcacctcca

SEQ ID NO: 2981563 - DNA, 25 bp, Homo sapien
tctccacgttttcgccgttcacctc

SEQ ID NO: 2981564 - DNA, 25 bp, Homo sapien
gcagctgctcgtccgtctcggggtc

SEQ ID NO: 2981565 - DNA, 25 bp, Homo sapien
aggcgcacggcgttgagtgcggcgc

SEQ ID NO: 2981566 - DNA, 25 bp, Homo sapien
tccgtctcggggtcgaccaccagca

SEQ ID NO: 2981567 - DNA, 25 bp, Homo sapien
gcgcggatgcggctcaccacctgct

SEQ ID NO: 2981568 - DNA, 25 bp, Homo sapien
tgctccgggtggctcttgtcggcct

SEQ ID NO: 2981569 - DNA, 25 bp, Homo sapien
ggcctcgcgaggctcattttcgttg

SEQ ID NO: 2981570 - DNA, 25 bp, Homo sapien
gctcttgtcggcctcgcgaggctca

SEQ ID NO: 2981571 - DNA, 25 bp, Homo sapien
gaggctcattttcgttgccagcccc

SEQ ID NO: 2981572 - DNA, 25 bp, Homo sapien
tagccccacggacactcccatcaga

SEQ ID NO: 2981573 - DNA, 25 bp, Homo sapien
ctgtgccctttctctgtccaggagg

SEQ ID NO: 2981574 - DNA, 25 bp, Homo sapien
cttaatgccgaactgtgccctttct

SEQ ID NO: 2981575 - DNA, 25 bp, Homo sapien
tcctcgtagccccacggacactccc

SEQ ID NO: 2981576 - DNA, 25 bp, Homo sapien
gttgatcctctagggctttgccttc

SEQ ID NO: 2981577 - DNA, 25 bp, Homo sapien
gatcctctagggctttgccttctac

SEQ ID NO: 2981578 - DNA, 25 bp, Homo sapien
accagttgatcctctagggctttgc

SEQ ID NO: 2981579 - DNA, 25 bp, Homo sapien
aaaccagttgatcctctagggcttt

SEQ ID NO: 2981580 - DNA, 25 bp, Homo sapien
acagccttccttccgggcgctcagg

SEQ ID NO: 2981581 - DNA, 25 bp, Homo sapien
gcagcctgagctgggggatgaagcc

SEQ ID NO: 2981582 - DNA, 25 bp, Homo sapien
tgtgctagctgcctttgggatgccc

SEQ ID NO: 2981583 - DNA, 25 bp, Homo sapien
agggcctctcgcagctggagctgca

SEQ ID NO: 2981584 - DNA, 25 bp, Homo sapien
gacaggcgcagctttctgcttcagc

SEQ ID NO: 2981585 - DNA, 25 bp, Homo sapien
acaggcgcagctttctgcttcagcc

SEQ ID NO: 2981586 - DNA, 25 bp, Homo sapien
ttctcccctagagctaatccctcca

SEQ ID NO: 2981587 - DNA, 25 bp, Homo sapien
cctagagctaatccctccacaaagc

SEQ ID NO: 2981588 - DNA, 25 bp, Homo sapien
acagccctgtgggatcttgttccgg

SEQ ID NO: 2981589 - DNA, 25 bp, Homo sapien
gggagtaagtgaggctcttctcccc

SEQ ID NO: 2981590 - DNA, 25 bp, Homo sapien
gcaggttgaagccatagccactggg

SEQ ID NO: 2981591 - DNA, 25 bp, Homo sapien
gcccttcttcatggtacagagccga

SEQ ID NO: 2981592 - DNA, 25 bp, Homo sapien
ctgaccggatgaactggcctggctt

SEQ ID NO: 2981593 - DNA, 25 bp, Homo sapien
cctggcttggacttgtcgctgtgca

SEQ ID NO: 2981594 - DNA, 25 bp, Homo sapien
atgatggtatgatggctgccccagg

SEQ ID NO: 2981595 - DNA, 25 bp, Homo sapien
tggtatgatggctgccccaggtgct

SEQ ID NO: 2981596 - DNA, 25 bp, Homo sapien
tatgcccgtgggctaatcaagccca

SEQ ID NO: 2981597 - DNA, 25 bp, Homo sapien
gctaatcaagcccatgatggtatga

SEQ ID NO: 2981598 - DNA, 25 bp, Homo sapien
ctgcttcccctccatgcagaccccg

SEQ ID NO: 2981599 - DNA, 25 bp, Homo sapien
ttcccctccatgcagaccccgttca

SEQ ID NO: 2981600 - DNA, 25 bp, Homo sapien
agcagcttggtctcgtccccgccag

SEQ ID NO: 2981601 - DNA, 25 bp, Homo sapien
cttgaagaactcgtcagtttccctg

SEQ ID NO: 2981602 - DNA, 25 bp, Homo sapien
ttggccgggaataagaagatctgtc

SEQ ID NO: 2981603 - DNA, 25 bp, Homo sapien
tccagaccaaggagcagagcatgct

SEQ ID NO: 2981604 - DNA, 25 bp, Homo sapien
cgtatcagatccctaggaggaaggc

SEQ ID NO: 2981605 - DNA, 25 bp, Homo sapien
ccagcaaggctgagtttccaagaca

SEQ ID NO: 2981606 - DNA, 25 bp, Homo sapien
cagattctggtttagtgggcaggcc

SEQ ID NO: 2981607 - DNA, 25 bp, Homo sapien
gatggctgcctaattcctacctggg

SEQ ID NO: 2981608 - DNA, 25 bp, Homo sapien
tggaccttggcagcacagattctgg

SEQ ID NO: 2981609 - DNA, 25 bp, Homo sapien
tgggcaggcctaagaatcaacattt

SEQ ID NO: 2981610 - DNA, 25 bp, Homo sapien
ctgtatctccccattggtgaagggc

SEQ ID NO: 2981611 - DNA, 25 bp, Homo sapien
tgtatctccccattggtgaagggca

SEQ ID NO: 2981612 - DNA, 25 bp, Homo sapien
gtatctccccattggtgaagggcac

SEQ ID NO: 2981613 - DNA, 25 bp, Homo sapien
tatctccccattggtgaagggcaca

SEQ ID NO: 2981614 - DNA, 25 bp, Homo sapien
tgtgggttgtcagaggatggggtga

SEQ ID NO: 2981615 - DNA, 25 bp, Homo sapien
ttgtgggttgtcagaggatggggtg

SEQ ID NO: 2981616 - DNA, 25 bp, Homo sapien
gttgtgggttgtcagaggatggggt

SEQ ID NO: 2981617 - DNA, 25 bp, Homo sapien
gtgggttgtcagaggatggggtgag

SEQ ID NO: 2981618 - DNA, 25 bp, Homo sapien
tgtcactggaggcggatctcaccag

SEQ ID NO: 2981619 - DNA, 25 bp, Homo sapien
actggaggcggatctcaccagggct

SEQ ID NO: 2981620 - DNA, 25 bp, Homo sapien
ggaggcggatctcaccagggctggc

SEQ ID NO: 2981621 - DNA, 25 bp, Homo sapien
tcactggaggcggatctcaccaggg

SEQ ID NO: 2981622 - DNA, 25 bp, Homo sapien
gtagacgagggcgctgtggagtcct

SEQ ID NO: 2981623 - DNA, 25 bp, Homo sapien
ttggggggctgtcttgggaattcag

SEQ ID NO: 2981624 - DNA, 25 bp, Homo sapien
ccagggagatgttgaagtctaggat

SEQ ID NO: 2981625 - DNA, 25 bp, Homo sapien
aggaggtagacgagggcgctgtgga

SEQ ID NO: 2981626 - DNA, 25 bp, Homo sapien
gaggttgctgaagagttcgtttttc

SEQ ID NO: 2981627 - DNA, 25 bp, Homo sapien
agagttcgtttttcttgctccagtc

SEQ ID NO: 2981628 - DNA, 25 bp, Homo sapien
ctgctgcgtttctggtgggccctct

SEQ ID NO: 2981629 - DNA, 25 bp, Homo sapien
tccagtccatctgcggggcccgttt

SEQ ID NO: 2981630 - DNA, 25 bp, Homo sapien
tcatttgtcaagaaaggggatgtgg

SEQ ID NO: 2981631 - DNA, 25 bp, Homo sapien
gggtggaatgctggctcggccctgc

SEQ ID NO: 2981632 - DNA, 25 bp, Homo sapien
gacgggaacacattcaccttcccta

SEQ ID NO: 2981633 - DNA, 25 bp, Homo sapien
cctaaagtcagggaagaacatagtt

SEQ ID NO: 2981634 - DNA, 25 bp, Homo sapien
ctctcgcctggtcccatgatcctgg

SEQ ID NO: 2981635 - DNA, 25 bp, Homo sapien
cacccggtaggatgaggcactcagt

SEQ ID NO: 2981636 - DNA, 25 bp, Homo sapien
tcccaggcagggtggcaaagggaca

SEQ ID NO: 2981637 - DNA, 25 bp, Homo sapien
gtgcaggttccagcgatgtcccagg

SEQ ID NO: 2981638 - DNA, 25 bp, Homo sapien
tgccatgccctggatgtaacaacca

SEQ ID NO: 2981639 - DNA, 25 bp, Homo sapien
gaaaacaagacgtgtctgccacagg

SEQ ID NO: 2981640 - DNA, 25 bp, Homo sapien
gaacaaaagtttaaggctgaggcca

SEQ ID NO: 2981641 - DNA, 25 bp, Homo sapien
tttccttacaatggtggtacctggc

SEQ ID NO: 2981642 - DNA, 25 bp, Homo sapien
gccgtctcccgccggtccgctgctg

SEQ ID NO: 2981643 - DNA, 25 bp, Homo sapien
gttccttaggtgcaaggacggcggc

SEQ ID NO: 2981644 - DNA, 25 bp, Homo sapien
gaggttccttaggtgcaaggacggc

SEQ ID NO: 2981645 - DNA, 25 bp, Homo sapien
ttccttaggtgcaaggacggcggct

SEQ ID NO: 2981646 - DNA, 25 bp, Homo sapien
cagaggttccttaggtgcaaggacg

SEQ ID NO: 2981647 - DNA, 25 bp, Homo sapien
gagtagagttccccggtctctgtaa

SEQ ID NO: 2981648 - DNA, 25 bp, Homo sapien
gaagagtagagttccccggtctctg

SEQ ID NO: 2981649 - DNA, 25 bp, Homo sapien
cggtctctgtaatttcacccgccat

SEQ ID NO: 2981650 - DNA, 25 bp, Homo sapien
gagttccccggtctctgtaatttca

SEQ ID NO: 2981651 - DNA, 25 bp, Homo sapien
tgggcatggtgagtgcgcccgtgcc

SEQ ID NO: 2981652 - DNA, 25 bp, Homo sapien
cccgtgcccacgatgaggttaaaca

SEQ ID NO: 2981653 - DNA, 25 bp, Homo sapien
aagccacccggcagtggcgaatgcc

SEQ ID NO: 2981654 - DNA, 25 bp, Homo sapien
cacgatgaggttaaacatgtacacc

SEQ ID NO: 2981655 - DNA, 25 bp, Homo sapien
gaataccctggcaaggactcactga

SEQ ID NO: 2981656 - DNA, 25 bp, Homo sapien
tccaaagcctagtggatgtccaggt

SEQ ID NO: 2981657 - DNA, 25 bp, Homo sapien
gaagaaataggccagcatcacgtga

SEQ ID NO: 2981658 - DNA, 25 bp, Homo sapien
tttatctgatcagggctgtgcaacc

SEQ ID NO: 2981659 - DNA, 25 bp, Homo sapien
agccatggcctctatcacaaaggtg

SEQ ID NO: 2981660 - DNA, 25 bp, Homo sapien
gcagccatggcctctatcacaaagg

SEQ ID NO: 2981661 - DNA, 25 bp, Homo sapien
ggagctgcgcgttggctgcagccat

SEQ ID NO: 2981662 - DNA, 25 bp, Homo sapien
tcttccagtggagctgcgcgttggc

SEQ ID NO: 2981663 - DNA, 25 bp, Homo sapien
ttctctgcccgctcgtagttgtccc

SEQ ID NO: 2981664 - DNA, 25 bp, Homo sapien
tagttgtcccggatgagaacatcgc

SEQ ID NO: 2981665 - DNA, 25 bp, Homo sapien
atgagaacatcgctgtctgaggctg

SEQ ID NO: 2981666 - DNA, 25 bp, Homo sapien
aggctgtggaggagtcgtcatcttc

SEQ ID NO: 2981667 - DNA, 25 bp, Homo sapien
caaatctgagtagtggccaagccag

SEQ ID NO: 2981668 - DNA, 25 bp, Homo sapien
gaacttaccaagctgcaaatctgag

SEQ ID NO: 2981669 - DNA, 25 bp, Homo sapien
gctcttttgagtctaccacagggcc

SEQ ID NO: 2981670 - DNA, 25 bp, Homo sapien
gaaactgaggtgcacaggtcaagga

SEQ ID NO: 2981671 - DNA, 25 bp, Homo sapien
caaacgggttgggagatccacgtct

SEQ ID NO: 2981672 - DNA, 25 bp, Homo sapien
tcaaacgggttgggagatccacgtc

SEQ ID NO: 2981673 - DNA, 25 bp, Homo sapien
aacgggttgggagatccacgtctct

SEQ ID NO: 2981674 - DNA, 25 bp, Homo sapien
aaatcttcgaagacagttgcaaggg

SEQ ID NO: 2981675 - DNA, 25 bp, Homo sapien
aaagaactggtagggcagcccactc

SEQ ID NO: 2981676 - DNA, 25 bp, Homo sapien
ccctagggcggcctttggctgataa

SEQ ID NO: 2981677 - DNA, 25 bp, Homo sapien
gctctaagttaagtgcagccacatt

SEQ ID NO: 2981678 - DNA, 25 bp, Homo sapien
tttcacctgagaggactcaacgagg

SEQ ID NO: 2981679 - DNA, 25 bp, Homo sapien
tgatgctgacaagagacagatcggc

SEQ ID NO: 2981680 - DNA, 25 bp, Homo sapien
tgatggaaaatagcccagctctctg

SEQ ID NO: 2981681 - DNA, 25 bp, Homo sapien
tctgaagctgggatccaaagggtaa

SEQ ID NO: 2981682 - DNA, 25 bp, Homo sapien
cagcagcatagatggcgaggtctcc

SEQ ID NO: 2981683 - DNA, 25 bp, Homo sapien
caggtaaacgatgatgcagaaatag

SEQ ID NO: 2981684 - DNA, 25 bp, Homo sapien
gaggtctccatacaggtaaacgatg

SEQ ID NO: 2981685 - DNA, 25 bp, Homo sapien
cagaaatagaacaagttgaccccca

SEQ ID NO: 2981686 - DNA, 25 bp, Homo sapien
ccagcaccggtcagtgtcattgtat

SEQ ID NO: 2981687 - DNA, 25 bp, Homo sapien
caagtagatgcggtaggcgtccact

SEQ ID NO: 2981688 - DNA, 25 bp, Homo sapien
ccacaccgcaggagtcattgccagt

SEQ ID NO: 2981689 - DNA, 25 bp, Homo sapien
ggtgtctgcttccacaccgcaggag

SEQ ID NO: 2981690 - DNA, 25 bp, Homo sapien
ctgagtgaaatctggctggcagcaa

SEQ ID NO: 2981691 - DNA, 25 bp, Homo sapien
gacctttacaaagacgcacagggat

SEQ ID NO: 2981692 - DNA, 25 bp, Homo sapien
gggatggacaatcttctgaaacaga

SEQ ID NO: 2981693 - DNA, 25 bp, Homo sapien
gaatctagctctcctgacctttaca

SEQ ID NO: 2981694 - DNA, 25 bp, Homo sapien
agggtagggaggtgctttcaattct

SEQ ID NO: 2981695 - DNA, 25 bp, Homo sapien
ggtagggaggtgctttcaattctcc

SEQ ID NO: 2981696 - DNA, 25 bp, Homo sapien
ctgagacaaacaaggtctgtgtgca

SEQ ID NO: 2981697 - DNA, 25 bp, Homo sapien
gagacaaacaaggtctgtgtgcagg

SEQ ID NO: 2981698 - DNA, 25 bp, Homo sapien
cggtagatgccgcttgctcttccta

SEQ ID NO: 2981699 - DNA, 25 bp, Homo sapien
ggtagatgccgcttgctcttcctaa

SEQ ID NO: 2981700 - DNA, 25 bp, Homo sapien
tgagcggtagatgccgcttgctctt

SEQ ID NO: 2981701 - DNA, 25 bp, Homo sapien
ctgtgagcggtagatgccgcttgct

SEQ ID NO: 2981702 - DNA, 25 bp, Homo sapien
tgctcaacagggcagtttgcggccg

SEQ ID NO: 2981703 - DNA, 25 bp, Homo sapien
gccaggataagctccgctctgccat

SEQ ID NO: 2981704 - DNA, 25 bp, Homo sapien
cagtttgcggccgggtctccagcca

SEQ ID NO: 2981705 - DNA, 25 bp, Homo sapien
cacgaagggccctctgctcaacagg

SEQ ID NO: 2981706 - DNA, 25 bp, Homo sapien
acttgagtgcccaggaaaagctggc

SEQ ID NO: 2981707 - DNA, 25 bp, Homo sapien
tatggtttaggctaagcaccccaaa

SEQ ID NO: 2981708 - DNA, 25 bp, Homo sapien
cacgtgcccgggagtaaacctggct

SEQ ID NO: 2981709 - DNA, 25 bp, Homo sapien
tgagcaaccaggtaagttacactgc

SEQ ID NO: 2981710 - DNA, 25 bp, Homo sapien
cttgctgcgggtaggaagtctttgc

SEQ ID NO: 2981711 - DNA, 25 bp, Homo sapien
ggagaggtgccaggcgatcacttga

SEQ ID NO: 2981712 - DNA, 25 bp, Homo sapien
ggcagtgggaacgctccagcaggag

SEQ ID NO: 2981713 - DNA, 25 bp, Homo sapien
tcggtccatgctctcggcgcaggaa

SEQ ID NO: 2981714 - DNA, 25 bp, Homo sapien
tgctctcggcatcttcccttcctcg

SEQ ID NO: 2981715 - DNA, 25 bp, Homo sapien
tctggacgtcaaagaaggtgaacgg

SEQ ID NO: 2981716 - DNA, 25 bp, Homo sapien
ggtcaggatctgcaggtacttggtc

SEQ ID NO: 2981717 - DNA, 25 bp, Homo sapien
tcaaagaaggtgaacggtccgagga

SEQ ID NO: 2981718 - DNA, 25 bp, Homo sapien
gtacttggtcttctggacgtcaaag

SEQ ID NO: 2981719 - DNA, 25 bp, Homo sapien
gaagccgtgactgggccaagccctt

SEQ ID NO: 2981720 - DNA, 25 bp, Homo sapien
gccaagcccttgtagcagctgaagg

SEQ ID NO: 2981721 - DNA, 25 bp, Homo sapien
aagcccttgtagcagctgaaggtga

SEQ ID NO: 2981722 - DNA, 25 bp, Homo sapien
agggatgaagccgtgactgggccaa

SEQ ID NO: 2981723 - DNA, 25 bp, Homo sapien
aggccgccatggtgaggagcatatc

SEQ ID NO: 2981724 - DNA, 25 bp, Homo sapien
ccatggtgaggagcatatccgggaa

SEQ ID NO: 2981725 - DNA, 25 bp, Homo sapien
ccgccatggtgaggagcatatccgg

SEQ ID NO: 2981726 - DNA, 25 bp, Homo sapien
gcatatccgggaaggacaggtggtt

SEQ ID NO: 2981727 - DNA, 25 bp, Homo sapien
gagccctgtgagaaagagtcattaa

SEQ ID NO: 2981728 - DNA, 25 bp, Homo sapien
cctgtgagaaagagtcattaaatgc

SEQ ID NO: 2981729 - DNA, 25 bp, Homo sapien
gccctgtgagaaagagtcattaaat

SEQ ID NO: 2981730 - DNA, 25 bp, Homo sapien
tgtgagaaagagtcattaaatgcat

SEQ ID NO: 2981731 - DNA, 25 bp, Homo sapien
atggtgggaaacacgacgcggtcca

SEQ ID NO: 2981732 - DNA, 25 bp, Homo sapien
tcttccagttgttgcgcagggtcac

SEQ ID NO: 2981733 - DNA, 25 bp, Homo sapien
tattggccgtgacgaaaatgaagca

SEQ ID NO: 2981734 - DNA, 25 bp, Homo sapien
gatgacgtactggatgccggtgccc

SEQ ID NO: 2981735 - DNA, 25 bp, Homo sapien
tcccattgtgcagggagtagcccgc

SEQ ID NO: 2981736 - DNA, 25 bp, Homo sapien
actaaatctgggctctgcgggcgag

SEQ ID NO: 2981737 - DNA, 25 bp, Homo sapien
gaagacctgggagcaactaaatctg

SEQ ID NO: 2981738 - DNA, 25 bp, Homo sapien
gaggtgtgattccagtaatgagtct

SEQ ID NO: 2981739 - DNA, 25 bp, Homo sapien
cagacctggctaggatacttccagc

SEQ ID NO: 2981740 - DNA, 25 bp, Homo sapien
ctctggtaccagttagcacttcttg

SEQ ID NO: 2981741 - DNA, 25 bp, Homo sapien
tccagcctgggattcgcctctgaag

SEQ ID NO: 2981742 - DNA, 25 bp, Homo sapien
ttcttagacaaggacgcaggatggg

SEQ ID NO: 2981743 - DNA, 25 bp, Homo sapien
atgtcactgccaagccgctgaggtg

SEQ ID NO: 2981744 - DNA, 25 bp, Homo sapien
ggcttccctctagtaggaccacctg

SEQ ID NO: 2981745 - DNA, 25 bp, Homo sapien
cagcgagggcagcagacggtccctt

SEQ ID NO: 2981746 - DNA, 25 bp, Homo sapien
acctgcactgtaggaggccctgagg

SEQ ID NO: 2981747 - DNA, 25 bp, Homo sapien
ctgaggccaattacaccacgcaggg

SEQ ID NO: 2981748 - DNA, 25 bp, Homo sapien
gactgtcacataaatcaacctgggc

SEQ ID NO: 2981749 - DNA, 25 bp, Homo sapien
gatatagcgtgaacactgagcaccc

SEQ ID NO: 2981750 - DNA, 25 bp, Homo sapien
caaagcagctagacaacggcagtgg

SEQ ID NO: 2981751 - DNA, 25 bp, Homo sapien
tggcacataatgaccctcagcggag

SEQ ID NO: 2981752 - DNA, 25 bp, Homo sapien
tgcctggtcccaatgcagaaagtac

SEQ ID NO: 2981753 - DNA, 25 bp, Homo sapien
gctgctgctctagcctcaggtgagg

SEQ ID NO: 2981754 - DNA, 25 bp, Homo sapien
gactctggcctttgcctgttgccga

SEQ ID NO: 2981755 - DNA, 25 bp, Homo sapien
ttgaggcagggccatcccgatcctt

SEQ ID NO: 2981756 - DNA, 25 bp, Homo sapien
tgaaatcctggccatgggaccccag

SEQ ID NO: 2981757 - DNA, 25 bp, Homo sapien
cactgtcagggttaagcggcaggca

SEQ ID NO: 2981758 - DNA, 25 bp, Homo sapien
tcttctcacgcagagttctgccagg

SEQ ID NO: 2981759 - DNA, 25 bp, Homo sapien
tgtccgacgtctcccgagtgtcgcg

SEQ ID NO: 2981760 - DNA, 25 bp, Homo sapien
ggcgcttgtgcgcagggctccgcag

SEQ ID NO: 2981761 - DNA, 25 bp, Homo sapien
aggacctgccgctgctcggtccgga

SEQ ID NO: 2981762 - DNA, 25 bp, Homo sapien
tgtcactacagctcctttcctcgag

SEQ ID NO: 2981763 - DNA, 25 bp, Homo sapien
gcccacgggagacatggaagacctc

SEQ ID NO: 2981764 - DNA, 25 bp, Homo sapien
tgctgcttcgaacggccacagagaa

SEQ ID NO: 2981765 - DNA, 25 bp, Homo sapien
tccccaacagggtgtcgatgaggcc

SEQ ID NO: 2981766 - DNA, 25 bp, Homo sapien
gcagcattgggtataagagccgccc

SEQ ID NO: 2981767 - DNA, 25 bp, Homo sapien
ttgggtctccaggacaagatcaagg

SEQ ID NO: 2981768 - DNA, 25 bp, Homo sapien
gaaggccaagggtagggttctgaga

SEQ ID NO: 2981769 - DNA, 25 bp, Homo sapien
tggcgtcgtccccacaggaaagcag

SEQ ID NO: 2981770 - DNA, 25 bp, Homo sapien
ctggccgggatctgagccacaggcc

SEQ ID NO: 2981771 - DNA, 25 bp, Homo sapien
ggagccagggtatctcagggtgcca

SEQ ID NO: 2981772 - DNA, 25 bp, Homo sapien
gctgggcttggagccggcgctgagc

SEQ ID NO: 2981773 - DNA, 25 bp, Homo sapien
caggcgctttatacccaggaggaca

SEQ ID NO: 2981774 - DNA, 25 bp, Homo sapien
gacagggtgatttacagctgcggga

SEQ ID NO: 2981775 - DNA, 25 bp, Homo sapien
tctcccacgccgagatggacaggcg

SEQ ID NO: 2981776 - DNA, 25 bp, Homo sapien
aagaggatccagagcgttgccagca

SEQ ID NO: 2981777 - DNA, 25 bp, Homo sapien
gcagcgcgaacacgtcggtgtcgta

SEQ ID NO: 2981778 - DNA, 25 bp, Homo sapien
ctgatgagcgtgcaggcgaggagca

SEQ ID NO: 2981779 - DNA, 25 bp, Homo sapien
ttgttgaaggctccgccgctgatga

SEQ ID NO: 2981780 - DNA, 25 bp, Homo sapien
acatccatgatgagggtgcagattc

SEQ ID NO: 2981781 - DNA, 25 bp, Homo sapien
aaactggagtagtagccggtcttga

SEQ ID NO: 2981782 - DNA, 25 bp, Homo sapien
tgactggcactcaaagaaactggag

SEQ ID NO: 2981783 - DNA, 25 bp, Homo sapien
tagtagccggtcttgaagacatcca

SEQ ID NO: 2981784 - DNA, 25 bp, Homo sapien
cgcagtctttagcagagacccagag

SEQ ID NO: 2981785 - DNA, 25 bp, Homo sapien
gacgtgaacgcagtctttagcagag

SEQ ID NO: 2981786 - DNA, 25 bp, Homo sapien
tccaggtggacgtgaacgcagtctt

SEQ ID NO: 2981787 - DNA, 25 bp, Homo sapien
tcagatccaggtggacgtgaacgca

SEQ ID NO: 2981788 - DNA, 25 bp, Homo sapien
aagcctgaatctctcctgcaaggtg

SEQ ID NO: 2981789 - DNA, 25 bp, Homo sapien
ccaccaaagagagggctaggaggtt

SEQ ID NO: 2981790 - DNA, 25 bp, Homo sapien
caaggtagtggaagtcagcctgaca

SEQ ID NO: 2981791 - DNA, 25 bp, Homo sapien
acgctgggtacaggcatcgagctgc

SEQ ID NO: 2981792 - DNA, 25 bp, Homo sapien
gggattggtgcacagattcatccac

SEQ ID NO: 2981793 - DNA, 25 bp, Homo sapien
tcagagatgagacgggcgtggctgg

SEQ ID NO: 2981794 - DNA, 25 bp, Homo sapien
tggctggcgttgctgtgagaactgc

SEQ ID NO: 2981795 - DNA, 25 bp, Homo sapien
tggtgagtgtgaacatgagaccaca

SEQ ID NO: 2981796 - DNA, 25 bp, Homo sapien
cgttataaattcacaaagcacccgg

SEQ ID NO: 2981797 - DNA, 25 bp, Homo sapien
gcagcctcaaggataaaagggtacc

SEQ ID NO: 2981798 - DNA, 25 bp, Homo sapien
tactgcagaggtagatcctgcaaca

SEQ ID NO: 2981799 - DNA, 25 bp, Homo sapien
ggtcacctacacctatactgcagag

SEQ ID NO: 2981800 - DNA, 25 bp, Homo sapien
catgcctttacagggcgtggcacac

SEQ ID NO: 2981801 - DNA, 25 bp, Homo sapien
tcagtgctcagtaagaacagtccag

SEQ ID NO: 2981802 - DNA, 25 bp, Homo sapien
gcccagcctagcttgtgacctttgt

SEQ ID NO: 2981803 - DNA, 25 bp, Homo sapien
tgacctttgttaagggcaggctccc

SEQ ID NO: 2981804 - DNA, 25 bp, Homo sapien
gagtctcctccgaccgggttgtctg

SEQ ID NO: 2981805 - DNA, 25 bp, Homo sapien
agaggcaggagtctcctccgaccgg

SEQ ID NO: 2981806 - DNA, 25 bp, Homo sapien
cctccgaccgggttgtctgcatgct

SEQ ID NO: 2981807 - DNA, 25 bp, Homo sapien
caggagtctcctccgaccgggttgt

SEQ ID NO: 2981808 - DNA, 25 bp, Homo sapien
taggtagaagtacccctgctggaag

SEQ ID NO: 2981809 - DNA, 25 bp, Homo sapien
tgtagtagatgaccagggcctgcct

SEQ ID NO: 2981810 - DNA, 25 bp, Homo sapien
caaggtggtgagtcccaagcagaca

SEQ ID NO: 2981811 - DNA, 25 bp, Homo sapien
taagagatggcgtactgacccaggg

SEQ ID NO: 2981812 - DNA, 25 bp, Homo sapien
gaggcagatgttgacgatgaccgcc

SEQ ID NO: 2981813 - DNA, 25 bp, Homo sapien
aggacagcacgtagacctccagcag

SEQ ID NO: 2981814 - DNA, 25 bp, Homo sapien
atgaccgcccagagggagtagccgt

SEQ ID NO: 2981815 - DNA, 25 bp, Homo sapien
tggacacagcgtgcatgcggtagaa

SEQ ID NO: 2981816 - DNA, 25 bp, Homo sapien
tgccccccatgcctctgttggaggc

SEQ ID NO: 2981817 - DNA, 25 bp, Homo sapien
tcttcctgccccccatgcctctgtt

SEQ ID NO: 2981818 - DNA, 25 bp, Homo sapien
cctgccccccatgcctctgttggag

SEQ ID NO: 2981819 - DNA, 25 bp, Homo sapien
tcctgccccccatgcctctgttgga

SEQ ID NO: 2981820 - DNA, 25 bp, Homo sapien
tccagatcttgttgggtcctagaaa

SEQ ID NO: 2981821 - DNA, 25 bp, Homo sapien
aggaaatgggctgtcatatggcacc

SEQ ID NO: 2981822 - DNA, 25 bp, Homo sapien
gtttattggtttccagctccgggca

SEQ ID NO: 2981823 - DNA, 25 bp, Homo sapien
tccactctgggaccagaaggaaatg

SEQ ID NO: 2981824 - DNA, 25 bp, Homo sapien
ggcacactttcctcaaagtcccctg

SEQ ID NO: 2981825 - DNA, 25 bp, Homo sapien
gttcccatgatctcccccaaatgcc

SEQ ID NO: 2981826 - DNA, 25 bp, Homo sapien
gctgttcccatgatctcccccaaat

SEQ ID NO: 2981827 - DNA, 25 bp, Homo sapien
gcacactttcctcaaagtcccctga

SEQ ID NO: 2981828 - DNA, 25 bp, Homo sapien
gtccgtccaggtgagaccgatgccc

SEQ ID NO: 2981829 - DNA, 25 bp, Homo sapien
aggtgagaccgatgcccgcgacgcc

SEQ ID NO: 2981830 - DNA, 25 bp, Homo sapien
cgactgcgggcgctgagcggatcgt

SEQ ID NO: 2981831 - DNA, 25 bp, Homo sapien
cgctgagcggatcgtccgtccaggt

SEQ ID NO: 2981832 - DNA, 25 bp, Homo sapien
ggccgggagaggcatcgccgtgggc

SEQ ID NO: 2981833 - DNA, 25 bp, Homo sapien
ctgaggccgggagaggcatcgccgt

SEQ ID NO: 2981834 - DNA, 25 bp, Homo sapien
cgggagaggcatcgccgtgggctaa

SEQ ID NO: 2981835 - DNA, 25 bp, Homo sapien
tgaggccgggagaggcatcgccgtg

SEQ ID NO: 2981836 - DNA, 25 bp, Homo sapien
tgggtagtatgtgccagtgtctggg

SEQ ID NO: 2981837 - DNA, 25 bp, Homo sapien
gctttcccgttccaatccctgcagc

SEQ ID NO: 2981838 - DNA, 25 bp, Homo sapien
tgcgcaagctgggaaagttccgccg

SEQ ID NO: 2981839 - DNA, 25 bp, Homo sapien
ttaaagggagttcacctctccacag

SEQ ID NO: 2981840 - DNA, 25 bp, Homo sapien
ctgaagaaggcatgggtgtagcctc

SEQ ID NO: 2981841 - DNA, 25 bp, Homo sapien
agaaggcatgggtgtagcctcagca

SEQ ID NO: 2981842 - DNA, 25 bp, Homo sapien
tgaagaaggcatgggtgtagcctca

SEQ ID NO: 2981843 - DNA, 25 bp, Homo sapien
aaggcatgggtgtagcctcagcagg

SEQ ID NO: 2981844 - DNA, 25 bp, Homo sapien
acatccactcggttctccttctccg

SEQ ID NO: 2981845 - DNA, 25 bp, Homo sapien
cccacatccactcggttctccttct

SEQ ID NO: 2981846 - DNA, 25 bp, Homo sapien
atccactcggttctccttctccggg

SEQ ID NO: 2981847 - DNA, 25 bp, Homo sapien
ccacatccactcggttctccttctc

SEQ ID NO: 2981848 - DNA, 25 bp, Homo sapien
gaagagttgtccagccttctgggcc

SEQ ID NO: 2981849 - DNA, 25 bp, Homo sapien
agaggaccttcagcgtggccagcag

SEQ ID NO: 2981850 - DNA, 25 bp, Homo sapien
gatcttggtagagcacggcgtgtgg

SEQ ID NO: 2981851 - DNA, 25 bp, Homo sapien
agaaatgcctcaccagccaggactt

SEQ ID NO: 2981852 - DNA, 25 bp, Homo sapien
tgacttgcagcggatgtggctcaca

SEQ ID NO: 2981853 - DNA, 25 bp, Homo sapien
catcgtagcccactcggaagatgtt

SEQ ID NO: 2981854 - DNA, 25 bp, Homo sapien
tggacgccgatgaagaccatctcga

SEQ ID NO: 2981855 - DNA, 25 bp, Homo sapien
ctcgatgacagagaagacaaggtcc

SEQ ID NO: 2981856 - DNA, 25 bp, Homo sapien
gtctggacccgaacacagtctttgc

SEQ ID NO: 2981857 - DNA, 25 bp, Homo sapien
cccgaacacagtctttgcagtgttt

SEQ ID NO: 2981858 - DNA, 25 bp, Homo sapien
acacagtctttgcagtgtttccaga

SEQ ID NO: 2981859 - DNA, 25 bp, Homo sapien
ggacccgaacacagtctttgcagtg

SEQ ID NO: 2981860 - DNA, 25 bp, Homo sapien
caagctcagcttcgatctctcggtg

SEQ ID NO: 2981861 - DNA, 25 bp, Homo sapien
ttggtaacggccagaacccacagca

SEQ ID NO: 2981862 - DNA, 25 bp, Homo sapien
gatctctcggtgcatggagtcattg

SEQ ID NO: 2981863 - DNA, 25 bp, Homo sapien
tttccatgaggatgccaagctcagc

SEQ ID NO: 2981864 - DNA, 25 bp, Homo sapien
acacgcggtggcattgaggcacaga

SEQ ID NO: 2981865 - DNA, 25 bp, Homo sapien
tctccggaaagcttcacacgcggtg

SEQ ID NO: 2981866 - DNA, 25 bp, Homo sapien
cacgatggagaaataggcgatgccc

SEQ ID NO: 2981867 - DNA, 25 bp, Homo sapien
cacatccaggctgcgggtagggttc

SEQ ID NO: 2981868 - DNA, 25 bp, Homo sapien
cgttctcaaactccgggtgtatgcc

SEQ ID NO: 2981869 - DNA, 25 bp, Homo sapien
gaaccatatctggtagccgtagaaa

SEQ ID NO: 2981870 - DNA, 25 bp, Homo sapien
gaagttgacgatggcgaaccatatc

SEQ ID NO: 2981871 - DNA, 25 bp, Homo sapien
aggcctcccacagagtgcatgcggt

SEQ ID NO: 2981872 - DNA, 25 bp, Homo sapien
gctggtctcggcacctcagaatgag

SEQ ID NO: 2981873 - DNA, 25 bp, Homo sapien
tggaccaggtgctcttctcgcagca

SEQ ID NO: 2981874 - DNA, 25 bp, Homo sapien
gctccccagactcggtcatgtaggt

SEQ ID NO: 2981875 - DNA, 25 bp, Homo sapien
tgcacccttggcttgcggatcgtgg

SEQ ID NO: 2981876 - DNA, 25 bp, Homo sapien
tgtccataggatgatatgtggttcc

SEQ ID NO: 2981877 - DNA, 25 bp, Homo sapien
caggccagttgtccataggatgata

SEQ ID NO: 2981878 - DNA, 25 bp, Homo sapien
gagattcaggccagttgtccatagg

SEQ ID NO: 2981879 - DNA, 25 bp, Homo sapien
gagtccccaaggagattcaggccag

SEQ ID NO: 2981880 - DNA, 25 bp, Homo sapien
attacaggcttatttggctgtaccc

SEQ ID NO: 2981881 - DNA, 25 bp, Homo sapien
gttttgatgattaatctgcctctat

SEQ ID NO: 2981882 - DNA, 25 bp, Homo sapien
tgattaatctgcctctattacaggc

SEQ ID NO: 2981883 - DNA, 25 bp, Homo sapien
tggctgtaccctggccgcttctttc

SEQ ID NO: 2981884 - DNA, 25 bp, Homo sapien
gagtcccagcattcgaggctgcaat

SEQ ID NO: 2981885 - DNA, 25 bp, Homo sapien
tgcttgagtcccagcattcgaggct

SEQ ID NO: 2981886 - DNA, 25 bp, Homo sapien
agtgaatgtcacatccttttgaagc

SEQ ID NO: 2981887 - DNA, 25 bp, Homo sapien
tttaagtgaatgtcacatccttttg

SEQ ID NO: 2981888 - DNA, 25 bp, Homo sapien
tgaatgtcacatccttttgaagcat

SEQ ID NO: 2981889 - DNA, 25 bp, Homo sapien
ccttttgaagcatctaggggccagg

SEQ ID NO: 2981890 - DNA, 25 bp, Homo sapien
cacccggagtggctggttagcaaga

SEQ ID NO: 2981891 - DNA, 25 bp, Homo sapien
tgagggtggactcaattaaatccag

SEQ ID NO: 2981892 - DNA, 25 bp, Homo sapien
gcccatctgagtggtagaagagccc

SEQ ID NO: 2981893 - DNA, 25 bp, Homo sapien
cacttgggagttcctggttgcaagc

SEQ ID NO: 2981894 - DNA, 25 bp, Homo sapien
ttaaaagcaaatgcccagtcactac

SEQ ID NO: 2981895 - DNA, 25 bp, Homo sapien
cataattactggtggaactagagag

SEQ ID NO: 2981896 - DNA, 25 bp, Homo sapien
agatatgttagtggtcaagttcctc

SEQ ID NO: 2981897 - DNA, 25 bp, Homo sapien
taaataacggtcagggatgaatggg

SEQ ID NO: 2981898 - DNA, 25 bp, Homo sapien
cccacaggaagtgacggctcgcggg

SEQ ID NO: 2981899 - DNA, 25 bp, Homo sapien
gtcgaccgacctcgcgcgctgcaca

SEQ ID NO: 2981900 - DNA, 25 bp, Homo sapien
ccaaccgcacagcggcgttgcggga

SEQ ID NO: 2981901 - DNA, 25 bp, Homo sapien
gaggcgaagggcgtcgaccgacctc

SEQ ID NO: 2981902 - DNA, 25 bp, Homo sapien
atggcaaagattccccggtgggctc

SEQ ID NO: 2981903 - DNA, 25 bp, Homo sapien
tatttcgtggtgttccttgccgcgg

SEQ ID NO: 2981904 - DNA, 25 bp, Homo sapien
caaaacacggcgctgatggcaaaga

SEQ ID NO: 2981905 - DNA, 25 bp, Homo sapien
tgtgaagccctggagtcttgtgacc

SEQ ID NO: 2981906 - DNA, 25 bp, Homo sapien
tagaagtctgacaaggatcactggc

SEQ ID NO: 2981907 - DNA, 25 bp, Homo sapien
aaagcattggtagaagctgtgttcc

SEQ ID NO: 2981908 - DNA, 25 bp, Homo sapien
tcaaagtcagcaacagaaggtggag

SEQ ID NO: 2981909 - DNA, 25 bp, Homo sapien
tcactggctaaagtcaaagcattgg

SEQ ID NO: 2981910 - DNA, 25 bp, Homo sapien
agggacggcgggtgggacagtggca

SEQ ID NO: 2981911 - DNA, 25 bp, Homo sapien
agtggcaaggaggatccgggcccgc

SEQ ID NO: 2981912 - DNA, 25 bp, Homo sapien
gggcaccgggctgcggcgacacaaa

SEQ ID NO: 2981913 - DNA, 25 bp, Homo sapien
gacacaaagggtggagtggcaggga

SEQ ID NO: 2981914 - DNA, 25 bp, Homo sapien
gggacaatgcggctgaggcgggccg

SEQ ID NO: 2981915 - DNA, 25 bp, Homo sapien
ggaactcgggctacagagcccgcgc

SEQ ID NO: 2981916 - DNA, 25 bp, Homo sapien
cctcgccatcaaccgctcgccggga

SEQ ID NO: 2981917 - DNA, 25 bp, Homo sapien
ctccagcgtcgggaactcgggctac

SEQ ID NO: 2981918 - DNA, 25 bp, Homo sapien
gcggctctccgcatggccccgcggg

SEQ ID NO: 2981919 - DNA, 25 bp, Homo sapien
caggtcctgctggtcgtaccaggac

SEQ ID NO: 2981920 - DNA, 25 bp, Homo sapien
ctgctggtcgtaccaggactcctct

SEQ ID NO: 2981921 - DNA, 25 bp, Homo sapien
gctggtcgtaccaggactcctcttc

SEQ ID NO: 2981922 - DNA, 25 bp, Homo sapien
tcctgctggtcgtaccaggactcct

SEQ ID NO: 2981923 - DNA, 25 bp, Homo sapien
gccttgagcaattaaccttctgatg

SEQ ID NO: 2981924 - DNA, 25 bp, Homo sapien
cagtaactcaggactcaggagccgg

SEQ ID NO: 2981925 - DNA, 25 bp, Homo sapien
tacagccctgtactatattgtgcgc

SEQ ID NO: 2981926 - DNA, 25 bp, Homo sapien
tatgacctgtcagttgggcaaaagt

SEQ ID NO: 2981927 - DNA, 25 bp, Homo sapien
agaggacgcccattcatgttccgag

SEQ ID NO: 2981928 - DNA, 25 bp, Homo sapien
taggagaaacacgagcatgagaaca

SEQ ID NO: 2981929 - DNA, 25 bp, Homo sapien
ggtaagccaggagctaagcctttgc

SEQ ID NO: 2981930 - DNA, 25 bp, Homo sapien
tgtaaccaagacactgggagcctcc

SEQ ID NO: 2981931 - DNA, 25 bp, Homo sapien
acctgttcctcattggtggagtaca

SEQ ID NO: 2981932 - DNA, 25 bp, Homo sapien
cctgcacctgttcctcattggtgga

SEQ ID NO: 2981933 - DNA, 25 bp, Homo sapien
cattggtggagtacatctgctgcag

SEQ ID NO: 2981934 - DNA, 25 bp, Homo sapien
cccagctccgcagctaggtgcaagt

SEQ ID NO: 2981935 - DNA, 25 bp, Homo sapien
tctccccttctaaggacaagtttgc

SEQ ID NO: 2981936 - DNA, 25 bp, Homo sapien
aggcttatgccaccatagccagcta

SEQ ID NO: 2981937 - DNA, 25 bp, Homo sapien
taaaaatggtggttcaggctgggcc

SEQ ID NO: 2981938 - DNA, 25 bp, Homo sapien
gatgtatttgtcttcagctgagtgg

SEQ ID NO: 2981939 - DNA, 25 bp, Homo sapien
ctgctcatagactttggcgtgctgc

SEQ ID NO: 2981940 - DNA, 25 bp, Homo sapien
tgctcgttcacgtgccgcagcgtgt

SEQ ID NO: 2981941 - DNA, 25 bp, Homo sapien
cagctgctcatagactttggcgtgc

SEQ ID NO: 2981942 - DNA, 25 bp, Homo sapien
tggcgtgctgctcgttcacgtgccg

SEQ ID NO: 2981943 - DNA, 25 bp, Homo sapien
tggaggcgctcaatggtctccgtca

SEQ ID NO: 2981944 - DNA, 25 bp, Homo sapien
gatggtacgcctgcgttcccgcttc

SEQ ID NO: 2981945 - DNA, 25 bp, Homo sapien
gaggcgctcaatggtctccgtcagc

SEQ ID NO: 2981946 - DNA, 25 bp, Homo sapien
ggaaggtgtggatggtacgcctgcg

SEQ ID NO: 2981947 - DNA, 25 bp, Homo sapien
tgtcattagcaacaggaccagtctc

SEQ ID NO: 2981948 - DNA, 25 bp, Homo sapien
cagggctcagtaaacgccagctgct

SEQ ID NO: 2981949 - DNA, 25 bp, Homo sapien
ttggataagacacacaacctctggg

SEQ ID NO: 2981950 - DNA, 25 bp, Homo sapien
tggatgatgcaccaactgcaccctg

SEQ ID NO: 2981951 - DNA, 25 bp, Homo sapien
tgaagagcgccttgtactcgggctg

SEQ ID NO: 2981952 - DNA, 25 bp, Homo sapien
tctttggccacgatggcgttgagcg

SEQ ID NO: 2981953 - DNA, 25 bp, Homo sapien
gcagtgtcgctgcagctcttgcgca

SEQ ID NO: 2981954 - DNA, 25 bp, Homo sapien
gactttggtggcgttgatgtcagcc

SEQ ID NO: 2981955 - DNA, 25 bp, Homo sapien
caaaggtgacgctggtctgccacta

SEQ ID NO: 2981956 - DNA, 25 bp, Homo sapien
ttggaagccaaggagacaagctctg

SEQ ID NO: 2981957 - DNA, 25 bp, Homo sapien
tttctaaggtctcaggaagggcggc

SEQ ID NO: 2981958 - DNA, 25 bp, Homo sapien
gaagcaaaactcctgacgcagctgg

SEQ ID NO: 2981959 - DNA, 25 bp, Homo sapien
tgggcccacgtgctctagctgaggt

SEQ ID NO: 2981960 - DNA, 25 bp, Homo sapien
tattttgggtggatctccccacacc

SEQ ID NO: 2981961 - DNA, 25 bp, Homo sapien
cctagctggccctcaataaatatag

SEQ ID NO: 2981962 - DNA, 25 bp, Homo sapien
tgccagagcctgctatttggagctg

SEQ ID NO: 2981963 - DNA, 25 bp, Homo sapien
tgggcaccccatgagtactgataaa

SEQ ID NO: 2981964 - DNA, 25 bp, Homo sapien
tgagttttaggaacgccaggctctt

SEQ ID NO: 2981965 - DNA, 25 bp, Homo sapien
cagaacatggcacatcgtgggcacc

SEQ ID NO: 2981966 - DNA, 25 bp, Homo sapien
taattgctgtctcctagccggaatg

SEQ ID NO: 2981967 - DNA, 25 bp, Homo sapien
tgagattcggggtagagcttgtcca

SEQ ID NO: 2981968 - DNA, 25 bp, Homo sapien
tgctcttgaactcagtgccgtcttt

SEQ ID NO: 2981969 - DNA, 25 bp, Homo sapien
tttctgcttgtgcagcgcccggcgt

SEQ ID NO: 2981970 - DNA, 25 bp, Homo sapien
cgtgggcaccgtgcgggcggtggga

SEQ ID NO: 2981971 - DNA, 25 bp, Homo sapien
cagcctgacaaaacgccccttccgt

SEQ ID NO: 2981972 - DNA, 25 bp, Homo sapien
ccagcagcctgacaaaacgcccctt

SEQ ID NO: 2981973 - DNA, 25 bp, Homo sapien
agcagcctgacaaaacgccccttcc

SEQ ID NO: 2981974 - DNA, 25 bp, Homo sapien
cttccgtccagtccttcccggctca

SEQ ID NO: 2981975 - DNA, 25 bp, Homo sapien
gaagctgttttattcgcgcgtcctg

SEQ ID NO: 2981976 - DNA, 25 bp, Homo sapien
tcttgagggccaaggacacgaacgt

SEQ ID NO: 2981977 - DNA, 25 bp, Homo sapien
cagaatgcccgtatttccccttggg

SEQ ID NO: 2981978 - DNA, 25 bp, Homo sapien
tttattgtccgccttggagggccag

SEQ ID NO: 2981979 - DNA, 25 bp, Homo sapien
tgggtgacagctaacgagactttgt

SEQ ID NO: 2981980 - DNA, 25 bp, Homo sapien
gcagcaacgcccttcagccttaaat

SEQ ID NO: 2981981 - DNA, 25 bp, Homo sapien
tcaaagcatcagtatcctcaggtgc

SEQ ID NO: 2981982 - DNA, 25 bp, Homo sapien
ggtgcactcccgactgccttcattt

SEQ ID NO: 2981983 - DNA, 25 bp, Homo sapien
tctttgtatccacaaggcccagtgc

SEQ ID NO: 2981984 - DNA, 25 bp, Homo sapien
aatgtaatgtacacagtgtcaaata

SEQ ID NO: 2981985 - DNA, 25 bp, Homo sapien
cacagtgtcaaataaatattacctg

SEQ ID NO: 2981986 - DNA, 25 bp, Homo sapien
gtaatgtaatgtacacagtgtcaaa

SEQ ID NO: 2981987 - DNA, 25 bp, Homo sapien
ctgtaatgtaatgtacacagtgtca

SEQ ID NO: 2981988 - DNA, 25 bp, Homo sapien
tgtcactgtcggcttgctttgcacc

SEQ ID NO: 2981989 - DNA, 25 bp, Homo sapien
ctagagggatgtcactgtcggcttg

SEQ ID NO: 2981990 - DNA, 25 bp, Homo sapien
ggatgtcactgtcggcttgctttgc

SEQ ID NO: 2981991 - DNA, 25 bp, Homo sapien
gagggatgtcactgtcggcttgctt

SEQ ID NO: 2981992 - DNA, 25 bp, Homo sapien
atgccaccacgcagccaactgattt

SEQ ID NO: 2981993 - DNA, 25 bp, Homo sapien
catgccaccacgcagccaactgatt

SEQ ID NO: 2981994 - DNA, 25 bp, Homo sapien
caagtttgtcttatctctctattcc

SEQ ID NO: 2981995 - DNA, 25 bp, Homo sapien
ccaggcagtcactgtatccagggtg

SEQ ID NO: 2981996 - DNA, 25 bp, Homo sapien
agccaccaagtttgtcttatctctc

SEQ ID NO: 2981997 - DNA, 25 bp, Homo sapien
aggcagtcactgtatccagggtgtt

SEQ ID NO: 2981998 - DNA, 25 bp, Homo sapien
tccgacaataagatattgtcaagcg

SEQ ID NO: 2981999 - DNA, 25 bp, Homo sapien
ccaggaccactactccgacaataag

SEQ ID NO: 2982000 - DNA, 25 bp, Homo sapien
cgacaataagatattgtcaagcgat

SEQ ID NO: 2982001 - DNA, 25 bp, Homo sapien
ccactactccgacaataagatattg

SEQ ID NO: 2982002 - DNA, 25 bp, Homo sapien
gcatgggtgcctgagacttccagga

SEQ ID NO: 2982003 - DNA, 25 bp, Homo sapien
gacttccaggaaggatcaacccctg

SEQ ID NO: 2982004 - DNA, 25 bp, Homo sapien
aagggagcatgggtgcctgagactt

SEQ ID NO: 2982005 - DNA, 25 bp, Homo sapien
ggtgcctgagacttccaggaaggat

SEQ ID NO: 2982006 - DNA, 25 bp, Homo sapien
cgatccactcggcagttgccaaatg

SEQ ID NO: 2982007 - DNA, 25 bp, Homo sapien
gatggctatcttctgccgcacgggc

SEQ ID NO: 2982008 - DNA, 25 bp, Homo sapien
cgtgatggctatcttctgccgcacg

SEQ ID NO: 2982009 - DNA, 25 bp, Homo sapien
gttgccaaatggaacctgacttctg

SEQ ID NO: 2982010 - DNA, 25 bp, Homo sapien
gaattttctgcaggcaatctgccag

SEQ ID NO: 2982011 - DNA, 25 bp, Homo sapien
gctggcctcagtgatcatgtctcga

SEQ ID NO: 2982012 - DNA, 25 bp, Homo sapien
catcttcttttgttggctccttcgg

SEQ ID NO: 2982013 - DNA, 25 bp, Homo sapien
ccagattccggaactgatagcggct

SEQ ID NO: 2982014 - DNA, 25 bp, Homo sapien
agccccagatgcccaatcagtgctt

SEQ ID NO: 2982015 - DNA, 25 bp, Homo sapien
ccagatgcccaatcagtgcttttca

SEQ ID NO: 2982016 - DNA, 25 bp, Homo sapien
gccccagatgcccaatcagtgcttt

SEQ ID NO: 2982017 - DNA, 25 bp, Homo sapien
aagactgcaattagccccagatgcc

SEQ ID NO: 2982018 - DNA, 25 bp, Homo sapien
ttttgtctcagcctttcccgattca

SEQ ID NO: 2982019 - DNA, 25 bp, Homo sapien
agtccatgtcgaccctcctgcttgt

SEQ ID NO: 2982020 - DNA, 25 bp, Homo sapien
gaccctcctgcttgtctttacagca

SEQ ID NO: 2982021 - DNA, 25 bp, Homo sapien
gtctcagcctttcccgattcatgtt

SEQ ID NO: 2982022 - DNA, 25 bp, Homo sapien
taaagacgtctgcaaccagtgcctg

SEQ ID NO: 2982023 - DNA, 25 bp, Homo sapien
aatgaacattcttgtgatggctcca

SEQ ID NO: 2982024 - DNA, 25 bp, Homo sapien
catggtgactgcctataaagacgtc

SEQ ID NO: 2982025 - DNA, 25 bp, Homo sapien
gatggctccaatgttatagacaagc

SEQ ID NO: 2982026 - DNA, 25 bp, Homo sapien
agtcggcttcacctctcctaaggag

SEQ ID NO: 2982027 - DNA, 25 bp, Homo sapien
ggtccttgacggatagaactgacag

SEQ ID NO: 2982028 - DNA, 25 bp, Homo sapien
cactggagacatataccgggacttt

SEQ ID NO: 2982029 - DNA, 25 bp, Homo sapien
tgaccacaattaaagcaagggcctg

SEQ ID NO: 2982030 - DNA, 25 bp, Homo sapien
tcttggatcttacagctctaacctc

SEQ ID NO: 2982031 - DNA, 25 bp, Homo sapien
gggtcttggatcttacagctctaac

SEQ ID NO: 2982032 - DNA, 25 bp, Homo sapien
ggatcttacagctctaacctcactc

SEQ ID NO: 2982033 - DNA, 25 bp, Homo sapien
ttggatcttacagctctaacctcac

SEQ ID NO: 2982034 - DNA, 25 bp, Homo sapien
cttaggaggccagtgccttatccat

SEQ ID NO: 2982035 - DNA, 25 bp, Homo sapien
ccctggcttaggaggccagtgcctt

SEQ ID NO: 2982036 - DNA, 25 bp, Homo sapien
taggaggccagtgccttatccatta

SEQ ID NO: 2982037 - DNA, 25 bp, Homo sapien
acaatccctggcttaggaggccagt

SEQ ID NO: 2982038 - DNA, 25 bp, Homo sapien
tcaacacgttgcacgggagtcgaac

SEQ ID NO: 2982039 - DNA, 25 bp, Homo sapien
tcctcctcaacacgttgcacgggag

SEQ ID NO: 2982040 - DNA, 25 bp, Homo sapien
ggagtcgaactagagaccaaggtcg

SEQ ID NO: 2982041 - DNA, 25 bp, Homo sapien
gagaccaaggtcgattccagcatcc

SEQ ID NO: 2982042 - DNA, 25 bp, Homo sapien
cagccagcggttcatcctgtcgtcc

SEQ ID NO: 2982043 - DNA, 25 bp, Homo sapien
ccgtgtttgggcactatggttgaac

SEQ ID NO: 2982044 - DNA, 25 bp, Homo sapien
gcatggagctcttgtgtagcccggt

SEQ ID NO: 2982045 - DNA, 25 bp, Homo sapien
cttctcaggcttggagcgcggtgac

SEQ ID NO: 2982046 - DNA, 25 bp, Homo sapien
gctcctggtccccgcgcgtcgtcac

SEQ ID NO: 2982047 - DNA, 25 bp, Homo sapien
ggctcctggtccccgcgcgtcgtca

SEQ ID NO: 2982048 - DNA, 25 bp, Homo sapien
ctcaatcttctgatccgaagtcaga

SEQ ID NO: 2982049 - DNA, 25 bp, Homo sapien
cgaaccctcaatcttctgatccgaa

SEQ ID NO: 2982050 - DNA, 25 bp, Homo sapien
gaccacgaagggactcgaaccctca

SEQ ID NO: 2982051 - DNA, 25 bp, Homo sapien
gaagtcagacgccttatccattagg

SEQ ID NO: 2982052 - DNA, 25 bp, Homo sapien
taaccggaagcgtcccgggatgcaa

SEQ ID NO: 2982053 - DNA, 25 bp, Homo sapien
gcaaagcctgattggacagaagcag

SEQ ID NO: 2982054 - DNA, 25 bp, Homo sapien
cctggctgcataatgacgccataac

SEQ ID NO: 2982055 - DNA, 25 bp, Homo sapien
cataatgacgccataaccggaagcg

SEQ ID NO: 2982056 - DNA, 25 bp, Homo sapien
tattggcctcaccaaccaattgaga

SEQ ID NO: 2982057 - DNA, 25 bp, Homo sapien
ccattgaggacttgaatgaagcttt

SEQ ID NO: 2982058 - DNA, 25 bp, Homo sapien
gacaagaaaaagtatccctattggc

SEQ ID NO: 2982059 - DNA, 25 bp, Homo sapien
tttgatcagatgaccattgaggact

SEQ ID NO: 2982060 - DNA, 25 bp, Homo sapien
tcctgggtgtattggcgacgactca

SEQ ID NO: 2982061 - DNA, 25 bp, Homo sapien
ctgagaagacccttgagctcctgtt

SEQ ID NO: 2982062 - DNA, 25 bp, Homo sapien
cctttaaggattcgtagcttccagc

SEQ ID NO: 2982063 - DNA, 25 bp, Homo sapien
tcgtttccgcttgggacacagaatg

SEQ ID NO: 2982064 - DNA, 25 bp, Homo sapien
agacaggtttttgtcatattgctca

SEQ ID NO: 2982065 - DNA, 25 bp, Homo sapien
tcaggcaatccacctctctgctctt

SEQ ID NO: 2982066 - DNA, 25 bp, Homo sapien
caggcaatccacctctctgctcttc

SEQ ID NO: 2982067 - DNA, 25 bp, Homo sapien
caggtttttgtcatattgctcaggc

SEQ ID NO: 2982068 - DNA, 25 bp, Homo sapien
aacttggtgaagacacccgatcggc

SEQ ID NO: 2982069 - DNA, 25 bp, Homo sapien
ccgttacttgctgcggaggaccgtg

SEQ ID NO: 2982070 - DNA, 25 bp, Homo sapien
cgtgacccacttccgttacttgctg

SEQ ID NO: 2982071 - DNA, 25 bp, Homo sapien
cccacttccgttacttgctgcggag

SEQ ID NO: 2982072 - DNA, 25 bp, Homo sapien
gaggaaagatcttcccgtgacccac

SEQ ID NO: 2982073 - DNA, 25 bp, Homo sapien
aagatacttccggaaccagccctca

SEQ ID NO: 2982074 - DNA, 25 bp, Homo sapien
agatacttccggaaccagccctcat

SEQ ID NO: 2982075 - DNA, 25 bp, Homo sapien
atcgccgggtccagctgcagttccg

SEQ ID NO: 2982076 - DNA, 25 bp, Homo sapien
gcgcagccgggccggcccatttctc

SEQ ID NO: 2982077 - DNA, 25 bp, Homo sapien
gcagttccgccatcttggaccgccg

SEQ ID NO: 2982078 - DNA, 25 bp, Homo sapien
ccagccccgccatcgccgggtccag

SEQ ID NO: 2982079 - DNA, 25 bp, Homo sapien
tccagcggctgcgcgacggcggcag

SEQ ID NO: 2982080 - DNA, 25 bp, Homo sapien
gctggggggcccgcggactgggcca

SEQ ID NO: 2982081 - DNA, 25 bp, Homo sapien
tgcccgcggggcgtggggccagccg

SEQ ID NO: 2982082 - DNA, 25 bp, Homo sapien
ggcagccgggcggccgtgcccgcgg

SEQ ID NO: 2982083 - DNA, 25 bp, Homo sapien
ccgccgccccctgcccgctcgggtg

SEQ ID NO: 2982084 - DNA, 25 bp, Homo sapien
ctgacccagcgggccgcgccgccgc

SEQ ID NO: 2982085 - DNA, 25 bp, Homo sapien
ccgcgccgccgccccctgcccgctc

SEQ ID NO: 2982086 - DNA, 25 bp, Homo sapien
cgccgccgccccctgcccgctcggg

SEQ ID NO: 2982087 - DNA, 25 bp, Homo sapien
tggtcacgaagtaggtgcctcccac

SEQ ID NO: 2982088 - DNA, 25 bp, Homo sapien
gaagtaggtgcctcccacgttcagc

SEQ ID NO: 2982089 - DNA, 25 bp, Homo sapien
tctggtggtcacgaagtaggtgcct

SEQ ID NO: 2982090 - DNA, 25 bp, Homo sapien
ctgtctggtggtcacgaagtaggtg

SEQ ID NO: 2982091 - DNA, 25 bp, Homo sapien
atgacttgggctcccggcctaaggt

SEQ ID NO: 2982092 - DNA, 25 bp, Homo sapien
aatgacttgggctcccggcctaagg

SEQ ID NO: 2982093 - DNA, 25 bp, Homo sapien
aaatgacttgggctcccggcctaag

SEQ ID NO: 2982094 - DNA, 25 bp, Homo sapien
agaaatgacttgggctcccggccta

SEQ ID NO: 2982095 - DNA, 25 bp, Homo sapien
gccaaccaaacacaagggtatcatt

SEQ ID NO: 2982096 - DNA, 25 bp, Homo sapien
caaccaaacacaagggtatcattgt

SEQ ID NO: 2982097 - DNA, 25 bp, Homo sapien
caaacacaagggtatcattgtggac

SEQ ID NO: 2982098 - DNA, 25 bp, Homo sapien
ctgccaaccaaacacaagggtatca

SEQ ID NO: 2982099 - DNA, 25 bp, Homo sapien
tgaggataggaccaaagtaggtggg

SEQ ID NO: 2982100 - DNA, 25 bp, Homo sapien
gggtccctgtcaatcagataggctc

SEQ ID NO: 2982101 - DNA, 25 bp, Homo sapien
tagtgatgatgagtttcccgtggcg

SEQ ID NO: 2982102 - DNA, 25 bp, Homo sapien
tcttctgccaactccttagtgatga

SEQ ID NO: 2982103 - DNA, 25 bp, Homo sapien
gaaaattggttaatctgggatatag

SEQ ID NO: 2982104 - DNA, 25 bp, Homo sapien
aaagatctccccataccccaaatat

SEQ ID NO: 2982105 - DNA, 25 bp, Homo sapien
agatctccccataccccaaatatga

SEQ ID NO: 2982106 - DNA, 25 bp, Homo sapien
agggagttctctgtgttattcttgc

SEQ ID NO: 2982107 - DNA, 25 bp, Homo sapien
cgtatcctttccttaaccagccgca

SEQ ID NO: 2982108 - DNA, 25 bp, Homo sapien
gcgatgttgtaaaactccgcttcct

SEQ ID NO: 2982109 - DNA, 25 bp, Homo sapien
ccagccgcacaagggacgcgatgtt

SEQ ID NO: 2982110 - DNA, 25 bp, Homo sapien
caagggacgcgatgttgtaaaactc

SEQ ID NO: 2982111 - DNA, 25 bp, Homo sapien
tgcaggactctgtacacgtgcttca

SEQ ID NO: 2982112 - DNA, 25 bp, Homo sapien
actgcaggactctgtacacgtgctt

SEQ ID NO: 2982113 - DNA, 25 bp, Homo sapien
ggactctgtacacgtgcttcacggg

SEQ ID NO: 2982114 - DNA, 25 bp, Homo sapien
caggactctgtacacgtgcttcacg

SEQ ID NO: 2982115 - DNA, 25 bp, Homo sapien
tgcagaccccttgaacggggcctgg

SEQ ID NO: 2982116 - DNA, 25 bp, Homo sapien
gattgtttgaagagctgcagacccc

SEQ ID NO: 2982117 - DNA, 25 bp, Homo sapien
agccgtctcccgtggttattaattg

SEQ ID NO: 2982118 - DNA, 25 bp, Homo sapien
tggccgtagccgtctcccgtggtta

SEQ ID NO: 2982119 - DNA, 25 bp, Homo sapien
ctatgacgatgccattggtagaatt

SEQ ID NO: 2982120 - DNA, 25 bp, Homo sapien
atttagttctctggagacaacacag

SEQ ID NO: 2982121 - DNA, 25 bp, Homo sapien
ttcgccttttcgctcggctctatga

SEQ ID NO: 2982122 - DNA, 25 bp, Homo sapien
aattctgcctgatcctcattgccgt

SEQ ID NO: 2982123 - DNA, 25 bp, Homo sapien
ttacatccgcgatcctctctcctga

SEQ ID NO: 2982124 - DNA, 25 bp, Homo sapien
atccgcgatcctctctcctgaagaa

SEQ ID NO: 2982125 - DNA, 25 bp, Homo sapien
tccgcgatcctctctcctgaagaat

SEQ ID NO: 2982126 - DNA, 25 bp, Homo sapien
acatccgcgatcctctctcctgaag

SEQ ID NO: 2982127 - DNA, 25 bp, Homo sapien
gcactgtcttcggagtcctgcaggt

SEQ ID NO: 2982128 - DNA, 25 bp, Homo sapien
tctgcagccagaagtcgcactgtct

SEQ ID NO: 2982129 - DNA, 25 bp, Homo sapien
catttccaaggagctaggccttccg

SEQ ID NO: 2982130 - DNA, 25 bp, Homo sapien
ccaggatcagctgtgctttgcagtg

SEQ ID NO: 2982131 - DNA, 25 bp, Homo sapien
gcatctgctgcacgtcttggagggt

SEQ ID NO: 2982132 - DNA, 25 bp, Homo sapien
ccttggaggctctattcatgggaat

SEQ ID NO: 2982133 - DNA, 25 bp, Homo sapien
tctgactcagtgcaggatgccgcct

SEQ ID NO: 2982134 - DNA, 25 bp, Homo sapien
gaagcagctgctaacgtccattgtg

SEQ ID NO: 2982135 - DNA, 25 bp, Homo sapien
gagcaggtccgccaaggttagaaac

SEQ ID NO: 2982136 - DNA, 25 bp, Homo sapien
taccgggttctatgctatgctacag

SEQ ID NO: 2982137 - DNA, 25 bp, Homo sapien
cagagggcacaacgctttcaagcaa

SEQ ID NO: 2982138 - DNA, 25 bp, Homo sapien
caagcaggtgagctgtggagcacac

SEQ ID NO: 2982139 - DNA, 25 bp, Homo sapien
atcagtgctactgtgtcatcagttg

SEQ ID NO: 2982140 - DNA, 25 bp, Homo sapien
cagtgctactgtgtcatcagttggg

SEQ ID NO: 2982141 - DNA, 25 bp, Homo sapien
agaatcagtgctactgtgtcatcag

SEQ ID NO: 2982142 - DNA, 25 bp, Homo sapien
ctggctggcatcacctgcgtcccag

SEQ ID NO: 2982143 - DNA, 25 bp, Homo sapien
ggccccacctcattgccatggaaaa

SEQ ID NO: 2982144 - DNA, 25 bp, Homo sapien
ccccacctcattgccatggaaaaag

SEQ ID NO: 2982145 - DNA, 25 bp, Homo sapien
tgggccccacctcattgccatggaa

SEQ ID NO: 2982146 - DNA, 25 bp, Homo sapien
aacaaagtcactttagaggaggctg

SEQ ID NO: 2982147 - DNA, 25 bp, Homo sapien
tgacatccccaagagcagttacaac

SEQ ID NO: 2982148 - DNA, 25 bp, Homo sapien
cactgacatccccaagagcagttac

SEQ ID NO: 2982149 - DNA, 25 bp, Homo sapien
ctcactgacatccccaagagcagtt

SEQ ID NO: 2982150 - DNA, 25 bp, Homo sapien
ctgacatccccaagagcagttacaa

SEQ ID NO: 2982151 - DNA, 25 bp, Homo sapien
aggaacagagggtgcccaccagtga

SEQ ID NO: 2982152 - DNA, 25 bp, Homo sapien
tcacagcatttcagactattcaaac

SEQ ID NO: 2982153 - DNA, 25 bp, Homo sapien
taagtctggatcaaaggccacgctg

SEQ ID NO: 2982154 - DNA, 25 bp, Homo sapien
accagtgacagcctcgtccctaagt

SEQ ID NO: 2982155 - DNA, 25 bp, Homo sapien
ttttggccgtcagcagcgatgatca

SEQ ID NO: 2982156 - DNA, 25 bp, Homo sapien
agcagcgatgatcagcatctgcttc

SEQ ID NO: 2982157 - DNA, 25 bp, Homo sapien
cctggtgcttttggccgtcagcagc

SEQ ID NO: 2982158 - DNA, 25 bp, Homo sapien
gtgcttttggccgtcagcagcgatg

SEQ ID NO: 2982159 - DNA, 25 bp, Homo sapien
ttcctctttctccacgaaatccaag

SEQ ID NO: 2982160 - DNA, 25 bp, Homo sapien
tctccacgaaatccaagatctgcat

SEQ ID NO: 2982161 - DNA, 25 bp, Homo sapien
tctttctccacgaaatccaagatct

SEQ ID NO: 2982162 - DNA, 25 bp, Homo sapien
tttctccacgaaatccaagatctgc

SEQ ID NO: 2982163 - DNA, 25 bp, Homo sapien
gtcactctggttgatgagcagggtg

SEQ ID NO: 2982164 - DNA, 25 bp, Homo sapien
tcactctggttgatgagcagggtgt

SEQ ID NO: 2982165 - DNA, 25 bp, Homo sapien
gttgctggtcactctggttgatgag

SEQ ID NO: 2982166 - DNA, 25 bp, Homo sapien
gctggtcactctggttgatgagcag

SEQ ID NO: 2982167 - DNA, 25 bp, Homo sapien
gtcaggggatgcttccacccacgct

SEQ ID NO: 2982168 - DNA, 25 bp, Homo sapien
ctagagctggaacagctcgtcgccg

SEQ ID NO: 2982169 - DNA, 25 bp, Homo sapien
acccagcgggtctcctagagctgga

SEQ ID NO: 2982170 - DNA, 25 bp, Homo sapien
ttgcagtaacctggcgggtggaggt

SEQ ID NO: 2982171 - DNA, 25 bp, Homo sapien
gcggtcactgcttgaagcccgggaa

SEQ ID NO: 2982172 - DNA, 25 bp, Homo sapien
gcgagcacagcatctgcggtcactg

SEQ ID NO: 2982173 - DNA, 25 bp, Homo sapien
cagcatctgcggtcactgcttgaag

SEQ ID NO: 2982174 - DNA, 25 bp, Homo sapien
gacaggccgcgcgagcacagcatct

SEQ ID NO: 2982175 - DNA, 25 bp, Homo sapien
cccaggcacacccacgagttggaca

SEQ ID NO: 2982176 - DNA, 25 bp, Homo sapien
tgcgggggtaggtgacgcccaggca

SEQ ID NO: 2982177 - DNA, 25 bp, Homo sapien
gggggtaggtgacgcccaggcacac

SEQ ID NO: 2982178 - DNA, 25 bp, Homo sapien
aggcacacccacgagttggacacct

SEQ ID NO: 2982179 - DNA, 25 bp, Homo sapien
agcaggtagaccacgctgcggctcg

SEQ ID NO: 2982180 - DNA, 25 bp, Homo sapien
gtagagcggctcgaggaaggctgcc

SEQ ID NO: 2982181 - DNA, 25 bp, Homo sapien
acccgccaggccgtagaaggacaag

SEQ ID NO: 2982182 - DNA, 25 bp, Homo sapien
acggtctgcgcgttgtcgtcccact

SEQ ID NO: 2982183 - DNA, 25 bp, Homo sapien
tttatggggtgctgtcacgggcggc

SEQ ID NO: 2982184 - DNA, 25 bp, Homo sapien
ttatggggtgctgtcacgggcggcg

SEQ ID NO: 2982185 - DNA, 25 bp, Homo sapien
cgggcgccgcttgagcgtggccgag

SEQ ID NO: 2982186 - DNA, 25 bp, Homo sapien
ttatttatggggtgctgtcacgggc

SEQ ID NO: 2982187 - DNA, 25 bp, Homo sapien
gggtagtccttgatgtgcattagtt

SEQ ID NO: 2982188 - DNA, 25 bp, Homo sapien
tagttgaaatgtactcagttggccg

SEQ ID NO: 2982189 - DNA, 25 bp, Homo sapien
aagtgcacgccacggcacccgggta

SEQ ID NO: 2982190 - DNA, 25 bp, Homo sapien
ctaggattgcaagtgcacgccacgg

SEQ ID NO: 2982191 - DNA, 25 bp, Homo sapien
gacgcaggcgccacgggatatccgt

SEQ ID NO: 2982192 - DNA, 25 bp, Homo sapien
tgaaatttgcacaacccggatgccc

SEQ ID NO: 2982193 - DNA, 25 bp, Homo sapien
caggcgccacgggatatccgtgtgt

SEQ ID NO: 2982194 - DNA, 25 bp, Homo sapien
gtgtctgaaatttgcacaacccgga

SEQ ID NO: 2982195 - DNA, 25 bp, Homo sapien
tcgcgacgaggaccgcgggactggg

SEQ ID NO: 2982196 - DNA, 25 bp, Homo sapien
gggactgggccaagcgccgcggcca

SEQ ID NO: 2982197 - DNA, 25 bp, Homo sapien
cgggcctggcggagaggtggctcag

SEQ ID NO: 2982198 - DNA, 25 bp, Homo sapien
tgcggcccgggccggtcgcgacgag

SEQ ID NO: 2982199 - DNA, 25 bp, Homo sapien
ttgggcttgcgggtcatcaccccag

SEQ ID NO: 2982200 - DNA, 25 bp, Homo sapien
ccaggagtccgagcgcccttgggct

SEQ ID NO: 2982201 - DNA, 25 bp, Homo sapien
gctgtgtccgccctggaatttcggg

SEQ ID NO: 2982202 - DNA, 25 bp, Homo sapien
ttttctagatcctcaccgccactga

SEQ ID NO: 2982203 - DNA, 25 bp, Homo sapien
cagcctatgttttcagggcgcctca

SEQ ID NO: 2982204 - DNA, 25 bp, Homo sapien
agctcgaacgcctggtcacgggaga

SEQ ID NO: 2982205 - DNA, 25 bp, Homo sapien
aagatgcttcgctctcacttgctgg

SEQ ID NO: 2982206 - DNA, 25 bp, Homo sapien
tcaaagacccctaggcccaatgaga

SEQ ID NO: 2982207 - DNA, 25 bp, Homo sapien
atgagtcatggtcactgcctggtgt

SEQ ID NO: 2982208 - DNA, 25 bp, Homo sapien
tgagtcatggtcactgcctggtgtg

SEQ ID NO: 2982209 - DNA, 25 bp, Homo sapien
catgagtcatggtcactgcctggtg

SEQ ID NO: 2982210 - DNA, 25 bp, Homo sapien
cttccaggcagggaggtccattcca

SEQ ID NO: 2982211 - DNA, 25 bp, Homo sapien
cccaggaccaagggcaatgcagctt

SEQ ID NO: 2982212 - DNA, 25 bp, Homo sapien
cattccagactcaagcagggcagag

SEQ ID NO: 2982213 - DNA, 25 bp, Homo sapien
cccagcagggaagtgctcttttctt

SEQ ID NO: 2982214 - DNA, 25 bp, Homo sapien
tcaaaattcagccctgccagacacg

SEQ ID NO: 2982215 - DNA, 25 bp, Homo sapien
cgagcggtttctccagtcaactggt

SEQ ID NO: 2982216 - DNA, 25 bp, Homo sapien
tcccatcgagcggtttctccagtca

SEQ ID NO: 2982217 - DNA, 25 bp, Homo sapien
ggtatggatgcccagtcggctctcc

SEQ ID NO: 2982218 - DNA, 25 bp, Homo sapien
tggccagaggcccacgcgttggcct

SEQ ID NO: 2982219 - DNA, 25 bp, Homo sapien
gcagctaagccatcccttcctcata

SEQ ID NO: 2982220 - DNA, 25 bp, Homo sapien
tcagcaggctgtccgtctctcctgg

SEQ ID NO: 2982221 - DNA, 25 bp, Homo sapien
catacccaagtaccaggtgtcacag

SEQ ID NO: 2982222 - DNA, 25 bp, Homo sapien
gctgccgacgctgccacggcctcac

SEQ ID NO: 2982223 - DNA, 25 bp, Homo sapien
gatggaggggaaccaagaggtctcg

SEQ ID NO: 2982224 - DNA, 25 bp, Homo sapien
tggcctggaactcccattgcaattc

SEQ ID NO: 2982225 - DNA, 25 bp, Homo sapien
tgccgatacacgtggggaagcccag

SEQ ID NO: 2982226 - DNA, 25 bp, Homo sapien
ttgcaattcagtgaagaagatgccg

SEQ ID NO: 2982227 - DNA, 25 bp, Homo sapien
agagtgcaactaaagggacagggaa

SEQ ID NO: 2982228 - DNA, 25 bp, Homo sapien
tctccgagagtgcaactaaagggac

SEQ ID NO: 2982229 - DNA, 25 bp, Homo sapien
ccgagagtgcaactaaagggacagg

SEQ ID NO: 2982230 - DNA, 25 bp, Homo sapien
agtgcaactaaagggacagggaagt

SEQ ID NO: 2982231 - DNA, 25 bp, Homo sapien
tggccatgtggcctgagcaaagcct

SEQ ID NO: 2982232 - DNA, 25 bp, Homo sapien
ccaggtggtttcaagggcacgagca

SEQ ID NO: 2982233 - DNA, 25 bp, Homo sapien
gaggctgctcattctatccgggtga

SEQ ID NO: 2982234 - DNA, 25 bp, Homo sapien
tccctgaaaggtggagcaagaccct

SEQ ID NO: 2982235 - DNA, 25 bp, Homo sapien
gcagccgaagcgtcccaccaggatg

SEQ ID NO: 2982236 - DNA, 25 bp, Homo sapien
agcatcacggtcactcggcagccga

SEQ ID NO: 2982237 - DNA, 25 bp, Homo sapien
tcctgctgtgaagtagagctggctg

SEQ ID NO: 2982238 - DNA, 25 bp, Homo sapien
aatcctgctgtgaagtagagctggc

SEQ ID NO: 2982239 - DNA, 25 bp, Homo sapien
tcctctggttctagtccatacccag

SEQ ID NO: 2982240 - DNA, 25 bp, Homo sapien
ttctagtccatacccagctccaagt

SEQ ID NO: 2982241 - DNA, 25 bp, Homo sapien
caagtccctggggactgaccatgga

SEQ ID NO: 2982242 - DNA, 25 bp, Homo sapien
tggggactgaccatggaatcagctg

SEQ ID NO: 2982243 - DNA, 25 bp, Homo sapien
agaggggaaaccagcctggaggcgc

SEQ ID NO: 2982244 - DNA, 25 bp, Homo sapien
tagtgagcccattgagcaggagtgc

SEQ ID NO: 2982245 - DNA, 25 bp, Homo sapien
aaagtagaagcccagcaccgtgatg

SEQ ID NO: 2982246 - DNA, 25 bp, Homo sapien
tacttgcggtggctagcaaaggccg

SEQ ID NO: 2982247 - DNA, 25 bp, Homo sapien
tgatgccgcacacaccaggttagtg

SEQ ID NO: 2982248 - DNA, 25 bp, Homo sapien
ggaacagagatcaagttaggccagt

SEQ ID NO: 2982249 - DNA, 25 bp, Homo sapien
gttaggccagtgctaccaggcctcc

SEQ ID NO: 2982250 - DNA, 25 bp, Homo sapien
atcaagttaggccagtgctaccagg

SEQ ID NO: 2982251 - DNA, 25 bp, Homo sapien
gggaacagagatcaagttaggccag

SEQ ID NO: 2982252 - DNA, 25 bp, Homo sapien
ctaaagttgttggtggcgtccagga

SEQ ID NO: 2982253 - DNA, 25 bp, Homo sapien
aaacatagctaaagttgttggtggc

SEQ ID NO: 2982254 - DNA, 25 bp, Homo sapien
catgtagaaaacatagctaaagttg

SEQ ID NO: 2982255 - DNA, 25 bp, Homo sapien
ttgttggtggcgtccaggagcaacc

SEQ ID NO: 2982256 - DNA, 25 bp, Homo sapien
tgaagagggcagctgagatgaggaa

SEQ ID NO: 2982257 - DNA, 25 bp, Homo sapien
ccatgaagagggcagctgagatgag

SEQ ID NO: 2982258 - DNA, 25 bp, Homo sapien
gagggcagctgagatgaggaagaag

SEQ ID NO: 2982259 - DNA, 25 bp, Homo sapien
agagggcagctgagatgaggaagaa

SEQ ID NO: 2982260 - DNA, 25 bp, Homo sapien
tcttctgcagggcgtagaagctgcc

SEQ ID NO: 2982261 - DNA, 25 bp, Homo sapien
ggcatccgccgcgacagcctgcttg

SEQ ID NO: 2982262 - DNA, 25 bp, Homo sapien
cccaggaccgtctttggcttccaag

SEQ ID NO: 2982263 - DNA, 25 bp, Homo sapien
ccgttgcttcccaggaccgtctttg

SEQ ID NO: 2982264 - DNA, 25 bp, Homo sapien
aggactcagacactggtcacacaga

SEQ ID NO: 2982265 - DNA, 25 bp, Homo sapien
ctgggtcttagacgctggttacata

SEQ ID NO: 2982266 - DNA, 25 bp, Homo sapien
cctggtgaaggagctagaggtcccc

SEQ ID NO: 2982267 - DNA, 25 bp, Homo sapien
ggctgagacagtgttcactcagtga

SEQ ID NO: 2982268 - DNA, 25 bp, Homo sapien
aatcccttgaacttgggaggcagag

SEQ ID NO: 2982269 - DNA, 25 bp, Homo sapien
cctgggcaacaagagtgaaactccg

SEQ ID NO: 2982270 - DNA, 25 bp, Homo sapien
ttgaacttggggggcagaggcagga

SEQ ID NO: 2982271 - DNA, 25 bp, Homo sapien
ccgagatggtgccactgcactccag

SEQ ID NO: 2982272 - DNA, 25 bp, Homo sapien
tcaccgattctaggatccaagccag

SEQ ID NO: 2982273 - DNA, 25 bp, Homo sapien
tcttcagaacggtatggaggccaga

SEQ ID NO: 2982274 - DNA, 25 bp, Homo sapien
catccaggctggacgagaaggtcca

SEQ ID NO: 2982275 - DNA, 25 bp, Homo sapien
tgcgaggcccaatgaccttcactgg

SEQ ID NO: 2982276 - DNA, 25 bp, Homo sapien
gttgacaccaataacacggcaggga

SEQ ID NO: 2982277 - DNA, 25 bp, Homo sapien
cagggttgacaccaataacacggca

SEQ ID NO: 2982278 - DNA, 25 bp, Homo sapien
acaccaataacacggcagggaaaag

SEQ ID NO: 2982279 - DNA, 25 bp, Homo sapien
gggttgacaccaataacacggcagg

SEQ ID NO: 2982280 - DNA, 25 bp, Homo sapien
cggagcctggttgagcctgaatcaa

SEQ ID NO: 2982281 - DNA, 25 bp, Homo sapien
caccccttgctgagctaggaggaaa

SEQ ID NO: 2982282 - DNA, 25 bp, Homo sapien
tccctcggtaccctgctgggacaag

SEQ ID NO: 2982283 - DNA, 25 bp, Homo sapien
gataaggttttcttgcggagcctgg

SEQ ID NO: 2982284 - DNA, 25 bp, Homo sapien
gcttattgacgccagctggacgtgg

SEQ ID NO: 2982285 - DNA, 25 bp, Homo sapien
cagtaccgcctttggccataagagc

SEQ ID NO: 2982286 - DNA, 25 bp, Homo sapien
aaagatgcttattgacgccagctgg

SEQ ID NO: 2982287 - DNA, 25 bp, Homo sapien
cagcccagagccgtttgcttggcct

SEQ ID NO: 2982288 - DNA, 25 bp, Homo sapien
caatttgcccaactcacatggcaga

SEQ ID NO: 2982289 - DNA, 25 bp, Homo sapien
ttgctctaacaaagtaacctcctac

SEQ ID NO: 2982290 - DNA, 25 bp, Homo sapien
atagtggcggagtcaaacagggcac

SEQ ID NO: 2982291 - DNA, 25 bp, Homo sapien
gaggtggtcaacaatttgcccaact

SEQ ID NO: 2982292 - DNA, 25 bp, Homo sapien
tacgggatgcacacaaaacctggtg

SEQ ID NO: 2982293 - DNA, 25 bp, Homo sapien
gagtcagacttttcaaccggaagag

SEQ ID NO: 2982294 - DNA, 25 bp, Homo sapien
aatggagtcgtcaggatgctcaccg

SEQ ID NO: 2982295 - DNA, 25 bp, Homo sapien
tgatggcagccaagtgtaagactgg

SEQ ID NO: 2982296 - DNA, 25 bp, Homo sapien
tctccttatgtggcccagggtggcc

SEQ ID NO: 2982297 - DNA, 25 bp, Homo sapien
cttatgtggcccagggtggcctctc

SEQ ID NO: 2982298 - DNA, 25 bp, Homo sapien
cccagggtggcctctcaagtgattc

SEQ ID NO: 2982299 - DNA, 25 bp, Homo sapien
tgtggcccagggtggcctctcaagt

SEQ ID NO: 2982300 - DNA, 25 bp, Homo sapien
tatgcagaacattcattgatacctt

SEQ ID NO: 2982301 - DNA, 25 bp, Homo sapien
gctattcttgcctaggagcaggtga

SEQ ID NO: 2982302 - DNA, 25 bp, Homo sapien
tattgaaggaattctgcccagagat

SEQ ID NO: 2982303 - DNA, 25 bp, Homo sapien
gagcaggtgagatgaaagtttccta

SEQ ID NO: 2982304 - DNA, 25 bp, Homo sapien
gatgctgaagcccttcggccgattc

SEQ ID NO: 2982305 - DNA, 25 bp, Homo sapien
ggtactgggtcatgtcctggtgctt

SEQ ID NO: 2982306 - DNA, 25 bp, Homo sapien
tttgtcagccgggtggatggcgcgc

SEQ ID NO: 2982307 - DNA, 25 bp, Homo sapien
tggacagaaatcaaagggtactggg

SEQ ID NO: 2982308 - DNA, 25 bp, Homo sapien
tgcgcggcgcgcttctggttttctg

SEQ ID NO: 2982309 - DNA, 25 bp, Homo sapien
tctcagaatcctgtaggagttgcgt

SEQ ID NO: 2982310 - DNA, 25 bp, Homo sapien
ctttagcctgtgctggaaccagcgg

SEQ ID NO: 2982311 - DNA, 25 bp, Homo sapien
tttctggatgccgaagctctttagc

SEQ ID NO: 2982312 - DNA, 25 bp, Homo sapien
tggaattccgtgaccagcgcctgca

SEQ ID NO: 2982313 - DNA, 25 bp, Homo sapien
aggtatcccagccgcccgacgtggg

SEQ ID NO: 2982314 - DNA, 25 bp, Homo sapien
gtctcctggaattccgtgaccagcg

SEQ ID NO: 2982315 - DNA, 25 bp, Homo sapien
cgtgggggtccaccttcggcttctg

SEQ ID NO: 2982316 - DNA, 25 bp, Homo sapien
ccacctgatcccaccgtggctctca

SEQ ID NO: 2982317 - DNA, 25 bp, Homo sapien
ctgcaacgggaaagcggcactgaag

SEQ ID NO: 2982318 - DNA, 25 bp, Homo sapien
cgggaaagcggcactgaagccaggt

SEQ ID NO: 2982319 - DNA, 25 bp, Homo sapien
acagcggaccctgccacctgatccc

SEQ ID NO: 2982320 - DNA, 25 bp, Homo sapien
aatagcaaactccaccagggtctca

SEQ ID NO: 2982321 - DNA, 25 bp, Homo sapien
tgccgcagatactcgtagttgctgg

SEQ ID NO: 2982322 - DNA, 25 bp, Homo sapien
cagcgaatcgagaaataaatccagg

SEQ ID NO: 2982323 - DNA, 25 bp, Homo sapien
ggtctcattctcctccgacagcgaa

SEQ ID NO: 2982324 - DNA, 25 bp, Homo sapien
aagggacgggactcagcttctagga

SEQ ID NO: 2982325 - DNA, 25 bp, Homo sapien
gaatcagctgagaagtggagacgct

SEQ ID NO: 2982326 - DNA, 25 bp, Homo sapien
tgatttggaggagctctatcgcccc

SEQ ID NO: 2982327 - DNA, 25 bp, Homo sapien
tgaccctgaggaaacgccagcagga

SEQ ID NO: 2982328 - DNA, 25 bp, Homo sapien
cacggagggattcgacgctgagaaa

SEQ ID NO: 2982329 - DNA, 25 bp, Homo sapien
caacatggtcccacggagggattcg

SEQ ID NO: 2982330 - DNA, 25 bp, Homo sapien
tcgacgctgagaaagctactgtgct

SEQ ID NO: 2982331 - DNA, 25 bp, Homo sapien
tgaaatttcattgcaacatggtccc

SEQ ID NO: 2982332 - DNA, 25 bp, Homo sapien
gctggttcaggtgggcgtgtggcga

SEQ ID NO: 2982333 - DNA, 25 bp, Homo sapien
tcatgaccgattcagaggccttgtg

SEQ ID NO: 2982334 - DNA, 25 bp, Homo sapien
gaaccatcggccttgccgttcatga

SEQ ID NO: 2982335 - DNA, 25 bp, Homo sapien
gatatgtacaaaggggttagaacca

SEQ ID NO: 2982336 - DNA, 25 bp, Homo sapien
cgcggcatgtctcccgagctgacgg

SEQ ID NO: 2982337 - DNA, 25 bp, Homo sapien
gacgggagcggccttcctgtgcaca

SEQ ID NO: 2982338 - DNA, 25 bp, Homo sapien
ccaggtgcgcctgggcagggcactg

SEQ ID NO: 2982339 - DNA, 25 bp, Homo sapien
tctctctgtgtaaagtgtgataaga

SEQ ID NO: 2982340 - DNA, 25 bp, Homo sapien
gacttctgtagttcttagatctggg

SEQ ID NO: 2982341 - DNA, 25 bp, Homo sapien
cctggacttctgtagttcttagatc

SEQ ID NO: 2982342 - DNA, 25 bp, Homo sapien
cttctgtagttcttagatctgggct

SEQ ID NO: 2982343 - DNA, 25 bp, Homo sapien
tggacttctgtagttcttagatctg

SEQ ID NO: 2982344 - DNA, 25 bp, Homo sapien
cagacagcaccgtctcctcattggg

SEQ ID NO: 2982345 - DNA, 25 bp, Homo sapien
atctgtgccaggttccggagcctgg

SEQ ID NO: 2982346 - DNA, 25 bp, Homo sapien
ctcctcggcagtgggatacccaggg

SEQ ID NO: 2982347 - DNA, 25 bp, Homo sapien
agggagaagcgaagcatgcactgca

SEQ ID NO: 2982348 - DNA, 25 bp, Homo sapien
tccctgagcgggtgctgatgagccc

SEQ ID NO: 2982349 - DNA, 25 bp, Homo sapien
gggctggtgcctctattccgacgta

SEQ ID NO: 2982350 - DNA, 25 bp, Homo sapien
atgcctgtcctgctgaaagaacccg

SEQ ID NO: 2982351 - DNA, 25 bp, Homo sapien
aagaacccgcctttcagatggctga

SEQ ID NO: 2982352 - DNA, 25 bp, Homo sapien
gagatgaacgacctaccggagtaag

SEQ ID NO: 2982353 - DNA, 25 bp, Homo sapien
tgctgaagtaccaccactgtgtggg

SEQ ID NO: 2982354 - DNA, 25 bp, Homo sapien
taaagtggccagtgtgtacgaagcc

SEQ ID NO: 2982355 - DNA, 25 bp, Homo sapien
ggacactctatgcaaatcagcccgg

SEQ ID NO: 2982356 - DNA, 25 bp, Homo sapien
gagcaggttagactcttctacctcc

SEQ ID NO: 2982357 - DNA, 25 bp, Homo sapien
caactttaaatatgcggggatttct

SEQ ID NO: 2982358 - DNA, 25 bp, Homo sapien
aagacccagagaggagtgggtttct

SEQ ID NO: 2982359 - DNA, 25 bp, Homo sapien
ctaaagatgagcaggttagactctt

SEQ ID NO: 2982360 - DNA, 25 bp, Homo sapien
aaagcctttgctctcacgcagagga

SEQ ID NO: 2982361 - DNA, 25 bp, Homo sapien
gtgaacaatgaagaggcctgcgcct

SEQ ID NO: 2982362 - DNA, 25 bp, Homo sapien
tgggtttaccaagcctcaactggac

SEQ ID NO: 2982363 - DNA, 25 bp, Homo sapien
ggcaatcacactgaagcgggtcttc

SEQ ID NO: 2982364 - DNA, 25 bp, Homo sapien
gacttgcagtgggacctctgggaat

SEQ ID NO: 2982365 - DNA, 25 bp, Homo sapien
taagcaaggcgaattactaccctgt

SEQ ID NO: 2982366 - DNA, 25 bp, Homo sapien
cataaaacaagtggactagaaggct

SEQ ID NO: 2982367 - DNA, 25 bp, Homo sapien
gccgtagagctagagttccctgttc

SEQ ID NO: 2982368 - DNA, 25 bp, Homo sapien
caaggaggttgatctgtaactatga

SEQ ID NO: 2982369 - DNA, 25 bp, Homo sapien
taactatgaacaagataactcacta

SEQ ID NO: 2982370 - DNA, 25 bp, Homo sapien
tgtaactatgaacaagataactcac

SEQ ID NO: 2982371 - DNA, 25 bp, Homo sapien
atctgtaactatgaacaagataact

SEQ ID NO: 2982372 - DNA, 25 bp, Homo sapien
cagctgccttgtgtgatcgatgacc

SEQ ID NO: 2982373 - DNA, 25 bp, Homo sapien
ccaagcccagtagagtaaggtccat

SEQ ID NO: 2982374 - DNA, 25 bp, Homo sapien
tatttgcagagttttgcggcctcca

SEQ ID NO: 2982375 - DNA, 25 bp, Homo sapien
gatgagttccatgctgtttcagctg

SEQ ID NO: 2982376 - DNA, 25 bp, Homo sapien
actaaacagccaatggtatgttttg

SEQ ID NO: 2982377 - DNA, 25 bp, Homo sapien
ttttaactaaacagccaatggtatg

SEQ ID NO: 2982378 - DNA, 25 bp, Homo sapien
catgctcattcagctcttatcttta

SEQ ID NO: 2982379 - DNA, 25 bp, Homo sapien
tagtggcatgctcattcagctctta

SEQ ID NO: 2982380 - DNA, 25 bp, Homo sapien
tggcgtcgacagcaaatcagggaaa

SEQ ID NO: 2982381 - DNA, 25 bp, Homo sapien
gaaccccaggctcctagaagtcgct

SEQ ID NO: 2982382 - DNA, 25 bp, Homo sapien
tggctgcgagacaagactccgcctg

SEQ ID NO: 2982383 - DNA, 25 bp, Homo sapien
agaagtcgctcggacgccaatgctt

SEQ ID NO: 2982384 - DNA, 25 bp, Homo sapien
tgttggctcgccatcgagctcctcc

SEQ ID NO: 2982385 - DNA, 25 bp, Homo sapien
agtgactgttggctcgccatcgagc

SEQ ID NO: 2982386 - DNA, 25 bp, Homo sapien
tgactgttggctcgccatcgagctc

SEQ ID NO: 2982387 - DNA, 25 bp, Homo sapien
ttggctcgccatcgagctcctccat

SEQ ID NO: 2982388 - DNA, 25 bp, Homo sapien
acccgcaaggacgagcaagcctgtt

SEQ ID NO: 2982389 - DNA, 25 bp, Homo sapien
cctgaagtaactaagcagacgcagt

SEQ ID NO: 2982390 - DNA, 25 bp, Homo sapien
taacactgcgacctccggaaaagtg

SEQ ID NO: 2982391 - DNA, 25 bp, Homo sapien
gaccactagggaagcagacaagcct

SEQ ID NO: 2982392 - DNA, 25 bp, Homo sapien
tgcttgggctgaacccactctaatg

SEQ ID NO: 2982393 - DNA, 25 bp, Homo sapien
ttgggctgaacccactctaatgccc

SEQ ID NO: 2982394 - DNA, 25 bp, Homo sapien
gggctgaacccactctaatgcccaa

SEQ ID NO: 2982395 - DNA, 25 bp, Homo sapien
tctgcttgggctgaacccactctaa

SEQ ID NO: 2982396 - DNA, 25 bp, Homo sapien
cgcgtgaattttttttatacacatc

SEQ ID NO: 2982397 - DNA, 25 bp, Homo sapien
gcgcgtgaattttttttatacacat

SEQ ID NO: 2982398 - DNA, 25 bp, Homo sapien
cgtgaattttttttatacacatcac

SEQ ID NO: 2982399 - DNA, 25 bp, Homo sapien
agcgcgtgaattttttttatacaca

SEQ ID NO: 2982400 - DNA, 25 bp, Homo sapien
taataaccataatccctctacctac

SEQ ID NO: 2982401 - DNA, 25 bp, Homo sapien
tgaggctaatcaccgactcacaaga

SEQ ID NO: 2982402 - DNA, 25 bp, Homo sapien
gaatgtaatcatttgcctcctcact

SEQ ID NO: 2982403 - DNA, 25 bp, Homo sapien
tctacctaccctgagatgaatgcat

SEQ ID NO: 2982404 - DNA, 25 bp, Homo sapien
aggaggtttcacataccagcatctc

SEQ ID NO: 2982405 - DNA, 25 bp, Homo sapien
aaagaaagcaaatcaaatgtcaaga

SEQ ID NO: 2982406 - DNA, 25 bp, Homo sapien
aaaaaagaaagcaaatcaaatgtca

SEQ ID NO: 2982407 - DNA, 25 bp, Homo sapien
gcacatgccttcattcccagctact

SEQ ID NO: 2982408 - DNA, 25 bp, Homo sapien
tggtggcacatgccttcattcccag

SEQ ID NO: 2982409 - DNA, 25 bp, Homo sapien
catccttacggatgatatagataaa

SEQ ID NO: 2982410 - DNA, 25 bp, Homo sapien
aactcttcgtcaattctctggaggc

SEQ ID NO: 2982411 - DNA, 25 bp, Homo sapien
tttgagagtaaacatctacatcctt

SEQ ID NO: 2982412 - DNA, 25 bp, Homo sapien
tctggaggcccagaaagattccatg

SEQ ID NO: 2982413 - DNA, 25 bp, Homo sapien
tggtgcatttcctccatacatgctc

SEQ ID NO: 2982414 - DNA, 25 bp, Homo sapien
gatcggtagtttttactcactcgaa

SEQ ID NO: 2982415 - DNA, 25 bp, Homo sapien
catgctctgatgactgatcggtagt

SEQ ID NO: 2982416 - DNA, 25 bp, Homo sapien
tcctccatacatgctctgatgactg

SEQ ID NO: 2982417 - DNA, 25 bp, Homo sapien
ggccattggctggatctttagcagc

SEQ ID NO: 2982418 - DNA, 25 bp, Homo sapien
cggccattggctggatctttagcag

SEQ ID NO: 2982419 - DNA, 25 bp, Homo sapien
gaatctcacacaggttccagatgag

SEQ ID NO: 2982420 - DNA, 25 bp, Homo sapien
gctccattgctgacaaaatggagac

SEQ ID NO: 2982421 - DNA, 25 bp, Homo sapien
ataaaaagaatctcacacaggttcc

SEQ ID NO: 2982422 - DNA, 25 bp, Homo sapien
tccagatgagctccattgctgacaa

SEQ ID NO: 2982423 - DNA, 25 bp, Homo sapien
cacacatggtcctgaatgacagact

SEQ ID NO: 2982424 - DNA, 25 bp, Homo sapien
tctgcagcaagttcctttatccaag

SEQ ID NO: 2982425 - DNA, 25 bp, Homo sapien
gacagactgtgctaggaaaaagcaa

SEQ ID NO: 2982426 - DNA, 25 bp, Homo sapien
caagctgactacataggtttatccc

SEQ ID NO: 2982427 - DNA, 25 bp, Homo sapien
tggagccggacccagtcaaggagat

SEQ ID NO: 2982428 - DNA, 25 bp, Homo sapien
agaacatctgccgacaaactgtcca

SEQ ID NO: 2982429 - DNA, 25 bp, Homo sapien
actgcccagaacatctgccgacaaa

SEQ ID NO: 2982430 - DNA, 25 bp, Homo sapien
aaactgtccacctcgcacacatgga

SEQ ID NO: 2982431 - DNA, 25 bp, Homo sapien
tacatggtacctcggttttagactc

SEQ ID NO: 2982432 - DNA, 25 bp, Homo sapien
tggaaaagtcttcaaagcattattt

SEQ ID NO: 2982433 - DNA, 25 bp, Homo sapien
gcaccagggacagtaggacacatgg

SEQ ID NO: 2982434 - DNA, 25 bp, Homo sapien
gggtgtcctcagacccacccggcag

SEQ ID NO: 2982435 - DNA, 25 bp, Homo sapien
cattagcccagtcaactagcgatct

SEQ ID NO: 2982436 - DNA, 25 bp, Homo sapien
gttttatatcattacccaggcatgg

SEQ ID NO: 2982437 - DNA, 25 bp, Homo sapien
gatgatccaaagtaatgtgcaagct

SEQ ID NO: 2982438 - DNA, 25 bp, Homo sapien
tcccaattgggtcagtcagcagagg

SEQ ID NO: 2982439 - DNA, 25 bp, Homo sapien
ctgagcttaggcggtcaaggctgca

SEQ ID NO: 2982440 - DNA, 25 bp, Homo sapien
cagtgagctgtaatctgaccactgc

SEQ ID NO: 2982441 - DNA, 25 bp, Homo sapien
gcactccaacatgggcaacagagac

SEQ ID NO: 2982442 - DNA, 25 bp, Homo sapien
ctgcactccaacatgggcaacagag

SEQ ID NO: 2982443 - DNA, 25 bp, Homo sapien
cattcagacacgaattatagtgctg

SEQ ID NO: 2982444 - DNA, 25 bp, Homo sapien
actgaagtgctttctagtgttgcta

SEQ ID NO: 2982445 - DNA, 25 bp, Homo sapien
tgctaagtgcaagaactatgggagg

SEQ ID NO: 2982446 - DNA, 25 bp, Homo sapien
gaactatgggaggtgttagataagc

SEQ ID NO: 2982447 - DNA, 25 bp, Homo sapien
gctggcatcggcttccttggagagc

SEQ ID NO: 2982448 - DNA, 25 bp, Homo sapien
ttgtcctcatcaggtcccccatgat

SEQ ID NO: 2982449 - DNA, 25 bp, Homo sapien
gcatcggcttccttggagagcatct

SEQ ID NO: 2982450 - DNA, 25 bp, Homo sapien
catgattcggcatatgcctgcagag

SEQ ID NO: 2982451 - DNA, 25 bp, Homo sapien
ctggtggcgaatgtgctgtcctgga

SEQ ID NO: 2982452 - DNA, 25 bp, Homo sapien
ggtgagggctggtggcgaatgtgct

SEQ ID NO: 2982453 - DNA, 25 bp, Homo sapien
attcctcgtgccagtgctgccactt

SEQ ID NO: 2982454 - DNA, 25 bp, Homo sapien
gctcacattcctcgtgccagtgctg

SEQ ID NO: 2982455 - DNA, 25 bp, Homo sapien
gatgcaatctgaactgcttcccaga

SEQ ID NO: 2982456 - DNA, 25 bp, Homo sapien
tagtctgaaagctctcgccatcacg

SEQ ID NO: 2982457 - DNA, 25 bp, Homo sapien
taagggcaccggatttcaactagtc

SEQ ID NO: 2982458 - DNA, 25 bp, Homo sapien
gacagccctatccaaggaggaccaa

SEQ ID NO: 2982459 - DNA, 25 bp, Homo sapien
gcatagtagtgcagatcaatgggtt

SEQ ID NO: 2982460 - DNA, 25 bp, Homo sapien
gccgagtcactaggaaatgatacca

SEQ ID NO: 2982461 - DNA, 25 bp, Homo sapien
caattactcagaagttccttctgct

SEQ ID NO: 2982462 - DNA, 25 bp, Homo sapien
gattggagtacaagagccgagtcac

SEQ ID NO: 2982463 - DNA, 25 bp, Homo sapien
atggatgtcaaactcaaaggctgcc

SEQ ID NO: 2982464 - DNA, 25 bp, Homo sapien
tggatgtcaaactcaaaggctgcca

SEQ ID NO: 2982465 - DNA, 25 bp, Homo sapien
gatggatgtcaaactcaaaggctgc

SEQ ID NO: 2982466 - DNA, 25 bp, Homo sapien
ctcaactatgggcagagacaccaac

SEQ ID NO: 2982467 - DNA, 25 bp, Homo sapien
taacacaggaaatttagaatactca

SEQ ID NO: 2982468 - DNA, 25 bp, Homo sapien
ccaacaaagccaaacgatggtgtgt

SEQ ID NO: 2982469 - DNA, 25 bp, Homo sapien
ccagatacagggcttataaattagg

SEQ ID NO: 2982470 - DNA, 25 bp, Homo sapien
atgctttccccttttatactccctg

SEQ ID NO: 2982471 - DNA, 25 bp, Homo sapien
catccaacagacttcttctgctcaa

SEQ ID NO: 2982472 - DNA, 25 bp, Homo sapien
ccctgcatccaacagacttcttctg

SEQ ID NO: 2982473 - DNA, 25 bp, Homo sapien
ccaacagacttcttctgctcaaatc

SEQ ID NO: 2982474 - DNA, 25 bp, Homo sapien
ctgagactgggggactgcaagccta

SEQ ID NO: 2982475 - DNA, 25 bp, Homo sapien
tccttgtctgtgtccggcacgagag

SEQ ID NO: 2982476 - DNA, 25 bp, Homo sapien
tgcaagcctaatcattccttgtctg

SEQ ID NO: 2982477 - DNA, 25 bp, Homo sapien
ccggcacgagagtgatgttgttcac

SEQ ID NO: 2982478 - DNA, 25 bp, Homo sapien
gggttagcagtcaagcatgcccacc

SEQ ID NO: 2982479 - DNA, 25 bp, Homo sapien
ggtagcctcgtgatcagagaaatgc

SEQ ID NO: 2982480 - DNA, 25 bp, Homo sapien
tgcatgggtctgactgatacatccc

SEQ ID NO: 2982481 - DNA, 25 bp, Homo sapien
cctttagcagggctgacgaactaca

SEQ ID NO: 2982482 - DNA, 25 bp, Homo sapien
ggaactggcccgtcttcagaggaag

SEQ ID NO: 2982483 - DNA, 25 bp, Homo sapien
tttagctcgatacttttggaggact

SEQ ID NO: 2982484 - DNA, 25 bp, Homo sapien
aggaaactgccgacatcttgcccaa

SEQ ID NO: 2982485 - DNA, 25 bp, Homo sapien
tcttgccagacagcaaggaactggc

SEQ ID NO: 2982486 - DNA, 25 bp, Homo sapien
tctagctgatggttatgtcgaaacc

SEQ ID NO: 2982487 - DNA, 25 bp, Homo sapien
aaagccttagcctgcacgaaagcca

SEQ ID NO: 2982488 - DNA, 25 bp, Homo sapien
aaaccattggagaagccagtgaaaa

SEQ ID NO: 2982489 - DNA, 25 bp, Homo sapien
tactactttgttaatcacacctcaa

SEQ ID NO: 2982490 - DNA, 25 bp, Homo sapien
agaaggaaaatcagggcacaggccg

SEQ ID NO: 2982491 - DNA, 25 bp, Homo sapien
atcaaaacatgttgttggccgggcg

SEQ ID NO: 2982492 - DNA, 25 bp, Homo sapien
cgtgatgatagctcatgcccgtgat

SEQ ID NO: 2982493 - DNA, 25 bp, Homo sapien
ttgggtgagagagcacaaccatatc

SEQ ID NO: 2982494 - DNA, 25 bp, Homo sapien
ggttgtgtgactggaggagcttgca

SEQ ID NO: 2982495 - DNA, 25 bp, Homo sapien
gtgggccacaaaccaccagttgctc

SEQ ID NO: 2982496 - DNA, 25 bp, Homo sapien
aggtgggccacaaaccaccagttgc

SEQ ID NO: 2982497 - DNA, 25 bp, Homo sapien
ttgtgtgactggaggagcttgcagt

SEQ ID NO: 2982498 - DNA, 25 bp, Homo sapien
gaggaactctctcatgttggaaccg

SEQ ID NO: 2982499 - DNA, 25 bp, Homo sapien
cccgaggcgtactccagcaggagga

SEQ ID NO: 2982500 - DNA, 25 bp, Homo sapien
ggatgagcaaacagtcccgaggcgt

SEQ ID NO: 2982501 - DNA, 25 bp, Homo sapien
gcaggaggaactctctcatgttgga

SEQ ID NO: 2982502 - DNA, 25 bp, Homo sapien
tccagggagactcggcccagctcgg

SEQ ID NO: 2982503 - DNA, 25 bp, Homo sapien
tctgctcggtgttcagaggtatccg

SEQ ID NO: 2982504 - DNA, 25 bp, Homo sapien
ggcagtaatcaaagtaatcgacccc

SEQ ID NO: 2982505 - DNA, 25 bp, Homo sapien
gtatccgctcaatgtgcagctccag

SEQ ID NO: 2982506 - DNA, 25 bp, Homo sapien
aggcataaagtgtgacctcaggatc

SEQ ID NO: 2982507 - DNA, 25 bp, Homo sapien
cccacagacagtaggctgggagcag

SEQ ID NO: 2982508 - DNA, 25 bp, Homo sapien
gggtaggcataaagtgtgacctcag

SEQ ID NO: 2982509 - DNA, 25 bp, Homo sapien
ctccagtgtggctcgtgaggaggag

SEQ ID NO: 2982510 - DNA, 25 bp, Homo sapien
tgttgcggacggctttcatggctaa

SEQ ID NO: 2982511 - DNA, 25 bp, Homo sapien
caaaggcggcatccttagcacggat

SEQ ID NO: 2982512 - DNA, 25 bp, Homo sapien
tgtctgacacgagcgtggcaaaggc

SEQ ID NO: 2982513 - DNA, 25 bp, Homo sapien
cagaacccaggcgattgttgcggac

SEQ ID NO: 2982514 - DNA, 25 bp, Homo sapien
tgggaagccaacactagcggcaccc

SEQ ID NO: 2982515 - DNA, 25 bp, Homo sapien
cagtctcaggcccacctcaaccacc

SEQ ID NO: 2982516 - DNA, 25 bp, Homo sapien
ggaagccaacactagcggcacccac

SEQ ID NO: 2982517 - DNA, 25 bp, Homo sapien
gggaagccaacactagcggcaccca

SEQ ID NO: 2982518 - DNA, 25 bp, Homo sapien
gaatgtcagtcggtcactgagcatc

SEQ ID NO: 2982519 - DNA, 25 bp, Homo sapien
gtcaatgagatccaaatcagaaaag

SEQ ID NO: 2982520 - DNA, 25 bp, Homo sapien
tgtcagtcggtcactgagcatcatg

SEQ ID NO: 2982521 - DNA, 25 bp, Homo sapien
caggaatgtcagtcggtcactgagc

SEQ ID NO: 2982522 - DNA, 25 bp, Homo sapien
gcaaggcgtctgtcagcagagtcat

SEQ ID NO: 2982523 - DNA, 25 bp, Homo sapien
cgtacatacggtggaactcgcgata

SEQ ID NO: 2982524 - DNA, 25 bp, Homo sapien
tccgagacgtcatcaaggacagaag

SEQ ID NO: 2982525 - DNA, 25 bp, Homo sapien
gagagaagctgcgtcggcaaaacgc

SEQ ID NO: 2982526 - DNA, 25 bp, Homo sapien
aaaggaggaaacacgcacatcggca

SEQ ID NO: 2982527 - DNA, 25 bp, Homo sapien
caactaagctctagcagggactgac

SEQ ID NO: 2982528 - DNA, 25 bp, Homo sapien
cgcacaggcagaacgacaaaggagg

SEQ ID NO: 2982529 - DNA, 25 bp, Homo sapien
tttcatacccttcgcaatagtgtgc

SEQ ID NO: 2982530 - DNA, 25 bp, Homo sapien
tggagctgctcggtatcagattctc

SEQ ID NO: 2982531 - DNA, 25 bp, Homo sapien
caggtcttcttgacgtcaagtcctc

SEQ ID NO: 2982532 - DNA, 25 bp, Homo sapien
cctccagacaccgcatcaactcata

SEQ ID NO: 2982533 - DNA, 25 bp, Homo sapien
cagattctccatgcacaggtcttct

SEQ ID NO: 2982534 - DNA, 25 bp, Homo sapien
ctccatgtggaaccatcaacccaaa

SEQ ID NO: 2982535 - DNA, 25 bp, Homo sapien
tggaaccatcaacccaaaagtgaaa

SEQ ID NO: 2982536 - DNA, 25 bp, Homo sapien
tgtggaaccatcaacccaaaagtga

SEQ ID NO: 2982537 - DNA, 25 bp, Homo sapien
ccatcaacccaaaagtgaaaatgac

SEQ ID NO: 2982538 - DNA, 25 bp, Homo sapien
gagagcgccagcatgagctaagagc

SEQ ID NO: 2982539 - DNA, 25 bp, Homo sapien
gaaggagccctttcacactcccgaa

SEQ ID NO: 2982540 - DNA, 25 bp, Homo sapien
gaaagcaataccaaagggccatact

SEQ ID NO: 2982541 - DNA, 25 bp, Homo sapien
tcccgaagggtctagctaatccaaa

SEQ ID NO: 2982542 - DNA, 25 bp, Homo sapien
tcaggaaccttccagtgagccttct

SEQ ID NO: 2982543 - DNA, 25 bp, Homo sapien
ccttggtggtctctatgtcatcatc

SEQ ID NO: 2982544 - DNA, 25 bp, Homo sapien
gcaagatttcgtgccagagaaagtc

SEQ ID NO: 2982545 - DNA, 25 bp, Homo sapien
tctcttataattgcccgagcaagat

SEQ ID NO: 2982546 - DNA, 25 bp, Homo sapien
gccatacaaagataccacattgaag

SEQ ID NO: 2982547 - DNA, 25 bp, Homo sapien
tatacattgccatacaaagatacca

SEQ ID NO: 2982548 - DNA, 25 bp, Homo sapien
caaagataccacattgaagcagttc

SEQ ID NO: 2982549 - DNA, 25 bp, Homo sapien
tacattgccatacaaagataccaca

SEQ ID NO: 2982550 - DNA, 25 bp, Homo sapien
caggttcagactagacagataaaaa

SEQ ID NO: 2982551 - DNA, 25 bp, Homo sapien
tcaggttcagactagacagataaaa

SEQ ID NO: 2982552 - DNA, 25 bp, Homo sapien
actagacagataaaaaattccctgg

SEQ ID NO: 2982553 - DNA, 25 bp, Homo sapien
cagactagacagataaaaaattccc

SEQ ID NO: 2982554 - DNA, 25 bp, Homo sapien
tccctgtatccgtcgcagtctggcg

SEQ ID NO: 2982555 - DNA, 25 bp, Homo sapien
tctgcgtttctctccactgatctgg

SEQ ID NO: 2982556 - DNA, 25 bp, Homo sapien
gactcctcagggtcctaaatctgcg

SEQ ID NO: 2982557 - DNA, 25 bp, Homo sapien
gatctggacgttagagtttttcact

SEQ ID NO: 2982558 - DNA, 25 bp, Homo sapien
tgcaagacagcccgccgcacgccca

SEQ ID NO: 2982559 - DNA, 25 bp, Homo sapien
cacgcccaacgccaggcccgaccat

SEQ ID NO: 2982560 - DNA, 25 bp, Homo sapien
ccaggcccgaccatcctcgggcaac

SEQ ID NO: 2982561 - DNA, 25 bp, Homo sapien
atcctcgggcaaccttcactgcggg

SEQ ID NO: 2982562 - DNA, 25 bp, Homo sapien
cctcctggtcaagtgctaacggtaa

SEQ ID NO: 2982563 - DNA, 25 bp, Homo sapien
gaagcttgaatccagatactccggc

SEQ ID NO: 2982564 - DNA, 25 bp, Homo sapien
caagcaggcgggtaaagtctcctcc

SEQ ID NO: 2982565 - DNA, 25 bp, Homo sapien
taaaccttcggattggcgcagggtc

SEQ ID NO: 2982566 - DNA, 25 bp, Homo sapien
caaaagctgactccacaagcgagta

SEQ ID NO: 2982567 - DNA, 25 bp, Homo sapien
ggcaggcaaaagctgactccacaag

SEQ ID NO: 2982568 - DNA, 25 bp, Homo sapien
gaggaggcaggcaaaagctgactcc

SEQ ID NO: 2982569 - DNA, 25 bp, Homo sapien
ggcaaaagctgactccacaagcgag

SEQ ID NO: 2982570 - DNA, 25 bp, Homo sapien
tagctcctccactggcttgcgataa

SEQ ID NO: 2982571 - DNA, 25 bp, Homo sapien
caatcaagggatccttgaattcagg

SEQ ID NO: 2982572 - DNA, 25 bp, Homo sapien
ggactatagcggctccatctcacct

SEQ ID NO: 2982573 - DNA, 25 bp, Homo sapien
tcttgagctcccgaacatatttctc

SEQ ID NO: 2982574 - DNA, 25 bp, Homo sapien
tgggatagtcccagtccatgtaaca

SEQ ID NO: 2982575 - DNA, 25 bp, Homo sapien
aatcctcaccagaaaccctccctgg

SEQ ID NO: 2982576 - DNA, 25 bp, Homo sapien
gaaaagcaacacgtttagctctcca

SEQ ID NO: 2982577 - DNA, 25 bp, Homo sapien
cccagtccatgtaacaagtgtttgt

SEQ ID NO: 2982578 - DNA, 25 bp, Homo sapien
cctatcatcatcatgttggtgaatt

SEQ ID NO: 2982579 - DNA, 25 bp, Homo sapien
tgaatcatgagggatctggccagta

SEQ ID NO: 2982580 - DNA, 25 bp, Homo sapien
gccagtactttgtttcctcctatca

SEQ ID NO: 2982581 - DNA, 25 bp, Homo sapien
cagtactttgtttcctcctatcatc

SEQ ID NO: 2982582 - DNA, 25 bp, Homo sapien
tcctctggttctgcgctggcaatgc

SEQ ID NO: 2982583 - DNA, 25 bp, Homo sapien
cattaaagcccgtacacatgcaggg

SEQ ID NO: 2982584 - DNA, 25 bp, Homo sapien
gctagactaggacagaaagagtgga

SEQ ID NO: 2982585 - DNA, 25 bp, Homo sapien
tacttccgaaacaccaaggaatggc

SEQ ID NO: 2982586 - DNA, 25 bp, Homo sapien
gcttccttttcacagcttccagagt

SEQ ID NO: 2982587 - DNA, 25 bp, Homo sapien
acttctcaaactgcttccttttcac

SEQ ID NO: 2982588 - DNA, 25 bp, Homo sapien
gtacttctcaaactgcttccttttc

SEQ ID NO: 2982589 - DNA, 25 bp, Homo sapien
tctcaaactgcttccttttcacagc

SEQ ID NO: 2982590 - DNA, 25 bp, Homo sapien
gttgcgttcgatggttgcctgttcc

SEQ ID NO: 2982591 - DNA, 25 bp, Homo sapien
gggttgcgttcgatggttgcctgtt

SEQ ID NO: 2982592 - DNA, 25 bp, Homo sapien
gtaggggttgcgttcgatggttgcc

SEQ ID NO: 2982593 - DNA, 25 bp, Homo sapien
tgcgttcgatggttgcctgttcctc

SEQ ID NO: 2982594 - DNA, 25 bp, Homo sapien
ggtaccagcccaatcataggctcac

SEQ ID NO: 2982595 - DNA, 25 bp, Homo sapien
tcccttgaggatgggtaccagccca

SEQ ID NO: 2982596 - DNA, 25 bp, Homo sapien
ccttgaggatgggtaccagcccaat

SEQ ID NO: 2982597 - DNA, 25 bp, Homo sapien
agcccaatcataggctcacagtttt

SEQ ID NO: 2982598 - DNA, 25 bp, Homo sapien
agcaccacctatcttgtttcacatg

SEQ ID NO: 2982599 - DNA, 25 bp, Homo sapien
cccactgcaccagctagaaagctat

SEQ ID NO: 2982600 - DNA, 25 bp, Homo sapien
caagctatcctgcattaggctccca

SEQ ID NO: 2982601 - DNA, 25 bp, Homo sapien
gaaagctatcaatcttgacccaact

SEQ ID NO: 2982602 - DNA, 25 bp, Homo sapien
tccggcatcagtgtccgctggtgct

SEQ ID NO: 2982603 - DNA, 25 bp, Homo sapien
cttgtgtgacagcttctccggcatc

SEQ ID NO: 2982604 - DNA, 25 bp, Homo sapien
tttatcccggcactcagtgatcatc

SEQ ID NO: 2982605 - DNA, 25 bp, Homo sapien
gggccctggttatggaaagcctcca

SEQ ID NO: 2982606 - DNA, 25 bp, Homo sapien
gcctctgccatcttgtgcaagtcat

SEQ ID NO: 2982607 - DNA, 25 bp, Homo sapien
ctctgccatcttgtgcaagtcatgc

SEQ ID NO: 2982608 - DNA, 25 bp, Homo sapien
cctctgccatcttgtgcaagtcatg

SEQ ID NO: 2982609 - DNA, 25 bp, Homo sapien
gagggccctgggctcctcctggaga

SEQ ID NO: 2982610 - DNA, 25 bp, Homo sapien
gggccctgggctcctcctggagact

SEQ ID NO: 2982611 - DNA, 25 bp, Homo sapien
cagagggccctgggctcctcctgga

SEQ ID NO: 2982612 - DNA, 25 bp, Homo sapien
actgtttcttgcggcagagggccct

SEQ ID NO: 2982613 - DNA, 25 bp, Homo sapien
gaaattcccaagtcaatgtgctccc

SEQ ID NO: 2982614 - DNA, 25 bp, Homo sapien
cagagagagcaagttccagcctcaa

SEQ ID NO: 2982615 - DNA, 25 bp, Homo sapien
agttttcagcgtggcagtagctcac

SEQ ID NO: 2982616 - DNA, 25 bp, Homo sapien
aaaacagccctgagtttcctggagg

SEQ ID NO: 2982617 - DNA, 25 bp, Homo sapien
taaaatgggtaagcatagccactgg

SEQ ID NO: 2982618 - DNA, 25 bp, Homo sapien
tggaggcagagcacaagtcacacca

SEQ ID NO: 2982619 - DNA, 25 bp, Homo sapien
ttatatatccaaaggtccgccccaa

SEQ ID NO: 2982620 - DNA, 25 bp, Homo sapien
catgctacaccagttcagcgtgaga

SEQ ID NO: 2982621 - DNA, 25 bp, Homo sapien
caggtacggagatacaagggcctca

SEQ ID NO: 2982622 - DNA, 25 bp, Homo sapien
caaatggtgcagtgccttaaacggc

SEQ ID NO: 2982623 - DNA, 25 bp, Homo sapien
taggccctttgcaggagtcaggtcc

SEQ ID NO: 2982624 - DNA, 25 bp, Homo sapien
caggacgtggtctatggtgagccaa

SEQ ID NO: 2982625 - DNA, 25 bp, Homo sapien
tagtgatggtatctccctcctcagg

SEQ ID NO: 2982626 - DNA, 25 bp, Homo sapien
cctcctcagggatccgggattcctg

SEQ ID NO: 2982627 - DNA, 25 bp, Homo sapien
tgtgatcagcagtttggtcacagat

SEQ ID NO: 2982628 - DNA, 25 bp, Homo sapien
gcagtttggtcacagatttcttagt

SEQ ID NO: 2982629 - DNA, 25 bp, Homo sapien
catcagtgcatgacgtttaaggcca

SEQ ID NO: 2982630 - DNA, 25 bp, Homo sapien
tttcagtcccaaagcggccgatggg

SEQ ID NO: 2982631 - DNA, 25 bp, Homo sapien
tccgactccagatatgaacagggcc

SEQ ID NO: 2982632 - DNA, 25 bp, Homo sapien
gcctgtgagggagtgcagaacacct

SEQ ID NO: 2982633 - DNA, 25 bp, Homo sapien
cttcttagagaaagtccagtgaatt

SEQ ID NO: 2982634 - DNA, 25 bp, Homo sapien
tagagaaagtccagtgaattttagg

SEQ ID NO: 2982635 - DNA, 25 bp, Homo sapien
cagtgaattttaggaaagttgacca

SEQ ID NO: 2982636 - DNA, 25 bp, Homo sapien
agtccagtgaattttaggaaagttg

SEQ ID NO: 2982637 - DNA, 25 bp, Homo sapien
atgcaaagaaaggctaaagcaaagg

SEQ ID NO: 2982638 - DNA, 25 bp, Homo sapien
tgcaaagaaaggctaaagcaaaggc

SEQ ID NO: 2982639 - DNA, 25 bp, Homo sapien
gaacacctgacacacttaaattgag

SEQ ID NO: 2982640 - DNA, 25 bp, Homo sapien
tctgagtcctggtagagaacacctg

SEQ ID NO: 2982641 - DNA, 25 bp, Homo sapien
actcaggctaagtcttggttgcgca

SEQ ID NO: 2982642 - DNA, 25 bp, Homo sapien
gactatttgcaaggtgttgactcca

SEQ ID NO: 2982643 - DNA, 25 bp, Homo sapien
cctgttcctacagaagtacagaggg

SEQ ID NO: 2982644 - DNA, 25 bp, Homo sapien
ttcactttgagaagcctatgatatg

SEQ ID NO: 2982645 - DNA, 25 bp, Homo sapien
ttgatgtctcatcctgtgtggtcct

SEQ ID NO: 2982646 - DNA, 25 bp, Homo sapien
tacagagggaatcttttgagaggga

SEQ ID NO: 2982647 - DNA, 25 bp, Homo sapien
gacaccctgattctactaaagtaca

SEQ ID NO: 2982648 - DNA, 25 bp, Homo sapien
gccactgtactccacactccaacct

SEQ ID NO: 2982649 - DNA, 25 bp, Homo sapien
ccgggcatggcagcgtgcgtctgta

SEQ ID NO: 2982650 - DNA, 25 bp, Homo sapien
ctgtactccacactccaacctaggc

SEQ ID NO: 2982651 - DNA, 25 bp, Homo sapien
tagtttcgagaagagtgcagcagct

SEQ ID NO: 2982652 - DNA, 25 bp, Homo sapien
caggcctgtttaaccgagaagagac

SEQ ID NO: 2982653 - DNA, 25 bp, Homo sapien
gagcagatcatggtttagtttcgag

SEQ ID NO: 2982654 - DNA, 25 bp, Homo sapien
gggaagccagcattctcagaagacc

SEQ ID NO: 2982655 - DNA, 25 bp, Homo sapien
ggttgtgtcctatattcatggctgg

SEQ ID NO: 2982656 - DNA, 25 bp, Homo sapien
tcatggctggagacgcttcactaca

SEQ ID NO: 2982657 - DNA, 25 bp, Homo sapien
gccagttcctcatcgtctgatacag

SEQ ID NO: 2982658 - DNA, 25 bp, Homo sapien
acaccgttcattgtactactgccag

SEQ ID NO: 2982659 - DNA, 25 bp, Homo sapien
ggggcggagccgtgcggaggccacc

SEQ ID NO: 2982660 - DNA, 25 bp, Homo sapien
ccgctctggcaccgagagggttacg

SEQ ID NO: 2982661 - DNA, 25 bp, Homo sapien
gctctggcaccgagagggttacggc

SEQ ID NO: 2982662 - DNA, 25 bp, Homo sapien
ctggcaccgagagggttacggcgac

SEQ ID NO: 2982663 - DNA, 25 bp, Homo sapien
ggaacataaaaatctctgattgtga

SEQ ID NO: 2982664 - DNA, 25 bp, Homo sapien
cataaaaatctctgattgtgatcaa

SEQ ID NO: 2982665 - DNA, 25 bp, Homo sapien
tctgattgtgatcaactagctgtaa

SEQ ID NO: 2982666 - DNA, 25 bp, Homo sapien
aaatctctgattgtgatcaactagc

SEQ ID NO: 2982667 - DNA, 25 bp, Homo sapien
cgatctttgatattccctgtactgg

SEQ ID NO: 2982668 - DNA, 25 bp, Homo sapien
tagccttagtctatgctcacagaca

SEQ ID NO: 2982669 - DNA, 25 bp, Homo sapien
ggaataatgaaatcagtagccttag

SEQ ID NO: 2982670 - DNA, 25 bp, Homo sapien
tcttccgtgtgctgcaaagcagcca

SEQ ID NO: 2982671 - DNA, 25 bp, Homo sapien
tggcaactctaagggggcttgcctc

SEQ ID NO: 2982672 - DNA, 25 bp, Homo sapien
gcagccatgtccgttactggcaact

SEQ ID NO: 2982673 - DNA, 25 bp, Homo sapien
atgtccgttactggcaactctaagg

SEQ ID NO: 2982674 - DNA, 25 bp, Homo sapien
gccatgtccgttactggcaactcta

SEQ ID NO: 2982675 - DNA, 25 bp, Homo sapien
ggggctggtcttcctcgcccgcgtc

SEQ ID NO: 2982676 - DNA, 25 bp, Homo sapien
gctggtcttcctcgcccgcgtcctc

SEQ ID NO: 2982677 - DNA, 25 bp, Homo sapien
gggctggtcttcctcgcccgcgtcc

SEQ ID NO: 2982678 - DNA, 25 bp, Homo sapien
ccggggctggtcttcctcgcccgcg

SEQ ID NO: 2982679 - DNA, 25 bp, Homo sapien
ctgccaacgctgcaaaggcaaaatc

SEQ ID NO: 2982680 - DNA, 25 bp, Homo sapien
caaaggcaaaatcactctgtggcca

SEQ ID NO: 2982681 - DNA, 25 bp, Homo sapien
cactctgtggccagctggaaccaca

SEQ ID NO: 2982682 - DNA, 25 bp, Homo sapien
gctgcaaaggcaaaatcactctgtg

SEQ ID NO: 2982683 - DNA, 25 bp, Homo sapien
gaagtggccttgcaatgcagtgaca

SEQ ID NO: 2982684 - DNA, 25 bp, Homo sapien
tcaaagctgagccagcctcgaaggc

SEQ ID NO: 2982685 - DNA, 25 bp, Homo sapien
aggctgagcaaccacgtctcttcca

SEQ ID NO: 2982686 - DNA, 25 bp, Homo sapien
gaaggctcagatacagacagtgacg

SEQ ID NO: 2982687 - DNA, 25 bp, Homo sapien
ctaagacagctcttttgggggccag

SEQ ID NO: 2982688 - DNA, 25 bp, Homo sapien
ccaggagcaagccttgtcaaggggt

SEQ ID NO: 2982689 - DNA, 25 bp, Homo sapien
gactaagacagctcttttgggggcc

SEQ ID NO: 2982690 - DNA, 25 bp, Homo sapien
ctactgactaagacagctcttttgg

SEQ ID NO: 2982691 - DNA, 25 bp, Homo sapien
gtgcccagcctcaaccttcattttc

SEQ ID NO: 2982692 - DNA, 25 bp, Homo sapien
cagcctcttaaaagttctgggacta

SEQ ID NO: 2982693 - DNA, 25 bp, Homo sapien
aattttgtgtggagaaggggtcttg

SEQ ID NO: 2982694 - DNA, 25 bp, Homo sapien
gactacaggctacaggcgtgaatca

SEQ ID NO: 2982695 - DNA, 25 bp, Homo sapien
aggcatgcccagatgaatgtggtca

SEQ ID NO: 2982696 - DNA, 25 bp, Homo sapien
ccagcatgtacaaaccccagtgagt

SEQ ID NO: 2982697 - DNA, 25 bp, Homo sapien
ggccaagagtactgcaggcatgccc

SEQ ID NO: 2982698 - DNA, 25 bp, Homo sapien
gatgaatgtggtcacccctgaaagg

SEQ ID NO: 2982699 - DNA, 25 bp, Homo sapien
gaagaccaatcttatggctggccca

SEQ ID NO: 2982700 - DNA, 25 bp, Homo sapien
gatagtatacatggaggctgggcca

SEQ ID NO: 2982701 - DNA, 25 bp, Homo sapien
tggctgctcaccaccggctgattag

SEQ ID NO: 2982702 - DNA, 25 bp, Homo sapien
gggcgctcttctctaaccacaggga

SEQ ID NO: 2982703 - DNA, 25 bp, Homo sapien
gagaaagtttgtccaacgcgctgcc

SEQ ID NO: 2982704 - DNA, 25 bp, Homo sapien
tctgagccacaagcagtcagctgca

SEQ ID NO: 2982705 - DNA, 25 bp, Homo sapien
caagaagccgggtgctgcacagaat

SEQ ID NO: 2982706 - DNA, 25 bp, Homo sapien
ttctagtcacgctgcagattcaggg

SEQ ID NO: 2982707 - DNA, 25 bp, Homo sapien
ctaacccgaagactcccacacaaag

SEQ ID NO: 2982708 - DNA, 25 bp, Homo sapien
aagcagcctcccattttgcattgtc

SEQ ID NO: 2982709 - DNA, 25 bp, Homo sapien
ttcccaggtcccagctacccatgct

SEQ ID NO: 2982710 - DNA, 25 bp, Homo sapien
gagaagcgtaaaagccctgccagca

SEQ ID NO: 2982711 - DNA, 25 bp, Homo sapien
ggaccacctgcgaagcatccatgtg

SEQ ID NO: 2982712 - DNA, 25 bp, Homo sapien
gagaagtgagtctttccaggaccac

SEQ ID NO: 2982713 - DNA, 25 bp, Homo sapien
agccccatgaaaggcagcgcctgaa

SEQ ID NO: 2982714 - DNA, 25 bp, Homo sapien
agaggagtgaatccctagacctcag

SEQ ID NO: 2982715 - DNA, 25 bp, Homo sapien
tggagagagggaaactaacatagag

SEQ ID NO: 2982716 - DNA, 25 bp, Homo sapien
ggaaactaacatagagatgctatct

SEQ ID NO: 2982717 - DNA, 25 bp, Homo sapien
agagatgctatcttttggccaggcg

SEQ ID NO: 2982718 - DNA, 25 bp, Homo sapien
gagatgctatcttttggccaggcgt

SEQ ID NO: 2982719 - DNA, 25 bp, Homo sapien
ttcttccgctccctgagatgtcctt

SEQ ID NO: 2982720 - DNA, 25 bp, Homo sapien
cttccgctccctgagatgtccttcc

SEQ ID NO: 2982721 - DNA, 25 bp, Homo sapien
cgctccctgagatgtccttccagca

SEQ ID NO: 2982722 - DNA, 25 bp, Homo sapien
tccgctccctgagatgtccttccag

SEQ ID NO: 2982723 - DNA, 25 bp, Homo sapien
cacggccagtagcatgagtgaggcc

SEQ ID NO: 2982724 - DNA, 25 bp, Homo sapien
cagcacggccagtagcatgagtgag

SEQ ID NO: 2982725 - DNA, 25 bp, Homo sapien
agcagcggttactgtggtggaggaa

SEQ ID NO: 2982726 - DNA, 25 bp, Homo sapien
gtggaagcaggagcagcggttactg

SEQ ID NO: 2982727 - DNA, 25 bp, Homo sapien
gatttggtcaatgatccctcgcagc

SEQ ID NO: 2982728 - DNA, 25 bp, Homo sapien
gcacaaggttgagaagcagtaacag

SEQ ID NO: 2982729 - DNA, 25 bp, Homo sapien
gcagtaacaggaacaaggccgaggc

SEQ ID NO: 2982730 - DNA, 25 bp, Homo sapien
ttcagccggtcttgccgcccgatga

SEQ ID NO: 2982731 - DNA, 25 bp, Homo sapien
tggccaggcctcaaagctatgatgt

SEQ ID NO: 2982732 - DNA, 25 bp, Homo sapien
ctctgtaggcccagtgcaaggacca

SEQ ID NO: 2982733 - DNA, 25 bp, Homo sapien
accaggatggcgcaaaaggcatgtg

SEQ ID NO: 2982734 - DNA, 25 bp, Homo sapien
gatacatggcactgggccactggat

SEQ ID NO: 2982735 - DNA, 25 bp, Homo sapien
tcccggctccaggacgatgtgctcg

SEQ ID NO: 2982736 - DNA, 25 bp, Homo sapien
ctgatgttgtcaatcacaggggtct

SEQ ID NO: 2982737 - DNA, 25 bp, Homo sapien
ttgtcaatcacaggggtctcaagga

SEQ ID NO: 2982738 - DNA, 25 bp, Homo sapien
ctctccacttctccccggggtgagg

SEQ ID NO: 2982739 - DNA, 25 bp, Homo sapien
tgtagcatcaccgactgcactgtga

SEQ ID NO: 2982740 - DNA, 25 bp, Homo sapien
cactgtgaaccgctcattgtccagg

SEQ ID NO: 2982741 - DNA, 25 bp, Homo sapien
caggaccacgggcacagcatagtgt

SEQ ID NO: 2982742 - DNA, 25 bp, Homo sapien
actggtcgggacagggccatgtcca

SEQ ID NO: 2982743 - DNA, 25 bp, Homo sapien
cggggcactgaagatgaagcgcagg

SEQ ID NO: 2982744 - DNA, 25 bp, Homo sapien
ggcactgaagatgaagcgcagggca

SEQ ID NO: 2982745 - DNA, 25 bp, Homo sapien
cccggggcactgaagatgaagcgca

SEQ ID NO: 2982746 - DNA, 25 bp, Homo sapien
ccccggggcactgaagatgaagcgc

SEQ ID NO: 2982747 - DNA, 25 bp, Homo sapien
tggccccacggccattccctgggca

SEQ ID NO: 2982748 - DNA, 25 bp, Homo sapien
agcggaccacacagatggctcctga

SEQ ID NO: 2982749 - DNA, 25 bp, Homo sapien
gaaggagcggaccacacagatggct

SEQ ID NO: 2982750 - DNA, 25 bp, Homo sapien
ggagcggaccacacagatggctcct

SEQ ID NO: 2982751 - DNA, 25 bp, Homo sapien
gcggaccacacagatggctcctgag

SEQ ID NO: 2982752 - DNA, 25 bp, Homo sapien
ggaggatgggcaggacgccattcac

SEQ ID NO: 2982753 - DNA, 25 bp, Homo sapien
gggaggatgggcaggacgccattca

SEQ ID NO: 2982754 - DNA, 25 bp, Homo sapien
gctgggtgaggccttgctcatctgg

SEQ ID NO: 2982755 - DNA, 25 bp, Homo sapien
agctgggtgaggccttgctcatctg

SEQ ID NO: 2982756 - DNA, 25 bp, Homo sapien
cctccgtatagctgctgagagtatc

SEQ ID NO: 2982757 - DNA, 25 bp, Homo sapien
tgagagtatcctctgagaacttagc

SEQ ID NO: 2982758 - DNA, 25 bp, Homo sapien
gagtatcctctgagaacttagccag

SEQ ID NO: 2982759 - DNA, 25 bp, Homo sapien
tgagaggagacagcctccgtatagc

SEQ ID NO: 2982760 - DNA, 25 bp, Homo sapien
gtggctcagcgttggcgatgtcccc

SEQ ID NO: 2982761 - DNA, 25 bp, Homo sapien
ctgtgcagcaggctggaactgtggc

SEQ ID NO: 2982762 - DNA, 25 bp, Homo sapien
tccccccgagcaccctcaggaagtg

SEQ ID NO: 2982763 - DNA, 25 bp, Homo sapien
ggccccaaatgcagcgcagcatttc

SEQ ID NO: 2982764 - DNA, 25 bp, Homo sapien
caggatcccctgtttgtccacacag

SEQ ID NO: 2982765 - DNA, 25 bp, Homo sapien
tggataggccatcggtgaggtcctc

SEQ ID NO: 2982766 - DNA, 25 bp, Homo sapien
gaacagtacagtctctgggctggga

SEQ ID NO: 2982767 - DNA, 25 bp, Homo sapien
ctgggatttggccatgacaggatcc

SEQ ID NO: 2982768 - DNA, 25 bp, Homo sapien
ggccatgcgctttgtggtgtgaata

SEQ ID NO: 2982769 - DNA, 25 bp, Homo sapien
tgcagggtgttgttcagggagccag

SEQ ID NO: 2982770 - DNA, 25 bp, Homo sapien
gggagcctcgccaggccagtcgcca

SEQ ID NO: 2982771 - DNA, 25 bp, Homo sapien
ccagatgggtgtttgctgcggccat

SEQ ID NO: 2982772 - DNA, 25 bp, Homo sapien
ctcttcttcaccaccctcggtgtcc

SEQ ID NO: 2982773 - DNA, 25 bp, Homo sapien
tgggctcttcttcaccaccctcggt

SEQ ID NO: 2982774 - DNA, 25 bp, Homo sapien
tctctaagagggagctccgggctgt

SEQ ID NO: 2982775 - DNA, 25 bp, Homo sapien
gagacgcctgctctttcagaccttg

SEQ ID NO: 2982776 - DNA, 25 bp, Homo sapien
gggacaccagtgattgcgattacaa

SEQ ID NO: 2982777 - DNA, 25 bp, Homo sapien
gaggctccacctacttcgcagcaga

SEQ ID NO: 2982778 - DNA, 25 bp, Homo sapien
tgtggctctcttgcagggcgatgtt

SEQ ID NO: 2982779 - DNA, 25 bp, Homo sapien
gcagctgccagttggagtcatcaaa

SEQ ID NO: 2982780 - DNA, 25 bp, Homo sapien
cacaggtggtcggagaatcggcaca

SEQ ID NO: 2982781 - DNA, 25 bp, Homo sapien
gctcggtgacgctggcatcacacag

SEQ ID NO: 2982782 - DNA, 25 bp, Homo sapien
tacagcgccagatggttctcctgct

SEQ ID NO: 2982783 - DNA, 25 bp, Homo sapien
tgcttgaaaagctccttggccccag

SEQ ID NO: 2982784 - DNA, 25 bp, Homo sapien
tctccttcattgtctcggcactggg

SEQ ID NO: 2982785 - DNA, 25 bp, Homo sapien
gtgacacaggagagccgccccagcg

SEQ ID NO: 2982786 - DNA, 25 bp, Homo sapien
caagctctggaagatctcgcctggt

SEQ ID NO: 2982787 - DNA, 25 bp, Homo sapien
tggaacacttggaagcagtctactt

SEQ ID NO: 2982788 - DNA, 25 bp, Homo sapien
aggcaacgcactgtcctcctggaga

SEQ ID NO: 2982789 - DNA, 25 bp, Homo sapien
tcaaaccctgagtgtcgctaaccag

SEQ ID NO: 2982790 - DNA, 25 bp, Homo sapien
tgtcagatcccgagagagggtagat

SEQ ID NO: 2982791 - DNA, 25 bp, Homo sapien
gagggtagatgtcagctccgtccca

SEQ ID NO: 2982792 - DNA, 25 bp, Homo sapien
accacatcagcggtgccatgggaca

SEQ ID NO: 2982793 - DNA, 25 bp, Homo sapien
tctgtgcaggcctctaagaccacat

SEQ ID NO: 2982794 - DNA, 25 bp, Homo sapien
cttgtaggcgaaggcagagcaatac

SEQ ID NO: 2982795 - DNA, 25 bp, Homo sapien
cacttgccattgagctgagaggaca

SEQ ID NO: 2982796 - DNA, 25 bp, Homo sapien
caggcaggctcgctggtagaagtcc

SEQ ID NO: 2982797 - DNA, 25 bp, Homo sapien
gctcgcacatggtgaagatgctgct

SEQ ID NO: 2982798 - DNA, 25 bp, Homo sapien
ccaaagagaagtagacaaagcggat

SEQ ID NO: 2982799 - DNA, 25 bp, Homo sapien
cccatgaagatctggccgctcaggg

SEQ ID NO: 2982800 - DNA, 25 bp, Homo sapien
atcaatgaggcgcacgatgtccagc

SEQ ID NO: 2982801 - DNA, 25 bp, Homo sapien
gcaggcgttgacaagcccatcaatg

SEQ ID NO: 2982802 - DNA, 25 bp, Homo sapien
ggcagacggccatgaacatacgggc

SEQ ID NO: 2982803 - DNA, 25 bp, Homo sapien
gaaacagagttagtggtggcagaag

SEQ ID NO: 2982804 - DNA, 25 bp, Homo sapien
tggcagaagggatggctctccccac

SEQ ID NO: 2982805 - DNA, 25 bp, Homo sapien
caaaagcccgtggaaacagagttag

SEQ ID NO: 2982806 - DNA, 25 bp, Homo sapien
gatctcggagccaggcatgtcacca

SEQ ID NO: 2982807 - DNA, 25 bp, Homo sapien
catcatgcagggagcctgcgtggct

SEQ ID NO: 2982808 - DNA, 25 bp, Homo sapien
cctgattcaggtcatcatgcaggga

SEQ ID NO: 2982809 - DNA, 25 bp, Homo sapien
tgtgagggagatgtggcagttccag

SEQ ID NO: 2982810 - DNA, 25 bp, Homo sapien
tgtcgctgtccgtaggctggaagct

SEQ ID NO: 2982811 - DNA, 25 bp, Homo sapien
ggagcccttctgcatcatctcggga

SEQ ID NO: 2982812 - DNA, 25 bp, Homo sapien
gaagctggggatgtcgctgtccgta

SEQ ID NO: 2982813 - DNA, 25 bp, Homo sapien
aagctgatgaggtccgagtggccct

SEQ ID NO: 2982814 - DNA, 25 bp, Homo sapien
tagcaggggcacgttgtcaatgttc

SEQ ID NO: 2982815 - DNA, 25 bp, Homo sapien
tcaatgttctgcaggtggggccgca

SEQ ID NO: 2982816 - DNA, 25 bp, Homo sapien
cgcacttggtggataccccggggca

SEQ ID NO: 2982817 - DNA, 25 bp, Homo sapien
cagtcggtgaaaaggggcactagca

SEQ ID NO: 2982818 - DNA, 25 bp, Homo sapien
aggttgcccaagtacccatggccac

SEQ ID NO: 2982819 - DNA, 25 bp, Homo sapien
agctcagccgacgggaccaggttgc

SEQ ID NO: 2982820 - DNA, 25 bp, Homo sapien
agccgacgggaccaggttgcccaag

SEQ ID NO: 2982821 - DNA, 25 bp, Homo sapien
agagcccacggggtacgcaggccca

SEQ ID NO: 2982822 - DNA, 25 bp, Homo sapien
aacccacaagattccccagctgatc

SEQ ID NO: 2982823 - DNA, 25 bp, Homo sapien
ccccggcagcgggatcatgtgaaca

SEQ ID NO: 2982824 - DNA, 25 bp, Homo sapien
caggttcctttactccctgcatggg

SEQ ID NO: 2982825 - DNA, 25 bp, Homo sapien
tgtgaacatcggcacttctgactcc

SEQ ID NO: 2982826 - DNA, 25 bp, Homo sapien
gaggcagctgttccgcaggttggca

SEQ ID NO: 2982827 - DNA, 25 bp, Homo sapien
ccgtactcttgcatgatctttatca

SEQ ID NO: 2982828 - DNA, 25 bp, Homo sapien
cagctgttccgcaggttggcagagc

SEQ ID NO: 2982829 - DNA, 25 bp, Homo sapien
agcaggtcacctccccgtactcttg

SEQ ID NO: 2982830 - DNA, 25 bp, Homo sapien
gcccatctgatcctccggtctggga

SEQ ID NO: 2982831 - DNA, 25 bp, Homo sapien
gcccaggtgcattggtcccagccag

SEQ ID NO: 2982832 - DNA, 25 bp, Homo sapien
gggcgaggtcggctatagtacacac

SEQ ID NO: 2982833 - DNA, 25 bp, Homo sapien
acacacttcagctgtatctcccaca

SEQ ID NO: 2982834 - DNA, 25 bp, Homo sapien
cgataagccggatgatgctgatggt

SEQ ID NO: 2982835 - DNA, 25 bp, Homo sapien
tcccaggagcaacgggatgggtaca

SEQ ID NO: 2982836 - DNA, 25 bp, Homo sapien
tggtctcctcctggcgaaaggtcag

SEQ ID NO: 2982837 - DNA, 25 bp, Homo sapien
atgctggtggcgtagccaaaggtct

SEQ ID NO: 2982838 - DNA, 25 bp, Homo sapien
aagcacttacggatgccataggtgg

SEQ ID NO: 2982839 - DNA, 25 bp, Homo sapien
gaagaggaagcacttacggatgcca

SEQ ID NO: 2982840 - DNA, 25 bp, Homo sapien
ctggatgaccacaagagtcagctgg

SEQ ID NO: 2982841 - DNA, 25 bp, Homo sapien
gaggaagcacttacggatgccatag

SEQ ID NO: 2982842 - DNA, 25 bp, Homo sapien
ttcaggcaaataataagggcatagg

SEQ ID NO: 2982843 - DNA, 25 bp, Homo sapien
tactcttctgccaatgagggtcagc

SEQ ID NO: 2982844 - DNA, 25 bp, Homo sapien
cctgggcccagatagatgctcacat

SEQ ID NO: 2982845 - DNA, 25 bp, Homo sapien
ttgactgtactgctaaccccagcct

SEQ ID NO: 2982846 - DNA, 25 bp, Homo sapien
agccacaggatgtcggtggtactca

SEQ ID NO: 2982847 - DNA, 25 bp, Homo sapien
gccacaggatgtcggtggtactcag

SEQ ID NO: 2982848 - DNA, 25 bp, Homo sapien
ggatggtgacaatgaccctctgtcc

SEQ ID NO: 2982849 - DNA, 25 bp, Homo sapien
gtagagggatggtgacaatgaccct

SEQ ID NO: 2982850 - DNA, 25 bp, Homo sapien
gagtcttgcgcgtgaggtcgagtct

SEQ ID NO: 2982851 - DNA, 25 bp, Homo sapien
ggaacctctagggagtcttgcgcgt

SEQ ID NO: 2982852 - DNA, 25 bp, Homo sapien
cgttgccatagacatgatggagcta

SEQ ID NO: 2982853 - DNA, 25 bp, Homo sapien
gccatagacatgatggagctatggg

SEQ ID NO: 2982854 - DNA, 25 bp, Homo sapien
ttgccatagacatgatggagctatg

SEQ ID NO: 2982855 - DNA, 25 bp, Homo sapien
ccccgttgccatagacatgatggag

SEQ ID NO: 2982856 - DNA, 25 bp, Homo sapien
caagtgccggagttctgctggaatc

SEQ ID NO: 2982857 - DNA, 25 bp, Homo sapien
tagctcttccacgtattcaacgggc

SEQ ID NO: 2982858 - DNA, 25 bp, Homo sapien
tgctcacttgcaaggctcacagggt

SEQ ID NO: 2982859 - DNA, 25 bp, Homo sapien
gctcttagtaaatggtcaggcctgg

SEQ ID NO: 2982860 - DNA, 25 bp, Homo sapien
ctgggcagcatgacggaggagcagt

SEQ ID NO: 2982861 - DNA, 25 bp, Homo sapien
tgaggttgcggtcccgggagctgtc

SEQ ID NO: 2982862 - DNA, 25 bp, Homo sapien
cgggagctgtcacagaagctctgca

SEQ ID NO: 2982863 - DNA, 25 bp, Homo sapien
gcagcatgacggaggagcagttggt

SEQ ID NO: 2982864 - DNA, 25 bp, Homo sapien
ccaaagtgaggcatgggctcagccc

SEQ ID NO: 2982865 - DNA, 25 bp, Homo sapien
aaagtgaggcatgggctcagcccct

SEQ ID NO: 2982866 - DNA, 25 bp, Homo sapien
ctgccaaagtgaggcatgggctcag

SEQ ID NO: 2982867 - DNA, 25 bp, Homo sapien
gccaaagtgaggcatgggctcagcc

SEQ ID NO: 2982868 - DNA, 25 bp, Homo sapien
cagtgtgcaggacaatcagggcggc

SEQ ID NO: 2982869 - DNA, 25 bp, Homo sapien
acaatcagggcggccgtgagcttct

SEQ ID NO: 2982870 - DNA, 25 bp, Homo sapien
ggccgtgagcttctgagccgacagc

SEQ ID NO: 2982871 - DNA, 25 bp, Homo sapien
tctgagccgacagcagtccattggc

SEQ ID NO: 2982872 - DNA, 25 bp, Homo sapien
atcatccacgccctcccagggagcc

SEQ ID NO: 2982873 - DNA, 25 bp, Homo sapien
caccatcatccacgccctcccaggg

SEQ ID NO: 2982874 - DNA, 25 bp, Homo sapien
ggtggggcgatgtgggggtcagact

SEQ ID NO: 2982875 - DNA, 25 bp, Homo sapien
gaaggtggggcgatgtgggggtcag

SEQ ID NO: 2982876 - DNA, 25 bp, Homo sapien
cacaggggcttggtgcgatgcacat

SEQ ID NO: 2982877 - DNA, 25 bp, Homo sapien
tccacaggggcttggtgcgatgcac

SEQ ID NO: 2982878 - DNA, 25 bp, Homo sapien
ggcttggtgcgatgcacatgggtga

SEQ ID NO: 2982879 - DNA, 25 bp, Homo sapien
ggggcttggtgcgatgcacatgggt

SEQ ID NO: 2982880 - DNA, 25 bp, Homo sapien
caacagttagctcaggcagggtaca

SEQ ID NO: 2982881 - DNA, 25 bp, Homo sapien
ctcttcccagtacaacagttagctc

SEQ ID NO: 2982882 - DNA, 25 bp, Homo sapien
gcagggtacagttaaaccactggcc

SEQ ID NO: 2982883 - DNA, 25 bp, Homo sapien
ccgtgtgaacccgacactgcttgct

SEQ ID NO: 2982884 - DNA, 25 bp, Homo sapien
ccacaaggaccagggacaggcagcc

SEQ ID NO: 2982885 - DNA, 25 bp, Homo sapien
tgtcagcaggggcacgtcctccagg

SEQ ID NO: 2982886 - DNA, 25 bp, Homo sapien
gatctcattggtcaccaccacaagg

SEQ ID NO: 2982887 - DNA, 25 bp, Homo sapien
tcatgtagcttcacgatctcattgg

SEQ ID NO: 2982888 - DNA, 25 bp, Homo sapien
ctgagcccagagggaggcgccctgc

SEQ ID NO: 2982889 - DNA, 25 bp, Homo sapien
gagggaggcgccctgctgacagctc

SEQ ID NO: 2982890 - DNA, 25 bp, Homo sapien
gggaggcgccctgctgacagctcac

SEQ ID NO: 2982891 - DNA, 25 bp, Homo sapien
cagagggaggcgccctgctgacagc

SEQ ID NO: 2982892 - DNA, 25 bp, Homo sapien
ggtggggcaggagattaaagtacag

SEQ ID NO: 2982893 - DNA, 25 bp, Homo sapien
ggagattaaagtacaggttggcaaa

SEQ ID NO: 2982894 - DNA, 25 bp, Homo sapien
caggagattaaagtacaggttggca

SEQ ID NO: 2982895 - DNA, 25 bp, Homo sapien
gggcaggagattaaagtacaggttg

SEQ ID NO: 2982896 - DNA, 25 bp, Homo sapien
tcgcttctggtagcggactcggacc

SEQ ID NO: 2982897 - DNA, 25 bp, Homo sapien
gaagggagagttcatgcccagctta

SEQ ID NO: 2982898 - DNA, 25 bp, Homo sapien
gcttagtttcaaactgcagcttctg

SEQ ID NO: 2982899 - DNA, 25 bp, Homo sapien
tgcagcttctgtcgcttctggtagc

SEQ ID NO: 2982900 - DNA, 25 bp, Homo sapien
gaggccatacattcaagagtgtccc

SEQ ID NO: 2982901 - DNA, 25 bp, Homo sapien
ccaaagaaggttggcttcaaggccg

SEQ ID NO: 2982902 - DNA, 25 bp, Homo sapien
ggagcaaacctggaaacattcatga

SEQ ID NO: 2982903 - DNA, 25 bp, Homo sapien
ttagggcccctctagggagcgcctg

SEQ ID NO: 2982904 - DNA, 25 bp, Homo sapien
gaggctccagggcgaagcgggggcc

SEQ ID NO: 2982905 - DNA, 25 bp, Homo sapien
tgctccatcttcaggttcaggcggg

SEQ ID NO: 2982906 - DNA, 25 bp, Homo sapien
ggcagccagcttgagccaggcacag

SEQ ID NO: 2982907 - DNA, 25 bp, Homo sapien
aagactgacaggcagccagcttgag

SEQ ID NO: 2982908 - DNA, 25 bp, Homo sapien
aatatacaccagtagaaacttctcc

SEQ ID NO: 2982909 - DNA, 25 bp, Homo sapien
atatacaccagtagaaacttctccc

SEQ ID NO: 2982910 - DNA, 25 bp, Homo sapien
atacaccagtagaaacttctcccag

SEQ ID NO: 2982911 - DNA, 25 bp, Homo sapien
tatacaccagtagaaacttctccca

SEQ ID NO: 2982912 - DNA, 25 bp, Homo sapien
aacaccattccacgtgactgggctg

SEQ ID NO: 2982913 - DNA, 25 bp, Homo sapien
ccctggagtggccttacagaccagc

SEQ ID NO: 2982914 - DNA, 25 bp, Homo sapien
cacccgcgtagatggaggaaggttt

SEQ ID NO: 2982915 - DNA, 25 bp, Homo sapien
ctgagggacccacccgcgtagatgg

SEQ ID NO: 2982916 - DNA, 25 bp, Homo sapien
tcttgcggggtcggcgggcacctcc

SEQ ID NO: 2982917 - DNA, 25 bp, Homo sapien
ttcttgcggggtcggcgggcacctc

SEQ ID NO: 2982918 - DNA, 25 bp, Homo sapien
gccgccggtgctgactgacagcctg

SEQ ID NO: 2982919 - DNA, 25 bp, Homo sapien
atctggcgcggatgggggcggagcc

SEQ ID NO: 2982920 - DNA, 25 bp, Homo sapien
tgactgcgcggccgggacggtccct

SEQ ID NO: 2982921 - DNA, 25 bp, Homo sapien
gcgcatgcgctgatccggtcagcgc

SEQ ID NO: 2982922 - DNA, 25 bp, Homo sapien
tggggtcccgcgtcttggttgccaa

SEQ ID NO: 2982923 - DNA, 25 bp, Homo sapien
gtgtctagcccttgggtctaagtcc

SEQ ID NO: 2982924 - DNA, 25 bp, Homo sapien
tgggtctaagtccagagccccaggt

SEQ ID NO: 2982925 - DNA, 25 bp, Homo sapien
gtgccgtccgctaggtggtgccatt

SEQ ID NO: 2982926 - DNA, 25 bp, Homo sapien
ccacctccgcccggcacgagcgcct

SEQ ID NO: 2982927 - DNA, 25 bp, Homo sapien
gcccggcacgagcgcctcctcgagg

SEQ ID NO: 2982928 - DNA, 25 bp, Homo sapien
ctccgcccggcacgagcgcctcctc

SEQ ID NO: 2982929 - DNA, 25 bp, Homo sapien
ggcacgagcgcctcctcgaggctgg

SEQ ID NO: 2982930 - DNA, 25 bp, Homo sapien
aattccgactttgcaggccgaaggc

SEQ ID NO: 2982931 - DNA, 25 bp, Homo sapien
gaggttcgccattccttcggtgtct

SEQ ID NO: 2982932 - DNA, 25 bp, Homo sapien
cagtgcgaatggtcacacttgtgac

SEQ ID NO: 2982933 - DNA, 25 bp, Homo sapien
ctccgaagccaggtttcgagggccg

SEQ ID NO: 2982934 - DNA, 25 bp, Homo sapien
ctgagcacgcgccccgcgggaacct

SEQ ID NO: 2982935 - DNA, 25 bp, Homo sapien
cacgcgccccgcgggaacctccacg

SEQ ID NO: 2982936 - DNA, 25 bp, Homo sapien
tgagcacgcgccccgcgggaacctc

SEQ ID NO: 2982937 - DNA, 25 bp, Homo sapien
agcacgcgccccgcgggaacctcca

SEQ ID NO: 2982938 - DNA, 25 bp, Homo sapien
gccagagctcttcccggcaccggcg

SEQ ID NO: 2982939 - DNA, 25 bp, Homo sapien
agcgctggggcagcttctgcgaccg

SEQ ID NO: 2982940 - DNA, 25 bp, Homo sapien
ttctgcgaccgcgagcgggcggcga

SEQ ID NO: 2982941 - DNA, 25 bp, Homo sapien
tccttggggccatgcgagcgctggg

SEQ ID NO: 2982942 - DNA, 25 bp, Homo sapien
ggaggggtctgcgtcagtccattcc

SEQ ID NO: 2982943 - DNA, 25 bp, Homo sapien
gaggggtctgcgtcagtccattccg

SEQ ID NO: 2982944 - DNA, 25 bp, Homo sapien
tctgcgtcagtccattccggagacc

SEQ ID NO: 2982945 - DNA, 25 bp, Homo sapien
gggtctgcgtcagtccattccggag

SEQ ID NO: 2982946 - DNA, 25 bp, Homo sapien
ccacgaagccctcttctggcctcca

SEQ ID NO: 2982947 - DNA, 25 bp, Homo sapien
gacttcaactccacgaagccctctt

SEQ ID NO: 2982948 - DNA, 25 bp, Homo sapien
caactccacgaagccctcttctggc

SEQ ID NO: 2982949 - DNA, 25 bp, Homo sapien
ttcaactccacgaagccctcttctg

SEQ ID NO: 2982950 - DNA, 25 bp, Homo sapien
ggcccagagcaagtgtcacaaggga

SEQ ID NO: 2982951 - DNA, 25 bp, Homo sapien
gcaagtgtcacaagggagggagggc

SEQ ID NO: 2982952 - DNA, 25 bp, Homo sapien
cagagcaagtgtcacaagggaggga

SEQ ID NO: 2982953 - DNA, 25 bp, Homo sapien
ctgtgtggggcccagagcaagtgtc

SEQ ID NO: 2982954 - DNA, 25 bp, Homo sapien
gaaggcgctgccggccctgctctga

SEQ ID NO: 2982955 - DNA, 25 bp, Homo sapien
ctcttccgggtgaaggcgctgccgg

SEQ ID NO: 2982956 - DNA, 25 bp, Homo sapien
ggtgaaggcgctgccggccctgctc

SEQ ID NO: 2982957 - DNA, 25 bp, Homo sapien
cttccgggtgaaggcgctgccggcc

SEQ ID NO: 2982958 - DNA, 25 bp, Homo sapien
tctaaagaccgggttgtgtgtgctt

SEQ ID NO: 2982959 - DNA, 25 bp, Homo sapien
cctgctttagaagtttggttatcag

SEQ ID NO: 2982960 - DNA, 25 bp, Homo sapien
cacctcctgctttagaagtttggtt

SEQ ID NO: 2982961 - DNA, 25 bp, Homo sapien
tggttatcagttctctaaagaccgg

SEQ ID NO: 2982962 - DNA, 25 bp, Homo sapien
gcagcatcactaatgtggactggaa

SEQ ID NO: 2982963 - DNA, 25 bp, Homo sapien
taatgtggactggaatccctgctcc

SEQ ID NO: 2982964 - DNA, 25 bp, Homo sapien
caagaatgtggccaaccaggaaagt

SEQ ID NO: 2982965 - DNA, 25 bp, Homo sapien
agaatgtggccaaccaggaaagtgg

SEQ ID NO: 2982966 - DNA, 25 bp, Homo sapien
tcctggatagacagtggcaggtctt

SEQ ID NO: 2982967 - DNA, 25 bp, Homo sapien
gtcacagtgtggtcggtcagcagca

SEQ ID NO: 2982968 - DNA, 25 bp, Homo sapien
ctggtactgcaggaaggtcacagtg

SEQ ID NO: 2982969 - DNA, 25 bp, Homo sapien
gcagctggtaagcttcctggataga

SEQ ID NO: 2982970 - DNA, 25 bp, Homo sapien
ttggaatcgtcgaaccacataaccc

SEQ ID NO: 2982971 - DNA, 25 bp, Homo sapien
ggttggaatcgtcgaaccacataac

SEQ ID NO: 2982972 - DNA, 25 bp, Homo sapien
cttggttggaatcgtcgaaccacat

SEQ ID NO: 2982973 - DNA, 25 bp, Homo sapien
gaatcgtcgaaccacataacccaac

SEQ ID NO: 2982974 - DNA, 25 bp, Homo sapien
gacagagctgctctaagggataacc

SEQ ID NO: 2982975 - DNA, 25 bp, Homo sapien
gactcctcactaaatgcaagctctg

SEQ ID NO: 2982976 - DNA, 25 bp, Homo sapien
tgttctcagcgatgtgtacagggcc

SEQ ID NO: 2982977 - DNA, 25 bp, Homo sapien
tatcgttgatcattctcacaggtga

SEQ ID NO: 2982978 - DNA, 25 bp, Homo sapien
tgtgcctctgcctaggcaatggccc

SEQ ID NO: 2982979 - DNA, 25 bp, Homo sapien
agtgctaaggccctaagcagacccc

SEQ ID NO: 2982980 - DNA, 25 bp, Homo sapien
tggcccagaggagctagcaaacttg

SEQ ID NO: 2982981 - DNA, 25 bp, Homo sapien
aaacgggccaagaggacagtcagtg

SEQ ID NO: 2982982 - DNA, 25 bp, Homo sapien
tgcacgctggcatccaggttaagct

SEQ ID NO: 2982983 - DNA, 25 bp, Homo sapien
tccaagtgctgcacgctggcatcca

SEQ ID NO: 2982984 - DNA, 25 bp, Homo sapien
atcctccaagtgctgcacgctggca

SEQ ID NO: 2982985 - DNA, 25 bp, Homo sapien
tgcctctcatacggggacaggacag

SEQ ID NO: 2982986 - DNA, 25 bp, Homo sapien
ggcaggtcccctagtgtctccctga

SEQ ID NO: 2982987 - DNA, 25 bp, Homo sapien
ggttgctaaggtgcacacgtcccat

SEQ ID NO: 2982988 - DNA, 25 bp, Homo sapien
catctgcccctggttgctaaggtgc

SEQ ID NO: 2982989 - DNA, 25 bp, Homo sapien
cacacgtcccatgggagctgaaggc

SEQ ID NO: 2982990 - DNA, 25 bp, Homo sapien
ggccttggccttcttattaatggac

SEQ ID NO: 2982991 - DNA, 25 bp, Homo sapien
ctgccagactcttgggttgcaggga

SEQ ID NO: 2982992 - DNA, 25 bp, Homo sapien
tgggttgcagggagttgtccagggc

SEQ ID NO: 2982993 - DNA, 25 bp, Homo sapien
actcttgggttgcagggagttgtcc

SEQ ID NO: 2982994 - DNA, 25 bp, Homo sapien
tcctctgggcattggctgggctggc

SEQ ID NO: 2982995 - DNA, 25 bp, Homo sapien
gcttgactcctggggtttctcctct

SEQ ID NO: 2982996 - DNA, 25 bp, Homo sapien
ctctgggcattggctgggctggctg

SEQ ID NO: 2982997 - DNA, 25 bp, Homo sapien
ttgactcctggggtttctcctctgg

SEQ ID NO: 2982998 - DNA, 25 bp, Homo sapien
cagaagctgaaaggggccccctggg

SEQ ID NO: 2982999 - DNA, 25 bp, Homo sapien
cccagaagctgaaaggggccccctg

SEQ ID NO: 2983000 - DNA, 25 bp, Homo sapien
cccagggaccccagaagctgaaagg

SEQ ID NO: 2983001 - DNA, 25 bp, Homo sapien
cagggaccccagaagctgaaagggg

SEQ ID NO: 2983002 - DNA, 25 bp, Homo sapien
ccgtgactccgttctcggctctgcc

SEQ ID NO: 2983003 - DNA, 25 bp, Homo sapien
tgactccgttctcggctctgccact

SEQ ID NO: 2983004 - DNA, 25 bp, Homo sapien
gtgactccgttctcggctctgccac

SEQ ID NO: 2983005 - DNA, 25 bp, Homo sapien
tcccgtgactccgttctcggctctg

SEQ ID NO: 2983006 - DNA, 25 bp, Homo sapien
agatctgctcgaagttccagcgccg

SEQ ID NO: 2983007 - DNA, 25 bp, Homo sapien
gggaaggagatctgctcgaagttcc

SEQ ID NO: 2983008 - DNA, 25 bp, Homo sapien
gcgcagaagggtgtggcggctgtct

SEQ ID NO: 2983009 - DNA, 25 bp, Homo sapien
agggtgtggcggctgtctgaagcca

SEQ ID NO: 2983010 - DNA, 25 bp, Homo sapien
ttctggcaccaggactcagcgtctg

SEQ ID NO: 2983011 - DNA, 25 bp, Homo sapien
ggatcggcgttgacatcttcctgga

SEQ ID NO: 2983012 - DNA, 25 bp, Homo sapien
ctggagcaccgctgcacctcgggat

SEQ ID NO: 2983013 - DNA, 25 bp, Homo sapien
atcttcctggaactgcgcggcctcc

SEQ ID NO: 2983014 - DNA, 25 bp, Homo sapien
ccagtggccctcgaagatgtggcag

SEQ ID NO: 2983015 - DNA, 25 bp, Homo sapien
gaccgtgcttgtgggtccactccct

SEQ ID NO: 2983016 - DNA, 25 bp, Homo sapien
agccgccggagaactgaccgtgctt

SEQ ID NO: 2983017 - DNA, 25 bp, Homo sapien
aaagtcctgtgattcctcagctgcc

SEQ ID NO: 2983018 - DNA, 25 bp, Homo sapien
ttaggacggccagatttagcaactt

SEQ ID NO: 2983019 - DNA, 25 bp, Homo sapien
catctaacaggttgggatcacagct

SEQ ID NO: 2983020 - DNA, 25 bp, Homo sapien
tcacagctagttggtggcaaagcca

SEQ ID NO: 2983021 - DNA, 25 bp, Homo sapien
acaatctaccgtgttcccataaagg

SEQ ID NO: 2983022 - DNA, 25 bp, Homo sapien
ggaggggagtcacatttctcagtct

SEQ ID NO: 2983023 - DNA, 25 bp, Homo sapien
ggagtcacatttctcagtctgccat

SEQ ID NO: 2983024 - DNA, 25 bp, Homo sapien
ctggggaggggagtcacatttctca

SEQ ID NO: 2983025 - DNA, 25 bp, Homo sapien
ggggagtcacatttctcagtctgcc

SEQ ID NO: 2983026 - DNA, 25 bp, Homo sapien
ctacaaggacacagaaaacaaggta

SEQ ID NO: 2983027 - DNA, 25 bp, Homo sapien
cctccatcaggaaggtgtgttgtct

SEQ ID NO: 2983028 - DNA, 25 bp, Homo sapien
caatgagaaacgttatgacatgaac

SEQ ID NO: 2983029 - DNA, 25 bp, Homo sapien
gagaaacgttatgacatgaactctt

SEQ ID NO: 2983030 - DNA, 25 bp, Homo sapien
atgagaaacgttatgacatgaactc

SEQ ID NO: 2983031 - DNA, 25 bp, Homo sapien
atacaatgagaaacgttatgacatg

SEQ ID NO: 2983032 - DNA, 25 bp, Homo sapien
catagggtttgccagggttattctt

SEQ ID NO: 2983033 - DNA, 25 bp, Homo sapien
ggttattctttcggaatgtggccac

SEQ ID NO: 2983034 - DNA, 25 bp, Homo sapien
tcggcctggtaaacatcaaagatga

SEQ ID NO: 2983035 - DNA, 25 bp, Homo sapien
actaatgcacatccgggcatagggt

SEQ ID NO: 2983036 - DNA, 25 bp, Homo sapien
acaaagggttagagtgagacccagc

SEQ ID NO: 2983037 - DNA, 25 bp, Homo sapien
gacaaagggttagagtgagacccag

SEQ ID NO: 2983038 - DNA, 25 bp, Homo sapien
ggacaaagggttagagtgagaccca

SEQ ID NO: 2983039 - DNA, 25 bp, Homo sapien
ggagatgtcaccatgatccaccagg

SEQ ID NO: 2983040 - DNA, 25 bp, Homo sapien
gagggacatccccactctggtaaga

SEQ ID NO: 2983041 - DNA, 25 bp, Homo sapien
taagacaaccgcttgaggctgcaga

SEQ ID NO: 2983042 - DNA, 25 bp, Homo sapien
gcaaagatcagagggacatccccac

SEQ ID NO: 2983043 - DNA, 25 bp, Homo sapien
ctggggcaacgtgaagtccctgaag

SEQ ID NO: 2983044 - DNA, 25 bp, Homo sapien
ggggcaacgtgaagtccctgaagct

SEQ ID NO: 2983045 - DNA, 25 bp, Homo sapien
atcctggggcaacgtgaagtccctg

SEQ ID NO: 2983046 - DNA, 25 bp, Homo sapien
cctggggcaacgtgaagtccctgaa

SEQ ID NO: 2983047 - DNA, 25 bp, Homo sapien
tccctgagaacagacagtcccggtc

SEQ ID NO: 2983048 - DNA, 25 bp, Homo sapien
tgaagctacaggttagagtctgggt

SEQ ID NO: 2983049 - DNA, 25 bp, Homo sapien
tacaggttagagtctgggtacagga

SEQ ID NO: 2983050 - DNA, 25 bp, Homo sapien
ccgagatggtccctgagaacagaca

SEQ ID NO: 2983051 - DNA, 25 bp, Homo sapien
gcaccctctcgttaaaggcacacag

SEQ ID NO: 2983052 - DNA, 25 bp, Homo sapien
tgtgagtatcagacacccagggcca

SEQ ID NO: 2983053 - DNA, 25 bp, Homo sapien
cctgggtccttaaaatcgagtcctg

SEQ ID NO: 2983054 - DNA, 25 bp, Homo sapien
tttatagcacgaagcaggcaccctc

SEQ ID NO: 2983055 - DNA, 25 bp, Homo sapien
tcgctccgccgcgcctgcccacggg

SEQ ID NO: 2983056 - DNA, 25 bp, Homo sapien
tccgccgcgcctgcccacgggctgc

SEQ ID NO: 2983057 - DNA, 25 bp, Homo sapien
ccgcccgaggcctcggcgtccctcg

SEQ ID NO: 2983058 - DNA, 25 bp, Homo sapien
gcctcggcgtccctcggcgcccgcc

SEQ ID NO: 2983059 - DNA, 25 bp, Homo sapien
tttcaacgacggcagacatctttgc

SEQ ID NO: 2983060 - DNA, 25 bp, Homo sapien
tcaacgacggcagacatctttgctt

SEQ ID NO: 2983061 - DNA, 25 bp, Homo sapien
aactttcaacgacggcagacatctt

SEQ ID NO: 2983062 - DNA, 25 bp, Homo sapien
aaacaactttcaacgacggcagaca

SEQ ID NO: 2983063 - DNA, 25 bp, Homo sapien
ggctgaaggctgtcaccacctgtgg

SEQ ID NO: 2983064 - DNA, 25 bp, Homo sapien
gggctgaaggctgtcaccacctgtg

SEQ ID NO: 2983065 - DNA, 25 bp, Homo sapien
cagggctgaaggctgtcaccacctg

SEQ ID NO: 2983066 - DNA, 25 bp, Homo sapien
ctcagggctgaaggctgtcaccacc

SEQ ID NO: 2983067 - DNA, 25 bp, Homo sapien
tctctccaagtccagtaggctgcca

SEQ ID NO: 2983068 - DNA, 25 bp, Homo sapien
caggtatcgattaggcccggcccaa

SEQ ID NO: 2983069 - DNA, 25 bp, Homo sapien
gtcctggcactcaggtatcgattag

SEQ ID NO: 2983070 - DNA, 25 bp, Homo sapien
tctctctccaagtccagtaggctgc

SEQ ID NO: 2983071 - DNA, 25 bp, Homo sapien
gcttagtctgcagcccccactggag

SEQ ID NO: 2983072 - DNA, 25 bp, Homo sapien
ttgcttagtctgcagcccccactgg

SEQ ID NO: 2983073 - DNA, 25 bp, Homo sapien
tttgcttagtctgcagcccccactg

SEQ ID NO: 2983074 - DNA, 25 bp, Homo sapien
ttagtctgcagcccccactggagac

SEQ ID NO: 2983075 - DNA, 25 bp, Homo sapien
ttaaactggaacaggtcccgcttga

SEQ ID NO: 2983076 - DNA, 25 bp, Homo sapien
taaactggaacaggtcccgcttgag

SEQ ID NO: 2983077 - DNA, 25 bp, Homo sapien
ccgcacagggtcatgccctggcctc

SEQ ID NO: 2983078 - DNA, 25 bp, Homo sapien
tctcccgcacagggtcatgccctgg

SEQ ID NO: 2983079 - DNA, 25 bp, Homo sapien
cttgacttctccagcagcacttcct

SEQ ID NO: 2983080 - DNA, 25 bp, Homo sapien
gcagcacttcctccctcccgaggtc

SEQ ID NO: 2983081 - DNA, 25 bp, Homo sapien
gcacttcctccctcccgaggtccca

SEQ ID NO: 2983082 - DNA, 25 bp, Homo sapien
tccagcagcacttcctccctcccga

SEQ ID NO: 2983083 - DNA, 25 bp, Homo sapien
gggcccagccattcgaaagccaata

SEQ ID NO: 2983084 - DNA, 25 bp, Homo sapien
gggtcaggaacacactgtttgttca

SEQ ID NO: 2983085 - DNA, 25 bp, Homo sapien
atacagaacaacctggccctccgca

SEQ ID NO: 2983086 - DNA, 25 bp, Homo sapien
tgctgggtcaggaacacactgtttg

SEQ ID NO: 2983087 - DNA, 25 bp, Homo sapien
tgtatcacttaggtggtgactcccc

SEQ ID NO: 2983088 - DNA, 25 bp, Homo sapien
tgcatatggcctccctaaaaggaag

SEQ ID NO: 2983089 - DNA, 25 bp, Homo sapien
gaacagttccaggtccctgttagag

SEQ ID NO: 2983090 - DNA, 25 bp, Homo sapien
tgtaaggcttagcttccctgctgct

SEQ ID NO: 2983091 - DNA, 25 bp, Homo sapien
agcctggtcttaaccttctagactc

SEQ ID NO: 2983092 - DNA, 25 bp, Homo sapien
agacaggtactcgtcatgttgtcca

SEQ ID NO: 2983093 - DNA, 25 bp, Homo sapien
ccagcctggtcttaaccttctagac

SEQ ID NO: 2983094 - DNA, 25 bp, Homo sapien
actgcaagctgcctaaaatggcttt

SEQ ID NO: 2983095 - DNA, 25 bp, Homo sapien
gtgcaccctgggtgacggacccagc

SEQ ID NO: 2983096 - DNA, 25 bp, Homo sapien
ccacgtgcaccctgggtgacggacc

SEQ ID NO: 2983097 - DNA, 25 bp, Homo sapien
tcggtgcctccaccacgtgcaccct

SEQ ID NO: 2983098 - DNA, 25 bp, Homo sapien
acgtgcaccctgggtgacggaccca

SEQ ID NO: 2983099 - DNA, 25 bp, Homo sapien
acctgtccccttcgcgccaccatgg

SEQ ID NO: 2983100 - DNA, 25 bp, Homo sapien
ggcctgcagacctgtccccttcgcg

SEQ ID NO: 2983101 - DNA, 25 bp, Homo sapien
cgagaagcacgtggggtgggcctgc

SEQ ID NO: 2983102 - DNA, 25 bp, Homo sapien
tgcaacgagaagcacgtggggtggg

SEQ ID NO: 2983103 - DNA, 25 bp, Homo sapien
ctccagaacgggtgccgatggccag

SEQ ID NO: 2983104 - DNA, 25 bp, Homo sapien
aggatgcgcagggacgggctgtagc

SEQ ID NO: 2983105 - DNA, 25 bp, Homo sapien
gggctggtgcgggaagccatgctcc

SEQ ID NO: 2983106 - DNA, 25 bp, Homo sapien
cgggctgtagccgagggcgctgggc

SEQ ID NO: 2983107 - DNA, 25 bp, Homo sapien
agtgggagcgaggggacggaggata

SEQ ID NO: 2983108 - DNA, 25 bp, Homo sapien
gtgggagcgaggggacggaggatac

SEQ ID NO: 2983109 - DNA, 25 bp, Homo sapien
gcaactccatagaaaggcgaagccc

SEQ ID NO: 2983110 - DNA, 25 bp, Homo sapien
tgttggctgtcgcttggtagcacct

SEQ ID NO: 2983111 - DNA, 25 bp, Homo sapien
gccagtgacctgatccctgggagat

SEQ ID NO: 2983112 - DNA, 25 bp, Homo sapien
agatttttcccagtcaggccggtgg

SEQ ID NO: 2983113 - DNA, 25 bp, Homo sapien
tggatctgcgtcacagcgttgttct

SEQ ID NO: 2983114 - DNA, 25 bp, Homo sapien
ctgcgtcacagcgttgttctcctgg

SEQ ID NO: 2983115 - DNA, 25 bp, Homo sapien
aggtggatctgcgtcacagcgttgt

SEQ ID NO: 2983116 - DNA, 25 bp, Homo sapien
gatctgcgtcacagcgttgttctcc

SEQ ID NO: 2983117 - DNA, 25 bp, Homo sapien
cccttgaccttcaggctccaaaggt

SEQ ID NO: 2983118 - DNA, 25 bp, Homo sapien
tgcagctccgatgccccgcccttga

SEQ ID NO: 2983119 - DNA, 25 bp, Homo sapien
ggggtccacgcagtgtgaagctctc

SEQ ID NO: 2983120 - DNA, 25 bp, Homo sapien
tccaaaggtgcaggctgttgtcatc

SEQ ID NO: 2983121 - DNA, 25 bp, Homo sapien
ggcgcaacaggcctcacaaagggtg

SEQ ID NO: 2983122 - DNA, 25 bp, Homo sapien
agtgtggcgatgcatcgggccaaac

SEQ ID NO: 2983123 - DNA, 25 bp, Homo sapien
cacaaagggtgagtccactccagag

SEQ ID NO: 2983124 - DNA, 25 bp, Homo sapien
cgggccaaacgcatgccagtcactg

SEQ ID NO: 2983125 - DNA, 25 bp, Homo sapien
gcagcaccgcgtccgagctgatggt

SEQ ID NO: 2983126 - DNA, 25 bp, Homo sapien
ggtcctccagcgcacgaaaagctgg

SEQ ID NO: 2983127 - DNA, 25 bp, Homo sapien
ccactctcggtgcccaggtagagca

SEQ ID NO: 2983128 - DNA, 25 bp, Homo sapien
cagctgcaccacaaacacgttgcca

SEQ ID NO: 2983129 - DNA, 25 bp, Homo sapien
taggaagggtgcataagacctccgg

SEQ ID NO: 2983130 - DNA, 25 bp, Homo sapien
gaaagatggctaggacatgtcacca

SEQ ID NO: 2983131 - DNA, 25 bp, Homo sapien
aagttctatttctatgcccggcagg

SEQ ID NO: 2983132 - DNA, 25 bp, Homo sapien
cctccggagggcatcaaagttctat

SEQ ID NO: 2983133 - DNA, 25 bp, Homo sapien
atctcgaacacacgccggtggcggg

SEQ ID NO: 2983134 - DNA, 25 bp, Homo sapien
ccagatgacaacgaggcctcggctg

SEQ ID NO: 2983135 - DNA, 25 bp, Homo sapien
ctgaggaagtggtagagcacgcggc

SEQ ID NO: 2983136 - DNA, 25 bp, Homo sapien
tcggctgtagccgatcaggatctgg

SEQ ID NO: 2983137 - DNA, 25 bp, Homo sapien
ctgggagagcaacatggcgcctgcc

SEQ ID NO: 2983138 - DNA, 25 bp, Homo sapien
ggcagcacgctggaccgaggcggcg

SEQ ID NO: 2983139 - DNA, 25 bp, Homo sapien
ggagagcaacatggcgcctgccatg

SEQ ID NO: 2983140 - DNA, 25 bp, Homo sapien
aggcggcgttcccatcgcctgcacc

SEQ ID NO: 2983141 - DNA, 25 bp, Homo sapien
ctggttgctgggcttcgctggacac

SEQ ID NO: 2983142 - DNA, 25 bp, Homo sapien
gcagtagctgccgtcagagtgacag

SEQ ID NO: 2983143 - DNA, 25 bp, Homo sapien
acagctgacgagcaggcggccgtcc

SEQ ID NO: 2983144 - DNA, 25 bp, Homo sapien
tggacacgggccactggcagtagct

SEQ ID NO: 2983145 - DNA, 25 bp, Homo sapien
cctgcccggcgggtgaaacactgac

SEQ ID NO: 2983146 - DNA, 25 bp, Homo sapien
gccctgcccggcgggtgaaacactg

SEQ ID NO: 2983147 - DNA, 25 bp, Homo sapien
ccctgcccggcgggtgaaacactga

SEQ ID NO: 2983148 - DNA, 25 bp, Homo sapien
tgctccgagaagttccccaagaaac

SEQ ID NO: 2983149 - DNA, 25 bp, Homo sapien
gaaaggaatcggcttgaacggatcc

SEQ ID NO: 2983150 - DNA, 25 bp, Homo sapien
gaaactgggtgaggcgaaccctgct

SEQ ID NO: 2983151 - DNA, 25 bp, Homo sapien
tagacctgtgcttgggaatcttgct

SEQ ID NO: 2983152 - DNA, 25 bp, Homo sapien
tcagccagaggattctggtaatcgc

SEQ ID NO: 2983153 - DNA, 25 bp, Homo sapien
ctagtggtcagccagaggattctgg

SEQ ID NO: 2983154 - DNA, 25 bp, Homo sapien
gtaatcgctttgcaaggaaagggac

SEQ ID NO: 2983155 - DNA, 25 bp, Homo sapien
gattctggtaatcgctttgcaagga

SEQ ID NO: 2983156 - DNA, 25 bp, Homo sapien
tcctggcacagcctcaacagccaca

SEQ ID NO: 2983157 - DNA, 25 bp, Homo sapien
aggcacagaggagcggcagtgggct

SEQ ID NO: 2983158 - DNA, 25 bp, Homo sapien
tggcacagcctcaacagccacaggc

SEQ ID NO: 2983159 - DNA, 25 bp, Homo sapien
ggctcctggcacagcctcaacagcc

SEQ ID NO: 2983160 - DNA, 25 bp, Homo sapien
tctgctggccatcgtggatcactga

SEQ ID NO: 2983161 - DNA, 25 bp, Homo sapien
gtccccgtagctggcccgtggcatg

SEQ ID NO: 2983162 - DNA, 25 bp, Homo sapien
gacagtgaagccgatgacacgggag

SEQ ID NO: 2983163 - DNA, 25 bp, Homo sapien
gaggtgaagtcgaaggccgtctgct

SEQ ID NO: 2983164 - DNA, 25 bp, Homo sapien
gcacccactcccgaagctctcctac

SEQ ID NO: 2983165 - DNA, 25 bp, Homo sapien
ggcacccactcccgaagctctccta

SEQ ID NO: 2983166 - DNA, 25 bp, Homo sapien
ggccctgtctttactgatggtcctg

SEQ ID NO: 2983167 - DNA, 25 bp, Homo sapien
cctgtctttactgatggtcctgccc

SEQ ID NO: 2983168 - DNA, 25 bp, Homo sapien
ctttactgatggtcctgccccatgc

SEQ ID NO: 2983169 - DNA, 25 bp, Homo sapien
cctggccctgtctttactgatggtc

SEQ ID NO: 2983170 - DNA, 25 bp, Homo sapien
tacgtgagagcttcagggtgcccac

SEQ ID NO: 2983171 - DNA, 25 bp, Homo sapien
gctctatacgatctggcgctggcca

SEQ ID NO: 2983172 - DNA, 25 bp, Homo sapien
ttagaaaagacagcgtaaccccagc

SEQ ID NO: 2983173 - DNA, 25 bp, Homo sapien
gatagaggccgtgagtacacagacc

SEQ ID NO: 2983174 - DNA, 25 bp, Homo sapien
tgctcagatgcacctgtcaagcctc

SEQ ID NO: 2983175 - DNA, 25 bp, Homo sapien
ctccagggttggagccagggcatct

SEQ ID NO: 2983176 - DNA, 25 bp, Homo sapien
agcagcacgcgtggtcttcagcaca

SEQ ID NO: 2983177 - DNA, 25 bp, Homo sapien
agtagccctggctctgcatgcaagg

SEQ ID NO: 2983178 - DNA, 25 bp, Homo sapien
cagcttcagcgggatgttggagacg

SEQ ID NO: 2983179 - DNA, 25 bp, Homo sapien
tggaccggtggccagcctgctgtct

SEQ ID NO: 2983180 - DNA, 25 bp, Homo sapien
agaagtgtgcgttctgccggctgcc

SEQ ID NO: 2983181 - DNA, 25 bp, Homo sapien
ggctgccggcggcaatgatccgctc

SEQ ID NO: 2983182 - DNA, 25 bp, Homo sapien
tggtgccaccatcaattggccactc

SEQ ID NO: 2983183 - DNA, 25 bp, Homo sapien
gtgagcagcaggtccctctggggtg

SEQ ID NO: 2983184 - DNA, 25 bp, Homo sapien
ctgtgagcagcaggtccctctgggg

SEQ ID NO: 2983185 - DNA, 25 bp, Homo sapien
tgtgagcagcaggtccctctggggt

SEQ ID NO: 2983186 - DNA, 25 bp, Homo sapien
tgaagttctcgttggggtccgtgtc

SEQ ID NO: 2983187 - DNA, 25 bp, Homo sapien
agaaccgcaccgtgccgtcctcgtg

SEQ ID NO: 2983188 - DNA, 25 bp, Homo sapien
ggaacacgcgcacagtgctgagttt

SEQ ID NO: 2983189 - DNA, 25 bp, Homo sapien
tcggtgaggaacacgcgcacagtgc

SEQ ID NO: 2983190 - DNA, 25 bp, Homo sapien
cagccaggtagccgctgtacttgca

SEQ ID NO: 2983191 - DNA, 25 bp, Homo sapien
ccgggggtcatcactgtaggggtca

SEQ ID NO: 2983192 - DNA, 25 bp, Homo sapien
ccaggtagccgctgtacttgcagag

SEQ ID NO: 2983193 - DNA, 25 bp, Homo sapien
ggtcatcactgtaggggtcaaagga

SEQ ID NO: 2983194 - DNA, 25 bp, Homo sapien
gcctcgtcattcagttccagtacca

SEQ ID NO: 2983195 - DNA, 25 bp, Homo sapien
ggctgacactgcaccaacacgaagg

SEQ ID NO: 2983196 - DNA, 25 bp, Homo sapien
ctgaaagccaggctcaaagcgcacg

SEQ ID NO: 2983197 - DNA, 25 bp, Homo sapien
gtagccctcttggtcctgcagcagg

SEQ ID NO: 2983198 - DNA, 25 bp, Homo sapien
gacttgacgcgggagagtgggccct

SEQ ID NO: 2983199 - DNA, 25 bp, Homo sapien
gccgggtgccgcttccggctggaca

SEQ ID NO: 2983200 - DNA, 25 bp, Homo sapien
tgacgcaaggacttcttgagggact

SEQ ID NO: 2983201 - DNA, 25 bp, Homo sapien
ggctccgacgcatccggcggaatga

SEQ ID NO: 2983202 - DNA, 25 bp, Homo sapien
tcagcaaagtacagggtccggacga

SEQ ID NO: 2983203 - DNA, 25 bp, Homo sapien
atcttgcgctgcacaggcgccagct

SEQ ID NO: 2983204 - DNA, 25 bp, Homo sapien
tgtgaaggagtcctctgccgagcga

SEQ ID NO: 2983205 - DNA, 25 bp, Homo sapien
tacagggtccggacgaagcctgtga

SEQ ID NO: 2983206 - DNA, 25 bp, Homo sapien
tgccgagaagccatgtttgggtgtc

SEQ ID NO: 2983207 - DNA, 25 bp, Homo sapien
gctgggcaaccagggtttactccca

SEQ ID NO: 2983208 - DNA, 25 bp, Homo sapien
gatacagcaggggagaaccagccag

SEQ ID NO: 2983209 - DNA, 25 bp, Homo sapien
tgtctgacccttagcgtgggagtcg

SEQ ID NO: 2983210 - DNA, 25 bp, Homo sapien
gctcatccattctccgctcggcggg

SEQ ID NO: 2983211 - DNA, 25 bp, Homo sapien
ggcatagatggtgcccccattggtg

SEQ ID NO: 2983212 - DNA, 25 bp, Homo sapien
gcagggagaaggcatagatggtgcc

SEQ ID NO: 2983213 - DNA, 25 bp, Homo sapien
tccattctccgctcggcgggaggca

SEQ ID NO: 2983214 - DNA, 25 bp, Homo sapien
ggctggagccactccctggacccag

SEQ ID NO: 2983215 - DNA, 25 bp, Homo sapien
gctggagccactccctggacccagc

SEQ ID NO: 2983216 - DNA, 25 bp, Homo sapien
agggctggagccactccctggaccc

SEQ ID NO: 2983217 - DNA, 25 bp, Homo sapien
gcagggctggagccactccctggac

SEQ ID NO: 2983218 - DNA, 25 bp, Homo sapien
tcttcgacagatcatgggccacttc

SEQ ID NO: 2983219 - DNA, 25 bp, Homo sapien
ggtacgctgtgtccgtcgagcacca

SEQ ID NO: 2983220 - DNA, 25 bp, Homo sapien
tcctctgatacgacgagcagctggt

SEQ ID NO: 2983221 - DNA, 25 bp, Homo sapien
agctggtggcttccctgcatgtcag

SEQ ID NO: 2983222 - DNA, 25 bp, Homo sapien
caccaactgcaaacaagactgagtc

SEQ ID NO: 2983223 - DNA, 25 bp, Homo sapien
acttatttcctgtacttctgcagcc

SEQ ID NO: 2983224 - DNA, 25 bp, Homo sapien
gccatcatttttgcccaaggtccga

SEQ ID NO: 2983225 - DNA, 25 bp, Homo sapien
ctcagtgtcctcacacgagactccc

SEQ ID NO: 2983226 - DNA, 25 bp, Homo sapien
gcgagaccacctggatgtcgcccag

SEQ ID NO: 2983227 - DNA, 25 bp, Homo sapien
gactgccgaagtgggccacgctgac

SEQ ID NO: 2983228 - DNA, 25 bp, Homo sapien
gtagtcctcggctcgacgactgccg

SEQ ID NO: 2983229 - DNA, 25 bp, Homo sapien
gccaggtggtgctccccgtagtcct

SEQ ID NO: 2983230 - DNA, 25 bp, Homo sapien
aggaggcgatgccactgacgtcctc

SEQ ID NO: 2983231 - DNA, 25 bp, Homo sapien
cttggccatatttggtgaagacgca

SEQ ID NO: 2983232 - DNA, 25 bp, Homo sapien
acgcaggaggcgatgccactgacgt

SEQ ID NO: 2983233 - DNA, 25 bp, Homo sapien
gcaggaggcgatgccactgacgtcc

SEQ ID NO: 2983234 - DNA, 25 bp, Homo sapien
gagagagaagcgctcaaactccgag

SEQ ID NO: 2983235 - DNA, 25 bp, Homo sapien
gagaagcgctcaaactccgagggtg

SEQ ID NO: 2983236 - DNA, 25 bp, Homo sapien
cgctcaaactccgagggtgagatca

SEQ ID NO: 2983237 - DNA, 25 bp, Homo sapien
caaactccgagggtgagatcaggta

SEQ ID NO: 2983238 - DNA, 25 bp, Homo sapien
cctcgccatcactctgagtccctga

SEQ ID NO: 2983239 - DNA, 25 bp, Homo sapien
gccatcactctgagtccctgagttc

SEQ ID NO: 2983240 - DNA, 25 bp, Homo sapien
cgccatcactctgagtccctgagtt

SEQ ID NO: 2983241 - DNA, 25 bp, Homo sapien
tcgccatcactctgagtccctgagt

SEQ ID NO: 2983242 - DNA, 25 bp, Homo sapien
ctctctctctccttactgaggtcag

SEQ ID NO: 2983243 - DNA, 25 bp, Homo sapien
tctctctctccttactgaggtcagg

SEQ ID NO: 2983244 - DNA, 25 bp, Homo sapien
ctctctctccttactgaggtcagga

SEQ ID NO: 2983245 - DNA, 25 bp, Homo sapien
tccatcaccaggccgggctgcttct

SEQ ID NO: 2983246 - DNA, 25 bp, Homo sapien
catggatctgtaccccgcctcaggg

SEQ ID NO: 2983247 - DNA, 25 bp, Homo sapien
cttggggcggctagccacagccctt

SEQ ID NO: 2983248 - DNA, 25 bp, Homo sapien
ccctttctccgtgggtgcccatgga

SEQ ID NO: 2983249 - DNA, 25 bp, Homo sapien
tgcaggccgggtgggaacagaggcc

SEQ ID NO: 2983250 - DNA, 25 bp, Homo sapien
ctccctccagtgtgctctggatttc

SEQ ID NO: 2983251 - DNA, 25 bp, Homo sapien
cagtgtgctctggatttccttcagg

SEQ ID NO: 2983252 - DNA, 25 bp, Homo sapien
tccagtgtgctctggatttccttca

SEQ ID NO: 2983253 - DNA, 25 bp, Homo sapien
cgcggtctccctccagtgtgctctg

SEQ ID NO: 2983254 - DNA, 25 bp, Homo sapien
ctgcacaggcaaagacaggggagtc

SEQ ID NO: 2983255 - DNA, 25 bp, Homo sapien
atggcctcagggacctccactctca

SEQ ID NO: 2983256 - DNA, 25 bp, Homo sapien
tgagccctctggcagagcctcgggc

SEQ ID NO: 2983257 - DNA, 25 bp, Homo sapien
cactctcagcgctcccctgagccct

SEQ ID NO: 2983258 - DNA, 25 bp, Homo sapien
aggctgcaccccacggcggctcgat

SEQ ID NO: 2983259 - DNA, 25 bp, Homo sapien
gctcgatgtgaacgccagttgccgc

SEQ ID NO: 2983260 - DNA, 25 bp, Homo sapien
gcggctcgatgtgaacgccagttgc

SEQ ID NO: 2983261 - DNA, 25 bp, Homo sapien
accccacggcggctcgatgtgaacg

SEQ ID NO: 2983262 - DNA, 25 bp, Homo sapien
tggtcatcagggcacgtgtcagccc

SEQ ID NO: 2983263 - DNA, 25 bp, Homo sapien
ccacgctgagcccagacatggtgct

SEQ ID NO: 2983264 - DNA, 25 bp, Homo sapien
cgtgtcagccccgtgggacccaggg

SEQ ID NO: 2983265 - DNA, 25 bp, Homo sapien
gctgagcccagacatggtgctttcc

SEQ ID NO: 2983266 - DNA, 25 bp, Homo sapien
catcgcgcagcctggacgctcagcc

SEQ ID NO: 2983267 - DNA, 25 bp, Homo sapien
atcgcgcagcctggacgctcagcca

SEQ ID NO: 2983268 - DNA, 25 bp, Homo sapien
tcgcgcagcctggacgctcagccac

SEQ ID NO: 2983269 - DNA, 25 bp, Homo sapien
cccagaggcagttaacatttataac

SEQ ID NO: 2983270 - DNA, 25 bp, Homo sapien
tgcattgtggaagccgggatgcccc

SEQ ID NO: 2983271 - DNA, 25 bp, Homo sapien
tgggagcaataaaaactgtgcaaca

SEQ ID NO: 2983272 - DNA, 25 bp, Homo sapien
ttgaccaaaggacccagacagacga

SEQ ID NO: 2983273 - DNA, 25 bp, Homo sapien
gtccccaggctggaatggagtggca

SEQ ID NO: 2983274 - DNA, 25 bp, Homo sapien
cagcctccgcctcccggattcaaga

SEQ ID NO: 2983275 - DNA, 25 bp, Homo sapien
ctgtccccaggctggaatggagtgg

SEQ ID NO: 2983276 - DNA, 25 bp, Homo sapien
ggagtggcatgatctcggctcactg

SEQ ID NO: 2983277 - DNA, 25 bp, Homo sapien
aggatgattatagtctgagcactcg

SEQ ID NO: 2983278 - DNA, 25 bp, Homo sapien
ggtaaccgcagcctgtagatgtctg

SEQ ID NO: 2983279 - DNA, 25 bp, Homo sapien
gatgtctgcaagctgtactccccta

SEQ ID NO: 2983280 - DNA, 25 bp, Homo sapien
tgtactcccctatcgccagttgtgc

SEQ ID NO: 2983281 - DNA, 25 bp, Homo sapien
ctctgcagtgggcttcctgcggcca

SEQ ID NO: 2983282 - DNA, 25 bp, Homo sapien
gctcggccgccggtttcgccctgtc

SEQ ID NO: 2983283 - DNA, 25 bp, Homo sapien
ccctgtccgcctgcccgcggtcgga

SEQ ID NO: 2983284 - DNA, 25 bp, Homo sapien
gcagccgccgttcccctctgcagtg

SEQ ID NO: 2983285 - DNA, 25 bp, Homo sapien
caggcgccccccgcggccgcccctg

SEQ ID NO: 2983286 - DNA, 25 bp, Homo sapien
gccgcccctgggcccgcgtccctga

SEQ ID NO: 2983287 - DNA, 25 bp, Homo sapien
cctgcattgtttctggctcggcgcc

SEQ ID NO: 2983288 - DNA, 25 bp, Homo sapien
agctgtcctcgaaggtcctggaggc

SEQ ID NO: 2983289 - DNA, 25 bp, Homo sapien
gacgtgtccccattgaggctcctgg

SEQ ID NO: 2983290 - DNA, 25 bp, Homo sapien
tccccagcggactcgagtcggagtc

SEQ ID NO: 2983291 - DNA, 25 bp, Homo sapien
ggcctgggaagcggcgcctggcggg

SEQ ID NO: 2983292 - DNA, 25 bp, Homo sapien
ctggcgggggcctcgcgaggagcct

SEQ ID NO: 2983293 - DNA, 25 bp, Homo sapien
tgcggaccaccaggagggccgccag

SEQ ID NO: 2983294 - DNA, 25 bp, Homo sapien
tgccgccgctggcacctgccccacc

SEQ ID NO: 2983295 - DNA, 25 bp, Homo sapien
tagacggtgccgcagcccgggctca

SEQ ID NO: 2983296 - DNA, 25 bp, Homo sapien
actcaggagccgctccttgaggcca

SEQ ID NO: 2983297 - DNA, 25 bp, Homo sapien
cagggctcgcgctacactcaggagc

SEQ ID NO: 2983298 - DNA, 25 bp, Homo sapien
agccaggcgcaacgctagacggtgc

SEQ ID NO: 2983299 - DNA, 25 bp, Homo sapien
cctcctgatcaaaagggtcgccggg

SEQ ID NO: 2983300 - DNA, 25 bp, Homo sapien
tcgtcctcctgatcaaaagggtcgc

SEQ ID NO: 2983301 - DNA, 25 bp, Homo sapien
gagtctcgtcctcctgatcaaaagg

SEQ ID NO: 2983302 - DNA, 25 bp, Homo sapien
ctggagtctcgtcctcctgatcaaa

SEQ ID NO: 2983303 - DNA, 25 bp, Homo sapien
atcctggggaacacgaccgcgaact

SEQ ID NO: 2983304 - DNA, 25 bp, Homo sapien
gatcctggggaacacgaccgcgaac

SEQ ID NO: 2983305 - DNA, 25 bp, Homo sapien
ctggggaacacgaccgcgaacttgg

SEQ ID NO: 2983306 - DNA, 25 bp, Homo sapien
cctggggaacacgaccgcgaacttg

SEQ ID NO: 2983307 - DNA, 25 bp, Homo sapien
gagggaaggcccgtcgggtgcagtc

SEQ ID NO: 2983308 - DNA, 25 bp, Homo sapien
gggcatctgcggacgcttcttcaga

SEQ ID NO: 2983309 - DNA, 25 bp, Homo sapien
ctgcacgaggccaacctcggccttc

SEQ ID NO: 2983310 - DNA, 25 bp, Homo sapien
gggcaaggagggagccgcgacgaag

SEQ ID NO: 2983311 - DNA, 25 bp, Homo sapien
agcgcaccgggggctcgtcattgag

SEQ ID NO: 2983312 - DNA, 25 bp, Homo sapien
cgtcattgagggtctccaactccgc

SEQ ID NO: 2983313 - DNA, 25 bp, Homo sapien
tcgtcattgagggtctccaactccg

SEQ ID NO: 2983314 - DNA, 25 bp, Homo sapien
gcaccgggggctcgtcattgagggt

SEQ ID NO: 2983315 - DNA, 25 bp, Homo sapien
ggccgtctccgaggctcctgccctt

SEQ ID NO: 2983316 - DNA, 25 bp, Homo sapien
tcctccatgtcttccaggccgtctc

SEQ ID NO: 2983317 - DNA, 25 bp, Homo sapien
caggcgggtctccaaggagagtcgg

SEQ ID NO: 2983318 - DNA, 25 bp, Homo sapien
tcgtcctcatcctcgggttcccaca

SEQ ID NO: 2983319 - DNA, 25 bp, Homo sapien
ccttctaaggattcaataagggtct

SEQ ID NO: 2983320 - DNA, 25 bp, Homo sapien
ccccttcctgccaggagggttcaag

SEQ ID NO: 2983321 - DNA, 25 bp, Homo sapien
tctacacgcaattcataaagatgag

SEQ ID NO: 2983322 - DNA, 25 bp, Homo sapien
taaagatgagggcagggtggatatg

SEQ ID NO: 2983323 - DNA, 25 bp, Homo sapien
tgtactaattagaaaggcggtcctg

SEQ ID NO: 2983324 - DNA, 25 bp, Homo sapien
gggacgtagcacctgttgcccctta

SEQ ID NO: 2983325 - DNA, 25 bp, Homo sapien
taatgcgcaggctacaaggagggct

SEQ ID NO: 2983326 - DNA, 25 bp, Homo sapien
tgcagggaccctggcaagtcattca

SEQ ID NO: 2983327 - DNA, 25 bp, Homo sapien
atagatacggcccaggtgaaatctc

SEQ ID NO: 2983328 - DNA, 25 bp, Homo sapien
tacggcccaggtgaaatctcttctt

SEQ ID NO: 2983329 - DNA, 25 bp, Homo sapien
gatacggcccaggtgaaatctcttc

SEQ ID NO: 2983330 - DNA, 25 bp, Homo sapien
ggcccaggtgaaatctcttcttgag

SEQ ID NO: 2983331 - DNA, 25 bp, Homo sapien
cagggggaatgcaaacagagcccag

SEQ ID NO: 2983332 - DNA, 25 bp, Homo sapien
caagctctcatcagagtgtggaggg

SEQ ID NO: 2983333 - DNA, 25 bp, Homo sapien
aggaaaacaagctctcatcagagtg

SEQ ID NO: 2983334 - DNA, 25 bp, Homo sapien
ctccagagagggttcaccgcctagc

SEQ ID NO: 2983335 - DNA, 25 bp, Homo sapien
ggtgggggttcagaacaagcaagac

SEQ ID NO: 2983336 - DNA, 25 bp, Homo sapien
gaccggtgggggttcagaacaagca

SEQ ID NO: 2983337 - DNA, 25 bp, Homo sapien
gtgggggttcagaacaagcaagaca

SEQ ID NO: 2983338 - DNA, 25 bp, Homo sapien
ccggtgggggttcagaacaagcaag

SEQ ID NO: 2983339 - DNA, 25 bp, Homo sapien
ggagtggtgctgagggccttcctgg

SEQ ID NO: 2983340 - DNA, 25 bp, Homo sapien
tgagggccttcctggggtggtagct

SEQ ID NO: 2983341 - DNA, 25 bp, Homo sapien
gctgagggccttcctggggtggtag

SEQ ID NO: 2983342 - DNA, 25 bp, Homo sapien
gggccttcctggggtggtagcttgc

SEQ ID NO: 2983343 - DNA, 25 bp, Homo sapien
accctccgaggtgtagcagaggtgc

SEQ ID NO: 2983344 - DNA, 25 bp, Homo sapien
gtgtagcagaggtgctcacaggccc

SEQ ID NO: 2983345 - DNA, 25 bp, Homo sapien
gacctcagtcaaggggacatgcagg

SEQ ID NO: 2983346 - DNA, 25 bp, Homo sapien
acaggccccgggacctcagtcaagg

SEQ ID NO: 2983347 - DNA, 25 bp, Homo sapien
caggtcataggctgatgccacgatg

SEQ ID NO: 2983348 - DNA, 25 bp, Homo sapien
atgggtcctgcccagtattctgagc

SEQ ID NO: 2983349 - DNA, 25 bp, Homo sapien
ctgatgccacgatggcaaagatgtg

SEQ ID NO: 2983350 - DNA, 25 bp, Homo sapien
tattctgagccaggtcataggctga

SEQ ID NO: 2983351 - DNA, 25 bp, Homo sapien
cccatgggttcagccacccaggaag

SEQ ID NO: 2983352 - DNA, 25 bp, Homo sapien
gccccatcaaccctcagtgtggccc

SEQ ID NO: 2983353 - DNA, 25 bp, Homo sapien
cgccccatcaaccctcagtgtggcc

SEQ ID NO: 2983354 - DNA, 25 bp, Homo sapien
tcagtgtggcccatgggttcagcca

SEQ ID NO: 2983355 - DNA, 25 bp, Homo sapien
gtgacagctagcctggagagacccc

SEQ ID NO: 2983356 - DNA, 25 bp, Homo sapien
gatgtgttggttggtagggtctcca

SEQ ID NO: 2983357 - DNA, 25 bp, Homo sapien
gaggggcacataggaccaccccagt

SEQ ID NO: 2983358 - DNA, 25 bp, Homo sapien
acccaggaagtgggatgtgccaccc

SEQ ID NO: 2983359 - DNA, 25 bp, Homo sapien
catgatctttttggcggcttccgtc

SEQ ID NO: 2983360 - DNA, 25 bp, Homo sapien
tgacactctcggttccccgtctgat

SEQ ID NO: 2983361 - DNA, 25 bp, Homo sapien
ctgcatgatctttttggcggcttcc

SEQ ID NO: 2983362 - DNA, 25 bp, Homo sapien
ttggcggcttccgtcttccctgagc

SEQ ID NO: 2983363 - DNA, 25 bp, Homo sapien
aagcatccctgggcagcagtagccc

SEQ ID NO: 2983364 - DNA, 25 bp, Homo sapien
cagctgaccccaggagacgccagag

SEQ ID NO: 2983365 - DNA, 25 bp, Homo sapien
cccaccagcaggcatcccagctagg

SEQ ID NO: 2983366 - DNA, 25 bp, Homo sapien
ggcgtcagtcccatcagaaagggca

SEQ ID NO: 2983367 - DNA, 25 bp, Homo sapien
tggcattggcattgaggatggtctt

SEQ ID NO: 2983368 - DNA, 25 bp, Homo sapien
tgagtataggcagcatatcctccac

SEQ ID NO: 2983369 - DNA, 25 bp, Homo sapien
tcttggcatggccaaagctgctgag

SEQ ID NO: 2983370 - DNA, 25 bp, Homo sapien
ctggccgaagcggctggcattggca

SEQ ID NO: 2983371 - DNA, 25 bp, Homo sapien
gggccccgtgcagaagaagccctac

SEQ ID NO: 2983372 - DNA, 25 bp, Homo sapien
agccctaccagggtctggaccccag

SEQ ID NO: 2983373 - DNA, 25 bp, Homo sapien
gacccaggaagggtaagtgattgta

SEQ ID NO: 2983374 - DNA, 25 bp, Homo sapien
taagtgattgtaggtgccccctgca

SEQ ID NO: 2983375 - DNA, 25 bp, Homo sapien
caagtagataatgagacacagaggc

SEQ ID NO: 2983376 - DNA, 25 bp, Homo sapien
tctcaagtagataatgagacacaga

SEQ ID NO: 2983377 - DNA, 25 bp, Homo sapien
agacacagaggctcccacgatgacc

SEQ ID NO: 2983378 - DNA, 25 bp, Homo sapien
ggaggtctcaagtagataatgagac

SEQ ID NO: 2983379 - DNA, 25 bp, Homo sapien
aaaaaacatggaagctccgctcagc

SEQ ID NO: 2983380 - DNA, 25 bp, Homo sapien
aaaacatggaagctccgctcagcct

SEQ ID NO: 2983381 - DNA, 25 bp, Homo sapien
gagccgctcccgctctatggagtcc

SEQ ID NO: 2983382 - DNA, 25 bp, Homo sapien
taagtctccggtccctgcagggaga

SEQ ID NO: 2983383 - DNA, 25 bp, Homo sapien
tagtagtaagtctccggtccctgca

SEQ ID NO: 2983384 - DNA, 25 bp, Homo sapien
ctcccgctctatggagtccagccct

SEQ ID NO: 2983385 - DNA, 25 bp, Homo sapien
agcacagcccagacggcattcaact

SEQ ID NO: 2983386 - DNA, 25 bp, Homo sapien
aagccgagcccctgcagtgccttca

SEQ ID NO: 2983387 - DNA, 25 bp, Homo sapien
gacggcattcaactcctctgggcac

SEQ ID NO: 2983388 - DNA, 25 bp, Homo sapien
cgagcccctgcagtgccttcagcag

SEQ ID NO: 2983389 - DNA, 25 bp, Homo sapien
ccatagctgctcatctaatgccaga

SEQ ID NO: 2983390 - DNA, 25 bp, Homo sapien
gggatctacccacttttcagggcag

SEQ ID NO: 2983391 - DNA, 25 bp, Homo sapien
gggcagcccagcactctgtagtctc

SEQ ID NO: 2983392 - DNA, 25 bp, Homo sapien
ttggcgtcattaccactgccctgat

SEQ ID NO: 2983393 - DNA, 25 bp, Homo sapien
tgtgtggatctcagcccagctagac

SEQ ID NO: 2983394 - DNA, 25 bp, Homo sapien
gtgtggatctcagcccagctagaca

SEQ ID NO: 2983395 - DNA, 25 bp, Homo sapien
tacccgcagcagtcgggctgctgtg

SEQ ID NO: 2983396 - DNA, 25 bp, Homo sapien
tccaggcactctggtggtacccgca

SEQ ID NO: 2983397 - DNA, 25 bp, Homo sapien
tgcagccctcatggtgcttactcag

SEQ ID NO: 2983398 - DNA, 25 bp, Homo sapien
gccctcatggtgcttactcagcctg

SEQ ID NO: 2983399 - DNA, 25 bp, Homo sapien
cagctggtgtgtcaggcctgcagcc

SEQ ID NO: 2983400 - DNA, 25 bp, Homo sapien
ggtgcttactcagcctgtgggtcag

SEQ ID NO: 2983401 - DNA, 25 bp, Homo sapien
acgggcagggatcgcgagacctggc

SEQ ID NO: 2983402 - DNA, 25 bp, Homo sapien
gcgagacctggccatagggcgtctc

SEQ ID NO: 2983403 - DNA, 25 bp, Homo sapien
gatcgcgagacctggccatagggcg

SEQ ID NO: 2983404 - DNA, 25 bp, Homo sapien
gcagggatcgcgagacctggccata

SEQ ID NO: 2983405 - DNA, 25 bp, Homo sapien
cctgctctgactctcacccgtctct

SEQ ID NO: 2983406 - DNA, 25 bp, Homo sapien
tgactctcacccgtctctagggcca

SEQ ID NO: 2983407 - DNA, 25 bp, Homo sapien
gagccacatagagccgtgcctcggg

SEQ ID NO: 2983408 - DNA, 25 bp, Homo sapien
taggcatggcgggtgggtgagccac

SEQ ID NO: 2983409 - DNA, 25 bp, Homo sapien
gacagtgacggtgccaatgctgcct

SEQ ID NO: 2983410 - DNA, 25 bp, Homo sapien
cagccgtgcattggttctcctcaga

SEQ ID NO: 2983411 - DNA, 25 bp, Homo sapien
tggaagaggcgggaatacagtgcct

SEQ ID NO: 2983412 - DNA, 25 bp, Homo sapien
cgtaggcatccacgacagtgacggt

SEQ ID NO: 2983413 - DNA, 25 bp, Homo sapien
tctgaaactcacaaggtaggtcctg

SEQ ID NO: 2983414 - DNA, 25 bp, Homo sapien
tttacagacgggaacgctggacctc

SEQ ID NO: 2983415 - DNA, 25 bp, Homo sapien
tcaagtctaaaggatccggcacagc

SEQ ID NO: 2983416 - DNA, 25 bp, Homo sapien
ccagggcgcagggatgagtaatacc

SEQ ID NO: 2983417 - DNA, 25 bp, Homo sapien
tggagaagagctgtaggcgctcgct

SEQ ID NO: 2983418 - DNA, 25 bp, Homo sapien
cgctcgctggcgaggttgttgcaca

SEQ ID NO: 2983419 - DNA, 25 bp, Homo sapien
ctggcgaggttgttgcacagttgct

SEQ ID NO: 2983420 - DNA, 25 bp, Homo sapien
gaggttgttgcacagttgctccagg

SEQ ID NO: 2983421 - DNA, 25 bp, Homo sapien
aggacagcaactcccgccgacactc

SEQ ID NO: 2983422 - DNA, 25 bp, Homo sapien
acagcaactcccgccgacactcctc

SEQ ID NO: 2983423 - DNA, 25 bp, Homo sapien
caggacagcaactcccgccgacact

SEQ ID NO: 2983424 - DNA, 25 bp, Homo sapien
gacagcaactcccgccgacactcct

SEQ ID NO: 2983425 - DNA, 25 bp, Homo sapien
aggtctaggcaggactccctcggag

SEQ ID NO: 2983426 - DNA, 25 bp, Homo sapien
ggctgatctaccaggaggtctaggc

SEQ ID NO: 2983427 - DNA, 25 bp, Homo sapien
ggacagccatgtctgggcgtccagg

SEQ ID NO: 2983428 - DNA, 25 bp, Homo sapien
tctgggcgtccaggatactcaggag

SEQ ID NO: 2983429 - DNA, 25 bp, Homo sapien
tctcaaccactaattgggaaaatgg

SEQ ID NO: 2983430 - DNA, 25 bp, Homo sapien
gccccatattcaggatcacgttata

SEQ ID NO: 2983431 - DNA, 25 bp, Homo sapien
gggtgattttgtatttggctctgcg

SEQ ID NO: 2983432 - DNA, 25 bp, Homo sapien
ttgagcttccacagaaactcctgct

SEQ ID NO: 2983433 - DNA, 25 bp, Homo sapien
gattccaaaagtgatcttgggacct

SEQ ID NO: 2983434 - DNA, 25 bp, Homo sapien
cttgggacctcaaagacactcgtga

SEQ ID NO: 2983435 - DNA, 25 bp, Homo sapien
gacctaagtgatattgctgagccct

SEQ ID NO: 2983436 - DNA, 25 bp, Homo sapien
cccacctcggactcagaaaatggta

SEQ ID NO: 2983437 - DNA, 25 bp, Homo sapien
gtggtcaccatggtgatagtggctc

SEQ ID NO: 2983438 - DNA, 25 bp, Homo sapien
cataatgtcgcacggtgaacacggg

SEQ ID NO: 2983439 - DNA, 25 bp, Homo sapien
tcaccatggtgatagtggctcttct

SEQ ID NO: 2983440 - DNA, 25 bp, Homo sapien
tggtaggtgacagtccctgcataat

SEQ ID NO: 2983441 - DNA, 25 bp, Homo sapien
gacaggtgtccaagccttgcaaggg

SEQ ID NO: 2983442 - DNA, 25 bp, Homo sapien
gcaacgccagagcttaggtctccat

SEQ ID NO: 2983443 - DNA, 25 bp, Homo sapien
gctcagaaggcgaagtaaactgcca

SEQ ID NO: 2983444 - DNA, 25 bp, Homo sapien
cacgcgtgcagcttcttggtaggca

SEQ ID NO: 2983445 - DNA, 25 bp, Homo sapien
caataggttgactagacaagaatgt

SEQ ID NO: 2983446 - DNA, 25 bp, Homo sapien
tagccttgggtctgccactggactt

SEQ ID NO: 2983447 - DNA, 25 bp, Homo sapien
gagaagaatctaccctctccccagg

SEQ ID NO: 2983448 - DNA, 25 bp, Homo sapien
gggctttaacctatgctagtcaata

SEQ ID NO: 2983449 - DNA, 25 bp, Homo sapien
cagctgatcccggtttctgtttaaa

SEQ ID NO: 2983450 - DNA, 25 bp, Homo sapien
cacagcagggtccagctgatcccgg

SEQ ID NO: 2983451 - DNA, 25 bp, Homo sapien
tccaccacagcagggtccagctgat

SEQ ID NO: 2983452 - DNA, 25 bp, Homo sapien
cagggtccagctgatcccggtttct

SEQ ID NO: 2983453 - DNA, 25 bp, Homo sapien
tcgccctcccctggactggggctct

SEQ ID NO: 2983454 - DNA, 25 bp, Homo sapien
ctggaagcgagaggccagcgtgggt

SEQ ID NO: 2983455 - DNA, 25 bp, Homo sapien
ccagcgtgggtctgcctcgccctcc

SEQ ID NO: 2983456 - DNA, 25 bp, Homo sapien
tctgcctcctggaacaggctgccca

SEQ ID NO: 2983457 - DNA, 25 bp, Homo sapien
ctgcccagccgggctatgaggtcct

SEQ ID NO: 2983458 - DNA, 25 bp, Homo sapien
gcccagccgggctatgaggtcctcc

SEQ ID NO: 2983459 - DNA, 25 bp, Homo sapien
tgcccagccgggctatgaggtcctc

SEQ ID NO: 2983460 - DNA, 25 bp, Homo sapien
ggcactggatgaaatagacatggct

SEQ ID NO: 2983461 - DNA, 25 bp, Homo sapien
gcactggatgaaatagacatggctc

SEQ ID NO: 2983462 - DNA, 25 bp, Homo sapien
ggcctccagtatggctgcctggtgc

SEQ ID NO: 2983463 - DNA, 25 bp, Homo sapien
acggcctccagtatggctgcctggt

SEQ ID NO: 2983464 - DNA, 25 bp, Homo sapien
tgtcacatgtcccacgtcaaagagg

SEQ ID NO: 2983465 - DNA, 25 bp, Homo sapien
ggtgcagttgctctgtcacatgtcc

SEQ ID NO: 2983466 - DNA, 25 bp, Homo sapien
aggaaggcctcaaagggcacacgca

SEQ ID NO: 2983467 - DNA, 25 bp, Homo sapien
ggaaggcctcaaagggcacacgcac

SEQ ID NO: 2983468 - DNA, 25 bp, Homo sapien
gccaggaaggcctcaaagggcacac

SEQ ID NO: 2983469 - DNA, 25 bp, Homo sapien
caggaaggcctcaaagggcacacgc

SEQ ID NO: 2983470 - DNA, 25 bp, Homo sapien
tcacaggtccagatggtggtaccag

SEQ ID NO: 2983471 - DNA, 25 bp, Homo sapien
gatctgactcaaggctgggaacacc

SEQ ID NO: 2983472 - DNA, 25 bp, Homo sapien
ccatcacaggctaaggaggtccaca

SEQ ID NO: 2983473 - DNA, 25 bp, Homo sapien
tgctgtgggcactagaccgtgagcc

SEQ ID NO: 2983474 - DNA, 25 bp, Homo sapien
cacttctcccggtcagagaggtctt

SEQ ID NO: 2983475 - DNA, 25 bp, Homo sapien
ggctcaggacggcaccacacttctc

SEQ ID NO: 2983476 - DNA, 25 bp, Homo sapien
caaggtgatagagaggtgattcggc

SEQ ID NO: 2983477 - DNA, 25 bp, Homo sapien
gtgatagagaggtgattcggccccc

SEQ ID NO: 2983478 - DNA, 25 bp, Homo sapien
ggaacccacgcatgcgagcctgcat

SEQ ID NO: 2983479 - DNA, 25 bp, Homo sapien
cgctggcgggagatgcaggtgtgga

SEQ ID NO: 2983480 - DNA, 25 bp, Homo sapien
cggtgcaggtcgaccagggcctggg

SEQ ID NO: 2983481 - DNA, 25 bp, Homo sapien
aggtgtggaagctgcggtgcaggtc

SEQ ID NO: 2983482 - DNA, 25 bp, Homo sapien
agccctggctccaacgcctgcagac

SEQ ID NO: 2983483 - DNA, 25 bp, Homo sapien
ttcagccctggctccaacgcctgca

SEQ ID NO: 2983484 - DNA, 25 bp, Homo sapien
tcagccctggctccaacgcctgcag

SEQ ID NO: 2983485 - DNA, 25 bp, Homo sapien
cagccctggctccaacgcctgcaga

SEQ ID NO: 2983486 - DNA, 25 bp, Homo sapien
tgaggcagacggtcagccaacagct

SEQ ID NO: 2983487 - DNA, 25 bp, Homo sapien
gcatctggcccaagggtagatgagg

SEQ ID NO: 2983488 - DNA, 25 bp, Homo sapien
gtagatgaggcagacggtcagccaa

SEQ ID NO: 2983489 - DNA, 25 bp, Homo sapien
agatgaggcagacggtcagccaaca

SEQ ID NO: 2983490 - DNA, 25 bp, Homo sapien
ccagagtttctgtttgcgggatgaa

SEQ ID NO: 2983491 - DNA, 25 bp, Homo sapien
gggcaacttcatagagactcaagta

SEQ ID NO: 2983492 - DNA, 25 bp, Homo sapien
gaaatagatagtggagatgcctggc

SEQ ID NO: 2983493 - DNA, 25 bp, Homo sapien
cagccctcgagttactctctgggaa

SEQ ID NO: 2983494 - DNA, 25 bp, Homo sapien
tgcccgccgccggaggtaccgcttc

SEQ ID NO: 2983495 - DNA, 25 bp, Homo sapien
ccagcaggatggtgttcagctgtcc

SEQ ID NO: 2983496 - DNA, 25 bp, Homo sapien
ggtgttcagctgtcccaaagctgcc

SEQ ID NO: 2983497 - DNA, 25 bp, Homo sapien
agtctctgccgcctctggagcaggg

SEQ ID NO: 2983498 - DNA, 25 bp, Homo sapien
caaggccctttcgctgctatgccag

SEQ ID NO: 2983499 - DNA, 25 bp, Homo sapien
tttcgctgctatgccagccctgcca

SEQ ID NO: 2983500 - DNA, 25 bp, Homo sapien
tatgccagccctgccaacgcccaag

SEQ ID NO: 2983501 - DNA, 25 bp, Homo sapien
ctccaaggccctttcgctgctatgc

SEQ ID NO: 2983502 - DNA, 25 bp, Homo sapien
ccgccgtcttcagcatgacggccag

SEQ ID NO: 2983503 - DNA, 25 bp, Homo sapien
gctcagccgggatctccaagcgccc

SEQ ID NO: 2983504 - DNA, 25 bp, Homo sapien
tttccgccgtcttcagcatgacggc

SEQ ID NO: 2983505 - DNA, 25 bp, Homo sapien
cagccgggatctccaagcgccccag

SEQ ID NO: 2983506 - DNA, 25 bp, Homo sapien
gaaagggaacaggtcaatgtctgct

SEQ ID NO: 2983507 - DNA, 25 bp, Homo sapien
aagggaacaggtcaatgtctgctgg

SEQ ID NO: 2983508 - DNA, 25 bp, Homo sapien
ggccgggcaggaacctcaggcggca

SEQ ID NO: 2983509 - DNA, 25 bp, Homo sapien
gcggcaggcactcggtgatgctccc

SEQ ID NO: 2983510 - DNA, 25 bp, Homo sapien
ggcacgctgagggttgtctccatcc

SEQ ID NO: 2983511 - DNA, 25 bp, Homo sapien
ggttaggggcttcgccagtggctgc

SEQ ID NO: 2983512 - DNA, 25 bp, Homo sapien
ctgggttaggggcttcgccagtggc

SEQ ID NO: 2983513 - DNA, 25 bp, Homo sapien
ccagggcacgctgagggttgtctcc

SEQ ID NO: 2983514 - DNA, 25 bp, Homo sapien
ctgagcaaaacagccatgagggccc

SEQ ID NO: 2983515 - DNA, 25 bp, Homo sapien
ttcatctgggttctgccatagctgg

SEQ ID NO: 2983516 - DNA, 25 bp, Homo sapien
caggtatgcgcccatgatctgcctc

SEQ ID NO: 2983517 - DNA, 25 bp, Homo sapien
cagctggctaaagagctcattccgc

SEQ ID NO: 2983518 - DNA, 25 bp, Homo sapien
cctgggggcctggtcagacacgaac

SEQ ID NO: 2983519 - DNA, 25 bp, Homo sapien
tgctggcacagcgctgccatgcccc

SEQ ID NO: 2983520 - DNA, 25 bp, Homo sapien
cttgtgctggcacagcgctgccatg

SEQ ID NO: 2983521 - DNA, 25 bp, Homo sapien
ctggcacagcgctgccatgcccctg

SEQ ID NO: 2983522 - DNA, 25 bp, Homo sapien
ccccgccgccatccggccagccact

SEQ ID NO: 2983523 - DNA, 25 bp, Homo sapien
aggccagctgcgactgctccaaggc

SEQ ID NO: 2983524 - DNA, 25 bp, Homo sapien
cgctgaaggtgaacacatccagcgc

SEQ ID NO: 2983525 - DNA, 25 bp, Homo sapien
gtgaacacatccagcgccatgcggc

SEQ ID NO: 2983526 - DNA, 25 bp, Homo sapien
tgctccccggtggtccaagactcca

SEQ ID NO: 2983527 - DNA, 25 bp, Homo sapien
cccggtggtccaagactccacctcg

SEQ ID NO: 2983528 - DNA, 25 bp, Homo sapien
ctgctccccggtggtccaagactcc

SEQ ID NO: 2983529 - DNA, 25 bp, Homo sapien
gctccccggtggtccaagactccac

SEQ ID NO: 2983530 - DNA, 25 bp, Homo sapien
ccctccacttccacaagggctccag

SEQ ID NO: 2983531 - DNA, 25 bp, Homo sapien
cacttccacaagggctccagcatgg

SEQ ID NO: 2983532 - DNA, 25 bp, Homo sapien
cacaagggctccagcatgggcattt

SEQ ID NO: 2983533 - DNA, 25 bp, Homo sapien
cggccctccacttccacaagggctc

SEQ ID NO: 2983534 - DNA, 25 bp, Homo sapien
gtgcagtgacacagaccagccccgg

SEQ ID NO: 2983535 - DNA, 25 bp, Homo sapien
tgcagtgacacagaccagccccggg

SEQ ID NO: 2983536 - DNA, 25 bp, Homo sapien
agtgacacagaccagccccggggag

SEQ ID NO: 2983537 - DNA, 25 bp, Homo sapien
cagtgacacagaccagccccgggga

SEQ ID NO: 2983538 - DNA, 25 bp, Homo sapien
ctcagtctggctgatcaggtccagc

SEQ ID NO: 2983539 - DNA, 25 bp, Homo sapien
aggtccagcacaaagtcgcagccag

SEQ ID NO: 2983540 - DNA, 25 bp, Homo sapien
gtctggctgatcaggtccagcacaa

SEQ ID NO: 2983541 - DNA, 25 bp, Homo sapien
ctgatcaggtccagcacaaagtcgc

SEQ ID NO: 2983542 - DNA, 25 bp, Homo sapien
ggcagtgagggggcctgaatgccag

SEQ ID NO: 2983543 - DNA, 25 bp, Homo sapien
gggcagtgagggggcctgaatgcca

SEQ ID NO: 2983544 - DNA, 25 bp, Homo sapien
ggggcagtgagggggcctgaatgcc

SEQ ID NO: 2983545 - DNA, 25 bp, Homo sapien
aggggcaaggggaatggcctcggct

SEQ ID NO: 2983546 - DNA, 25 bp, Homo sapien
ggccggaggatatcactggctggaa

SEQ ID NO: 2983547 - DNA, 25 bp, Homo sapien
tctggtccaggaagccgtccaggct

SEQ ID NO: 2983548 - DNA, 25 bp, Homo sapien
ctgaggccggaggatatcactggct

SEQ ID NO: 2983549 - DNA, 25 bp, Homo sapien
gaggccggaggatatcactggctgg

SEQ ID NO: 2983550 - DNA, 25 bp, Homo sapien
cccttcatgcggctgctcagagccc

SEQ ID NO: 2983551 - DNA, 25 bp, Homo sapien
gcgccccctcccttcatgcggctgc

SEQ ID NO: 2983552 - DNA, 25 bp, Homo sapien
ccctcccttcatgcggctgctcaga

SEQ ID NO: 2983553 - DNA, 25 bp, Homo sapien
tgtgtgggcccaatggcgccccctc

SEQ ID NO: 2983554 - DNA, 25 bp, Homo sapien
gggactgtgcccattgctggcatca

SEQ ID NO: 2983555 - DNA, 25 bp, Homo sapien
ggtatgcaggcatctgaatcattcc

SEQ ID NO: 2983556 - DNA, 25 bp, Homo sapien
catcatgggcatgggtgcagggacc

SEQ ID NO: 2983557 - DNA, 25 bp, Homo sapien
atgcctggctggtatgcaggcatct

SEQ ID NO: 2983558 - DNA, 25 bp, Homo sapien
caggattagcgcctgctgctggata

SEQ ID NO: 2983559 - DNA, 25 bp, Homo sapien
ggattagcgcctgctgctggataaa

SEQ ID NO: 2983560 - DNA, 25 bp, Homo sapien
tagcgcctgctgctggataaagttc

SEQ ID NO: 2983561 - DNA, 25 bp, Homo sapien
gattagcgcctgctgctggataaag

SEQ ID NO: 2983562 - DNA, 25 bp, Homo sapien
gcttggaggtgacggctgagggtga

SEQ ID NO: 2983563 - DNA, 25 bp, Homo sapien
gatcccaggtcacgctgtggcttct

SEQ ID NO: 2983564 - DNA, 25 bp, Homo sapien
atcccaggtcacgctgtggcttctc

SEQ ID NO: 2983565 - DNA, 25 bp, Homo sapien
tgggcttggaggtgacggctgaggg

SEQ ID NO: 2983566 - DNA, 25 bp, Homo sapien
tgtcttcagcctcctcggaggtctc

SEQ ID NO: 2983567 - DNA, 25 bp, Homo sapien
ctgatagggcctgtcttcagcctcc

SEQ ID NO: 2983568 - DNA, 25 bp, Homo sapien
ctgtcttcagcctcctcggaggtct

SEQ ID NO: 2983569 - DNA, 25 bp, Homo sapien
ggcctgtcttcagcctcctcggagg

SEQ ID NO: 2983570 - DNA, 25 bp, Homo sapien
gaaatagttccgtttctgctggaag

SEQ ID NO: 2983571 - DNA, 25 bp, Homo sapien
aatagttccgtttctgctggaagct

SEQ ID NO: 2983572 - DNA, 25 bp, Homo sapien
aaatagttccgtttctgctggaagc

SEQ ID NO: 2983573 - DNA, 25 bp, Homo sapien
tagttccgtttctgctggaagctct

SEQ ID NO: 2983574 - DNA, 25 bp, Homo sapien
gatgtggaccttggccgggggcttc

SEQ ID NO: 2983575 - DNA, 25 bp, Homo sapien
ttggccgggggcttcatcgtcctca

SEQ ID NO: 2983576 - DNA, 25 bp, Homo sapien
ttcatcgtcctcactgtgatctgtg

SEQ ID NO: 2983577 - DNA, 25 bp, Homo sapien
gaccttggccgggggcttcatcgtc

SEQ ID NO: 2983578 - DNA, 25 bp, Homo sapien
tcacgatggggggaggaggagggga

SEQ ID NO: 2983579 - DNA, 25 bp, Homo sapien
cttcacgatggggggaggaggaggg

SEQ ID NO: 2983580 - DNA, 25 bp, Homo sapien
tggccatggcccttggccgctgtct

SEQ ID NO: 2983581 - DNA, 25 bp, Homo sapien
cctcagcctcttttggagctttggc

SEQ ID NO: 2983582 - DNA, 25 bp, Homo sapien
gcccttggccatggcccttggccgc

SEQ ID NO: 2983583 - DNA, 25 bp, Homo sapien
ttttggagctttggccccaccttgc

SEQ ID NO: 2983584 - DNA, 25 bp, Homo sapien
gcgcaccacagtccccctgccttgg

SEQ ID NO: 2983585 - DNA, 25 bp, Homo sapien
cgcaccacagtccccctgccttggg

SEQ ID NO: 2983586 - DNA, 25 bp, Homo sapien
ctgcgcaccacagtccccctgcctt

SEQ ID NO: 2983587 - DNA, 25 bp, Homo sapien
tgcgcaccacagtccccctgccttg

SEQ ID NO: 2983588 - DNA, 25 bp, Homo sapien
cccgggcggctctggtacatgcgga

SEQ ID NO: 2983589 - DNA, 25 bp, Homo sapien
ttgccaatttccctgctgggttgtg

SEQ ID NO: 2983590 - DNA, 25 bp, Homo sapien
atgatgttgccaatttccctgctgg

SEQ ID NO: 2983591 - DNA, 25 bp, Homo sapien
tgtggccgcttgggcttggagtctg

SEQ ID NO: 2983592 - DNA, 25 bp, Homo sapien
caagaggtcactaagttcatagggt

SEQ ID NO: 2983593 - DNA, 25 bp, Homo sapien
attccccgaggagcgggacagccct

SEQ ID NO: 2983594 - DNA, 25 bp, Homo sapien
tcatagggtgattccccgaggagcg

SEQ ID NO: 2983595 - DNA, 25 bp, Homo sapien
ctcgtgggagaagcaagaggtcact

SEQ ID NO: 2983596 - DNA, 25 bp, Homo sapien
gcaccgttgatacccagcttggcca

SEQ ID NO: 2983597 - DNA, 25 bp, Homo sapien
gccagagcctcgtccttggggtcga

SEQ ID NO: 2983598 - DNA, 25 bp, Homo sapien
cgttgatacccagcttggccagagc

SEQ ID NO: 2983599 - DNA, 25 bp, Homo sapien
gtgggcaccgttgatacccagcttg

SEQ ID NO: 2983600 - DNA, 25 bp, Homo sapien
gcaataggcagcttctggccaaaca

SEQ ID NO: 2983601 - DNA, 25 bp, Homo sapien
gctagagggcccaagctgtagcggg

SEQ ID NO: 2983602 - DNA, 25 bp, Homo sapien
gatggagctagagggcccaagctgt

SEQ ID NO: 2983603 - DNA, 25 bp, Homo sapien
ggccttgggtcgaggagccacagct

SEQ ID NO: 2983604 - DNA, 25 bp, Homo sapien
gaacaacttccagggcgtgccggtg

SEQ ID NO: 2983605 - DNA, 25 bp, Homo sapien
cagggcgtgccggtgtaggagaagc

SEQ ID NO: 2983606 - DNA, 25 bp, Homo sapien
gcgcgagtagctgggtggagacccc

SEQ ID NO: 2983607 - DNA, 25 bp, Homo sapien
acgctgccagagggcgcgagtagct

SEQ ID NO: 2983608 - DNA, 25 bp, Homo sapien
cagaggagcctcaggtagtagggat

SEQ ID NO: 2983609 - DNA, 25 bp, Homo sapien
acagaggagcctcaggtagtaggga

SEQ ID NO: 2983610 - DNA, 25 bp, Homo sapien
tcacagaggagcctcaggtagtagg

SEQ ID NO: 2983611 - DNA, 25 bp, Homo sapien
agaggagcctcaggtagtagggatg

SEQ ID NO: 2983612 - DNA, 25 bp, Homo sapien
agagcgaggtggtcaccaccaggtc

SEQ ID NO: 2983613 - DNA, 25 bp, Homo sapien
ggcagagcgaggtggtcaccaccag

SEQ ID NO: 2983614 - DNA, 25 bp, Homo sapien
cagagcgaggtggtcaccaccaggt

SEQ ID NO: 2983615 - DNA, 25 bp, Homo sapien
gggggcagagcgaggtggtcaccac

SEQ ID NO: 2983616 - DNA, 25 bp, Homo sapien
tccggatacaggactcggagaaggt

SEQ ID NO: 2983617 - DNA, 25 bp, Homo sapien
cgccgctcattctgggaaatccgga

SEQ ID NO: 2983618 - DNA, 25 bp, Homo sapien
actcggagaaggtgtcccgtaggat

SEQ ID NO: 2983619 - DNA, 25 bp, Homo sapien
tgggaaatccggatacaggactcgg

SEQ ID NO: 2983620 - DNA, 25 bp, Homo sapien
ggtgagagaatccaggtccacctcc

SEQ ID NO: 2983621 - DNA, 25 bp, Homo sapien
cttcggtggtggtgagagaatccag

SEQ ID NO: 2983622 - DNA, 25 bp, Homo sapien
gtggtggtgagagaatccaggtcca

SEQ ID NO: 2983623 - DNA, 25 bp, Homo sapien
gaatccaggtccacctccaagcctc

SEQ ID NO: 2983624 - DNA, 25 bp, Homo sapien
aagcgggagaagtaattggcccagt

SEQ ID NO: 2983625 - DNA, 25 bp, Homo sapien
agaagcgggagaagtaattggccca

SEQ ID NO: 2983626 - DNA, 25 bp, Homo sapien
accacgatgcgcttcttgacgctgt

SEQ ID NO: 2983627 - DNA, 25 bp, Homo sapien
agttgtcccgagcggccaccacgat

SEQ ID NO: 2983628 - DNA, 25 bp, Homo sapien
tgagcagagaatcttcagctggtcg

SEQ ID NO: 2983629 - DNA, 25 bp, Homo sapien
gcagtcgcagcccacggtgggacac

SEQ ID NO: 2983630 - DNA, 25 bp, Homo sapien
cacggtgggacacggctaacagctg

SEQ ID NO: 2983631 - DNA, 25 bp, Homo sapien
gggccttgggtcaccttgagcagtc

SEQ ID NO: 2983632 - DNA, 25 bp, Homo sapien
aatagctcaaccagcgcctcgatgg

SEQ ID NO: 2983633 - DNA, 25 bp, Homo sapien
cgctcttcagtgacagctccagggt

SEQ ID NO: 2983634 - DNA, 25 bp, Homo sapien
aggaatagctcaaccagcgcctcga

SEQ ID NO: 2983635 - DNA, 25 bp, Homo sapien
agcaccagctgctcgctcttcagtg

SEQ ID NO: 2983636 - DNA, 25 bp, Homo sapien
tcctgcctgcccacctgctccccct

SEQ ID NO: 2983637 - DNA, 25 bp, Homo sapien
ccctgtcctgcctgcccacctgctc

SEQ ID NO: 2983638 - DNA, 25 bp, Homo sapien
ctgcctgcccacctgctccccctgc

SEQ ID NO: 2983639 - DNA, 25 bp, Homo sapien
tgtcctgcctgcccacctgctcccc

SEQ ID NO: 2983640 - DNA, 25 bp, Homo sapien
atgtagctgcgcagggcgatgacat

SEQ ID NO: 2983641 - DNA, 25 bp, Homo sapien
gccaccggcagcagcttgatgaggt

SEQ ID NO: 2983642 - DNA, 25 bp, Homo sapien
gcagcttgatgaggtccccacggtg

SEQ ID NO: 2983643 - DNA, 25 bp, Homo sapien
tcagtgatgtagctgcgcagggcga

SEQ ID NO: 2983644 - DNA, 25 bp, Homo sapien
gcactatgtcggcaggaaagagtcc

SEQ ID NO: 2983645 - DNA, 25 bp, Homo sapien
gcagccggctgcactatgtcggcag

SEQ ID NO: 2983646 - DNA, 25 bp, Homo sapien
tatgtcggcaggaaagagtccggaa

SEQ ID NO: 2983647 - DNA, 25 bp, Homo sapien
ggctgcactatgtcggcaggaaaga

SEQ ID NO: 2983648 - DNA, 25 bp, Homo sapien
ccctggttccccgttggacagctga

SEQ ID NO: 2983649 - DNA, 25 bp, Homo sapien
gccctggttccccgttggacagctg

SEQ ID NO: 2983650 - DNA, 25 bp, Homo sapien
cctggttccccgttggacagctgac

SEQ ID NO: 2983651 - DNA, 25 bp, Homo sapien
cagccctggttccccgttggacagc

SEQ ID NO: 2983652 - DNA, 25 bp, Homo sapien
agagacaaggcgagccatcaggagc

SEQ ID NO: 2983653 - DNA, 25 bp, Homo sapien
gaaagtgaagagctgtttattaagc

SEQ ID NO: 2983654 - DNA, 25 bp, Homo sapien
gtgggacacaagagcagcatccagc

SEQ ID NO: 2983655 - DNA, 25 bp, Homo sapien
gggcagccttgaactaagtaccacg

SEQ ID NO: 2983656 - DNA, 25 bp, Homo sapien
agacaccaaaggagcaagaccagaa

SEQ ID NO: 2983657 - DNA, 25 bp, Homo sapien
tggcctccgagtcgtcactgtgtgc

SEQ ID NO: 2983658 - DNA, 25 bp, Homo sapien
tgtagctgtgggagtcgggcagaaa

SEQ ID NO: 2983659 - DNA, 25 bp, Homo sapien
tccgagtcgtcactgtgtgcctggc

SEQ ID NO: 2983660 - DNA, 25 bp, Homo sapien
aggctggtggcctccgagtcgtcac

SEQ ID NO: 2983661 - DNA, 25 bp, Homo sapien
gaagtaacgccgggcgaattcctgc

SEQ ID NO: 2983662 - DNA, 25 bp, Homo sapien
aagtaacgccgggcgaattcctgca

SEQ ID NO: 2983663 - DNA, 25 bp, Homo sapien
agtaacgccgggcgaattcctgcat

SEQ ID NO: 2983664 - DNA, 25 bp, Homo sapien
ttcctgcggcacctccatcagtctg

SEQ ID NO: 2983665 - DNA, 25 bp, Homo sapien
gctgtccgtgtcctttcctgcggca

SEQ ID NO: 2983666 - DNA, 25 bp, Homo sapien
tttcctgcggcacctccatcagtct

SEQ ID NO: 2983667 - DNA, 25 bp, Homo sapien
caggctgtccgtgtcctttcctgcg

SEQ ID NO: 2983668 - DNA, 25 bp, Homo sapien
ttgctcacatcatcactgaggctga

SEQ ID NO: 2983669 - DNA, 25 bp, Homo sapien
caggaagctggctacagccagcttg

SEQ ID NO: 2983670 - DNA, 25 bp, Homo sapien
ggaagctggctacagccagcttgct

SEQ ID NO: 2983671 - DNA, 25 bp, Homo sapien
gccagcttgctcacatcatcactga

SEQ ID NO: 2983672 - DNA, 25 bp, Homo sapien
tcatagagcagatccatctcatcct

SEQ ID NO: 2983673 - DNA, 25 bp, Homo sapien
cttggactggtcacccataaaccgc

SEQ ID NO: 2983674 - DNA, 25 bp, Homo sapien
ggactggtcacccataaaccgcatc

SEQ ID NO: 2983675 - DNA, 25 bp, Homo sapien
ctggtcacccataaaccgcatcagg

SEQ ID NO: 2983676 - DNA, 25 bp, Homo sapien
gataacctggcagtaaatctcatcc

SEQ ID NO: 2983677 - DNA, 25 bp, Homo sapien
ctgcttgataacctggcagtaaatc

SEQ ID NO: 2983678 - DNA, 25 bp, Homo sapien
taacctggcagtaaatctcatccct

SEQ ID NO: 2983679 - DNA, 25 bp, Homo sapien
ggcagtaaatctcatccctcagctt

SEQ ID NO: 2983680 - DNA, 25 bp, Homo sapien
gaagctccagcctcgagtgcagtgt

SEQ ID NO: 2983681 - DNA, 25 bp, Homo sapien
gggaagaagcctgtgagaaggctga

SEQ ID NO: 2983682 - DNA, 25 bp, Homo sapien
gctccagcctcgagtgcagtgttcc

SEQ ID NO: 2983683 - DNA, 25 bp, Homo sapien
tgaggaagctccagcctcgagtgca

SEQ ID NO: 2983684 - DNA, 25 bp, Homo sapien
cctgaatcctgcagaaacttggtca

SEQ ID NO: 2983685 - DNA, 25 bp, Homo sapien
gaatcctgcagaaacttggtcaggt

SEQ ID NO: 2983686 - DNA, 25 bp, Homo sapien
gggcctgaatcctgcagaaacttgg

SEQ ID NO: 2983687 - DNA, 25 bp, Homo sapien
ggcctgaatcctgcagaaacttggt

SEQ ID NO: 2983688 - DNA, 25 bp, Homo sapien
ttgactgtgcgctggaggtgctcct

SEQ ID NO: 2983689 - DNA, 25 bp, Homo sapien
atatttgactgtgcgctggaggtgc

SEQ ID NO: 2983690 - DNA, 25 bp, Homo sapien
ggcgccccccatatttgactgtgcg

SEQ ID NO: 2983691 - DNA, 25 bp, Homo sapien
ccccatatttgactgtgcgctggag

SEQ ID NO: 2983692 - DNA, 25 bp, Homo sapien
ctggatattcgtcctataatccaca

SEQ ID NO: 2983693 - DNA, 25 bp, Homo sapien
gatattcgtcctataatccacaccc

SEQ ID NO: 2983694 - DNA, 25 bp, Homo sapien
tccacaccccccggcaggtgaataa

SEQ ID NO: 2983695 - DNA, 25 bp, Homo sapien
ccacaccccccggcaggtgaataag

SEQ ID NO: 2983696 - DNA, 25 bp, Homo sapien
cttcctgaggctccgtgatacccat

SEQ ID NO: 2983697 - DNA, 25 bp, Homo sapien
aagagggcgaattcctgcacttcct

SEQ ID NO: 2983698 - DNA, 25 bp, Homo sapien
tgatacccatttgccggcacagctc

SEQ ID NO: 2983699 - DNA, 25 bp, Homo sapien
aggaagagggcgaattcctgcactt

SEQ ID NO: 2983700 - DNA, 25 bp, Homo sapien
gagtggccccaccgtgaggctccgt

SEQ ID NO: 2983701 - DNA, 25 bp, Homo sapien
gggagtggccccaccgtgaggctcc

SEQ ID NO: 2983702 - DNA, 25 bp, Homo sapien
tggccccaccgtgaggctccgtccc

SEQ ID NO: 2983703 - DNA, 25 bp, Homo sapien
agtggccccaccgtgaggctccgtc

SEQ ID NO: 2983704 - DNA, 25 bp, Homo sapien
tgggtgctgatgtaggtggagttat

SEQ ID NO: 2983705 - DNA, 25 bp, Homo sapien
ttatcgaagtgcagtggggtctccc

SEQ ID NO: 2983706 - DNA, 25 bp, Homo sapien
actaccacgctgttgaggtattcgg

SEQ ID NO: 2983707 - DNA, 25 bp, Homo sapien
agccgccggctgtgcaggctcacgt

SEQ ID NO: 2983708 - DNA, 25 bp, Homo sapien
ggcgagctgcgcgtctgccttggcg

SEQ ID NO: 2983709 - DNA, 25 bp, Homo sapien
agcctggcgagctgcgcgtctgcct

SEQ ID NO: 2983710 - DNA, 25 bp, Homo sapien
cgagctgcgcgtctgccttggcgct

SEQ ID NO: 2983711 - DNA, 25 bp, Homo sapien
ggcggccagcctggcgagctgcgcg

SEQ ID NO: 2983712 - DNA, 25 bp, Homo sapien
aggttcttgatggaggccgtgttca

SEQ ID NO: 2983713 - DNA, 25 bp, Homo sapien
tgtgtccttccagccgtctcagctc

SEQ ID NO: 2983714 - DNA, 25 bp, Homo sapien
gctttggcacgtaagctagcaggtc

SEQ ID NO: 2983715 - DNA, 25 bp, Homo sapien
tcacctgccgttgcagctgctttgg

SEQ ID NO: 2983716 - DNA, 25 bp, Homo sapien
ggccctggaacctgctctgcttggt

SEQ ID NO: 2983717 - DNA, 25 bp, Homo sapien
ctgcgggtggagagggtgcaggcag

SEQ ID NO: 2983718 - DNA, 25 bp, Homo sapien
ggtgcaggcaggaaatctgactgct

SEQ ID NO: 2983719 - DNA, 25 bp, Homo sapien
aatctgactgctggggccctggaac

SEQ ID NO: 2983720 - DNA, 25 bp, Homo sapien
atgagatgctggcggttgagcccca

SEQ ID NO: 2983721 - DNA, 25 bp, Homo sapien
tcgcagcaccccatagacggtgtag

SEQ ID NO: 2983722 - DNA, 25 bp, Homo sapien
gccccaggagagtgggtccggacag

SEQ ID NO: 2983723 - DNA, 25 bp, Homo sapien
agggcctgcatgctcactcgcagca

SEQ ID NO: 2983724 - DNA, 25 bp, Homo sapien
cttcagggcaatgcggcagtacagg

SEQ ID NO: 2983725 - DNA, 25 bp, Homo sapien
ttcagggcaatgcggcagtacaggc

SEQ ID NO: 2983726 - DNA, 25 bp, Homo sapien
tcagggcaatgcggcagtacaggct

SEQ ID NO: 2983727 - DNA, 25 bp, Homo sapien
accagatggtctgggggttgtcagc

SEQ ID NO: 2983728 - DNA, 25 bp, Homo sapien
tgagccatagttgacttccaggcca

SEQ ID NO: 2983729 - DNA, 25 bp, Homo sapien
agctgagccatagttgacttccagg

SEQ ID NO: 2983730 - DNA, 25 bp, Homo sapien
tctcctccagagggcttagcaggtg

SEQ ID NO: 2983731 - DNA, 25 bp, Homo sapien
gcaagaggcactgctgtctatcagg

SEQ ID NO: 2983732 - DNA, 25 bp, Homo sapien
tgcaagaggcactgctgtctatcag

SEQ ID NO: 2983733 - DNA, 25 bp, Homo sapien
aggaagacagtggtgtatagcagct

SEQ ID NO: 2983734 - DNA, 25 bp, Homo sapien
ggaagacagtggtgtatagcagctc

SEQ ID NO: 2983735 - DNA, 25 bp, Homo sapien
agccgagttcctgcagcccgctttg

SEQ ID NO: 2983736 - DNA, 25 bp, Homo sapien
gatctgatagcatccaaggcagacc

SEQ ID NO: 2983737 - DNA, 25 bp, Homo sapien
agaacagtgatctgatagcatccaa

SEQ ID NO: 2983738 - DNA, 25 bp, Homo sapien
tgctggtgacgtgatagcagcccct

SEQ ID NO: 2983739 - DNA, 25 bp, Homo sapien
tgcttgcaaagcctatagacccttc

SEQ ID NO: 2983740 - DNA, 25 bp, Homo sapien
cacctgtccaaggtatcggaaccta

SEQ ID NO: 2983741 - DNA, 25 bp, Homo sapien
tctgggacacatgtcgaggacagaa

SEQ ID NO: 2983742 - DNA, 25 bp, Homo sapien
ttctcagagcggtcctcatggctgg

SEQ ID NO: 2983743 - DNA, 25 bp, Homo sapien
actgggaggagttctagttagagca

SEQ ID NO: 2983744 - DNA, 25 bp, Homo sapien
ttgcatccttgagcctgcgccttgg

SEQ ID NO: 2983745 - DNA, 25 bp, Homo sapien
caggaatggctgtttataaggagcc

SEQ ID NO: 2983746 - DNA, 25 bp, Homo sapien
caggcttcagagctgcattcactca

SEQ ID NO: 2983747 - DNA, 25 bp, Homo sapien
gctcagcatctgaaggcgtcttggg

SEQ ID NO: 2983748 - DNA, 25 bp, Homo sapien
gaagaaagaagtcggctctctgcct

SEQ ID NO: 2983749 - DNA, 25 bp, Homo sapien
caagtgtcaaattaccgtcgcgagg

SEQ ID NO: 2983750 - DNA, 25 bp, Homo sapien
agagcgctgctcagggacaagacaa

SEQ ID NO: 2983751 - DNA, 25 bp, Homo sapien
gacagtgtcatagctttgcgcccag

SEQ ID NO: 2983752 - DNA, 25 bp, Homo sapien
ttcttagagggacgacaatgccgac

SEQ ID NO: 2983753 - DNA, 25 bp, Homo sapien
tacaggtcttgtgagtctagccagc

SEQ ID NO: 2983754 - DNA, 25 bp, Homo sapien
ttgtcatttggagcgtaaacccgcg

SEQ ID NO: 2983755 - DNA, 25 bp, Homo sapien
gcttcctgttggggctcctgccggg

SEQ ID NO: 2983756 - DNA, 25 bp, Homo sapien
ggcttcctgttggggctcctgccgg

SEQ ID NO: 2983757 - DNA, 25 bp, Homo sapien
ctggcttcctgttggggctcctgcc

SEQ ID NO: 2983758 - DNA, 25 bp, Homo sapien
tggcttcctgttggggctcctgccg

SEQ ID NO: 2983759 - DNA, 25 bp, Homo sapien
gcatctcctgcacgaagtcggtggc

SEQ ID NO: 2983760 - DNA, 25 bp, Homo sapien
gcgcatctcctgcacgaagtcggtg

SEQ ID NO: 2983761 - DNA, 25 bp, Homo sapien
cgcatctcctgcacgaagtcggtgg

SEQ ID NO: 2983762 - DNA, 25 bp, Homo sapien
gtgaaaaggatgatgactgagaagg

SEQ ID NO: 2983763 - DNA, 25 bp, Homo sapien
aaaggatgatgactgagaaggccac

SEQ ID NO: 2983764 - DNA, 25 bp, Homo sapien
ctgtgaaaaggatgatgactgagaa

SEQ ID NO: 2983765 - DNA, 25 bp, Homo sapien
gaaaaggatgatgactgagaaggcc

SEQ ID NO: 2983766 - DNA, 25 bp, Homo sapien
tggtgtcggctgcacctggaccttc

SEQ ID NO: 2983767 - DNA, 25 bp, Homo sapien
gtgtcggctgcacctggaccttcct

SEQ ID NO: 2983768 - DNA, 25 bp, Homo sapien
gtggtgtcggctgcacctggacctt

SEQ ID NO: 2983769 - DNA, 25 bp, Homo sapien
ggtggtgtcggctgcacctggacct

SEQ ID NO: 2983770 - DNA, 25 bp, Homo sapien
aaagtgcaggtaggcgaagaagccc

SEQ ID NO: 2983771 - DNA, 25 bp, Homo sapien
gatgagaggtttgcacctataccag

SEQ ID NO: 2983772 - DNA, 25 bp, Homo sapien
ctcaagttgtcagtgtccaggtacc

SEQ ID NO: 2983773 - DNA, 25 bp, Homo sapien
gatggcctgtgtcatggcattggcc

SEQ ID NO: 2983774 - DNA, 25 bp, Homo sapien
gaatactgacatgctcacgctctgg

SEQ ID NO: 2983775 - DNA, 25 bp, Homo sapien
caagggccaattgcccacaggtggg

SEQ ID NO: 2983776 - DNA, 25 bp, Homo sapien
tttggcatgtatcagcagagcccca

SEQ ID NO: 2983777 - DNA, 25 bp, Homo sapien
gaagctattgcacaaagcccctctg

SEQ ID NO: 2983778 - DNA, 25 bp, Homo sapien
aaagttctctggaagaaaaactcag

SEQ ID NO: 2983779 - DNA, 25 bp, Homo sapien
gaaagttctctggaagaaaaactca

SEQ ID NO: 2983780 - DNA, 25 bp, Homo sapien
ttgttaatctcagtgggtttgaagc

SEQ ID NO: 2983781 - DNA, 25 bp, Homo sapien
aggctgctgtcggagagcaggtctg

SEQ ID NO: 2983782 - DNA, 25 bp, Homo sapien
accggcacaagaagctgcctcttaa

SEQ ID NO: 2983783 - DNA, 25 bp, Homo sapien
cttccccagggaagaccggcacaag

SEQ ID NO: 2983784 - DNA, 25 bp, Homo sapien
tctgtttattctttcccacagtggg

SEQ ID NO: 2983785 - DNA, 25 bp, Homo sapien
tcaggccgcccaggtctgcagcatc

SEQ ID NO: 2983786 - DNA, 25 bp, Homo sapien
ctttcccacagtggggcaactgctg

SEQ ID NO: 2983787 - DNA, 25 bp, Homo sapien
ggccgcccaggtctgcagcatcttt

SEQ ID NO: 2983788 - DNA, 25 bp, Homo sapien
tcacactttgtggagggctgagctg

SEQ ID NO: 2983789 - DNA, 25 bp, Homo sapien
ggcacgtgttcatgagtccctcctg

SEQ ID NO: 2983790 - DNA, 25 bp, Homo sapien
gaccagaccttagttgctgtcacca

SEQ ID NO: 2983791 - DNA, 25 bp, Homo sapien
aacaaacaaaggtgggctagggctg

SEQ ID NO: 2983792 - DNA, 25 bp, Homo sapien
attctgctggtagctgttctgggtc

SEQ ID NO: 2983793 - DNA, 25 bp, Homo sapien
tgattctgctggtagctgttctggg

SEQ ID NO: 2983794 - DNA, 25 bp, Homo sapien
gattctgctggtagctgttctgggt

SEQ ID NO: 2983795 - DNA, 25 bp, Homo sapien
ctgattctgctggtagctgttctgg

SEQ ID NO: 2983796 - DNA, 25 bp, Homo sapien
aataagataatcactgccaggcccc

SEQ ID NO: 2983797 - DNA, 25 bp, Homo sapien
aataagatgagaagcaggacagcgg

SEQ ID NO: 2983798 - DNA, 25 bp, Homo sapien
cctgtgagcctgttagagaaccttg

SEQ ID NO: 2983799 - DNA, 25 bp, Homo sapien
caaggagccagaattggtctcagac

SEQ ID NO: 2983800 - DNA, 25 bp, Homo sapien
tagacatgtacacaaaaaaggccgc

SEQ ID NO: 2983801 - DNA, 25 bp, Homo sapien
aaaaggatatgttggcaaatagaca

SEQ ID NO: 2983802 - DNA, 25 bp, Homo sapien
tgtacacaaaaaaggccgctgatga

SEQ ID NO: 2983803 - DNA, 25 bp, Homo sapien
agacagtctttgtcgtgcaggctgg

SEQ ID NO: 2983804 - DNA, 25 bp, Homo sapien
gattgcgtgggttctgcctaaagct

SEQ ID NO: 2983805 - DNA, 25 bp, Homo sapien
cactgcgcgacggatataagattgc

SEQ ID NO: 2983806 - DNA, 25 bp, Homo sapien
tggctcactcctatgactcaagacg

SEQ ID NO: 2983807 - DNA, 25 bp, Homo sapien
aaaacggcagtttcctgcgcctggc

SEQ ID NO: 2983808 - DNA, 25 bp, Homo sapien
tgcgagagacgacagaacattcttc

SEQ ID NO: 2983809 - DNA, 25 bp, Homo sapien
gctctgaatcttccgcgtaaactgc

SEQ ID NO: 2983810 - DNA, 25 bp, Homo sapien
ctcgattccagcctcgccatcagac

SEQ ID NO: 2983811 - DNA, 25 bp, Homo sapien
tcttccgcgtaaactgcgagagacg

SEQ ID NO: 2983812 - DNA, 25 bp, Homo sapien
tagacgagaaaagtcatcctcccca

SEQ ID NO: 2983813 - DNA, 25 bp, Homo sapien
gcatcagataccaatccgcctttct

SEQ ID NO: 2983814 - DNA, 25 bp, Homo sapien
cccataggcatcagataccaatccg

SEQ ID NO: 2983815 - DNA, 25 bp, Homo sapien
tcatcaccccctagacgagaaaagt

SEQ ID NO: 2983816 - DNA, 25 bp, Homo sapien
tttcagtctctgaatcgtcatcttc

SEQ ID NO: 2983817 - DNA, 25 bp, Homo sapien
gaaacagactaatccacctgcaggg

SEQ ID NO: 2983818 - DNA, 25 bp, Homo sapien
tcttgaccaaacatacgaactgagc

SEQ ID NO: 2983819 - DNA, 25 bp, Homo sapien
gcaagtgggttgttggcctcagcca

SEQ ID NO: 2983820 - DNA, 25 bp, Homo sapien
gtgacacttaaagccccatctggga

SEQ ID NO: 2983821 - DNA, 25 bp, Homo sapien
gattcccagtagatgccttgaacct

SEQ ID NO: 2983822 - DNA, 25 bp, Homo sapien
gaacctctgatagtactgagaccta

SEQ ID NO: 2983823 - DNA, 25 bp, Homo sapien
gactgcagctgacctcaggttactg

SEQ ID NO: 2983824 - DNA, 25 bp, Homo sapien
catgagaggcatgcataaatacttc

SEQ ID NO: 2983825 - DNA, 25 bp, Homo sapien
tctgtgctcacaggtaaccccaaac

SEQ ID NO: 2983826 - DNA, 25 bp, Homo sapien
tgctgccccaacctaaaggacagga

SEQ ID NO: 2983827 - DNA, 25 bp, Homo sapien
tgcttaccgaagagacaagatcaga

SEQ ID NO: 2983828 - DNA, 25 bp, Homo sapien
ttgtttcctatgcaacgcccagcct

SEQ ID NO: 2983829 - DNA, 25 bp, Homo sapien
ttgcaatgctgcaaaaggactcggg

SEQ ID NO: 2983830 - DNA, 25 bp, Homo sapien
gaagggcagcgaatataccaggagc

SEQ ID NO: 2983831 - DNA, 25 bp, Homo sapien
aattctcagttgtcagggctcgcca

SEQ ID NO: 2983832 - DNA, 25 bp, Homo sapien
tcagatcccagagtcttggaagggc

SEQ ID NO: 2983833 - DNA, 25 bp, Homo sapien
gaattggccttgtagactgaagaca

SEQ ID NO: 2983834 - DNA, 25 bp, Homo sapien
ttctataggaatgggtgaaacagga

SEQ ID NO: 2983835 - DNA, 25 bp, Homo sapien
attaagccggctatagaattggcct

SEQ ID NO: 2983836 - DNA, 25 bp, Homo sapien
ggtgaaacaggagtttgccaagact

SEQ ID NO: 2983837 - DNA, 25 bp, Homo sapien
gctcctaaatcctaagacaaaaata

SEQ ID NO: 2983838 - DNA, 25 bp, Homo sapien
gaacactgggcctaatgctcctaaa

SEQ ID NO: 2983839 - DNA, 25 bp, Homo sapien
atacaccaagcaatgggccaagcat

SEQ ID NO: 2983840 - DNA, 25 bp, Homo sapien
tattgagcatgatttatacaccaag

SEQ ID NO: 2983841 - DNA, 25 bp, Homo sapien
tgccctctgagtccaacaagctggg

SEQ ID NO: 2983842 - DNA, 25 bp, Homo sapien
gaggactgccacaccaacttcaggt

SEQ ID NO: 2983843 - DNA, 25 bp, Homo sapien
gatcaacaatctcaagggccacacg

SEQ ID NO: 2983844 - DNA, 25 bp, Homo sapien
caggttgcagtcataaatcagcggc

SEQ ID NO: 2983845 - DNA, 25 bp, Homo sapien
ggagtctaccatgtctaccccaaag

SEQ ID NO: 2983846 - DNA, 25 bp, Homo sapien
gcagcaaacctttaataagtggcag

SEQ ID NO: 2983847 - DNA, 25 bp, Homo sapien
tttgtaacagcagactcccgagatg

SEQ ID NO: 2983848 - DNA, 25 bp, Homo sapien
taatgcaaacagtgtcccatgacag

SEQ ID NO: 2983849 - DNA, 25 bp, Homo sapien
tcccgagatgaaaatgcagactagc

SEQ ID NO: 2983850 - DNA, 25 bp, Homo sapien
gagaccactcaggatttttaaggaa

SEQ ID NO: 2983851 - DNA, 25 bp, Homo sapien
aactgggcaacgtataccctgcctg

SEQ ID NO: 2983852 - DNA, 25 bp, Homo sapien
ccatcgctgaggagaacacaagcca

SEQ ID NO: 2983853 - DNA, 25 bp, Homo sapien
cactgccaggaacactaagggtaag

SEQ ID NO: 2983854 - DNA, 25 bp, Homo sapien
cctgggggtctcgcttttctgcttc

SEQ ID NO: 2983855 - DNA, 25 bp, Homo sapien
cgggcatcctaggaaatgccaaagc

SEQ ID NO: 2983856 - DNA, 25 bp, Homo sapien
gggcatcctaggaaatgccaaagcc

SEQ ID NO: 2983857 - DNA, 25 bp, Homo sapien
ccgggcatcctaggaaatgccaaag

SEQ ID NO: 2983858 - DNA, 25 bp, Homo sapien
tacactgagacaggagtcgagcctg

SEQ ID NO: 2983859 - DNA, 25 bp, Homo sapien
ggagctggtcctatctcacaagcag

SEQ ID NO: 2983860 - DNA, 25 bp, Homo sapien
cattttaggtgacggcaagaggaca

SEQ ID NO: 2983861 - DNA, 25 bp, Homo sapien
ccttggcaggcgctaggcacataaa

SEQ ID NO: 2983862 - DNA, 25 bp, Homo sapien
cttgatttcatcaggcgacatgttc

SEQ ID NO: 2983863 - DNA, 25 bp, Homo sapien
gcgacatgttccgaactctttcaga

SEQ ID NO: 2983864 - DNA, 25 bp, Homo sapien
gggttctggcgggatcttgatttca

SEQ ID NO: 2983865 - DNA, 25 bp, Homo sapien
caagtgatttgaacatctgccaggg

SEQ ID NO: 2983866 - DNA, 25 bp, Homo sapien
tatccgacctcagtagccgagtctc

SEQ ID NO: 2983867 - DNA, 25 bp, Homo sapien
gacttcactgaaggcaagacagggc

SEQ ID NO: 2983868 - DNA, 25 bp, Homo sapien
aggctaacaggaggtaaagtggact

SEQ ID NO: 2983869 - DNA, 25 bp, Homo sapien
gccaactcctgagatgaggctaaca

SEQ ID NO: 2983870 - DNA, 25 bp, Homo sapien
ttgttgtctggttgtctggcacgga

SEQ ID NO: 2983871 - DNA, 25 bp, Homo sapien
gtctggcacggagggtgacgtgatt

SEQ ID NO: 2983872 - DNA, 25 bp, Homo sapien
ttgtctggcacggagggtgacgtga

SEQ ID NO: 2983873 - DNA, 25 bp, Homo sapien
ctggttgtctggcacggagggtgac

SEQ ID NO: 2983874 - DNA, 25 bp, Homo sapien
ggtgggggggtgtatgacagaagcc

SEQ ID NO: 2983875 - DNA, 25 bp, Homo sapien
gggtgtatgacagaagcccacccct

SEQ ID NO: 2983876 - DNA, 25 bp, Homo sapien
gggggtgtatgacagaagcccaccc

SEQ ID NO: 2983877 - DNA, 25 bp, Homo sapien
tgtatgacagaagcccacccctcca

SEQ ID NO: 2983878 - DNA, 25 bp, Homo sapien
tcttcctttggataatgtagttcat

SEQ ID NO: 2983879 - DNA, 25 bp, Homo sapien
aatgtagttcatatccattccctcc

SEQ ID NO: 2983880 - DNA, 25 bp, Homo sapien
gttcataaagcttctggatcttgtc

SEQ ID NO: 2983881 - DNA, 25 bp, Homo sapien
cctcctttatctttcgttcataaag

SEQ ID NO: 2983882 - DNA, 25 bp, Homo sapien
tcttaaatggcaagcctctggctgg

SEQ ID NO: 2983883 - DNA, 25 bp, Homo sapien
cagggacgagaactcagccaggtct

SEQ ID NO: 2983884 - DNA, 25 bp, Homo sapien
tgggttagcacagtccgccatgtcc

SEQ ID NO: 2983885 - DNA, 25 bp, Homo sapien
taataactcaataaactctgcaggc

SEQ ID NO: 2983886 - DNA, 25 bp, Homo sapien
ctgaaagaacagtgccggcgctgag

SEQ ID NO: 2983887 - DNA, 25 bp, Homo sapien
tggaggaagaccagacatcgctctg

SEQ ID NO: 2983888 - DNA, 25 bp, Homo sapien
caaggtgacggctgagttttgtctc

SEQ ID NO: 2983889 - DNA, 25 bp, Homo sapien
gcacagctggattgggcttaccaca

SEQ ID NO: 2983890 - DNA, 25 bp, Homo sapien
tagttggtgccaagctcgtcaatgg

SEQ ID NO: 2983891 - DNA, 25 bp, Homo sapien
tttgggtagttggtgccaagctcgt

SEQ ID NO: 2983892 - DNA, 25 bp, Homo sapien
gctcgtcaatggcacagaactggat

SEQ ID NO: 2983893 - DNA, 25 bp, Homo sapien
tgccaagctcgtcaatggcacagaa

SEQ ID NO: 2983894 - DNA, 25 bp, Homo sapien
catggaacaagcaaaggaccctggg

SEQ ID NO: 2983895 - DNA, 25 bp, Homo sapien
gccggccaccggaatctctttattg

SEQ ID NO: 2983896 - DNA, 25 bp, Homo sapien
tatttcagaacaatagggactcaaa

SEQ ID NO: 2983897 - DNA, 25 bp, Homo sapien
acagggactgtgctttcaacgagcc

SEQ ID NO: 2983898 - DNA, 25 bp, Homo sapien
ttggtctttagccaaggggcggctg

SEQ ID NO: 2983899 - DNA, 25 bp, Homo sapien
tctttagccaaggggcggctggcaa

SEQ ID NO: 2983900 - DNA, 25 bp, Homo sapien
ttagccaaggggcggctggcaagtg

SEQ ID NO: 2983901 - DNA, 25 bp, Homo sapien
gtctttagccaaggggcggctggca

SEQ ID NO: 2983902 - DNA, 25 bp, Homo sapien
accagccatggggatcaaacatatc

SEQ ID NO: 2983903 - DNA, 25 bp, Homo sapien
ctaatgcctcatagtaggagtcctc

SEQ ID NO: 2983904 - DNA, 25 bp, Homo sapien
agaccagccatggggatcaaacata

SEQ ID NO: 2983905 - DNA, 25 bp, Homo sapien
gaccagccatggggatcaaacatat

SEQ ID NO: 2983906 - DNA, 25 bp, Homo sapien
ttccaatttgtccatctcaattttc

SEQ ID NO: 2983907 - DNA, 25 bp, Homo sapien
tttgtccatctcaattttctgggcc

SEQ ID NO: 2983908 - DNA, 25 bp, Homo sapien
ccttttccaatttgtccatctcaat

SEQ ID NO: 2983909 - DNA, 25 bp, Homo sapien
ttggccttttccaatttgtccatct

SEQ ID NO: 2983910 - DNA, 25 bp, Homo sapien
acctaataggtagcacccaggcgag

SEQ ID NO: 2983911 - DNA, 25 bp, Homo sapien
tgatgcccggctctgagactggtca

SEQ ID NO: 2983912 - DNA, 25 bp, Homo sapien
gactggtcacaaagggaacaaggcc

SEQ ID NO: 2983913 - DNA, 25 bp, Homo sapien
tgtagcaaacaagtctccgagggca

SEQ ID NO: 2983914 - DNA, 25 bp, Homo sapien
ggacagctccggtccccaggcgctg

SEQ ID NO: 2983915 - DNA, 25 bp, Homo sapien
aggacagctccggtccccaggcgct

SEQ ID NO: 2983916 - DNA, 25 bp, Homo sapien
gaagagaataagaccaggcaaagct

SEQ ID NO: 2983917 - DNA, 25 bp, Homo sapien
tagggcgagatgtctaagaagaacc

SEQ ID NO: 2983918 - DNA, 25 bp, Homo sapien
ggcactacacaaaagaggcattgga

SEQ ID NO: 2983919 - DNA, 25 bp, Homo sapien
acctcacatgcccagaaccgtttgg

SEQ ID NO: 2983920 - DNA, 25 bp, Homo sapien
gacgtggcgttggtcgtggtgcctt

SEQ ID NO: 2983921 - DNA, 25 bp, Homo sapien
ttttggtgcccgtcacaaactcaat

SEQ ID NO: 2983922 - DNA, 25 bp, Homo sapien
tagtggtggtggacgtggcgttggt

SEQ ID NO: 2983923 - DNA, 25 bp, Homo sapien
tggtcgtggtgccttttttggtgcc

SEQ ID NO: 2983924 - DNA, 25 bp, Homo sapien
cccagactccaaaggtgcttctcaa

SEQ ID NO: 2983925 - DNA, 25 bp, Homo sapien
caggatcacgatccaccaatgagcg

SEQ ID NO: 2983926 - DNA, 25 bp, Homo sapien
gatccaccaatgagcggtgccctct

SEQ ID NO: 2983927 - DNA, 25 bp, Homo sapien
tcacgatccaccaatgagcggtgcc

SEQ ID NO: 2983928 - DNA, 25 bp, Homo sapien
aaatcaggatcacgatccaccaatg

SEQ ID NO: 2983929 - DNA, 25 bp, Homo sapien
cttcttcacaatggtgcccacagca

SEQ ID NO: 2983930 - DNA, 25 bp, Homo sapien
gagatgacggtggtcttggagccgc

SEQ ID NO: 2983931 - DNA, 25 bp, Homo sapien
gctgggctatcgttgtcactgggat

SEQ ID NO: 2983932 - DNA, 25 bp, Homo sapien
ctggtggtgaccgtgacaacagctg

SEQ ID NO: 2983933 - DNA, 25 bp, Homo sapien
gggagtaggtcccagtcctgaaata

SEQ ID NO: 2983934 - DNA, 25 bp, Homo sapien
aatacggcacttttaataggcggca

SEQ ID NO: 2983935 - DNA, 25 bp, Homo sapien
aatatacaaagtggcgcctcccact

SEQ ID NO: 2983936 - DNA, 25 bp, Homo sapien
tgcacggtcctttcaagtcctaggg

SEQ ID NO: 2983937 - DNA, 25 bp, Homo sapien
tcaagtgcactcaagggagcacagc

SEQ ID NO: 2983938 - DNA, 25 bp, Homo sapien
cagaggcatacacggataacaacgg

SEQ ID NO: 2983939 - DNA, 25 bp, Homo sapien
tgcaaacagaatgcaggagaggcca

SEQ ID NO: 2983940 - DNA, 25 bp, Homo sapien
tgtcaaccctgaggcaatagtccca

SEQ ID NO: 2983941 - DNA, 25 bp, Homo sapien
actctctgcacaggtcaggatctca

SEQ ID NO: 2983942 - DNA, 25 bp, Homo sapien
tgcacaggtcaggatctcaccccag

SEQ ID NO: 2983943 - DNA, 25 bp, Homo sapien
gtcaggatctcaccccagcccttct

SEQ ID NO: 2983944 - DNA, 25 bp, Homo sapien
aggtcaggatctcaccccagccctt

SEQ ID NO: 2983945 - DNA, 25 bp, Homo sapien
gacctcctgaagtgcccgagtgtgt

SEQ ID NO: 2983946 - DNA, 25 bp, Homo sapien
taagggcttgagaccactcaactgg

SEQ ID NO: 2983947 - DNA, 25 bp, Homo sapien
ggtcccacaagagtaccaggtgcca

SEQ ID NO: 2983948 - DNA, 25 bp, Homo sapien
gcctgtaaacaatgagctgccgcct

SEQ ID NO: 2983949 - DNA, 25 bp, Homo sapien
ttataaagcttttgcataagtcacc

SEQ ID NO: 2983950 - DNA, 25 bp, Homo sapien
aagcttttgcataagtcacctctgg

SEQ ID NO: 2983951 - DNA, 25 bp, Homo sapien
gtttataaagcttttgcataagtca

SEQ ID NO: 2983952 - DNA, 25 bp, Homo sapien
ataaagcttttgcataagtcacctc

SEQ ID NO: 2983953 - DNA, 25 bp, Homo sapien
tgttcaggtcagagaagggcttcat

SEQ ID NO: 2983954 - DNA, 25 bp, Homo sapien
gtgttcaggtcagagaagggcttca

SEQ ID NO: 2983955 - DNA, 25 bp, Homo sapien
cacgggtgttcaggtcagagaaggg

SEQ ID NO: 2983956 - DNA, 25 bp, Homo sapien
gggtgttcaggtcagagaagggctt

SEQ ID NO: 2983957 - DNA, 25 bp, Homo sapien
gctcgggtgcgcggactgccccggg

SEQ ID NO: 2983958 - DNA, 25 bp, Homo sapien
ggcggcctcttagcccccgtccgca

SEQ ID NO: 2983959 - DNA, 25 bp, Homo sapien
tggaggcggcctcttagcccccgtc

SEQ ID NO: 2983960 - DNA, 25 bp, Homo sapien
caggctcgggtgcgcggactgcccc

SEQ ID NO: 2983961 - DNA, 25 bp, Homo sapien
ggaggcgctggtgagtcagaccggc

SEQ ID NO: 2983962 - DNA, 25 bp, Homo sapien
agggactgtccgagggcgggcgcgg

SEQ ID NO: 2983963 - DNA, 25 bp, Homo sapien
gagtcagaccggctgcattccttcg

SEQ ID NO: 2983964 - DNA, 25 bp, Homo sapien
cgcgggcgagcagggactgtccgag

SEQ ID NO: 2983965 - DNA, 25 bp, Homo sapien
tgctgtgcgcccgtcctggacctac

SEQ ID NO: 2983966 - DNA, 25 bp, Homo sapien
ctgctgctgtgcgcccgtcctggac

SEQ ID NO: 2983967 - DNA, 25 bp, Homo sapien
cctctcccggccagcctcggctgct

SEQ ID NO: 2983968 - DNA, 25 bp, Homo sapien
tcggctgctgctgtgcgcccgtcct

SEQ ID NO: 2983969 - DNA, 25 bp, Homo sapien
ctgacgctgatcaaggctgccagga

SEQ ID NO: 2983970 - DNA, 25 bp, Homo sapien
gaggctgacgctgatcaaggctgcc

SEQ ID NO: 2983971 - DNA, 25 bp, Homo sapien
ggctgacgctgatcaaggctgccag

SEQ ID NO: 2983972 - DNA, 25 bp, Homo sapien
gagaggctgacgctgatcaaggctg

SEQ ID NO: 2983973 - DNA, 25 bp, Homo sapien
gtgcccaacctgcatttcaatttta

SEQ ID NO: 2983974 - DNA, 25 bp, Homo sapien
agtaggcgcagtccttatccacacg

SEQ ID NO: 2983975 - DNA, 25 bp, Homo sapien
actggggccttcttgcagcggtttg

SEQ ID NO: 2983976 - DNA, 25 bp, Homo sapien
cacacggacacactccgtgcagctc

SEQ ID NO: 2983977 - DNA, 25 bp, Homo sapien
gacacactccgtgcagctcttcact

SEQ ID NO: 2983978 - DNA, 25 bp, Homo sapien
cctgggtgttgcagcgccggtccct

SEQ ID NO: 2983979 - DNA, 25 bp, Homo sapien
gctctccatgaccacgatgctctcc

SEQ ID NO: 2983980 - DNA, 25 bp, Homo sapien
tgttgcagcgccggtccctgaacat

SEQ ID NO: 2983981 - DNA, 25 bp, Homo sapien
tccgcctgggtgttgcagcgccggt

SEQ ID NO: 2983982 - DNA, 25 bp, Homo sapien
acctccagctcaaaatgccgctcct

SEQ ID NO: 2983983 - DNA, 25 bp, Homo sapien
gggacatctggctgcgccgcagggt

SEQ ID NO: 2983984 - DNA, 25 bp, Homo sapien
ttgaggttgtccagatcatcggaca

SEQ ID NO: 2983985 - DNA, 25 bp, Homo sapien
agaagtccatgaggatgtacaggtc

SEQ ID NO: 2983986 - DNA, 25 bp, Homo sapien
aatccaatagtgtagtcgctggtga

SEQ ID NO: 2983987 - DNA, 25 bp, Homo sapien
gacgctgactttgtccacaaacttg

SEQ ID NO: 2983988 - DNA, 25 bp, Homo sapien
aaacttgccaaatccaatagtgtag

SEQ ID NO: 2983989 - DNA, 25 bp, Homo sapien
ttctcaggcctcatgtccgtctgcg

SEQ ID NO: 2983990 - DNA, 25 bp, Homo sapien
gctctccctgcagtttattccggaa

SEQ ID NO: 2983991 - DNA, 25 bp, Homo sapien
cagtttattccggaactcatccaca

SEQ ID NO: 2983992 - DNA, 25 bp, Homo sapien
tgtcaggctgatgacgttcttgaag

SEQ ID NO: 2983993 - DNA, 25 bp, Homo sapien
ctgatgacgttcttgaaggagaagg

SEQ ID NO: 2983994 - DNA, 25 bp, Homo sapien
ctgcaggatggcatcgaagccgccc

SEQ ID NO: 2983995 - DNA, 25 bp, Homo sapien
gatggcatcgaagccgccctcagga

SEQ ID NO: 2983996 - DNA, 25 bp, Homo sapien
aggatggcatcgaagccgccctcag

SEQ ID NO: 2983997 - DNA, 25 bp, Homo sapien
tgcaggatggcatcgaagccgccct

SEQ ID NO: 2983998 - DNA, 25 bp, Homo sapien
tggcagcacccttcccagtgcccac

SEQ ID NO: 2983999 - DNA, 25 bp, Homo sapien
ccctggcctaggctggcagcaccct

SEQ ID NO: 2984000 - DNA, 25 bp, Homo sapien
gctggcagcacccttcccagtgccc

SEQ ID NO: 2984001 - DNA, 25 bp, Homo sapien
aggctggcagcacccttcccagtgc

SEQ ID NO: 2984002 - DNA, 25 bp, Homo sapien
tcctgtactgggtgtaggtgcccgt

SEQ ID NO: 2984003 - DNA, 25 bp, Homo sapien
ttgtgcttggcgagcaggcgcacca

SEQ ID NO: 2984004 - DNA, 25 bp, Homo sapien
caggtggcaccgttcatcgttgcgg

SEQ ID NO: 2984005 - DNA, 25 bp, Homo sapien
gcaccgacgggtagtcctgtgtcct

SEQ ID NO: 2984006 - DNA, 25 bp, Homo sapien
cagctccacgatgttggacgagtcc

SEQ ID NO: 2984007 - DNA, 25 bp, Homo sapien
tccacgatgttggacgagtcctcct

SEQ ID NO: 2984008 - DNA, 25 bp, Homo sapien
cgatgttggacgagtcctcctgcag

SEQ ID NO: 2984009 - DNA, 25 bp, Homo sapien
gctccacgatgttggacgagtcctc

SEQ ID NO: 2984010 - DNA, 25 bp, Homo sapien
ggtgacctctgtccgaaggcctcgg

SEQ ID NO: 2984011 - DNA, 25 bp, Homo sapien
gacccagtcctcgtcttctggaaca

SEQ ID NO: 2984012 - DNA, 25 bp, Homo sapien
ccccgccggatgtgaaaggacccag

SEQ ID NO: 2984013 - DNA, 25 bp, Homo sapien
tgtctagggcccggatgtccaggtt

SEQ ID NO: 2984014 - DNA, 25 bp, Homo sapien
ggcagctggcacacgtgcgtcccat

SEQ ID NO: 2984015 - DNA, 25 bp, Homo sapien
acgtgctcaagggcccgcagctgca

SEQ ID NO: 2984016 - DNA, 25 bp, Homo sapien
gtgcgtcccatccacgtgctcaagg

SEQ ID NO: 2984017 - DNA, 25 bp, Homo sapien
agatgatgcccgcgtccatcttgag

SEQ ID NO: 2984018 - DNA, 25 bp, Homo sapien
gcacacgaagtctccgttgaagctg

SEQ ID NO: 2984019 - DNA, 25 bp, Homo sapien
gcagcgagctgaccgcacctctttt

SEQ ID NO: 2984020 - DNA, 25 bp, Homo sapien
actgtccgcacacgaagtctccgtt

SEQ ID NO: 2984021 - DNA, 25 bp, Homo sapien
gcacacacactgtccgcacacgaag

SEQ ID NO: 2984022 - DNA, 25 bp, Homo sapien
tgaatgtcactcagagagccggtgg

SEQ ID NO: 2984023 - DNA, 25 bp, Homo sapien
tactcgcagaactgaccctcgtagc

SEQ ID NO: 2984024 - DNA, 25 bp, Homo sapien
cattgcagaggaacccggaagtgcg

SEQ ID NO: 2984025 - DNA, 25 bp, Homo sapien
ggagcagttgcaggtctggccactc

SEQ ID NO: 2984026 - DNA, 25 bp, Homo sapien
cccattgctgtcgatgcaggtggca

SEQ ID NO: 2984027 - DNA, 25 bp, Homo sapien
ttgctgtcgatgcaggtggcattgc

SEQ ID NO: 2984028 - DNA, 25 bp, Homo sapien
gggacagtcacagcttgggcctgtc

SEQ ID NO: 2984029 - DNA, 25 bp, Homo sapien
tggcccatggagcagcgtcctcggt

SEQ ID NO: 2984030 - DNA, 25 bp, Homo sapien
actgtctgtcttatgcccaggccta

SEQ ID NO: 2984031 - DNA, 25 bp, Homo sapien
tgacagacactgtctgtcttatgcc

SEQ ID NO: 2984032 - DNA, 25 bp, Homo sapien
gagggggcaccagtgagccagctgt

SEQ ID NO: 2984033 - DNA, 25 bp, Homo sapien
ggagggggcaccagtgagccagctg

SEQ ID NO: 2984034 - DNA, 25 bp, Homo sapien
atggtgtccgtgtagagcgactgct

SEQ ID NO: 2984035 - DNA, 25 bp, Homo sapien
cgccgagtagttgatctcgcagatg

SEQ ID NO: 2984036 - DNA, 25 bp, Homo sapien
tggcagcggccacactcacagtggc

SEQ ID NO: 2984037 - DNA, 25 bp, Homo sapien
cagtggccacgtccattacagatgc

SEQ ID NO: 2984038 - DNA, 25 bp, Homo sapien
cgctccccaaacctcttgcccttgg

SEQ ID NO: 2984039 - DNA, 25 bp, Homo sapien
cacgcccacacctcgtaggtcttag

SEQ ID NO: 2984040 - DNA, 25 bp, Homo sapien
tgttgggtgggcctctgccagaccc

SEQ ID NO: 2984041 - DNA, 25 bp, Homo sapien
tcctgtggcatcaggcttagcccct

SEQ ID NO: 2984042 - DNA, 25 bp, Homo sapien
ttaagctcgtccaccatcttgacct

SEQ ID NO: 2984043 - DNA, 25 bp, Homo sapien
gtgcgccccttcttctcgccggtgc

SEQ ID NO: 2984044 - DNA, 25 bp, Homo sapien
cactgcacgcaggagcgtaggtcct

SEQ ID NO: 2984045 - DNA, 25 bp, Homo sapien
gaagttgcattcctcacacgtgcgc

SEQ ID NO: 2984046 - DNA, 25 bp, Homo sapien
gtgaccttagcccagactgcaagcc

SEQ ID NO: 2984047 - DNA, 25 bp, Homo sapien
tggagttcctgtccggactgtgtga

SEQ ID NO: 2984048 - DNA, 25 bp, Homo sapien
caggtgatgacacccttgccccgtt

SEQ ID NO: 2984049 - DNA, 25 bp, Homo sapien
cagctctggagttcctgtccggact

SEQ ID NO: 2984050 - DNA, 25 bp, Homo sapien
gtcatcctcgtcccggaaggagcag

SEQ ID NO: 2984051 - DNA, 25 bp, Homo sapien
tgtagctgtaggtgcagtcgtcatc

SEQ ID NO: 2984052 - DNA, 25 bp, Homo sapien
catggtgtagctgtaggtgcagtcg

SEQ ID NO: 2984053 - DNA, 25 bp, Homo sapien
tgtaggtgcagtcgtcatcctcgtc

SEQ ID NO: 2984054 - DNA, 25 bp, Homo sapien
gatgagccaccagaaggagcccgga

SEQ ID NO: 2984055 - DNA, 25 bp, Homo sapien
gcaggcacagtacttccagcatagc

SEQ ID NO: 2984056 - DNA, 25 bp, Homo sapien
gagccaccagaaggagcccggaggg

SEQ ID NO: 2984057 - DNA, 25 bp, Homo sapien
aggcacagtacttccagcatagcag

SEQ ID NO: 2984058 - DNA, 25 bp, Homo sapien
tcctccacgctttctcttgtctgtt

SEQ ID NO: 2984059 - DNA, 25 bp, Homo sapien
cacataactccttgcctatgtaatg

SEQ ID NO: 2984060 - DNA, 25 bp, Homo sapien
ttactacggagtgtggtctgccgcc

SEQ ID NO: 2984061 - DNA, 25 bp, Homo sapien
tcccaggccttttgcacgtggctga

SEQ ID NO: 2984062 - DNA, 25 bp, Homo sapien
gccgggtgctctgtaaaggttctgt

SEQ ID NO: 2984063 - DNA, 25 bp, Homo sapien
agcagggtgtaagcatggcacacaa

SEQ ID NO: 2984064 - DNA, 25 bp, Homo sapien
cagacaccagaatatccaggtggta

SEQ ID NO: 2984065 - DNA, 25 bp, Homo sapien
tggaactctcatcctgccgggtgct

SEQ ID NO: 2984066 - DNA, 25 bp, Homo sapien
tcggttgcagcacgggagaagtgcc

SEQ ID NO: 2984067 - DNA, 25 bp, Homo sapien
ctcggttgcagcacgggagaagtgc

SEQ ID NO: 2984068 - DNA, 25 bp, Homo sapien
cggttgcagcacgggagaagtgcca

SEQ ID NO: 2984069 - DNA, 25 bp, Homo sapien
gctgcccctgcgatgccaggcccat

SEQ ID NO: 2984070 - DNA, 25 bp, Homo sapien
aacctcttcaggtgggaccccagag

SEQ ID NO: 2984071 - DNA, 25 bp, Homo sapien
tagacccgcacagcccaacctcttc

SEQ ID NO: 2984072 - DNA, 25 bp, Homo sapien
tccaccccagctcagagaaagagca

SEQ ID NO: 2984073 - DNA, 25 bp, Homo sapien
ggttctcccgcagcatgtagtggtc

SEQ ID NO: 2984074 - DNA, 25 bp, Homo sapien
cagcatgggcgtgtccaagtggtca

SEQ ID NO: 2984075 - DNA, 25 bp, Homo sapien
caggccgctgcatgttgttggtgac

SEQ ID NO: 2984076 - DNA, 25 bp, Homo sapien
ttggtgaccttccagcggaccacgt

SEQ ID NO: 2984077 - DNA, 25 bp, Homo sapien
agcaggttctcggtgcaaaggcggg

SEQ ID NO: 2984078 - DNA, 25 bp, Homo sapien
ctcctggcgcagctgggcgcactcc

SEQ ID NO: 2984079 - DNA, 25 bp, Homo sapien
cactcccgagtgtcaggcttcagca

SEQ ID NO: 2984080 - DNA, 25 bp, Homo sapien
aggttctcggtgcaaaggcgggcca

SEQ ID NO: 2984081 - DNA, 25 bp, Homo sapien
tctccggccaggcctagttcctggg

SEQ ID NO: 2984082 - DNA, 25 bp, Homo sapien
ctccggccaggcctagttcctgggt

SEQ ID NO: 2984083 - DNA, 25 bp, Homo sapien
tccggccaggcctagttcctgggtc

SEQ ID NO: 2984084 - DNA, 25 bp, Homo sapien
ttgtgtacaccggagatctgcctgt

SEQ ID NO: 2984085 - DNA, 25 bp, Homo sapien
agatctgcctgtagacctcgttcag

SEQ ID NO: 2984086 - DNA, 25 bp, Homo sapien
ctgctggagcttgtgtacaccggag

SEQ ID NO: 2984087 - DNA, 25 bp, Homo sapien
tacaccggagatctgcctgtagacc

SEQ ID NO: 2984088 - DNA, 25 bp, Homo sapien
cagaggtgcacccaagatcagggtc

SEQ ID NO: 2984089 - DNA, 25 bp, Homo sapien
gactcgatgtaggacctgggaaaaa

SEQ ID NO: 2984090 - DNA, 25 bp, Homo sapien
gaaaaaaggtgtgtgacctgctggc

SEQ ID NO: 2984091 - DNA, 25 bp, Homo sapien
cccatgaagggccaggactcgatgt

SEQ ID NO: 2984092 - DNA, 25 bp, Homo sapien
ccatcagcactgtgtccacaatggt

SEQ ID NO: 2984093 - DNA, 25 bp, Homo sapien
gccaccttgaggtcgtggaaggccc

SEQ ID NO: 2984094 - DNA, 25 bp, Homo sapien
gcgccatcagcactgtgtccacaat

SEQ ID NO: 2984095 - DNA, 25 bp, Homo sapien
gaggtcgtggaaggccctctgttcc

SEQ ID NO: 2984096 - DNA, 25 bp, Homo sapien
aggcgggaggtgcgaggcagtggca

SEQ ID NO: 2984097 - DNA, 25 bp, Homo sapien
gaggtgcgaggcagtggcacagcgg

SEQ ID NO: 2984098 - DNA, 25 bp, Homo sapien
tggcacagcggacccgccctcctac

SEQ ID NO: 2984099 - DNA, 25 bp, Homo sapien
agggccacacaggcgggaggtgcga

SEQ ID NO: 2984100 - DNA, 25 bp, Homo sapien
gggcacccgtacgtccaccagctcc

SEQ ID NO: 2984101 - DNA, 25 bp, Homo sapien
ggcacccgtacgtccaccagctcca

SEQ ID NO: 2984102 - DNA, 25 bp, Homo sapien
gaggggcacccgtacgtccaccagc

SEQ ID NO: 2984103 - DNA, 25 bp, Homo sapien
tcaggccggataaagaggggcaccc

SEQ ID NO: 2984104 - DNA, 25 bp, Homo sapien
tgatggtgatgtttaccaggcggcg

SEQ ID NO: 2984105 - DNA, 25 bp, Homo sapien
gggcacgtcgatggcctccaccagc

SEQ ID NO: 2984106 - DNA, 25 bp, Homo sapien
gtggcagtgcctgcgggcacgtcga

SEQ ID NO: 2984107 - DNA, 25 bp, Homo sapien
gtgatgtttaccaggcggcggccga

SEQ ID NO: 2984108 - DNA, 25 bp, Homo sapien
cttatgaggatgcaacagaagcttc

SEQ ID NO: 2984109 - DNA, 25 bp, Homo sapien
gaacaaagtgtccagcagacatcct

SEQ ID NO: 2984110 - DNA, 25 bp, Homo sapien
tgtccacggtgtgatgccttggcca

SEQ ID NO: 2984111 - DNA, 25 bp, Homo sapien
cagaagcttccatttactgagcgct

SEQ ID NO: 2984112 - DNA, 25 bp, Homo sapien
ccgtccaggacacgccggatgacag

SEQ ID NO: 2984113 - DNA, 25 bp, Homo sapien
tgctcaaaggacaccacgtctctgg

SEQ ID NO: 2984114 - DNA, 25 bp, Homo sapien
gccatcctgtgtgcggtaggagacc

SEQ ID NO: 2984115 - DNA, 25 bp, Homo sapien
gaccgagaactcaggctgctcaaag

SEQ ID NO: 2984116 - DNA, 25 bp, Homo sapien
tgctgctttgtcttgggaacccaat

SEQ ID NO: 2984117 - DNA, 25 bp, Homo sapien
ggagcctcatccagcgtgtcactgg

SEQ ID NO: 2984118 - DNA, 25 bp, Homo sapien
ccagggactcaagcagctgccatgt

SEQ ID NO: 2984119 - DNA, 25 bp, Homo sapien
ttgggaacccaatgcggtgcccacg

SEQ ID NO: 2984120 - DNA, 25 bp, Homo sapien
gatttggctgtaccccagcactggg

SEQ ID NO: 2984121 - DNA, 25 bp, Homo sapien
agaggtttggctaccctgtggatcc

SEQ ID NO: 2984122 - DNA, 25 bp, Homo sapien
ggtcttcgatcccagctcaagaaac

SEQ ID NO: 2984123 - DNA, 25 bp, Homo sapien
ctgcttggcaaattgtgacagccct

SEQ ID NO: 2984124 - DNA, 25 bp, Homo sapien
cctgggcaacagagtgagactccgt

SEQ ID NO: 2984125 - DNA, 25 bp, Homo sapien
gcctgggcaacagagtgagactccg

SEQ ID NO: 2984126 - DNA, 25 bp, Homo sapien
gctgagatcgcgccagcctgggcaa

SEQ ID NO: 2984127 - DNA, 25 bp, Homo sapien
taagctgagatcgcgccagcctggg

SEQ ID NO: 2984128 - DNA, 25 bp, Homo sapien
tgggccccaaacttagggttgctga

SEQ ID NO: 2984129 - DNA, 25 bp, Homo sapien
tgctgagctggacgtggaaacggcg

SEQ ID NO: 2984130 - DNA, 25 bp, Homo sapien
gcagctcaccctccacggggatgta

SEQ ID NO: 2984131 - DNA, 25 bp, Homo sapien
tggacgtggaaacggcggacctggc

SEQ ID NO: 2984132 - DNA, 25 bp, Homo sapien
caacatctgactcgtgaagctccgg

SEQ ID NO: 2984133 - DNA, 25 bp, Homo sapien
gtaccccattggcttgccagaaggg

SEQ ID NO: 2984134 - DNA, 25 bp, Homo sapien
tggacccagcggccttagcattggg

SEQ ID NO: 2984135 - DNA, 25 bp, Homo sapien
gttgaaatggatcttcctggaccca

SEQ ID NO: 2984136 - DNA, 25 bp, Homo sapien
gcttcggattcggagtcaccctgaa

SEQ ID NO: 2984137 - DNA, 25 bp, Homo sapien
tccactgagggcaccttgctgtcga

SEQ ID NO: 2984138 - DNA, 25 bp, Homo sapien
tcatctcatagtcgcaatacgggta

SEQ ID NO: 2984139 - DNA, 25 bp, Homo sapien
aatacgggtacaggttggtgagctc

SEQ ID NO: 2984140 - DNA, 25 bp, Homo sapien
ggttgtcatcgttgaccaggccata

SEQ ID NO: 2984141 - DNA, 25 bp, Homo sapien
tagcagacctcgtaggctgtgatct

SEQ ID NO: 2984142 - DNA, 25 bp, Homo sapien
tcaccgtggaggagacgacattgaa

SEQ ID NO: 2984143 - DNA, 25 bp, Homo sapien
tgatctcaccgttggtctcagccgg

SEQ ID NO: 2984144 - DNA, 25 bp, Homo sapien
gcagagagagtgcttcagagggtca

SEQ ID NO: 2984145 - DNA, 25 bp, Homo sapien
ctggggcagagagagtgcttcagag

SEQ ID NO: 2984146 - DNA, 25 bp, Homo sapien
gggcagagagagtgcttcagagggt

SEQ ID NO: 2984147 - DNA, 25 bp, Homo sapien
tggggcagagagagtgcttcagagg

SEQ ID NO: 2984148 - DNA, 25 bp, Homo sapien
ccttcaccgtgtagcggtagggctg

SEQ ID NO: 2984149 - DNA, 25 bp, Homo sapien
gctgggactcccgaaggttctcaat

SEQ ID NO: 2984150 - DNA, 25 bp, Homo sapien
gggttgtcaaccagcactttcttca

SEQ ID NO: 2984151 - DNA, 25 bp, Homo sapien
ggttctcaataagcagcatccggtt

SEQ ID NO: 2984152 - DNA, 25 bp, Homo sapien
gaacgtcatcgctgtacataaggaa

SEQ ID NO: 2984153 - DNA, 25 bp, Homo sapien
gcccgatggagagcgtagaacgtca

SEQ ID NO: 2984154 - DNA, 25 bp, Homo sapien
taaggaagctgtcgtagtcctcccc

SEQ ID NO: 2984155 - DNA, 25 bp, Homo sapien
tctgggcgtccacgatagggatgtc

SEQ ID NO: 2984156 - DNA, 25 bp, Homo sapien
tgtgcgcttgcacaaggctgtgtgt

SEQ ID NO: 2984157 - DNA, 25 bp, Homo sapien
tcgtggtcccgtgggcatgaactca

SEQ ID NO: 2984158 - DNA, 25 bp, Homo sapien
cagtggactcactctgtacccaaga

SEQ ID NO: 2984159 - DNA, 25 bp, Homo sapien
taagggctccgcagcactttgtgct

SEQ ID NO: 2984160 - DNA, 25 bp, Homo sapien
tgctggccgacaggcgcgggatgag

SEQ ID NO: 2984161 - DNA, 25 bp, Homo sapien
gggcgcctcggcgtcggaggagcgc

SEQ ID NO: 2984162 - DNA, 25 bp, Homo sapien
cggggggcccgggtgtcgcactgcg

SEQ ID NO: 2984163 - DNA, 25 bp, Homo sapien
cgggtgtcgcactgcggggcaggct

SEQ ID NO: 2984164 - DNA, 25 bp, Homo sapien
ttccctcaaaccactagggacagag

SEQ ID NO: 2984165 - DNA, 25 bp, Homo sapien
gccctgcacattcctggtcacccac

SEQ ID NO: 2984166 - DNA, 25 bp, Homo sapien
tggcttttgcttaaatacaaccagt

SEQ ID NO: 2984167 - DNA, 25 bp, Homo sapien
ctctgggtggcttttgcttaaatac

SEQ ID NO: 2984168 - DNA, 25 bp, Homo sapien
gaaggcaaagtccatccggccattc

SEQ ID NO: 2984169 - DNA, 25 bp, Homo sapien
tcgtggtcatcctgtgcagggagtt

SEQ ID NO: 2984170 - DNA, 25 bp, Homo sapien
ggtgctgcccgggaaggcaaagtcc

SEQ ID NO: 2984171 - DNA, 25 bp, Homo sapien
agtccatccggccattcaccaggtg

SEQ ID NO: 2984172 - DNA, 25 bp, Homo sapien
gctcaggtgggtgccataggcagca

SEQ ID NO: 2984173 - DNA, 25 bp, Homo sapien
tagtcccgtgtgagggtggaggatg

SEQ ID NO: 2984174 - DNA, 25 bp, Homo sapien
cgagtgtgagtgttctgagcgggtc

SEQ ID NO: 2984175 - DNA, 25 bp, Homo sapien
tgagcgggtcagtgagttgtagtcc

SEQ ID NO: 2984176 - DNA, 25 bp, Homo sapien
caggattatagagtctcgtgggccc

SEQ ID NO: 2984177 - DNA, 25 bp, Homo sapien
ctcccagccaggattatagagtctc

SEQ ID NO: 2984178 - DNA, 25 bp, Homo sapien
tatagagtctcgtgggcccctggaa

SEQ ID NO: 2984179 - DNA, 25 bp, Homo sapien
ggaaccctttcatctgagcccgact

SEQ ID NO: 2984180 - DNA, 25 bp, Homo sapien
acaggaggccgcagtcagccagaga

SEQ ID NO: 2984181 - DNA, 25 bp, Homo sapien
gctggcatgtctacactgaccgctg

SEQ ID NO: 2984182 - DNA, 25 bp, Homo sapien
ggcagagttaggcatcagcactgat

SEQ ID NO: 2984183 - DNA, 25 bp, Homo sapien
ggcaggtggttagcgcctgtgggca

SEQ ID NO: 2984184 - DNA, 25 bp, Homo sapien
ggcgtgtcgggcacaccagcagtca

SEQ ID NO: 2984185 - DNA, 25 bp, Homo sapien
cgttcagcagctggtactccacact

SEQ ID NO: 2984186 - DNA, 25 bp, Homo sapien
gtgtcgggcacaccagcagtcaggc

SEQ ID NO: 2984187 - DNA, 25 bp, Homo sapien
ccagctcactctgagagatgtgggc

SEQ ID NO: 2984188 - DNA, 25 bp, Homo sapien
cctaagctgccatcgagacctagtt

SEQ ID NO: 2984189 - DNA, 25 bp, Homo sapien
tgtgtactatacaagagtggagcct

SEQ ID NO: 2984190 - DNA, 25 bp, Homo sapien
cagtagtgcagtgttactcccaccc

SEQ ID NO: 2984191 - DNA, 25 bp, Homo sapien
tatcacccacccaggactagctgtg

SEQ ID NO: 2984192 - DNA, 25 bp, Homo sapien
tctgggcccgcacgcggaacacgta

SEQ ID NO: 2984193 - DNA, 25 bp, Homo sapien
ggattcaatggtgatgacaccctca

SEQ ID NO: 2984194 - DNA, 25 bp, Homo sapien
acacagtgggctctgcgggtgcacc

SEQ ID NO: 2984195 - DNA, 25 bp, Homo sapien
acacgtaggagtggttgggcaggag

SEQ ID NO: 2984196 - DNA, 25 bp, Homo sapien
accaggtagccgacgatatccccat

SEQ ID NO: 2984197 - DNA, 25 bp, Homo sapien
gacgatatccccattgggcctccgt

SEQ ID NO: 2984198 - DNA, 25 bp, Homo sapien
cagggcagtgaacaccagcgggcct

SEQ ID NO: 2984199 - DNA, 25 bp, Homo sapien
tccgtggccgctcccagctcagctg

SEQ ID NO: 2984200 - DNA, 25 bp, Homo sapien
tccacccggaatgcggtggctggcc

SEQ ID NO: 2984201 - DNA, 25 bp, Homo sapien
tctatggtgatgatgccctcgcgct

SEQ ID NO: 2984202 - DNA, 25 bp, Homo sapien
aacttgtagggcacgttctcgctga

SEQ ID NO: 2984203 - DNA, 25 bp, Homo sapien
cgttctcgctgaggcccggcacggt

SEQ ID NO: 2984204 - DNA, 25 bp, Homo sapien
cactaggaagggctcggtggcgctg

SEQ ID NO: 2984205 - DNA, 25 bp, Homo sapien
tactcgctttgcagcgggtgctgga

SEQ ID NO: 2984206 - DNA, 25 bp, Homo sapien
ggtgctggaagagcccggcacggct

SEQ ID NO: 2984207 - DNA, 25 bp, Homo sapien
ggtgatgctgctgtactcgctttgc

SEQ ID NO: 2984208 - DNA, 25 bp, Homo sapien
aggagagccgggatcccctagccct

SEQ ID NO: 2984209 - DNA, 25 bp, Homo sapien
gaggcattagatgacctggcttggg

SEQ ID NO: 2984210 - DNA, 25 bp, Homo sapien
cgggatcccctagccctcagtgctc

SEQ ID NO: 2984211 - DNA, 25 bp, Homo sapien
gaggaggaggcattagatgacctgg

SEQ ID NO: 2984212 - DNA, 25 bp, Homo sapien
gtttggaagaactgttggtccatgt

SEQ ID NO: 2984213 - DNA, 25 bp, Homo sapien
ccgctggtggtcagtgtccggctca

SEQ ID NO: 2984214 - DNA, 25 bp, Homo sapien
tttggaagaactgttggtccatgtg

SEQ ID NO: 2984215 - DNA, 25 bp, Homo sapien
ggtgctaagggttccgctggtggtc

SEQ ID NO: 2984216 - DNA, 25 bp, Homo sapien
aggacgcctagtgggacgtggcggg

SEQ ID NO: 2984217 - DNA, 25 bp, Homo sapien
gagtcgggaggacgcctagtgggac

SEQ ID NO: 2984218 - DNA, 25 bp, Homo sapien
tcgggaggacgcctagtgggacgtg

SEQ ID NO: 2984219 - DNA, 25 bp, Homo sapien
gagaggagtcgggaggacgcctagt

SEQ ID NO: 2984220 - DNA, 25 bp, Homo sapien
agaggacggaccttgcccccttcat

SEQ ID NO: 2984221 - DNA, 25 bp, Homo sapien
tgctctgtgcatgcgggtgggctgg

SEQ ID NO: 2984222 - DNA, 25 bp, Homo sapien
aggagacacctagcccctgctctgt

SEQ ID NO: 2984223 - DNA, 25 bp, Homo sapien
gaggacggaccttgcccccttcatg

SEQ ID NO: 2984224 - DNA, 25 bp, Homo sapien
cagcccgttcaatttacagaggagg

SEQ ID NO: 2984225 - DNA, 25 bp, Homo sapien
gagcatgttccccttaaactgtgag

SEQ ID NO: 2984226 - DNA, 25 bp, Homo sapien
cagacctgggcgaacgtagccttct

SEQ ID NO: 2984227 - DNA, 25 bp, Homo sapien
gagtgcacaggtacaggatgtccag

SEQ ID NO: 2984228 - DNA, 25 bp, Homo sapien
caccgccaccctagtccaattctcc

SEQ ID NO: 2984229 - DNA, 25 bp, Homo sapien
ccgccaccctagtccaattctccat

SEQ ID NO: 2984230 - DNA, 25 bp, Homo sapien
accgccaccctagtccaattctcca

SEQ ID NO: 2984231 - DNA, 25 bp, Homo sapien
ccaccgccaccctagtccaattctc

SEQ ID NO: 2984232 - DNA, 25 bp, Homo sapien
ctgacacatagcagaagttccagga

SEQ ID NO: 2984233 - DNA, 25 bp, Homo sapien
gacttgcagctgggttatctgagca

SEQ ID NO: 2984234 - DNA, 25 bp, Homo sapien
aagacaagacttgcagctgggttat

SEQ ID NO: 2984235 - DNA, 25 bp, Homo sapien
gcaggaacttcagggacagagtagg

SEQ ID NO: 2984236 - DNA, 25 bp, Homo sapien
cagcaaataaagacaagacttgcag

SEQ ID NO: 2984237 - DNA, 25 bp, Homo sapien
tttccagccagtgtgaggcgcaaga

SEQ ID NO: 2984238 - DNA, 25 bp, Homo sapien
agctgtcagctgcatcttgtaggtc

SEQ ID NO: 2984239 - DNA, 25 bp, Homo sapien
catcttgtaggtctggacatgctcc

SEQ ID NO: 2984240 - DNA, 25 bp, Homo sapien
gacagcctcggccctgagctgtcag

SEQ ID NO: 2984241 - DNA, 25 bp, Homo sapien
ttttccctccctgatccctttgtca

SEQ ID NO: 2984242 - DNA, 25 bp, Homo sapien
cctcagaagactaaggatgccctct

SEQ ID NO: 2984243 - DNA, 25 bp, Homo sapien
ctccctgatccctttgtcagcaggt

SEQ ID NO: 2984244 - DNA, 25 bp, Homo sapien
gatgccctcttcttgggccgggtgg

SEQ ID NO: 2984245 - DNA, 25 bp, Homo sapien
cttggatacttttagcacctggtcc

SEQ ID NO: 2984246 - DNA, 25 bp, Homo sapien
gagccagagtcctgtcaggaccttg

SEQ ID NO: 2984247 - DNA, 25 bp, Homo sapien
atcatgaacaagtggtcttccagcc

SEQ ID NO: 2984248 - DNA, 25 bp, Homo sapien
ctaagggcttcaggacaagtggagt

SEQ ID NO: 2984249 - DNA, 25 bp, Homo sapien
gatgttggaacgtgctatgctgtag

SEQ ID NO: 2984250 - DNA, 25 bp, Homo sapien
tctgcaggctggcatagaaggctct

SEQ ID NO: 2984251 - DNA, 25 bp, Homo sapien
tagtgaaccttctccagtctgcagg

SEQ ID NO: 2984252 - DNA, 25 bp, Homo sapien
ttgagcactcaacccagaaggcgaa

SEQ ID NO: 2984253 - DNA, 25 bp, Homo sapien
taccacatgttaaccctctagctga

SEQ ID NO: 2984254 - DNA, 25 bp, Homo sapien
acatccagttggctcgccggatacg

SEQ ID NO: 2984255 - DNA, 25 bp, Homo sapien
ctcaggatgaatgcgaaaagtgact

SEQ ID NO: 2984256 - DNA, 25 bp, Homo sapien
taaacctggcagctatagaatacac

SEQ ID NO: 2984257 - DNA, 25 bp, Homo sapien
gaccgtggcgcttcgagagattcgt

SEQ ID NO: 2984258 - DNA, 25 bp, Homo sapien
tcgtcgttatcagaagtcgaccgag

SEQ ID NO: 2984259 - DNA, 25 bp, Homo sapien
gttggtgagggagatcgcgcaggat

SEQ ID NO: 2984260 - DNA, 25 bp, Homo sapien
gggagatcgcgcaggatttcaaaac

SEQ ID NO: 2984261 - DNA, 25 bp, Homo sapien
gactgctcgtaagtccaccggtggg

SEQ ID NO: 2984262 - DNA, 25 bp, Homo sapien
aaacagctggccacgaaagccgcca

SEQ ID NO: 2984263 - DNA, 25 bp, Homo sapien
agaaaatggcccgaaccaagcagac

SEQ ID NO: 2984264 - DNA, 25 bp, Homo sapien
tgctcgtaagtccaccggtgggaaa

SEQ ID NO: 2984265 - DNA, 25 bp, Homo sapien
gctggtttttcgctcgtcgactgcg

SEQ ID NO: 2984266 - DNA, 25 bp, Homo sapien
aggttctgccaaccgttggcgccgc

SEQ ID NO: 2984267 - DNA, 25 bp, Homo sapien
tcgactgcggctcttcctcgggcag

SEQ ID NO: 2984268 - DNA, 25 bp, Homo sapien
tttacccgcggcttcaggttctgcc

SEQ ID NO: 2984269 - DNA, 25 bp, Homo sapien
tgttaaagtagcctctctgggtgca

SEQ ID NO: 2984270 - DNA, 25 bp, Homo sapien
ttttatccaatcagaagggccgctt

SEQ ID NO: 2984271 - DNA, 25 bp, Homo sapien
cactttaacagccaatcagcggcgt

SEQ ID NO: 2984272 - DNA, 25 bp, Homo sapien
tcagcggcgtagatatgcaccaatc

SEQ ID NO: 2984273 - DNA, 25 bp, Homo sapien
atagtaggactatttactttctagc

SEQ ID NO: 2984274 - DNA, 25 bp, Homo sapien
caccaagagacctgctttttgttaa

SEQ ID NO: 2984275 - DNA, 25 bp, Homo sapien
tagtaagttacctcttgtttaagca

SEQ ID NO: 2984276 - DNA, 25 bp, Homo sapien
caagtaacatgttgcttagtaagtt

SEQ ID NO: 2984277 - DNA, 25 bp, Homo sapien
ctgcaatccgccagcaaccccttca

SEQ ID NO: 2984278 - DNA, 25 bp, Homo sapien
tgcaatccgccagcaaccccttcat

SEQ ID NO: 2984279 - DNA, 25 bp, Homo sapien
ttcagtttcatagggaagcctttcc

SEQ ID NO: 2984280 - DNA, 25 bp, Homo sapien
cgttttcagtttcatagggaagcct

SEQ ID NO: 2984281 - DNA, 25 bp, Homo sapien
cagcgcgttttcagtttcataggga

SEQ ID NO: 2984282 - DNA, 25 bp, Homo sapien
gcgttttcagtttcatagggaagcc

SEQ ID NO: 2984283 - DNA, 25 bp, Homo sapien
agcacaggaccacaatacccaggga

SEQ ID NO: 2984284 - DNA, 25 bp, Homo sapien
ctggcaaagcacaggaccacaatac

SEQ ID NO: 2984285 - DNA, 25 bp, Homo sapien
gcacaggaccacaatacccagggat

SEQ ID NO: 2984286 - DNA, 25 bp, Homo sapien
caggaccacaatacccagggatcct

SEQ ID NO: 2984287 - DNA, 25 bp, Homo sapien
tctatgtccggctggaattttaccg

SEQ ID NO: 2984288 - DNA, 25 bp, Homo sapien
agttgtggttctatgtccggctgga

SEQ ID NO: 2984289 - DNA, 25 bp, Homo sapien
tccggctggaattttaccgtcggca

SEQ ID NO: 2984290 - DNA, 25 bp, Homo sapien
gctggaattttaccgtcggcagagg

SEQ ID NO: 2984291 - DNA, 25 bp, Homo sapien
tgcagcacctgagcggtagcggccg

SEQ ID NO: 2984292 - DNA, 25 bp, Homo sapien
tattattcagtctgcgcggtccgcg

SEQ ID NO: 2984293 - DNA, 25 bp, Homo sapien
tcgccgctccccttttattattcag

SEQ ID NO: 2984294 - DNA, 25 bp, Homo sapien
gggcccttcgacatggtcttgtctt

SEQ ID NO: 2984295 - DNA, 25 bp, Homo sapien
caatggaaagactgcgaaagatctc

SEQ ID NO: 2984296 - DNA, 25 bp, Homo sapien
tataacaagagttcctcctgactgg

SEQ ID NO: 2984297 - DNA, 25 bp, Homo sapien
aaggaatggttaacgtgagtcagac

SEQ ID NO: 2984298 - DNA, 25 bp, Homo sapien
cagtgatctgagcaaccagagatta

SEQ ID NO: 2984299 - DNA, 25 bp, Homo sapien
taagtttaagaatctacccttagca

SEQ ID NO: 2984300 - DNA, 25 bp, Homo sapien
ccagaaatgtttattggtaatgtag

SEQ ID NO: 2984301 - DNA, 25 bp, Homo sapien
atttctgtcctgcaagaaattagtt

SEQ ID NO: 2984302 - DNA, 25 bp, Homo sapien
tagataatagcaaatatcaactagg

SEQ ID NO: 2984303 - DNA, 25 bp, Homo sapien
gacgtgtaggtccacgagggtatct

SEQ ID NO: 2984304 - DNA, 25 bp, Homo sapien
cagtcaaagcagatgcatatgggtt

SEQ ID NO: 2984305 - DNA, 25 bp, Homo sapien
tgtgcccaagatggatttctctaag

SEQ ID NO: 2984306 - DNA, 25 bp, Homo sapien
ggagctcctttatagagtgtgccca

SEQ ID NO: 2984307 - DNA, 25 bp, Homo sapien
tacctaagcgtgctcatggcttcta

SEQ ID NO: 2984308 - DNA, 25 bp, Homo sapien
gcaaccttactgtcatcactcttga

SEQ ID NO: 2984309 - DNA, 25 bp, Homo sapien
tgcccagtgtgggaaaataatcact

SEQ ID NO: 2984310 - DNA, 25 bp, Homo sapien
tggcagggctctagttacctaagcg

SEQ ID NO: 2984311 - DNA, 25 bp, Homo sapien
agatgcatacggatagtgggaaaac

SEQ ID NO: 2984312 - DNA, 25 bp, Homo sapien
aaacctcctttagtatcaaccatag

SEQ ID NO: 2984313 - DNA, 25 bp, Homo sapien
tagccataactgtccatagttgcaa

SEQ ID NO: 2984314 - DNA, 25 bp, Homo sapien
ggaagacaatctactaggattagcc

SEQ ID NO: 2984315 - DNA, 25 bp, Homo sapien
ttggctaagaatggcagagaaactt

SEQ ID NO: 2984316 - DNA, 25 bp, Homo sapien
tatattggctaagaatggcagagaa

SEQ ID NO: 2984317 - DNA, 25 bp, Homo sapien
attggctaagaatggcagagaaact

SEQ ID NO: 2984318 - DNA, 25 bp, Homo sapien
tattggctaagaatggcagagaaac

SEQ ID NO: 2984319 - DNA, 25 bp, Homo sapien
taagtcacaaaacaccatgctaaag

SEQ ID NO: 2984320 - DNA, 25 bp, Homo sapien
tcctaaagaaattgagccaccaaca

SEQ ID NO: 2984321 - DNA, 25 bp, Homo sapien
cctggcacctcttaacagtaaaagt

SEQ ID NO: 2984322 - DNA, 25 bp, Homo sapien
ggtctgattcacacaaatcctgaag

SEQ ID NO: 2984323 - DNA, 25 bp, Homo sapien
gtattcattataaagtactcttact

SEQ ID NO: 2984324 - DNA, 25 bp, Homo sapien
cattataaagtactcttacttcaat

SEQ ID NO: 2984325 - DNA, 25 bp, Homo sapien
ttcattataaagtactcttacttca

SEQ ID NO: 2984326 - DNA, 25 bp, Homo sapien
ttataaagtactcttacttcaatag

SEQ ID NO: 2984327 - DNA, 25 bp, Homo sapien
atgcccggctaactaaacatttctt

SEQ ID NO: 2984328 - DNA, 25 bp, Homo sapien
aactaaacatttcttaactgagcta

SEQ ID NO: 2984329 - DNA, 25 bp, Homo sapien
catgcccggctaactaaacatttct

SEQ ID NO: 2984330 - DNA, 25 bp, Homo sapien
gctaactaaacatttcttaactgag

SEQ ID NO: 2984331 - DNA, 25 bp, Homo sapien
taagggtcactcacgtcactgatgt

SEQ ID NO: 2984332 - DNA, 25 bp, Homo sapien
gccccaagaactaacaagagccagg

SEQ ID NO: 2984333 - DNA, 25 bp, Homo sapien
gaatattcgagagtactacaaaccc

SEQ ID NO: 2984334 - DNA, 25 bp, Homo sapien
aattagtcctgtgtgtccatggtcc

SEQ ID NO: 2984335 - DNA, 25 bp, Homo sapien
tgatggcctccagacaactaagaca

SEQ ID NO: 2984336 - DNA, 25 bp, Homo sapien
tggaataactcactctggatgcccc

SEQ ID NO: 2984337 - DNA, 25 bp, Homo sapien
tgagttttcaagatggagcggccag

SEQ ID NO: 2984338 - DNA, 25 bp, Homo sapien
tgaatcccggaacatgcagtgaaca

SEQ ID NO: 2984339 - DNA, 25 bp, Homo sapien
actggagtccagtggcccgatctcg

SEQ ID NO: 2984340 - DNA, 25 bp, Homo sapien
gagtctcgcactatcgcccagactg

SEQ ID NO: 2984341 - DNA, 25 bp, Homo sapien
ctgggtttgcaccattctcctgcct

SEQ ID NO: 2984342 - DNA, 25 bp, Homo sapien
gtctcgcactatcgcccagactgga

SEQ ID NO: 2984343 - DNA, 25 bp, Homo sapien
gctaaacagttggtatgccccatca

SEQ ID NO: 2984344 - DNA, 25 bp, Homo sapien
catgcaagccggtttgctgacctct

SEQ ID NO: 2984345 - DNA, 25 bp, Homo sapien
acttttgatcatgttgtcccctggg

SEQ ID NO: 2984346 - DNA, 25 bp, Homo sapien
gactgttttgtacactgccacatcg

SEQ ID NO: 2984347 - DNA, 25 bp, Homo sapien
gagaaacgaatgagtgcaggttcaa

SEQ ID NO: 2984348 - DNA, 25 bp, Homo sapien
gcaactacttgagtctgtagttgaa

SEQ ID NO: 2984349 - DNA, 25 bp, Homo sapien
tgtagttgaagtgcacaagcagcca

SEQ ID NO: 2984350 - DNA, 25 bp, Homo sapien
tgcaggttcaaaggaagcgttattt

SEQ ID NO: 2984351 - DNA, 25 bp, Homo sapien
cgcggcagggcacatcagaatattc

SEQ ID NO: 2984352 - DNA, 25 bp, Homo sapien
gtggactcaccgacagccaggaaaa

SEQ ID NO: 2984353 - DNA, 25 bp, Homo sapien
tgaaagaaaactaccactgctaagc

SEQ ID NO: 2984354 - DNA, 25 bp, Homo sapien
gccatcaaactactgcgcggcaggg

SEQ ID NO: 2984355 - DNA, 25 bp, Homo sapien
cagttgaagatttggcataaactca

SEQ ID NO: 2984356 - DNA, 25 bp, Homo sapien
ctcagttgcgcagattaatggattt

SEQ ID NO: 2984357 - DNA, 25 bp, Homo sapien
ctcttagatgacaattgtagaattc

SEQ ID NO: 2984358 - DNA, 25 bp, Homo sapien
tttattcaggatatccatctcttag

SEQ ID NO: 2984359 - DNA, 25 bp, Homo sapien
gcccctgtgcccggccagcaaactc

SEQ ID NO: 2984360 - DNA, 25 bp, Homo sapien
cccctgtgcccggccagcaaactct

SEQ ID NO: 2984361 - DNA, 25 bp, Homo sapien
ccctgtgcccggccagcaaactctt

SEQ ID NO: 2984362 - DNA, 25 bp, Homo sapien
agcccctgtgcccggccagcaaact

SEQ ID NO: 2984363 - DNA, 25 bp, Homo sapien
tgcagcagccgggctatttatgtcc

SEQ ID NO: 2984364 - DNA, 25 bp, Homo sapien
ctatttatgtcctgggggcatgaag

SEQ ID NO: 2984365 - DNA, 25 bp, Homo sapien
gcagccgggctatttatgtcctggg

SEQ ID NO: 2984366 - DNA, 25 bp, Homo sapien
tatttatgtcctgggggcatgaagc

SEQ ID NO: 2984367 - DNA, 25 bp, Homo sapien
ctgtaattgaaggtgccgtcccgac

SEQ ID NO: 2984368 - DNA, 25 bp, Homo sapien
tgtagggccgatgctgcgtgcattt

SEQ ID NO: 2984369 - DNA, 25 bp, Homo sapien
cagtagacgtcagggctgtaattga

SEQ ID NO: 2984370 - DNA, 25 bp, Homo sapien
tgtagcctcgtcgtacttggtgcag

SEQ ID NO: 2984371 - DNA, 25 bp, Homo sapien
gtagtgggggtcactcaactttgct

SEQ ID NO: 2984372 - DNA, 25 bp, Homo sapien
gaacacggtagtgggggtcactcaa

SEQ ID NO: 2984373 - DNA, 25 bp, Homo sapien
cagcctaggcttccctgcctacccc

SEQ ID NO: 2984374 - DNA, 25 bp, Homo sapien
gggtcactcaactttgctgcctgca

SEQ ID NO: 2984375 - DNA, 25 bp, Homo sapien
gcaggccgtttttggtgcagttgcc

SEQ ID NO: 2984376 - DNA, 25 bp, Homo sapien
gcagttgcctttcgagtctgtctcg

SEQ ID NO: 2984377 - DNA, 25 bp, Homo sapien
ccgtgggcaaaagcgcagtgcaggc

SEQ ID NO: 2984378 - DNA, 25 bp, Homo sapien
agattccagttttgtagtaacgaag

SEQ ID NO: 2984379 - DNA, 25 bp, Homo sapien
tggaccccagcctactgccatcagc

SEQ ID NO: 2984380 - DNA, 25 bp, Homo sapien
ccactgcagtctgaggtactcacca

SEQ ID NO: 2984381 - DNA, 25 bp, Homo sapien
gtactcaccatcattagccgccagg

SEQ ID NO: 2984382 - DNA, 25 bp, Homo sapien
gaggtactcaccatcattagccgcc

SEQ ID NO: 2984383 - DNA, 25 bp, Homo sapien
tatgctcccctctaccgtggtctgg

SEQ ID NO: 2984384 - DNA, 25 bp, Homo sapien
tctatcatggcatggctcgcagccc

SEQ ID NO: 2984385 - DNA, 25 bp, Homo sapien
gctgaggatcttttctatcatggca

SEQ ID NO: 2984386 - DNA, 25 bp, Homo sapien
ttgccaccgaggctcctcgctgagg

SEQ ID NO: 2984387 - DNA, 25 bp, Homo sapien
gagccaaatccccagggcagctatg

SEQ ID NO: 2984388 - DNA, 25 bp, Homo sapien
gctcacagggtgaaagggcactctt

SEQ ID NO: 2984389 - DNA, 25 bp, Homo sapien
gcgcttatgtacgtgcctgtgcaca

SEQ ID NO: 2984390 - DNA, 25 bp, Homo sapien
gcacatgtgaaagcctggagggatc

SEQ ID NO: 2984391 - DNA, 25 bp, Homo sapien
tgtatttgtgcttccgggggctccg

SEQ ID NO: 2984392 - DNA, 25 bp, Homo sapien
aaggctccgtcttatagttccccag

SEQ ID NO: 2984393 - DNA, 25 bp, Homo sapien
tagggacaggcatagccttggcggc

SEQ ID NO: 2984394 - DNA, 25 bp, Homo sapien
ccttgctgttgtggtagtagggaca

SEQ ID NO: 2984395 - DNA, 25 bp, Homo sapien
tggccgaatcaccacaaaggatact

SEQ ID NO: 2984396 - DNA, 25 bp, Homo sapien
tcccactagcccaagtagggtcagg

SEQ ID NO: 2984397 - DNA, 25 bp, Homo sapien
tgagatcggagcctagcaggtgcca

SEQ ID NO: 2984398 - DNA, 25 bp, Homo sapien
tcctcattcatgcaggaggtgaagc

SEQ ID NO: 2984399 - DNA, 25 bp, Homo sapien
tgctcggtgcgggtgtggcagtact

SEQ ID NO: 2984400 - DNA, 25 bp, Homo sapien
cccgtgcttgacgtttggacatgga

SEQ ID NO: 2984401 - DNA, 25 bp, Homo sapien
ggtggaactgctgctcggtgcgggt

SEQ ID NO: 2984402 - DNA, 25 bp, Homo sapien
gtactggcaggcgtctccgttctca

SEQ ID NO: 2984403 - DNA, 25 bp, Homo sapien
agggatcctctaggcactgccaggg

SEQ ID NO: 2984404 - DNA, 25 bp, Homo sapien
agatagcatgttgcagggtagtctc

SEQ ID NO: 2984405 - DNA, 25 bp, Homo sapien
gccacaagtccctcttccaggatgg

SEQ ID NO: 2984406 - DNA, 25 bp, Homo sapien
gatgccaaattcagcatgcagggat

SEQ ID NO: 2984407 - DNA, 25 bp, Homo sapien
agctgcccgactgctgcatgtcgtt

SEQ ID NO: 2984408 - DNA, 25 bp, Homo sapien
tgggcaaaggcgcagaagggtcctc

SEQ ID NO: 2984409 - DNA, 25 bp, Homo sapien
gactgctgcatgtcgttgcacttgg

SEQ ID NO: 2984410 - DNA, 25 bp, Homo sapien
cgttgcacttggtggacttgtagat

SEQ ID NO: 2984411 - DNA, 25 bp, Homo sapien
ttggaagctctaggccttcaaggct

SEQ ID NO: 2984412 - DNA, 25 bp, Homo sapien
gaaccatgagtgctcaaccaggcgg

SEQ ID NO: 2984413 - DNA, 25 bp, Homo sapien
gatttgccaagtcagccatgggagg

SEQ ID NO: 2984414 - DNA, 25 bp, Homo sapien
gggattgcactatattctgactggc

SEQ ID NO: 2984415 - DNA, 25 bp, Homo sapien
aggcaccgagtctccggcggcagat

SEQ ID NO: 2984416 - DNA, 25 bp, Homo sapien
atggcatgtacaggacaggacctgg

SEQ ID NO: 2984417 - DNA, 25 bp, Homo sapien
ctccggcggcagatggcatgtacag

SEQ ID NO: 2984418 - DNA, 25 bp, Homo sapien
gcagatggcatgtacaggacaggac

SEQ ID NO: 2984419 - DNA, 25 bp, Homo sapien
aggggcatgcgggctggaggggctc

SEQ ID NO: 2984420 - DNA, 25 bp, Homo sapien
tgaaatttttcaggtactcggctcc

SEQ ID NO: 2984421 - DNA, 25 bp, Homo sapien
tggtcttccctctcgaagccgggag

SEQ ID NO: 2984422 - DNA, 25 bp, Homo sapien
cagggaagacgatgccctccaggtt

SEQ ID NO: 2984423 - DNA, 25 bp, Homo sapien
ccgcagaggttagacgggctgccta

SEQ ID NO: 2984424 - DNA, 25 bp, Homo sapien
aagcagaggctgctcttgactcctg

SEQ ID NO: 2984425 - DNA, 25 bp, Homo sapien
ctgaagcagaggctgctcttgactc

SEQ ID NO: 2984426 - DNA, 25 bp, Homo sapien
tgactcctgggctctaatgagtggg

SEQ ID NO: 2984427 - DNA, 25 bp, Homo sapien
ttgactcctgggctctaatgagtgg

SEQ ID NO: 2984428 - DNA, 25 bp, Homo sapien
ctgactctaccgtgtcgctggtggg

SEQ ID NO: 2984429 - DNA, 25 bp, Homo sapien
gcagagcgtttgcattcatgccggg

SEQ ID NO: 2984430 - DNA, 25 bp, Homo sapien
ctatgactgactctaccgtgtcgct

SEQ ID NO: 2984431 - DNA, 25 bp, Homo sapien
tgactgactctaccgtgtcgctggt

SEQ ID NO: 2984432 - DNA, 25 bp, Homo sapien
gcggccacgccaaactcattcaggt

SEQ ID NO: 2984433 - DNA, 25 bp, Homo sapien
aggtccaggtcatccaaagcagact

SEQ ID NO: 2984434 - DNA, 25 bp, Homo sapien
cactgtgctgttatcgaaagtcttc

SEQ ID NO: 2984435 - DNA, 25 bp, Homo sapien
gggcactgtgctgttatcgaaagtc

SEQ ID NO: 2984436 - DNA, 25 bp, Homo sapien
ttttccgactgactcaggtggccct

SEQ ID NO: 2984437 - DNA, 25 bp, Homo sapien
tgctgcaggaaatgcgaggagaggc

SEQ ID NO: 2984438 - DNA, 25 bp, Homo sapien
aatgtgttttccgactgactcaggt

SEQ ID NO: 2984439 - DNA, 25 bp, Homo sapien
ggatgttcacgggtgcagagctctg

SEQ ID NO: 2984440 - DNA, 25 bp, Homo sapien
cagcaccctcatgtgggaaatggga

SEQ ID NO: 2984441 - DNA, 25 bp, Homo sapien
tagttggtgccactcaacttccgag

SEQ ID NO: 2984442 - DNA, 25 bp, Homo sapien
gtactgcatgtgagagcagtcccag

SEQ ID NO: 2984443 - DNA, 25 bp, Homo sapien
ccccgatagtggcaatttatgattg

SEQ ID NO: 2984444 - DNA, 25 bp, Homo sapien
tcatccagctcttgccgaagtcggg

SEQ ID NO: 2984445 - DNA, 25 bp, Homo sapien
gcccctggccctgataggaaagcgg

SEQ ID NO: 2984446 - DNA, 25 bp, Homo sapien
cccctggccctgataggaaagcggg

SEQ ID NO: 2984447 - DNA, 25 bp, Homo sapien
gatggtgctgttggcttcatccagc

SEQ ID NO: 2984448 - DNA, 25 bp, Homo sapien
gcactggggaaggccggcaggcacg

SEQ ID NO: 2984449 - DNA, 25 bp, Homo sapien
cctccaggtcggagaaggcgggcag

SEQ ID NO: 2984450 - DNA, 25 bp, Homo sapien
aggtgggcccgcagttgtttctgga

SEQ ID NO: 2984451 - DNA, 25 bp, Homo sapien
agggtggagagtgagagcgcctcca

SEQ ID NO: 2984452 - DNA, 25 bp, Homo sapien
tcaggccccgcgtgtagccgctcca

SEQ ID NO: 2984453 - DNA, 25 bp, Homo sapien
cagcgtgttggcacggcagcactgc

SEQ ID NO: 2984454 - DNA, 25 bp, Homo sapien
cctgacacttaaggcatttcaccga

SEQ ID NO: 2984455 - DNA, 25 bp, Homo sapien
tgcccgcttctgttcctgacactta

SEQ ID NO: 2984456 - DNA, 25 bp, Homo sapien
cagagctcacacagcgcagcgtgtt

SEQ ID NO: 2984457 - DNA, 25 bp, Homo sapien
gcatacctgcacacatacggaaatg

SEQ ID NO: 2984458 - DNA, 25 bp, Homo sapien
ttgttcctaccgcagacacccggtg

SEQ ID NO: 2984459 - DNA, 25 bp, Homo sapien
agtcctaggtgagaagatctgggcc

SEQ ID NO: 2984460 - DNA, 25 bp, Homo sapien
gtcatagaatgagtaccagcctggt

SEQ ID NO: 2984461 - DNA, 25 bp, Homo sapien
acagacagacggaagcagaaaggac

SEQ ID NO: 2984462 - DNA, 25 bp, Homo sapien
gaccctgccaaagatgaggctccag

SEQ ID NO: 2984463 - DNA, 25 bp, Homo sapien
ggcacagagtctcctggaaaaggga

SEQ ID NO: 2984464 - DNA, 25 bp, Homo sapien
ttctggctctgagggagcaagagct

SEQ ID NO: 2984465 - DNA, 25 bp, Homo sapien
tgcttcaggaccaacgaaggagctg

SEQ ID NO: 2984466 - DNA, 25 bp, Homo sapien
tgaagtccccagtggagcctatggc

SEQ ID NO: 2984467 - DNA, 25 bp, Homo sapien
tggctactcttacatgcccagcggg

SEQ ID NO: 2984468 - DNA, 25 bp, Homo sapien
agtcgccaatggaatgtacccctgc

SEQ ID NO: 2984469 - DNA, 25 bp, Homo sapien
cctccctggaaagcgaagtcaagca

SEQ ID NO: 2984470 - DNA, 25 bp, Homo sapien
tagttatcaggatgccggtttcgcg

SEQ ID NO: 2984471 - DNA, 25 bp, Homo sapien
gaactaccacgtgggaagtgcagcc

SEQ ID NO: 2984472 - DNA, 25 bp, Homo sapien
tctgctgagtgaacgaaagctcccc

SEQ ID NO: 2984473 - DNA, 25 bp, Homo sapien
cgcctttggcgtgagccacaaaccc

SEQ ID NO: 2984474 - DNA, 25 bp, Homo sapien
cacgcctttggcgtgagccacaaac

SEQ ID NO: 2984475 - DNA, 25 bp, Homo sapien
acgcctttggcgtgagccacaaacc

SEQ ID NO: 2984476 - DNA, 25 bp, Homo sapien
attacaggcgcttacaggcgcacaa

SEQ ID NO: 2984477 - DNA, 25 bp, Homo sapien
ttacaggcgcttacaggcgcacaac

SEQ ID NO: 2984478 - DNA, 25 bp, Homo sapien
acaggtgaccgctaccacacccagc

SEQ ID NO: 2984479 - DNA, 25 bp, Homo sapien
ttacaggtgaccgctaccacaccca

SEQ ID NO: 2984480 - DNA, 25 bp, Homo sapien
attacaggtgaccgctaccacaccc

SEQ ID NO: 2984481 - DNA, 25 bp, Homo sapien
ccttctatgctgtacgggacggcaa

SEQ ID NO: 2984482 - DNA, 25 bp, Homo sapien
gaagtcctgcatatccgtgctgaag

SEQ ID NO: 2984483 - DNA, 25 bp, Homo sapien
tgggccctctccttcgtctgggaag

SEQ ID NO: 2984484 - DNA, 25 bp, Homo sapien
cagatcgggcccctcaagaagtcct

SEQ ID NO: 2984485 - DNA, 25 bp, Homo sapien
cattcctcagacaagggacttaggg

SEQ ID NO: 2984486 - DNA, 25 bp, Homo sapien
caggaactttgctaagggtgccagg

SEQ ID NO: 2984487 - DNA, 25 bp, Homo sapien
tgtactaggcctcctgtcagagacc

SEQ ID NO: 2984488 - DNA, 25 bp, Homo sapien
tattatgggacatcgtggccactcc

SEQ ID NO: 2984489 - DNA, 25 bp, Homo sapien
actggacatctatgttatatgtact

SEQ ID NO: 2984490 - DNA, 25 bp, Homo sapien
ttatatgtactcatggataaatatt

SEQ ID NO: 2984491 - DNA, 25 bp, Homo sapien
atatgtactcatggataaatatttc

SEQ ID NO: 2984492 - DNA, 25 bp, Homo sapien
aaactggacatctatgttatatgta

SEQ ID NO: 2984493 - DNA, 25 bp, Homo sapien
ttgagtcaagccgactaaggcccct

SEQ ID NO: 2984494 - DNA, 25 bp, Homo sapien
gagtcactcagggaacaatgagcac

SEQ ID NO: 2984495 - DNA, 25 bp, Homo sapien
taagcagcacgtgacactggcagga

SEQ ID NO: 2984496 - DNA, 25 bp, Homo sapien
tgtaggctgttacctcaagtgagtc

SEQ ID NO: 2984497 - DNA, 25 bp, Homo sapien
gctgtagtcattctaatgactatca

SEQ ID NO: 2984498 - DNA, 25 bp, Homo sapien
tgcaggggtgcggtcatgggctcat

SEQ ID NO: 2984499 - DNA, 25 bp, Homo sapien
ttttagctatacaaacattgatgtg

SEQ ID NO: 2984500 - DNA, 25 bp, Homo sapien
ggtcatgggctcatgggattctcct

SEQ ID NO: 2984501 - DNA, 25 bp, Homo sapien
gaggtgagcataaacgcagagttca

SEQ ID NO: 2984502 - DNA, 25 bp, Homo sapien
gccaccatgcctatgtgcccaagag

SEQ ID NO: 2984503 - DNA, 25 bp, Homo sapien
gataaatgggatgcccttgccccag

SEQ ID NO: 2984504 - DNA, 25 bp, Homo sapien
gcctctggagatgataagggccaaa

SEQ ID NO: 2984505 - DNA, 25 bp, Homo sapien
atgccgagcgcctcaagcgcgaggt

SEQ ID NO: 2984506 - DNA, 25 bp, Homo sapien
gtgcgcgagtgtcgcctccacgagc

SEQ ID NO: 2984507 - DNA, 25 bp, Homo sapien
tgtgtgcagcgtgtgcaccgtgcgc

SEQ ID NO: 2984508 - DNA, 25 bp, Homo sapien
gagctgattataaaagtcgtgggtc

SEQ ID NO: 2984509 - DNA, 25 bp, Homo sapien
gaaacttcgtctatggccgcacaga

SEQ ID NO: 2984510 - DNA, 25 bp, Homo sapien
ggtagatccgtgcactttgtccaga

SEQ ID NO: 2984511 - DNA, 25 bp, Homo sapien
tacacactgtcaggtaggtgggcgc

SEQ ID NO: 2984512 - DNA, 25 bp, Homo sapien
gatgagtccagaagaggttccgcgc

SEQ ID NO: 2984513 - DNA, 25 bp, Homo sapien
gagcccacctatggcatctactaag

SEQ ID NO: 2984514 - DNA, 25 bp, Homo sapien
tacagggacagtcatgagcccacct

SEQ ID NO: 2984515 - DNA, 25 bp, Homo sapien
gagccagagtgtgcgcatttcagag

SEQ ID NO: 2984516 - DNA, 25 bp, Homo sapien
tgcgctacctggaccggtacaggga

SEQ ID NO: 2984517 - DNA, 25 bp, Homo sapien
ctctcatacgctctctatcttctca

SEQ ID NO: 2984518 - DNA, 25 bp, Homo sapien
cccagcggaccttccgcacttttga

SEQ ID NO: 2984519 - DNA, 25 bp, Homo sapien
ccacactctcatacgctctctatct

SEQ ID NO: 2984520 - DNA, 25 bp, Homo sapien
gctggcccagcggaccttccgcact

SEQ ID NO: 2984521 - DNA, 25 bp, Homo sapien
atgtcccggcgttcacagagcttgg

SEQ ID NO: 2984522 - DNA, 25 bp, Homo sapien
gagacttcaggacgcagagggaaaa

SEQ ID NO: 2984523 - DNA, 25 bp, Homo sapien
ggctttctagcctcagtgactgtgg

SEQ ID NO: 2984524 - DNA, 25 bp, Homo sapien
tgttaccagcctatgcggcaggacc

SEQ ID NO: 2984525 - DNA, 25 bp, Homo sapien
gcacacaagggcttgagcacgcagc

SEQ ID NO: 2984526 - DNA, 25 bp, Homo sapien
cacacaagggcttgagcacgcagct

SEQ ID NO: 2984527 - DNA, 25 bp, Homo sapien
acacaagggcttgagcacgcagctg

SEQ ID NO: 2984528 - DNA, 25 bp, Homo sapien
tctcggaagaagtcccaaggcctgg

SEQ ID NO: 2984529 - DNA, 25 bp, Homo sapien
ttccaagctgcgagcctccaaggag

SEQ ID NO: 2984530 - DNA, 25 bp, Homo sapien
ggaaagttcagtgcctgtcacgccc

SEQ ID NO: 2984531 - DNA, 25 bp, Homo sapien
ccaccaactgaaggtgcagggtccc

SEQ ID NO: 2984532 - DNA, 25 bp, Homo sapien
tggtctcgggatctgtaaaacgcct

SEQ ID NO: 2984533 - DNA, 25 bp, Homo sapien
tctgagaagcccgtacaggatcgat

SEQ ID NO: 2984534 - DNA, 25 bp, Homo sapien
taggtcgtgaagtcgccattgcaga

SEQ ID NO: 2984535 - DNA, 25 bp, Homo sapien
taaaacgcctggcatggagtcggct

SEQ ID NO: 2984536 - DNA, 25 bp, Homo sapien
ggatcatggttggacagctgtgacc

SEQ ID NO: 2984537 - DNA, 25 bp, Homo sapien
tcagactgcggactacacttcataa

SEQ ID NO: 2984538 - DNA, 25 bp, Homo sapien
catatgttgttacccagccctggct

SEQ ID NO: 2984539 - DNA, 25 bp, Homo sapien
gattcaactaaatgactgccttggg

SEQ ID NO: 2984540 - DNA, 25 bp, Homo sapien
gatgttagctgttgcatatgtgcac

SEQ ID NO: 2984541 - DNA, 25 bp, Homo sapien
tgtgcacattcctagattcaagggt

SEQ ID NO: 2984542 - DNA, 25 bp, Homo sapien
gggaagatcatggaaaattcgggat

SEQ ID NO: 2984543 - DNA, 25 bp, Homo sapien
cagtacttcttcctatggttcatga

SEQ ID NO: 2984544 - DNA, 25 bp, Homo sapien
acatgttacatcttaattcttggat

SEQ ID NO: 2984545 - DNA, 25 bp, Homo sapien
aacatgttacatcttaattcttgga

SEQ ID NO: 2984546 - DNA, 25 bp, Homo sapien
ctgctttggcctcctctgagaagct

SEQ ID NO: 2984547 - DNA, 25 bp, Homo sapien
tgctttggcctcctctgagaagctg

SEQ ID NO: 2984548 - DNA, 25 bp, Homo sapien
tgtagcacactttggccaccaactc

SEQ ID NO: 2984549 - DNA, 25 bp, Homo sapien
gattgtagcacactttggccaccaa

SEQ ID NO: 2984550 - DNA, 25 bp, Homo sapien
ccagagtgaggagaattaatgagat

SEQ ID NO: 2984551 - DNA, 25 bp, Homo sapien
cacctgaaggcattttatagttcct

SEQ ID NO: 2984552 - DNA, 25 bp, Homo sapien
aaatgtgttggctatttgcaatgga

SEQ ID NO: 2984553 - DNA, 25 bp, Homo sapien
ttacaacattcaccgtgttcatatg

SEQ ID NO: 2984554 - DNA, 25 bp, Homo sapien
aatctaaatctggggccaggcgtgg

SEQ ID NO: 2984555 - DNA, 25 bp, Homo sapien
tttgggaggccgaagcgggtggatc

SEQ ID NO: 2984556 - DNA, 25 bp, Homo sapien
tggctcacgcctgtaatccaagcac

SEQ ID NO: 2984557 - DNA, 25 bp, Homo sapien
acctgaggtcaggagtttgagacca

SEQ ID NO: 2984558 - DNA, 25 bp, Homo sapien
gaacttattccgcacgggcctactg

SEQ ID NO: 2984559 - DNA, 25 bp, Homo sapien
aaagccttaatcgttccactgggag

SEQ ID NO: 2984560 - DNA, 25 bp, Homo sapien
gccatatgcctcatgaaaccagctg

SEQ ID NO: 2984561 - DNA, 25 bp, Homo sapien
gaagtatagggaaacctctcagctg

SEQ ID NO: 2984562 - DNA, 25 bp, Homo sapien
aagtcactgcagtccaagctctgaa

SEQ ID NO: 2984563 - DNA, 25 bp, Homo sapien
gaaagcgcctgtgtgcaactcaaat

SEQ ID NO: 2984564 - DNA, 25 bp, Homo sapien
ggaatctttttcgaattcaaatagc

SEQ ID NO: 2984565 - DNA, 25 bp, Homo sapien
ctctgaagtgtcacaaggacaagtt

SEQ ID NO: 2984566 - DNA, 25 bp, Homo sapien
ttgtttgagtgggctaagaactccc

SEQ ID NO: 2984567 - DNA, 25 bp, Homo sapien
tgcttggccgctatgatgggaatgt

SEQ ID NO: 2984568 - DNA, 25 bp, Homo sapien
tggccgctatgatgggaatgtgtat

SEQ ID NO: 2984569 - DNA, 25 bp, Homo sapien
ctctgtgcttggccgctatgatggg

SEQ ID NO: 2984570 - DNA, 25 bp, Homo sapien
tagcatcttcattacagtcacagtc

SEQ ID NO: 2984571 - DNA, 25 bp, Homo sapien
cagccctggctttttcagcatgtct

SEQ ID NO: 2984572 - DNA, 25 bp, Homo sapien
acccgtcacggagtctctaccagtg

SEQ ID NO: 2984573 - DNA, 25 bp, Homo sapien
tttttgaggcttctaaggacagccc

SEQ ID NO: 2984574 - DNA, 25 bp, Homo sapien
gcacccggcctgagagataagattc

SEQ ID NO: 2984575 - DNA, 25 bp, Homo sapien
tctttatgtagtcctcctcgcttgg

SEQ ID NO: 2984576 - DNA, 25 bp, Homo sapien
catgctgttcataggaggcataaga

SEQ ID NO: 2984577 - DNA, 25 bp, Homo sapien
cataagatgtgaaatagtctgaggc

SEQ ID NO: 2984578 - DNA, 25 bp, Homo sapien
ccgcgcccggctactattatttctt

SEQ ID NO: 2984579 - DNA, 25 bp, Homo sapien
atggtctcgatctgatggtctcgat

SEQ ID NO: 2984580 - DNA, 25 bp, Homo sapien
ggtctcgatctgatggtctcgatct

SEQ ID NO: 2984581 - DNA, 25 bp, Homo sapien
ttggtttcagggtcccccagcactg

SEQ ID NO: 2984582 - DNA, 25 bp, Homo sapien
tcctggaaattatcgcatgctatcg

SEQ ID NO: 2984583 - DNA, 25 bp, Homo sapien
ccttaggatatgacaaggagatcag

SEQ ID NO: 2984584 - DNA, 25 bp, Homo sapien
aagaatgctgccagttaaccgtgac

SEQ ID NO: 2984585 - DNA, 25 bp, Homo sapien
taaccgtgacatgctattaattgtg

SEQ ID NO: 2984586 - DNA, 25 bp, Homo sapien
tttcccgaggatccgctcgggagcc

SEQ ID NO: 2984587 - DNA, 25 bp, Homo sapien
aggggattagtctgccccgcgaccg

SEQ ID NO: 2984588 - DNA, 25 bp, Homo sapien
ttctttccgcctcgcgtggtcacgt

SEQ ID NO: 2984589 - DNA, 25 bp, Homo sapien
tgttctaggcgtcgccggtcctcgg

SEQ ID NO: 2984590 - DNA, 25 bp, Homo sapien
cggtgatggcgaaagcaaagaagtc

SEQ ID NO: 2984591 - DNA, 25 bp, Homo sapien
tccaagacctctagtaactgccagg

SEQ ID NO: 2984592 - DNA, 25 bp, Homo sapien
tttcccactttgatgacggtgatgg

SEQ ID NO: 2984593 - DNA, 25 bp, Homo sapien
ttggtctcattctaagtccccgtcc

SEQ ID NO: 2984594 - DNA, 25 bp, Homo sapien
cagactacagacaggctaggcgcag

SEQ ID NO: 2984595 - DNA, 25 bp, Homo sapien
tgtgccaggtacagagaataaacta

SEQ ID NO: 2984596 - DNA, 25 bp, Homo sapien
cctgagatcagcagcttaataagac

SEQ ID NO: 2984597 - DNA, 25 bp, Homo sapien
gaataaactagacaccctctctgct

SEQ ID NO: 2984598 - DNA, 25 bp, Homo sapien
accaaatagttgagagggattttga

SEQ ID NO: 2984599 - DNA, 25 bp, Homo sapien
aaccaaatagttgagagggattttg

SEQ ID NO: 2984600 - DNA, 25 bp, Homo sapien
gtaataggtcccaggtttgggcagc

SEQ ID NO: 2984601 - DNA, 25 bp, Homo sapien
acttggcctgcactaacctcccagg

SEQ ID NO: 2984602 - DNA, 25 bp, Homo sapien
cgtgctcccatcaggaacttggcct

SEQ ID NO: 2984603 - DNA, 25 bp, Homo sapien
ctgccaaatgttctcagcgtgctcc

SEQ ID NO: 2984604 - DNA, 25 bp, Homo sapien
tcagtgttactctggactgaatcat

SEQ ID NO: 2984605 - DNA, 25 bp, Homo sapien
gatcggatccgtgctgagccatcag

SEQ ID NO: 2984606 - DNA, 25 bp, Homo sapien
ctgaatcatgtcatagaggcacaac

SEQ ID NO: 2984607 - DNA, 25 bp, Homo sapien
aagaacctggtgctgatcggatccg

SEQ ID NO: 2984608 - DNA, 25 bp, Homo sapien
cgaggacgatgtacagggagcccac

SEQ ID NO: 2984609 - DNA, 25 bp, Homo sapien
tccccgaggacgatgtacagggagc

SEQ ID NO: 2984610 - DNA, 25 bp, Homo sapien
agctccccgaggacgatgtacaggg

SEQ ID NO: 2984611 - DNA, 25 bp, Homo sapien
cctgctgatgctggagctccccgag

SEQ ID NO: 2984612 - DNA, 25 bp, Homo sapien
tcatctttgattcgagttccctccg

SEQ ID NO: 2984613 - DNA, 25 bp, Homo sapien
tcagggtggacagagcacagtcagc

SEQ ID NO: 2984614 - DNA, 25 bp, Homo sapien
gttccctccgtgaatgacgagcgtg

SEQ ID NO: 2984615 - DNA, 25 bp, Homo sapien
ttcacagggaggtttaaagcagcca

SEQ ID NO: 2984616 - DNA, 25 bp, Homo sapien
tccaacaagggcaggttcatcccct

SEQ ID NO: 2984617 - DNA, 25 bp, Homo sapien
acacaggtcagcacgcgcgccttca

SEQ ID NO: 2984618 - DNA, 25 bp, Homo sapien
ccaacaagggcaggttcatcccctc

SEQ ID NO: 2984619 - DNA, 25 bp, Homo sapien
tccacacaggtcagcacgcgcgcct

SEQ ID NO: 2984620 - DNA, 25 bp, Homo sapien
agctccagagggttcgggctctgaa

SEQ ID NO: 2984621 - DNA, 25 bp, Homo sapien
tcggctttcgagctccagacaaggc

SEQ ID NO: 2984622 - DNA, 25 bp, Homo sapien
caggtgagggtgttgctaggctgct

SEQ ID NO: 2984623 - DNA, 25 bp, Homo sapien
gaggcgtctgtgctctcccgggctc

SEQ ID NO: 2984624 - DNA, 25 bp, Homo sapien
ggttctcattgctgagccaatccca

SEQ ID NO: 2984625 - DNA, 25 bp, Homo sapien
gggctgtcggatttatggcatgctt

SEQ ID NO: 2984626 - DNA, 25 bp, Homo sapien
ttctgggttctcattgctgagccaa

SEQ ID NO: 2984627 - DNA, 25 bp, Homo sapien
tcattgctgagccaatcccaaagta

SEQ ID NO: 2984628 - DNA, 25 bp, Homo sapien
tccatggccccacaccaagcacggc

SEQ ID NO: 2984629 - DNA, 25 bp, Homo sapien
ggccccggcgcccaagctcggccac

SEQ ID NO: 2984630 - DNA, 25 bp, Homo sapien
gcacggccccggcgcccaagctcgg

SEQ ID NO: 2984631 - DNA, 25 bp, Homo sapien
tgggcctttattcaccaggaccttc

SEQ ID NO: 2984632 - DNA, 25 bp, Homo sapien
aggctctgggtacacatggcggcca

SEQ ID NO: 2984633 - DNA, 25 bp, Homo sapien
cacagtcctgtcttaggctgcacgg

SEQ ID NO: 2984634 - DNA, 25 bp, Homo sapien
gggtcaggagggtcttaaagccaca

SEQ ID NO: 2984635 - DNA, 25 bp, Homo sapien
ggcccagaattcaccagaagccctg

SEQ ID NO: 2984636 - DNA, 25 bp, Homo sapien
tgccgggccttagagggcaagacca

SEQ ID NO: 2984637 - DNA, 25 bp, Homo sapien
aaggcaccgggcaatttgcacccca

SEQ ID NO: 2984638 - DNA, 25 bp, Homo sapien
ccagcttccatgtggcgccctgccc

SEQ ID NO: 2984639 - DNA, 25 bp, Homo sapien
agcgctcccgttgctcctccagctt

SEQ ID NO: 2984640 - DNA, 25 bp, Homo sapien
gtacaccaccccataggtgccctct

SEQ ID NO: 2984641 - DNA, 25 bp, Homo sapien
tccctgttcttggccttgtacacca

SEQ ID NO: 2984642 - DNA, 25 bp, Homo sapien
gccttgtacaccaccccataggtgc

SEQ ID NO: 2984643 - DNA, 25 bp, Homo sapien
gccctctccgatcttctctaccttc

SEQ ID NO: 2984644 - DNA, 25 bp, Homo sapien
gcagcgagatctccctgatggcagt

SEQ ID NO: 2984645 - DNA, 25 bp, Homo sapien
ttgagcagcgagatctccctgatgg

SEQ ID NO: 2984646 - DNA, 25 bp, Homo sapien
tcagttccttgagcagcgagatctc

SEQ ID NO: 2984647 - DNA, 25 bp, Homo sapien
tccttgagcagcgagatctccctga

SEQ ID NO: 2984648 - DNA, 25 bp, Homo sapien
ccagatagagcttcctctcgttgtg

SEQ ID NO: 2984649 - DNA, 25 bp, Homo sapien
gagcttcctctcgttgtgcaccacg

SEQ ID NO: 2984650 - DNA, 25 bp, Homo sapien
ggaactcaaacaccagatagagctt

SEQ ID NO: 2984651 - DNA, 25 bp, Homo sapien
ggtggagtccatgtacttcttcagg

SEQ ID NO: 2984652 - DNA, 25 bp, Homo sapien
gagcgcgaggtgcagccagctgagc

SEQ ID NO: 2984653 - DNA, 25 bp, Homo sapien
agaaacgagcgcgaggtgcagccag

SEQ ID NO: 2984654 - DNA, 25 bp, Homo sapien
ctggagaaacgagcgcgaggtgcag

SEQ ID NO: 2984655 - DNA, 25 bp, Homo sapien
gcgaggtgcagccagctgagcggag

SEQ ID NO: 2984656 - DNA, 25 bp, Homo sapien
ccagcttgatggcacccaactcatt

SEQ ID NO: 2984657 - DNA, 25 bp, Homo sapien
agcttgatggcacccaactcattga

SEQ ID NO: 2984658 - DNA, 25 bp, Homo sapien
tctcggtggatgacccgatgtgagt

SEQ ID NO: 2984659 - DNA, 25 bp, Homo sapien
cccgatgtgagtggcagaaactcac

SEQ ID NO: 2984660 - DNA, 25 bp, Homo sapien
cagctgtggtatagaacttgctgcc

SEQ ID NO: 2984661 - DNA, 25 bp, Homo sapien
tgcaaagatgcaaccaatgctccag

SEQ ID NO: 2984662 - DNA, 25 bp, Homo sapien
tctcgggggcgcgataccacagtgt

SEQ ID NO: 2984663 - DNA, 25 bp, Homo sapien
acttgctgcccaagagaatctcggg

SEQ ID NO: 2984664 - DNA, 25 bp, Homo sapien
gtaggaccctgcctgtggcaccctg

SEQ ID NO: 2984665 - DNA, 25 bp, Homo sapien
caaccccagtaggaccctgcctgtg

SEQ ID NO: 2984666 - DNA, 25 bp, Homo sapien
ctgcctgtggcaccctgtggccatg

SEQ ID NO: 2984667 - DNA, 25 bp, Homo sapien
tgtggccatgtgtgcccctctctct

SEQ ID NO: 2984668 - DNA, 25 bp, Homo sapien
gatatcttttccatgactgtgcaaa

SEQ ID NO: 2984669 - DNA, 25 bp, Homo sapien
ataccagataagtggccagacccag

SEQ ID NO: 2984670 - DNA, 25 bp, Homo sapien
ctttaatccgcctcgaatgggagca

SEQ ID NO: 2984671 - DNA, 25 bp, Homo sapien
gggagaggcctgtcaagatatcttt

SEQ ID NO: 2984672 - DNA, 25 bp, Homo sapien
agaagagaaggtgtggggtccgcca

SEQ ID NO: 2984673 - DNA, 25 bp, Homo sapien
gaagaagagaaggtgtggggtccgc

SEQ ID NO: 2984674 - DNA, 25 bp, Homo sapien
gtgaccccgggccatgtgtcttcgc

SEQ ID NO: 2984675 - DNA, 25 bp, Homo sapien
agcatacgaaagatacgaaagagct

SEQ ID NO: 2984676 - DNA, 25 bp, Homo sapien
tgggtgtccccagcatacgaaagat

SEQ ID NO: 2984677 - DNA, 25 bp, Homo sapien
catgtgtcttcgctgggtgtcccca

SEQ ID NO: 2984678 - DNA, 25 bp, Homo sapien
ccttcctggtccacttagggaagct

SEQ ID NO: 2984679 - DNA, 25 bp, Homo sapien
cctctggctccagattgggcacaat

SEQ ID NO: 2984680 - DNA, 25 bp, Homo sapien
gccctctggctccagattgggcaca

SEQ ID NO: 2984681 - DNA, 25 bp, Homo sapien
tggctccagattgggcacaatctct

SEQ ID NO: 2984682 - DNA, 25 bp, Homo sapien
gcagctggagcccacatgcacctac

SEQ ID NO: 2984683 - DNA, 25 bp, Homo sapien
aactgtagtcggagcagcagctgga

SEQ ID NO: 2984684 - DNA, 25 bp, Homo sapien
gaggggaaactgtagtcggagcagc

SEQ ID NO: 2984685 - DNA, 25 bp, Homo sapien
tgatgaggggaaactgtagtcggag

SEQ ID NO: 2984686 - DNA, 25 bp, Homo sapien
ggatgagaagtacgggtgggccagg

SEQ ID NO: 2984687 - DNA, 25 bp, Homo sapien
tgcagcacatactggcgggcagctg

SEQ ID NO: 2984688 - DNA, 25 bp, Homo sapien
tcaatggcggaatcgctgcagcaca

SEQ ID NO: 2984689 - DNA, 25 bp, Homo sapien
tcttggctgtgatccgctggctggg

SEQ ID NO: 2984690 - DNA, 25 bp, Homo sapien
tgttgtcaagccagaaatgaaccaa

SEQ ID NO: 2984691 - DNA, 25 bp, Homo sapien
gacccctcgtgcatggagcatctgt

SEQ ID NO: 2984692 - DNA, 25 bp, Homo sapien
taacctgcgggcaggactaacccag

SEQ ID NO: 2984693 - DNA, 25 bp, Homo sapien
ttaacttgggactgaactggaactc

SEQ ID NO: 2984694 - DNA, 25 bp, Homo sapien
caagggcatctttggattcaggagc

SEQ ID NO: 2984695 - DNA, 25 bp, Homo sapien
gagtttaacatcttcggccctgcat

SEQ ID NO: 2984696 - DNA, 25 bp, Homo sapien
ttaagcagcgtgtcaggagagcacc

SEQ ID NO: 2984697 - DNA, 25 bp, Homo sapien
tcagtaatgcgttcaggagtccaca

SEQ ID NO: 2984698 - DNA, 25 bp, Homo sapien
tcaaggtagatgtctgggtcgcacc

SEQ ID NO: 2984699 - DNA, 25 bp, Homo sapien
tgggacctggtgtagccctgactgc

SEQ ID NO: 2984700 - DNA, 25 bp, Homo sapien
caagccctggcaggttatggagtca

SEQ ID NO: 2984701 - DNA, 25 bp, Homo sapien
gactgcacgttgaaatctcttagga

SEQ ID NO: 2984702 - DNA, 25 bp, Homo sapien
ctgcagccgtctgggtctccgcgag

SEQ ID NO: 2984703 - DNA, 25 bp, Homo sapien
gggtctccgcgagcgggaagctccc

SEQ ID NO: 2984704 - DNA, 25 bp, Homo sapien
ggtgccgctgaccccgaggctgccc

SEQ ID NO: 2984705 - DNA, 25 bp, Homo sapien
ccgtctgggtctccgcgagcgggaa

SEQ ID NO: 2984706 - DNA, 25 bp, Homo sapien
gcacaggatgaaacacaggtcggcc

SEQ ID NO: 2984707 - DNA, 25 bp, Homo sapien
gatgaacaggttggtagtgctgacc

SEQ ID NO: 2984708 - DNA, 25 bp, Homo sapien
ggaagatgaggaagtgcaccgcctt

SEQ ID NO: 2984709 - DNA, 25 bp, Homo sapien
cccagccgtccagggtgtagatggt

SEQ ID NO: 2984710 - DNA, 25 bp, Homo sapien
ttgggcaagggacagttaatttctc

SEQ ID NO: 2984711 - DNA, 25 bp, Homo sapien
gaggctgtgactacccactggtgac

SEQ ID NO: 2984712 - DNA, 25 bp, Homo sapien
ttcgcgctcagtggctacaggaggt

SEQ ID NO: 2984713 - DNA, 25 bp, Homo sapien
agaatgcgagctttgtggatcccac

SEQ ID NO: 2984714 - DNA, 25 bp, Homo sapien
acactcagcggagcctggaaatggg

SEQ ID NO: 2984715 - DNA, 25 bp, Homo sapien
actcagcggagcctggaaatggggc

SEQ ID NO: 2984716 - DNA, 25 bp, Homo sapien
gacactcagcggagcctggaaatgg

SEQ ID NO: 2984717 - DNA, 25 bp, Homo sapien
cactcagcggagcctggaaatgggg

SEQ ID NO: 2984718 - DNA, 25 bp, Homo sapien
ctgcggtcagaccgggaagggagac

SEQ ID NO: 2984719 - DNA, 25 bp, Homo sapien
gacgtcggctgagcgggcacattca

SEQ ID NO: 2984720 - DNA, 25 bp, Homo sapien
gaagggagacgtcggctgagcgggc

SEQ ID NO: 2984721 - DNA, 25 bp, Homo sapien
tcagaccgggaagggagacgtcggc

SEQ ID NO: 2984722 - DNA, 25 bp, Homo sapien
gcttggagaccagcgcgtaaacgat

SEQ ID NO: 2984723 - DNA, 25 bp, Homo sapien
tgaggatcatgcgtgtcaccttgcg

SEQ ID NO: 2984724 - DNA, 25 bp, Homo sapien
agagcgcggccacgatgaggatcat

SEQ ID NO: 2984725 - DNA, 25 bp, Homo sapien
cagatcgtgcggaagcctttgcgga

SEQ ID NO: 2984726 - DNA, 25 bp, Homo sapien
ctccaacacgctgccactgtgggtg

SEQ ID NO: 2984727 - DNA, 25 bp, Homo sapien
catcaaccgtcaggatgctgtcgcc

SEQ ID NO: 2984728 - DNA, 25 bp, Homo sapien
gccaggacagggctcgaggatgcat

SEQ ID NO: 2984729 - DNA, 25 bp, Homo sapien
tcatgtgcaacaggtcgctggactc

SEQ ID NO: 2984730 - DNA, 25 bp, Homo sapien
tgtgacatcccagcgcgcccgctaa

SEQ ID NO: 2984731 - DNA, 25 bp, Homo sapien
tgtgcgttttattaacaggcaaagc

SEQ ID NO: 2984732 - DNA, 25 bp, Homo sapien
caactctgtgacatcccagcgcgcc

SEQ ID NO: 2984733 - DNA, 25 bp, Homo sapien
cgttttattaacaggcaaagctctc

SEQ ID NO: 2984734 - DNA, 25 bp, Homo sapien
gcggtgcctaagctacaacctctat

SEQ ID NO: 2984735 - DNA, 25 bp, Homo sapien
ctggagggagcagcggtgcctaagc

SEQ ID NO: 2984736 - DNA, 25 bp, Homo sapien
taagctacaacctctattccagtca

SEQ ID NO: 2984737 - DNA, 25 bp, Homo sapien
agggagcagcggtgcctaagctaca

SEQ ID NO: 2984738 - DNA, 25 bp, Homo sapien
ctgcccgtggaccaacagcaaggta

SEQ ID NO: 2984739 - DNA, 25 bp, Homo sapien
cctgcccgtggaccaacagcaaggt

SEQ ID NO: 2984740 - DNA, 25 bp, Homo sapien
acagcaaggtaatgctgaaccccag

SEQ ID NO: 2984741 - DNA, 25 bp, Homo sapien
ggtaatgctgaaccccaggaaggtg

SEQ ID NO: 2984742 - DNA, 25 bp, Homo sapien
cattaaacacgttggagacaaacac

SEQ ID NO: 2984743 - DNA, 25 bp, Homo sapien
cattgttcgggatctggatgctttc

SEQ ID NO: 2984744 - DNA, 25 bp, Homo sapien
cttggacaagttgacgttgaagagg

SEQ ID NO: 2984745 - DNA, 25 bp, Homo sapien
gcacatccacgagcaggggcgcact

SEQ ID NO: 2984746 - DNA, 25 bp, Homo sapien
catggaggacattgtgtatcgcagg

SEQ ID NO: 2984747 - DNA, 25 bp, Homo sapien
cagcatggaggacattgtgtatcgc

SEQ ID NO: 2984748 - DNA, 25 bp, Homo sapien
agcagcatggaggacattgtgtatc

SEQ ID NO: 2984749 - DNA, 25 bp, Homo sapien
gaggacattgtgtatcgcaggatgt

SEQ ID NO: 2984750 - DNA, 25 bp, Homo sapien
actcccagggcagcgtgatggcgtg

SEQ ID NO: 2984751 - DNA, 25 bp, Homo sapien
ccaggatggtgagccttggtgtcca

SEQ ID NO: 2984752 - DNA, 25 bp, Homo sapien
tggtgtccagagagactcccagggc

SEQ ID NO: 2984753 - DNA, 25 bp, Homo sapien
gcgtgccgcgggtgtgcactagtgt

SEQ ID NO: 2984754 - DNA, 25 bp, Homo sapien
ggccaggttgagcttcacgtggccg

SEQ ID NO: 2984755 - DNA, 25 bp, Homo sapien
ccgtgttgctgagagcgtagaagct

SEQ ID NO: 2984756 - DNA, 25 bp, Homo sapien
ccgtcctggtctactcgagcctggg

SEQ ID NO: 2984757 - DNA, 25 bp, Homo sapien
cttcacgtggccgtcctggtctact

SEQ ID NO: 2984758 - DNA, 25 bp, Homo sapien
cctcctcccctcctcaaccctgcag

SEQ ID NO: 2984759 - DNA, 25 bp, Homo sapien
tcctcccctcctcaaccctgcagcc

SEQ ID NO: 2984760 - DNA, 25 bp, Homo sapien
ccctgcagcccctgccctgtcagca

SEQ ID NO: 2984761 - DNA, 25 bp, Homo sapien
ttcctcctcccctcctcaaccctgc

SEQ ID NO: 2984762 - DNA, 25 bp, Homo sapien
tggtcacaggctcgtcagtctatca

SEQ ID NO: 2984763 - DNA, 25 bp, Homo sapien
taccgctgagcacagagatgggctg

SEQ ID NO: 2984764 - DNA, 25 bp, Homo sapien
tttgagtctgtcaccctagagaggg

SEQ ID NO: 2984765 - DNA, 25 bp, Homo sapien
cagaagactgatgtgctcggacctc

SEQ ID NO: 2984766 - DNA, 25 bp, Homo sapien
gggacagacttggacacaaaaccga

SEQ ID NO: 2984767 - DNA, 25 bp, Homo sapien
ggtgatggagacttttgatggcttt

SEQ ID NO: 2984768 - DNA, 25 bp, Homo sapien
aaccgatccatagaagggcttccca

SEQ ID NO: 2984769 - DNA, 25 bp, Homo sapien
aggagagatcccagctgccaagtct

SEQ ID NO: 2984770 - DNA, 25 bp, Homo sapien
taaactacgtattccctcttgacac

SEQ ID NO: 2984771 - DNA, 25 bp, Homo sapien
gatcataaactacgtattccctctt

SEQ ID NO: 2984772 - DNA, 25 bp, Homo sapien
gggtcttcagatcataaactacgta

SEQ ID NO: 2984773 - DNA, 25 bp, Homo sapien
ggtgggacttgggtcttcagatcat

SEQ ID NO: 2984774 - DNA, 25 bp, Homo sapien
cctctgtcggcctcctcccgacttg

SEQ ID NO: 2984775 - DNA, 25 bp, Homo sapien
ctccagcagccctctgtcggcctcc

SEQ ID NO: 2984776 - DNA, 25 bp, Homo sapien
gcagccctctgtcggcctcctcccg

SEQ ID NO: 2984777 - DNA, 25 bp, Homo sapien
tgtcggcctcctcccgacttgactc

SEQ ID NO: 2984778 - DNA, 25 bp, Homo sapien
tctgcaggcaccaagagagcgatga

SEQ ID NO: 2984779 - DNA, 25 bp, Homo sapien
tagcctatgcgctcaatggcccgga

SEQ ID NO: 2984780 - DNA, 25 bp, Homo sapien
cttgtagcctatgcgctcaatggcc

SEQ ID NO: 2984781 - DNA, 25 bp, Homo sapien
gacttgagcgccgtgttcttcagcc

SEQ ID NO: 2984782 - DNA, 25 bp, Homo sapien
gaggagtggaggacgaggtaactca

SEQ ID NO: 2984783 - DNA, 25 bp, Homo sapien
cgaggtaactcagcagcaatgtcac

SEQ ID NO: 2984784 - DNA, 25 bp, Homo sapien
tggaggacgaggtaactcagcagca

SEQ ID NO: 2984785 - DNA, 25 bp, Homo sapien
ggacgaggtaactcagcagcaatgt

SEQ ID NO: 2984786 - DNA, 25 bp, Homo sapien
gggttgccgtgctctcgctgttccc

SEQ ID NO: 2984787 - DNA, 25 bp, Homo sapien
gaggccctgggttgccgtgctctcg

SEQ ID NO: 2984788 - DNA, 25 bp, Homo sapien
cctgggttgccgtgctctcgctgtt

SEQ ID NO: 2984789 - DNA, 25 bp, Homo sapien
aggccctgggttgccgtgctctcgc

SEQ ID NO: 2984790 - DNA, 25 bp, Homo sapien
agatgcggtcagcagtctcaggcca

SEQ ID NO: 2984791 - DNA, 25 bp, Homo sapien
gaagatgcggtcagcagtctcaggc

SEQ ID NO: 2984792 - DNA, 25 bp, Homo sapien
gaagaagatgcggtcagcagtctca

SEQ ID NO: 2984793 - DNA, 25 bp, Homo sapien
cggtcagcagtctcaggccagcttc

SEQ ID NO: 2984794 - DNA, 25 bp, Homo sapien
aagacgaattgggtgcacagcaccc

SEQ ID NO: 2984795 - DNA, 25 bp, Homo sapien
gcaaagacgaattgggtgcacagca

SEQ ID NO: 2984796 - DNA, 25 bp, Homo sapien
ctgcaaagacgaattgggtgcacag

SEQ ID NO: 2984797 - DNA, 25 bp, Homo sapien
caaagacgaattgggtgcacagcac

SEQ ID NO: 2984798 - DNA, 25 bp, Homo sapien
gctgcgtcagacttgcacgctgccc

SEQ ID NO: 2984799 - DNA, 25 bp, Homo sapien
gtcagacttgcacgctgcccacatc

SEQ ID NO: 2984800 - DNA, 25 bp, Homo sapien
ttgcacgctgcccacatccagattc

SEQ ID NO: 2984801 - DNA, 25 bp, Homo sapien
ttacagtctaggccgcctgccatgg

SEQ ID NO: 2984802 - DNA, 25 bp, Homo sapien
ttcatcctaaggtgtgcagcccagg

SEQ ID NO: 2984803 - DNA, 25 bp, Homo sapien
gcttgtgtgctagcggagggagagc

SEQ ID NO: 2984804 - DNA, 25 bp, Homo sapien
gggtttatttcacgctctgtgcttg

SEQ ID NO: 2984805 - DNA, 25 bp, Homo sapien
cccagccatgggaaagcaaacttca

SEQ ID NO: 2984806 - DNA, 25 bp, Homo sapien
ggtgtaagcagtgagcctccagaca

SEQ ID NO: 2984807 - DNA, 25 bp, Homo sapien
caggtgtaagcagtgagcctccaga

SEQ ID NO: 2984808 - DNA, 25 bp, Homo sapien
tgtaagcagtgagcctccagacact

SEQ ID NO: 2984809 - DNA, 25 bp, Homo sapien
gtaagcagtgagcctccagacactg

SEQ ID NO: 2984810 - DNA, 25 bp, Homo sapien
aatgtagtgagtgtagctgtagctg

SEQ ID NO: 2984811 - DNA, 25 bp, Homo sapien
gccgagcttgctggaactactggga

SEQ ID NO: 2984812 - DNA, 25 bp, Homo sapien
tctttaagcccgacttgaggctgag

SEQ ID NO: 2984813 - DNA, 25 bp, Homo sapien
gcaggacagacagactaatgtagtg

SEQ ID NO: 2984814 - DNA, 25 bp, Homo sapien
tgaaggcgcattcttgtcccaagtc

SEQ ID NO: 2984815 - DNA, 25 bp, Homo sapien
tctgcaggccaagtaggctctgcgg

SEQ ID NO: 2984816 - DNA, 25 bp, Homo sapien
gagagcgatgaactgaaggcgcatt

SEQ ID NO: 2984817 - DNA, 25 bp, Homo sapien
cagggctagactctgcgtggacaga

SEQ ID NO: 2984818 - DNA, 25 bp, Homo sapien
atgatgttagagagggcgtccccgt

SEQ ID NO: 2984819 - DNA, 25 bp, Homo sapien
gagggcgtccccgtacacacactgt

SEQ ID NO: 2984820 - DNA, 25 bp, Homo sapien
ggcactaaaagatcctccccagctg

SEQ ID NO: 2984821 - DNA, 25 bp, Homo sapien
ctaaaagatcctccccagctgcggg

SEQ ID NO: 2984822 - DNA, 25 bp, Homo sapien
gaacgaacggatccatagcggttcc

SEQ ID NO: 2984823 - DNA, 25 bp, Homo sapien
acgaacggatccatagcggttcccg

SEQ ID NO: 2984824 - DNA, 25 bp, Homo sapien
tgggggcgagagtcttggttcccca

SEQ ID NO: 2984825 - DNA, 25 bp, Homo sapien
cgaacggatccatagcggttcccgg

SEQ ID NO: 2984826 - DNA, 25 bp, Homo sapien
agaagcacggaaagattcctcaagg

SEQ ID NO: 2984827 - DNA, 25 bp, Homo sapien
caggtaaacagtagccacagtggcc

SEQ ID NO: 2984828 - DNA, 25 bp, Homo sapien
cttcctcgcagcaggtgcttagtcc

SEQ ID NO: 2984829 - DNA, 25 bp, Homo sapien
gattcaggtaaacagtagccacagt

SEQ ID NO: 2984830 - DNA, 25 bp, Homo sapien
gaggatccctgtccttcctcgcagc

SEQ ID NO: 2984831 - DNA, 25 bp, Homo sapien
gaaatgtggaccagtgattctcagt

SEQ ID NO: 2984832 - DNA, 25 bp, Homo sapien
tcctcactcaattgggaggtggcat

SEQ ID NO: 2984833 - DNA, 25 bp, Homo sapien
gattctcagtttggtgcccaggtcc

SEQ ID NO: 2984834 - DNA, 25 bp, Homo sapien
gaagtgatggagagccttgagctaa

SEQ ID NO: 2984835 - DNA, 25 bp, Homo sapien
tggaaagggagagccatactgcacg

SEQ ID NO: 2984836 - DNA, 25 bp, Homo sapien
tactgcacggacgtagcgtttccct

SEQ ID NO: 2984837 - DNA, 25 bp, Homo sapien
ttctgggcctcacatgcctgtgcgg

SEQ ID NO: 2984838 - DNA, 25 bp, Homo sapien
cctgtgcggttaagaaggagctctt

SEQ ID NO: 2984839 - DNA, 25 bp, Homo sapien
tttctccgtgtgacctaaagccact

SEQ ID NO: 2984840 - DNA, 25 bp, Homo sapien
ggtccatgggctaatttcttacaca

SEQ ID NO: 2984841 - DNA, 25 bp, Homo sapien
tctcagagggaactggaaccctcct

SEQ ID NO: 2984842 - DNA, 25 bp, Homo sapien
cagctcacgagaccttttgcaggga

SEQ ID NO: 2984843 - DNA, 25 bp, Homo sapien
gctgatgacaatgccgtcagtcgga

SEQ ID NO: 2984844 - DNA, 25 bp, Homo sapien
cgccggcgcttgtcatccagcagcc

SEQ ID NO: 2984845 - DNA, 25 bp, Homo sapien
tcggaatgcccagcgccggcgcttg

SEQ ID NO: 2984846 - DNA, 25 bp, Homo sapien
gctgttacaacctgtaaccacaatc

SEQ ID NO: 2984847 - DNA, 25 bp, Homo sapien
tcaggtgacacgcatcctgctcctt

SEQ ID NO: 2984848 - DNA, 25 bp, Homo sapien
tctcacacacgagtgctgtggctcg

SEQ ID NO: 2984849 - DNA, 25 bp, Homo sapien
ctgtggctcgcaccgtcatcggagt

SEQ ID NO: 2984850 - DNA, 25 bp, Homo sapien
ttctctccgttctcacacacgagtg

SEQ ID NO: 2984851 - DNA, 25 bp, Homo sapien
ggagcaggctctgcacctgtcagca

SEQ ID NO: 2984852 - DNA, 25 bp, Homo sapien
gagcaggctctgcacctgtcagcac

SEQ ID NO: 2984853 - DNA, 25 bp, Homo sapien
gggggcaggagcaggctctgcacct

SEQ ID NO: 2984854 - DNA, 25 bp, Homo sapien
gcaggagcaggctctgcacctgtca

SEQ ID NO: 2984855 - DNA, 25 bp, Homo sapien
cacagcaagcccgtgaggtcagtac

SEQ ID NO: 2984856 - DNA, 25 bp, Homo sapien
caagcccgtgaggtcagtacgcatg

SEQ ID NO: 2984857 - DNA, 25 bp, Homo sapien
cgtgaggtcagtacgcatgtcccat

SEQ ID NO: 2984858 - DNA, 25 bp, Homo sapien
attctctcatctagtcctcacagca

SEQ ID NO: 2984859 - DNA, 25 bp, Homo sapien
acaagtaaccgatgttctgccctgg

SEQ ID NO: 2984860 - DNA, 25 bp, Homo sapien
tctttcctactgaacagccgcagct

SEQ ID NO: 2984861 - DNA, 25 bp, Homo sapien
gagcagacttcagatctgattcttg

SEQ ID NO: 2984862 - DNA, 25 bp, Homo sapien
tgccctggctaaggcttctatagaa

SEQ ID NO: 2984863 - DNA, 25 bp, Homo sapien
cccaaaaactgagacatgaacggaa

SEQ ID NO: 2984864 - DNA, 25 bp, Homo sapien
aaatctacctctagaggtctcttca

SEQ ID NO: 2984865 - DNA, 25 bp, Homo sapien
ggtctcttcatactcccatttttga

SEQ ID NO: 2984866 - DNA, 25 bp, Homo sapien
catgaacggaaagcacctttatcca

SEQ ID NO: 2984867 - DNA, 25 bp, Homo sapien
caatgactttgacatcgcaagcgtg

SEQ ID NO: 2984868 - DNA, 25 bp, Homo sapien
taactccgttacaggccagaggacg

SEQ ID NO: 2984869 - DNA, 25 bp, Homo sapien
catgaacttggtgggagacgatccc

SEQ ID NO: 2984870 - DNA, 25 bp, Homo sapien
ttattttaaggacagcaacgcagag

SEQ ID NO: 2984871 - DNA, 25 bp, Homo sapien
ccccaagcagggaacactatgtgtt

SEQ ID NO: 2984872 - DNA, 25 bp, Homo sapien
gcttctaagaagtgcggtgtggcca

SEQ ID NO: 2984873 - DNA, 25 bp, Homo sapien
ccctagcccgtggaatggatttgtt

SEQ ID NO: 2984874 - DNA, 25 bp, Homo sapien
gaggctctagagttaccccttgtga

SEQ ID NO: 2984875 - DNA, 25 bp, Homo sapien
tagattcggaagctctctaagcagc

SEQ ID NO: 2984876 - DNA, 25 bp, Homo sapien
gactatttggcagctggtcaggtct

SEQ ID NO: 2984877 - DNA, 25 bp, Homo sapien
tgtaaaagaggactctcgggccggc

SEQ ID NO: 2984878 - DNA, 25 bp, Homo sapien
gctgttctggcattctcagtgttga

SEQ ID NO: 2984879 - DNA, 25 bp, Homo sapien
caaagcaagcagagcattgatgatc

SEQ ID NO: 2984880 - DNA, 25 bp, Homo sapien
ctcagagccatggatgtcaggtgcg

SEQ ID NO: 2984881 - DNA, 25 bp, Homo sapien
gatcgtcttcttaatggtacatcaa

SEQ ID NO: 2984882 - DNA, 25 bp, Homo sapien
acgtggtggcgctgctcagttgtat

SEQ ID NO: 2984883 - DNA, 25 bp, Homo sapien
gaagaggatggatcacccacgcagg

SEQ ID NO: 2984884 - DNA, 25 bp, Homo sapien
gatggatcacccacgcaggaaggtg

SEQ ID NO: 2984885 - DNA, 25 bp, Homo sapien
ggatcacccacgcaggaaggtggta

SEQ ID NO: 2984886 - DNA, 25 bp, Homo sapien
gaggatggatcacccacgcaggaag

SEQ ID NO: 2984887 - DNA, 25 bp, Homo sapien
tttgccgcttcatagactcacaggg

SEQ ID NO: 2984888 - DNA, 25 bp, Homo sapien
gcagatggtgcctctccaagcaaga

SEQ ID NO: 2984889 - DNA, 25 bp, Homo sapien
taacaagggtgttcctgacagacca

SEQ ID NO: 2984890 - DNA, 25 bp, Homo sapien
tatatgctattaacgtaggccctgg

SEQ ID NO: 2984891 - DNA, 25 bp, Homo sapien
gctaggcacaaatcatgacaaggtt

SEQ ID NO: 2984892 - DNA, 25 bp, Homo sapien
taagatttgggtttcgagccaggca

SEQ ID NO: 2984893 - DNA, 25 bp, Homo sapien
tagcgcttctgacacccaaaagagg

SEQ ID NO: 2984894 - DNA, 25 bp, Homo sapien
tagtccgaagactgaaggaaccttg

SEQ ID NO: 2984895 - DNA, 25 bp, Homo sapien
ctcaaagctttgcagttagagagca

SEQ ID NO: 2984896 - DNA, 25 bp, Homo sapien
tctttagactaacgcactgctggga

SEQ ID NO: 2984897 - DNA, 25 bp, Homo sapien
cagtgcctgagataaagtaactgac

SEQ ID NO: 2984898 - DNA, 25 bp, Homo sapien
gcacttcagaggtctaaaaggtaac

SEQ ID NO: 2984899 - DNA, 25 bp, Homo sapien
aggagagaagtttgactcaactcat

SEQ ID NO: 2984900 - DNA, 25 bp, Homo sapien
ccacttcattatgggaggagagaag

SEQ ID NO: 2984901 - DNA, 25 bp, Homo sapien
tgccagccacttcattatgggagga

SEQ ID NO: 2984902 - DNA, 25 bp, Homo sapien
ggaggagagaagtttgactcaactc

SEQ ID NO: 2984903 - DNA, 25 bp, Homo sapien
ggcttaagccatggcgcttcccacg

SEQ ID NO: 2984904 - DNA, 25 bp, Homo sapien
cagtgcctgcggcagcattggcctt

SEQ ID NO: 2984905 - DNA, 25 bp, Homo sapien
gcattgctgtaaccgacaaagacac

SEQ ID NO: 2984906 - DNA, 25 bp, Homo sapien
tggcgcttcccacggcattcagcag

SEQ ID NO: 2984907 - DNA, 25 bp, Homo sapien
ggtggacatcccgtctaattccgtg

SEQ ID NO: 2984908 - DNA, 25 bp, Homo sapien
ggacatcccgtctaattccgtgtac

SEQ ID NO: 2984909 - DNA, 25 bp, Homo sapien
tcccgtctaattccgtgtaccgcta

SEQ ID NO: 2984910 - DNA, 25 bp, Homo sapien
acatcccgtctaattccgtgtaccg

SEQ ID NO: 2984911 - DNA, 25 bp, Homo sapien
ccaccgcaaggatcgagcagtattt

SEQ ID NO: 2984912 - DNA, 25 bp, Homo sapien
gatggaagccaagatttatgtacaa

SEQ ID NO: 2984913 - DNA, 25 bp, Homo sapien
cagaacgttacttgcaccctaggaa

SEQ ID NO: 2984914 - DNA, 25 bp, Homo sapien
gcgatgtcgcaggtacagcttccag

SEQ ID NO: 2984915 - DNA, 25 bp, Homo sapien
cgcccgcccggcgaatgttgtggtt

SEQ ID NO: 2984916 - DNA, 25 bp, Homo sapien
ccaacgttcggggactgccgctgat

SEQ ID NO: 2984917 - DNA, 25 bp, Homo sapien
atgttgtggttcgactcccgcggcc

SEQ ID NO: 2984918 - DNA, 25 bp, Homo sapien
gggctcgcgctcaccgctgctgccg

SEQ ID NO: 2984919 - DNA, 25 bp, Homo sapien
gaactggttgatcatgacctggtgc

SEQ ID NO: 2984920 - DNA, 25 bp, Homo sapien
tcgaactgccagtgggccgcctgca

SEQ ID NO: 2984921 - DNA, 25 bp, Homo sapien
cagcacgaactggttgatcatgacc

SEQ ID NO: 2984922 - DNA, 25 bp, Homo sapien
tgcttcgcctggtcggccgcgcagc

SEQ ID NO: 2984923 - DNA, 25 bp, Homo sapien
ttcttggaagaacgtgctcagcgcg

SEQ ID NO: 2984924 - DNA, 25 bp, Homo sapien
cttggaagaacgtgctcagcgcggt

SEQ ID NO: 2984925 - DNA, 25 bp, Homo sapien
gtttcttggaagaacgtgctcagcg

SEQ ID NO: 2984926 - DNA, 25 bp, Homo sapien
tggtttcttggaagaacgtgctcag

SEQ ID NO: 2984927 - DNA, 25 bp, Homo sapien
ggcgctccccggcaacatggctgtc

SEQ ID NO: 2984928 - DNA, 25 bp, Homo sapien
ggcctcaaagttggaggcgccagcg

SEQ ID NO: 2984929 - DNA, 25 bp, Homo sapien
ctttgtttacattcgcggcgcggcg

SEQ ID NO: 2984930 - DNA, 25 bp, Homo sapien
ggaggcgggcctcaaagttggaggc

SEQ ID NO: 2984931 - DNA, 25 bp, Homo sapien
catcggggaagttgggcggcgtggc

SEQ ID NO: 2984932 - DNA, 25 bp, Homo sapien
agggcgggatccagggcgcctggtg

SEQ ID NO: 2984933 - DNA, 25 bp, Homo sapien
ctgggcgcccccctgctgtgctcct

SEQ ID NO: 2984934 - DNA, 25 bp, Homo sapien
ctctggccgtccatggccgccatgg

SEQ ID NO: 2984935 - DNA, 25 bp, Homo sapien
cacgtggcccaggaagtttactgtc

SEQ ID NO: 2984936 - DNA, 25 bp, Homo sapien
ctgaaaaactcctgaaggacccacg

SEQ ID NO: 2984937 - DNA, 25 bp, Homo sapien
ggcccattctcacgcacattagtta

SEQ ID NO: 2984938 - DNA, 25 bp, Homo sapien
aaaatcttccagtgcgatcttcggg

SEQ ID NO: 2984939 - DNA, 25 bp, Homo sapien
gagcctggcctttgaccaaagtcag

SEQ ID NO: 2984940 - DNA, 25 bp, Homo sapien
cagagcctggcctttgaccaaagtc

SEQ ID NO: 2984941 - DNA, 25 bp, Homo sapien
ggcagagcctggcctttgaccaaag

SEQ ID NO: 2984942 - DNA, 25 bp, Homo sapien
tgggcagagcctggcctttgaccaa

SEQ ID NO: 2984943 - DNA, 25 bp, Homo sapien
gctctccactttggacctggacacg

SEQ ID NO: 2984944 - DNA, 25 bp, Homo sapien
ccactttggacctggacacgcagcg

SEQ ID NO: 2984945 - DNA, 25 bp, Homo sapien
ctttggacctggacacgcagcggga

SEQ ID NO: 2984946 - DNA, 25 bp, Homo sapien
tctccactttggacctggacacgca

SEQ ID NO: 2984947 - DNA, 25 bp, Homo sapien
ccctggtgagatgggattctgattc

SEQ ID NO: 2984948 - DNA, 25 bp, Homo sapien
tgggattctgattcgggaactaaac

SEQ ID NO: 2984949 - DNA, 25 bp, Homo sapien
tttcgccctggtgagatgggattct

SEQ ID NO: 2984950 - DNA, 25 bp, Homo sapien
aattaaaatttcgccctggtgagat

SEQ ID NO: 2984951 - DNA, 25 bp, Homo sapien
taaataaacagtacctctcaggctg

SEQ ID NO: 2984952 - DNA, 25 bp, Homo sapien
ccttaaaggcctactgtgtcccaag

SEQ ID NO: 2984953 - DNA, 25 bp, Homo sapien
actcaacctcctgcccatggatgtg

SEQ ID NO: 2984954 - DNA, 25 bp, Homo sapien
caatatcctgtgtagatggtggtca

SEQ ID NO: 2984955 - DNA, 25 bp, Homo sapien
tagaaaatagcatcccacctctggg

SEQ ID NO: 2984956 - DNA, 25 bp, Homo sapien
cagaaattgttatgcctacagccat

SEQ ID NO: 2984957 - DNA, 25 bp, Homo sapien
catcttccaaggatgtcagattaga

SEQ ID NO: 2984958 - DNA, 25 bp, Homo sapien
tgcctacagccattgaaaaatgaag

SEQ ID NO: 2984959 - DNA, 25 bp, Homo sapien
atttagcagtgctggattgtatgcc

SEQ ID NO: 2984960 - DNA, 25 bp, Homo sapien
tcggtcagatttagcagtgctggat

SEQ ID NO: 2984961 - DNA, 25 bp, Homo sapien
tagcagtgctggattgtatgccaac

SEQ ID NO: 2984962 - DNA, 25 bp, Homo sapien
aaatcggtcagatttagcagtgctg

SEQ ID NO: 2984963 - DNA, 25 bp, Homo sapien
acatctcacatgtaagcgtgaacac

SEQ ID NO: 2984964 - DNA, 25 bp, Homo sapien
tcagccaggtgatgtactgatgttc

SEQ ID NO: 2984965 - DNA, 25 bp, Homo sapien
atgtaagcgtgaacacccaatgatc

SEQ ID NO: 2984966 - DNA, 25 bp, Homo sapien
gatgtactgatgttctaacaaggtt

SEQ ID NO: 2984967 - DNA, 25 bp, Homo sapien
tgcaagctgctagcatccatgctgg

SEQ ID NO: 2984968 - DNA, 25 bp, Homo sapien
gggttccagcatgatcctttagggc

SEQ ID NO: 2984969 - DNA, 25 bp, Homo sapien
gttggacttagctcatacctcagat

SEQ ID NO: 2984970 - DNA, 25 bp, Homo sapien
gaaagaaatgtatggtcctccctca

SEQ ID NO: 2984971 - DNA, 25 bp, Homo sapien
aaagtagttggttgtctgggcatga

SEQ ID NO: 2984972 - DNA, 25 bp, Homo sapien
caaaatgctagagcagtaagggctg

SEQ ID NO: 2984973 - DNA, 25 bp, Homo sapien
catgatggctcaagctgtactccca

SEQ ID NO: 2984974 - DNA, 25 bp, Homo sapien
ggctggacttaatataggatgtggt

SEQ ID NO: 2984975 - DNA, 25 bp, Homo sapien
cagttgggagcagggtaaattctcc

SEQ ID NO: 2984976 - DNA, 25 bp, Homo sapien
cagatgattaattgttacagttggg

SEQ ID NO: 2984977 - DNA, 25 bp, Homo sapien
gagcctggctagtttaatgaatgcg

SEQ ID NO: 2984978 - DNA, 25 bp, Homo sapien
gaatgcgtataccatgcctgtttcc

SEQ ID NO: 2984979 - DNA, 25 bp, Homo sapien
ttggcacactcggatcccacatctt

SEQ ID NO: 2984980 - DNA, 25 bp, Homo sapien
tgctttctaagtggactaactgcct

SEQ ID NO: 2984981 - DNA, 25 bp, Homo sapien
tctgcttggcacactcggatcccac

SEQ ID NO: 2984982 - DNA, 25 bp, Homo sapien
tgtctgctttctaagtggactaact

SEQ ID NO: 2984983 - DNA, 25 bp, Homo sapien
ccagaaagactgtggaacagacgca

SEQ ID NO: 2984984 - DNA, 25 bp, Homo sapien
cagaaagactgtggaacagacgcat

SEQ ID NO: 2984985 - DNA, 25 bp, Homo sapien
tgtggttgaggtcaccagaaagact

SEQ ID NO: 2984986 - DNA, 25 bp, Homo sapien
tcaccagaaagactgtggaacagac

SEQ ID NO: 2984987 - DNA, 25 bp, Homo sapien
tactgtcaatgtgagaggcacctct

SEQ ID NO: 2984988 - DNA, 25 bp, Homo sapien
tgtcaccacaagcagagtctctaaa

SEQ ID NO: 2984989 - DNA, 25 bp, Homo sapien
tgtggtccttcacgacatgctgagt

SEQ ID NO: 2984990 - DNA, 25 bp, Homo sapien
caagtactgattgcgggcctctgga

SEQ ID NO: 2984991 - DNA, 25 bp, Homo sapien
tagtggctaaattgagtaggtgctc

SEQ ID NO: 2984992 - DNA, 25 bp, Homo sapien
cattcggaggcatcatcatttgtat

SEQ ID NO: 2984993 - DNA, 25 bp, Homo sapien
tgccaaatattccatcattcggagg

SEQ ID NO: 2984994 - DNA, 25 bp, Homo sapien
aacgtgctatctttgggcattgagc

SEQ ID NO: 2984995 - DNA, 25 bp, Homo sapien
gtgtgtcaaaccacctcaggcagtt

SEQ ID NO: 2984996 - DNA, 25 bp, Homo sapien
cagacagtgggctgaacgtggccct

SEQ ID NO: 2984997 - DNA, 25 bp, Homo sapien
gaacctcatctgtgctacaggacag

SEQ ID NO: 2984998 - DNA, 25 bp, Homo sapien
ttgatctcctagcagccaagctgga

SEQ ID NO: 2984999 - DNA, 25 bp, Homo sapien
tattagtgtcctggtggcgtagaca

SEQ ID NO: 2985000 - DNA, 25 bp, Homo sapien
tcctggtggtttgccgacagccttt

SEQ ID NO: 2985001 - DNA, 25 bp, Homo sapien
tggtcatccgtgtcttgctgctgcg

SEQ ID NO: 2985002 - DNA, 25 bp, Homo sapien
tcttcagagccctctcaaggtggcg

SEQ ID NO: 2985003 - DNA, 25 bp, Homo sapien
gtggtgagctgagatcgtcccattg

SEQ ID NO: 2985004 - DNA, 25 bp, Homo sapien
actccagcctgggtgacagggcgaa

SEQ ID NO: 2985005 - DNA, 25 bp, Homo sapien
cctgggtgacagggcgaaactccat

SEQ ID NO: 2985006 - DNA, 25 bp, Homo sapien
tggtgagctgagatcgtcccattgc

SEQ ID NO: 2985007 - DNA, 25 bp, Homo sapien
cagaccccacgctgagaagccaagt

SEQ ID NO: 2985008 - DNA, 25 bp, Homo sapien
gaccccacgctgagaagccaagtcc

SEQ ID NO: 2985009 - DNA, 25 bp, Homo sapien
agaccccacgctgagaagccaagtc

SEQ ID NO: 2985010 - DNA, 25 bp, Homo sapien
accccacgctgagaagccaagtcca

SEQ ID NO: 2985011 - DNA, 25 bp, Homo sapien
ggttccaggccgcacaatgggtcct

SEQ ID NO: 2985012 - DNA, 25 bp, Homo sapien
ttccaggccgcacaatgggtcctct

SEQ ID NO: 2985013 - DNA, 25 bp, Homo sapien
ggccccggttccaggccgcacaatg

SEQ ID NO: 2985014 - DNA, 25 bp, Homo sapien
aggccgcacaatgggtcctctgtcc

SEQ ID NO: 2985015 - DNA, 25 bp, Homo sapien
actgcaaactgagttggcaagggga

SEQ ID NO: 2985016 - DNA, 25 bp, Homo sapien
taccaccagccttgagtccgcggag

SEQ ID NO: 2985017 - DNA, 25 bp, Homo sapien
gggccccagaaaggtcggatcctgc

SEQ ID NO: 2985018 - DNA, 25 bp, Homo sapien
gggcacgggctctttatccaacgcc

SEQ ID NO: 2985019 - DNA, 25 bp, Homo sapien
tgtcggaatgatgggtcctgcacct

SEQ ID NO: 2985020 - DNA, 25 bp, Homo sapien
tgcagccgcagtgccgcggtcatgc

SEQ ID NO: 2985021 - DNA, 25 bp, Homo sapien
cttgctccaggaatccggcgcgggc

SEQ ID NO: 2985022 - DNA, 25 bp, Homo sapien
cgttccgggaaggtgactcagcgac

SEQ ID NO: 2985023 - DNA, 25 bp, Homo sapien
acgcagccaattagccgggcggcgc

SEQ ID NO: 2985024 - DNA, 25 bp, Homo sapien
tcttaaagtcgagaagaggcaggtc

SEQ ID NO: 2985025 - DNA, 25 bp, Homo sapien
ctccgcggtgtcttctcttccggag

SEQ ID NO: 2985026 - DNA, 25 bp, Homo sapien
aggtccaggaggagcacgcagccaa

SEQ ID NO: 2985027 - DNA, 25 bp, Homo sapien
ctagcgcgctgtcccgggtagagca

SEQ ID NO: 2985028 - DNA, 25 bp, Homo sapien
tatttttaacttcccgacgctgcag

SEQ ID NO: 2985029 - DNA, 25 bp, Homo sapien
ctgcagctgggctaccgagcctgag

SEQ ID NO: 2985030 - DNA, 25 bp, Homo sapien
tccgcgcgaactcgtgtcggagcga

SEQ ID NO: 2985031 - DNA, 25 bp, Homo sapien
tggagcgccccgctggagcggactc

SEQ ID NO: 2985032 - DNA, 25 bp, Homo sapien
ttttcgctcaacttcgcagccggcg

SEQ ID NO: 2985033 - DNA, 25 bp, Homo sapien
ggaacgcagctcgtcccaagctcag

SEQ ID NO: 2985034 - DNA, 25 bp, Homo sapien
gggagggcactgagcctcggcgccg

SEQ ID NO: 2985035 - DNA, 25 bp, Homo sapien
gggtcgcgccaaagccaagcccgaa

SEQ ID NO: 2985036 - DNA, 25 bp, Homo sapien
tgctctcgcccaagcgacaagtggc

SEQ ID NO: 2985037 - DNA, 25 bp, Homo sapien
tgcccggagctccagagcggtggga

SEQ ID NO: 2985038 - DNA, 25 bp, Homo sapien
cacgagcggcgcgaaggcagggtgg

SEQ ID NO: 2985039 - DNA, 25 bp, Homo sapien
aaaatcccagaacttgagcggacat

SEQ ID NO: 2985040 - DNA, 25 bp, Homo sapien
tccagctgcgtaaaaatcccagaac

SEQ ID NO: 2985041 - DNA, 25 bp, Homo sapien
gcgtaaaaatcccagaacttgagcg

SEQ ID NO: 2985042 - DNA, 25 bp, Homo sapien
gggagtccagctgcgtaaaaatccc

SEQ ID NO: 2985043 - DNA, 25 bp, Homo sapien
ctgagggagagaagacagcgctggc

SEQ ID NO: 2985044 - DNA, 25 bp, Homo sapien
cccgccgtgtgactaagcctacaat

SEQ ID NO: 2985045 - DNA, 25 bp, Homo sapien
cggttccggcccgacggatgagtca

SEQ ID NO: 2985046 - DNA, 25 bp, Homo sapien
tacaatccctgagaagggcgcctgc

SEQ ID NO: 2985047 - DNA, 25 bp, Homo sapien
tgccttcagctccttatcggtgctg

SEQ ID NO: 2985048 - DNA, 25 bp, Homo sapien
aggcgggcgtcgcagggccggctgt

SEQ ID NO: 2985049 - DNA, 25 bp, Homo sapien
ggagcaccggcgtcattccctgcgg

SEQ ID NO: 2985050 - DNA, 25 bp, Homo sapien
tcagctccttatcggtgctgcccag

SEQ ID NO: 2985051 - DNA, 25 bp, Homo sapien
ggcgttccatcattcctggcgagga

SEQ ID NO: 2985052 - DNA, 25 bp, Homo sapien
ggataatgtttctcccgatcgtcca

SEQ ID NO: 2985053 - DNA, 25 bp, Homo sapien
ggcttctggcctcgtgagggataat

SEQ ID NO: 2985054 - DNA, 25 bp, Homo sapien
cctttcgtccagctgggcgttccat

SEQ ID NO: 2985055 - DNA, 25 bp, Homo sapien
caaaaccaaagaggccacgtccgca

SEQ ID NO: 2985056 - DNA, 25 bp, Homo sapien
accaaagaggccacgtccgcaaccg

SEQ ID NO: 2985057 - DNA, 25 bp, Homo sapien
aagaggccacgtccgcaaccgacca

SEQ ID NO: 2985058 - DNA, 25 bp, Homo sapien
caaagaggccacgtccgcaaccgac

SEQ ID NO: 2985059 - DNA, 25 bp, Homo sapien
agccaaaaggggctgcacgtgactc

SEQ ID NO: 2985060 - DNA, 25 bp, Homo sapien
catcagcgtgaaggagatttcagcc

SEQ ID NO: 2985061 - DNA, 25 bp, Homo sapien
agcgtgaaggagatttcagcctcag

SEQ ID NO: 2985062 - DNA, 25 bp, Homo sapien
cagtgagcatcagcgtgaaggagat

SEQ ID NO: 2985063 - DNA, 25 bp, Homo sapien
tccagacatgaccaccagagcgtcc

SEQ ID NO: 2985064 - DNA, 25 bp, Homo sapien
agacatgaccaccagagcgtcccag

SEQ ID NO: 2985065 - DNA, 25 bp, Homo sapien
tcgtgcatcagcccgtctccagaca

SEQ ID NO: 2985066 - DNA, 25 bp, Homo sapien
tccgaccgcaccagctcccgcgcgt

SEQ ID NO: 2985067 - DNA, 25 bp, Homo sapien
aggaagctgccagcgcgttgccaga

SEQ ID NO: 2985068 - DNA, 25 bp, Homo sapien
tctggatggcggtctcccagtcagg

SEQ ID NO: 2985069 - DNA, 25 bp, Homo sapien
aggccgctccatgagcccgttcacc

SEQ ID NO: 2985070 - DNA, 25 bp, Homo sapien
gttcaaggaagctgccagcgcgttg

SEQ ID NO: 2985071 - DNA, 25 bp, Homo sapien
gtagaacagatgcatgacgccagct

SEQ ID NO: 2985072 - DNA, 25 bp, Homo sapien
gaagtagtttgggtgcacctggccc

SEQ ID NO: 2985073 - DNA, 25 bp, Homo sapien
tggaacccactcttcctacagggag

SEQ ID NO: 2985074 - DNA, 25 bp, Homo sapien
gaccacgggcacatataccaagtag

SEQ ID NO: 2985075 - DNA, 25 bp, Homo sapien
taagggctcttctggcggtggcatc

SEQ ID NO: 2985076 - DNA, 25 bp, Homo sapien
tgggcgggggctccacgcaaccgct

SEQ ID NO: 2985077 - DNA, 25 bp, Homo sapien
tcataagggctcttctggcggtggc

SEQ ID NO: 2985078 - DNA, 25 bp, Homo sapien
gcgggggctccacgcaaccgctgac

SEQ ID NO: 2985079 - DNA, 25 bp, Homo sapien
caagtagacactaaggcacagcgcg

SEQ ID NO: 2985080 - DNA, 25 bp, Homo sapien
gaaggccttacataggcagctgggc

SEQ ID NO: 2985081 - DNA, 25 bp, Homo sapien
gaggaagggtcctgcaagtagacac

SEQ ID NO: 2985082 - DNA, 25 bp, Homo sapien
gggtctcagaacaaactagaaggcc

SEQ ID NO: 2985083 - DNA, 25 bp, Homo sapien
gagccagccctctcttggactagaa

SEQ ID NO: 2985084 - DNA, 25 bp, Homo sapien
taggtgccttgctcttctgtcggag

SEQ ID NO: 2985085 - DNA, 25 bp, Homo sapien
gactagaaggcctactgtcagccct

SEQ ID NO: 2985086 - DNA, 25 bp, Homo sapien
gggaaagcaacagctataggtgcct

SEQ ID NO: 2985087 - DNA, 25 bp, Homo sapien
gacgagcaccccaagatagaggagc

SEQ ID NO: 2985088 - DNA, 25 bp, Homo sapien
cctgagaagccaactcgggagaaga

SEQ ID NO: 2985089 - DNA, 25 bp, Homo sapien
ggagagcctcaagaacatgactgtg

SEQ ID NO: 2985090 - DNA, 25 bp, Homo sapien
cttccgggagttgaaagaggccatc

SEQ ID NO: 2985091 - DNA, 25 bp, Homo sapien
tcacgacctggtgtcgggccgttac

SEQ ID NO: 2985092 - DNA, 25 bp, Homo sapien
gttaccgtggctccgtgcacttcgg

SEQ ID NO: 2985093 - DNA, 25 bp, Homo sapien
tgcacttcgggctggtgcgcctcat

SEQ ID NO: 2985094 - DNA, 25 bp, Homo sapien
ctcatccacggcgaggactcggact

SEQ ID NO: 2985095 - DNA, 25 bp, Homo sapien
tgtggagaggatacccagtgttccc

SEQ ID NO: 2985096 - DNA, 25 bp, Homo sapien
gctgtagtagcagatgttccccggg

SEQ ID NO: 2985097 - DNA, 25 bp, Homo sapien
acttggtgctggcattccctcggga

SEQ ID NO: 2985098 - DNA, 25 bp, Homo sapien
gactccgggctgcaaggctgtagta

SEQ ID NO: 2985099 - DNA, 25 bp, Homo sapien
tgcagttcttagaggaggccatccc

SEQ ID NO: 2985100 - DNA, 25 bp, Homo sapien
tcaaagtgggcccttagggagcctc

SEQ ID NO: 2985101 - DNA, 25 bp, Homo sapien
ttttaggtagcctcagcccttggtc

SEQ ID NO: 2985102 - DNA, 25 bp, Homo sapien
gcaaggagagtgcataggacacccc

SEQ ID NO: 2985103 - DNA, 25 bp, Homo sapien
gggacaggggtctcatcctcatctc

SEQ ID NO: 2985104 - DNA, 25 bp, Homo sapien
caagggacaggggtctcatcctcat

SEQ ID NO: 2985105 - DNA, 25 bp, Homo sapien
ctgttggagaacagcaagggacagg

SEQ ID NO: 2985106 - DNA, 25 bp, Homo sapien
tgttggagaacagcaagggacaggg

SEQ ID NO: 2985107 - DNA, 25 bp, Homo sapien
tcctaagccaaggagggcctcccag

SEQ ID NO: 2985108 - DNA, 25 bp, Homo sapien
ctttggaagtgtcctcctaagccaa

SEQ ID NO: 2985109 - DNA, 25 bp, Homo sapien
ggaagtgtcctcctaagccaaggag

SEQ ID NO: 2985110 - DNA, 25 bp, Homo sapien
gtgtcctcctaagccaaggagggcc

SEQ ID NO: 2985111 - DNA, 25 bp, Homo sapien
ctggccactggtgcctccttggggc

SEQ ID NO: 2985112 - DNA, 25 bp, Homo sapien
cactggtgcctccttggggcgcccc

SEQ ID NO: 2985113 - DNA, 25 bp, Homo sapien
tctggccactggtgcctccttgggg

SEQ ID NO: 2985114 - DNA, 25 bp, Homo sapien
gccactggtgcctccttggggcgcc

SEQ ID NO: 2985115 - DNA, 25 bp, Homo sapien
tggcagacgtggggcctcaggtttc

SEQ ID NO: 2985116 - DNA, 25 bp, Homo sapien
cttcacgctcgatctcaaaggcgct

SEQ ID NO: 2985117 - DNA, 25 bp, Homo sapien
aggcagcgaaactcactggcaggga

SEQ ID NO: 2985118 - DNA, 25 bp, Homo sapien
tctcaaaggcgctgacagcgtcctc

SEQ ID NO: 2985119 - DNA, 25 bp, Homo sapien
tcctccggggtgaggcagcgaaact

SEQ ID NO: 2985120 - DNA, 25 bp, Homo sapien
tgcaccccgagtgtccactcagatg

SEQ ID NO: 2985121 - DNA, 25 bp, Homo sapien
ctgcaccccgagtgtccactcagat

SEQ ID NO: 2985122 - DNA, 25 bp, Homo sapien
gcaccccgagtgtccactcagatgc

SEQ ID NO: 2985123 - DNA, 25 bp, Homo sapien
gtagtcgctgtgcctcgcgtccact

SEQ ID NO: 2985124 - DNA, 25 bp, Homo sapien
agtcgctgtgcctcgcgtccactgt

SEQ ID NO: 2985125 - DNA, 25 bp, Homo sapien
ggctcaggtgggtgactggtagtcg

SEQ ID NO: 2985126 - DNA, 25 bp, Homo sapien
ggtgggtgactggtagtcgctgtgc

SEQ ID NO: 2985127 - DNA, 25 bp, Homo sapien
cagggacagctctggacatagggtc

SEQ ID NO: 2985128 - DNA, 25 bp, Homo sapien
ttgtcccagagcgagccgatgatga

SEQ ID NO: 2985129 - DNA, 25 bp, Homo sapien
cagacgcccaagacggagatgaagg

SEQ ID NO: 2985130 - DNA, 25 bp, Homo sapien
acatagggtcaggaagtgccggatc

SEQ ID NO: 2985131 - DNA, 25 bp, Homo sapien
tctcatagaagggtaccagcgcgtc

SEQ ID NO: 2985132 - DNA, 25 bp, Homo sapien
agcagccgctgttcctgcgcaggaa

SEQ ID NO: 2985133 - DNA, 25 bp, Homo sapien
cggcgtggaagctgaacctctcata

SEQ ID NO: 2985134 - DNA, 25 bp, Homo sapien
cccagacctgtgcagcgtcagtgac

SEQ ID NO: 2985135 - DNA, 25 bp, Homo sapien
agctcaggccgtgagaagccacctt

SEQ ID NO: 2985136 - DNA, 25 bp, Homo sapien
gcctcgtggggacagacaagacaca

SEQ ID NO: 2985137 - DNA, 25 bp, Homo sapien
ccagcccggtctcaggtacagagtt

SEQ ID NO: 2985138 - DNA, 25 bp, Homo sapien
atgctcagctgagctaagaggagcc

SEQ ID NO: 2985139 - DNA, 25 bp, Homo sapien
cttgattaccatgggcagagggccc

SEQ ID NO: 2985140 - DNA, 25 bp, Homo sapien
gccagtgaggcaccgggtatgacca

SEQ ID NO: 2985141 - DNA, 25 bp, Homo sapien
ccaccgagcaatgggctactgtgag

SEQ ID NO: 2985142 - DNA, 25 bp, Homo sapien
gtatgaccacttgattaccatgggc

SEQ ID NO: 2985143 - DNA, 25 bp, Homo sapien
cagctccgagggccgagggctttcc

SEQ ID NO: 2985144 - DNA, 25 bp, Homo sapien
gtcggcgggaccacatgcctgggtc

SEQ ID NO: 2985145 - DNA, 25 bp, Homo sapien
tcgaccgctagctccacctgccttg

SEQ ID NO: 2985146 - DNA, 25 bp, Homo sapien
gggcctcagtccagaaacctcgacc

SEQ ID NO: 2985147 - DNA, 25 bp, Homo sapien
cgccgcgttcgtgcaccgagggcat

SEQ ID NO: 2985148 - DNA, 25 bp, Homo sapien
cctcgccgcgaaagctcgggagtgt

SEQ ID NO: 2985149 - DNA, 25 bp, Homo sapien
tgtccgtgtcattcataagccacgg

SEQ ID NO: 2985150 - DNA, 25 bp, Homo sapien
ggaggtgcgctcaagttccgacagc

SEQ ID NO: 2985151 - DNA, 25 bp, Homo sapien
cagctgccccatcccctcccaggcc

SEQ ID NO: 2985152 - DNA, 25 bp, Homo sapien
gcgcagctgccccatcccctcccag

SEQ ID NO: 2985153 - DNA, 25 bp, Homo sapien
ctgccccatcccctcccaggccaag

SEQ ID NO: 2985154 - DNA, 25 bp, Homo sapien
ggcgcagctgccccatcccctccca

SEQ ID NO: 2985155 - DNA, 25 bp, Homo sapien
aatcggcggcgccagagcatggcca

SEQ ID NO: 2985156 - DNA, 25 bp, Homo sapien
ctcggttggcaaatcggcggcgcca

SEQ ID NO: 2985157 - DNA, 25 bp, Homo sapien
ggactcggttggcaaatcggcggcg

SEQ ID NO: 2985158 - DNA, 25 bp, Homo sapien
aaatcggcggcgccagagcatggcc

SEQ ID NO: 2985159 - DNA, 25 bp, Homo sapien
tagctgccccatccacgtcgctggg

SEQ ID NO: 2985160 - DNA, 25 bp, Homo sapien
tgaggactgagggtccgcatccaag

SEQ ID NO: 2985161 - DNA, 25 bp, Homo sapien
tgcctgaggactgagggtccgcatc

SEQ ID NO: 2985162 - DNA, 25 bp, Homo sapien
actgagggtccgcatccaagctgct

SEQ ID NO: 2985163 - DNA, 25 bp, Homo sapien
ggcttacttcagaggttctttctcc

SEQ ID NO: 2985164 - DNA, 25 bp, Homo sapien
cagaggtgagggcttacttcagagg

SEQ ID NO: 2985165 - DNA, 25 bp, Homo sapien
ggtgagggcttacttcagaggttct

SEQ ID NO: 2985166 - DNA, 25 bp, Homo sapien
gagggcttacttcagaggttctttc

SEQ ID NO: 2985167 - DNA, 25 bp, Homo sapien
gctaggggacgaaccaggacctgag

SEQ ID NO: 2985168 - DNA, 25 bp, Homo sapien
cccattctccctcttgccgctgctg

SEQ ID NO: 2985169 - DNA, 25 bp, Homo sapien
ctcccacagcatcctcctgggctag

SEQ ID NO: 2985170 - DNA, 25 bp, Homo sapien
cttctctagtgctgcttccccccat

SEQ ID NO: 2985171 - DNA, 25 bp, Homo sapien
ggctgccccagaattagcctggtgg

SEQ ID NO: 2985172 - DNA, 25 bp, Homo sapien
agactggcaggtcccgggctgagag

SEQ ID NO: 2985173 - DNA, 25 bp, Homo sapien
cagcaagtccctcatcctaggcttt

SEQ ID NO: 2985174 - DNA, 25 bp, Homo sapien
tccgagagcagcgagcacgtctgct

SEQ ID NO: 2985175 - DNA, 25 bp, Homo sapien
agaaaacacattcggaggacaagct

SEQ ID NO: 2985176 - DNA, 25 bp, Homo sapien
ggcagacatgtcacagatccaactg

SEQ ID NO: 2985177 - DNA, 25 bp, Homo sapien
gaggacaagctgtccgttgctccca

SEQ ID NO: 2985178 - DNA, 25 bp, Homo sapien
ttattgataatttcagcagagcagc

SEQ ID NO: 2985179 - DNA, 25 bp, Homo sapien
gtttggaacacacgcgcttgcacac

SEQ ID NO: 2985180 - DNA, 25 bp, Homo sapien
gctcaggatcatgcaggattgaaaa

SEQ ID NO: 2985181 - DNA, 25 bp, Homo sapien
gggactgagcatcagcaaattgata

SEQ ID NO: 2985182 - DNA, 25 bp, Homo sapien
taatagctgtgagacatcaggagca

SEQ ID NO: 2985183 - DNA, 25 bp, Homo sapien
agagtggcggctgaagtgctgctgt

SEQ ID NO: 2985184 - DNA, 25 bp, Homo sapien
caggcagagacatcgccgctgggct

SEQ ID NO: 2985185 - DNA, 25 bp, Homo sapien
ggaagtcaagggcacgggccagcca

SEQ ID NO: 2985186 - DNA, 25 bp, Homo sapien
tcagaggcagagtggcggctgaagt

SEQ ID NO: 2985187 - DNA, 25 bp, Homo sapien
cctcctgcgcaggttctcggaacag

SEQ ID NO: 2985188 - DNA, 25 bp, Homo sapien
gacaattcctcagaccagtggaagg

SEQ ID NO: 2985189 - DNA, 25 bp, Homo sapien
aaatgtgcagactgcgcagagagcc

SEQ ID NO: 2985190 - DNA, 25 bp, Homo sapien
gagagaggtaactttctgcagcagg

SEQ ID NO: 2985191 - DNA, 25 bp, Homo sapien
ttgttatttcacagtagccagcacc

SEQ ID NO: 2985192 - DNA, 25 bp, Homo sapien
ctggtggaacaaggttcaaacccag

SEQ ID NO: 2985193 - DNA, 25 bp, Homo sapien
ctcttggactcttgttatttcacag

SEQ ID NO: 2985194 - DNA, 25 bp, Homo sapien
aggttcaaacccaggagctctgact

SEQ ID NO: 2985195 - DNA, 25 bp, Homo sapien
tagccgtcctgaatctaccactgtt

SEQ ID NO: 2985196 - DNA, 25 bp, Homo sapien
tgccagctcacatatatgggacact

SEQ ID NO: 2985197 - DNA, 25 bp, Homo sapien
gttcaaaccggattgtgccagctca

SEQ ID NO: 2985198 - DNA, 25 bp, Homo sapien
aggatgtgaggaactctagccgtcc

SEQ ID NO: 2985199 - DNA, 25 bp, Homo sapien
ggagctgaggttcattccggaagca

SEQ ID NO: 2985200 - DNA, 25 bp, Homo sapien
gcctcccgtcttgtcaaggagctga

SEQ ID NO: 2985201 - DNA, 25 bp, Homo sapien
caggtcgaggtcaccactggaggtt

SEQ ID NO: 2985202 - DNA, 25 bp, Homo sapien
gatctgttgcagaactaccggtcgc

SEQ ID NO: 2985203 - DNA, 25 bp, Homo sapien
cacacttggaatgggtgggtactcc

SEQ ID NO: 2985204 - DNA, 25 bp, Homo sapien
taagcgcccaatgcatgttagtggt

SEQ ID NO: 2985205 - DNA, 25 bp, Homo sapien
gatattagcattcacacggaggaag

SEQ ID NO: 2985206 - DNA, 25 bp, Homo sapien
cagattggtggcaatgaccctggcc

SEQ ID NO: 2985207 - DNA, 25 bp, Homo sapien
cattacagttgctttcgattgggaa

SEQ ID NO: 2985208 - DNA, 25 bp, Homo sapien
ggagatcattagtcctctgcgtcct

SEQ ID NO: 2985209 - DNA, 25 bp, Homo sapien
cctgttgtcaagtgtctgctgctta

SEQ ID NO: 2985210 - DNA, 25 bp, Homo sapien
cagagaactaaaggtcacagggaca

SEQ ID NO: 2985211 - DNA, 25 bp, Homo sapien
ccagccgtgtatgacagggtgacat

SEQ ID NO: 2985212 - DNA, 25 bp, Homo sapien
tatggtcggccttcagctgtaacca

SEQ ID NO: 2985213 - DNA, 25 bp, Homo sapien
taaccactctggtaggcatgtagtg

SEQ ID NO: 2985214 - DNA, 25 bp, Homo sapien
gcccagccgcatgtcgaacaacttt

SEQ ID NO: 2985215 - DNA, 25 bp, Homo sapien
tcttaggaccgtgaaacagtgtcac

SEQ ID NO: 2985216 - DNA, 25 bp, Homo sapien
tgagacgctgcaacaattcccgagc

SEQ ID NO: 2985217 - DNA, 25 bp, Homo sapien
gaaagctgggatcatgcagatgacc

SEQ ID NO: 2985218 - DNA, 25 bp, Homo sapien
taacacagaccctacgcattgagaa

SEQ ID NO: 2985219 - DNA, 25 bp, Homo sapien
tgtgcaagcctccttccggaaatca

SEQ ID NO: 2985220 - DNA, 25 bp, Homo sapien
tgtggcaggtactctggaagcacct

SEQ ID NO: 2985221 - DNA, 25 bp, Homo sapien
gaaaatgagctcatgtgtgcaagcc

SEQ ID NO: 2985222 - DNA, 25 bp, Homo sapien
gaactcataagtgaaggcactgcga

SEQ ID NO: 2985223 - DNA, 25 bp, Homo sapien
gcaagagtctgcttcagcgggacaa

SEQ ID NO: 2985224 - DNA, 25 bp, Homo sapien
tggcagcagcgatatcacaggaagc

SEQ ID NO: 2985225 - DNA, 25 bp, Homo sapien
ttacatttggaacggtggcagcagc

SEQ ID NO: 2985226 - DNA, 25 bp, Homo sapien
ggtaggtagtatcccagacagccaa

SEQ ID NO: 2985227 - DNA, 25 bp, Homo sapien
tcaacaccgactggagtggccatgt

SEQ ID NO: 2985228 - DNA, 25 bp, Homo sapien
aacaccgactggagtggccatgtct

SEQ ID NO: 2985229 - DNA, 25 bp, Homo sapien
caacaccgactggagtggccatgtc

SEQ ID NO: 2985230 - DNA, 25 bp, Homo sapien
gctcaacaccgactggagtggccat

SEQ ID NO: 2985231 - DNA, 25 bp, Homo sapien
tcaagacactccaagcggaatcacg

SEQ ID NO: 2985232 - DNA, 25 bp, Homo sapien
gatgccaaacaaagaaaggcctctg

SEQ ID NO: 2985233 - DNA, 25 bp, Homo sapien
tgttagtgtcgtgtcaaggaagacc

SEQ ID NO: 2985234 - DNA, 25 bp, Homo sapien
tatcgtcaccacttcgtctctgagg

SEQ ID NO: 2985235 - DNA, 25 bp, Homo sapien
gatccacgctggttacaatgacacc

SEQ ID NO: 2985236 - DNA, 25 bp, Homo sapien
gattcctaaatcctagcgatccaaa

SEQ ID NO: 2985237 - DNA, 25 bp, Homo sapien
tcacacgggcaaagacgctactcat

SEQ ID NO: 2985238 - DNA, 25 bp, Homo sapien
ttcatccctgcatgccctaacgagg

SEQ ID NO: 2985239 - DNA, 25 bp, Homo sapien
agacctcctcacaaaagataccatt

SEQ ID NO: 2985240 - DNA, 25 bp, Homo sapien
tcagcaagtcagacctcctcacaaa

SEQ ID NO: 2985241 - DNA, 25 bp, Homo sapien
acagggataactttaaatcatcctc

SEQ ID NO: 2985242 - DNA, 25 bp, Homo sapien
gctgagcctcagcaagtcagacctc

SEQ ID NO: 2985243 - DNA, 25 bp, Homo sapien
ggcttcattctaacagaaaccacct

SEQ ID NO: 2985244 - DNA, 25 bp, Homo sapien
acaggcttcattctaacagaaacca

SEQ ID NO: 2985245 - DNA, 25 bp, Homo sapien
ttattctccagatttgtattaaaca

SEQ ID NO: 2985246 - DNA, 25 bp, Homo sapien
cattctaacagaaaccaccttaagg

SEQ ID NO: 2985247 - DNA, 25 bp, Homo sapien
catgaagatccttacacttaacacc

SEQ ID NO: 2985248 - DNA, 25 bp, Homo sapien
cttacacttaacaccttaaggtgat

SEQ ID NO: 2985249 - DNA, 25 bp, Homo sapien
agatccttacacttaacaccttaag

SEQ ID NO: 2985250 - DNA, 25 bp, Homo sapien
cacttaacaccttaaggtgatgagt

SEQ ID NO: 2985251 - DNA, 25 bp, Homo sapien
gatcaattattcctcatgcaggctg

SEQ ID NO: 2985252 - DNA, 25 bp, Homo sapien
ggactggccacatgattcctggact

SEQ ID NO: 2985253 - DNA, 25 bp, Homo sapien
tagcctaacgtgtggtatacaggag

SEQ ID NO: 2985254 - DNA, 25 bp, Homo sapien
tctgggcaatcgtaaccctggaaga

SEQ ID NO: 2985255 - DNA, 25 bp, Homo sapien
taacttgaaatcatcatggactcag

SEQ ID NO: 2985256 - DNA, 25 bp, Homo sapien
acagggataacttgaaatcatcatg

SEQ ID NO: 2985257 - DNA, 25 bp, Homo sapien
acttgaaatcatcatggactcagct

SEQ ID NO: 2985258 - DNA, 25 bp, Homo sapien
gggataacttgaaatcatcatggac

SEQ ID NO: 2985259 - DNA, 25 bp, Homo sapien
acatggcactttgggtccgggtcca

SEQ ID NO: 2985260 - DNA, 25 bp, Homo sapien
ggtccaggtcctggttcagagcagc

SEQ ID NO: 2985261 - DNA, 25 bp, Homo sapien
tagaggatccttttccggctttgga

SEQ ID NO: 2985262 - DNA, 25 bp, Homo sapien
agcagctgccacaccgtggctacta

SEQ ID NO: 2985263 - DNA, 25 bp, Homo sapien
caaaatgctactaaagtctccctgc

SEQ ID NO: 2985264 - DNA, 25 bp, Homo sapien
caaaccaagcctgtttaccagttcg

SEQ ID NO: 2985265 - DNA, 25 bp, Homo sapien
tgcagacacctagcaacaaaatgct

SEQ ID NO: 2985266 - DNA, 25 bp, Homo sapien
tgtttccggcaaagcagttcagttt

SEQ ID NO: 2985267 - DNA, 25 bp, Homo sapien
gataactaaccatcataggcttgtg

SEQ ID NO: 2985268 - DNA, 25 bp, Homo sapien
tcagacagggataactaaccatcat

SEQ ID NO: 2985269 - DNA, 25 bp, Homo sapien
acagggataactaaccatcataggc

SEQ ID NO: 2985270 - DNA, 25 bp, Homo sapien
tttcagacagggataactaaccatc

SEQ ID NO: 2985271 - DNA, 25 bp, Homo sapien
gagcagaggcaaggtcagagtcatt

SEQ ID NO: 2985272 - DNA, 25 bp, Homo sapien
gctacaaacttaggagacctccctg

SEQ ID NO: 2985273 - DNA, 25 bp, Homo sapien
aggaatgatgctctagactgggctc

SEQ ID NO: 2985274 - DNA, 25 bp, Homo sapien
caaatcctgggtacttgtgcattcc

SEQ ID NO: 2985275 - DNA, 25 bp, Homo sapien
ccttgcagtcccatcgatttgtgag

SEQ ID NO: 2985276 - DNA, 25 bp, Homo sapien
cgcatggcgattactttagaggaac

SEQ ID NO: 2985277 - DNA, 25 bp, Homo sapien
gattgccttggtgagtcaacactgg

SEQ ID NO: 2985278 - DNA, 25 bp, Homo sapien
cccatctggcatcgctgggagctaa

SEQ ID NO: 2985279 - DNA, 25 bp, Homo sapien
cagcctggcgacagagtggaactcc

SEQ ID NO: 2985280 - DNA, 25 bp, Homo sapien
agcctggcgacagagtggaactccg

SEQ ID NO: 2985281 - DNA, 25 bp, Homo sapien
ccagcctggcgacagagtggaactc

SEQ ID NO: 2985282 - DNA, 25 bp, Homo sapien
tactaaagaaggtacgcgcctgtag

SEQ ID NO: 2985283 - DNA, 25 bp, Homo sapien
cgagaccagccagggtaacaaattg

SEQ ID NO: 2985284 - DNA, 25 bp, Homo sapien
ccagaggatcgcttaagtccgggag

SEQ ID NO: 2985285 - DNA, 25 bp, Homo sapien
gcttggagccagaggatcgcttaag

SEQ ID NO: 2985286 - DNA, 25 bp, Homo sapien
aaacctgagactggtagtgggcttg

SEQ ID NO: 2985287 - DNA, 25 bp, Homo sapien
atgactacacggctttgcacagtct

SEQ ID NO: 2985288 - DNA, 25 bp, Homo sapien
ctacacggctttgcacagtctgaga

SEQ ID NO: 2985289 - DNA, 25 bp, Homo sapien
gactacacggctttgcacagtctga

SEQ ID NO: 2985290 - DNA, 25 bp, Homo sapien
tacacggctttgcacagtctgagat

SEQ ID NO: 2985291 - DNA, 25 bp, Homo sapien
caggtaataaaccttcatcctcata

SEQ ID NO: 2985292 - DNA, 25 bp, Homo sapien
gtaataaaccttcatcctcatatca

SEQ ID NO: 2985293 - DNA, 25 bp, Homo sapien
ggtaataaaccttcatcctcatatc

SEQ ID NO: 2985294 - DNA, 25 bp, Homo sapien
atcaccaccttgtcaccaacaggat

SEQ ID NO: 2985295 - DNA, 25 bp, Homo sapien
tgatcctctcaagtggccaaaagct

SEQ ID NO: 2985296 - DNA, 25 bp, Homo sapien
tatgcaaaccacgatctgtccctgg

SEQ ID NO: 2985297 - DNA, 25 bp, Homo sapien
gcttcttcaagagttgcggccctga

SEQ ID NO: 2985298 - DNA, 25 bp, Homo sapien
tggattcatcacaagcaactactgg

SEQ ID NO: 2985299 - DNA, 25 bp, Homo sapien
gagacctatatatgcctagtaccgg

SEQ ID NO: 2985300 - DNA, 25 bp, Homo sapien
gatatcccttacctcggagctggga

SEQ ID NO: 2985301 - DNA, 25 bp, Homo sapien
cttggaccgaataaagaactgactg

SEQ ID NO: 2985302 - DNA, 25 bp, Homo sapien
tgtgaccaggtaagaggccttctct

SEQ ID NO: 2985303 - DNA, 25 bp, Homo sapien
tgaagcccctctaattagtcccgtg

SEQ ID NO: 2985304 - DNA, 25 bp, Homo sapien
caagtgccatcagtgggtagaggcc

SEQ ID NO: 2985305 - DNA, 25 bp, Homo sapien
cagccaacacaaggtgccggaagga

SEQ ID NO: 2985306 - DNA, 25 bp, Homo sapien
gatgtgcatatggtcctcgtctggg

SEQ ID NO: 2985307 - DNA, 25 bp, Homo sapien
tgacatcaagatggcgtctcacggg

SEQ ID NO: 2985308 - DNA, 25 bp, Homo sapien
ccatgaaacgggagagcagactcga

SEQ ID NO: 2985309 - DNA, 25 bp, Homo sapien
tcctgagaggcggaaacaatgggcc

SEQ ID NO: 2985310 - DNA, 25 bp, Homo sapien
gggaaattctccagtcggctcaggg

SEQ ID NO: 2985311 - DNA, 25 bp, Homo sapien
ggctccccaggtgtaagcagcagct

SEQ ID NO: 2985312 - DNA, 25 bp, Homo sapien
tgttcaggactgtatcagccaacgt

SEQ ID NO: 2985313 - DNA, 25 bp, Homo sapien
gacaccagatttgcaggcagagtcc

SEQ ID NO: 2985314 - DNA, 25 bp, Homo sapien
tttctcaaggcctaggtctgtcccc

SEQ ID NO: 2985315 - DNA, 25 bp, Homo sapien
actgccaaagccaagaactgaccgg

SEQ ID NO: 2985316 - DNA, 25 bp, Homo sapien
taatccggctgtaccagcgtcctgg

SEQ ID NO: 2985317 - DNA, 25 bp, Homo sapien
gctacacgatgaagggataatccgg

SEQ ID NO: 2985318 - DNA, 25 bp, Homo sapien
ttatgcgtgcgtatccagggacctg

SEQ ID NO: 2985319 - DNA, 25 bp, Homo sapien
tacagcttttagtcatggaagcagc

SEQ ID NO: 2985320 - DNA, 25 bp, Homo sapien
tggaagcagcgtatagacacatcta

SEQ ID NO: 2985321 - DNA, 25 bp, Homo sapien
taattaaggcaatcatacagctttt

SEQ ID NO: 2985322 - DNA, 25 bp, Homo sapien
gaatctccccactaagattgaggtg

SEQ ID NO: 2985323 - DNA, 25 bp, Homo sapien
cgtgtcatccttgcacaggggtcat

SEQ ID NO: 2985324 - DNA, 25 bp, Homo sapien
gctaattttctctgtatcgttccaa

SEQ ID NO: 2985325 - DNA, 25 bp, Homo sapien
atatatggagcacttcacaaatttg

SEQ ID NO: 2985326 - DNA, 25 bp, Homo sapien
tatatctgctgctgaagcaggcaca

SEQ ID NO: 2985327 - DNA, 25 bp, Homo sapien
tggactctgtggatgagtttctcag

SEQ ID NO: 2985328 - DNA, 25 bp, Homo sapien
cctgggtgacaccaaggtagagcgg

SEQ ID NO: 2985329 - DNA, 25 bp, Homo sapien
gctgagcatcctgggactgcctctc

SEQ ID NO: 2985330 - DNA, 25 bp, Homo sapien
gaatggcaacttcgggctggactct

SEQ ID NO: 2985331 - DNA, 25 bp, Homo sapien
tgagaaacatgatacgtggcaggtt

SEQ ID NO: 2985332 - DNA, 25 bp, Homo sapien
cagcgcccagcttagaactttatgt

SEQ ID NO: 2985333 - DNA, 25 bp, Homo sapien
ccaatggaggtggaggtcggcacgt

SEQ ID NO: 2985334 - DNA, 25 bp, Homo sapien
tgttctatgcaatttagtccttgtg

SEQ ID NO: 2985335 - DNA, 25 bp, Homo sapien
ggagtggccccaccaacctggactc

SEQ ID NO: 2985336 - DNA, 25 bp, Homo sapien
gactcttcgggcctgatggcggcct

SEQ ID NO: 2985337 - DNA, 25 bp, Homo sapien
ctgcaggctccacaccgcggggagt

SEQ ID NO: 2985338 - DNA, 25 bp, Homo sapien
tgagtcctctacaagtgaaaattcc

SEQ ID NO: 2985339 - DNA, 25 bp, Homo sapien
gctgagttgcgcacatttccgacga

SEQ ID NO: 2985340 - DNA, 25 bp, Homo sapien
tgaatcatatctgcagggtcacctg

SEQ ID NO: 2985341 - DNA, 25 bp, Homo sapien
tctttttggagagcggcagggtacc

SEQ ID NO: 2985342 - DNA, 25 bp, Homo sapien
ggacctgcctgtacttagagcctga

SEQ ID NO: 2985343 - DNA, 25 bp, Homo sapien
tgtaagtaattatactaagaccaga

SEQ ID NO: 2985344 - DNA, 25 bp, Homo sapien
aatgtaagtaattatactaagacca

SEQ ID NO: 2985345 - DNA, 25 bp, Homo sapien
atgtaagtaattatactaagaccag

SEQ ID NO: 2985346 - DNA, 25 bp, Homo sapien
catctggatacaattagctggctcc

SEQ ID NO: 2985347 - DNA, 25 bp, Homo sapien
cttcctggactgacggtaaccacct

SEQ ID NO: 2985348 - DNA, 25 bp, Homo sapien
atctggatacaattagctggctccc

SEQ ID NO: 2985349 - DNA, 25 bp, Homo sapien
tctggatacaattagctggctcccc

SEQ ID NO: 2985350 - DNA, 25 bp, Homo sapien
tctgagattgttctcatcagctcac

SEQ ID NO: 2985351 - DNA, 25 bp, Homo sapien
atcagctcacagagattcatttcag

SEQ ID NO: 2985352 - DNA, 25 bp, Homo sapien
tgacaccatttctgctacctcatct

SEQ ID NO: 2985353 - DNA, 25 bp, Homo sapien
gctcacagagattcatttcagtgaa

SEQ ID NO: 2985354 - DNA, 25 bp, Homo sapien
tacatccagctaaaggagagcgttt

SEQ ID NO: 2985355 - DNA, 25 bp, Homo sapien
tcactctggcgcctggtcactgtgc

SEQ ID NO: 2985356 - DNA, 25 bp, Homo sapien
tgcccagctgggagcgttctttcag

SEQ ID NO: 2985357 - DNA, 25 bp, Homo sapien
tagtactagaggtaagatctgccaa

SEQ ID NO: 2985358 - DNA, 25 bp, Homo sapien
gaggccctctcctgatccaaatctt

SEQ ID NO: 2985359 - DNA, 25 bp, Homo sapien
aggccctctcctgatccaaatcttt

SEQ ID NO: 2985360 - DNA, 25 bp, Homo sapien
ccagctgttattgggctctgaggcc

SEQ ID NO: 2985361 - DNA, 25 bp, Homo sapien
aggttccagctgttattgggctctg

SEQ ID NO: 2985362 - DNA, 25 bp, Homo sapien
gcagctccggctctacgacatgtag

SEQ ID NO: 2985363 - DNA, 25 bp, Homo sapien
caaggagacgtttggcgagatgtcc

SEQ ID NO: 2985364 - DNA, 25 bp, Homo sapien
tcgacagagttcagaaggaacagct

SEQ ID NO: 2985365 - DNA, 25 bp, Homo sapien
tgttctgaaaagcaaccgcagtcac

SEQ ID NO: 2985366 - DNA, 25 bp, Homo sapien
aagccaaaccacagaagactttgag

SEQ ID NO: 2985367 - DNA, 25 bp, Homo sapien
cggtggaggcgaggcaggtacgcac

SEQ ID NO: 2985368 - DNA, 25 bp, Homo sapien
cgcggcccgcaggaaatgcaggtcc

SEQ ID NO: 2985369 - DNA, 25 bp, Homo sapien
atgctaagccgcagccccgcaaact

SEQ ID NO: 2985370 - DNA, 25 bp, Homo sapien
aggaaatgcaggtcccgccatgcta

SEQ ID NO: 2985371 - DNA, 25 bp, Homo sapien
tagactaggaagagtgggtacccag

SEQ ID NO: 2985372 - DNA, 25 bp, Homo sapien
tgtccgttatgtaagcacaacaggg

SEQ ID NO: 2985373 - DNA, 25 bp, Homo sapien
tactgtctctgtgggctagccaggc

SEQ ID NO: 2985374 - DNA, 25 bp, Homo sapien
tacccagagaccacttgttcagaag

SEQ ID NO: 2985375 - DNA, 25 bp, Homo sapien
tgtgtcagcaaagagcgcagctcct

SEQ ID NO: 2985376 - DNA, 25 bp, Homo sapien
gctaccaatgcagataaacgcggct

SEQ ID NO: 2985377 - DNA, 25 bp, Homo sapien
caatatctgtgctgtctcccgaggt

SEQ ID NO: 2985378 - DNA, 25 bp, Homo sapien
gagagccattggaaaagtcacccgg

SEQ ID NO: 2985379 - DNA, 25 bp, Homo sapien
agttcttgtgagtgaggtgactgcc

SEQ ID NO: 2985380 - DNA, 25 bp, Homo sapien
tccacagaacagatacagcacgggc

SEQ ID NO: 2985381 - DNA, 25 bp, Homo sapien
ggtgactgccctggagacttagctc

SEQ ID NO: 2985382 - DNA, 25 bp, Homo sapien
cactgcgtgctgtgatttggtcaca

SEQ ID NO: 2985383 - DNA, 25 bp, Homo sapien
tcaaggactcgctggattggacccg

SEQ ID NO: 2985384 - DNA, 25 bp, Homo sapien
attggacccggcacaactactacga

SEQ ID NO: 2985385 - DNA, 25 bp, Homo sapien
tacgagagcttctcgctgagcccgg

SEQ ID NO: 2985386 - DNA, 25 bp, Homo sapien
aaccacaagagcaagaagcgcatcc

SEQ ID NO: 2985387 - DNA, 25 bp, Homo sapien
ggtgacgcagccgacgtgaccttcc

SEQ ID NO: 2985388 - DNA, 25 bp, Homo sapien
cagaactggcaacgggcggctggcg

SEQ ID NO: 2985389 - DNA, 25 bp, Homo sapien
aagtgatgggcacagcggcagcgcg

SEQ ID NO: 2985390 - DNA, 25 bp, Homo sapien
gcggctggcgcgaccggaagtgatg

SEQ ID NO: 2985391 - DNA, 25 bp, Homo sapien
ccggagcaaggcgaaagagactcac

SEQ ID NO: 2985392 - DNA, 25 bp, Homo sapien
agaaagcccggagcaaggcgaaaga

SEQ ID NO: 2985393 - DNA, 25 bp, Homo sapien
aaagcccggagcaaggcgaaagaga

SEQ ID NO: 2985394 - DNA, 25 bp, Homo sapien
agcccggagcaaggcgaaagagact

SEQ ID NO: 2985395 - DNA, 25 bp, Homo sapien
gaaagcccagatctggtgataaccc

SEQ ID NO: 2985396 - DNA, 25 bp, Homo sapien
ctgacggcaagaaggggaaagccca

SEQ ID NO: 2985397 - DNA, 25 bp, Homo sapien
cccagatctggtgataaccctgccg

SEQ ID NO: 2985398 - DNA, 25 bp, Homo sapien
cagatctggtgataaccctgccgcg

SEQ ID NO: 2985399 - DNA, 25 bp, Homo sapien
ctccgagaatcgaaagcgctgggcc

SEQ ID NO: 2985400 - DNA, 25 bp, Homo sapien
ggctgccagactgcgcgagcgggaa

SEQ ID NO: 2985401 - DNA, 25 bp, Homo sapien
tgtcctcggaaatcgtgctcgccca

SEQ ID NO: 2985402 - DNA, 25 bp, Homo sapien
cgtgctcgcccagtagggcgtcgtt

SEQ ID NO: 2985403 - DNA, 25 bp, Homo sapien
ctcaggcgcctcctggcgggtgctg

SEQ ID NO: 2985404 - DNA, 25 bp, Homo sapien
gcgcctcctggcgggtgctgctgca

SEQ ID NO: 2985405 - DNA, 25 bp, Homo sapien
gcctcctggcgggtgctgctgcacg

SEQ ID NO: 2985406 - DNA, 25 bp, Homo sapien
tcctggcgggtgctgctgcacgcac

SEQ ID NO: 2985407 - DNA, 25 bp, Homo sapien
caagtcagccgacatccgctcctga

SEQ ID NO: 2985408 - DNA, 25 bp, Homo sapien
ggaacccagccaagtcagccgacat

SEQ ID NO: 2985409 - DNA, 25 bp, Homo sapien
tcaggaacccagccaagtcagccga

SEQ ID NO: 2985410 - DNA, 25 bp, Homo sapien
ctgagcgtccgcacccccggtccct

SEQ ID NO: 2985411 - DNA, 25 bp, Homo sapien
ccgaagggcttcatatccgacgttt

SEQ ID NO: 2985412 - DNA, 25 bp, Homo sapien
taatgcaccgaagggcttcatatcc

SEQ ID NO: 2985413 - DNA, 25 bp, Homo sapien
agagacatttaatgcaccgaagggc

SEQ ID NO: 2985414 - DNA, 25 bp, Homo sapien
tcatatccgacgtttttgctccggg

SEQ ID NO: 2985415 - DNA, 25 bp, Homo sapien
tcacttaagcttacagttcgagacc

SEQ ID NO: 2985416 - DNA, 25 bp, Homo sapien
aaagattcgatgtggagaaagccgg

SEQ ID NO: 2985417 - DNA, 25 bp, Homo sapien
ctggcaggaaagattcgatgtggag

SEQ ID NO: 2985418 - DNA, 25 bp, Homo sapien
tgaccaacatagtgaccagggtcac

SEQ ID NO: 2985419 - DNA, 25 bp, Homo sapien
gctgtttctttagcatgggacatgc

SEQ ID NO: 2985420 - DNA, 25 bp, Homo sapien
tgctttgaaaaaccgaagacaggca

SEQ ID NO: 2985421 - DNA, 25 bp, Homo sapien
tttctttagcatgggacatgcctca

SEQ ID NO: 2985422 - DNA, 25 bp, Homo sapien
aatactgcaaagtgaaagtgctttg

SEQ ID NO: 2985423 - DNA, 25 bp, Homo sapien
gccaaacatacattccatactggag

SEQ ID NO: 2985424 - DNA, 25 bp, Homo sapien
tctgtgaaaccaaaggtactgggcc

SEQ ID NO: 2985425 - DNA, 25 bp, Homo sapien
ctggcagagatcttctgtgaaacca

SEQ ID NO: 2985426 - DNA, 25 bp, Homo sapien
agcacagggccaaacatacattcca

SEQ ID NO: 2985427 - DNA, 25 bp, Homo sapien
ttaaagggccatgtatcgtaactgg

SEQ ID NO: 2985428 - DNA, 25 bp, Homo sapien
tgtataaaatgtaccgtaactgaac

SEQ ID NO: 2985429 - DNA, 25 bp, Homo sapien
taactggcagttaattgctatgcac

SEQ ID NO: 2985430 - DNA, 25 bp, Homo sapien
tggaactgcaaataattgggaatct

SEQ ID NO: 2985431 - DNA, 25 bp, Homo sapien
tgttagtcctaccacctgcagatgt

SEQ ID NO: 2985432 - DNA, 25 bp, Homo sapien
cttgtggtggtagagccagaagatc

SEQ ID NO: 2985433 - DNA, 25 bp, Homo sapien
gatcccaagatatatgaccccatgt

SEQ ID NO: 2985434 - DNA, 25 bp, Homo sapien
tttgccgacagacttccagacagtg

SEQ ID NO: 2985435 - DNA, 25 bp, Homo sapien
aatgtactattgagccaaaaaagct

SEQ ID NO: 2985436 - DNA, 25 bp, Homo sapien
tcactggccaaatgtactattgagc

SEQ ID NO: 2985437 - DNA, 25 bp, Homo sapien
ttttcatatagcatcactggccaaa

SEQ ID NO: 2985438 - DNA, 25 bp, Homo sapien
tatagcatcactggccaaatgtact

SEQ ID NO: 2985439 - DNA, 25 bp, Homo sapien
ctcctaacttgataagtagaccaca

SEQ ID NO: 2985440 - DNA, 25 bp, Homo sapien
agtagaccacaattggaccttggga

SEQ ID NO: 2985441 - DNA, 25 bp, Homo sapien
ccacaattggaccttgggattcttg

SEQ ID NO: 2985442 - DNA, 25 bp, Homo sapien
cttgataagtagaccacaattggac

SEQ ID NO: 2985443 - DNA, 25 bp, Homo sapien
ataaaaagtaagggtcatccatact

SEQ ID NO: 2985444 - DNA, 25 bp, Homo sapien
aaaagtaagggtcatccatacttgc

SEQ ID NO: 2985445 - DNA, 25 bp, Homo sapien
aaaaagtaagggtcatccatacttg

SEQ ID NO: 2985446 - DNA, 25 bp, Homo sapien
atataaaaagtaagggtcatccata

SEQ ID NO: 2985447 - DNA, 25 bp, Homo sapien
ttttgcttcagatgtattctattct

SEQ ID NO: 2985448 - DNA, 25 bp, Homo sapien
catgggtagggtagagtaaggctta

SEQ ID NO: 2985449 - DNA, 25 bp, Homo sapien
gcttcagatgtattctattcttaaa

SEQ ID NO: 2985450 - DNA, 25 bp, Homo sapien
tcttaaattatgtatcgcatgggta

SEQ ID NO: 2985451 - DNA, 25 bp, Homo sapien
gtggacacatttcatatcccatttg

SEQ ID NO: 2985452 - DNA, 25 bp, Homo sapien
catttcaactgtatgtcttcctgga

SEQ ID NO: 2985453 - DNA, 25 bp, Homo sapien
cctggaagggtagattctgctatat

SEQ ID NO: 2985454 - DNA, 25 bp, Homo sapien
gaagggtagattctgctatatcttc

SEQ ID NO: 2985455 - DNA, 25 bp, Homo sapien
gctgaagtggtctgctcatagtttg

SEQ ID NO: 2985456 - DNA, 25 bp, Homo sapien
tgagtttaagtgttgtctaggtgac

SEQ ID NO: 2985457 - DNA, 25 bp, Homo sapien
tgacatcaaaatctaaggcaaacag

SEQ ID NO: 2985458 - DNA, 25 bp, Homo sapien
catagtttgtgtgccaggttgctca

SEQ ID NO: 2985459 - DNA, 25 bp, Homo sapien
tgtaactttgtaagtacttataaca

SEQ ID NO: 2985460 - DNA, 25 bp, Homo sapien
atataaataacggagcatacagtga

SEQ ID NO: 2985461 - DNA, 25 bp, Homo sapien
cttgcatataaataacggagcatac

SEQ ID NO: 2985462 - DNA, 25 bp, Homo sapien
catgtatgaacttaacatggaaaat

SEQ ID NO: 2985463 - DNA, 25 bp, Homo sapien
caaacctagatgtatcggcaagcag

SEQ ID NO: 2985464 - DNA, 25 bp, Homo sapien
tcccgattgctcctgtgtaaagatg

SEQ ID NO: 2985465 - DNA, 25 bp, Homo sapien
cggcaagcagtgtaaacggaggact

SEQ ID NO: 2985466 - DNA, 25 bp, Homo sapien
gagccttagtaagtacgtgcctgaa

SEQ ID NO: 2985467 - DNA, 25 bp, Homo sapien
gataataatggctgtttcgtaaact

SEQ ID NO: 2985468 - DNA, 25 bp, Homo sapien
tattggccagtattgcagattttaa

SEQ ID NO: 2985469 - DNA, 25 bp, Homo sapien
gctgcggtctcctgtttgataaaag

SEQ ID NO: 2985470 - DNA, 25 bp, Homo sapien
gctgtttttatccaacgtctgcatt

SEQ ID NO: 2985471 - DNA, 25 bp, Homo sapien
tttgggagtaatactgaagagaggg

SEQ ID NO: 2985472 - DNA, 25 bp, Homo sapien
ttgggagtaatactgaagagagggg

SEQ ID NO: 2985473 - DNA, 25 bp, Homo sapien
ctttgggagtaatactgaagagagg

SEQ ID NO: 2985474 - DNA, 25 bp, Homo sapien
agaggaaggagcggtgtcctcttaa

SEQ ID NO: 2985475 - DNA, 25 bp, Homo sapien
tgaagaggaaggagcggtgtcctct

SEQ ID NO: 2985476 - DNA, 25 bp, Homo sapien
gaaggagcggtgtcctcttaagaaa

SEQ ID NO: 2985477 - DNA, 25 bp, Homo sapien
aggaaggagcggtgtcctcttaaga

SEQ ID NO: 2985478 - DNA, 25 bp, Homo sapien
aatccaggtcgcgatcgaagagtcc

SEQ ID NO: 2985479 - DNA, 25 bp, Homo sapien
cgctgaggacgctatggatgccatg

SEQ ID NO: 2985480 - DNA, 25 bp, Homo sapien
gctgcctggaattaaccccgctgtg

SEQ ID NO: 2985481 - DNA, 25 bp, Homo sapien
gctttcacgacaagcgcgacgctga

SEQ ID NO: 2985482 - DNA, 25 bp, Homo sapien
cgcggtgggccaatcagaaggtttc

SEQ ID NO: 2985483 - DNA, 25 bp, Homo sapien
gcgtttcgcgggctttccaactgcc

SEQ ID NO: 2985484 - DNA, 25 bp, Homo sapien
gatcgtccggcctcccaggcggaaa

SEQ ID NO: 2985485 - DNA, 25 bp, Homo sapien
tccagccgtgactccgcgctttttg

SEQ ID NO: 2985486 - DNA, 25 bp, Homo sapien
gaagcactcttcagacggagacggg

SEQ ID NO: 2985487 - DNA, 25 bp, Homo sapien
gggctgacggctgagcaaaaaaggg

SEQ ID NO: 2985488 - DNA, 25 bp, Homo sapien
gactccggcgaagagcagtcaggaa

SEQ ID NO: 2985489 - DNA, 25 bp, Homo sapien
agagacgacgcagcggagtctgagg

SEQ ID NO: 2985490 - DNA, 25 bp, Homo sapien
caagcgctccgcggggagtccccac

SEQ ID NO: 2985491 - DNA, 25 bp, Homo sapien
ctggcacgcgcaagcgctccgcggg

SEQ ID NO: 2985492 - DNA, 25 bp, Homo sapien
cacgcgcaagcgctccgcggggagt

SEQ ID NO: 2985493 - DNA, 25 bp, Homo sapien
acgcgcaagcgctccgcggggagtc

SEQ ID NO: 2985494 - DNA, 25 bp, Homo sapien
gccgctcggcccgctgggaaacgta

SEQ ID NO: 2985495 - DNA, 25 bp, Homo sapien
ctgaccgcagccgcggcgccggccg

SEQ ID NO: 2985496 - DNA, 25 bp, Homo sapien
cgctcggcccgctgggaaacgtagt

SEQ ID NO: 2985497 - DNA, 25 bp, Homo sapien
cgccggccgctcggcccgctgggaa

SEQ ID NO: 2985498 - DNA, 25 bp, Homo sapien
gaatttatccgctccaggttgaggg

SEQ ID NO: 2985499 - DNA, 25 bp, Homo sapien
atccgagtacggaagagcacaaccc

SEQ ID NO: 2985500 - DNA, 25 bp, Homo sapien
attaaagggccaagtgccagccgca

SEQ ID NO: 2985501 - DNA, 25 bp, Homo sapien
gcagttaggatactcctaagaagcg

SEQ ID NO: 2985502 - DNA, 25 bp, Homo sapien
tcaacttccagttcctggatcggaa

SEQ ID NO: 2985503 - DNA, 25 bp, Homo sapien
caacttccagttcctggatcggaac

SEQ ID NO: 2985504 - DNA, 25 bp, Homo sapien
ttccagttcctggatcggaacccca

SEQ ID NO: 2985505 - DNA, 25 bp, Homo sapien
cagttcctggatcggaaccccaggt

SEQ ID NO: 2985506 - DNA, 25 bp, Homo sapien
gcagtcagctctcctcggggcgaag

SEQ ID NO: 2985507 - DNA, 25 bp, Homo sapien
cagctctgccggaggcagcagccca

SEQ ID NO: 2985508 - DNA, 25 bp, Homo sapien
tcctcggggcgaagccactgacaat

SEQ ID NO: 2985509 - DNA, 25 bp, Homo sapien
gctcagctctgccggaggcagcagc

SEQ ID NO: 2985510 - DNA, 25 bp, Homo sapien
tgaaaggcagtgaacataaacataa

SEQ ID NO: 2985511 - DNA, 25 bp, Homo sapien
gtttgaaaggcagtgaacataaaca

SEQ ID NO: 2985512 - DNA, 25 bp, Homo sapien
aacataaacataaaggcaactccta

SEQ ID NO: 2985513 - DNA, 25 bp, Homo sapien
ggcaactcctaaaataatgatgttg

SEQ ID NO: 2985514 - DNA, 25 bp, Homo sapien
tgcattatgatgggcacttcaaagg

SEQ ID NO: 2985515 - DNA, 25 bp, Homo sapien
gcattatgatgggcacttcaaagga

SEQ ID NO: 2985516 - DNA, 25 bp, Homo sapien
tatttaagctcctgatgacagtttg

SEQ ID NO: 2985517 - DNA, 25 bp, Homo sapien
aaatctgtcctatttaagctcctga

SEQ ID NO: 2985518 - DNA, 25 bp, Homo sapien
ctggtatatccactgccgtgaaaat

SEQ ID NO: 2985519 - DNA, 25 bp, Homo sapien
cactgccgtgaaaatctgtcctatt

SEQ ID NO: 2985520 - DNA, 25 bp, Homo sapien
ctacaatggcaaccactgacggtgt

SEQ ID NO: 2985521 - DNA, 25 bp, Homo sapien
tagagagttgaggtcctacaatggc

SEQ ID NO: 2985522 - DNA, 25 bp, Homo sapien
tgtaaaataaaccactggcaaacat

SEQ ID NO: 2985523 - DNA, 25 bp, Homo sapien
ctgacggtgtaatcaaatttgaagc

SEQ ID NO: 2985524 - DNA, 25 bp, Homo sapien
gaccacgggaaaggctggatgaaaa

SEQ ID NO: 2985525 - DNA, 25 bp, Homo sapien
aggaccacgggaaaggctggatgaa

SEQ ID NO: 2985526 - DNA, 25 bp, Homo sapien
aggctgtgtagaaggaccacgggaa

SEQ ID NO: 2985527 - DNA, 25 bp, Homo sapien
aacagaggctgtgtagaaggaccac

SEQ ID NO: 2985528 - DNA, 25 bp, Homo sapien
tcatccgaattgattgtcaggcagt

SEQ ID NO: 2985529 - DNA, 25 bp, Homo sapien
tgtcaggcagtttccttgtgctgtc

SEQ ID NO: 2985530 - DNA, 25 bp, Homo sapien
tgtgctcatccgaattgattgtcag

SEQ ID NO: 2985531 - DNA, 25 bp, Homo sapien
caatgctgtgctcatccgaattgat

SEQ ID NO: 2985532 - DNA, 25 bp, Homo sapien
ttttcccttgccaggcaaaatatat

SEQ ID NO: 2985533 - DNA, 25 bp, Homo sapien
agttttcccttgccaggcaaaatat

SEQ ID NO: 2985534 - DNA, 25 bp, Homo sapien
tttcccttgccaggcaaaatatatg

SEQ ID NO: 2985535 - DNA, 25 bp, Homo sapien
gttttcccttgccaggcaaaatata

SEQ ID NO: 2985536 - DNA, 25 bp, Homo sapien
caaggctaatcaccgttagggcaat

SEQ ID NO: 2985537 - DNA, 25 bp, Homo sapien
tcagaatctggtttccgaatgagaa

SEQ ID NO: 2985538 - DNA, 25 bp, Homo sapien
gaaagaatagaactgtccccacaag

SEQ ID NO: 2985539 - DNA, 25 bp, Homo sapien
gaagactcatcttctcctaggacat

SEQ ID NO: 2985540 - DNA, 25 bp, Homo sapien
aaagctttagagctggatcacagaa

SEQ ID NO: 2985541 - DNA, 25 bp, Homo sapien
catatggattgagtgagaaagctga

SEQ ID NO: 2985542 - DNA, 25 bp, Homo sapien
gatcacagaaacagtaaccaaggtc

SEQ ID NO: 2985543 - DNA, 25 bp, Homo sapien
ggcaaggccaggaacagactcaact

SEQ ID NO: 2985544 - DNA, 25 bp, Homo sapien
catctaatgctcctatgactggaca

SEQ ID NO: 2985545 - DNA, 25 bp, Homo sapien
gcatatccagaccaaagcgctgcct

SEQ ID NO: 2985546 - DNA, 25 bp, Homo sapien
gatactgcagatcactagcctgtca

SEQ ID NO: 2985547 - DNA, 25 bp, Homo sapien
taagttagtgcaagagccggacacc

SEQ ID NO: 2985548 - DNA, 25 bp, Homo sapien
gatgcagggttgccacaagccttca

SEQ ID NO: 2985549 - DNA, 25 bp, Homo sapien
tcgatgcagggttgccacaagcctt

SEQ ID NO: 2985550 - DNA, 25 bp, Homo sapien
cgatgcagggttgccacaagccttc

SEQ ID NO: 2985551 - DNA, 25 bp, Homo sapien
tatttgtgctgccgaagtgagcaca

SEQ ID NO: 2985552 - DNA, 25 bp, Homo sapien
taaaagcatctactgcctttgtcag

SEQ ID NO: 2985553 - DNA, 25 bp, Homo sapien
aaagcatctactgcctttgtcagat

SEQ ID NO: 2985554 - DNA, 25 bp, Homo sapien
agcatctactgcctttgtcagattg

SEQ ID NO: 2985555 - DNA, 25 bp, Homo sapien
catctactgcctttgtcagattgtt

SEQ ID NO: 2985556 - DNA, 25 bp, Homo sapien
agtcactgcgcgcagccacaatctg

SEQ ID NO: 2985557 - DNA, 25 bp, Homo sapien
aaaatcccaggaagactctcaactt

SEQ ID NO: 2985558 - DNA, 25 bp, Homo sapien
ggcgcgagtcactgcgcgcagccac

SEQ ID NO: 2985559 - DNA, 25 bp, Homo sapien
aatctgctcttaattaccctgcaaa

SEQ ID NO: 2985560 - DNA, 25 bp, Homo sapien
gatctcaccaagtaagccaatgtgg

SEQ ID NO: 2985561 - DNA, 25 bp, Homo sapien
gaaagggctcactaagaaatgtcaa

SEQ ID NO: 2985562 - DNA, 25 bp, Homo sapien
ttaacattaacagacagccagaggg

SEQ ID NO: 2985563 - DNA, 25 bp, Homo sapien
tccaactgtctaggtgagatgtcct

SEQ ID NO: 2985564 - DNA, 25 bp, Homo sapien
gagagagaggtgcatcatgttgccc

SEQ ID NO: 2985565 - DNA, 25 bp, Homo sapien
tatgagcatgggcttgattctagac

SEQ ID NO: 2985566 - DNA, 25 bp, Homo sapien
gctatctaaccttgcttaagaccca

SEQ ID NO: 2985567 - DNA, 25 bp, Homo sapien
gtggcgccatcactgtttactgcag

SEQ ID NO: 2985568 - DNA, 25 bp, Homo sapien
ctttttggccatacagaagctgggc

SEQ ID NO: 2985569 - DNA, 25 bp, Homo sapien
gattaaccgttaggctcttgagaga

SEQ ID NO: 2985570 - DNA, 25 bp, Homo sapien
catggagcagctttaagagtggact

SEQ ID NO: 2985571 - DNA, 25 bp, Homo sapien
tgagagagtcaacaatcagcaaagc

SEQ ID NO: 2985572 - DNA, 25 bp, Homo sapien
taatactaagaaggagcatctcctt

SEQ ID NO: 2985573 - DNA, 25 bp, Homo sapien
gttgtaatactaagaaggagcatct

SEQ ID NO: 2985574 - DNA, 25 bp, Homo sapien
actaagaaggagcatctccttggtg

SEQ ID NO: 2985575 - DNA, 25 bp, Homo sapien
agcagttgtaatactaagaaggagc

SEQ ID NO: 2985576 - DNA, 25 bp, Homo sapien
gggccaaccctgtgatttgctgtca

SEQ ID NO: 2985577 - DNA, 25 bp, Homo sapien
tggttattttctgtagcgctctgca

SEQ ID NO: 2985578 - DNA, 25 bp, Homo sapien
catgcaaccttgacttactgagctc

SEQ ID NO: 2985579 - DNA, 25 bp, Homo sapien
tgtcaccaacagaatccagtagaag

SEQ ID NO: 2985580 - DNA, 25 bp, Homo sapien
ccatatacaccagagaagaaagtta

SEQ ID NO: 2985581 - DNA, 25 bp, Homo sapien
tgccagaaagtccaataaggctttt

SEQ ID NO: 2985582 - DNA, 25 bp, Homo sapien
aaaatttctccaatgccgatgaaaa

SEQ ID NO: 2985583 - DNA, 25 bp, Homo sapien
caatgccgatgaaaatgccagaaag

SEQ ID NO: 2985584 - DNA, 25 bp, Homo sapien
actgcctgacatacaaagatttctg

SEQ ID NO: 2985585 - DNA, 25 bp, Homo sapien
tatactgcaagtgctgaacaaatct

SEQ ID NO: 2985586 - DNA, 25 bp, Homo sapien
caaagtccgctttacccatggtgct

SEQ ID NO: 2985587 - DNA, 25 bp, Homo sapien
gatgcccaatatagaccttgtcctg

SEQ ID NO: 2985588 - DNA, 25 bp, Homo sapien
tcttgctcagcaggccgaagaggct

SEQ ID NO: 2985589 - DNA, 25 bp, Homo sapien
tggatttgatgtaagcactgctgtc

SEQ ID NO: 2985590 - DNA, 25 bp, Homo sapien
agttcctttaacaggagcaatcggg

SEQ ID NO: 2985591 - DNA, 25 bp, Homo sapien
aaagctatgaagtgcaccaggatgc

SEQ ID NO: 2985592 - DNA, 25 bp, Homo sapien
cccacccgtactcaagcgactagag

SEQ ID NO: 2985593 - DNA, 25 bp, Homo sapien
gcgactagagaaatgacagccacta

SEQ ID NO: 2985594 - DNA, 25 bp, Homo sapien
tcaagcgactagagaaatgacagcc

SEQ ID NO: 2985595 - DNA, 25 bp, Homo sapien
aagcgactagagaaatgacagccac

SEQ ID NO: 2985596 - DNA, 25 bp, Homo sapien
gggcgctgtcttcagaatacagaaa

SEQ ID NO: 2985597 - DNA, 25 bp, Homo sapien
atggcaaatgctggggcgctgtctt

SEQ ID NO: 2985598 - DNA, 25 bp, Homo sapien
gatactaagcagctgggtattaaag

SEQ ID NO: 2985599 - DNA, 25 bp, Homo sapien
gctgggtattaaagcagctgtctcc

SEQ ID NO: 2985600 - DNA, 25 bp, Homo sapien
tatcaccatgaccaggagttgccag

SEQ ID NO: 2985601 - DNA, 25 bp, Homo sapien
tcagatacttcggtagtcagagccg

SEQ ID NO: 2985602 - DNA, 25 bp, Homo sapien
tagaaaaatgccacggctgcgcaaa

SEQ ID NO: 2985603 - DNA, 25 bp, Homo sapien
ccgcgggctacaaaggcggcagctt

SEQ ID NO: 2985604 - DNA, 25 bp, Homo sapien
tatagtgaagatcaaaggcgacttc

SEQ ID NO: 2985605 - DNA, 25 bp, Homo sapien
aaacttgaacaccaactctggctga

SEQ ID NO: 2985606 - DNA, 25 bp, Homo sapien
gaggtcatacgtgtcccctcacgga

SEQ ID NO: 2985607 - DNA, 25 bp, Homo sapien
cctagtattctaaatcaaggcagga

SEQ ID NO: 2985608 - DNA, 25 bp, Homo sapien
catatggggaatgacatatgcttcc

SEQ ID NO: 2985609 - DNA, 25 bp, Homo sapien
gagtatagcggtgcaacaccacacc

SEQ ID NO: 2985610 - DNA, 25 bp, Homo sapien
gaatgacatatgcttcccattatta

SEQ ID NO: 2985611 - DNA, 25 bp, Homo sapien
caacagctgggagtatagcggtgca

SEQ ID NO: 2985612 - DNA, 25 bp, Homo sapien
cagagggcgatctttagccaatagc

SEQ ID NO: 2985613 - DNA, 25 bp, Homo sapien
gactactccgtagcatgatgaaggg

SEQ ID NO: 2985614 - DNA, 25 bp, Homo sapien
taggctggaactagtgactggcacc

SEQ ID NO: 2985615 - DNA, 25 bp, Homo sapien
caactatacgagtgagcagggaagc

SEQ ID NO: 2985616 - DNA, 25 bp, Homo sapien
aaactatttatttcattgtcacatt

SEQ ID NO: 2985617 - DNA, 25 bp, Homo sapien
aattaaactatttatttcattgtca

SEQ ID NO: 2985618 - DNA, 25 bp, Homo sapien
tttttttttttggagctggagtgca

SEQ ID NO: 2985619 - DNA, 25 bp, Homo sapien
ttaaactatttatttcattgtcaca

SEQ ID NO: 2985620 - DNA, 25 bp, Homo sapien
cagccgaagccctggtttaaaggcg

SEQ ID NO: 2985621 - DNA, 25 bp, Homo sapien
atcctgtgtgggcagccgaagccct

SEQ ID NO: 2985622 - DNA, 25 bp, Homo sapien
ggaaagaaatcctgtgtgggcagcc

SEQ ID NO: 2985623 - DNA, 25 bp, Homo sapien
tgtgggcagccgaagccctggttta

SEQ ID NO: 2985624 - DNA, 25 bp, Homo sapien
tgccattccatcgtatggagaaacc

SEQ ID NO: 2985625 - DNA, 25 bp, Homo sapien
tttaatgctgaatgccattccatcg

SEQ ID NO: 2985626 - DNA, 25 bp, Homo sapien
gctgaatgccattccatcgtatgga

SEQ ID NO: 2985627 - DNA, 25 bp, Homo sapien
ctgtcttttaatgctgaatgccatt

SEQ ID NO: 2985628 - DNA, 25 bp, Homo sapien
ccatgcctagccattaattgtgata

SEQ ID NO: 2985629 - DNA, 25 bp, Homo sapien
gcctagccattaattgtgataaaaa

SEQ ID NO: 2985630 - DNA, 25 bp, Homo sapien
tgcctagccattaattgtgataaaa

SEQ ID NO: 2985631 - DNA, 25 bp, Homo sapien
catgcctagccattaattgtgataa

SEQ ID NO: 2985632 - DNA, 25 bp, Homo sapien
ttccctcaggtctcctatctgtcat

SEQ ID NO: 2985633 - DNA, 25 bp, Homo sapien
tccctcaggtctcctatctgtcatg

SEQ ID NO: 2985634 - DNA, 25 bp, Homo sapien
agagggcccctatcaggtcgtcagg

SEQ ID NO: 2985635 - DNA, 25 bp, Homo sapien
gagaacaatcccaagaggtcctgag

SEQ ID NO: 2985636 - DNA, 25 bp, Homo sapien
tcggttcaaacatgtgcactaagag

SEQ ID NO: 2985637 - DNA, 25 bp, Homo sapien
caggagctaggcgagtcggttcaaa

SEQ ID NO: 2985638 - DNA, 25 bp, Homo sapien
aacacaatccatattcacaaccatg

SEQ ID NO: 2985639 - DNA, 25 bp, Homo sapien
tcacaaccatgttgatgaacaaaac

SEQ ID NO: 2985640 - DNA, 25 bp, Homo sapien
aattatctcttaaccaataaacaca

SEQ ID NO: 2985641 - DNA, 25 bp, Homo sapien
taattatctcttaaccaataaacac

SEQ ID NO: 2985642 - DNA, 25 bp, Homo sapien
tgtgtctacatcttatgattctgaa

SEQ ID NO: 2985643 - DNA, 25 bp, Homo sapien
tgtctcaagagttccctaagtttta

SEQ ID NO: 2985644 - DNA, 25 bp, Homo sapien
tctgtgtctacatcttatgattctg

SEQ ID NO: 2985645 - DNA, 25 bp, Homo sapien
gagattttgtctcaagagttcccta

SEQ ID NO: 2985646 - DNA, 25 bp, Homo sapien
caagttagaggtgaagctcagctca

SEQ ID NO: 2985647 - DNA, 25 bp, Homo sapien
gagttccatcaatacagaggcagtg

SEQ ID NO: 2985648 - DNA, 25 bp, Homo sapien
tacctatcccatgcatgtgagacgc

SEQ ID NO: 2985649 - DNA, 25 bp, Homo sapien
tttcctcatatctggcaaggcgtgg

SEQ ID NO: 2985650 - DNA, 25 bp, Homo sapien
atcccacactgggccgcaagtggag

SEQ ID NO: 2985651 - DNA, 25 bp, Homo sapien
gtgcattcaccaaccctaaactaga

SEQ ID NO: 2985652 - DNA, 25 bp, Homo sapien
taactagatacagagcgccaactgg

SEQ ID NO: 2985653 - DNA, 25 bp, Homo sapien
ggcggggaggctcagacatagcagg

SEQ ID NO: 2985654 - DNA, 25 bp, Homo sapien
ttttcatgcggacattttataactg

SEQ ID NO: 2985655 - DNA, 25 bp, Homo sapien
gttttcatgtatgtgcagctgcctg

SEQ ID NO: 2985656 - DNA, 25 bp, Homo sapien
ggcaaaacatcttttcatgcggaca

SEQ ID NO: 2985657 - DNA, 25 bp, Homo sapien
ggatttcaaccggatgttctatcat

SEQ ID NO: 2985658 - DNA, 25 bp, Homo sapien
caaatcaccaagtgtgtgggccgtc

SEQ ID NO: 2985659 - DNA, 25 bp, Homo sapien
aactgtctcaggaatcaagaatcgg

SEQ ID NO: 2985660 - DNA, 25 bp, Homo sapien
ggtatccctgggcagacatattgca

SEQ ID NO: 2985661 - DNA, 25 bp, Homo sapien
gaaggagcatgctctgtgagcgccc

SEQ ID NO: 2985662 - DNA, 25 bp, Homo sapien
gggaccaaccaggtcaatgagtgga

SEQ ID NO: 2985663 - DNA, 25 bp, Homo sapien
aagccagggaccaaccaggtcaatg

SEQ ID NO: 2985664 - DNA, 25 bp, Homo sapien
accaaccaggtcaatgagtggagac

SEQ ID NO: 2985665 - DNA, 25 bp, Homo sapien
tctggaacctgggaaagccagggac

SEQ ID NO: 2985666 - DNA, 25 bp, Homo sapien
caatgggcatcgctttctcacaggt

SEQ ID NO: 2985667 - DNA, 25 bp, Homo sapien
catggttgagaaaaaggtcatcgcc

SEQ ID NO: 2985668 - DNA, 25 bp, Homo sapien
gccgcaagcccaggatcaaggtgtt

SEQ ID NO: 2985669 - DNA, 25 bp, Homo sapien
gctcgcgctgcggtaacagatcaaa

SEQ ID NO: 2985670 - DNA, 25 bp, Homo sapien
ccttgaaggaagagttgaggcaaca

SEQ ID NO: 2985671 - DNA, 25 bp, Homo sapien
ccgagctcaacagccttgggcggta

SEQ ID NO: 2985672 - DNA, 25 bp, Homo sapien
atgtcctgactgtccttagcggctc

SEQ ID NO: 2985673 - DNA, 25 bp, Homo sapien
gtagggaccactccgacatgtaggg

SEQ ID NO: 2985674 - DNA, 25 bp, Homo sapien
taaatgtcgcatctctgatgagagc

SEQ ID NO: 2985675 - DNA, 25 bp, Homo sapien
ggattcccacggtgaagacagccct

SEQ ID NO: 2985676 - DNA, 25 bp, Homo sapien
gaaagactcgaacccatcctcggat

SEQ ID NO: 2985677 - DNA, 25 bp, Homo sapien
tgttaacatggaggaccagcactga

SEQ ID NO: 2985678 - DNA, 25 bp, Homo sapien
caaattgaagatcgcacctgcggac

SEQ ID NO: 2985679 - DNA, 25 bp, Homo sapien
atcgcacctgcggacttctcatggg

SEQ ID NO: 2985680 - DNA, 25 bp, Homo sapien
tccaaattgaagatcgcacctgcgg

SEQ ID NO: 2985681 - DNA, 25 bp, Homo sapien
gaagatcgcacctgcggacttctca

SEQ ID NO: 2985682 - DNA, 25 bp, Homo sapien
agaggatgccgtgggagagccgtgg

SEQ ID NO: 2985683 - DNA, 25 bp, Homo sapien
tcttcaacagaagggaagtagatgg

SEQ ID NO: 2985684 - DNA, 25 bp, Homo sapien
gacccctttgttggtccatctctgc

SEQ ID NO: 2985685 - DNA, 25 bp, Homo sapien
gcctccatggctgtatagaggatgc

SEQ ID NO: 2985686 - DNA, 25 bp, Homo sapien
agcaggcttcatagagagtagatca

SEQ ID NO: 2985687 - DNA, 25 bp, Homo sapien
gatgttcaatgttagtcagcttttc

SEQ ID NO: 2985688 - DNA, 25 bp, Homo sapien
catagagagtagatcatgaatgttt

SEQ ID NO: 2985689 - DNA, 25 bp, Homo sapien
gagagtagatcatgaatgtttctta

SEQ ID NO: 2985690 - DNA, 25 bp, Homo sapien
tcctgccacgaagccgctgcctgct

SEQ ID NO: 2985691 - DNA, 25 bp, Homo sapien
gaggtgactggatcagggcgcagaa

SEQ ID NO: 2985692 - DNA, 25 bp, Homo sapien
tcagggcgcagaattcccccttgct

SEQ ID NO: 2985693 - DNA, 25 bp, Homo sapien
gctcctgccacgaagccgctgcctg

SEQ ID NO: 2985694 - DNA, 25 bp, Homo sapien
cctttgccgtagtgtgcagcattaa

SEQ ID NO: 2985695 - DNA, 25 bp, Homo sapien
cgcgtacaaatcagcaacagtggca

SEQ ID NO: 2985696 - DNA, 25 bp, Homo sapien
agcacattacgaggcaataggccat

SEQ ID NO: 2985697 - DNA, 25 bp, Homo sapien
cagcatttactgacaccgcgtacaa

SEQ ID NO: 2985698 - DNA, 25 bp, Homo sapien
tcaaggttgtttttagagctcatag

SEQ ID NO: 2985699 - DNA, 25 bp, Homo sapien
gttgtttttagagctcatagacggg

SEQ ID NO: 2985700 - DNA, 25 bp, Homo sapien
aggcttcaaggttgtttttagagct

SEQ ID NO: 2985701 - DNA, 25 bp, Homo sapien
aggttgtttttagagctcatagacg

SEQ ID NO: 2985702 - DNA, 25 bp, Homo sapien
gcgtctgcctgctcgggctcgctcg

SEQ ID NO: 2985703 - DNA, 25 bp, Homo sapien
cgccctccccgcttcacattttggg

SEQ ID NO: 2985704 - DNA, 25 bp, Homo sapien
cgcccgcgctctggtgtccggcgtc

SEQ ID NO: 2985705 - DNA, 25 bp, Homo sapien
atggctctcgacgagggcaacccgc

SEQ ID NO: 2985706 - DNA, 25 bp, Homo sapien
ccgcgtccgagcgaagctgggagcg

SEQ ID NO: 2985707 - DNA, 25 bp, Homo sapien
tctgcgggccgaagccgcgtccgag

SEQ ID NO: 2985708 - DNA, 25 bp, Homo sapien
tccgggccacgaaccctctgcgggc

SEQ ID NO: 2985709 - DNA, 25 bp, Homo sapien
ctctcgccgcgtccgggccacgaac

SEQ ID NO: 2985710 - DNA, 25 bp, Homo sapien
tgttcaaacttgttggtgcgagcag

SEQ ID NO: 2985711 - DNA, 25 bp, Homo sapien
tcaaacttgttggtgcgagcagccg

SEQ ID NO: 2985712 - DNA, 25 bp, Homo sapien
aaacttgttggtgcgagcagccgcg

SEQ ID NO: 2985713 - DNA, 25 bp, Homo sapien
ttcaaacttgttggtgcgagcagcc

SEQ ID NO: 2985714 - DNA, 25 bp, Homo sapien
tcccatcggggttgacggtgatcat

SEQ ID NO: 2985715 - DNA, 25 bp, Homo sapien
ttctgaccattatcttcccatcggg

SEQ ID NO: 2985716 - DNA, 25 bp, Homo sapien
gggtgaccaggcatcttctgaccat

SEQ ID NO: 2985717 - DNA, 25 bp, Homo sapien
agggtctcagggtgaccaggcatct

SEQ ID NO: 2985718 - DNA, 25 bp, Homo sapien
cactataggataaagagagctcaac

SEQ ID NO: 2985719 - DNA, 25 bp, Homo sapien
tataggataaagagagctcaactac

SEQ ID NO: 2985720 - DNA, 25 bp, Homo sapien
gcccccccactataggataaagaga

SEQ ID NO: 2985721 - DNA, 25 bp, Homo sapien
ccccactataggataaagagagctc

SEQ ID NO: 2985722 - DNA, 25 bp, Homo sapien
cgtgccctgacgctccaccacgtac

SEQ ID NO: 2985723 - DNA, 25 bp, Homo sapien
accacgtaccggctgcacaaatgtt

SEQ ID NO: 2985724 - DNA, 25 bp, Homo sapien
gtgccctgacgctccaccacgtacc

SEQ ID NO: 2985725 - DNA, 25 bp, Homo sapien
tccaccacgtaccggctgcacaaat

SEQ ID NO: 2985726 - DNA, 25 bp, Homo sapien
ctgcggagaggaaggaggcgggtca

SEQ ID NO: 2985727 - DNA, 25 bp, Homo sapien
aggaaggaggcgggtcaggagggca

SEQ ID NO: 2985728 - DNA, 25 bp, Homo sapien
cggagaggaaggaggcgggtcagga

SEQ ID NO: 2985729 - DNA, 25 bp, Homo sapien
gaggaaggaggcgggtcaggagggc

SEQ ID NO: 2985730 - DNA, 25 bp, Homo sapien
gacgtcatcaggaagcagagagtga

SEQ ID NO: 2985731 - DNA, 25 bp, Homo sapien
agtgaagaagccgatgcccaggaca

SEQ ID NO: 2985732 - DNA, 25 bp, Homo sapien
ggcctcccagagacgtcatcaggaa

SEQ ID NO: 2985733 - DNA, 25 bp, Homo sapien
tgcggatggtgaatggcgagtcccc

SEQ ID NO: 2985734 - DNA, 25 bp, Homo sapien
tcatcttgcgcaggacgccgcggga

SEQ ID NO: 2985735 - DNA, 25 bp, Homo sapien
tcttgcgcaggacgccgcgggactc

SEQ ID NO: 2985736 - DNA, 25 bp, Homo sapien
gcgggaaagtgcaggtcgccgccgg

SEQ ID NO: 2985737 - DNA, 25 bp, Homo sapien
cgccggcccggtgcagctcactgct

SEQ ID NO: 2985738 - DNA, 25 bp, Homo sapien
ggctgtaccacagtgtggtccaaat

SEQ ID NO: 2985739 - DNA, 25 bp, Homo sapien
tggtagaaatgcactctgggctgta

SEQ ID NO: 2985740 - DNA, 25 bp, Homo sapien
caaatgtgaccaaatgttaacggtt

SEQ ID NO: 2985741 - DNA, 25 bp, Homo sapien
ttcatctgtgacgttttatttaaag

SEQ ID NO: 2985742 - DNA, 25 bp, Homo sapien
aggcctgcggacagaggctgcatca

SEQ ID NO: 2985743 - DNA, 25 bp, Homo sapien
acctggacacttattgatgacttag

SEQ ID NO: 2985744 - DNA, 25 bp, Homo sapien
atgacttagaaagaccccactgggc

SEQ ID NO: 2985745 - DNA, 25 bp, Homo sapien
gacttagaaagaccccactgggcca

SEQ ID NO: 2985746 - DNA, 25 bp, Homo sapien
ctggacacttattgatgacttagaa

SEQ ID NO: 2985747 - DNA, 25 bp, Homo sapien
tgtccactagagaaggcatagcagg

SEQ ID NO: 2985748 - DNA, 25 bp, Homo sapien
atagcaggaaccctcaatggccacc

SEQ ID NO: 2985749 - DNA, 25 bp, Homo sapien
gcctagtgagctgtccactagagaa

SEQ ID NO: 2985750 - DNA, 25 bp, Homo sapien
cctcctcttctgagcctagtgagct

SEQ ID NO: 2985751 - DNA, 25 bp, Homo sapien
taagctccgtttatccctatacaag

SEQ ID NO: 2985752 - DNA, 25 bp, Homo sapien
tatacaaggtactggtctttatggc

SEQ ID NO: 2985753 - DNA, 25 bp, Homo sapien
tttgcaggcccagtttaagctccgt

SEQ ID NO: 2985754 - DNA, 25 bp, Homo sapien
tatggctgcacataatgggaattcg

SEQ ID NO: 2985755 - DNA, 25 bp, Homo sapien
tgtcggagacgttctgggcaatagc

SEQ ID NO: 2985756 - DNA, 25 bp, Homo sapien
cttcacagcgatgtcggagacgttc

SEQ ID NO: 2985757 - DNA, 25 bp, Homo sapien
ttctgggcaatagcctggatccgct

SEQ ID NO: 2985758 - DNA, 25 bp, Homo sapien
tggatccgctccatgaggccggccc

SEQ ID NO: 2985759 - DNA, 25 bp, Homo sapien
caggagcagactgtggcgcaggatc

SEQ ID NO: 2985760 - DNA, 25 bp, Homo sapien
aggagcagactgtggcgcaggatct

SEQ ID NO: 2985761 - DNA, 25 bp, Homo sapien
gtcactgggtgcctcacactggtcc

SEQ ID NO: 2985762 - DNA, 25 bp, Homo sapien
gaacttggggtcactgggtgcctca

SEQ ID NO: 2985763 - DNA, 25 bp, Homo sapien
acactggtcccgccggccttctgac

SEQ ID NO: 2985764 - DNA, 25 bp, Homo sapien
tggggtcactgggtgcctcacactg

SEQ ID NO: 2985765 - DNA, 25 bp, Homo sapien
cccaaagaaggcgtagcaggggtca

SEQ ID NO: 2985766 - DNA, 25 bp, Homo sapien
cactcggtgccgtccaccccaaaga

SEQ ID NO: 2985767 - DNA, 25 bp, Homo sapien
ctcgacctcactgaggtagatgagg

SEQ ID NO: 2985768 - DNA, 25 bp, Homo sapien
agcggggggcagaaccactcgacct

SEQ ID NO: 2985769 - DNA, 25 bp, Homo sapien
cgctgcccatcaggtccagaaggtg

SEQ ID NO: 2985770 - DNA, 25 bp, Homo sapien
tgggacaggttgcttcggaaaactg

SEQ ID NO: 2985771 - DNA, 25 bp, Homo sapien
aagatcagggactccttcccgctgc

SEQ ID NO: 2985772 - DNA, 25 bp, Homo sapien
tcttggtccgcttcttcatgaagat

SEQ ID NO: 2985773 - DNA, 25 bp, Homo sapien
agggagactgtgacccgcaggccat

SEQ ID NO: 2985774 - DNA, 25 bp, Homo sapien
cccaggacatagagtgcagtcagaa

SEQ ID NO: 2985775 - DNA, 25 bp, Homo sapien
tccccggactcctccgtcaggaagc

SEQ ID NO: 2985776 - DNA, 25 bp, Homo sapien
agaatgtccgcccactgcaccatct

SEQ ID NO: 2985777 - DNA, 25 bp, Homo sapien
gaaatcaccttcctaagatcccctg

SEQ ID NO: 2985778 - DNA, 25 bp, Homo sapien
gagccagatcgttcattcacacata

SEQ ID NO: 2985779 - DNA, 25 bp, Homo sapien
tttagatctgcaagagcttgagagg

SEQ ID NO: 2985780 - DNA, 25 bp, Homo sapien
tctccctggagcacctttagatctg

SEQ ID NO: 2985781 - DNA, 25 bp, Homo sapien
cttctagaagcatcttctcacaggc

SEQ ID NO: 2985782 - DNA, 25 bp, Homo sapien
acttggcttttcaatgagcaatgtg

SEQ ID NO: 2985783 - DNA, 25 bp, Homo sapien
ttcagtctccttcttacttggcttt

SEQ ID NO: 2985784 - DNA, 25 bp, Homo sapien
acaggcacccatgactccacatctg

SEQ ID NO: 2985785 - DNA, 25 bp, Homo sapien
tgtttttggtaaagaccaggtctca

SEQ ID NO: 2985786 - DNA, 25 bp, Homo sapien
ggaccacaggcgcacttggctaatt

SEQ ID NO: 2985787 - DNA, 25 bp, Homo sapien
cagtagcatgatcacggctgactgt

SEQ ID NO: 2985788 - DNA, 25 bp, Homo sapien
cctcgacttcccaggctcaagtgat

SEQ ID NO: 2985789 - DNA, 25 bp, Homo sapien
catcctggattcggatattgagggc

SEQ ID NO: 2985790 - DNA, 25 bp, Homo sapien
tcctggattcggatattgagggccg

SEQ ID NO: 2985791 - DNA, 25 bp, Homo sapien
cctggattcggatattgagggccgc

SEQ ID NO: 2985792 - DNA, 25 bp, Homo sapien
ctggattcggatattgagggccgct

SEQ ID NO: 2985793 - DNA, 25 bp, Homo sapien
cagggactaagccatcagaggtcag

SEQ ID NO: 2985794 - DNA, 25 bp, Homo sapien
actaagccatcagaggtcagcctcg

SEQ ID NO: 2985795 - DNA, 25 bp, Homo sapien
taagccatcagaggtcagcctcgcc

SEQ ID NO: 2985796 - DNA, 25 bp, Homo sapien
ggactaagccatcagaggtcagcct

SEQ ID NO: 2985797 - DNA, 25 bp, Homo sapien
gtgccgtgtcgatgatgtttctggt

SEQ ID NO: 2985798 - DNA, 25 bp, Homo sapien
agtggtgccgtgtcgatgatgtttc

SEQ ID NO: 2985799 - DNA, 25 bp, Homo sapien
cgtccaaagtggtgccgtgtcgatg

SEQ ID NO: 2985800 - DNA, 25 bp, Homo sapien
caaagtggtgccgtgtcgatgatgt

SEQ ID NO: 2985801 - DNA, 25 bp, Homo sapien
gctgcaggccgtggtagtcggtgta

SEQ ID NO: 2985802 - DNA, 25 bp, Homo sapien
gggcatggtgagcgggcagcttccc

SEQ ID NO: 2985803 - DNA, 25 bp, Homo sapien
ggtagtcggtgtagatgaggtcgaa

SEQ ID NO: 2985804 - DNA, 25 bp, Homo sapien
aggagagtcccatgtgccgcttcat

SEQ ID NO: 2985805 - DNA, 25 bp, Homo sapien
cagcgtggcgtactcctcgtggttg

SEQ ID NO: 2985806 - DNA, 25 bp, Homo sapien
ccagttggtccggtagccgtgcagc

SEQ ID NO: 2985807 - DNA, 25 bp, Homo sapien
ggttccgtcccgaaggtgtcgatga

SEQ ID NO: 2985808 - DNA, 25 bp, Homo sapien
ctcgtggttgtacgcaggttccgtc

SEQ ID NO: 2985809 - DNA, 25 bp, Homo sapien
cgcactgggatcccgaataaaccgt

SEQ ID NO: 2985810 - DNA, 25 bp, Homo sapien
agccctgccttctgcgcactgggat

SEQ ID NO: 2985811 - DNA, 25 bp, Homo sapien
aaccgtttattgagtccaaggatat

SEQ ID NO: 2985812 - DNA, 25 bp, Homo sapien
tatttaatctaccttcccgcacgga

SEQ ID NO: 2985813 - DNA, 25 bp, Homo sapien
cagaaggaatggggtcaccaaacaa

SEQ ID NO: 2985814 - DNA, 25 bp, Homo sapien
tgcagcccgagcacgcagaaggaat

SEQ ID NO: 2985815 - DNA, 25 bp, Homo sapien
gcagcccgagcacgcagaaggaatg

SEQ ID NO: 2985816 - DNA, 25 bp, Homo sapien
gcccgagcacgcagaaggaatgggg

SEQ ID NO: 2985817 - DNA, 25 bp, Homo sapien
tccttgccgtacaccacggccatgt

SEQ ID NO: 2985818 - DNA, 25 bp, Homo sapien
ccgcttctccgtctcgttgagctcc

SEQ ID NO: 2985819 - DNA, 25 bp, Homo sapien
cgcctttgatgagccgcttctccgt

SEQ ID NO: 2985820 - DNA, 25 bp, Homo sapien
ctcctcggacacgaagcccatgaag

SEQ ID NO: 2985821 - DNA, 25 bp, Homo sapien
gggccgctggctctcgtagtacacg

SEQ ID NO: 2985822 - DNA, 25 bp, Homo sapien
aagaggccgtggttcttcacaaagg

SEQ ID NO: 2985823 - DNA, 25 bp, Homo sapien
gaaactcaggctgcggtaagaggcc

SEQ ID NO: 2985824 - DNA, 25 bp, Homo sapien
ggtgccatggatctccatgtatttg

SEQ ID NO: 2985825 - DNA, 25 bp, Homo sapien
gaagatgcaaccattggcgatggcc

SEQ ID NO: 2985826 - DNA, 25 bp, Homo sapien
gtgggcttgcctcggaagaactcgt

SEQ ID NO: 2985827 - DNA, 25 bp, Homo sapien
aagcgggactgcaggaagatgcaac

SEQ ID NO: 2985828 - DNA, 25 bp, Homo sapien
ctcgtaggggaagccaaacccgatg

SEQ ID NO: 2985829 - DNA, 25 bp, Homo sapien
tggggcttgccgatgaagttctccg

SEQ ID NO: 2985830 - DNA, 25 bp, Homo sapien
cataatggccttgatggctgcttca

SEQ ID NO: 2985831 - DNA, 25 bp, Homo sapien
ttgtagtcgactgtccacacgtggg

SEQ ID NO: 2985832 - DNA, 25 bp, Homo sapien
agttctccgcgtagggatgctggga

SEQ ID NO: 2985833 - DNA, 25 bp, Homo sapien
tgaatggccttgctctggacacaga

SEQ ID NO: 2985834 - DNA, 25 bp, Homo sapien
cattaggtctaattacaggtgtgcg

SEQ ID NO: 2985835 - DNA, 25 bp, Homo sapien
gacaggtgctgatcctgcctgggaa

SEQ ID NO: 2985836 - DNA, 25 bp, Homo sapien
ggtgtgcgccctaatcagtctcgac

SEQ ID NO: 2985837 - DNA, 25 bp, Homo sapien
ggtgggctctcacatcctgtgccat

SEQ ID NO: 2985838 - DNA, 25 bp, Homo sapien
ggctctcacatcctgtgccatgccc

SEQ ID NO: 2985839 - DNA, 25 bp, Homo sapien
tggtgggctctcacatcctgtgcca

SEQ ID NO: 2985840 - DNA, 25 bp, Homo sapien
atgggcagacacatggggcgggaga

SEQ ID NO: 2985841 - DNA, 25 bp, Homo sapien
tgggcagacacatggggcgggagaa

SEQ ID NO: 2985842 - DNA, 25 bp, Homo sapien
gcagacacatggggcgggagaaggc

SEQ ID NO: 2985843 - DNA, 25 bp, Homo sapien
gggcagacacatggggcgggagaag

SEQ ID NO: 2985844 - DNA, 25 bp, Homo sapien
cctcgcaggtgtactcgtagggtag

SEQ ID NO: 2985845 - DNA, 25 bp, Homo sapien
gatgtaggcgtggatccgctccagc

SEQ ID NO: 2985846 - DNA, 25 bp, Homo sapien
agcatcccctcgcaggtgtactcgt

SEQ ID NO: 2985847 - DNA, 25 bp, Homo sapien
ctggtgctggatgtaggcgtggatc

SEQ ID NO: 2985848 - DNA, 25 bp, Homo sapien
ctgcggggcgtgggcctctggtagg

SEQ ID NO: 2985849 - DNA, 25 bp, Homo sapien
ggggcgtgggcctctggtagggcag

SEQ ID NO: 2985850 - DNA, 25 bp, Homo sapien
tgcggggcgtgggcctctggtaggg

SEQ ID NO: 2985851 - DNA, 25 bp, Homo sapien
cggggcgtgggcctctggtagggca

SEQ ID NO: 2985852 - DNA, 25 bp, Homo sapien
ggtccaggcaggtgtcggtgcaggc

SEQ ID NO: 2985853 - DNA, 25 bp, Homo sapien
aggtgtcggtgcaggccctcccagg

SEQ ID NO: 2985854 - DNA, 25 bp, Homo sapien
cccactcgaggtgggtggcattggg

SEQ ID NO: 2985855 - DNA, 25 bp, Homo sapien
agctggtgttccgagcccactcgag

SEQ ID NO: 2985856 - DNA, 25 bp, Homo sapien
ttggagccggcgcagctgaagagca

SEQ ID NO: 2985857 - DNA, 25 bp, Homo sapien
tggcccttgcggaagtcgcggcagg

SEQ ID NO: 2985858 - DNA, 25 bp, Homo sapien
cagagccggcggtacttggtgttgg

SEQ ID NO: 2985859 - DNA, 25 bp, Homo sapien
ccgggtacaggtggttcatctccga

SEQ ID NO: 2985860 - DNA, 25 bp, Homo sapien
cacagacagccctggcacaaggcca

SEQ ID NO: 2985861 - DNA, 25 bp, Homo sapien
acagacagccctggcacaaggccac

SEQ ID NO: 2985862 - DNA, 25 bp, Homo sapien
tcacagacagccctggcacaaggcc

SEQ ID NO: 2985863 - DNA, 25 bp, Homo sapien
gagtcagcacctgcggaagtggcta

SEQ ID NO: 2985864 - DNA, 25 bp, Homo sapien
gccactcggagaaggacagctagat

SEQ ID NO: 2985865 - DNA, 25 bp, Homo sapien
gtagggacaaggactcggcactgat

SEQ ID NO: 2985866 - DNA, 25 bp, Homo sapien
gagaaacaattcaaccagggtctgg

SEQ ID NO: 2985867 - DNA, 25 bp, Homo sapien
taggctcatagattggaacacatgg

SEQ ID NO: 2985868 - DNA, 25 bp, Homo sapien
tgtcaaaacacgtagaatacacggc

SEQ ID NO: 2985869 - DNA, 25 bp, Homo sapien
gggctccaactacctgatgatctgg

SEQ ID NO: 2985870 - DNA, 25 bp, Homo sapien
caatggaaccactctgtatggtgcc

SEQ ID NO: 2985871 - DNA, 25 bp, Homo sapien
tcatcctcaggacgaacctccgcac

SEQ ID NO: 2985872 - DNA, 25 bp, Homo sapien
gactgaaggcccactctgatctttg

SEQ ID NO: 2985873 - DNA, 25 bp, Homo sapien
ggcccactctgatctttgggaccac

SEQ ID NO: 2985874 - DNA, 25 bp, Homo sapien
tccccatgctttccggctgtaccct

SEQ ID NO: 2985875 - DNA, 25 bp, Homo sapien
tcctgtattcctacccagtgccagg

SEQ ID NO: 2985876 - DNA, 25 bp, Homo sapien
ttcctgtattcctacccagtgccag

SEQ ID NO: 2985877 - DNA, 25 bp, Homo sapien
tgtccctgaacttcaaccacgtctt

SEQ ID NO: 2985878 - DNA, 25 bp, Homo sapien
gaacttcaaccacgtcttctctgtg

SEQ ID NO: 2985879 - DNA, 25 bp, Homo sapien
cttcaaccacgtcttctctgtgtta

SEQ ID NO: 2985880 - DNA, 25 bp, Homo sapien
ctgaacttcaaccacgtcttctctg

SEQ ID NO: 2985881 - DNA, 25 bp, Homo sapien
ggagttctcgttattaggaggaatc

SEQ ID NO: 2985882 - DNA, 25 bp, Homo sapien
cagcgggagggggagttctcgttat

SEQ ID NO: 2985883 - DNA, 25 bp, Homo sapien
ttctcgttattaggaggaatcttgc

SEQ ID NO: 2985884 - DNA, 25 bp, Homo sapien
ctcgttattaggaggaatcttgcgc

SEQ ID NO: 2985885 - DNA, 25 bp, Homo sapien
taggtgagtctagcatggttccatc

SEQ ID NO: 2985886 - DNA, 25 bp, Homo sapien
tgtgagtcgtgtctttcttggcacc

SEQ ID NO: 2985887 - DNA, 25 bp, Homo sapien
attgcagctgatcatgctccacctg

SEQ ID NO: 2985888 - DNA, 25 bp, Homo sapien
caatagggctcttccactgaaggtg

SEQ ID NO: 2985889 - DNA, 25 bp, Homo sapien
actccgaactcgactgtctgctttg

SEQ ID NO: 2985890 - DNA, 25 bp, Homo sapien
ttgcttcgggaatcactgaagcttt

SEQ ID NO: 2985891 - DNA, 25 bp, Homo sapien
tgaagctttccttccggccacagct

SEQ ID NO: 2985892 - DNA, 25 bp, Homo sapien
actgtctgctttgcttcgggaatca

SEQ ID NO: 2985893 - DNA, 25 bp, Homo sapien
agctggctatttttgccggcggccg

SEQ ID NO: 2985894 - DNA, 25 bp, Homo sapien
tgcagctccacatatcacaggtatg

SEQ ID NO: 2985895 - DNA, 25 bp, Homo sapien
tgtgaggctccaacatgacaatgtg

SEQ ID NO: 2985896 - DNA, 25 bp, Homo sapien
cacaggtatgccactagacggagct

SEQ ID NO: 2985897 - DNA, 25 bp, Homo sapien
ccttttacggcagtctgggaacttg

SEQ ID NO: 2985898 - DNA, 25 bp, Homo sapien
gatctgaccgcctttcatcaccttg

SEQ ID NO: 2985899 - DNA, 25 bp, Homo sapien
tggccctgttgatctgaccgccttt

SEQ ID NO: 2985900 - DNA, 25 bp, Homo sapien
tgaccgcctttcatcaccttggtgc

SEQ ID NO: 2985901 - DNA, 25 bp, Homo sapien
ctgttgatctgaccgcctttcatca

SEQ ID NO: 2985902 - DNA, 25 bp, Homo sapien
aattccgcaggctagggccgatggc

SEQ ID NO: 2985903 - DNA, 25 bp, Homo sapien
ggcagagctctgttatcgtcccggg

SEQ ID NO: 2985904 - DNA, 25 bp, Homo sapien
agtcatcctgcggactgcgagtcgg

SEQ ID NO: 2985905 - DNA, 25 bp, Homo sapien
gcgagagcgggtttcccctccaaca

SEQ ID NO: 2985906 - DNA, 25 bp, Homo sapien
gatgggagaagccgtccccgaaatc

SEQ ID NO: 2985907 - DNA, 25 bp, Homo sapien
tgcgatgggagaagccgtccccgaa

SEQ ID NO: 2985908 - DNA, 25 bp, Homo sapien
ttgcgatgggagaagccgtccccga

SEQ ID NO: 2985909 - DNA, 25 bp, Homo sapien
gcgatgggagaagccgtccccgaaa

SEQ ID NO: 2985910 - DNA, 25 bp, Homo sapien
caatttcggtggctgtgtgcggacc

SEQ ID NO: 2985911 - DNA, 25 bp, Homo sapien
ttaccacactcctagaaacctgggc

SEQ ID NO: 2985912 - DNA, 25 bp, Homo sapien
gacaaaagtcattcgacgcttacca

SEQ ID NO: 2985913 - DNA, 25 bp, Homo sapien
taacataatgtgctttaaaaggaca

SEQ ID NO: 2985914 - DNA, 25 bp, Homo sapien
caggaagaaaatagtggttgctgca

SEQ ID NO: 2985915 - DNA, 25 bp, Homo sapien
tgctgaggtcacttcgaatgctctc

SEQ ID NO: 2985916 - DNA, 25 bp, Homo sapien
tgcatgttttcagccaatcgtcggg

SEQ ID NO: 2985917 - DNA, 25 bp, Homo sapien
tgctctcatcaacgaggggcaggaa

SEQ ID NO: 2985918 - DNA, 25 bp, Homo sapien
aacactttgtcaccatgcttgacat

SEQ ID NO: 2985919 - DNA, 25 bp, Homo sapien
acactttgtcaccatgcttgacata

SEQ ID NO: 2985920 - DNA, 25 bp, Homo sapien
cactttgtcaccatgcttgacatac

SEQ ID NO: 2985921 - DNA, 25 bp, Homo sapien
gaacactttgtcaccatgcttgaca

SEQ ID NO: 2985922 - DNA, 25 bp, Homo sapien
ccacaacttggcaggctcaacaaca

SEQ ID NO: 2985923 - DNA, 25 bp, Homo sapien
tctctgatactaactacaaccattt

SEQ ID NO: 2985924 - DNA, 25 bp, Homo sapien
gaatgaaagacatgacagtaacatt

SEQ ID NO: 2985925 - DNA, 25 bp, Homo sapien
gggctctctgatactaactacaacc

SEQ ID NO: 2985926 - DNA, 25 bp, Homo sapien
tgaaagacatgacagtaacattgtt

SEQ ID NO: 2985927 - DNA, 25 bp, Homo sapien
ctaactgggttgtagttcccagaga

SEQ ID NO: 2985928 - DNA, 25 bp, Homo sapien
catttaaccttgtctccctaactgg

SEQ ID NO: 2985929 - DNA, 25 bp, Homo sapien
atctctgtatccgtaacatttaaca

SEQ ID NO: 2985930 - DNA, 25 bp, Homo sapien
gtaacatttaacatgatgtcaggcc

SEQ ID NO: 2985931 - DNA, 25 bp, Homo sapien
cagattctagctcgagggtttcatc

SEQ ID NO: 2985932 - DNA, 25 bp, Homo sapien
gattctagctcgagggtttcatcct

SEQ ID NO: 2985933 - DNA, 25 bp, Homo sapien
tccttcagattctagctcgagggtt

SEQ ID NO: 2985934 - DNA, 25 bp, Homo sapien
ttcagattctagctcgagggtttca

SEQ ID NO: 2985935 - DNA, 25 bp, Homo sapien
gtggcctccgcctctaagtgctaag

SEQ ID NO: 2985936 - DNA, 25 bp, Homo sapien
tgggatcagaaaccccacgtggaca

SEQ ID NO: 2985937 - DNA, 25 bp, Homo sapien
tacacaacagggtcttaagcagtca

SEQ ID NO: 2985938 - DNA, 25 bp, Homo sapien
gcccagcagagacaaaaccagatat

SEQ ID NO: 2985939 - DNA, 25 bp, Homo sapien
cctctcctgagtgctttataggatt

SEQ ID NO: 2985940 - DNA, 25 bp, Homo sapien
ctcaaatgtaccaatctgggccagt

SEQ ID NO: 2985941 - DNA, 25 bp, Homo sapien
ggtgacaacaacatagctaccacgt

SEQ ID NO: 2985942 - DNA, 25 bp, Homo sapien
taccacgtctaaagtgctcccaggc

SEQ ID NO: 2985943 - DNA, 25 bp, Homo sapien
agtaagtcttacctcggctctcctg

SEQ ID NO: 2985944 - DNA, 25 bp, Homo sapien
ggaaggcatctttccgtggcaaata

SEQ ID NO: 2985945 - DNA, 25 bp, Homo sapien
ctgaaaatgctttgtgccgggcgcg

SEQ ID NO: 2985946 - DNA, 25 bp, Homo sapien
gcaccccagggaatttcacagctga

SEQ ID NO: 2985947 - DNA, 25 bp, Homo sapien
ttagctggttgtgggggcatgtgcc

SEQ ID NO: 2985948 - DNA, 25 bp, Homo sapien
aaattagctggttgtgggggcatgt

SEQ ID NO: 2985949 - DNA, 25 bp, Homo sapien
tgtaatcccagttacttgggaggct

SEQ ID NO: 2985950 - DNA, 25 bp, Homo sapien
gaggcaggagaatcgcttgaacctg

SEQ ID NO: 2985951 - DNA, 25 bp, Homo sapien
tattccagaaatgtcaatatacact

SEQ ID NO: 2985952 - DNA, 25 bp, Homo sapien
tactttgggcaattaatacatttcc

SEQ ID NO: 2985953 - DNA, 25 bp, Homo sapien
cactcttgtgagtggcccaaattgt

SEQ ID NO: 2985954 - DNA, 25 bp, Homo sapien
gaatgtaggtaactgtttatcacag

SEQ ID NO: 2985955 - DNA, 25 bp, Homo sapien
tttcccgatgttctcaccagctggc

SEQ ID NO: 2985956 - DNA, 25 bp, Homo sapien
caaatactggtacgtgttaacactg

SEQ ID NO: 2985957 - DNA, 25 bp, Homo sapien
tcatgccagagacacttctaaaccc

SEQ ID NO: 2985958 - DNA, 25 bp, Homo sapien
tgcacactgtctgggacttcaaata

SEQ ID NO: 2985959 - DNA, 25 bp, Homo sapien
tccaaatactgcaggacatgtggct

SEQ ID NO: 2985960 - DNA, 25 bp, Homo sapien
gaagggcacgcgatctttatgtgaa

SEQ ID NO: 2985961 - DNA, 25 bp, Homo sapien
tagacctgggatcctctcaatgggc

SEQ ID NO: 2985962 - DNA, 25 bp, Homo sapien
catgagccaaaaagacggtgtcccc

SEQ ID NO: 2985963 - DNA, 25 bp, Homo sapien
gctgacagtctgtgaacatgtgacc

SEQ ID NO: 2985964 - DNA, 25 bp, Homo sapien
tgcataaccactgttacataaccct

SEQ ID NO: 2985965 - DNA, 25 bp, Homo sapien
ctgctcgggctgtagttctaacgtg

SEQ ID NO: 2985966 - DNA, 25 bp, Homo sapien
ggggctcctttcattaccattgcaa

SEQ ID NO: 2985967 - DNA, 25 bp, Homo sapien
gggccagccacgcatagaaggtaaa

SEQ ID NO: 2985968 - DNA, 25 bp, Homo sapien
cttacggagcctcgtgtgggagtca

SEQ ID NO: 2985969 - DNA, 25 bp, Homo sapien
tgtgagcccggccatgcctttggat

SEQ ID NO: 2985970 - DNA, 25 bp, Homo sapien
gaaggagactcacgtaccttaggat

SEQ ID NO: 2985971 - DNA, 25 bp, Homo sapien
ttattctgccatccaccgttgtggg

SEQ ID NO: 2985972 - DNA, 25 bp, Homo sapien
caggcatctgtgatagtgtcagcaa

SEQ ID NO: 2985973 - DNA, 25 bp, Homo sapien
caaggagggcacctttacgtcaccg

SEQ ID NO: 2985974 - DNA, 25 bp, Homo sapien
gaaacctttagaacgccactgtgga

SEQ ID NO: 2985975 - DNA, 25 bp, Homo sapien
gaaatcaggcgagagaaatagcagc

SEQ ID NO: 2985976 - DNA, 25 bp, Homo sapien
gacttcccaagaaatcaggcgagag

SEQ ID NO: 2985977 - DNA, 25 bp, Homo sapien
gcaaaccaacactgagttgttatct

SEQ ID NO: 2985978 - DNA, 25 bp, Homo sapien
tcaaaatggagtcacccgtgctcag

SEQ ID NO: 2985979 - DNA, 25 bp, Homo sapien
ctcactgcaaactcccgggttcaca

SEQ ID NO: 2985980 - DNA, 25 bp, Homo sapien
gtgcctgccaacacgcccagttaat

SEQ ID NO: 2985981 - DNA, 25 bp, Homo sapien
tcactgcaaactcccgggttcacac

SEQ ID NO: 2985982 - DNA, 25 bp, Homo sapien
caggtgcctgccaacacgcccagtt

SEQ ID NO: 2985983 - DNA, 25 bp, Homo sapien
tcaagcctgctgatgcatttttggg

SEQ ID NO: 2985984 - DNA, 25 bp, Homo sapien
gagcccagccttaactcgttcttta

SEQ ID NO: 2985985 - DNA, 25 bp, Homo sapien
catttttgggtgcattcagcctgtg

SEQ ID NO: 2985986 - DNA, 25 bp, Homo sapien
gcaataccaatactctgttctcaag

SEQ ID NO: 2985987 - DNA, 25 bp, Homo sapien
catccagggcgccctttgctgattt

SEQ ID NO: 2985988 - DNA, 25 bp, Homo sapien
atccagggcgccctttgctgatttt

SEQ ID NO: 2985989 - DNA, 25 bp, Homo sapien
cccagtgatacacagctaaggaagt

SEQ ID NO: 2985990 - DNA, 25 bp, Homo sapien
gcttgtgggacctgtttggttcctg

SEQ ID NO: 2985991 - DNA, 25 bp, Homo sapien
tgacccagtgatacacagctaagga

SEQ ID NO: 2985992 - DNA, 25 bp, Homo sapien
cagtgatacacagctaaggaagtgt

SEQ ID NO: 2985993 - DNA, 25 bp, Homo sapien
gagactatgtctcagaaaaaaaaaa

SEQ ID NO: 2985994 - DNA, 25 bp, Homo sapien
gcgacagaacgagactatgtctcag

SEQ ID NO: 2985995 - DNA, 25 bp, Homo sapien
ggcgacagaacgagactatgtctca

SEQ ID NO: 2985996 - DNA, 25 bp, Homo sapien
cgacagaacgagactatgtctcaga

SEQ ID NO: 2985997 - DNA, 25 bp, Homo sapien
ggcataatcatagccgtctgcagca

SEQ ID NO: 2985998 - DNA, 25 bp, Homo sapien
gcataatcatagccgtctgcagcat

SEQ ID NO: 2985999 - DNA, 25 bp, Homo sapien
cataatcatagccgtctgcagcatc

SEQ ID NO: 2986000 - DNA, 25 bp, Homo sapien
tggcataatcatagccgtctgcagc

SEQ ID NO: 2986001 - DNA, 25 bp, Homo sapien
gcggggcagtctcggttccactgct

SEQ ID NO: 2986002 - DNA, 25 bp, Homo sapien
tccgcggggcagtctcggttccact

SEQ ID NO: 2986003 - DNA, 25 bp, Homo sapien
gttccactgctccgcgaccgtagct

SEQ ID NO: 2986004 - DNA, 25 bp, Homo sapien
gcgaccgtagctcgaccgccggttc

SEQ ID NO: 2986005 - DNA, 25 bp, Homo sapien
cacggggtggcgaggggcgctcata

SEQ ID NO: 2986006 - DNA, 25 bp, Homo sapien
ggacacggggtggcgaggggcgctc

SEQ ID NO: 2986007 - DNA, 25 bp, Homo sapien
ctgggacacggggtggcgaggggcg

SEQ ID NO: 2986008 - DNA, 25 bp, Homo sapien
acacggggtggcgaggggcgctcat

SEQ ID NO: 2986009 - DNA, 25 bp, Homo sapien
tgccgggccgatggcagccggggct

SEQ ID NO: 2986010 - DNA, 25 bp, Homo sapien
agaggcgccggactccacggagacc

SEQ ID NO: 2986011 - DNA, 25 bp, Homo sapien
cgagaggcgccggactccacggaga

SEQ ID NO: 2986012 - DNA, 25 bp, Homo sapien
cgtttcgggtgccgggccgatggca

SEQ ID NO: 2986013 - DNA, 25 bp, Homo sapien
cattaagaatggtactttatgctga

SEQ ID NO: 2986014 - DNA, 25 bp, Homo sapien
tcattaagaatggtactttatgctg

SEQ ID NO: 2986015 - DNA, 25 bp, Homo sapien
taagaatggtactttatgctgaaca

SEQ ID NO: 2986016 - DNA, 25 bp, Homo sapien
agaatggtactttatgctgaacatg

SEQ ID NO: 2986017 - DNA, 25 bp, Homo sapien
tggacttgccagtcctctgtctccc

SEQ ID NO: 2986018 - DNA, 25 bp, Homo sapien
ctggacttgccagtcctctgtctcc

SEQ ID NO: 2986019 - DNA, 25 bp, Homo sapien
tgtgataagtaaccacaatgcagaa

SEQ ID NO: 2986020 - DNA, 25 bp, Homo sapien
aatatatgtgataagtaaccacaat

SEQ ID NO: 2986021 - DNA, 25 bp, Homo sapien
tatgtgataagtaaccacaatgcag

SEQ ID NO: 2986022 - DNA, 25 bp, Homo sapien
tgataagtaaccacaatgcagaaac

SEQ ID NO: 2986023 - DNA, 25 bp, Homo sapien
ttgcaatacaacagcaaccctctca

SEQ ID NO: 2986024 - DNA, 25 bp, Homo sapien
gattgcaatacaacagcaaccctct

SEQ ID NO: 2986025 - DNA, 25 bp, Homo sapien
caatacaacagcaaccctctcacac

SEQ ID NO: 2986026 - DNA, 25 bp, Homo sapien
gcaatacaacagcaaccctctcaca

SEQ ID NO: 2986027 - DNA, 25 bp, Homo sapien
tcaaaggggtatttgtacaccctca

SEQ ID NO: 2986028 - DNA, 25 bp, Homo sapien
caccctcactggggactggtatttc

SEQ ID NO: 2986029 - DNA, 25 bp, Homo sapien
agccataattaattcaaaggggtat

SEQ ID NO: 2986030 - DNA, 25 bp, Homo sapien
ctggggactggtatttctgcaccat

SEQ ID NO: 2986031 - DNA, 25 bp, Homo sapien
gatcatcaaattctaacactgtact

SEQ ID NO: 2986032 - DNA, 25 bp, Homo sapien
tttacacactctagatacggttcat

SEQ ID NO: 2986033 - DNA, 25 bp, Homo sapien
ccatggagacgaacaataaatctat

SEQ ID NO: 2986034 - DNA, 25 bp, Homo sapien
agttcaagtgatgccatggagacga

SEQ ID NO: 2986035 - DNA, 25 bp, Homo sapien
cctacggtaatctaaaaatgactgg

SEQ ID NO: 2986036 - DNA, 25 bp, Homo sapien
tgagtaaaactccatcgcacagtgc

SEQ ID NO: 2986037 - DNA, 25 bp, Homo sapien
cacgttttcatcaggtgtgtgctca

SEQ ID NO: 2986038 - DNA, 25 bp, Homo sapien
ttcacccataggcagagcactcttc

SEQ ID NO: 2986039 - DNA, 25 bp, Homo sapien
gaaattaaccactacctcagaacaa

SEQ ID NO: 2986040 - DNA, 25 bp, Homo sapien
gcaaggtaaacgtcacaattttgaa

SEQ ID NO: 2986041 - DNA, 25 bp, Homo sapien
gaatttgaatttcgagttcttctgt

SEQ ID NO: 2986042 - DNA, 25 bp, Homo sapien
tgaaaatagtgaagtaagggaaata

SEQ ID NO: 2986043 - DNA, 25 bp, Homo sapien
cgccaccgtgcgttctagtgaggca

SEQ ID NO: 2986044 - DNA, 25 bp, Homo sapien
taagttgagtgaggcgttttctccc

SEQ ID NO: 2986045 - DNA, 25 bp, Homo sapien
tagtgaggcacattcgctttctgac

SEQ ID NO: 2986046 - DNA, 25 bp, Homo sapien
ctctgaatgctgaactgaaaagggc

SEQ ID NO: 2986047 - DNA, 25 bp, Homo sapien
cccgcgcttgggagaacaagacaaa

SEQ ID NO: 2986048 - DNA, 25 bp, Homo sapien
gaaactcccattgcaagtgaaagta

SEQ ID NO: 2986049 - DNA, 25 bp, Homo sapien
acagactatgtccttagcacccgcg

SEQ ID NO: 2986050 - DNA, 25 bp, Homo sapien
cacaaaatagtatgagagcaacact

SEQ ID NO: 2986051 - DNA, 25 bp, Homo sapien
ccagaggaacgacatgggcacagct

SEQ ID NO: 2986052 - DNA, 25 bp, Homo sapien
gcagctagctgccacaaagatggag

SEQ ID NO: 2986053 - DNA, 25 bp, Homo sapien
tgaaaatctgacgtgcacaggacct

SEQ ID NO: 2986054 - DNA, 25 bp, Homo sapien
tatatgagtcgcgagtccatcctgg

SEQ ID NO: 2986055 - DNA, 25 bp, Homo sapien
aagaaagtccagatcagaaggggaa

SEQ ID NO: 2986056 - DNA, 25 bp, Homo sapien
cagacggatacagcagtgcccgtgg

SEQ ID NO: 2986057 - DNA, 25 bp, Homo sapien
ggtccggtgcagaaagcccctcgtc

SEQ ID NO: 2986058 - DNA, 25 bp, Homo sapien
gttggcctccaatggcctcagagag

SEQ ID NO: 2986059 - DNA, 25 bp, Homo sapien
tgggaaaggcagtcgcccccttgcc

SEQ ID NO: 2986060 - DNA, 25 bp, Homo sapien
actcctttgctccaagagttccaga

SEQ ID NO: 2986061 - DNA, 25 bp, Homo sapien
ccaacaccgggagggctgtgagata

SEQ ID NO: 2986062 - DNA, 25 bp, Homo sapien
tctgcatcaacccatcggagcttct

SEQ ID NO: 2986063 - DNA, 25 bp, Homo sapien
ggagcttcttccattcgtacaccca

SEQ ID NO: 2986064 - DNA, 25 bp, Homo sapien
cactgcccacgaacatcggaatcaa

SEQ ID NO: 2986065 - DNA, 25 bp, Homo sapien
tgtcactgcccacgaacatcggaat

SEQ ID NO: 2986066 - DNA, 25 bp, Homo sapien
agtgtcactgcccacgaacatcgga

SEQ ID NO: 2986067 - DNA, 25 bp, Homo sapien
gcccacgaacatcggaatcaaagga

SEQ ID NO: 2986068 - DNA, 25 bp, Homo sapien
caggacgccctttccctccaagacg

SEQ ID NO: 2986069 - DNA, 25 bp, Homo sapien
caggacgccctctcccaccaggacg

SEQ ID NO: 2986070 - DNA, 25 bp, Homo sapien
caccaggacgccctttccctccaag

SEQ ID NO: 2986071 - DNA, 25 bp, Homo sapien
gacgccctctcccaccaggacgccc

SEQ ID NO: 2986072 - DNA, 25 bp, Homo sapien
acgtttcattataagcctcaatgtg

SEQ ID NO: 2986073 - DNA, 25 bp, Homo sapien
gatgacccgattggaaaacgtttca

SEQ ID NO: 2986074 - DNA, 25 bp, Homo sapien
ggaaaacgtttcattataagcctca

SEQ ID NO: 2986075 - DNA, 25 bp, Homo sapien
gcaatgctcattaatgatgacccga

SEQ ID NO: 2986076 - DNA, 25 bp, Homo sapien
aaaacaggtccaatcttcattttca

SEQ ID NO: 2986077 - DNA, 25 bp, Homo sapien
taatatctaaacttgcagactgttc

SEQ ID NO: 2986078 - DNA, 25 bp, Homo sapien
aaacttgcagactgttcaaaacagg

SEQ ID NO: 2986079 - DNA, 25 bp, Homo sapien
ttaatgttgctggtatattgtttca

SEQ ID NO: 2986080 - DNA, 25 bp, Homo sapien
aggcggactccaacggggcacaaag

SEQ ID NO: 2986081 - DNA, 25 bp, Homo sapien
tcttcttctaattggcgaaggtagt

SEQ ID NO: 2986082 - DNA, 25 bp, Homo sapien
cagcttctgggatgacgacggccat

SEQ ID NO: 2986083 - DNA, 25 bp, Homo sapien
gaggtcgtgatggaaggcggactcc

SEQ ID NO: 2986084 - DNA, 25 bp, Homo sapien
acagagagaaaacggcaacgccgac

SEQ ID NO: 2986085 - DNA, 25 bp, Homo sapien
tgttccaaggaagcgggaacaggca

SEQ ID NO: 2986086 - DNA, 25 bp, Homo sapien
tgctctcgggatgaagcccctgcca

SEQ ID NO: 2986087 - DNA, 25 bp, Homo sapien
acgccgacttccctagccttgctct

SEQ ID NO: 2986088 - DNA, 25 bp, Homo sapien
tggcgaagtctaatgaggcagctct

SEQ ID NO: 2986089 - DNA, 25 bp, Homo sapien
cctggagccactggcgaagtctaat

SEQ ID NO: 2986090 - DNA, 25 bp, Homo sapien
cactggcgaagtctaatgaggcagc

SEQ ID NO: 2986091 - DNA, 25 bp, Homo sapien
gccactggcgaagtctaatgaggca

SEQ ID NO: 2986092 - DNA, 25 bp, Homo sapien
ctggcttctgaatggaaaccttcgt

SEQ ID NO: 2986093 - DNA, 25 bp, Homo sapien
cgtctctccgggcagacgacaggtc

SEQ ID NO: 2986094 - DNA, 25 bp, Homo sapien
aaagagaattaaacatggatgatgt

SEQ ID NO: 2986095 - DNA, 25 bp, Homo sapien
gaaaccttcgtagtgccagagacaa

SEQ ID NO: 2986096 - DNA, 25 bp, Homo sapien
gctttctccacgtcaaagactgaca

SEQ ID NO: 2986097 - DNA, 25 bp, Homo sapien
caatattaaaatcccgtgcacggag

SEQ ID NO: 2986098 - DNA, 25 bp, Homo sapien
cccgtgcacggaggaaccgaagaat

SEQ ID NO: 2986099 - DNA, 25 bp, Homo sapien
cggaggaaccgaagaatatgctcat

SEQ ID NO: 2986100 - DNA, 25 bp, Homo sapien
atctgccccagcctgagcacgtaga

SEQ ID NO: 2986101 - DNA, 25 bp, Homo sapien
gcagggcttcctccccgagcgctct

SEQ ID NO: 2986102 - DNA, 25 bp, Homo sapien
cgagcgctctcaccaagcctttggt

SEQ ID NO: 2986103 - DNA, 25 bp, Homo sapien
tcaccaagcctttggtgtccatctg

SEQ ID NO: 2986104 - DNA, 25 bp, Homo sapien
catgtgtggcaaaggtaacggctat

SEQ ID NO: 2986105 - DNA, 25 bp, Homo sapien
taaaactaccgcgtccagctatgga

SEQ ID NO: 2986106 - DNA, 25 bp, Homo sapien
tggaagagggacactaacagcgtat

SEQ ID NO: 2986107 - DNA, 25 bp, Homo sapien
tgaagcacagaggtatccccagatg

SEQ ID NO: 2986108 - DNA, 25 bp, Homo sapien
tgataggccgaccaaagacttttgt

SEQ ID NO: 2986109 - DNA, 25 bp, Homo sapien
gcccttcttcatttatggagagaac

SEQ ID NO: 2986110 - DNA, 25 bp, Homo sapien
ttttgtattctcttcgcatcgcctt

SEQ ID NO: 2986111 - DNA, 25 bp, Homo sapien
gtattctcttcgcatcgccttagcc

SEQ ID NO: 2986112 - DNA, 25 bp, Homo sapien
ctaactgtctgtccctcgtcactgg

SEQ ID NO: 2986113 - DNA, 25 bp, Homo sapien
cacttcttgtctaccttttagagca

SEQ ID NO: 2986114 - DNA, 25 bp, Homo sapien
atatttaattcgttttctcagtaag

SEQ ID NO: 2986115 - DNA, 25 bp, Homo sapien
tcgtcactggcatattacatgttca

SEQ ID NO: 2986116 - DNA, 25 bp, Homo sapien
ggaccaaggcctgaaactgcaatta

SEQ ID NO: 2986117 - DNA, 25 bp, Homo sapien
cagtgtgctgtcctcgacgtgctaa

SEQ ID NO: 2986118 - DNA, 25 bp, Homo sapien
tgggctatgcttcaacagagagaga

SEQ ID NO: 2986119 - DNA, 25 bp, Homo sapien
cacaggatcagtgtggtaggaccaa

SEQ ID NO: 2986120 - DNA, 25 bp, Homo sapien
tcacaccaggtctccacaagtggcg

SEQ ID NO: 2986121 - DNA, 25 bp, Homo sapien
tgtctcagggtagttggcctccacc

SEQ ID NO: 2986122 - DNA, 25 bp, Homo sapien
cgatgatccgcagcagcgctttcac

SEQ ID NO: 2986123 - DNA, 25 bp, Homo sapien
ctgggcgcccgcaggatgagaaggc

SEQ ID NO: 2986124 - DNA, 25 bp, Homo sapien
aatctctttgtcgatgtaatccagc

SEQ ID NO: 2986125 - DNA, 25 bp, Homo sapien
ataatctctttgtcgatgtaatcca

SEQ ID NO: 2986126 - DNA, 25 bp, Homo sapien
tctctttgtcgatgtaatccagcag

SEQ ID NO: 2986127 - DNA, 25 bp, Homo sapien
taatctctttgtcgatgtaatccag

SEQ ID NO: 2986128 - DNA, 25 bp, Homo sapien
atcacctgagcccaccaagtcaggc

SEQ ID NO: 2986129 - DNA, 25 bp, Homo sapien
agagccggaccctgtctccataaaa

SEQ ID NO: 2986130 - DNA, 25 bp, Homo sapien
gcccaccaagtcaggctgctgagct

SEQ ID NO: 2986131 - DNA, 25 bp, Homo sapien
aaaatgtcatccagtctggggcaaa

SEQ ID NO: 2986132 - DNA, 25 bp, Homo sapien
gagttttgctctcaatagccacagg

SEQ ID NO: 2986133 - DNA, 25 bp, Homo sapien
tcctactaaaatgcgtgaggcactg

SEQ ID NO: 2986134 - DNA, 25 bp, Homo sapien
gtaaaacactctgcactactgagca

SEQ ID NO: 2986135 - DNA, 25 bp, Homo sapien
aacactggcagggtcgtaaaacact

SEQ ID NO: 2986136 - DNA, 25 bp, Homo sapien
ctgcagtccggtacagagatttggg

SEQ ID NO: 2986137 - DNA, 25 bp, Homo sapien
ctctgcagtccggtacagagatttg

SEQ ID NO: 2986138 - DNA, 25 bp, Homo sapien
cagctcctctgcagtccggtacaga

SEQ ID NO: 2986139 - DNA, 25 bp, Homo sapien
gctcctctgcagtccggtacagaga

SEQ ID NO: 2986140 - DNA, 25 bp, Homo sapien
catatggcatgcacaggaacacgga

SEQ ID NO: 2986141 - DNA, 25 bp, Homo sapien
aaacatggacaagagcgatagtgcc

SEQ ID NO: 2986142 - DNA, 25 bp, Homo sapien
tcactcgtgatgctacaggacagac

SEQ ID NO: 2986143 - DNA, 25 bp, Homo sapien
gccacgaaccttgtcctagctgaga

SEQ ID NO: 2986144 - DNA, 25 bp, Homo sapien
tgaaacgccacttcagaatgtcctt

SEQ ID NO: 2986145 - DNA, 25 bp, Homo sapien
attcagtgaggtacaagggtcctgt

SEQ ID NO: 2986146 - DNA, 25 bp, Homo sapien
actgaaacgccacttcagaatgtcc

SEQ ID NO: 2986147 - DNA, 25 bp, Homo sapien
agcagattcagtgaggtacaagggt

SEQ ID NO: 2986148 - DNA, 25 bp, Homo sapien
tctgctgtgcccttcagcgcgtggc

SEQ ID NO: 2986149 - DNA, 25 bp, Homo sapien
ggctcacacgagagaacagtggcga

SEQ ID NO: 2986150 - DNA, 25 bp, Homo sapien
aaagcagctgtgcagagttctgcag

SEQ ID NO: 2986151 - DNA, 25 bp, Homo sapien
aacttacacagcaccgacagagcta

SEQ ID NO: 2986152 - DNA, 25 bp, Homo sapien
cacacactctaagaggccaggtctt

SEQ ID NO: 2986153 - DNA, 25 bp, Homo sapien
aaacaccaaacactgtgagctcgta

SEQ ID NO: 2986154 - DNA, 25 bp, Homo sapien
tacatgagtggttcagaggactgcc

SEQ ID NO: 2986155 - DNA, 25 bp, Homo sapien
aggtccaagatctcccatacaccat

SEQ ID NO: 2986156 - DNA, 25 bp, Homo sapien
tgctacatgtcatgcaccaagctct

SEQ ID NO: 2986157 - DNA, 25 bp, Homo sapien
gtatggacggatctctttccccaga

SEQ ID NO: 2986158 - DNA, 25 bp, Homo sapien
agggaaacgctgaatgcgtatggac

SEQ ID NO: 2986159 - DNA, 25 bp, Homo sapien
tccattcaaccgctggatcctgcta

SEQ ID NO: 2986160 - DNA, 25 bp, Homo sapien
aaagaggcagcgttaggcagccacg

SEQ ID NO: 2986161 - DNA, 25 bp, Homo sapien
tgcgagcgcatcgtgctctccaggg

SEQ ID NO: 2986162 - DNA, 25 bp, Homo sapien
gatccacgagcaccaggccggcatg

SEQ ID NO: 2986163 - DNA, 25 bp, Homo sapien
tgaaaaagaggcagcgttaggcagc

SEQ ID NO: 2986164 - DNA, 25 bp, Homo sapien
tcccaagtgatgactgacgaggcat

SEQ ID NO: 2986165 - DNA, 25 bp, Homo sapien
taaacacaatgtcccctttgcacac

SEQ ID NO: 2986166 - DNA, 25 bp, Homo sapien
tgttcccacccggagaggtgatgct

SEQ ID NO: 2986167 - DNA, 25 bp, Homo sapien
tttgcacacgtcgaaatcccaagtg

SEQ ID NO: 2986168 - DNA, 25 bp, Homo sapien
gctgaaggcacgtcaccctaaagtg

SEQ ID NO: 2986169 - DNA, 25 bp, Homo sapien
tagctacggaaactatctcaatggg

SEQ ID NO: 2986170 - DNA, 25 bp, Homo sapien
taaagtgagccgtcaatccgtggaa

SEQ ID NO: 2986171 - DNA, 25 bp, Homo sapien
tgcctctaagaccactgaaacactg

SEQ ID NO: 2986172 - DNA, 25 bp, Homo sapien
caggatgtagaagcccggccacctg

SEQ ID NO: 2986173 - DNA, 25 bp, Homo sapien
tgcagggacgcaagcacgtcgtcca

SEQ ID NO: 2986174 - DNA, 25 bp, Homo sapien
ggcgcacgcaggcatgctgtggaat

SEQ ID NO: 2986175 - DNA, 25 bp, Homo sapien
gatcacctcggtgtagtacatcact

SEQ ID NO: 2986176 - DNA, 25 bp, Homo sapien
gagctaaagcaaaggcagtcagtcg

SEQ ID NO: 2986177 - DNA, 25 bp, Homo sapien
cagggagtcaccgtgccaacaaatg

SEQ ID NO: 2986178 - DNA, 25 bp, Homo sapien
gatggacatgagtaacccaccaggg

SEQ ID NO: 2986179 - DNA, 25 bp, Homo sapien
cacgcagacggcagtgtgagctaaa

SEQ ID NO: 2986180 - DNA, 25 bp, Homo sapien
tggactccaggctcgtcatggaacc

SEQ ID NO: 2986181 - DNA, 25 bp, Homo sapien
ggactccaggctcgtcatggaacct

SEQ ID NO: 2986182 - DNA, 25 bp, Homo sapien
ctggactccaggctcgtcatggaac

SEQ ID NO: 2986183 - DNA, 25 bp, Homo sapien
acaatgtcgccgctgggtgggcggg

SEQ ID NO: 2986184 - DNA, 25 bp, Homo sapien
tgggatcaaacgactacgtttacca

SEQ ID NO: 2986185 - DNA, 25 bp, Homo sapien
tgtcgccgctgggtgggcgggtgca

SEQ ID NO: 2986186 - DNA, 25 bp, Homo sapien
gactacgtttaccatctgagagcta

SEQ ID NO: 2986187 - DNA, 25 bp, Homo sapien
gagaccacgtcaatcctttaattgg

SEQ ID NO: 2986188 - DNA, 25 bp, Homo sapien
gaccacgtcaatcctttaattggta

SEQ ID NO: 2986189 - DNA, 25 bp, Homo sapien
agaccacgtcaatcctttaattggt

SEQ ID NO: 2986190 - DNA, 25 bp, Homo sapien
ccacgtcaatcctttaattggtaca

SEQ ID NO: 2986191 - DNA, 25 bp, Homo sapien
ggtccaaaggcaggtgatcacagca

SEQ ID NO: 2986192 - DNA, 25 bp, Homo sapien
ccctgaagtggatgcgagagctgct

SEQ ID NO: 2986193 - DNA, 25 bp, Homo sapien
caagacggcctcctagtggctggaa

SEQ ID NO: 2986194 - DNA, 25 bp, Homo sapien
taagggcctgtaccagatagagcag

SEQ ID NO: 2986195 - DNA, 25 bp, Homo sapien
cgcgctttccggaagcaaaggcttc

SEQ ID NO: 2986196 - DNA, 25 bp, Homo sapien
gcgctttccggaagcaaaggcttca

SEQ ID NO: 2986197 - DNA, 25 bp, Homo sapien
tactagccctacctactagccctac

SEQ ID NO: 2986198 - DNA, 25 bp, Homo sapien
cctacctactagccctacctactag

SEQ ID NO: 2986199 - DNA, 25 bp, Homo sapien
tagccctacctactagccctaccta

SEQ ID NO: 2986200 - DNA, 25 bp, Homo sapien
tacctactagccctacctactagcc

SEQ ID NO: 2986201 - DNA, 25 bp, Homo sapien
cctacctactagccctacctactag

SEQ ID NO: 2986202 - DNA, 25 bp, Homo sapien
tagccctacctactagccctaccta

SEQ ID NO: 2986203 - DNA, 25 bp, Homo sapien
tacctactagccctacctactagcc

SEQ ID NO: 2986204 - DNA, 25 bp, Homo sapien
tactagccctacctactagccctac

SEQ ID NO: 2986205 - DNA, 25 bp, Homo sapien
tactagccctacctactagccctac

SEQ ID NO: 2986206 - DNA, 25 bp, Homo sapien
tagccctacctactagccctaccta

SEQ ID NO: 2986207 - DNA, 25 bp, Homo sapien
tacctactagccctacctactagcc

SEQ ID NO: 2986208 - DNA, 25 bp, Homo sapien
ctacctactagccctacctactagc

SEQ ID NO: 2986209 - DNA, 25 bp, Homo sapien
aagcagcacagacgcgctactaacc

SEQ ID NO: 2986210 - DNA, 25 bp, Homo sapien
gcaccaggtggaagcagcacagacg

SEQ ID NO: 2986211 - DNA, 25 bp, Homo sapien
cagggaccaccttcaggcccttgtg

SEQ ID NO: 2986212 - DNA, 25 bp, Homo sapien
ttgtgatttgggaacaggaagcacc

SEQ ID NO: 2986213 - DNA, 25 bp, Homo sapien
gatggctgcaattcaaacagttcta

SEQ ID NO: 2986214 - DNA, 25 bp, Homo sapien
ggtcatgtgctttgagctcttcaag

SEQ ID NO: 2986215 - DNA, 25 bp, Homo sapien
cagcagcgttttaaaagagtggcaa

SEQ ID NO: 2986216 - DNA, 25 bp, Homo sapien
tactaaaggtagaaacacgatgcaa

SEQ ID NO: 2986217 - DNA, 25 bp, Homo sapien
atcagtattgtattaccaagtgagg

SEQ ID NO: 2986218 - DNA, 25 bp, Homo sapien
ccaagtgaggtaatatgtttacaaa

SEQ ID NO: 2986219 - DNA, 25 bp, Homo sapien
ttaccaagtgaggtaatatgtttac

SEQ ID NO: 2986220 - DNA, 25 bp, Homo sapien
tcagtattgtattaccaagtgaggt

SEQ ID NO: 2986221 - DNA, 25 bp, Homo sapien
ttctggaagcattcggttcatgtgc

SEQ ID NO: 2986222 - DNA, 25 bp, Homo sapien
gcattcggttcatgtgctcctctga

SEQ ID NO: 2986223 - DNA, 25 bp, Homo sapien
gccgcagagccttctggaagcattc

SEQ ID NO: 2986224 - DNA, 25 bp, Homo sapien
agccgcagagccttctggaagcatt

SEQ ID NO: 2986225 - DNA, 25 bp, Homo sapien
ctgtggccagcaggcaaaagaatcc

SEQ ID NO: 2986226 - DNA, 25 bp, Homo sapien
ggccagcaggcaaaagaatccctcc

SEQ ID NO: 2986227 - DNA, 25 bp, Homo sapien
tggccagcaggcaaaagaatccctc

SEQ ID NO: 2986228 - DNA, 25 bp, Homo sapien
gtggccagcaggcaaaagaatccct

SEQ ID NO: 2986229 - DNA, 25 bp, Homo sapien
accggctggccgcagcatcaccgag

SEQ ID NO: 2986230 - DNA, 25 bp, Homo sapien
gctggccgcagcatcaccgagcctt

SEQ ID NO: 2986231 - DNA, 25 bp, Homo sapien
tcaccgagccttccagaggcagggt

SEQ ID NO: 2986232 - DNA, 25 bp, Homo sapien
gcagcatcaccgagccttccagagg

SEQ ID NO: 2986233 - DNA, 25 bp, Homo sapien
ccagcatcagttccctaaagggttt

SEQ ID NO: 2986234 - DNA, 25 bp, Homo sapien
tagacccagcatcagttccctaaag

SEQ ID NO: 2986235 - DNA, 25 bp, Homo sapien
gtttcaaagagctggccataagctt

SEQ ID NO: 2986236 - DNA, 25 bp, Homo sapien
taagctttgtcatgcagacactgaa

SEQ ID NO: 2986237 - DNA, 25 bp, Homo sapien
ccagggaactctggtgatattccag

SEQ ID NO: 2986238 - DNA, 25 bp, Homo sapien
ctggtgatattccagtaggatttcc

SEQ ID NO: 2986239 - DNA, 25 bp, Homo sapien
gggaactctggtgatattccagtag

SEQ ID NO: 2986240 - DNA, 25 bp, Homo sapien
gaactctggtgatattccagtagga

SEQ ID NO: 2986241 - DNA, 25 bp, Homo sapien
gcaggccccatccaaaacatgggga

SEQ ID NO: 2986242 - DNA, 25 bp, Homo sapien
acacctgtccccttcgtgctaaagg

SEQ ID NO: 2986243 - DNA, 25 bp, Homo sapien
gaaggtaaccggccattcacaggaa

SEQ ID NO: 2986244 - DNA, 25 bp, Homo sapien
tgctaaaggacgttggggacaagca

SEQ ID NO: 2986245 - DNA, 25 bp, Homo sapien
tcggtcctcagagggcaacggcagt

SEQ ID NO: 2986246 - DNA, 25 bp, Homo sapien
gtcgctgtcgccaagagcccgagga

SEQ ID NO: 2986247 - DNA, 25 bp, Homo sapien
actgctaaaacatcgccctgcggaa

SEQ ID NO: 2986248 - DNA, 25 bp, Homo sapien
gaccagagccggcggtcagaccctt

SEQ ID NO: 2986249 - DNA, 25 bp, Homo sapien
atgggttcccagtggccccgttgtg

SEQ ID NO: 2986250 - DNA, 25 bp, Homo sapien
cctccaatcacattggtaaccaaca

SEQ ID NO: 2986251 - DNA, 25 bp, Homo sapien
gccagtgcctttcgcgggtccagtt

SEQ ID NO: 2986252 - DNA, 25 bp, Homo sapien
ttggctgcttttccgcagccagtgc

SEQ ID NO: 2986253 - DNA, 25 bp, Homo sapien
tttccagacaggaacgttgggtgta

SEQ ID NO: 2986254 - DNA, 25 bp, Homo sapien
ccagaaaggagcatggtaaggtgaa

SEQ ID NO: 2986255 - DNA, 25 bp, Homo sapien
ccagacaggaacgttgggtgtagca

SEQ ID NO: 2986256 - DNA, 25 bp, Homo sapien
tgcttttccaaggagacggtttgga

SEQ ID NO: 2986257 - DNA, 25 bp, Homo sapien
cttgttcacctcgttctctgggcac

SEQ ID NO: 2986258 - DNA, 25 bp, Homo sapien
agtatggtcctcaggccagtttctg

SEQ ID NO: 2986259 - DNA, 25 bp, Homo sapien
ttacttgttcacctcgttctctggg

SEQ ID NO: 2986260 - DNA, 25 bp, Homo sapien
tctgggcactgaggattggcaagta

SEQ ID NO: 2986261 - DNA, 25 bp, Homo sapien
tggccgccgctcccaggaaagtgtg

SEQ ID NO: 2986262 - DNA, 25 bp, Homo sapien
gcgctcccagggcgctaatcctggg

SEQ ID NO: 2986263 - DNA, 25 bp, Homo sapien
ctcccagggcgctaatcctgggccg

SEQ ID NO: 2986264 - DNA, 25 bp, Homo sapien
ccaggaaagtgtggcggcgaggcag

SEQ ID NO: 2986265 - DNA, 25 bp, Homo sapien
gagtcagcgagagagtccagcgctc

SEQ ID NO: 2986266 - DNA, 25 bp, Homo sapien
gggtaggagtcagcgagagagtcca

SEQ ID NO: 2986267 - DNA, 25 bp, Homo sapien
cgagagagtccagcgctccaaaggg

SEQ ID NO: 2986268 - DNA, 25 bp, Homo sapien
cagcgctccaaaggggactttctgg

SEQ ID NO: 2986269 - DNA, 25 bp, Homo sapien
caggctgccatccagattactgtgg

SEQ ID NO: 2986270 - DNA, 25 bp, Homo sapien
cagacggtgccttggtaagctcagg

SEQ ID NO: 2986271 - DNA, 25 bp, Homo sapien
tgccgtcagggttagttcccggcga

SEQ ID NO: 2986272 - DNA, 25 bp, Homo sapien
tgcctgcctggctatctatcatcta

SEQ ID NO: 2986273 - DNA, 25 bp, Homo sapien
taacgattccgtggctccagttgag

SEQ ID NO: 2986274 - DNA, 25 bp, Homo sapien
gagaagacgcaaagcaaaccgttca

SEQ ID NO: 2986275 - DNA, 25 bp, Homo sapien
gatttcctaaaatgggcatctggtg

SEQ ID NO: 2986276 - DNA, 25 bp, Homo sapien
gctcttgaacaaattgccaggctca

SEQ ID NO: 2986277 - DNA, 25 bp, Homo sapien
gccggccactggaggtccgcgtgcc

SEQ ID NO: 2986278 - DNA, 25 bp, Homo sapien
ccggccactggaggtccgcgtgcct

SEQ ID NO: 2986279 - DNA, 25 bp, Homo sapien
agccggccactggaggtccgcgtgc

SEQ ID NO: 2986280 - DNA, 25 bp, Homo sapien
cggccactggaggtccgcgtgcctc

SEQ ID NO: 2986281 - DNA, 25 bp, Homo sapien
tggtaacatctagaagggctgagaa

SEQ ID NO: 2986282 - DNA, 25 bp, Homo sapien
ggtggtaacatctagaagggctgag

SEQ ID NO: 2986283 - DNA, 25 bp, Homo sapien
gaaggccactcgggagggcgtggtg

SEQ ID NO: 2986284 - DNA, 25 bp, Homo sapien
gtaacatctagaagggctgagaagc

SEQ ID NO: 2986285 - DNA, 25 bp, Homo sapien
ctggagctggcgctccattcctaga

SEQ ID NO: 2986286 - DNA, 25 bp, Homo sapien
tgctcgtgctcagccaaccatctgg

SEQ ID NO: 2986287 - DNA, 25 bp, Homo sapien
gagctggcgctccattcctagaggg

SEQ ID NO: 2986288 - DNA, 25 bp, Homo sapien
tcagccaaccatctgggctgtagcc

SEQ ID NO: 2986289 - DNA, 25 bp, Homo sapien
ggagagaacgcatctttggctgaaa

SEQ ID NO: 2986290 - DNA, 25 bp, Homo sapien
ctaacacacgttccagtaaatcctc

SEQ ID NO: 2986291 - DNA, 25 bp, Homo sapien
tgctttctgatgctctgggctcgga

SEQ ID NO: 2986292 - DNA, 25 bp, Homo sapien
catcttccatgtcccctcacctaac

SEQ ID NO: 2986293 - DNA, 25 bp, Homo sapien
ttcagccgccccaggtgcaccatcc

SEQ ID NO: 2986294 - DNA, 25 bp, Homo sapien
gggcaccagcgcctctgtccccttc

SEQ ID NO: 2986295 - DNA, 25 bp, Homo sapien
tctgtccccttccacgaagcacagc

SEQ ID NO: 2986296 - DNA, 25 bp, Homo sapien
ggctccacaggggcccagtaggagc

SEQ ID NO: 2986297 - DNA, 25 bp, Homo sapien
tgagaaaaggttccggagcacctgc

SEQ ID NO: 2986298 - DNA, 25 bp, Homo sapien
cctccgtcccattagtctgcagtga

SEQ ID NO: 2986299 - DNA, 25 bp, Homo sapien
tcaaattcctgacgacttccaaagt

SEQ ID NO: 2986300 - DNA, 25 bp, Homo sapien
gatgctacgatttccttgggcttaa

SEQ ID NO: 2986301 - DNA, 25 bp, Homo sapien
ggtctgcctgcgagagtcccagagt

SEQ ID NO: 2986302 - DNA, 25 bp, Homo sapien
aggagtccggcagaccaccgggtct

SEQ ID NO: 2986303 - DNA, 25 bp, Homo sapien
tgcagaggtcccgagtgcggcttcc

SEQ ID NO: 2986304 - DNA, 25 bp, Homo sapien
taatatccacttggagatgcttaac

SEQ ID NO: 2986305 - DNA, 25 bp, Homo sapien
gttgcaatcacgaatgcatccgaat

SEQ ID NO: 2986306 - DNA, 25 bp, Homo sapien
tcacgaatgcatccgaattaccaca

SEQ ID NO: 2986307 - DNA, 25 bp, Homo sapien
gaatgcatccgaattaccacatttc

SEQ ID NO: 2986308 - DNA, 25 bp, Homo sapien
gcatccgaattaccacatttccatg

SEQ ID NO: 2986309 - DNA, 25 bp, Homo sapien
tcctacggatatatttagcagcggc

SEQ ID NO: 2986310 - DNA, 25 bp, Homo sapien
gcgggagtcccggcgtcccgctcag

SEQ ID NO: 2986311 - DNA, 25 bp, Homo sapien
acggatatatttagcagcggcggga

SEQ ID NO: 2986312 - DNA, 25 bp, Homo sapien
tacggatatatttagcagcggcggg

SEQ ID NO: 2986313 - DNA, 25 bp, Homo sapien
gatgacggaactgcggcccagagct

SEQ ID NO: 2986314 - DNA, 25 bp, Homo sapien
cttgcagatgacggaactgcggccc

SEQ ID NO: 2986315 - DNA, 25 bp, Homo sapien
gcagatgacggaactgcggcccaga

SEQ ID NO: 2986316 - DNA, 25 bp, Homo sapien
ttgcagatgacggaactgcggccca

SEQ ID NO: 2986317 - DNA, 25 bp, Homo sapien
tttgaacacattgccggttgcctgc

SEQ ID NO: 2986318 - DNA, 25 bp, Homo sapien
tgcacttgtgcagtcccatgagggc

SEQ ID NO: 2986319 - DNA, 25 bp, Homo sapien
gaagtgaatcaagagcccagagcat

SEQ ID NO: 2986320 - DNA, 25 bp, Homo sapien
catccttctgagtgttcacggaggc

SEQ ID NO: 2986321 - DNA, 25 bp, Homo sapien
aggaacacccagcgatcacaggggt

SEQ ID NO: 2986322 - DNA, 25 bp, Homo sapien
tcaggaacacccagcgatcacaggg

SEQ ID NO: 2986323 - DNA, 25 bp, Homo sapien
caggaacacccagcgatcacagggg

SEQ ID NO: 2986324 - DNA, 25 bp, Homo sapien
caatactcagcagtccccaactggg

SEQ ID NO: 2986325 - DNA, 25 bp, Homo sapien
cagagttagtgcagatcccataggt

SEQ ID NO: 2986326 - DNA, 25 bp, Homo sapien
tggctaacagccaccttaaagggtg

SEQ ID NO: 2986327 - DNA, 25 bp, Homo sapien
caccagatgtgtggtttcctcccgc

SEQ ID NO: 2986328 - DNA, 25 bp, Homo sapien
gtcatgtcaggctctatccacaggg

SEQ ID NO: 2986329 - DNA, 25 bp, Homo sapien
ccgtgatactggaccgaggccttat

SEQ ID NO: 2986330 - DNA, 25 bp, Homo sapien
atatgccagttacccatgtattgcc

SEQ ID NO: 2986331 - DNA, 25 bp, Homo sapien
gcctgctctgtactgagtttctcca

SEQ ID NO: 2986332 - DNA, 25 bp, Homo sapien
atgttaaaacaaaatgccttaggct

SEQ ID NO: 2986333 - DNA, 25 bp, Homo sapien
actgcgcctggatgcatagttggag

SEQ ID NO: 2986334 - DNA, 25 bp, Homo sapien
gcaccagagattaagctccaacata

SEQ ID NO: 2986335 - DNA, 25 bp, Homo sapien
gccctcatgagccaatacttccctg

SEQ ID NO: 2986336 - DNA, 25 bp, Homo sapien
cgccgcagagctcggagaaaggcat

SEQ ID NO: 2986337 - DNA, 25 bp, Homo sapien
caagaagagacacagggtgaaggcc

SEQ ID NO: 2986338 - DNA, 25 bp, Homo sapien
gagctgcaagccgaggaataccagg

SEQ ID NO: 2986339 - DNA, 25 bp, Homo sapien
ggaatgaaccttcagacacctcggt

SEQ ID NO: 2986340 - DNA, 25 bp, Homo sapien
tgtgaaatagcctgttccaccgtcc

SEQ ID NO: 2986341 - DNA, 25 bp, Homo sapien
tggaggcccctctagtagacatatc

SEQ ID NO: 2986342 - DNA, 25 bp, Homo sapien
tgaggtcccttctatgcactcctga

SEQ ID NO: 2986343 - DNA, 25 bp, Homo sapien
tgtaaagagtcaagctctactcgct

SEQ ID NO: 2986344 - DNA, 25 bp, Homo sapien
ggaaactagcgcctgccgcatgagt

SEQ ID NO: 2986345 - DNA, 25 bp, Homo sapien
tgagtgagcgttcatgtgcgtgtaa

SEQ ID NO: 2986346 - DNA, 25 bp, Homo sapien
caaggcctgactcacatcagaggga

SEQ ID NO: 2986347 - DNA, 25 bp, Homo sapien
cagtccctggagctaggtcatacca

SEQ ID NO: 2986348 - DNA, 25 bp, Homo sapien
gcagaatcttgacagcctcccatgg

SEQ ID NO: 2986349 - DNA, 25 bp, Homo sapien
tgcagccacgtgacacaagggaaca

SEQ ID NO: 2986350 - DNA, 25 bp, Homo sapien
catggaaggcctttcagatgcggca

SEQ ID NO: 2986351 - DNA, 25 bp, Homo sapien
atccaagacgggatctggcgcacag

SEQ ID NO: 2986352 - DNA, 25 bp, Homo sapien
caaaatgatttgctgagggtcgcac

SEQ ID NO: 2986353 - DNA, 25 bp, Homo sapien
taaacacgtgcccagagtaggctgg

SEQ ID NO: 2986354 - DNA, 25 bp, Homo sapien
caaaacatcgccaggtgctgaggcc

SEQ ID NO: 2986355 - DNA, 25 bp, Homo sapien
gcagcaccctggctttgtgagaagt

SEQ ID NO: 2986356 - DNA, 25 bp, Homo sapien
cagcaacagggtgggaacattccca

SEQ ID NO: 2986357 - DNA, 25 bp, Homo sapien
gtggccacagatcttgagcacacat

SEQ ID NO: 2986358 - DNA, 25 bp, Homo sapien
cagggtgggaacattcccagacagg

SEQ ID NO: 2986359 - DNA, 25 bp, Homo sapien
tactctggtcacagggaccacggag

SEQ ID NO: 2986360 - DNA, 25 bp, Homo sapien
tgttcgatcctgtgcaatgacaaag

SEQ ID NO: 2986361 - DNA, 25 bp, Homo sapien
cctttgcagaatggcagagtcggga

SEQ ID NO: 2986362 - DNA, 25 bp, Homo sapien
tgtgcaatgacaaagcgcagtttcc

SEQ ID NO: 2986363 - DNA, 25 bp, Homo sapien
gacaaagcgcagtttcctttgcaga

SEQ ID NO: 2986364 - DNA, 25 bp, Homo sapien
ggcggatcaggttcccgcacccgca

SEQ ID NO: 2986365 - DNA, 25 bp, Homo sapien
ctgcagtgcagagctagccgccgga

SEQ ID NO: 2986366 - DNA, 25 bp, Homo sapien
gcaccggcctccctgtctcgcactg

SEQ ID NO: 2986367 - DNA, 25 bp, Homo sapien
cgggcggatcaggttcccgcacccg

SEQ ID NO: 2986368 - DNA, 25 bp, Homo sapien
agcggcgaggaagcgcccccggcgg

SEQ ID NO: 2986369 - DNA, 25 bp, Homo sapien
cgggtcgcgcggagggcagcggcga

SEQ ID NO: 2986370 - DNA, 25 bp, Homo sapien
ctggtgggcagcgggtcgcgcggag

SEQ ID NO: 2986371 - DNA, 25 bp, Homo sapien
ggtgggcagcgggtcgcgcggaggg

SEQ ID NO: 2986372 - DNA, 25 bp, Homo sapien
ttgaccgcggggtccgacatgatgg

SEQ ID NO: 2986373 - DNA, 25 bp, Homo sapien
cagctgcgcgttgaccgcggggtcc

SEQ ID NO: 2986374 - DNA, 25 bp, Homo sapien
ttcgaagtccgaaatgatcccatcc

SEQ ID NO: 2986375 - DNA, 25 bp, Homo sapien
cttcgaagtccgaaatgatcccatc

SEQ ID NO: 2986376 - DNA, 25 bp, Homo sapien
gaccggctaagtcgtgccacttgga

SEQ ID NO: 2986377 - DNA, 25 bp, Homo sapien
tggaaagtggtcagaccggctaagt

SEQ ID NO: 2986378 - DNA, 25 bp, Homo sapien
cgtgccacttggacatttgggacaa

SEQ ID NO: 2986379 - DNA, 25 bp, Homo sapien
tggtcagaccggctaagtcgtgcca

SEQ ID NO: 2986380 - DNA, 25 bp, Homo sapien
ttgcaggaaccaagacaccaggtga

SEQ ID NO: 2986381 - DNA, 25 bp, Homo sapien
actcccggcgggcatgcctggccct

SEQ ID NO: 2986382 - DNA, 25 bp, Homo sapien
ttcctactctccctcaaggtccgcc

SEQ ID NO: 2986383 - DNA, 25 bp, Homo sapien
atatgatcttcacaggcaggcccct

SEQ ID NO: 2986384 - DNA, 25 bp, Homo sapien
ctctaagtttctgggcattggcagg

SEQ ID NO: 2986385 - DNA, 25 bp, Homo sapien
tatggtcccggctgacatcgaggtc

SEQ ID NO: 2986386 - DNA, 25 bp, Homo sapien
tgtctgctggcccagtctaaacgga

SEQ ID NO: 2986387 - DNA, 25 bp, Homo sapien
cgacaacaaacttgaagtctctaga

SEQ ID NO: 2986388 - DNA, 25 bp, Homo sapien
gccagtttaataccctgccacggaa

SEQ ID NO: 2986389 - DNA, 25 bp, Homo sapien
tccattcggaggctgctagggactc

SEQ ID NO: 2986390 - DNA, 25 bp, Homo sapien
tcattcttggctcggactgttcagg

SEQ ID NO: 2986391 - DNA, 25 bp, Homo sapien
gctaaaaaatggactgctggtcccc

SEQ ID NO: 2986392 - DNA, 25 bp, Homo sapien
ccaccttgggacctggacctaagtg

SEQ ID NO: 2986393 - DNA, 25 bp, Homo sapien
agggacagccgcctcttaccatcca

SEQ ID NO: 2986394 - DNA, 25 bp, Homo sapien
ccttgggacctggacctaagtggag

SEQ ID NO: 2986395 - DNA, 25 bp, Homo sapien
gcctcttaccatccaccttgggacc

SEQ ID NO: 2986396 - DNA, 25 bp, Homo sapien
tgctgctcttagaaatgcatcccag

SEQ ID NO: 2986397 - DNA, 25 bp, Homo sapien
tgtctgttctgaggcccgggacaga

SEQ ID NO: 2986398 - DNA, 25 bp, Homo sapien
caggacccggacctggagaccctga

SEQ ID NO: 2986399 - DNA, 25 bp, Homo sapien
agctccctgcgaggagccagcaagg

SEQ ID NO: 2986400 - DNA, 25 bp, Homo sapien
tggcagctctccgtcctcgattctg

SEQ ID NO: 2986401 - DNA, 25 bp, Homo sapien
ctggagacagagaaacgtgatgctg

SEQ ID NO: 2986402 - DNA, 25 bp, Homo sapien
agggaccagatgacctttcaggtct

SEQ ID NO: 2986403 - DNA, 25 bp, Homo sapien
tgaggctttcctcagctttaatcca

SEQ ID NO: 2986404 - DNA, 25 bp, Homo sapien
tccagcagcatgtacgccatgggca

SEQ ID NO: 2986405 - DNA, 25 bp, Homo sapien
gtgagtccagcagcatgtacgccat

SEQ ID NO: 2986406 - DNA, 25 bp, Homo sapien
tgtgacactggaccttggcacaggt

SEQ ID NO: 2986407 - DNA, 25 bp, Homo sapien
gcatgtacgccatgggcacctcctt

SEQ ID NO: 2986408 - DNA, 25 bp, Homo sapien
actgtggaccgtgcacagtgtcaga

SEQ ID NO: 2986409 - DNA, 25 bp, Homo sapien
catcacaactgtggaccgtgcacag

SEQ ID NO: 2986410 - DNA, 25 bp, Homo sapien
ggaggagcaccggacagcttcctcc

SEQ ID NO: 2986411 - DNA, 25 bp, Homo sapien
cccagctgagcatcacaactgtgga

SEQ ID NO: 2986412 - DNA, 25 bp, Homo sapien
ccggcatgtttcctgctaaggagca

SEQ ID NO: 2986413 - DNA, 25 bp, Homo sapien
aatggatggctagggaacactccgg

SEQ ID NO: 2986414 - DNA, 25 bp, Homo sapien
agatgctgcccgtcgtgtcttgcca

SEQ ID NO: 2986415 - DNA, 25 bp, Homo sapien
tcatgtctcagcaagcggaagggac

SEQ ID NO: 2986416 - DNA, 25 bp, Homo sapien
tccacctgcttggacgagatgtcaa

SEQ ID NO: 2986417 - DNA, 25 bp, Homo sapien
atgtcaatggacagctcagtgcgcc

SEQ ID NO: 2986418 - DNA, 25 bp, Homo sapien
cgggccgagggttctgagttcttca

SEQ ID NO: 2986419 - DNA, 25 bp, Homo sapien
gagttgggtgtctcgacctcctcga

SEQ ID NO: 2986420 - DNA, 25 bp, Homo sapien
tcttgtggcccaacacctcggccct

SEQ ID NO: 2986421 - DNA, 25 bp, Homo sapien
ctcggccctcttgagcccgaaccgg

SEQ ID NO: 2986422 - DNA, 25 bp, Homo sapien
aacacctcggccctcttgagcccga

SEQ ID NO: 2986423 - DNA, 25 bp, Homo sapien
ggcccaacacctcggccctcttgag

SEQ ID NO: 2986424 - DNA, 25 bp, Homo sapien
gggtttgacgatggtgatctccgtc

SEQ ID NO: 2986425 - DNA, 25 bp, Homo sapien
tttgacgatggtgatctccgtcctc

SEQ ID NO: 2986426 - DNA, 25 bp, Homo sapien
acgatggtgatctccgtcctccgag

SEQ ID NO: 2986427 - DNA, 25 bp, Homo sapien
ctgactcctggggtttgacgatggt

SEQ ID NO: 2986428 - DNA, 25 bp, Homo sapien
gcggtgggcgcctcagcaggcttgg

SEQ ID NO: 2986429 - DNA, 25 bp, Homo sapien
tggctccggggtgtagcctcagcca

SEQ ID NO: 2986430 - DNA, 25 bp, Homo sapien
ggcaggctctgaattctccaaggtc

SEQ ID NO: 2986431 - DNA, 25 bp, Homo sapien
cttgggggctgcgtcggtggcaggg

SEQ ID NO: 2986432 - DNA, 25 bp, Homo sapien
tgtgaacacatcaacccaggatggg

SEQ ID NO: 2986433 - DNA, 25 bp, Homo sapien
gtatccggcacgtcaaacaaaggtc

SEQ ID NO: 2986434 - DNA, 25 bp, Homo sapien
gagtgtgaacacatcaacccaggat

SEQ ID NO: 2986435 - DNA, 25 bp, Homo sapien
atgggggtgtatccggcacgtcaaa

SEQ ID NO: 2986436 - DNA, 25 bp, Homo sapien
ccaccggcctggaacctagggatgg

SEQ ID NO: 2986437 - DNA, 25 bp, Homo sapien
cttgctgattaagtaagggttgtgt

SEQ ID NO: 2986438 - DNA, 25 bp, Homo sapien
acagagcagggcttctaaacaccag

SEQ ID NO: 2986439 - DNA, 25 bp, Homo sapien
cgccccgtcgtgcattgctttttag

SEQ ID NO: 2986440 - DNA, 25 bp, Homo sapien
taagctaaaagacacttttctagga

SEQ ID NO: 2986441 - DNA, 25 bp, Homo sapien
ataagctaaaagacacttttctagg

SEQ ID NO: 2986442 - DNA, 25 bp, Homo sapien
aataagctaaaagacacttttctag

SEQ ID NO: 2986443 - DNA, 25 bp, Homo sapien
tgtcctcactaagcgagctaaagca

SEQ ID NO: 2986444 - DNA, 25 bp, Homo sapien
catgtttgcacaccgactgatcgat

SEQ ID NO: 2986445 - DNA, 25 bp, Homo sapien
tacctactcaagactgcagccttgg

SEQ ID NO: 2986446 - DNA, 25 bp, Homo sapien
tgtcctggttcgtggtgtcaatcgc

SEQ ID NO: 2986447 - DNA, 25 bp, Homo sapien
tcaggcagggaaatctgtcccgcag

SEQ ID NO: 2986448 - DNA, 25 bp, Homo sapien
caggttgtagggtgcctaaggcttc

SEQ ID NO: 2986449 - DNA, 25 bp, Homo sapien
atgcaccgggtctcggtccagcctg

SEQ ID NO: 2986450 - DNA, 25 bp, Homo sapien
tgggaggccagggtatgggcaacca

SEQ ID NO: 2986451 - DNA, 25 bp, Homo sapien
atctgtaacccgagcccacagtgac

SEQ ID NO: 2986452 - DNA, 25 bp, Homo sapien
acagtgaccgggacttgctgcttcc

SEQ ID NO: 2986453 - DNA, 25 bp, Homo sapien
cgctaagcgtcagtcagcaggtgcc

SEQ ID NO: 2986454 - DNA, 25 bp, Homo sapien
tctcctatcagcatccgctaagcgt

SEQ ID NO: 2986455 - DNA, 25 bp, Homo sapien
cagaggcagaaagatcaacagcaaa

SEQ ID NO: 2986456 - DNA, 25 bp, Homo sapien
ggagaacaagagcttagcctcatgc

SEQ ID NO: 2986457 - DNA, 25 bp, Homo sapien
cccaagcaggctggactgtgttccc

SEQ ID NO: 2986458 - DNA, 25 bp, Homo sapien
caacatataatggaacagctggtag

SEQ ID NO: 2986459 - DNA, 25 bp, Homo sapien
ttccctccccgaaggctgacaatgt

SEQ ID NO: 2986460 - DNA, 25 bp, Homo sapien
caaggggtgtgaccactcctgcaga

SEQ ID NO: 2986461 - DNA, 25 bp, Homo sapien
gacaatgtcaacctacagaagaagc

SEQ ID NO: 2986462 - DNA, 25 bp, Homo sapien
tgtgaccactcctgcagatggaacc

SEQ ID NO: 2986463 - DNA, 25 bp, Homo sapien
cacatgatgagcaagcgggaacagc

SEQ ID NO: 2986464 - DNA, 25 bp, Homo sapien
ctccaaatagcaagtcgggcaggcc

SEQ ID NO: 2986465 - DNA, 25 bp, Homo sapien
tacctgctgtgtgactatgggccag

SEQ ID NO: 2986466 - DNA, 25 bp, Homo sapien
tcagagatccggctaaatcctggca

SEQ ID NO: 2986467 - DNA, 25 bp, Homo sapien
cagagtcaataacctgcttatcagc

SEQ ID NO: 2986468 - DNA, 25 bp, Homo sapien
caaatttgtccccaatttacatacg

SEQ ID NO: 2986469 - DNA, 25 bp, Homo sapien
tcttacattatatcattaaatcccc

SEQ ID NO: 2986470 - DNA, 25 bp, Homo sapien
tacgatgaggcaaattcagagtcaa

SEQ ID NO: 2986471 - DNA, 25 bp, Homo sapien
aaattacggtcagatcaaggtcacg

SEQ ID NO: 2986472 - DNA, 25 bp, Homo sapien
caaggtcacggtcaacgagcttctc

SEQ ID NO: 2986473 - DNA, 25 bp, Homo sapien
tgacggcatcggcaccatcaaaatt

SEQ ID NO: 2986474 - DNA, 25 bp, Homo sapien
ctgactgtataaccagggctgtgac

SEQ ID NO: 2986475 - DNA, 25 bp, Homo sapien
gagagacaggtttcgcaacatctgc

SEQ ID NO: 2986476 - DNA, 25 bp, Homo sapien
aaaagttccagtgagctgtcagccg

SEQ ID NO: 2986477 - DNA, 25 bp, Homo sapien
tctgcgggcccttgctatgaggtca

SEQ ID NO: 2986478 - DNA, 25 bp, Homo sapien
gatgtccccattttgcaacctgcga

SEQ ID NO: 2986479 - DNA, 25 bp, Homo sapien
tgcgctagacagaggcaccaggtgt

SEQ ID NO: 2986480 - DNA, 25 bp, Homo sapien
tatgtactaacagtcccctgggtgc

SEQ ID NO: 2986481 - DNA, 25 bp, Homo sapien
tatagatatacgaaagccaggtgca

SEQ ID NO: 2986482 - DNA, 25 bp, Homo sapien
ccagggcaggcaaaagtgtcactca

SEQ ID NO: 2986483 - DNA, 25 bp, Homo sapien
agacagtggaacaaggagtctaatc

SEQ ID NO: 2986484 - DNA, 25 bp, Homo sapien
gggagacagtggaacaaggagtcta

SEQ ID NO: 2986485 - DNA, 25 bp, Homo sapien
cagtggaacaaggagtctaatctgt

SEQ ID NO: 2986486 - DNA, 25 bp, Homo sapien
ggggagacagtggaacaaggagtct

SEQ ID NO: 2986487 - DNA, 25 bp, Homo sapien
cctattaagatagtatacgggccct

SEQ ID NO: 2986488 - DNA, 25 bp, Homo sapien
gagccaacatcaagtgtgtcccaga

SEQ ID NO: 2986489 - DNA, 25 bp, Homo sapien
tattgctggttgtggtctgtagcca

SEQ ID NO: 2986490 - DNA, 25 bp, Homo sapien
caatacaaagcaatcgggccctgca

SEQ ID NO: 2986491 - DNA, 25 bp, Homo sapien
tgcatttgtagctgtgacgccccga

SEQ ID NO: 2986492 - DNA, 25 bp, Homo sapien
gataagcagttacagcggcaacagg

SEQ ID NO: 2986493 - DNA, 25 bp, Homo sapien
tcagaaagaaggtcccaaggtgtcc

SEQ ID NO: 2986494 - DNA, 25 bp, Homo sapien
gagactgatcggcttctgaccctta

SEQ ID NO: 2986495 - DNA, 25 bp, Homo sapien
caattactgtgactgacgacgactc

SEQ ID NO: 2986496 - DNA, 25 bp, Homo sapien
atactcaggcagtgaccccaaggaa

SEQ ID NO: 2986497 - DNA, 25 bp, Homo sapien
aaatgaatgttttaggcacacgcta

SEQ ID NO: 2986498 - DNA, 25 bp, Homo sapien
tcctgaagctaggaggcgatgcaga

SEQ ID NO: 2986499 - DNA, 25 bp, Homo sapien
acctggccagtgagtcagtctcttc

SEQ ID NO: 2986500 - DNA, 25 bp, Homo sapien
gggacctggccagtgagtcagtctc

SEQ ID NO: 2986501 - DNA, 25 bp, Homo sapien
tccgagagcctctggattcagatct

SEQ ID NO: 2986502 - DNA, 25 bp, Homo sapien
agctgacactataggggctgggcct

SEQ ID NO: 2986503 - DNA, 25 bp, Homo sapien
tgctggctgggaccatggaagggag

SEQ ID NO: 2986504 - DNA, 25 bp, Homo sapien
tggctgggaccatggaagggagaag

SEQ ID NO: 2986505 - DNA, 25 bp, Homo sapien
gctgggaccatggaagggagaagga

SEQ ID NO: 2986506 - DNA, 25 bp, Homo sapien
ctggctgggaccatggaagggagaa

SEQ ID NO: 2986507 - DNA, 25 bp, Homo sapien
accgggtcacatggctcagagccga

SEQ ID NO: 2986508 - DNA, 25 bp, Homo sapien
gcccggcgcagaagcaacctgaagg

SEQ ID NO: 2986509 - DNA, 25 bp, Homo sapien
gtggtcgcggaacaaggagcctccc

SEQ ID NO: 2986510 - DNA, 25 bp, Homo sapien
gtagggagggacctcgactgcctgg

SEQ ID NO: 2986511 - DNA, 25 bp, Homo sapien
gaaagcaggtccgttagggagatcc

SEQ ID NO: 2986512 - DNA, 25 bp, Homo sapien
caggaatccagagctgcgctgtagc

SEQ ID NO: 2986513 - DNA, 25 bp, Homo sapien
tagagaaagcggtggccaattcgaa

SEQ ID NO: 2986514 - DNA, 25 bp, Homo sapien
ttgaggccgaaaatctggtccccgc

SEQ ID NO: 2986515 - DNA, 25 bp, Homo sapien
tctgggactagagtcccagccaagg

SEQ ID NO: 2986516 - DNA, 25 bp, Homo sapien
caataaacaaatcaaagctcggcgc

SEQ ID NO: 2986517 - DNA, 25 bp, Homo sapien
cccaggtggtatcgatgctctgtgt

SEQ ID NO: 2986518 - DNA, 25 bp, Homo sapien
gccggaaggcagaactctgggacta

SEQ ID NO: 2986519 - DNA, 25 bp, Homo sapien
ggaacaaaggctgagagataaaaga

SEQ ID NO: 2986520 - DNA, 25 bp, Homo sapien
tggcccctggaacaaaggctgagag

SEQ ID NO: 2986521 - DNA, 25 bp, Homo sapien
ctcctggtcctgtggtggcccctgg

SEQ ID NO: 2986522 - DNA, 25 bp, Homo sapien
tcctggtcctgtggtggcccctgga

SEQ ID NO: 2986523 - DNA, 25 bp, Homo sapien
tctcaccacaaagcctagtgcaggt

SEQ ID NO: 2986524 - DNA, 25 bp, Homo sapien
tagtgcaggtaacgaagccaagagg

SEQ ID NO: 2986525 - DNA, 25 bp, Homo sapien
cagaggcgacaggtaacagcaatcc

SEQ ID NO: 2986526 - DNA, 25 bp, Homo sapien
tccattagcacagcgtgtggcctgc

SEQ ID NO: 2986527 - DNA, 25 bp, Homo sapien
actgggatctggtattggccgtggg

SEQ ID NO: 2986528 - DNA, 25 bp, Homo sapien
tctggctgtggacatctagtgctgg

SEQ ID NO: 2986529 - DNA, 25 bp, Homo sapien
catctagtgctggtcactgggatct

SEQ ID NO: 2986530 - DNA, 25 bp, Homo sapien
tggctgcagggactcagtattgtct

SEQ ID NO: 2986531 - DNA, 25 bp, Homo sapien
caggcaatgctaggaggacagtgtc

SEQ ID NO: 2986532 - DNA, 25 bp, Homo sapien
ttgtctgtcactgccaatggtggcc

SEQ ID NO: 2986533 - DNA, 25 bp, Homo sapien
tggccaagcagaatgcaaggtcatc

SEQ ID NO: 2986534 - DNA, 25 bp, Homo sapien
tttgcctcgtaacaatgcacactgg

SEQ ID NO: 2986535 - DNA, 25 bp, Homo sapien
tggaaattatatccccatgaggacg

SEQ ID NO: 2986536 - DNA, 25 bp, Homo sapien
ggtctacgtcccagaaatgtccaca

SEQ ID NO: 2986537 - DNA, 25 bp, Homo sapien
caacagatgcgtggagaaacccaac

SEQ ID NO: 2986538 - DNA, 25 bp, Homo sapien
agtgttttccacaagtgcccaggag

SEQ ID NO: 2986539 - DNA, 25 bp, Homo sapien
cttctcgttccgtgatgcaggcgcc

SEQ ID NO: 2986540 - DNA, 25 bp, Homo sapien
gcttcatggccttccggcgcatctg

SEQ ID NO: 2986541 - DNA, 25 bp, Homo sapien
atgtcgccaacgcagctgggagccg

SEQ ID NO: 2986542 - DNA, 25 bp, Homo sapien
agtcaatccccacgtagccgaagtc

SEQ ID NO: 2986543 - DNA, 25 bp, Homo sapien
ccgacttccggctgattttggattt

SEQ ID NO: 2986544 - DNA, 25 bp, Homo sapien
ggtggatttacccaagccgctctgc

SEQ ID NO: 2986545 - DNA, 25 bp, Homo sapien
gtgggctgcaccgacttccggctga

SEQ ID NO: 2986546 - DNA, 25 bp, Homo sapien
tcttggggatgcgctcctctgaggt

SEQ ID NO: 2986547 - DNA, 25 bp, Homo sapien
cagttctcgttgttgatgtggtccc

SEQ ID NO: 2986548 - DNA, 25 bp, Homo sapien
ccctggtgtgtcaatcactgtcagc

SEQ ID NO: 2986549 - DNA, 25 bp, Homo sapien
tgtcagcttcatccggacgcctttc

SEQ ID NO: 2986550 - DNA, 25 bp, Homo sapien
gtggtccccgaaccctggtgtgtca

SEQ ID NO: 2986551 - DNA, 25 bp, Homo sapien
tcgtactggtcattgatgaacttca

SEQ ID NO: 2986552 - DNA, 25 bp, Homo sapien
ctcctcctgcaggtatttctcgtac

SEQ ID NO: 2986553 - DNA, 25 bp, Homo sapien
cctgcaggtatttctcgtactggtc

SEQ ID NO: 2986554 - DNA, 25 bp, Homo sapien
tatttctcgtactggtcattgatga

SEQ ID NO: 2986555 - DNA, 25 bp, Homo sapien
gcgggtgtccgggatgcgcttcttg

SEQ ID NO: 2986556 - DNA, 25 bp, Homo sapien
ggtgtccgggatgcgcttcttgcgg

SEQ ID NO: 2986557 - DNA, 25 bp, Homo sapien
tggacgcgggtgtccgggatgcgct

SEQ ID NO: 2986558 - DNA, 25 bp, Homo sapien
cagcagtggacgcgggtgtccggga

SEQ ID NO: 2986559 - DNA, 25 bp, Homo sapien
tgacagggacgatgttgaccacctt

SEQ ID NO: 2986560 - DNA, 25 bp, Homo sapien
accaccttgctcaggcgtttcataa

SEQ ID NO: 2986561 - DNA, 25 bp, Homo sapien
gagtgtgtccgccttggcgatgaca

SEQ ID NO: 2986562 - DNA, 25 bp, Homo sapien
tcaggcgtttcataaactcgatgtc

SEQ ID NO: 2986563 - DNA, 25 bp, Homo sapien
cagcccaggcacctcggtttcattt

SEQ ID NO: 2986564 - DNA, 25 bp, Homo sapien
ccgtgtgtagcctccggcagacaca

SEQ ID NO: 2986565 - DNA, 25 bp, Homo sapien
cacacccaccgaggcagatgtggtg

SEQ ID NO: 2986566 - DNA, 25 bp, Homo sapien
gacacacccactttgtgtggactgt

SEQ ID NO: 2986567 - DNA, 25 bp, Homo sapien
ttgccacatgacctccacactgtgt

SEQ ID NO: 2986568 - DNA, 25 bp, Homo sapien
tgccccaggctcgggttcaagggca

SEQ ID NO: 2986569 - DNA, 25 bp, Homo sapien
ccacatgacctccacactgtgtgct

SEQ ID NO: 2986570 - DNA, 25 bp, Homo sapien
tgccacatgacctccacactgtgtg

SEQ ID NO: 2986571 - DNA, 25 bp, Homo sapien
tcaccagccggtcctccgagtcctc

SEQ ID NO: 2986572 - DNA, 25 bp, Homo sapien
tccttctgggggtacacgtcgatgc

SEQ ID NO: 2986573 - DNA, 25 bp, Homo sapien
gggtacacgtcgatgccgttggaca

SEQ ID NO: 2986574 - DNA, 25 bp, Homo sapien
cgtcgatgccgttggacagcaggtc

SEQ ID NO: 2986575 - DNA, 25 bp, Homo sapien
gatcctcttgccgttgacctggtac

SEQ ID NO: 2986576 - DNA, 25 bp, Homo sapien
cttcgatggtaccccacttggtctt

SEQ ID NO: 2986577 - DNA, 25 bp, Homo sapien
ccgttgacctggtactcgtggtcac

SEQ ID NO: 2986578 - DNA, 25 bp, Homo sapien
cacttggtcttcctcccaaggatcc

SEQ ID NO: 2986579 - DNA, 25 bp, Homo sapien
tcctatatgaacacgcggtgcctgg

SEQ ID NO: 2986580 - DNA, 25 bp, Homo sapien
tacaagcccaagctcgggacagtgg

SEQ ID NO: 2986581 - DNA, 25 bp, Homo sapien
tggacgaccattcacaagctcaaga

SEQ ID NO: 2986582 - DNA, 25 bp, Homo sapien
taaacattgctcagggacatgtgca

SEQ ID NO: 2986583 - DNA, 25 bp, Homo sapien
ggtaggcaaactcacagtgtgtggt

SEQ ID NO: 2986584 - DNA, 25 bp, Homo sapien
cgcaggtaggcaaactcacagtgtg

SEQ ID NO: 2986585 - DNA, 25 bp, Homo sapien
ggcaaactcacagtgtgtggtgttt

SEQ ID NO: 2986586 - DNA, 25 bp, Homo sapien
cccgcaggtaggcaaactcacagtg

SEQ ID NO: 2986587 - DNA, 25 bp, Homo sapien
tcgttgaggcgcttcacacggtacg

SEQ ID NO: 2986588 - DNA, 25 bp, Homo sapien
gctgctgccctcgttgaggcgcttc

SEQ ID NO: 2986589 - DNA, 25 bp, Homo sapien
ggtacgcctcgaagtggatgctgct

SEQ ID NO: 2986590 - DNA, 25 bp, Homo sapien
gtccttgatgttctgcatgtgcgtc

SEQ ID NO: 2986591 - DNA, 25 bp, Homo sapien
tgacaaatggagaaaatcatataaa

SEQ ID NO: 2986592 - DNA, 25 bp, Homo sapien
gatgacaaatggagaaaatcatata

SEQ ID NO: 2986593 - DNA, 25 bp, Homo sapien
catataaaataaaatggggtggtgg

SEQ ID NO: 2986594 - DNA, 25 bp, Homo sapien
gaacgatgacaaatggagaaaatca

SEQ ID NO: 2986595 - DNA, 25 bp, Homo sapien
gcagcctccccacaacctcggggag

SEQ ID NO: 2986596 - DNA, 25 bp, Homo sapien
cagcctccccacaacctcggggagg

SEQ ID NO: 2986597 - DNA, 25 bp, Homo sapien
gactcactcggagggaggccccttc

SEQ ID NO: 2986598 - DNA, 25 bp, Homo sapien
atcactgactcactcggagggaggc

SEQ ID NO: 2986599 - DNA, 25 bp, Homo sapien
tcctctgcaagtgcgaggcctggcc

SEQ ID NO: 2986600 - DNA, 25 bp, Homo sapien
cggatgatctgcacaccgaagctgc

SEQ ID NO: 2986601 - DNA, 25 bp, Homo sapien
tttctacccttaggagcagggcagg

SEQ ID NO: 2986602 - DNA, 25 bp, Homo sapien
gggctgagtgatggccacaccatgt

SEQ ID NO: 2986603 - DNA, 25 bp, Homo sapien
gactcacttgcttagaccttttcaa

SEQ ID NO: 2986604 - DNA, 25 bp, Homo sapien
gcatctggccaagcagtctgcggat

SEQ ID NO: 2986605 - DNA, 25 bp, Homo sapien
caaacccagacactagacagacaga

SEQ ID NO: 2986606 - DNA, 25 bp, Homo sapien
cagacagacggacacgcatacacat

SEQ ID NO: 2986607 - DNA, 25 bp, Homo sapien
acagagtcaggctcgcctggcctcc

SEQ ID NO: 2986608 - DNA, 25 bp, Homo sapien
ccagctcagagagtcagcaaggcct

SEQ ID NO: 2986609 - DNA, 25 bp, Homo sapien
ctccccagctcagagagtcagcaag

SEQ ID NO: 2986610 - DNA, 25 bp, Homo sapien
atcaacagagtcaggctcgcctggc

SEQ ID NO: 2986611 - DNA, 25 bp, Homo sapien
gaaaccttgctcttcagctgtggac

SEQ ID NO: 2986612 - DNA, 25 bp, Homo sapien
gatgtgtgcacctgagtggagtctc

SEQ ID NO: 2986613 - DNA, 25 bp, Homo sapien
tgacgcccgttctctcctttctagg

SEQ ID NO: 2986614 - DNA, 25 bp, Homo sapien
gcaaagtaaactgtctcaccagtgg

SEQ ID NO: 2986615 - DNA, 25 bp, Homo sapien
cccgccaccaagtgacattgaggct

SEQ ID NO: 2986616 - DNA, 25 bp, Homo sapien
ccaccaagtgacattgaggctgggc

SEQ ID NO: 2986617 - DNA, 25 bp, Homo sapien
accccgccaccaagtgacattgagg

SEQ ID NO: 2986618 - DNA, 25 bp, Homo sapien
cgccaccaagtgacattgaggctgg

SEQ ID NO: 2986619 - DNA, 25 bp, Homo sapien
caaatttctcgggaggcacgtagca

SEQ ID NO: 2986620 - DNA, 25 bp, Homo sapien
gaacagagcctgatgaaacgaacaa

SEQ ID NO: 2986621 - DNA, 25 bp, Homo sapien
gcacgtagcaaaaggccattgagga

SEQ ID NO: 2986622 - DNA, 25 bp, Homo sapien
gaaagtgaagcatctcaaggctggg

SEQ ID NO: 2986623 - DNA, 25 bp, Homo sapien
tgcagtggttaaaggatgccgcacc

SEQ ID NO: 2986624 - DNA, 25 bp, Homo sapien
gatccagcgggatttagagcaatgc

SEQ ID NO: 2986625 - DNA, 25 bp, Homo sapien
cacgccacttttgtagcagaaagta

SEQ ID NO: 2986626 - DNA, 25 bp, Homo sapien
agcagaaaaacaccggccactttct

SEQ ID NO: 2986627 - DNA, 25 bp, Homo sapien
tacaacagactattccaccatgggc

SEQ ID NO: 2986628 - DNA, 25 bp, Homo sapien
tgagctgggcccaacttcggtggaa

SEQ ID NO: 2986629 - DNA, 25 bp, Homo sapien
ccaggagaccttcgtgtatgtgact

SEQ ID NO: 2986630 - DNA, 25 bp, Homo sapien
caatgactgttccatgtgcaggcac

SEQ ID NO: 2986631 - DNA, 25 bp, Homo sapien
caatagaatatgcaggaatgatggt

SEQ ID NO: 2986632 - DNA, 25 bp, Homo sapien
gaatgatggtatgtcacttccaagg

SEQ ID NO: 2986633 - DNA, 25 bp, Homo sapien
tctgctcccacgctgtactggggtt

SEQ ID NO: 2986634 - DNA, 25 bp, Homo sapien
tactggggttggtctgtgtaaccaa

SEQ ID NO: 2986635 - DNA, 25 bp, Homo sapien
gggcattgcagcagcggagagggag

SEQ ID NO: 2986636 - DNA, 25 bp, Homo sapien
tggcttctgcaagatttaaagcctc

SEQ ID NO: 2986637 - DNA, 25 bp, Homo sapien
taaagcctctggcaccattacagac

SEQ ID NO: 2986638 - DNA, 25 bp, Homo sapien
cattacagacgaggaacgttgcggg

SEQ ID NO: 2986639 - DNA, 25 bp, Homo sapien
ttccagccatagtgggtcccagaga

SEQ ID NO: 2986640 - DNA, 25 bp, Homo sapien
cgtgctttgttcacgacagggtgaa

SEQ ID NO: 2986641 - DNA, 25 bp, Homo sapien
tgaacataggcagggtcctcgggtt

SEQ ID NO: 2986642 - DNA, 25 bp, Homo sapien
agaagatgcatcgtctggcgcgcaa

SEQ ID NO: 2986643 - DNA, 25 bp, Homo sapien
ggtgttttcatagacctggcggcta

SEQ ID NO: 2986644 - DNA, 25 bp, Homo sapien
catgaaacctgttgtgaacggcaca

SEQ ID NO: 2986645 - DNA, 25 bp, Homo sapien
cacacagggagaccttatcggcaag

SEQ ID NO: 2986646 - DNA, 25 bp, Homo sapien
tgcggtcagagtgccttcaacagga

SEQ ID NO: 2986647 - DNA, 25 bp, Homo sapien
atctgcccgacaacagaaacatcct

SEQ ID NO: 2986648 - DNA, 25 bp, Homo sapien
gaagctttcccatcctctgcatggg

SEQ ID NO: 2986649 - DNA, 25 bp, Homo sapien
caactgtggcaggtgaagctttccc

SEQ ID NO: 2986650 - DNA, 25 bp, Homo sapien
ctctgcatggggctgaccatctgcc

SEQ ID NO: 2986651 - DNA, 25 bp, Homo sapien
gaggaccccgcgatatactctaagg

SEQ ID NO: 2986652 - DNA, 25 bp, Homo sapien
gggatagtcacacgctccccaaagg

SEQ ID NO: 2986653 - DNA, 25 bp, Homo sapien
gcagtcctggttgttggcatcatca

SEQ ID NO: 2986654 - DNA, 25 bp, Homo sapien
ccagagctctatcagcaaggatgtg

SEQ ID NO: 2986655 - DNA, 25 bp, Homo sapien
cgggaggctgaggccagagaatcac

SEQ ID NO: 2986656 - DNA, 25 bp, Homo sapien
ctcgggaggctgaggccagagaatc

SEQ ID NO: 2986657 - DNA, 25 bp, Homo sapien
aaacattagccggatgtggtggtgc

SEQ ID NO: 2986658 - DNA, 25 bp, Homo sapien
atgcctgtagtcccagctactcggg

SEQ ID NO: 2986659 - DNA, 25 bp, Homo sapien
gggcgaatcatcttgagttcaagac

SEQ ID NO: 2986660 - DNA, 25 bp, Homo sapien
tgttgggcgaatcatcttgagttca

SEQ ID NO: 2986661 - DNA, 25 bp, Homo sapien
gaggctgtgttgggcgaatcatctt

SEQ ID NO: 2986662 - DNA, 25 bp, Homo sapien
gctgtgttgggcgaatcatcttgag

SEQ ID NO: 2986663 - DNA, 25 bp, Homo sapien
cagagctgcctgactactgccaacg

SEQ ID NO: 2986664 - DNA, 25 bp, Homo sapien
gagctgcctgactactgccaacggg

SEQ ID NO: 2986665 - DNA, 25 bp, Homo sapien
ctcttgtccagatccagacagggtg

SEQ ID NO: 2986666 - DNA, 25 bp, Homo sapien
gtggtgggctcttgtccagatccag

SEQ ID NO: 2986667 - DNA, 25 bp, Homo sapien
tgcaaatttattccatccaagctcc

SEQ ID NO: 2986668 - DNA, 25 bp, Homo sapien
tgagtgccaggttatcatgatgttc

SEQ ID NO: 2986669 - DNA, 25 bp, Homo sapien
tgaattctctccatagacccatgag

SEQ ID NO: 2986670 - DNA, 25 bp, Homo sapien
gatgttgcggagaagtaactgctca

SEQ ID NO: 2986671 - DNA, 25 bp, Homo sapien
tagcctgggcatggaagaatttctg

SEQ ID NO: 2986672 - DNA, 25 bp, Homo sapien
tctgccaagcttcctgggacaaagg

SEQ ID NO: 2986673 - DNA, 25 bp, Homo sapien
ttttatcagcgtgactcagcccagc

SEQ ID NO: 2986674 - DNA, 25 bp, Homo sapien
gaaacgggagccaggataggaacac

SEQ ID NO: 2986675 - DNA, 25 bp, Homo sapien
ccccaagaacgcagctcgctccagt

SEQ ID NO: 2986676 - DNA, 25 bp, Homo sapien
gaacgcagctcgctccagtctccag

SEQ ID NO: 2986677 - DNA, 25 bp, Homo sapien
agccatccagaatcgtcctccctct

SEQ ID NO: 2986678 - DNA, 25 bp, Homo sapien
gaagccatccagaatcgtcctccct

SEQ ID NO: 2986679 - DNA, 25 bp, Homo sapien
ataacagctacagtggaaaggcggg

SEQ ID NO: 2986680 - DNA, 25 bp, Homo sapien
tgagcaaataacctagccatccctg

SEQ ID NO: 2986681 - DNA, 25 bp, Homo sapien
tcatgggccatctactctgtctgga

SEQ ID NO: 2986682 - DNA, 25 bp, Homo sapien
tgttgaagccacctaagtcgtgcca

SEQ ID NO: 2986683 - DNA, 25 bp, Homo sapien
ggaacctttgcctgaaacgctggaa

SEQ ID NO: 2986684 - DNA, 25 bp, Homo sapien
tgggtccagggatacagcgcaagac

SEQ ID NO: 2986685 - DNA, 25 bp, Homo sapien
tagaaactcacgtccacagtcaggt

SEQ ID NO: 2986686 - DNA, 25 bp, Homo sapien
tataagggtagacactcaacagccg

SEQ ID NO: 2986687 - DNA, 25 bp, Homo sapien
ccaacgttaccatgaaagggcagtc

SEQ ID NO: 2986688 - DNA, 25 bp, Homo sapien
cttaagatgggctggttcacgcggt

SEQ ID NO: 2986689 - DNA, 25 bp, Homo sapien
tagagatgcgtgctaggaccaggct

SEQ ID NO: 2986690 - DNA, 25 bp, Homo sapien
tccaacacgggtctaggagccaact

SEQ ID NO: 2986691 - DNA, 25 bp, Homo sapien
tgaatgatctacctgagcaaagcca

SEQ ID NO: 2986692 - DNA, 25 bp, Homo sapien
cctgagcaaagccataaagaacgcc

SEQ ID NO: 2986693 - DNA, 25 bp, Homo sapien
agcaaagccataaagaacgccgggt

SEQ ID NO: 2986694 - DNA, 25 bp, Homo sapien
gcaatgaatgatctacctgagcaaa

SEQ ID NO: 2986695 - DNA, 25 bp, Homo sapien
ttcccaaacgggctttatatcttga

SEQ ID NO: 2986696 - DNA, 25 bp, Homo sapien
tgatgaccttttagaaaccaatgac

SEQ ID NO: 2986697 - DNA, 25 bp, Homo sapien
tcttgtccgacttgtgcataaaact

SEQ ID NO: 2986698 - DNA, 25 bp, Homo sapien
ttatacaagcccactgcgtaagtca

SEQ ID NO: 2986699 - DNA, 25 bp, Homo sapien
aattgtcgccgggtccttaggatgc

SEQ ID NO: 2986700 - DNA, 25 bp, Homo sapien
tccagcctggtgttcgatgacgcca

SEQ ID NO: 2986701 - DNA, 25 bp, Homo sapien
taggatgccactagccatgtgaagg

SEQ ID NO: 2986702 - DNA, 25 bp, Homo sapien
ggctcccgagccgtatgtagaacac

SEQ ID NO: 2986703 - DNA, 25 bp, Homo sapien
ggttgggtatccatgtcctcagatc

SEQ ID NO: 2986704 - DNA, 25 bp, Homo sapien
gcaggtggttgggtatccatgtcct

SEQ ID NO: 2986705 - DNA, 25 bp, Homo sapien
ggtggttgggtatccatgtcctcag

SEQ ID NO: 2986706 - DNA, 25 bp, Homo sapien
caggtggttgggtatccatgtcctc

SEQ ID NO: 2986707 - DNA, 25 bp, Homo sapien
tcatcggcaggtgtttaggtgtcca

SEQ ID NO: 2986708 - DNA, 25 bp, Homo sapien
tgggagctcgttacacatgcagatg

SEQ ID NO: 2986709 - DNA, 25 bp, Homo sapien
gacagctgatgagtaggagagaccc

SEQ ID NO: 2986710 - DNA, 25 bp, Homo sapien
gaaacatcagctccgatcagagagg

SEQ ID NO: 2986711 - DNA, 25 bp, Homo sapien
ggtgactccagccataatactctga

SEQ ID NO: 2986712 - DNA, 25 bp, Homo sapien
gaccaactgtgatccctaccgtgtg

SEQ ID NO: 2986713 - DNA, 25 bp, Homo sapien
ggactctctgactctacagcctgag

SEQ ID NO: 2986714 - DNA, 25 bp, Homo sapien
tggtgacacggagcacagatcgttt

SEQ ID NO: 2986715 - DNA, 25 bp, Homo sapien
ccatgagagcctttgtaggacagaa

SEQ ID NO: 2986716 - DNA, 25 bp, Homo sapien
gacagggtccctcggagagagaact

SEQ ID NO: 2986717 - DNA, 25 bp, Homo sapien
gggaacaagaagacacatcccgctt

SEQ ID NO: 2986718 - DNA, 25 bp, Homo sapien
catacagccaagaactgcaaacggg

SEQ ID NO: 2986719 - DNA, 25 bp, Homo sapien
ctatgcctggcctttcatgtttaac

SEQ ID NO: 2986720 - DNA, 25 bp, Homo sapien
acaaaaccatttttcgaagaggctg

SEQ ID NO: 2986721 - DNA, 25 bp, Homo sapien
caaaaccatttttcgaagaggctgc

SEQ ID NO: 2986722 - DNA, 25 bp, Homo sapien
tgcctggcctttcatgtttaacttt

SEQ ID NO: 2986723 - DNA, 25 bp, Homo sapien
gctattgtcagtagtcctgctgcgg

SEQ ID NO: 2986724 - DNA, 25 bp, Homo sapien
gctgttcccagctacgtgtggtggc

SEQ ID NO: 2986725 - DNA, 25 bp, Homo sapien
tgttgtcagttttgggctattgtca

SEQ ID NO: 2986726 - DNA, 25 bp, Homo sapien
gcgggcattcgtgtacaacatttgt

SEQ ID NO: 2986727 - DNA, 25 bp, Homo sapien
caatcttgtcatctcgaactgctcg

SEQ ID NO: 2986728 - DNA, 25 bp, Homo sapien
gacctgaaatggaatgaccaattct

SEQ ID NO: 2986729 - DNA, 25 bp, Homo sapien
ggcatggatggtaaggacgctcaat

SEQ ID NO: 2986730 - DNA, 25 bp, Homo sapien
cagggtagccctgtttgctggtccc

SEQ ID NO: 2986731 - DNA, 25 bp, Homo sapien
ctcgggtgacaatccccgccaggaa

SEQ ID NO: 2986732 - DNA, 25 bp, Homo sapien
cgggtgacaatccccgccaggaagc

SEQ ID NO: 2986733 - DNA, 25 bp, Homo sapien
tcgggtgacaatccccgccaggaag

SEQ ID NO: 2986734 - DNA, 25 bp, Homo sapien
ctgagcaagcttggcacaggcacca

SEQ ID NO: 2986735 - DNA, 25 bp, Homo sapien
tcccactgagcaagcttggcacagg

SEQ ID NO: 2986736 - DNA, 25 bp, Homo sapien
actgagcaagcttggcacaggcacc

SEQ ID NO: 2986737 - DNA, 25 bp, Homo sapien
ccactgagcaagcttggcacaggca

SEQ ID NO: 2986738 - DNA, 25 bp, Homo sapien
gtgtctgcacgtgctctccaggatg

SEQ ID NO: 2986739 - DNA, 25 bp, Homo sapien
gtacttctgtgtctgcacgtgctct

SEQ ID NO: 2986740 - DNA, 25 bp, Homo sapien
cacagggcacacagtacttctgtgt

SEQ ID NO: 2986741 - DNA, 25 bp, Homo sapien
tctgtgtctgcacgtgctctccagg

SEQ ID NO: 2986742 - DNA, 25 bp, Homo sapien
ggaacttagtgaacagctgctgctg

SEQ ID NO: 2986743 - DNA, 25 bp, Homo sapien
tggagaatgggtgaccgccctcctt

SEQ ID NO: 2986744 - DNA, 25 bp, Homo sapien
taatctctgtggtctgtgatggtcg

SEQ ID NO: 2986745 - DNA, 25 bp, Homo sapien
ttctggaaacactgacgtgcttgct

SEQ ID NO: 2986746 - DNA, 25 bp, Homo sapien
caaagcacttgggacgcagcttccg

SEQ ID NO: 2986747 - DNA, 25 bp, Homo sapien
gagagcacgtcattggatagcacca

SEQ ID NO: 2986748 - DNA, 25 bp, Homo sapien
tgtataacacagaattggactggcc

SEQ ID NO: 2986749 - DNA, 25 bp, Homo sapien
tcatagagtcggcatcccatggcaa

SEQ ID NO: 2986750 - DNA, 25 bp, Homo sapien
agttgacagtcacgcacacagataa

SEQ ID NO: 2986751 - DNA, 25 bp, Homo sapien
ttaggcgaagttgacagtcacgcac

SEQ ID NO: 2986752 - DNA, 25 bp, Homo sapien
ggcgaagttgacagtcacgcacaca

SEQ ID NO: 2986753 - DNA, 25 bp, Homo sapien
acgcacacagataacggagggggca

SEQ ID NO: 2986754 - DNA, 25 bp, Homo sapien
acttcatgtacatttacagtaccaa

SEQ ID NO: 2986755 - DNA, 25 bp, Homo sapien
tgatgcaaatctgtactttaagacg

SEQ ID NO: 2986756 - DNA, 25 bp, Homo sapien
ctttaagacgacaaaagacaaggca

SEQ ID NO: 2986757 - DNA, 25 bp, Homo sapien
gaattcatacaacaatatgcacttc

SEQ ID NO: 2986758 - DNA, 25 bp, Homo sapien
gcctggtaggcaaggataagtcctc

SEQ ID NO: 2986759 - DNA, 25 bp, Homo sapien
cagatccaggtgcatgcaaaaccat

SEQ ID NO: 2986760 - DNA, 25 bp, Homo sapien
tcccagcagaagtggctaagtgcct

SEQ ID NO: 2986761 - DNA, 25 bp, Homo sapien
gcatatgctggcctgtgtacccaca

SEQ ID NO: 2986762 - DNA, 25 bp, Homo sapien
tcttccccaggtgacaacatagttt

SEQ ID NO: 2986763 - DNA, 25 bp, Homo sapien
tggtggcttcagacgcagcctgaca

SEQ ID NO: 2986764 - DNA, 25 bp, Homo sapien
tttatgacaaagcacgcggcagcct

SEQ ID NO: 2986765 - DNA, 25 bp, Homo sapien
tcctgaaatatgttatcggtgatga

SEQ ID NO: 2986766 - DNA, 25 bp, Homo sapien
gacagaaactccctctgggctgttg

SEQ ID NO: 2986767 - DNA, 25 bp, Homo sapien
ctgatgatgggagaatgattctgaa

SEQ ID NO: 2986768 - DNA, 25 bp, Homo sapien
gcagcctgaagacagaaactccctc

SEQ ID NO: 2986769 - DNA, 25 bp, Homo sapien
tatttgcaggctctgatgatgggag

SEQ ID NO: 2986770 - DNA, 25 bp, Homo sapien
cagaatactagcgtccttggtggag

SEQ ID NO: 2986771 - DNA, 25 bp, Homo sapien
taagatcaggttctggaatgcactc

SEQ ID NO: 2986772 - DNA, 25 bp, Homo sapien
agctcggatggttctgcaggcccag

SEQ ID NO: 2986773 - DNA, 25 bp, Homo sapien
gagatgtacagaactgccccagtgc

SEQ ID NO: 2986774 - DNA, 25 bp, Homo sapien
actggtctcaaactcctggcctcag

SEQ ID NO: 2986775 - DNA, 25 bp, Homo sapien
gactggtctcaaactcctggcctca

SEQ ID NO: 2986776 - DNA, 25 bp, Homo sapien
ttttatggctgcaattttttgtatt

SEQ ID NO: 2986777 - DNA, 25 bp, Homo sapien
ttttttatggctgcaattttttgta

SEQ ID NO: 2986778 - DNA, 25 bp, Homo sapien
cctcagcctggattggtgtcctggc

SEQ ID NO: 2986779 - DNA, 25 bp, Homo sapien
ccttctgcaactggagacaagctta

SEQ ID NO: 2986780 - DNA, 25 bp, Homo sapien
cctggctgggctccgaagagcagaa

SEQ ID NO: 2986781 - DNA, 25 bp, Homo sapien
gacaagcttattctcagcccctcag

SEQ ID NO: 2986782 - DNA, 25 bp, Homo sapien
tgtgagatttcgtcagcacctcctc

SEQ ID NO: 2986783 - DNA, 25 bp, Homo sapien
tctccactgccggaagaatccaggg

SEQ ID NO: 2986784 - DNA, 25 bp, Homo sapien
gttgcttctcatcagcttccctgtg

SEQ ID NO: 2986785 - DNA, 25 bp, Homo sapien
cccacgagtgggcagttcttggctg

SEQ ID NO: 2986786 - DNA, 25 bp, Homo sapien
ggcttcaaactccaacaaggcctgg

SEQ ID NO: 2986787 - DNA, 25 bp, Homo sapien
gcttcaaactccaacaaggcctggg

SEQ ID NO: 2986788 - DNA, 25 bp, Homo sapien
tcacgcccaggtcgactggtcctgc

SEQ ID NO: 2986789 - DNA, 25 bp, Homo sapien
tcaaactccaacaaggcctgggcct

SEQ ID NO: 2986790 - DNA, 25 bp, Homo sapien
gagggccagtcggcccaggtggctc

SEQ ID NO: 2986791 - DNA, 25 bp, Homo sapien
gaaggagggccagtcggcccaggtg

SEQ ID NO: 2986792 - DNA, 25 bp, Homo sapien
aggagggccagtcggcccaggtggc

SEQ ID NO: 2986793 - DNA, 25 bp, Homo sapien
aaggagggccagtcggcccaggtgg

SEQ ID NO: 2986794 - DNA, 25 bp, Homo sapien
ttcccatccagcgatgatcacagct

SEQ ID NO: 2986795 - DNA, 25 bp, Homo sapien
tgaagaccacgtgggtgcttgacca

SEQ ID NO: 2986796 - DNA, 25 bp, Homo sapien
acagctccatcctggacctgcaagg

SEQ ID NO: 2986797 - DNA, 25 bp, Homo sapien
gacctgcaaggtgcagatgtgtgaa

SEQ ID NO: 2986798 - DNA, 25 bp, Homo sapien
gtcatgctgatgatgtggcaggtgt

SEQ ID NO: 2986799 - DNA, 25 bp, Homo sapien
ggtcatgctgatgatgtggcaggtg

SEQ ID NO: 2986800 - DNA, 25 bp, Homo sapien
actgttatgacccagccattgggtg

SEQ ID NO: 2986801 - DNA, 25 bp, Homo sapien
tccgttctctttgggaccactgtta

SEQ ID NO: 2986802 - DNA, 25 bp, Homo sapien
gccattgggtgagggcggtcccagg

SEQ ID NO: 2986803 - DNA, 25 bp, Homo sapien
aggaactgggcccagatcggcccat

SEQ ID NO: 2986804 - DNA, 25 bp, Homo sapien
catgccatccattcgtcacggtttg

SEQ ID NO: 2986805 - DNA, 25 bp, Homo sapien
ttgagcccatgccatccattcgtca

SEQ ID NO: 2986806 - DNA, 25 bp, Homo sapien
gcccatgccatccattcgtcacggt

SEQ ID NO: 2986807 - DNA, 25 bp, Homo sapien
cattgagcccatgccatccattcgt

SEQ ID NO: 2986808 - DNA, 25 bp, Homo sapien
gactgatgagtgttcccctggttct

SEQ ID NO: 2986809 - DNA, 25 bp, Homo sapien
ttccaggggacagcccattcttggg

SEQ ID NO: 2986810 - DNA, 25 bp, Homo sapien
gctttgatacatatcctgagatctg

SEQ ID NO: 2986811 - DNA, 25 bp, Homo sapien
cagcaaccagattcagacggtctag

SEQ ID NO: 2986812 - DNA, 25 bp, Homo sapien
cccgaggccccggactccaggctgg

SEQ ID NO: 2986813 - DNA, 25 bp, Homo sapien
tgggctccacactgaaggcgggagt

SEQ ID NO: 2986814 - DNA, 25 bp, Homo sapien
ctgtcactgcactcagcgaggctgg

SEQ ID NO: 2986815 - DNA, 25 bp, Homo sapien
ggcgggagtggctgctttctgtcac

SEQ ID NO: 2986816 - DNA, 25 bp, Homo sapien
tgcatggacgtccacatgcttctgg

SEQ ID NO: 2986817 - DNA, 25 bp, Homo sapien
agatgtcctgttctcggcccctgct

SEQ ID NO: 2986818 - DNA, 25 bp, Homo sapien
gggctggcctgcctcgaagtcaggg

SEQ ID NO: 2986819 - DNA, 25 bp, Homo sapien
gcttctggctaatgaatgcttctgt

SEQ ID NO: 2986820 - DNA, 25 bp, Homo sapien
tacacgaaggtcacaatgagccagt

SEQ ID NO: 2986821 - DNA, 25 bp, Homo sapien
aatacttcccggctggtgttggaca

SEQ ID NO: 2986822 - DNA, 25 bp, Homo sapien
agcttgcttcaacgtgtctgcccca

SEQ ID NO: 2986823 - DNA, 25 bp, Homo sapien
gaatcctactgctgtgaggaccaaa

SEQ ID NO: 2986824 - DNA, 25 bp, Homo sapien
ggtctctcgctctgcaaaggttggt

SEQ ID NO: 2986825 - DNA, 25 bp, Homo sapien
gagcactagtccgagatcttccaag

SEQ ID NO: 2986826 - DNA, 25 bp, Homo sapien
gagactcccagaccaaatccggagg

SEQ ID NO: 2986827 - DNA, 25 bp, Homo sapien
caccccgggacatgtggtcttgcca

SEQ ID NO: 2986828 - DNA, 25 bp, Homo sapien
gaaagccatctgtgtgcactctgtg

SEQ ID NO: 2986829 - DNA, 25 bp, Homo sapien
tctgagagccgaggtttcttcatct

SEQ ID NO: 2986830 - DNA, 25 bp, Homo sapien
gatattctgagcatcggtgtctggg

SEQ ID NO: 2986831 - DNA, 25 bp, Homo sapien
tgatttccctctctgagagccgagg

SEQ ID NO: 2986832 - DNA, 25 bp, Homo sapien
cccacagggactggcatttgtaagc

SEQ ID NO: 2986833 - DNA, 25 bp, Homo sapien
ttgtcacgggaacaaaccatcccca

SEQ ID NO: 2986834 - DNA, 25 bp, Homo sapien
aagccattgtcatacatgcttggca

SEQ ID NO: 2986835 - DNA, 25 bp, Homo sapien
tggcacgttagaaatccagagggca

SEQ ID NO: 2986836 - DNA, 25 bp, Homo sapien
gacaagacagacagatccgggccat

SEQ ID NO: 2986837 - DNA, 25 bp, Homo sapien
agacagacagatccgggccatgaca

SEQ ID NO: 2986838 - DNA, 25 bp, Homo sapien
gagctggagcggttcttttgagctt

SEQ ID NO: 2986839 - DNA, 25 bp, Homo sapien
gctggagcggttcttttgagcttct

SEQ ID NO: 2986840 - DNA, 25 bp, Homo sapien
aggatgccgcccgataattcccgga

SEQ ID NO: 2986841 - DNA, 25 bp, Homo sapien
gggagtcaggatgccgcccgataat

SEQ ID NO: 2986842 - DNA, 25 bp, Homo sapien
aaggcgggagtcaggatgccgcccg

SEQ ID NO: 2986843 - DNA, 25 bp, Homo sapien
tgccgcccgataattcccggagctg

SEQ ID NO: 2986844 - DNA, 25 bp, Homo sapien
tgagcattcaacctggaggtgccct

SEQ ID NO: 2986845 - DNA, 25 bp, Homo sapien
cattcccgaagtcgctgagcattca

SEQ ID NO: 2986846 - DNA, 25 bp, Homo sapien
ctcttgcagcccaataggtgaggga

SEQ ID NO: 2986847 - DNA, 25 bp, Homo sapien
cccttggggctttgaggtgcatgtc

SEQ ID NO: 2986848 - DNA, 25 bp, Homo sapien
catgcgtctggggttgtgcacccag

SEQ ID NO: 2986849 - DNA, 25 bp, Homo sapien
ctggtccagtagatcacagcaaagc

SEQ ID NO: 2986850 - DNA, 25 bp, Homo sapien
ctgctggtccagtagatcacagcaa

SEQ ID NO: 2986851 - DNA, 25 bp, Homo sapien
aggcaggccaaggacatgcgtctgg

SEQ ID NO: 2986852 - DNA, 25 bp, Homo sapien
cgacaagtggcagaactcagtaata

SEQ ID NO: 2986853 - DNA, 25 bp, Homo sapien
tacagggcacatagagggagcttct

SEQ ID NO: 2986854 - DNA, 25 bp, Homo sapien
ccctctctgcgaggtaagaatttag

SEQ ID NO: 2986855 - DNA, 25 bp, Homo sapien
gaatttagagttacgattctccaag

SEQ ID NO: 2986856 - DNA, 25 bp, Homo sapien
gtcagcacacctggaatgtgagcct

SEQ ID NO: 2986857 - DNA, 25 bp, Homo sapien
gcacacctggaatgtgagcctaacc

SEQ ID NO: 2986858 - DNA, 25 bp, Homo sapien
gaatgtgagcctaaccctgggaaaa

SEQ ID NO: 2986859 - DNA, 25 bp, Homo sapien
cctggaatgtgagcctaaccctggg

SEQ ID NO: 2986860 - DNA, 25 bp, Homo sapien
taattgacaaatgtgcgtcctgtgc

SEQ ID NO: 2986861 - DNA, 25 bp, Homo sapien
caaatgtgcgtcctgtgcatgagct

SEQ ID NO: 2986862 - DNA, 25 bp, Homo sapien
cggctaattgacaaatgtgcgtcct

SEQ ID NO: 2986863 - DNA, 25 bp, Homo sapien
tgacaaatgtgcgtcctgtgcatga

SEQ ID NO: 2986864 - DNA, 25 bp, Homo sapien
ctgggaagttcaggccaccccagta

SEQ ID NO: 2986865 - DNA, 25 bp, Homo sapien
caccccagtaactttcatcttggga

SEQ ID NO: 2986866 - DNA, 25 bp, Homo sapien
ttcaggccaccccagtaactttcat

SEQ ID NO: 2986867 - DNA, 25 bp, Homo sapien
actgggaagttcaggccaccccagt

SEQ ID NO: 2986868 - DNA, 25 bp, Homo sapien
gaaataacagcttcctctccgaagg

SEQ ID NO: 2986869 - DNA, 25 bp, Homo sapien
tctctaattactaggatcgcaccag

SEQ ID NO: 2986870 - DNA, 25 bp, Homo sapien
aaattaagggagctttctcagcagt

SEQ ID NO: 2986871 - DNA, 25 bp, Homo sapien
gcaggcatgcaaaacacggtgttga

SEQ ID NO: 2986872 - DNA, 25 bp, Homo sapien
caacaggttgagtaatctgaggagc

SEQ ID NO: 2986873 - DNA, 25 bp, Homo sapien
cggtttgggcaatggaagcagattc

SEQ ID NO: 2986874 - DNA, 25 bp, Homo sapien
tatacacaagggtgaaggagccggt

SEQ ID NO: 2986875 - DNA, 25 bp, Homo sapien
catttgggaacgagtctaatctcag

SEQ ID NO: 2986876 - DNA, 25 bp, Homo sapien
gcttcagccagacggggcgctcgcg

SEQ ID NO: 2986877 - DNA, 25 bp, Homo sapien
tagcacgtgactcccaccgtatctg

SEQ ID NO: 2986878 - DNA, 25 bp, Homo sapien
ccgcgttggcctccaacaggaagtc

SEQ ID NO: 2986879 - DNA, 25 bp, Homo sapien
gtcccggcccctagcacgtgactcc

SEQ ID NO: 2986880 - DNA, 25 bp, Homo sapien
gctgaggtgcggagctgccaccgcg

SEQ ID NO: 2986881 - DNA, 25 bp, Homo sapien
tgaggtgcggagctgccaccgcggc

SEQ ID NO: 2986882 - DNA, 25 bp, Homo sapien
gggccgtcgcgctgaggtgcggagc

SEQ ID NO: 2986883 - DNA, 25 bp, Homo sapien
gtcgcgctgaggtgcggagctgcca

SEQ ID NO: 2986884 - DNA, 25 bp, Homo sapien
ggctccgcggggctccggtggcgcg

SEQ ID NO: 2986885 - DNA, 25 bp, Homo sapien
cggctccgcggggctccggtggcgc

SEQ ID NO: 2986886 - DNA, 25 bp, Homo sapien
gcggctccgcggggctccggtggcg

SEQ ID NO: 2986887 - DNA, 25 bp, Homo sapien
accgaacctcggctacacaatggat

SEQ ID NO: 2986888 - DNA, 25 bp, Homo sapien
tactggccgaagtacgtcaacgtga

SEQ ID NO: 2986889 - DNA, 25 bp, Homo sapien
ccttaaagacgctgaagttggacat

SEQ ID NO: 2986890 - DNA, 25 bp, Homo sapien
cagtcagaaggctccaacttgcaac

SEQ ID NO: 2986891 - DNA, 25 bp, Homo sapien
tatgtctcagccattatgttacgcg

SEQ ID NO: 2986892 - DNA, 25 bp, Homo sapien
gccaacaactagaggttccacctga

SEQ ID NO: 2986893 - DNA, 25 bp, Homo sapien
gaatttgttaaagtcagtcccactg

SEQ ID NO: 2986894 - DNA, 25 bp, Homo sapien
tgaagtcttgcctaaccactgcagc

SEQ ID NO: 2986895 - DNA, 25 bp, Homo sapien
tctgtggcagattctaggaagagca

SEQ ID NO: 2986896 - DNA, 25 bp, Homo sapien
gaagagcagtaagtaccctatgcct

SEQ ID NO: 2986897 - DNA, 25 bp, Homo sapien
gggtatggccctaagaaaatctgat

SEQ ID NO: 2986898 - DNA, 25 bp, Homo sapien
gcttttcagtttgaccctaccagta

SEQ ID NO: 2986899 - DNA, 25 bp, Homo sapien
tacagccccacgtaccaggcttact

SEQ ID NO: 2986900 - DNA, 25 bp, Homo sapien
ccccacgtaccaggcttactagttg

SEQ ID NO: 2986901 - DNA, 25 bp, Homo sapien
cacgtaccaggcttactagttgaaa

SEQ ID NO: 2986902 - DNA, 25 bp, Homo sapien
ctgtcagcttcccaattcccctcaa

SEQ ID NO: 2986903 - DNA, 25 bp, Homo sapien
tgaaatacgcttagcccaaaccagg

SEQ ID NO: 2986904 - DNA, 25 bp, Homo sapien
gatatcaaagtaaagcagcagccag

SEQ ID NO: 2986905 - DNA, 25 bp, Homo sapien
tagtgctccaaggaaaatttgctgc

SEQ ID NO: 2986906 - DNA, 25 bp, Homo sapien
taaaggaatccgtgagatctctgct

SEQ ID NO: 2986907 - DNA, 25 bp, Homo sapien
ggccaattacctgcttttatctata

SEQ ID NO: 2986908 - DNA, 25 bp, Homo sapien
ttacctgcttttatctataccaggg

SEQ ID NO: 2986909 - DNA, 25 bp, Homo sapien
caggctaggccaattacctgctttt

SEQ ID NO: 2986910 - DNA, 25 bp, Homo sapien
ggctaggccaattacctgcttttat

SEQ ID NO: 2986911 - DNA, 25 bp, Homo sapien
ggactgaatgagatgaccaaaggaa

SEQ ID NO: 2986912 - DNA, 25 bp, Homo sapien
gatctgttcagtggaaatgcccatt

SEQ ID NO: 2986913 - DNA, 25 bp, Homo sapien
taatttctgatggacatacatggag

SEQ ID NO: 2986914 - DNA, 25 bp, Homo sapien
aggttggtgtcttcagtgcgtatgt

SEQ ID NO: 2986915 - DNA, 25 bp, Homo sapien
tcctcggtgaactctacagaactgt

SEQ ID NO: 2986916 - DNA, 25 bp, Homo sapien
aacatacacaagtagggtgcagtgg

SEQ ID NO: 2986917 - DNA, 25 bp, Homo sapien
gctcatttacctatggcaaaaggca

SEQ ID NO: 2986918 - DNA, 25 bp, Homo sapien
ccaggactacctgatcttgggcaag

SEQ ID NO: 2986919 - DNA, 25 bp, Homo sapien
aattctcaaagggatctgggactac

SEQ ID NO: 2986920 - DNA, 25 bp, Homo sapien
cacaaaactgtggagataggctgag

SEQ ID NO: 2986921 - DNA, 25 bp, Homo sapien
aagcattttagttcccggcggcagg

SEQ ID NO: 2986922 - DNA, 25 bp, Homo sapien
gagaaacagactacgcagggctgaa

SEQ ID NO: 2986923 - DNA, 25 bp, Homo sapien
tagcagctactcaattctggcggtg

SEQ ID NO: 2986924 - DNA, 25 bp, Homo sapien
aatgtgattgagaaggactacccta

SEQ ID NO: 2986925 - DNA, 25 bp, Homo sapien
taaactaacgggcatagcggtgttc

SEQ ID NO: 2986926 - DNA, 25 bp, Homo sapien
tcctaacaccatcacgctggaggtt

SEQ ID NO: 2986927 - DNA, 25 bp, Homo sapien
taatagatgccttagcacagatgtc

SEQ ID NO: 2986928 - DNA, 25 bp, Homo sapien
tctagaggctgggttctatagaccc

SEQ ID NO: 2986929 - DNA, 25 bp, Homo sapien
tccaagaccagggttccatcatggt

SEQ ID NO: 2986930 - DNA, 25 bp, Homo sapien
tccccatatggcagagagtagacag

SEQ ID NO: 2986931 - DNA, 25 bp, Homo sapien
tccttgtttctagggatgtcttgcc

SEQ ID NO: 2986932 - DNA, 25 bp, Homo sapien
gaaagttggtctgtgaatttacgcc

SEQ ID NO: 2986933 - DNA, 25 bp, Homo sapien
cccaaatgggttatagcctcatctt

SEQ ID NO: 2986934 - DNA, 25 bp, Homo sapien
tgtgtcctctggtagtaacattccc

SEQ ID NO: 2986935 - DNA, 25 bp, Homo sapien
tgcctggctgggaagacccttttct

SEQ ID NO: 2986936 - DNA, 25 bp, Homo sapien
taaataattggcacagtccacccct

SEQ ID NO: 2986937 - DNA, 25 bp, Homo sapien
ggcaaagcctaaagtgaagccagct

SEQ ID NO: 2986938 - DNA, 25 bp, Homo sapien
tacataaactgggaactgagcaaca

SEQ ID NO: 2986939 - DNA, 25 bp, Homo sapien
taagaaacgcgtctcttggcctctc

SEQ ID NO: 2986940 - DNA, 25 bp, Homo sapien
aactgaccacgcttcttaagaaacg

SEQ ID NO: 2986941 - DNA, 25 bp, Homo sapien
tggagttaccgcagcctgaactgac

SEQ ID NO: 2986942 - DNA, 25 bp, Homo sapien
tctagccactgacacaggtattcca

SEQ ID NO: 2986943 - DNA, 25 bp, Homo sapien
catgacccacgttaaaaccacctag

SEQ ID NO: 2986944 - DNA, 25 bp, Homo sapien
tccatatccctgtcaaatatctcct

SEQ ID NO: 2986945 - DNA, 25 bp, Homo sapien
caaatgtatcaattaaatggagagt

SEQ ID NO: 2986946 - DNA, 25 bp, Homo sapien
cttccccccaggacaatatttgctt

SEQ ID NO: 2986947 - DNA, 25 bp, Homo sapien
cttgcacagtgaaattataaacttg

SEQ ID NO: 2986948 - DNA, 25 bp, Homo sapien
ttgcacagtgaaattataaacttgg

SEQ ID NO: 2986949 - DNA, 25 bp, Homo sapien
tttctggtatataatctcagctgaa

SEQ ID NO: 2986950 - DNA, 25 bp, Homo sapien
ttttctgatatgatcaagtagtatt

SEQ ID NO: 2986951 - DNA, 25 bp, Homo sapien
ctgatatgatcaagtagtatttaaa

SEQ ID NO: 2986952 - DNA, 25 bp, Homo sapien
ttctggtatataatctcagctgaaa

SEQ ID NO: 2986953 - DNA, 25 bp, Homo sapien
tttcttccatcaaacgttcctcttc

SEQ ID NO: 2986954 - DNA, 25 bp, Homo sapien
gtctttctgcccaactctagaggcc

SEQ ID NO: 2986955 - DNA, 25 bp, Homo sapien
ctgtagcgatgagtctttctgccca

SEQ ID NO: 2986956 - DNA, 25 bp, Homo sapien
agaggccaatttagtatcagaaacc

SEQ ID NO: 2986957 - DNA, 25 bp, Homo sapien
aactctagaggccaatttagtatca

SEQ ID NO: 2986958 - DNA, 25 bp, Homo sapien
tctgccatctaacaggtatttatta

SEQ ID NO: 2986959 - DNA, 25 bp, Homo sapien
ttgagaacagggaactgatctctgc

SEQ ID NO: 2986960 - DNA, 25 bp, Homo sapien
ctctgccatctaacaggtatttatt

SEQ ID NO: 2986961 - DNA, 25 bp, Homo sapien
cttctttgagaacagggaactgatc

SEQ ID NO: 2986962 - DNA, 25 bp, Homo sapien
gattttatacgcacccagtcctcca

SEQ ID NO: 2986963 - DNA, 25 bp, Homo sapien
tcagtgattttatacgcacccagtc

SEQ ID NO: 2986964 - DNA, 25 bp, Homo sapien
tgattttatacgcacccagtcctcc

SEQ ID NO: 2986965 - DNA, 25 bp, Homo sapien
agtgattttatacgcacccagtcct

SEQ ID NO: 2986966 - DNA, 25 bp, Homo sapien
agaccctgtgcagactctagagcca

SEQ ID NO: 2986967 - DNA, 25 bp, Homo sapien
taagctcaacaagcacttcaagctg

SEQ ID NO: 2986968 - DNA, 25 bp, Homo sapien
tgcaacatgggaaaagaagttccct

SEQ ID NO: 2986969 - DNA, 25 bp, Homo sapien
ccacctgagcaggaatgcaacatgg

SEQ ID NO: 2986970 - DNA, 25 bp, Homo sapien
taatgctatggctggtagtctacag

SEQ ID NO: 2986971 - DNA, 25 bp, Homo sapien
ttccagcttgcaatgctaatgctat

SEQ ID NO: 2986972 - DNA, 25 bp, Homo sapien
gctatggctggtagtctacaggtca

SEQ ID NO: 2986973 - DNA, 25 bp, Homo sapien
caatgctaatgctatggctggtagt

SEQ ID NO: 2986974 - DNA, 25 bp, Homo sapien
gccttgagctatgagcacaacagga

SEQ ID NO: 2986975 - DNA, 25 bp, Homo sapien
tgtgcccctcagagacgcctttgtg

SEQ ID NO: 2986976 - DNA, 25 bp, Homo sapien
tgaacgagcacaagcacatcaggct

SEQ ID NO: 2986977 - DNA, 25 bp, Homo sapien
ggcttgtctgaatgcgtggcccacg

SEQ ID NO: 2986978 - DNA, 25 bp, Homo sapien
actcaggcaaccgagatgatatggc

SEQ ID NO: 2986979 - DNA, 25 bp, Homo sapien
tgatatggctgagatgactgaccca

SEQ ID NO: 2986980 - DNA, 25 bp, Homo sapien
gaggaaaaggagttcatgctacaga

SEQ ID NO: 2986981 - DNA, 25 bp, Homo sapien
gacccagctaccactgggactagaa

SEQ ID NO: 2986982 - DNA, 25 bp, Homo sapien
agtacagatgcaactgtccatttat

SEQ ID NO: 2986983 - DNA, 25 bp, Homo sapien
tataatacctaatgtaatttacatg

SEQ ID NO: 2986984 - DNA, 25 bp, Homo sapien
gtacagatgcaactgtccatttata

SEQ ID NO: 2986985 - DNA, 25 bp, Homo sapien
ataatacctaatgtaatttacatgc

SEQ ID NO: 2986986 - DNA, 25 bp, Homo sapien
tcacactggttagagtccccgtagg

SEQ ID NO: 2986987 - DNA, 25 bp, Homo sapien
tggccactggcagatgcacgtttgc

SEQ ID NO: 2986988 - DNA, 25 bp, Homo sapien
gaagtactggtactggtaccggcag

SEQ ID NO: 2986989 - DNA, 25 bp, Homo sapien
gaacaggtcttagtaggttctggca

SEQ ID NO: 2986990 - DNA, 25 bp, Homo sapien
tgatgctgtgttccggctccaggta

SEQ ID NO: 2986991 - DNA, 25 bp, Homo sapien
tgggatgatgctgtgttccggctcc

SEQ ID NO: 2986992 - DNA, 25 bp, Homo sapien
ctggttggagcttactgggatgatg

SEQ ID NO: 2986993 - DNA, 25 bp, Homo sapien
cttactgggatgatgctgtgttccg

SEQ ID NO: 2986994 - DNA, 25 bp, Homo sapien
tacagttagaaacgcctagtggaag

SEQ ID NO: 2986995 - DNA, 25 bp, Homo sapien
taacaactagttacaggcaaggaag

SEQ ID NO: 2986996 - DNA, 25 bp, Homo sapien
tgtgcactcataagacagactagga

SEQ ID NO: 2986997 - DNA, 25 bp, Homo sapien
gccttgatgggttcgtatggaccaa

SEQ ID NO: 2986998 - DNA, 25 bp, Homo sapien
taccaagtggttagcagacgaaagc

SEQ ID NO: 2986999 - DNA, 25 bp, Homo sapien
taaactgctggcaactaaatagatg

SEQ ID NO: 2987000 - DNA, 25 bp, Homo sapien
tctgttaagattttcccaaggacca

SEQ ID NO: 2987001 - DNA, 25 bp, Homo sapien
gaaaactgatgcaatactgtcaacc

SEQ ID NO: 2987002 - DNA, 25 bp, Homo sapien
taagaaatggcaaaatgtgtggttg

SEQ ID NO: 2987003 - DNA, 25 bp, Homo sapien
ttttctatagaagcaagcttgcaga

SEQ ID NO: 2987004 - DNA, 25 bp, Homo sapien
catctcgttaggaagcatattctat

SEQ ID NO: 2987005 - DNA, 25 bp, Homo sapien
taactgtcagactaagtctctttcc

SEQ ID NO: 2987006 - DNA, 25 bp, Homo sapien
cccaggccaacgtgggtgacggcaa

SEQ ID NO: 2987007 - DNA, 25 bp, Homo sapien
gatacttgttgacatcaataacgct

SEQ ID NO: 2987008 - DNA, 25 bp, Homo sapien
aatgcccaggccaacgtgggtgacg

SEQ ID NO: 2987009 - DNA, 25 bp, Homo sapien
caataacgctacaaaaccaatgaag

SEQ ID NO: 2987010 - DNA, 25 bp, Homo sapien
gactaggttcttttcactgccaatt

SEQ ID NO: 2987011 - DNA, 25 bp, Homo sapien
gaattatgctctaggtgatttcaaa

SEQ ID NO: 2987012 - DNA, 25 bp, Homo sapien
caaagtaggtacgtaattccaggtg

SEQ ID NO: 2987013 - DNA, 25 bp, Homo sapien
gaccatactaaagctaatatcaacc

SEQ ID NO: 2987014 - DNA, 25 bp, Homo sapien
tgtctgtagtacattctgaggcaga

SEQ ID NO: 2987015 - DNA, 25 bp, Homo sapien
ccttgtcagtcctatctattatcac

SEQ ID NO: 2987016 - DNA, 25 bp, Homo sapien
gatggaaggccacgcctccttgtca

SEQ ID NO: 2987017 - DNA, 25 bp, Homo sapien
agctgcagttggcttcgcttctgta

SEQ ID NO: 2987018 - DNA, 25 bp, Homo sapien
tattttgacctatggcactgactgg

SEQ ID NO: 2987019 - DNA, 25 bp, Homo sapien
ccaggcgagtattccaggaccagca

SEQ ID NO: 2987020 - DNA, 25 bp, Homo sapien
tccaagggcactctgattagaaggg

SEQ ID NO: 2987021 - DNA, 25 bp, Homo sapien
cactgactggactgcaaatactgga

SEQ ID NO: 2987022 - DNA, 25 bp, Homo sapien
ggtgacttgtcctcctgatttgcgg

SEQ ID NO: 2987023 - DNA, 25 bp, Homo sapien
gaagatgccgctttggcccaggagt

SEQ ID NO: 2987024 - DNA, 25 bp, Homo sapien
ggctggtgacactaggactctccca

SEQ ID NO: 2987025 - DNA, 25 bp, Homo sapien
cagcagtagagcttatcgagtcccc

SEQ ID NO: 2987026 - DNA, 25 bp, Homo sapien
gacagacgatgaatctgcccaatct

SEQ ID NO: 2987027 - DNA, 25 bp, Homo sapien
ccccaagtgtccaaggacagacgat

SEQ ID NO: 2987028 - DNA, 25 bp, Homo sapien
cccagatctcgtggtgtcattccaa

SEQ ID NO: 2987029 - DNA, 25 bp, Homo sapien
tatttgtgctgttgccccagccact

SEQ ID NO: 2987030 - DNA, 25 bp, Homo sapien
ttcacagaagcagctcctccccagt

SEQ ID NO: 2987031 - DNA, 25 bp, Homo sapien
cacagaagcagctcctccccagtta

SEQ ID NO: 2987032 - DNA, 25 bp, Homo sapien
gtttcacagaagcagctcctcccca

SEQ ID NO: 2987033 - DNA, 25 bp, Homo sapien
tgtttcacagaagcagctcctcccc

SEQ ID NO: 2987034 - DNA, 25 bp, Homo sapien
cgaatggacggtggagagggttctt

SEQ ID NO: 2987035 - DNA, 25 bp, Homo sapien
ttttgcggcgaatggacggtggaga

SEQ ID NO: 2987036 - DNA, 25 bp, Homo sapien
ctgtccttctgtttgaccggtaccg

SEQ ID NO: 2987037 - DNA, 25 bp, Homo sapien
tcaatttccattttgcggcgaatgg

SEQ ID NO: 2987038 - DNA, 25 bp, Homo sapien
cagttttattgttatagttgcttgg

SEQ ID NO: 2987039 - DNA, 25 bp, Homo sapien
agttttattgttatagttgcttggg

SEQ ID NO: 2987040 - DNA, 25 bp, Homo sapien
acagttttattgttatagttgcttg

SEQ ID NO: 2987041 - DNA, 25 bp, Homo sapien
ctggatgaccgggttgtttctatcc

SEQ ID NO: 2987042 - DNA, 25 bp, Homo sapien
ggatgaccgggttgtttctatccca

SEQ ID NO: 2987043 - DNA, 25 bp, Homo sapien
ctctggatgaccgggttgtttctat

SEQ ID NO: 2987044 - DNA, 25 bp, Homo sapien
gatgaccgggttgtttctatcccac

SEQ ID NO: 2987045 - DNA, 25 bp, Homo sapien
gtgtgtggtgttgctcgtggtagtg

SEQ ID NO: 2987046 - DNA, 25 bp, Homo sapien
ctgtgtgtggtgttgctcgtggtag

SEQ ID NO: 2987047 - DNA, 25 bp, Homo sapien
tgtgtgtggtgttgctcgtggtagt

SEQ ID NO: 2987048 - DNA, 25 bp, Homo sapien
gaccaagcaacggtgatcgattcag

SEQ ID NO: 2987049 - DNA, 25 bp, Homo sapien
ttcagctgagtaccggcctggtgcg

SEQ ID NO: 2987050 - DNA, 25 bp, Homo sapien
tgatcgattcagctgagtaccggcc

SEQ ID NO: 2987051 - DNA, 25 bp, Homo sapien
caacggtgatcgattcagctgagta

SEQ ID NO: 2987052 - DNA, 25 bp, Homo sapien
tgacctctggtttagtgacactgat

SEQ ID NO: 2987053 - DNA, 25 bp, Homo sapien
cactgatgcgttagctggaggctaa

SEQ ID NO: 2987054 - DNA, 25 bp, Homo sapien
catttgtgggactaggtgcagccca

SEQ ID NO: 2987055 - DNA, 25 bp, Homo sapien
gcagcccacggaccactgatttttg

SEQ ID NO: 2987056 - DNA, 25 bp, Homo sapien
tatatttggtgataatatgtgcaat

SEQ ID NO: 2987057 - DNA, 25 bp, Homo sapien
caactgctcctatagtattgctaca

SEQ ID NO: 2987058 - DNA, 25 bp, Homo sapien
tgcacaggctgcaaaagttgcaggg

SEQ ID NO: 2987059 - DNA, 25 bp, Homo sapien
tacacctacaaagagcacacgcatg

SEQ ID NO: 2987060 - DNA, 25 bp, Homo sapien
tttgccgacttgtaggagcccacag

SEQ ID NO: 2987061 - DNA, 25 bp, Homo sapien
gctagagcctttgccgacttgtagg

SEQ ID NO: 2987062 - DNA, 25 bp, Homo sapien
ccctgctatggctgagatacatctc

SEQ ID NO: 2987063 - DNA, 25 bp, Homo sapien
taaagtgtgcctctggctagagcct

SEQ ID NO: 2987064 - DNA, 25 bp, Homo sapien
aacaggtgcgccagctcttccaaat

SEQ ID NO: 2987065 - DNA, 25 bp, Homo sapien
gtgccattatccaccagggtagaag

SEQ ID NO: 2987066 - DNA, 25 bp, Homo sapien
aatgccaccggcggctctgcagggt

SEQ ID NO: 2987067 - DNA, 25 bp, Homo sapien
actgctgggtggcttcccccatgct

SEQ ID NO: 2987068 - DNA, 25 bp, Homo sapien
cttgcataggaaccacgcgaatctt

SEQ ID NO: 2987069 - DNA, 25 bp, Homo sapien
taggaaccacgcgaatcttctctgt

SEQ ID NO: 2987070 - DNA, 25 bp, Homo sapien
gcataggaaccacgcgaatcttctc

SEQ ID NO: 2987071 - DNA, 25 bp, Homo sapien
catccttgcataggaaccacgcgaa

SEQ ID NO: 2987072 - DNA, 25 bp, Homo sapien
gcattattccacacgtccccttctt

SEQ ID NO: 2987073 - DNA, 25 bp, Homo sapien
gaagcagcattattccacacgtccc

SEQ ID NO: 2987074 - DNA, 25 bp, Homo sapien
gggaagcagcattattccacacgtc

SEQ ID NO: 2987075 - DNA, 25 bp, Homo sapien
ttattccacacgtccccttcttcat

SEQ ID NO: 2987076 - DNA, 25 bp, Homo sapien
catgtctgtgagttgtttgatcagc

SEQ ID NO: 2987077 - DNA, 25 bp, Homo sapien
gatcagccggctcatgatccaggcc

SEQ ID NO: 2987078 - DNA, 25 bp, Homo sapien
tcctgcttgccagacgtcttcatgc

SEQ ID NO: 2987079 - DNA, 25 bp, Homo sapien
catcctgcttgccagacgtcttcat

SEQ ID NO: 2987080 - DNA, 25 bp, Homo sapien
ttcatattgttactcttcaaggcct

SEQ ID NO: 2987081 - DNA, 25 bp, Homo sapien
gggcttggcggccattccattatgg

SEQ ID NO: 2987082 - DNA, 25 bp, Homo sapien
actctttggagattggcgggcggca

SEQ ID NO: 2987083 - DNA, 25 bp, Homo sapien
ggcggtccacggaagactctttgga

SEQ ID NO: 2987084 - DNA, 25 bp, Homo sapien
ttccattatggtcggtcactcccag

SEQ ID NO: 2987085 - DNA, 25 bp, Homo sapien
aacaacaaaccacctatattcatac

SEQ ID NO: 2987086 - DNA, 25 bp, Homo sapien
aaacaacaaaccacctatattcata

SEQ ID NO: 2987087 - DNA, 25 bp, Homo sapien
aaaacaacaaaccacctatattcat

SEQ ID NO: 2987088 - DNA, 25 bp, Homo sapien
gacccttgcccattggacaaattga

SEQ ID NO: 2987089 - DNA, 25 bp, Homo sapien
tttctccgctttgcagtcacaccag

SEQ ID NO: 2987090 - DNA, 25 bp, Homo sapien
gagctgtgaccggactggctaaaca

SEQ ID NO: 2987091 - DNA, 25 bp, Homo sapien
actcatgtggccaactgacaagggc

SEQ ID NO: 2987092 - DNA, 25 bp, Homo sapien
aaggcgtgggctcttccacgaggcc

SEQ ID NO: 2987093 - DNA, 25 bp, Homo sapien
caagaacggtgaaggcgtgggctct

SEQ ID NO: 2987094 - DNA, 25 bp, Homo sapien
ggaaggcaagaacggtgaaggcgtg

SEQ ID NO: 2987095 - DNA, 25 bp, Homo sapien
acggtgaaggcgtgggctcttccac

SEQ ID NO: 2987096 - DNA, 25 bp, Homo sapien
aagttttgcatgcccagcccggagg

SEQ ID NO: 2987097 - DNA, 25 bp, Homo sapien
gaagaattcaagttttgcatgccca

SEQ ID NO: 2987098 - DNA, 25 bp, Homo sapien
ggcctgactggggagtgcactgtgt

SEQ ID NO: 2987099 - DNA, 25 bp, Homo sapien
agcccggaggcaatcccacccaggg

SEQ ID NO: 2987100 - DNA, 25 bp, Homo sapien
tggacctctggatgcatccggcagc

SEQ ID NO: 2987101 - DNA, 25 bp, Homo sapien
gaatgtggtgctttctcgcagatca

SEQ ID NO: 2987102 - DNA, 25 bp, Homo sapien
tagccagtcccaagttagcaccaag

SEQ ID NO: 2987103 - DNA, 25 bp, Homo sapien
taagtcacctgaagggaaatcctgg

SEQ ID NO: 2987104 - DNA, 25 bp, Homo sapien
acatacccagattgccactcggtat

SEQ ID NO: 2987105 - DNA, 25 bp, Homo sapien
aacatacccagattgccactcggta

SEQ ID NO: 2987106 - DNA, 25 bp, Homo sapien
aaacatacccagattgccactcggt

SEQ ID NO: 2987107 - DNA, 25 bp, Homo sapien
cggagactgggctgggaagagttaa

SEQ ID NO: 2987108 - DNA, 25 bp, Homo sapien
gaagagttaagaggctgcactggtg

SEQ ID NO: 2987109 - DNA, 25 bp, Homo sapien
gggatagaaactgaggcacttgagc

SEQ ID NO: 2987110 - DNA, 25 bp, Homo sapien
aaactgaggcacttgagcacggaga

SEQ ID NO: 2987111 - DNA, 25 bp, Homo sapien
cgtcatatgttgaggattaattggc

SEQ ID NO: 2987112 - DNA, 25 bp, Homo sapien
taattggcgaggttaatagtgcagg

SEQ ID NO: 2987113 - DNA, 25 bp, Homo sapien
tgcagggttgagaccaatgtttttt

SEQ ID NO: 2987114 - DNA, 25 bp, Homo sapien
gctgatagagctggttcaacatcgt

SEQ ID NO: 2987115 - DNA, 25 bp, Homo sapien
gctggagtgcaaaggtgcgaggctc

SEQ ID NO: 2987116 - DNA, 25 bp, Homo sapien
gtgcaaaggtgcgaggctcactgca

SEQ ID NO: 2987117 - DNA, 25 bp, Homo sapien
tggagtgcaaaggtgcgaggctcac

SEQ ID NO: 2987118 - DNA, 25 bp, Homo sapien
catgattcctggtcatgattttctt

SEQ ID NO: 2987119 - DNA, 25 bp, Homo sapien
taatcatggaggaataaaatacccc

SEQ ID NO: 2987120 - DNA, 25 bp, Homo sapien
tttggcaagactcatcaaagtagaa

SEQ ID NO: 2987121 - DNA, 25 bp, Homo sapien
aaacttaaccttatggaagcactga

SEQ ID NO: 2987122 - DNA, 25 bp, Homo sapien
gatgtctttcacactatagaggtca

SEQ ID NO: 2987123 - DNA, 25 bp, Homo sapien
gccatggctgacacatattctggag

SEQ ID NO: 2987124 - DNA, 25 bp, Homo sapien
catggctgacacatattctggaggc

SEQ ID NO: 2987125 - DNA, 25 bp, Homo sapien
tgacacatattctggaggcacagag

SEQ ID NO: 2987126 - DNA, 25 bp, Homo sapien
tggctgacacatattctggaggcac

SEQ ID NO: 2987127 - DNA, 25 bp, Homo sapien
gctggatttgtaaacgttggtatgc

SEQ ID NO: 2987128 - DNA, 25 bp, Homo sapien
ggacacattacgctgggcctgtaac

SEQ ID NO: 2987129 - DNA, 25 bp, Homo sapien
tggatccggacacattacgctgggc

SEQ ID NO: 2987130 - DNA, 25 bp, Homo sapien
ttgtctcatggatccggacacatta

SEQ ID NO: 2987131 - DNA, 25 bp, Homo sapien
taggccgggagtctgtgggtgcgag

SEQ ID NO: 2987132 - DNA, 25 bp, Homo sapien
tggctgcttcacgagcagggcctgg

SEQ ID NO: 2987133 - DNA, 25 bp, Homo sapien
ccatggccgatttgcctgcagaggg

SEQ ID NO: 2987134 - DNA, 25 bp, Homo sapien
aggggaagctgtccatggccgattt

SEQ ID NO: 2987135 - DNA, 25 bp, Homo sapien
ctataacttttagtgctggtgaaaa

SEQ ID NO: 2987136 - DNA, 25 bp, Homo sapien
tactacttatcgtcataacaacatg

SEQ ID NO: 2987137 - DNA, 25 bp, Homo sapien
tagtctttgattaagtaaggcccac

SEQ ID NO: 2987138 - DNA, 25 bp, Homo sapien
ctgaataaacatggtcctgaggctt

SEQ ID NO: 2987139 - DNA, 25 bp, Homo sapien
agagagatgcggttaggattcgcct

SEQ ID NO: 2987140 - DNA, 25 bp, Homo sapien
gagatgcggttaggattcgcctgct

SEQ ID NO: 2987141 - DNA, 25 bp, Homo sapien
tgcggttaggattcgcctgctcctc

SEQ ID NO: 2987142 - DNA, 25 bp, Homo sapien
taaagagagagatgcggttaggatt

SEQ ID NO: 2987143 - DNA, 25 bp, Homo sapien
ttcaccgacaagccaccggtcatgt

SEQ ID NO: 2987144 - DNA, 25 bp, Homo sapien
ggtgcgtccactgggggaggcgtga

SEQ ID NO: 2987145 - DNA, 25 bp, Homo sapien
tgcttgctagggttctgctccaggg

SEQ ID NO: 2987146 - DNA, 25 bp, Homo sapien
ggactgggatgggtccttcaccgac

SEQ ID NO: 2987147 - DNA, 25 bp, Homo sapien
tcaatggaggacttacctggaggcc

SEQ ID NO: 2987148 - DNA, 25 bp, Homo sapien
cgtaccggccataggagtcatcaat

SEQ ID NO: 2987149 - DNA, 25 bp, Homo sapien
gatttggcacgtgaccagctatggg

SEQ ID NO: 2987150 - DNA, 25 bp, Homo sapien
tgttctggattaaatcgtaccggcc

SEQ ID NO: 2987151 - DNA, 25 bp, Homo sapien
agatccttagctcagattctgggtc

SEQ ID NO: 2987152 - DNA, 25 bp, Homo sapien
caaagctctgggcttaacgcttcca

SEQ ID NO: 2987153 - DNA, 25 bp, Homo sapien
tgggtcctctcagcctaatcactct

SEQ ID NO: 2987154 - DNA, 25 bp, Homo sapien
tctgggtcctctcagcctaatcact

SEQ ID NO: 2987155 - DNA, 25 bp, Homo sapien
cagtcctttccatggaactcccgga

SEQ ID NO: 2987156 - DNA, 25 bp, Homo sapien
tgcagtcctttccatggaactcccg

SEQ ID NO: 2987157 - DNA, 25 bp, Homo sapien
cctttccatggaactcccggatgga

SEQ ID NO: 2987158 - DNA, 25 bp, Homo sapien
ttccatggaactcccggatggaatt

SEQ ID NO: 2987159 - DNA, 25 bp, Homo sapien
ctccactcttgaggaggtagcggtt

SEQ ID NO: 2987160 - DNA, 25 bp, Homo sapien
gccaggagtgacgtcagggtcattc

SEQ ID NO: 2987161 - DNA, 25 bp, Homo sapien
aggagtgacgtcagggtcattctca

SEQ ID NO: 2987162 - DNA, 25 bp, Homo sapien
ggtagcggttgacatcctggatggt

SEQ ID NO: 2987163 - DNA, 25 bp, Homo sapien
cgtaacatccctgttccgaaacgca

SEQ ID NO: 2987164 - DNA, 25 bp, Homo sapien
gacagcagggacacccgtaacatcc

SEQ ID NO: 2987165 - DNA, 25 bp, Homo sapien
tccctgttccgaaacgcagctgcat

SEQ ID NO: 2987166 - DNA, 25 bp, Homo sapien
tctgccatcttacacggctcctttt

SEQ ID NO: 2987167 - DNA, 25 bp, Homo sapien
aggtggtggcggtgtccgggttcat

SEQ ID NO: 2987168 - DNA, 25 bp, Homo sapien
gcggtgtccgggttcatgactctaa

SEQ ID NO: 2987169 - DNA, 25 bp, Homo sapien
tggtggcggtgtccgggttcatgac

SEQ ID NO: 2987170 - DNA, 25 bp, Homo sapien
ctgcagaaccaaacacggcactgag

SEQ ID NO: 2987171 - DNA, 25 bp, Homo sapien
tggccaggcactcgaagaaggcagc

SEQ ID NO: 2987172 - DNA, 25 bp, Homo sapien
taggtgcggatgcaatgctgctgaa

SEQ ID NO: 2987173 - DNA, 25 bp, Homo sapien
gctgctgaaagagctactgtagccg

SEQ ID NO: 2987174 - DNA, 25 bp, Homo sapien
ctactgtagccggaggcactgagtg

SEQ ID NO: 2987175 - DNA, 25 bp, Homo sapien
tccatagttcatgagacagagaggc

SEQ ID NO: 2987176 - DNA, 25 bp, Homo sapien
gtcgatttgatgtctgacagtttac

SEQ ID NO: 2987177 - DNA, 25 bp, Homo sapien
cttgcgtgtgggaggtagggccaga

SEQ ID NO: 2987178 - DNA, 25 bp, Homo sapien
ccagaggaccacgtcgatttgatgt

SEQ ID NO: 2987179 - DNA, 25 bp, Homo sapien
ggtttcgaagaacgagccagctgct

SEQ ID NO: 2987180 - DNA, 25 bp, Homo sapien
cgaagaacgagccagctgctggttc

SEQ ID NO: 2987181 - DNA, 25 bp, Homo sapien
tgaggtttcgaagaacgagccagct

SEQ ID NO: 2987182 - DNA, 25 bp, Homo sapien
gagtgaggtttcgaagaacgagcca

SEQ ID NO: 2987183 - DNA, 25 bp, Homo sapien
cacttatggaccctgaccaagaacc

SEQ ID NO: 2987184 - DNA, 25 bp, Homo sapien
tcctcccatgcagcgtcacttatgg

SEQ ID NO: 2987185 - DNA, 25 bp, Homo sapien
aagcgggaaccctccctggatcatg

SEQ ID NO: 2987186 - DNA, 25 bp, Homo sapien
tggagccaatcctggcacttgctca

SEQ ID NO: 2987187 - DNA, 25 bp, Homo sapien
aggtggaatgtgataagaggcccat

SEQ ID NO: 2987188 - DNA, 25 bp, Homo sapien
caatgtccgcagtgtagaaccatca

SEQ ID NO: 2987189 - DNA, 25 bp, Homo sapien
tgttgcaaacacaatgtccgcagtg

SEQ ID NO: 2987190 - DNA, 25 bp, Homo sapien
acagcattgccttgagtcagattca

SEQ ID NO: 2987191 - DNA, 25 bp, Homo sapien
ggcagcctcctccttggagctgtac

SEQ ID NO: 2987192 - DNA, 25 bp, Homo sapien
cagcctcctccttggagctgtaccg

SEQ ID NO: 2987193 - DNA, 25 bp, Homo sapien
atgtgcagagacttctgggccttgg

SEQ ID NO: 2987194 - DNA, 25 bp, Homo sapien
cctcctccttggagctgtaccggac

SEQ ID NO: 2987195 - DNA, 25 bp, Homo sapien
ccccaagtcctgctgagttcgtggc

SEQ ID NO: 2987196 - DNA, 25 bp, Homo sapien
gctttctctgtattgggaacggccc

SEQ ID NO: 2987197 - DNA, 25 bp, Homo sapien
ctgtattgggaacggccccacatgg

SEQ ID NO: 2987198 - DNA, 25 bp, Homo sapien
gtcctgctgagttcgtggcactggc

SEQ ID NO: 2987199 - DNA, 25 bp, Homo sapien
gttccagtggccagcgtcgctgcgt

SEQ ID NO: 2987200 - DNA, 25 bp, Homo sapien
tggacgcgctgctggactgccagct

SEQ ID NO: 2987201 - DNA, 25 bp, Homo sapien
cgaactcggccaggatggtagtgtt

SEQ ID NO: 2987202 - DNA, 25 bp, Homo sapien
ccttgggctaagaagcgattcactt

SEQ ID NO: 2987203 - DNA, 25 bp, Homo sapien
ccgctgctgggttccagcgggtctg

SEQ ID NO: 2987204 - DNA, 25 bp, Homo sapien
ctggacagaggtactcaaaagggcg

SEQ ID NO: 2987205 - DNA, 25 bp, Homo sapien
aggtactcaaaagggcggccgctgc

SEQ ID NO: 2987206 - DNA, 25 bp, Homo sapien
gacagaggtactcaaaagggcggcc

SEQ ID NO: 2987207 - DNA, 25 bp, Homo sapien
aggactgcggccaaggttcgtcttc

SEQ ID NO: 2987208 - DNA, 25 bp, Homo sapien
gcagcccgcactgttttgcgaacag

SEQ ID NO: 2987209 - DNA, 25 bp, Homo sapien
ttcgcaaggactgcggccaaggttc

SEQ ID NO: 2987210 - DNA, 25 bp, Homo sapien
ttgcgaacagttcgcaaggactgcg

SEQ ID NO: 2987211 - DNA, 25 bp, Homo sapien
tacacatgaattgtcgccagccctg

SEQ ID NO: 2987212 - DNA, 25 bp, Homo sapien
taacaaccgtttgaccaatgcgcca

SEQ ID NO: 2987213 - DNA, 25 bp, Homo sapien
caagggtaatgtgcataggcggatc

SEQ ID NO: 2987214 - DNA, 25 bp, Homo sapien
tagctaaaggaagggcgaggacact

SEQ ID NO: 2987215 - DNA, 25 bp, Homo sapien
aatcgacagagtccacgacgatggc

SEQ ID NO: 2987216 - DNA, 25 bp, Homo sapien
gggaacaacactgtcccgtcccaga

SEQ ID NO: 2987217 - DNA, 25 bp, Homo sapien
agagctctgaaggaacgcatctgca

SEQ ID NO: 2987218 - DNA, 25 bp, Homo sapien
cgacgatggccgagggaacaacact

SEQ ID NO: 2987219 - DNA, 25 bp, Homo sapien
gcgcgtccggcatgtgcaagacagt

SEQ ID NO: 2987220 - DNA, 25 bp, Homo sapien
tacatgaaatggtgtggagctgccc

SEQ ID NO: 2987221 - DNA, 25 bp, Homo sapien
gcaggcagggagcacaatgttcata

SEQ ID NO: 2987222 - DNA, 25 bp, Homo sapien
ttttctacaactcaatgctcgccgg

SEQ ID NO: 2987223 - DNA, 25 bp, Homo sapien
ttcgaaggaattgacccacagtggg

SEQ ID NO: 2987224 - DNA, 25 bp, Homo sapien
aaattacagagggaacgcatgcagc

SEQ ID NO: 2987225 - DNA, 25 bp, Homo sapien
tcgcagcgtgcaaagtagacatcca

SEQ ID NO: 2987226 - DNA, 25 bp, Homo sapien
aaacgaactcttgctgaggctcggc

SEQ ID NO: 2987227 - DNA, 25 bp, Homo sapien
tggttgtgacctgttgagcccatct

SEQ ID NO: 2987228 - DNA, 25 bp, Homo sapien
catgatcattggttgtgacctgttg

SEQ ID NO: 2987229 - DNA, 25 bp, Homo sapien
cagtccagaaagtgacgtgacagtc

SEQ ID NO: 2987230 - DNA, 25 bp, Homo sapien
cagtccacagggaccgacgtagggt

SEQ ID NO: 2987231 - DNA, 25 bp, Homo sapien
gcatctgggtggatctgagccaagt

SEQ ID NO: 2987232 - DNA, 25 bp, Homo sapien
cacaggggcccgacagagttggcat

SEQ ID NO: 2987233 - DNA, 25 bp, Homo sapien
gcatcttcaggtgcgagtgctgctg

SEQ ID NO: 2987234 - DNA, 25 bp, Homo sapien
ctggtgctgattctgggcagccaac

SEQ ID NO: 2987235 - DNA, 25 bp, Homo sapien
tgcttggaggcgaacagggcttggt

SEQ ID NO: 2987236 - DNA, 25 bp, Homo sapien
tgaggagcccgtgggataccgaaaa

SEQ ID NO: 2987237 - DNA, 25 bp, Homo sapien
tcatgaccccgtgctccaggtctgc

SEQ ID NO: 2987238 - DNA, 25 bp, Homo sapien
ggcataggtaaccagcacctgtgct

SEQ ID NO: 2987239 - DNA, 25 bp, Homo sapien
tggctgtggtgtctacccaaggccg

SEQ ID NO: 2987240 - DNA, 25 bp, Homo sapien
aggccgagctctgacccgtctttgg

SEQ ID NO: 2987241 - DNA, 25 bp, Homo sapien
tttccccgtgcaggtcggcatggct

SEQ ID NO: 2987242 - DNA, 25 bp, Homo sapien
gcaactcgatagaagctacttaggt

SEQ ID NO: 2987243 - DNA, 25 bp, Homo sapien
tggcatctcggctgcggtggttgtc

SEQ ID NO: 2987244 - DNA, 25 bp, Homo sapien
ccctgctgctggctagttggtgcca

SEQ ID NO: 2987245 - DNA, 25 bp, Homo sapien
tttcccgtttcaccacatagagctg

SEQ ID NO: 2987246 - DNA, 25 bp, Homo sapien
cagctcgtcccaagcactcatggga

SEQ ID NO: 2987247 - DNA, 25 bp, Homo sapien
tccacaccagggctaggggggcgct

SEQ ID NO: 2987248 - DNA, 25 bp, Homo sapien
gcttgtggggatcagcggctggcgt

SEQ ID NO: 2987249 - DNA, 25 bp, Homo sapien
acaccagggctaggggggcgcttgt

SEQ ID NO: 2987250 - DNA, 25 bp, Homo sapien
taggggggcgcttgtggggatcagc

SEQ ID NO: 2987251 - DNA, 25 bp, Homo sapien
cctggagctgatttatgggcagact

SEQ ID NO: 2987252 - DNA, 25 bp, Homo sapien
ccctggagtgatgcagaccctaacc

SEQ ID NO: 2987253 - DNA, 25 bp, Homo sapien
gcattatctgtggaacggccaggat

SEQ ID NO: 2987254 - DNA, 25 bp, Homo sapien
tggctttcccatctaacgatccggg

SEQ ID NO: 2987255 - DNA, 25 bp, Homo sapien
cacccttcagaggaagactcaggaa

SEQ ID NO: 2987256 - DNA, 25 bp, Homo sapien
aaaacatcatttggtgctggagctg

SEQ ID NO: 2987257 - DNA, 25 bp, Homo sapien
gatactggttgtttagctccgggtg

SEQ ID NO: 2987258 - DNA, 25 bp, Homo sapien
tcaaagtgatgtgtatggccaggca

SEQ ID NO: 2987259 - DNA, 25 bp, Homo sapien
ctagaggaagttctttgaggtcaca

SEQ ID NO: 2987260 - DNA, 25 bp, Homo sapien
tcttctgagaacatgaggaccttgg

SEQ ID NO: 2987261 - DNA, 25 bp, Homo sapien
actctcacagatgaacgggccccga

SEQ ID NO: 2987262 - DNA, 25 bp, Homo sapien
agggcagacgcagagaaggcctaca

SEQ ID NO: 2987263 - DNA, 25 bp, Homo sapien
cccagagttgcagccgctctgggct

SEQ ID NO: 2987264 - DNA, 25 bp, Homo sapien
gccaggttgcggttctccctgggta

SEQ ID NO: 2987265 - DNA, 25 bp, Homo sapien
ggccatttggcagccgagttccctc

SEQ ID NO: 2987266 - DNA, 25 bp, Homo sapien
ccctccggctcggacagagctggga

SEQ ID NO: 2987267 - DNA, 25 bp, Homo sapien
cccttctcagacgactcctgccaag

SEQ ID NO: 2987268 - DNA, 25 bp, Homo sapien
gtccccttctcagacgactcctgcc

SEQ ID NO: 2987269 - DNA, 25 bp, Homo sapien
tccccttctcagacgactcctgcca

SEQ ID NO: 2987270 - DNA, 25 bp, Homo sapien
agtccccttctcagacgactcctgc

SEQ ID NO: 2987271 - DNA, 25 bp, Homo sapien
tctccctccactggacatccagctc

SEQ ID NO: 2987272 - DNA, 25 bp, Homo sapien
cctctgcattctccctccactggac

SEQ ID NO: 2987273 - DNA, 25 bp, Homo sapien
tccctccactggacatccagctcac

SEQ ID NO: 2987274 - DNA, 25 bp, Homo sapien
cattctccctccactggacatccag

SEQ ID NO: 2987275 - DNA, 25 bp, Homo sapien
aatcctgctgcggtcgaattcgggc

SEQ ID NO: 2987276 - DNA, 25 bp, Homo sapien
tgctgcggtcgaattcgggcccagc

SEQ ID NO: 2987277 - DNA, 25 bp, Homo sapien
agccccgctccaactctcagaggga

SEQ ID NO: 2987278 - DNA, 25 bp, Homo sapien
tgagagagaatcctgctgcggtcga

SEQ ID NO: 2987279 - DNA, 25 bp, Homo sapien
cttggctatggcctctgtgcacgct

SEQ ID NO: 2987280 - DNA, 25 bp, Homo sapien
agtccccggttggatgagccttaag

SEQ ID NO: 2987281 - DNA, 25 bp, Homo sapien
gatatgagtccccggttggatgagc

SEQ ID NO: 2987282 - DNA, 25 bp, Homo sapien
ttccgtcccctctgcgccggcgtcg

SEQ ID NO: 2987283 - DNA, 25 bp, Homo sapien
cacgggtagaggctggggcgccggg

SEQ ID NO: 2987284 - DNA, 25 bp, Homo sapien
ggcacgggtagaggctggggcgccg

SEQ ID NO: 2987285 - DNA, 25 bp, Homo sapien
tcggcgggcacgggtagaggctggg

SEQ ID NO: 2987286 - DNA, 25 bp, Homo sapien
cgggcacgggtagaggctggggcgc

SEQ ID NO: 2987287 - DNA, 25 bp, Homo sapien
cttgtccatcatggcatagggcagc

SEQ ID NO: 2987288 - DNA, 25 bp, Homo sapien
caggggcccgctccgatgacaccga

SEQ ID NO: 2987289 - DNA, 25 bp, Homo sapien
ccgcgcacgggcgtcccagagccgc

SEQ ID NO: 2987290 - DNA, 25 bp, Homo sapien
ccgctccgatgacaccgaccgcggc

SEQ ID NO: 2987291 - DNA, 25 bp, Homo sapien
cgtctggcgcccgcgtggcacccac

SEQ ID NO: 2987292 - DNA, 25 bp, Homo sapien
cgatctcgtagagcgccccctccca

SEQ ID NO: 2987293 - DNA, 25 bp, Homo sapien
gcaaggtctgcacccccgcgggctc

SEQ ID NO: 2987294 - DNA, 25 bp, Homo sapien
gcaggcgcctttccaccgtctgccg

SEQ ID NO: 2987295 - DNA, 25 bp, Homo sapien
ccaccgctgccagcgcaaggtctgc

SEQ ID NO: 2987296 - DNA, 25 bp, Homo sapien
tgacagtcacctgggggtgctgcgt

SEQ ID NO: 2987297 - DNA, 25 bp, Homo sapien
tgctgcgtgggcccgaggtttgcgg

SEQ ID NO: 2987298 - DNA, 25 bp, Homo sapien
gggtgctgcgtgggcccgaggtttg

SEQ ID NO: 2987299 - DNA, 25 bp, Homo sapien
tgcgtgggcccgaggtttgcggtgc

SEQ ID NO: 2987300 - DNA, 25 bp, Homo sapien
caggttgagtagcagcaggaagcgg

SEQ ID NO: 2987301 - DNA, 25 bp, Homo sapien
aaggtgaagtaggaccgaattcctg

SEQ ID NO: 2987302 - DNA, 25 bp, Homo sapien
ggctcagcaggttgagtagcagcag

SEQ ID NO: 2987303 - DNA, 25 bp, Homo sapien
gaccgaattcctgtgccgaagaggc

SEQ ID NO: 2987304 - DNA, 25 bp, Homo sapien
caagttcagggtggggcctgggtca

SEQ ID NO: 2987305 - DNA, 25 bp, Homo sapien
agttcagggtggggcctgggtcagg

SEQ ID NO: 2987306 - DNA, 25 bp, Homo sapien
tcaagttcagggtggggcctgggtc

SEQ ID NO: 2987307 - DNA, 25 bp, Homo sapien
aagttcagggtggggcctgggtcag

SEQ ID NO: 2987308 - DNA, 25 bp, Homo sapien
aaacatgccaaagttgattgtggaa

SEQ ID NO: 2987309 - DNA, 25 bp, Homo sapien
ccaaagttgattgtggaacctcaaa

SEQ ID NO: 2987310 - DNA, 25 bp, Homo sapien
ttgtggaacctcaaaacgccaggcg

SEQ ID NO: 2987311 - DNA, 25 bp, Homo sapien
gttgattgtggaacctcaaaacgcc

SEQ ID NO: 2987312 - DNA, 25 bp, Homo sapien
tcggtacgcaccgtagaagagatag

SEQ ID NO: 2987313 - DNA, 25 bp, Homo sapien
caccgtagaagagataggtgttggt

SEQ ID NO: 2987314 - DNA, 25 bp, Homo sapien
ccactcggtacgcaccgtagaagag

SEQ ID NO: 2987315 - DNA, 25 bp, Homo sapien
ccagcgggctgaggaggtaggccag

SEQ ID NO: 2987316 - DNA, 25 bp, Homo sapien
ttgaactcgttgctgatctcatgct

SEQ ID NO: 2987317 - DNA, 25 bp, Homo sapien
ctgagaggcgcctgatagccctgac

SEQ ID NO: 2987318 - DNA, 25 bp, Homo sapien
agcagagtcttctgcggcagcccct

SEQ ID NO: 2987319 - DNA, 25 bp, Homo sapien
gcagaagtcccatgaggagaagacc

SEQ ID NO: 2987320 - DNA, 25 bp, Homo sapien
cagaagatggcgctgatggccccaa

SEQ ID NO: 2987321 - DNA, 25 bp, Homo sapien
cgttgagtacgttgacccgcaggta

SEQ ID NO: 2987322 - DNA, 25 bp, Homo sapien
gagtacttggtagcccagaagatgg

SEQ ID NO: 2987323 - DNA, 25 bp, Homo sapien
tgcatcagctggaagcgacggccct

SEQ ID NO: 2987324 - DNA, 25 bp, Homo sapien
cagatcagagtgaggttgacctccg

SEQ ID NO: 2987325 - DNA, 25 bp, Homo sapien
ccaggaagttgaccagggcgatgac

SEQ ID NO: 2987326 - DNA, 25 bp, Homo sapien
tccgtgttgggagggtagttctcca

SEQ ID NO: 2987327 - DNA, 25 bp, Homo sapien
tccagctggaccagaaatgtgaaca

SEQ ID NO: 2987328 - DNA, 25 bp, Homo sapien
tgatagtcacaaacgttgtagccgt

SEQ ID NO: 2987329 - DNA, 25 bp, Homo sapien
cacagtatggtctgacccagggaga

SEQ ID NO: 2987330 - DNA, 25 bp, Homo sapien
ccagggagacggagaacatccccaa

SEQ ID NO: 2987331 - DNA, 25 bp, Homo sapien
tagccgtaggactcacagctgctct

SEQ ID NO: 2987332 - DNA, 25 bp, Homo sapien
ggggacccgtcaccactcacggcca

SEQ ID NO: 2987333 - DNA, 25 bp, Homo sapien
gaggaagttgaagatactcagcttg

SEQ ID NO: 2987334 - DNA, 25 bp, Homo sapien
ggaagttgaagatactcagcttgta

SEQ ID NO: 2987335 - DNA, 25 bp, Homo sapien
aggaagttgaagatactcagcttgt

SEQ ID NO: 2987336 - DNA, 25 bp, Homo sapien
ctgtattggtcatggccacagcctg

SEQ ID NO: 2987337 - DNA, 25 bp, Homo sapien
actccagacagatgcgtgggctgta

SEQ ID NO: 2987338 - DNA, 25 bp, Homo sapien
ctccacactggacccgctcaccctt

SEQ ID NO: 2987339 - DNA, 25 bp, Homo sapien
gcctgccacttactcccgggctcca

SEQ ID NO: 2987340 - DNA, 25 bp, Homo sapien
aagaggaagacgctattcagcaggg

SEQ ID NO: 2987341 - DNA, 25 bp, Homo sapien
cagaaccggcctgagaaccggtcca

SEQ ID NO: 2987342 - DNA, 25 bp, Homo sapien
cccgccacgatgtccagcacattct

SEQ ID NO: 2987343 - DNA, 25 bp, Homo sapien
ggcccatccaggtgaccgtctgccc

SEQ ID NO: 2987344 - DNA, 25 bp, Homo sapien
ggaggcgagcccagctcaaggcatc

SEQ ID NO: 2987345 - DNA, 25 bp, Homo sapien
gggcgcaagcaatagcaaccaggag

SEQ ID NO: 2987346 - DNA, 25 bp, Homo sapien
gtcagcgagttatgcagaccccagg

SEQ ID NO: 2987347 - DNA, 25 bp, Homo sapien
caatagcaaccaggagtcagcgagt

SEQ ID NO: 2987348 - DNA, 25 bp, Homo sapien
tggagctggaggcacggaagggccg

SEQ ID NO: 2987349 - DNA, 25 bp, Homo sapien
ggaggcacggaagggccgcgaagat

SEQ ID NO: 2987350 - DNA, 25 bp, Homo sapien
cacggaagggccgcgaagatgccct

SEQ ID NO: 2987351 - DNA, 25 bp, Homo sapien
ggaagggccgcgaagatgccctgga

SEQ ID NO: 2987352 - DNA, 25 bp, Homo sapien
gcagccagaagcaggcccaggagga

SEQ ID NO: 2987353 - DNA, 25 bp, Homo sapien
aggggcactgcagccagaagcaggc

SEQ ID NO: 2987354 - DNA, 25 bp, Homo sapien
ctgaccacatagcccaggggcactg

SEQ ID NO: 2987355 - DNA, 25 bp, Homo sapien
ctgctgaccacatagcccaggggca

SEQ ID NO: 2987356 - DNA, 25 bp, Homo sapien
gccgcagtcccaggaggagtggatg

SEQ ID NO: 2987357 - DNA, 25 bp, Homo sapien
caatgggcgggagcccaagggccac

SEQ ID NO: 2987358 - DNA, 25 bp, Homo sapien
gaagctgaaggcgtgggagcccagg

SEQ ID NO: 2987359 - DNA, 25 bp, Homo sapien
gggccaccagctccgggaccacttg

SEQ ID NO: 2987360 - DNA, 25 bp, Homo sapien
agctccgggaccacttgccagggtg

SEQ ID NO: 2987361 - DNA, 25 bp, Homo sapien
ccccctccaggtgtcccctcccatg

SEQ ID NO: 2987362 - DNA, 25 bp, Homo sapien
ctcccatggccccggctgccctgag

SEQ ID NO: 2987363 - DNA, 25 bp, Homo sapien
cccctccaggtgtcccctcccatgg

SEQ ID NO: 2987364 - DNA, 25 bp, Homo sapien
gtgtcccctcccatggccccggctg

SEQ ID NO: 2987365 - DNA, 25 bp, Homo sapien
ggctttctgcgtctggctcctggtt

SEQ ID NO: 2987366 - DNA, 25 bp, Homo sapien
ttggctttctgcgtctggctcctgg

SEQ ID NO: 2987367 - DNA, 25 bp, Homo sapien
tggctttctgcgtctggctcctggt

SEQ ID NO: 2987368 - DNA, 25 bp, Homo sapien
ccttggctttctgcgtctggctcct

SEQ ID NO: 2987369 - DNA, 25 bp, Homo sapien
ctgtatctgaggatgggaccctcct

SEQ ID NO: 2987370 - DNA, 25 bp, Homo sapien
gcagccacccagacacggtgcttcc

SEQ ID NO: 2987371 - DNA, 25 bp, Homo sapien
ctctggcacagcaataccaatagct

SEQ ID NO: 2987372 - DNA, 25 bp, Homo sapien
acccagacacggtgcttccccagtg

SEQ ID NO: 2987373 - DNA, 25 bp, Homo sapien
ggattcgtggtcagttgcccctggg

SEQ ID NO: 2987374 - DNA, 25 bp, Homo sapien
aatctctacaatacgcggtactggg

SEQ ID NO: 2987375 - DNA, 25 bp, Homo sapien
acctcaatctctacaatacgcggta

SEQ ID NO: 2987376 - DNA, 25 bp, Homo sapien
tcaatctctacaatacgcggtactg

SEQ ID NO: 2987377 - DNA, 25 bp, Homo sapien
tctgggagacgcacaccgtcaggac

SEQ ID NO: 2987378 - DNA, 25 bp, Homo sapien
gtctgggagacgcacaccgtcagga

SEQ ID NO: 2987379 - DNA, 25 bp, Homo sapien
gggagacgcacaccgtcaggacaag

SEQ ID NO: 2987380 - DNA, 25 bp, Homo sapien
tgggagacgcacaccgtcaggacaa

SEQ ID NO: 2987381 - DNA, 25 bp, Homo sapien
tgacccgctcagacgtgttctaggc

SEQ ID NO: 2987382 - DNA, 25 bp, Homo sapien
cctccagtgggaagaacccacctga

SEQ ID NO: 2987383 - DNA, 25 bp, Homo sapien
cacacatagggaagggtttccactg

SEQ ID NO: 2987384 - DNA, 25 bp, Homo sapien
aggtcatgtacttaccaggtctggc

SEQ ID NO: 2987385 - DNA, 25 bp, Homo sapien
aagcactcttcacgcctcggcgtga

SEQ ID NO: 2987386 - DNA, 25 bp, Homo sapien
gcagtagcaagaccacagcccactg

SEQ ID NO: 2987387 - DNA, 25 bp, Homo sapien
caggattgcagtagcaagaccacag

SEQ ID NO: 2987388 - DNA, 25 bp, Homo sapien
ccaggcaggattgcagtagcaagac

SEQ ID NO: 2987389 - DNA, 25 bp, Homo sapien
caagtggcgagttgcgacaggcgct

SEQ ID NO: 2987390 - DNA, 25 bp, Homo sapien
aggagaacaagtggcgagttgcgac

SEQ ID NO: 2987391 - DNA, 25 bp, Homo sapien
aacaagtggcgagttgcgacaggcg

SEQ ID NO: 2987392 - DNA, 25 bp, Homo sapien
agaacaagtggcgagttgcgacagg

SEQ ID NO: 2987393 - DNA, 25 bp, Homo sapien
tggctccggcagcagtcgcgacagg

SEQ ID NO: 2987394 - DNA, 25 bp, Homo sapien
ggcagcagtcgcgacaggtcctcca

SEQ ID NO: 2987395 - DNA, 25 bp, Homo sapien
gggcccggagagtcgctcgggcctg

SEQ ID NO: 2987396 - DNA, 25 bp, Homo sapien
cccggagagtcgctcgggcctggct

SEQ ID NO: 2987397 - DNA, 25 bp, Homo sapien
gcatccggggcagaaggactgcggg

SEQ ID NO: 2987398 - DNA, 25 bp, Homo sapien
tccagggcaaggggaacgcagtccc

SEQ ID NO: 2987399 - DNA, 25 bp, Homo sapien
agtcccgcggcatccacgacggagg

SEQ ID NO: 2987400 - DNA, 25 bp, Homo sapien
ggcagaaggactgcgggcgcgaagc

SEQ ID NO: 2987401 - DNA, 25 bp, Homo sapien
gctggggaagcggaatctgcgggcg

SEQ ID NO: 2987402 - DNA, 25 bp, Homo sapien
gggaagcggaatctgcgggcggagg

SEQ ID NO: 2987403 - DNA, 25 bp, Homo sapien
gaagcggaatctgcgggcggaggcc

SEQ ID NO: 2987404 - DNA, 25 bp, Homo sapien
cgccgctggggaagcggaatctgcg

SEQ ID NO: 2987405 - DNA, 25 bp, Homo sapien
gccccagggaggcttcggggaggca

SEQ ID NO: 2987406 - DNA, 25 bp, Homo sapien
ccccagggaggcttcggggaggcag

SEQ ID NO: 2987407 - DNA, 25 bp, Homo sapien
gaagatggagtaaggaggcctgaag

SEQ ID NO: 2987408 - DNA, 25 bp, Homo sapien
ctggaagatggagtaaggaggcctg

SEQ ID NO: 2987409 - DNA, 25 bp, Homo sapien
ccctggagccactgagaggggcggt

SEQ ID NO: 2987410 - DNA, 25 bp, Homo sapien
gggaggccctggagccactgagagg

SEQ ID NO: 2987411 - DNA, 25 bp, Homo sapien
ctgagaggggcggtggtcgccaggg

SEQ ID NO: 2987412 - DNA, 25 bp, Homo sapien
tggagccactgagaggggcggtggt

SEQ ID NO: 2987413 - DNA, 25 bp, Homo sapien
tgcaggcccgtacataccactaagg

SEQ ID NO: 2987414 - DNA, 25 bp, Homo sapien
tggaaaaggaaactcgaacaggctc

SEQ ID NO: 2987415 - DNA, 25 bp, Homo sapien
gtcacctgggagcttcgaaaagtcc

SEQ ID NO: 2987416 - DNA, 25 bp, Homo sapien
cagatttagtcactgcagcatggca

SEQ ID NO: 2987417 - DNA, 25 bp, Homo sapien
tcatttaatcttggaggccacttgg

SEQ ID NO: 2987418 - DNA, 25 bp, Homo sapien
catttaatcttggaggccacttgga

SEQ ID NO: 2987419 - DNA, 25 bp, Homo sapien
tgggtgtagggcctctgctcgggca

SEQ ID NO: 2987420 - DNA, 25 bp, Homo sapien
cagtgagaacctcctagttcctggc

SEQ ID NO: 2987421 - DNA, 25 bp, Homo sapien
tcggtgggtgtagggcctctgctcg

SEQ ID NO: 2987422 - DNA, 25 bp, Homo sapien
gcctcggtgggtgtagggcctctgc

SEQ ID NO: 2987423 - DNA, 25 bp, Homo sapien
agcacggccaagcagaacagcccag

SEQ ID NO: 2987424 - DNA, 25 bp, Homo sapien
cggccaagcagaacagcccagggag

SEQ ID NO: 2987425 - DNA, 25 bp, Homo sapien
acggccaagcagaacagcccaggga

SEQ ID NO: 2987426 - DNA, 25 bp, Homo sapien
ccagcacggccaagcagaacagccc

SEQ ID NO: 2987427 - DNA, 25 bp, Homo sapien
tgtaagagaggtaagggcgataagg

SEQ ID NO: 2987428 - DNA, 25 bp, Homo sapien
aagagaggtaagggcgataaggaga

SEQ ID NO: 2987429 - DNA, 25 bp, Homo sapien
taagagaggtaagggcgataaggag

SEQ ID NO: 2987430 - DNA, 25 bp, Homo sapien
ctgtaagagaggtaagggcgataag

SEQ ID NO: 2987431 - DNA, 25 bp, Homo sapien
cccgtgccttggagaagctgctggc

SEQ ID NO: 2987432 - DNA, 25 bp, Homo sapien
ctcccgtgccttggagaagctgctg

SEQ ID NO: 2987433 - DNA, 25 bp, Homo sapien
cttcctcccgtgccttggagaagct

SEQ ID NO: 2987434 - DNA, 25 bp, Homo sapien
cgtgccttggagaagctgctggcag

SEQ ID NO: 2987435 - DNA, 25 bp, Homo sapien
caatatagggaggtgactgtccatc

SEQ ID NO: 2987436 - DNA, 25 bp, Homo sapien
actgtccatcctcaccttaatggac

SEQ ID NO: 2987437 - DNA, 25 bp, Homo sapien
taacctgatggcctagcaacaaggg

SEQ ID NO: 2987438 - DNA, 25 bp, Homo sapien
caagggttagttgggacaatatagg

SEQ ID NO: 2987439 - DNA, 25 bp, Homo sapien
ggcggaactgccctgcacaggtact

SEQ ID NO: 2987440 - DNA, 25 bp, Homo sapien
ccaaacaggtgctcaagtatttgtt

SEQ ID NO: 2987441 - DNA, 25 bp, Homo sapien
ctcttaggagtttagttagcaggac

SEQ ID NO: 2987442 - DNA, 25 bp, Homo sapien
caagaatcagagaagtcgggagcca

SEQ ID NO: 2987443 - DNA, 25 bp, Homo sapien
tggaccttggcatggccgtgcttgc

SEQ ID NO: 2987444 - DNA, 25 bp, Homo sapien
tgcttgccagtcatcgaagtagaca

SEQ ID NO: 2987445 - DNA, 25 bp, Homo sapien
tatgagttgacaggcagatatctcc

SEQ ID NO: 2987446 - DNA, 25 bp, Homo sapien
agtaccaaccaggtggaccttggca

SEQ ID NO: 2987447 - DNA, 25 bp, Homo sapien
tccctcatgcagacgaaagtcctct

SEQ ID NO: 2987448 - DNA, 25 bp, Homo sapien
tctccctcatgcagacgaaagtcct

SEQ ID NO: 2987449 - DNA, 25 bp, Homo sapien
tcatgcagacgaaagtcctctcgca

SEQ ID NO: 2987450 - DNA, 25 bp, Homo sapien
aaggtctccctcatgcagacgaaag

SEQ ID NO: 2987451 - DNA, 25 bp, Homo sapien
tgggagccttgattgcagcagctgc

SEQ ID NO: 2987452 - DNA, 25 bp, Homo sapien
cagacagcaccatgatcaggatctc

SEQ ID NO: 2987453 - DNA, 25 bp, Homo sapien
cctgggagccttgattgcagcagct

SEQ ID NO: 2987454 - DNA, 25 bp, Homo sapien
gctgcctcctcggtcatggcagaca

SEQ ID NO: 2987455 - DNA, 25 bp, Homo sapien
gggagggggcctcttgggaggatca

SEQ ID NO: 2987456 - DNA, 25 bp, Homo sapien
ccagggcagagccaagccagcctgg

SEQ ID NO: 2987457 - DNA, 25 bp, Homo sapien
gagggggcctcttgggaggatcact

SEQ ID NO: 2987458 - DNA, 25 bp, Homo sapien
gggcctcttgggaggatcactgctg

SEQ ID NO: 2987459 - DNA, 25 bp, Homo sapien
aaagccacggcttcgcttgctcctg

SEQ ID NO: 2987460 - DNA, 25 bp, Homo sapien
aagccacggcttcgcttgctcctgg

SEQ ID NO: 2987461 - DNA, 25 bp, Homo sapien
ccaaagccacggcttcgcttgctcc

SEQ ID NO: 2987462 - DNA, 25 bp, Homo sapien
ccccaaagccacggcttcgcttgct

SEQ ID NO: 2987463 - DNA, 25 bp, Homo sapien
agggctctcccagatgcctgaggag

SEQ ID NO: 2987464 - DNA, 25 bp, Homo sapien
gagcctgcagggaagggtaaagccc

SEQ ID NO: 2987465 - DNA, 25 bp, Homo sapien
tcaggtttgattttaacaaatgtgt

SEQ ID NO: 2987466 - DNA, 25 bp, Homo sapien
cccgtgggggcagggctctcccaga

SEQ ID NO: 2987467 - DNA, 25 bp, Homo sapien
tacacacacgctcatggcagcgtga

SEQ ID NO: 2987468 - DNA, 25 bp, Homo sapien
ctgtacacacacgctcatggcagcg

SEQ ID NO: 2987469 - DNA, 25 bp, Homo sapien
tgtacacacacgctcatggcagcgt

SEQ ID NO: 2987470 - DNA, 25 bp, Homo sapien
acacacacgctcatggcagcgtgat

SEQ ID NO: 2987471 - DNA, 25 bp, Homo sapien
aggtactggtttggccaggctcggt

SEQ ID NO: 2987472 - DNA, 25 bp, Homo sapien
cttaagaaggtactggtttggccag

SEQ ID NO: 2987473 - DNA, 25 bp, Homo sapien
agcaccttaagaaggtactggtttg

SEQ ID NO: 2987474 - DNA, 25 bp, Homo sapien
agaaggtactggtttggccaggctc

SEQ ID NO: 2987475 - DNA, 25 bp, Homo sapien
ctgggagatgaaaaggtccaaggag

SEQ ID NO: 2987476 - DNA, 25 bp, Homo sapien
ggagatgaaaaggtccaaggaggaa

SEQ ID NO: 2987477 - DNA, 25 bp, Homo sapien
gagatgaaaaggtccaaggaggaag

SEQ ID NO: 2987478 - DNA, 25 bp, Homo sapien
caaggaggaagaaagaaaccgacat

SEQ ID NO: 2987479 - DNA, 25 bp, Homo sapien
gcaggttatgagcacccagcggcct

SEQ ID NO: 2987480 - DNA, 25 bp, Homo sapien
gttatgagcacccagcggcctttgg

SEQ ID NO: 2987481 - DNA, 25 bp, Homo sapien
gtgcacagcaggttatgagcaccca

SEQ ID NO: 2987482 - DNA, 25 bp, Homo sapien
gcacagcaggttatgagcacccagc

SEQ ID NO: 2987483 - DNA, 25 bp, Homo sapien
aggccggctcgtgggtcttcaccac

SEQ ID NO: 2987484 - DNA, 25 bp, Homo sapien
gactggacttgagtgtgacgttgag

SEQ ID NO: 2987485 - DNA, 25 bp, Homo sapien
agtgcatctgtagcctggcactgtc

SEQ ID NO: 2987486 - DNA, 25 bp, Homo sapien
cttgatgttcttggttccacagagg

SEQ ID NO: 2987487 - DNA, 25 bp, Homo sapien
gccgtgtgtaccacacaatttcaca

SEQ ID NO: 2987488 - DNA, 25 bp, Homo sapien
ctacctgccgtgtgtaccacacaat

SEQ ID NO: 2987489 - DNA, 25 bp, Homo sapien
cttgtgtagcgtatttcagattgcc

SEQ ID NO: 2987490 - DNA, 25 bp, Homo sapien
caatttcacatttggtttttatctt

SEQ ID NO: 2987491 - DNA, 25 bp, Homo sapien
cagagtgaagttggcccgcagctca

SEQ ID NO: 2987492 - DNA, 25 bp, Homo sapien
ctgcagagtgaagttggcccgcagc

SEQ ID NO: 2987493 - DNA, 25 bp, Homo sapien
tgcagagtgaagttggcccgcagct

SEQ ID NO: 2987494 - DNA, 25 bp, Homo sapien
gagtgaagttggcccgcagctcaga

SEQ ID NO: 2987495 - DNA, 25 bp, Homo sapien
tggcaccagaaccagtccgatgtct

SEQ ID NO: 2987496 - DNA, 25 bp, Homo sapien
gaggacgcctggcagatcatctcca

SEQ ID NO: 2987497 - DNA, 25 bp, Homo sapien
catccttcccgatcaggctgttggt

SEQ ID NO: 2987498 - DNA, 25 bp, Homo sapien
gcgttgtttgcagcctggcaccaga

SEQ ID NO: 2987499 - DNA, 25 bp, Homo sapien
cagtggccgggtagagctgtcccac

SEQ ID NO: 2987500 - DNA, 25 bp, Homo sapien
gctgcccctctggaaatccaagggc

SEQ ID NO: 2987501 - DNA, 25 bp, Homo sapien
ccacttcccatcgacctgtgtcttg

SEQ ID NO: 2987502 - DNA, 25 bp, Homo sapien
tcccggcacagaagcgccagctgcc

SEQ ID NO: 2987503 - DNA, 25 bp, Homo sapien
ttgggcttcctttaggcaggggcca

SEQ ID NO: 2987504 - DNA, 25 bp, Homo sapien
tgggcttcctttaggcaggggccag

SEQ ID NO: 2987505 - DNA, 25 bp, Homo sapien
ctgccaaccagcacgatggtgggtg

SEQ ID NO: 2987506 - DNA, 25 bp, Homo sapien
caaggctgccaaccagcacgatggt

SEQ ID NO: 2987507 - DNA, 25 bp, Homo sapien
cctggaggtgatggccgcagtggag

SEQ ID NO: 2987508 - DNA, 25 bp, Homo sapien
cagtggaggcaaggctgccaaccag

SEQ ID NO: 2987509 - DNA, 25 bp, Homo sapien
cgtctgagagtgttcgtttgttttg

SEQ ID NO: 2987510 - DNA, 25 bp, Homo sapien
cagtggagactcaagtcaggcaggc

SEQ ID NO: 2987511 - DNA, 25 bp, Homo sapien
atcccctcccgaggcgtctgagagt

SEQ ID NO: 2987512 - DNA, 25 bp, Homo sapien
agactcaagtcaggcaggctcacct

SEQ ID NO: 2987513 - DNA, 25 bp, Homo sapien
tgctcctgtagagcggcaaggcaag

SEQ ID NO: 2987514 - DNA, 25 bp, Homo sapien
ctcagacggcgggtgctcctgtaga

SEQ ID NO: 2987515 - DNA, 25 bp, Homo sapien
ctcctcttcactcagacggcgggtg

SEQ ID NO: 2987516 - DNA, 25 bp, Homo sapien
gtgctcctgtagagcggcaaggcaa

SEQ ID NO: 2987517 - DNA, 25 bp, Homo sapien
tgctgctttgcgtcctctgacctcc

SEQ ID NO: 2987518 - DNA, 25 bp, Homo sapien
gctgctttgcgtcctctgacctccc

SEQ ID NO: 2987519 - DNA, 25 bp, Homo sapien
ctgctgctttgcgtcctctgacctc

SEQ ID NO: 2987520 - DNA, 25 bp, Homo sapien
caaaggttcctatagcgaagcaagt

SEQ ID NO: 2987521 - DNA, 25 bp, Homo sapien
cgtgcttggctctctggacggttca

SEQ ID NO: 2987522 - DNA, 25 bp, Homo sapien
tacgaacagtgcacgctgatggcct

SEQ ID NO: 2987523 - DNA, 25 bp, Homo sapien
tgcatgaactccaaatacgaacagt

SEQ ID NO: 2987524 - DNA, 25 bp, Homo sapien
cgcaggtcgaaggagccgcccgcct

SEQ ID NO: 2987525 - DNA, 25 bp, Homo sapien
ccgcaggtcgaaggagccgcccgcc

SEQ ID NO: 2987526 - DNA, 25 bp, Homo sapien
gccgcaggtcgaaggagccgcccgc

SEQ ID NO: 2987527 - DNA, 25 bp, Homo sapien
cttacagggagggggtacatcttgg

SEQ ID NO: 2987528 - DNA, 25 bp, Homo sapien
tgaaagaggtttaaccaagacaggc

SEQ ID NO: 2987529 - DNA, 25 bp, Homo sapien
ggaatcattctgcttaggtacctga

SEQ ID NO: 2987530 - DNA, 25 bp, Homo sapien
ccttttggaggctgacatcttagcc

SEQ ID NO: 2987531 - DNA, 25 bp, Homo sapien
gggactaactcaggcctgtggatac

SEQ ID NO: 2987532 - DNA, 25 bp, Homo sapien
cctgatggggtgtacagatgctggc

SEQ ID NO: 2987533 - DNA, 25 bp, Homo sapien
gaccctgatggggtgtacagatgct

SEQ ID NO: 2987534 - DNA, 25 bp, Homo sapien
aggggcacacacagcggggaccctg

SEQ ID NO: 2987535 - DNA, 25 bp, Homo sapien
tgatggggtgtacagatgctggcct

SEQ ID NO: 2987536 - DNA, 25 bp, Homo sapien
aggggaggacctggtagggctggtg

SEQ ID NO: 2987537 - DNA, 25 bp, Homo sapien
gggaggacctggtagggctggtggc

SEQ ID NO: 2987538 - DNA, 25 bp, Homo sapien
ctgccgggaggggaggacctggtag

SEQ ID NO: 2987539 - DNA, 25 bp, Homo sapien
aggacctggtagggctggtggccgc

SEQ ID NO: 2987540 - DNA, 25 bp, Homo sapien
gcttagactcgtgggcattgctgta

SEQ ID NO: 2987541 - DNA, 25 bp, Homo sapien
tctgcttagactcgtgggcattgct

SEQ ID NO: 2987542 - DNA, 25 bp, Homo sapien
tgcttagactcgtgggcattgctgt

SEQ ID NO: 2987543 - DNA, 25 bp, Homo sapien
acatctgcttagactcgtgggcatt

SEQ ID NO: 2987544 - DNA, 25 bp, Homo sapien
ggctggtgccattcaagcacggaaa

SEQ ID NO: 2987545 - DNA, 25 bp, Homo sapien
gaggcaaagcccatctgctcgggtg

SEQ ID NO: 2987546 - DNA, 25 bp, Homo sapien
ccaagatcaaatggaggtgccacag

SEQ ID NO: 2987547 - DNA, 25 bp, Homo sapien
gctgcggaaccctagagttaatgcc

SEQ ID NO: 2987548 - DNA, 25 bp, Homo sapien
cagaaaccaacaaaccacaggaagg

SEQ ID NO: 2987549 - DNA, 25 bp, Homo sapien
ccaagaaccggcccctggccatcct

SEQ ID NO: 2987550 - DNA, 25 bp, Homo sapien
caagaaccggcccctggccatccta

SEQ ID NO: 2987551 - DNA, 25 bp, Homo sapien
tggtaggccagggaggccagcacac

SEQ ID NO: 2987552 - DNA, 25 bp, Homo sapien
ctggtaggccagggaggccagcaca

SEQ ID NO: 2987553 - DNA, 25 bp, Homo sapien
ggtaggccagggaggccagcacacc

SEQ ID NO: 2987554 - DNA, 25 bp, Homo sapien
aagggtggctgttggtagttgtcca

SEQ ID NO: 2987555 - DNA, 25 bp, Homo sapien
gaagggtggctgttggtagttgtcc

SEQ ID NO: 2987556 - DNA, 25 bp, Homo sapien
tgaagggtggctgttggtagttgtc

SEQ ID NO: 2987557 - DNA, 25 bp, Homo sapien
aacgcagataatagcggctcccacg

SEQ ID NO: 2987558 - DNA, 25 bp, Homo sapien
cacttgtcagtagcacatgggcacc

SEQ ID NO: 2987559 - DNA, 25 bp, Homo sapien
cccgccaggctatgaggctccttag

SEQ ID NO: 2987560 - DNA, 25 bp, Homo sapien
acgagtctttggcagagaacgcaga

SEQ ID NO: 2987561 - DNA, 25 bp, Homo sapien
tgcggaatgcgaccccagacagagg

SEQ ID NO: 2987562 - DNA, 25 bp, Homo sapien
agccagcccctaagggtgtacccag

SEQ ID NO: 2987563 - DNA, 25 bp, Homo sapien
atgttgatgaaaggcttgtgcggaa

SEQ ID NO: 2987564 - DNA, 25 bp, Homo sapien
gccttgttcaaactacaagttccat

SEQ ID NO: 2987565 - DNA, 25 bp, Homo sapien
gagcagtgccctgttagttcgtact

SEQ ID NO: 2987566 - DNA, 25 bp, Homo sapien
tccccttcgctagtgatgtgtccca

SEQ ID NO: 2987567 - DNA, 25 bp, Homo sapien
tcccaagccaaagccatcgggtgag

SEQ ID NO: 2987568 - DNA, 25 bp, Homo sapien
caatcgggacttgccgatgacagct

SEQ ID NO: 2987569 - DNA, 25 bp, Homo sapien
tggccccgcttggtggcctgggatc

SEQ ID NO: 2987570 - DNA, 25 bp, Homo sapien
gcacctttgagccttggcccacact

SEQ ID NO: 2987571 - DNA, 25 bp, Homo sapien
tgcggctttcactgctgagtttctg

SEQ ID NO: 2987572 - DNA, 25 bp, Homo sapien
tgcttcttcccctctgcggctttca

SEQ ID NO: 2987573 - DNA, 25 bp, Homo sapien
caacgccgggaagaccgtaattgtg

SEQ ID NO: 2987574 - DNA, 25 bp, Homo sapien
aggccatggccaacgccgggaagac

SEQ ID NO: 2987575 - DNA, 25 bp, Homo sapien
ggaagaccgtaattgtggctgcact

SEQ ID NO: 2987576 - DNA, 25 bp, Homo sapien
tggagttctgcgaggccatggccaa

SEQ ID NO: 2987577 - DNA, 25 bp, Homo sapien
attagccagtcatagcagcgcacac

SEQ ID NO: 2987578 - DNA, 25 bp, Homo sapien
tttactggcaagatgcagtgactca

SEQ ID NO: 2987579 - DNA, 25 bp, Homo sapien
ccagtcatagcagcgcacacctgtg

SEQ ID NO: 2987580 - DNA, 25 bp, Homo sapien
catatatctatttactggcaagatg

SEQ ID NO: 2987581 - DNA, 25 bp, Homo sapien
tagcttactgttacgtgaccccaaa

SEQ ID NO: 2987582 - DNA, 25 bp, Homo sapien
ccaaaatactgtttcacacattctt

SEQ ID NO: 2987583 - DNA, 25 bp, Homo sapien
tagcaaggtaataacgaaacaatag

SEQ ID NO: 2987584 - DNA, 25 bp, Homo sapien
cattctttccagaactcgaagtagg

SEQ ID NO: 2987585 - DNA, 25 bp, Homo sapien
gctgtgcagagaacagatccacccg

SEQ ID NO: 2987586 - DNA, 25 bp, Homo sapien
ttaaccgcacttcgtgaccatgctg

SEQ ID NO: 2987587 - DNA, 25 bp, Homo sapien
cattcctaagatgcgatgtccacgg

SEQ ID NO: 2987588 - DNA, 25 bp, Homo sapien
tgtatccgagagttgctatggctgt

SEQ ID NO: 2987589 - DNA, 25 bp, Homo sapien
gattttgccgccagggtccatttga

SEQ ID NO: 2987590 - DNA, 25 bp, Homo sapien
tgcttggcaaggtagcgcacactct

SEQ ID NO: 2987591 - DNA, 25 bp, Homo sapien
tagttgtccgttgttggctggctcc

SEQ ID NO: 2987592 - DNA, 25 bp, Homo sapien
cgtagggtttcagcttcacacaggc

SEQ ID NO: 2987593 - DNA, 25 bp, Homo sapien
tcttcttccaaggaaccttgcttgg

SEQ ID NO: 2987594 - DNA, 25 bp, Homo sapien
tcttccaaggaaccttgcttgggaa

SEQ ID NO: 2987595 - DNA, 25 bp, Homo sapien
gacatcttcttccaaggaaccttgc

SEQ ID NO: 2987596 - DNA, 25 bp, Homo sapien
agacatcttcttccaaggaaccttg

SEQ ID NO: 2987597 - DNA, 25 bp, Homo sapien
taataaatgagctaactccgcccca

SEQ ID NO: 2987598 - DNA, 25 bp, Homo sapien
cacaggagtgctctagacggcttct

SEQ ID NO: 2987599 - DNA, 25 bp, Homo sapien
aggcgctctgcatgcccacaggagt

SEQ ID NO: 2987600 - DNA, 25 bp, Homo sapien
tacaccatggtgctcaagcactggg

SEQ ID NO: 2987601 - DNA, 25 bp, Homo sapien
gatgccctcagatccatggtctaga

SEQ ID NO: 2987602 - DNA, 25 bp, Homo sapien
gatgaggtcccccaaacgaattcag

SEQ ID NO: 2987603 - DNA, 25 bp, Homo sapien
gaccgctgtgcctttagccagctgg

SEQ ID NO: 2987604 - DNA, 25 bp, Homo sapien
tagaggtataccagcgaccgctgtg

SEQ ID NO: 2987605 - DNA, 25 bp, Homo sapien
ccatcggctgggacagtactgattc

SEQ ID NO: 2987606 - DNA, 25 bp, Homo sapien
tcaattcctatctgtgagtaggtcc

SEQ ID NO: 2987607 - DNA, 25 bp, Homo sapien
tgtgagtaggtcctcaaggcttcct

SEQ ID NO: 2987608 - DNA, 25 bp, Homo sapien
ccagtcggacaacccatcggctggg

SEQ ID NO: 2987609 - DNA, 25 bp, Homo sapien
tctctagggacctcatttaaatgaa

SEQ ID NO: 2987610 - DNA, 25 bp, Homo sapien
gaatttgaacttttgtatctggata

SEQ ID NO: 2987611 - DNA, 25 bp, Homo sapien
tacagcattttgctgactgtaaaat

SEQ ID NO: 2987612 - DNA, 25 bp, Homo sapien
tttgacttctctagggacctcattt

SEQ ID NO: 2987613 - DNA, 25 bp, Homo sapien
gtagagaaggtgttttgtcgtgttg

SEQ ID NO: 2987614 - DNA, 25 bp, Homo sapien
ttcagtagagaaggtgttttgtcgt

SEQ ID NO: 2987615 - DNA, 25 bp, Homo sapien
tcagtagagaaggtgttttgtcgtg

SEQ ID NO: 2987616 - DNA, 25 bp, Homo sapien
agaaggtgttttgtcgtgttggcca

SEQ ID NO: 2987617 - DNA, 25 bp, Homo sapien
tacaactcaggctatgtggaaatgg

SEQ ID NO: 2987618 - DNA, 25 bp, Homo sapien
aagacaccccagaacaaaccttatg

SEQ ID NO: 2987619 - DNA, 25 bp, Homo sapien
cagaacaaaccttatggcaaacttc

SEQ ID NO: 2987620 - DNA, 25 bp, Homo sapien
aaatggtgctacgaacacgcgtgta

SEQ ID NO: 2987621 - DNA, 25 bp, Homo sapien
cacttgcaagcatctgtaggacgca

SEQ ID NO: 2987622 - DNA, 25 bp, Homo sapien
tcactgtgaggccattgccggctgc

SEQ ID NO: 2987623 - DNA, 25 bp, Homo sapien
tctgggtcaaaaggcagacgcattt

SEQ ID NO: 2987624 - DNA, 25 bp, Homo sapien
tcatcggagtggcttcatcagaagg

SEQ ID NO: 2987625 - DNA, 25 bp, Homo sapien
ctggaactcctgaattcacttttta

SEQ ID NO: 2987626 - DNA, 25 bp, Homo sapien
tctggaactcctgaattcacttttt

SEQ ID NO: 2987627 - DNA, 25 bp, Homo sapien
tggaactcctgaattcactttttat

SEQ ID NO: 2987628 - DNA, 25 bp, Homo sapien
taacgtgcaacttgggatccctgtc

SEQ ID NO: 2987629 - DNA, 25 bp, Homo sapien
ggttgatctccccaaaagaggtgga

SEQ ID NO: 2987630 - DNA, 25 bp, Homo sapien
gctagtcagcagagacctaaggcct

SEQ ID NO: 2987631 - DNA, 25 bp, Homo sapien
gaaagggctccgtgtattaacgtgc

SEQ ID NO: 2987632 - DNA, 25 bp, Homo sapien
tacacacttattatgtgcgctatac

SEQ ID NO: 2987633 - DNA, 25 bp, Homo sapien
tttcagcacgactttactacacact

SEQ ID NO: 2987634 - DNA, 25 bp, Homo sapien
tgaactgtggttctgcgaggaccct

SEQ ID NO: 2987635 - DNA, 25 bp, Homo sapien
gactgccagtcctgacgtctgtcaa

SEQ ID NO: 2987636 - DNA, 25 bp, Homo sapien
gcagcaggctcttcctggtggcccg

SEQ ID NO: 2987637 - DNA, 25 bp, Homo sapien
ctcgtcggggaagtaaatgtccact

SEQ ID NO: 2987638 - DNA, 25 bp, Homo sapien
ttcgccgtctccataggggacatgc

SEQ ID NO: 2987639 - DNA, 25 bp, Homo sapien
cttcctggtggcccgggcccttgtg

SEQ ID NO: 2987640 - DNA, 25 bp, Homo sapien
cgctctgccagtatcctccgtgaaa

SEQ ID NO: 2987641 - DNA, 25 bp, Homo sapien
tctgccagtatcctccgtgaaagaa

SEQ ID NO: 2987642 - DNA, 25 bp, Homo sapien
ttccgctctgccagtatcctccgtg

SEQ ID NO: 2987643 - DNA, 25 bp, Homo sapien
tgccagtatcctccgtgaaagaaca

SEQ ID NO: 2987644 - DNA, 25 bp, Homo sapien
ccaggatcacatgtgaatggaggca

SEQ ID NO: 2987645 - DNA, 25 bp, Homo sapien
caagctaagggctgtctaaggccac

SEQ ID NO: 2987646 - DNA, 25 bp, Homo sapien
cctgcaaggagtgcccagcttgtgg

SEQ ID NO: 2987647 - DNA, 25 bp, Homo sapien
cacatttgacttgagacttccgttc

SEQ ID NO: 2987648 - DNA, 25 bp, Homo sapien
taacatgaacatgcttgaaggcaac

SEQ ID NO: 2987649 - DNA, 25 bp, Homo sapien
tgaaggcaactctgtaggaagaccc

SEQ ID NO: 2987650 - DNA, 25 bp, Homo sapien
gaagaccctagggaacagcagtgtc

SEQ ID NO: 2987651 - DNA, 25 bp, Homo sapien
aaagtactgaaaaccccatgtcctg

SEQ ID NO: 2987652 - DNA, 25 bp, Homo sapien
gccactgtgcaaggcaatttgtgta

SEQ ID NO: 2987653 - DNA, 25 bp, Homo sapien
aaaatagaggcaattatgttccctc

SEQ ID NO: 2987654 - DNA, 25 bp, Homo sapien
ctgtgcaaggcaatttgtgtaactt

SEQ ID NO: 2987655 - DNA, 25 bp, Homo sapien
gaggcaattatgttccctctctcag

SEQ ID NO: 2987656 - DNA, 25 bp, Homo sapien
atcactgtagcctcgacctcctggg

SEQ ID NO: 2987657 - DNA, 25 bp, Homo sapien
caatggtgcgatcatggatcactgt

SEQ ID NO: 2987658 - DNA, 25 bp, Homo sapien
gcaatggtgcgatcatggatcactg

SEQ ID NO: 2987659 - DNA, 25 bp, Homo sapien
cagctggaggcagcttggccactac

SEQ ID NO: 2987660 - DNA, 25 bp, Homo sapien
gacacacagatgtgacagctggagg

SEQ ID NO: 2987661 - DNA, 25 bp, Homo sapien
gcttggccactacgctgcttcctgt

SEQ ID NO: 2987662 - DNA, 25 bp, Homo sapien
tgtcctggacacaccacttgccaga

SEQ ID NO: 2987663 - DNA, 25 bp, Homo sapien
cagcgggtggaccatgaaggcagac

SEQ ID NO: 2987664 - DNA, 25 bp, Homo sapien
gtaagccactattaccacggccact

SEQ ID NO: 2987665 - DNA, 25 bp, Homo sapien
actccctgtgccgtcagcgggtgga

SEQ ID NO: 2987666 - DNA, 25 bp, Homo sapien
ctttgggggcgatgccgtaagccac

SEQ ID NO: 2987667 - DNA, 25 bp, Homo sapien
tctggacaaacgcaacgctgcgggt

SEQ ID NO: 2987668 - DNA, 25 bp, Homo sapien
tggacaaacgcaacgctgcgggtca

SEQ ID NO: 2987669 - DNA, 25 bp, Homo sapien
tgcgggtcacctggtctaccatgtg

SEQ ID NO: 2987670 - DNA, 25 bp, Homo sapien
acaaacgcaacgctgcgggtcacct

SEQ ID NO: 2987671 - DNA, 25 bp, Homo sapien
ggatttgcacgcagtttccccacaa

SEQ ID NO: 2987672 - DNA, 25 bp, Homo sapien
cacccactgaggtccaacaggaaga

SEQ ID NO: 2987673 - DNA, 25 bp, Homo sapien
tatcctaggtactgattgcactgtc

SEQ ID NO: 2987674 - DNA, 25 bp, Homo sapien
ggcagcttggctgtatcctaggtac

SEQ ID NO: 2987675 - DNA, 25 bp, Homo sapien
tgaccccatgcttggtccagtcggc

SEQ ID NO: 2987676 - DNA, 25 bp, Homo sapien
catgcttggtccagtcggccaggag

SEQ ID NO: 2987677 - DNA, 25 bp, Homo sapien
ctgaggttgggcgtgaccccatgct

SEQ ID NO: 2987678 - DNA, 25 bp, Homo sapien
tgggcgtgaccccatgcttggtcca

SEQ ID NO: 2987679 - DNA, 25 bp, Homo sapien
gaagtatacacgatgggctccaggt

SEQ ID NO: 2987680 - DNA, 25 bp, Homo sapien
ggtcaaagaccccactcaccaggaa

SEQ ID NO: 2987681 - DNA, 25 bp, Homo sapien
ggtcagctggagagcaacgttctgt

SEQ ID NO: 2987682 - DNA, 25 bp, Homo sapien
gcaacgttctgtgaagtatacacga

SEQ ID NO: 2987683 - DNA, 25 bp, Homo sapien
tgggggctattcctctgagcgtcct

SEQ ID NO: 2987684 - DNA, 25 bp, Homo sapien
gggagtcgaactggcccacgaccac

SEQ ID NO: 2987685 - DNA, 25 bp, Homo sapien
acgaccaccagcacacggcaggtgg

SEQ ID NO: 2987686 - DNA, 25 bp, Homo sapien
caggactgtcggtggaattcggggg

SEQ ID NO: 2987687 - DNA, 25 bp, Homo sapien
aaagtggtccacatcgtggagctct

SEQ ID NO: 2987688 - DNA, 25 bp, Homo sapien
ctgggtgagcacgttgtccttctgg

SEQ ID NO: 2987689 - DNA, 25 bp, Homo sapien
caaatgaggctttccactctccttg

SEQ ID NO: 2987690 - DNA, 25 bp, Homo sapien
gagctcttcaaatgaggctttccac

SEQ ID NO: 2987691 - DNA, 25 bp, Homo sapien
aagggctgccagggatgaggcccca

SEQ ID NO: 2987692 - DNA, 25 bp, Homo sapien
aaagggctgccagggatgaggcccc

SEQ ID NO: 2987693 - DNA, 25 bp, Homo sapien
agggctgccagggatgaggccccac

SEQ ID NO: 2987694 - DNA, 25 bp, Homo sapien
caaggtgggatgcacgtggaccagg

SEQ ID NO: 2987695 - DNA, 25 bp, Homo sapien
actcttgccgggcagacagacacag

SEQ ID NO: 2987696 - DNA, 25 bp, Homo sapien
agcagtgagaatggactcttgccgg

SEQ ID NO: 2987697 - DNA, 25 bp, Homo sapien
gaccaggctccaagtatcgtcagaa

SEQ ID NO: 2987698 - DNA, 25 bp, Homo sapien
gtctaagaggcagctccgggcatct

SEQ ID NO: 2987699 - DNA, 25 bp, Homo sapien
gagcattgacttgcggacgttcccc

SEQ ID NO: 2987700 - DNA, 25 bp, Homo sapien
ctgtcagcaggtagatgggccagac

SEQ ID NO: 2987701 - DNA, 25 bp, Homo sapien
gcgtcatctttgtcatgctctgtca

SEQ ID NO: 2987702 - DNA, 25 bp, Homo sapien
tttaaatataatgccattctggccg

SEQ ID NO: 2987703 - DNA, 25 bp, Homo sapien
ctatttaaatataatgccattctgg

SEQ ID NO: 2987704 - DNA, 25 bp, Homo sapien
tatttaaatataatgccattctggc

SEQ ID NO: 2987705 - DNA, 25 bp, Homo sapien
ttaaatataatgccattctggccgg

SEQ ID NO: 2987706 - DNA, 25 bp, Homo sapien
agcgcacgccctcttaggcggtcca

SEQ ID NO: 2987707 - DNA, 25 bp, Homo sapien
gtcgggagcgcacgccctcttaggc

SEQ ID NO: 2987708 - DNA, 25 bp, Homo sapien
gcacgccctcttaggcggtccaccc

SEQ ID NO: 2987709 - DNA, 25 bp, Homo sapien
ggagcgcacgccctcttaggcggtc

SEQ ID NO: 2987710 - DNA, 25 bp, Homo sapien
cccgcgattcaaatctggcggttaa

SEQ ID NO: 2987711 - DNA, 25 bp, Homo sapien
ctgccaacgggtcccgcgattcaaa

SEQ ID NO: 2987712 - DNA, 25 bp, Homo sapien
aatctggcggttaatggcgcgccgc

SEQ ID NO: 2987713 - DNA, 25 bp, Homo sapien
cgattcaaatctggcggttaatggc

SEQ ID NO: 2987714 - DNA, 25 bp, Homo sapien
gccaggcagggggcaacgtcggggc

SEQ ID NO: 2987715 - DNA, 25 bp, Homo sapien
tgccaggcagggggcaacgtcgggg

SEQ ID NO: 2987716 - DNA, 25 bp, Homo sapien
ccaggcagggggcaacgtcggggca

SEQ ID NO: 2987717 - DNA, 25 bp, Homo sapien
caagaagggccagttcttgaatgta

SEQ ID NO: 2987718 - DNA, 25 bp, Homo sapien
aagggccagttcttgaatgtagaga

SEQ ID NO: 2987719 - DNA, 25 bp, Homo sapien
tagagatgcggtggtccttgagaaa

SEQ ID NO: 2987720 - DNA, 25 bp, Homo sapien
aatgtagagatgcggtggtccttga

SEQ ID NO: 2987721 - DNA, 25 bp, Homo sapien
ggccaagtctggctcgttctcagtg

SEQ ID NO: 2987722 - DNA, 25 bp, Homo sapien
ccaagtctggctcgttctcagtggg

SEQ ID NO: 2987723 - DNA, 25 bp, Homo sapien
ctcagtggggcagtggatgaagcca

SEQ ID NO: 2987724 - DNA, 25 bp, Homo sapien
ggggtcgtcatctggctcccagcct

SEQ ID NO: 2987725 - DNA, 25 bp, Homo sapien
catcaccaaggcaccagcatataga

SEQ ID NO: 2987726 - DNA, 25 bp, Homo sapien
agagaggtatccgttcacaacagct

SEQ ID NO: 2987727 - DNA, 25 bp, Homo sapien
cagttcaaaacaaagcccatcgagg

SEQ ID NO: 2987728 - DNA, 25 bp, Homo sapien
cctcccatactaagtgtctttgcaa

SEQ ID NO: 2987729 - DNA, 25 bp, Homo sapien
cagagaagggcattattgccccggg

SEQ ID NO: 2987730 - DNA, 25 bp, Homo sapien
gcagagaagggcattattgccccgg

SEQ ID NO: 2987731 - DNA, 25 bp, Homo sapien
aatcaaaacaacagcggaaaggcag

SEQ ID NO: 2987732 - DNA, 25 bp, Homo sapien
cgtcaagtctgaagttgatggcatc

SEQ ID NO: 2987733 - DNA, 25 bp, Homo sapien
tgaagggattaaagcggcagtccac

SEQ ID NO: 2987734 - DNA, 25 bp, Homo sapien
gatggcatcagtgctttgcccaagc

SEQ ID NO: 2987735 - DNA, 25 bp, Homo sapien
ccaagggttaattcttcaaactgct

SEQ ID NO: 2987736 - DNA, 25 bp, Homo sapien
tgacagaaaggaaagcgcaaccgga

SEQ ID NO: 2987737 - DNA, 25 bp, Homo sapien
tctgtccagtttcaaaaattcacca

SEQ ID NO: 2987738 - DNA, 25 bp, Homo sapien
gcaaccggacgaatgctttttatgt

SEQ ID NO: 2987739 - DNA, 25 bp, Homo sapien
aacacagagtccctttgagggacta

SEQ ID NO: 2987740 - DNA, 25 bp, Homo sapien
ggactaggtagtttagtgctaaaga

SEQ ID NO: 2987741 - DNA, 25 bp, Homo sapien
tagtgctaaagacattgaacagggt

SEQ ID NO: 2987742 - DNA, 25 bp, Homo sapien
cattgaacagggtttgagcagttct

SEQ ID NO: 2987743 - DNA, 25 bp, Homo sapien
gtccagttaaacagaccctggcaaa

SEQ ID NO: 2987744 - DNA, 25 bp, Homo sapien
ggctcttcctcgaacagaaattctt

SEQ ID NO: 2987745 - DNA, 25 bp, Homo sapien
ttcatgtccagttaaacagaccctg

SEQ ID NO: 2987746 - DNA, 25 bp, Homo sapien
atcaggctcttcctcgaacagaaat

SEQ ID NO: 2987747 - DNA, 25 bp, Homo sapien
aataaagaatagacacatgacactg

SEQ ID NO: 2987748 - DNA, 25 bp, Homo sapien
ggcacggcgcactttctccgcagtt

SEQ ID NO: 2987749 - DNA, 25 bp, Homo sapien
tttctccgcagtttcctcaaattct

SEQ ID NO: 2987750 - DNA, 25 bp, Homo sapien
cagctgctcgatggcacggcgcact

SEQ ID NO: 2987751 - DNA, 25 bp, Homo sapien
tgctcgatggcacggcgcactttct

SEQ ID NO: 2987752 - DNA, 25 bp, Homo sapien
aataaaccctggaagtggtgcagcc

SEQ ID NO: 2987753 - DNA, 25 bp, Homo sapien
tcagctctagcaaaagggacactgc

SEQ ID NO: 2987754 - DNA, 25 bp, Homo sapien
tcaacaacatgaggtccagacacat

SEQ ID NO: 2987755 - DNA, 25 bp, Homo sapien
ggtaagcccgggaatcaaaacagca

SEQ ID NO: 2987756 - DNA, 25 bp, Homo sapien
cacaagtcatgcatctaccaaaaaa

SEQ ID NO: 2987757 - DNA, 25 bp, Homo sapien
gttaaacagtagaggagccagggac

SEQ ID NO: 2987758 - DNA, 25 bp, Homo sapien
gcacaggtgtgacagataaggaacc

SEQ ID NO: 2987759 - DNA, 25 bp, Homo sapien
taattgtagtttgtgctattctgtg

SEQ ID NO: 2987760 - DNA, 25 bp, Homo sapien
ggagtatctgccagacgcttcctat

SEQ ID NO: 2987761 - DNA, 25 bp, Homo sapien
gctcactgggcctgtctaatcacac

SEQ ID NO: 2987762 - DNA, 25 bp, Homo sapien
tcatccacctgaagttcaccccgtt

SEQ ID NO: 2987763 - DNA, 25 bp, Homo sapien
ccacagcatcgagccaagtcattta

SEQ ID NO: 2987764 - DNA, 25 bp, Homo sapien
ggaggagggcgaatcaaatccatca

SEQ ID NO: 2987765 - DNA, 25 bp, Homo sapien
tgaaggttgggctgacagacacacg

SEQ ID NO: 2987766 - DNA, 25 bp, Homo sapien
ccccgtgtggagaacgtgacagatg

SEQ ID NO: 2987767 - DNA, 25 bp, Homo sapien
gatgacctccagaggtttccagcga

SEQ ID NO: 2987768 - DNA, 25 bp, Homo sapien
atgacaggctttttatttctcagga

SEQ ID NO: 2987769 - DNA, 25 bp, Homo sapien
gaaatgacaggctttttatttctca

SEQ ID NO: 2987770 - DNA, 25 bp, Homo sapien
acaggctttttatttctcaggaaca

SEQ ID NO: 2987771 - DNA, 25 bp, Homo sapien
gacaggctttttatttctcaggaac

SEQ ID NO: 2987772 - DNA, 25 bp, Homo sapien
tatctcaggccgactcagatgtggc

SEQ ID NO: 2987773 - DNA, 25 bp, Homo sapien
caggctagggacgacgatgaaaaac

SEQ ID NO: 2987774 - DNA, 25 bp, Homo sapien
gaaggagcccggatgatacaaacag

SEQ ID NO: 2987775 - DNA, 25 bp, Homo sapien
taagcagcttagatgagtacagagg

SEQ ID NO: 2987776 - DNA, 25 bp, Homo sapien
tgagaggggcggctccagctcagcc

SEQ ID NO: 2987777 - DNA, 25 bp, Homo sapien
ggctgagaggggcggctccagctca

SEQ ID NO: 2987778 - DNA, 25 bp, Homo sapien
gcgggctgagaggggcggctccagc

SEQ ID NO: 2987779 - DNA, 25 bp, Homo sapien
cagctcagccctgcccacagcacag

SEQ ID NO: 2987780 - DNA, 25 bp, Homo sapien
ggcctacggctttattaacagatgt

SEQ ID NO: 2987781 - DNA, 25 bp, Homo sapien
gatgtcgaggaagctttcaggtgct

SEQ ID NO: 2987782 - DNA, 25 bp, Homo sapien
gcacttagacaagggcctacggctt

SEQ ID NO: 2987783 - DNA, 25 bp, Homo sapien
gccatgagggtctggttttaaggat

SEQ ID NO: 2987784 - DNA, 25 bp, Homo sapien
gggctctaacctgccattggaacct

SEQ ID NO: 2987785 - DNA, 25 bp, Homo sapien
attggaacctcacccatagcccaga

SEQ ID NO: 2987786 - DNA, 25 bp, Homo sapien
tactctttccacatggcgacagcct

SEQ ID NO: 2987787 - DNA, 25 bp, Homo sapien
tgtatctgaaagaaagtctaggcgg

SEQ ID NO: 2987788 - DNA, 25 bp, Homo sapien
gtcttctcggtactcctgcagacac

SEQ ID NO: 2987789 - DNA, 25 bp, Homo sapien
ttctcggtactcctgcagacaccag

SEQ ID NO: 2987790 - DNA, 25 bp, Homo sapien
cgtcttctcggtactcctgcagaca

SEQ ID NO: 2987791 - DNA, 25 bp, Homo sapien
tcttctcggtactcctgcagacacc

SEQ ID NO: 2987792 - DNA, 25 bp, Homo sapien
ctgcagtgcccgttccgttccctcc

SEQ ID NO: 2987793 - DNA, 25 bp, Homo sapien
gcagtgcccgttccgttccctccga

SEQ ID NO: 2987794 - DNA, 25 bp, Homo sapien
tcacatcgcagagcgcacctgcagt

SEQ ID NO: 2987795 - DNA, 25 bp, Homo sapien
acctgcagtgcccgttccgttccct

SEQ ID NO: 2987796 - DNA, 25 bp, Homo sapien
agccaaacaagatgcacctgcctgg

SEQ ID NO: 2987797 - DNA, 25 bp, Homo sapien
aaccagacggcatccggtgaagtgc

SEQ ID NO: 2987798 - DNA, 25 bp, Homo sapien
ccacccgtgctcctggaagcatagg

SEQ ID NO: 2987799 - DNA, 25 bp, Homo sapien
gggtcctggtctgtatcagtcctga

SEQ ID NO: 2987800 - DNA, 25 bp, Homo sapien
agtagtcgctggcgaccgcggcggc

SEQ ID NO: 2987801 - DNA, 25 bp, Homo sapien
cagtagtcgctggcgaccgcggcgg

SEQ ID NO: 2987802 - DNA, 25 bp, Homo sapien
gccaggcgctgccattgccggcgtc

SEQ ID NO: 2987803 - DNA, 25 bp, Homo sapien
tcgcagatgcgccagagccccgagt

SEQ ID NO: 2987804 - DNA, 25 bp, Homo sapien
ggagagcagctctgcgcgcccgggc

SEQ ID NO: 2987805 - DNA, 25 bp, Homo sapien
agccccgagtgcgaggagagcagct

SEQ ID NO: 2987806 - DNA, 25 bp, Homo sapien
gaccagcgggatgcagccgttctgc

SEQ ID NO: 2987807 - DNA, 25 bp, Homo sapien
cactggcaaaagggtcgaccagcgg

SEQ ID NO: 2987808 - DNA, 25 bp, Homo sapien
tgctgcaccgaggtggagacgtcca

SEQ ID NO: 2987809 - DNA, 25 bp, Homo sapien
caaaagggtcgaccagcgggatgca

SEQ ID NO: 2987810 - DNA, 25 bp, Homo sapien
tggaaacgtcctcttggaaacgcag

SEQ ID NO: 2987811 - DNA, 25 bp, Homo sapien
tgggacaggtctgcgtggaaacgtc

SEQ ID NO: 2987812 - DNA, 25 bp, Homo sapien
acaggtctgcgtggaaacgtcctct

SEQ ID NO: 2987813 - DNA, 25 bp, Homo sapien
ggacaggtctgcgtggaaacgtcct

SEQ ID NO: 2987814 - DNA, 25 bp, Homo sapien
ggaccacaatgactgcacggtgcag

SEQ ID NO: 2987815 - DNA, 25 bp, Homo sapien
caggaagtagcagccggtgaaaagc

SEQ ID NO: 2987816 - DNA, 25 bp, Homo sapien
agatccagccacacacgagaaggac

SEQ ID NO: 2987817 - DNA, 25 bp, Homo sapien
tgagcaggccgcagatccagccaca

SEQ ID NO: 2987818 - DNA, 25 bp, Homo sapien
gccctcggaggagccttcggaggag

SEQ ID NO: 2987819 - DNA, 25 bp, Homo sapien
gagccttcggaggagcacttggcca

SEQ ID NO: 2987820 - DNA, 25 bp, Homo sapien
aggagccttcggaggagcacttggc

SEQ ID NO: 2987821 - DNA, 25 bp, Homo sapien
cggaggagccttcggaggagcactt

SEQ ID NO: 2987822 - DNA, 25 bp, Homo sapien
tcctgatttcattgtctagaggaga

SEQ ID NO: 2987823 - DNA, 25 bp, Homo sapien
agggtcaggtcatttggattcttcc

SEQ ID NO: 2987824 - DNA, 25 bp, Homo sapien
ttcattgtctagaggagaccttgac

SEQ ID NO: 2987825 - DNA, 25 bp, Homo sapien
gaccttgacttcactgttgttctca

SEQ ID NO: 2987826 - DNA, 25 bp, Homo sapien
aagctgacgcggacgccctgcatgt

SEQ ID NO: 2987827 - DNA, 25 bp, Homo sapien
gtgctgcgggccatactgctgcacc

SEQ ID NO: 2987828 - DNA, 25 bp, Homo sapien
ccgcaaaggccaggtgcgagtagct

SEQ ID NO: 2987829 - DNA, 25 bp, Homo sapien
ctgagagcaggagggttccgctgaa

SEQ ID NO: 2987830 - DNA, 25 bp, Homo sapien
tcagtgaaaagtacctagcaggctt

SEQ ID NO: 2987831 - DNA, 25 bp, Homo sapien
tcaagacctctcaagactcgggaag

SEQ ID NO: 2987832 - DNA, 25 bp, Homo sapien
tccatctgcataacggtgggcgtgc

SEQ ID NO: 2987833 - DNA, 25 bp, Homo sapien
tagtgcttccacgtgttgtacaggc

SEQ ID NO: 2987834 - DNA, 25 bp, Homo sapien
tggaagatccgtatacaggagttcc

SEQ ID NO: 2987835 - DNA, 25 bp, Homo sapien
gatccgtatacaggagttcccaggg

SEQ ID NO: 2987836 - DNA, 25 bp, Homo sapien
gaagatccgtatacaggagttccca

SEQ ID NO: 2987837 - DNA, 25 bp, Homo sapien
tgtggaagatccgtatacaggagtt

SEQ ID NO: 2987838 - DNA, 25 bp, Homo sapien
tgatcccaccttcgtggagacgaac

SEQ ID NO: 2987839 - DNA, 25 bp, Homo sapien
ccttcgtggagacgaacatggtggt

SEQ ID NO: 2987840 - DNA, 25 bp, Homo sapien
ccacactggccacgtggcgtgcgtg

SEQ ID NO: 2987841 - DNA, 25 bp, Homo sapien
catggctgggttgcgggccgtgagt

SEQ ID NO: 2987842 - DNA, 25 bp, Homo sapien
cagggcgacttctgtctgcctagca

SEQ ID NO: 2987843 - DNA, 25 bp, Homo sapien
ctcatctctggtgagcgcagggcga

SEQ ID NO: 2987844 - DNA, 25 bp, Homo sapien
gacggtgctgacacccgagtgtgca

SEQ ID NO: 2987845 - DNA, 25 bp, Homo sapien
ggttgctaagcccacagagtgtgca

SEQ ID NO: 2987846 - DNA, 25 bp, Homo sapien
ggcctgcgcagcgacaaggtgacca

SEQ ID NO: 2987847 - DNA, 25 bp, Homo sapien
cctgcgcagcgacaaggtgaccagg

SEQ ID NO: 2987848 - DNA, 25 bp, Homo sapien
gtggtgggcctgcgcagcgacaagg

SEQ ID NO: 2987849 - DNA, 25 bp, Homo sapien
tgggcctgcgcagcgacaaggtgac

SEQ ID NO: 2987850 - DNA, 25 bp, Homo sapien
gaacaggttggctagtgggaaccca

SEQ ID NO: 2987851 - DNA, 25 bp, Homo sapien
ttactggaaaagctgtagctgaagg

SEQ ID NO: 2987852 - DNA, 25 bp, Homo sapien
tcaccatggcaacttctggctgtgg

SEQ ID NO: 2987853 - DNA, 25 bp, Homo sapien
ttggctagtgggaacccattgttcc

SEQ ID NO: 2987854 - DNA, 25 bp, Homo sapien
ttcatgactgtttgcctcttgccca

SEQ ID NO: 2987855 - DNA, 25 bp, Homo sapien
cacatcttccatgttgacgtcgcct

SEQ ID NO: 2987856 - DNA, 25 bp, Homo sapien
ccaagcccttcatgactgtttgcct

SEQ ID NO: 2987857 - DNA, 25 bp, Homo sapien
tcttccatgttgacgtcgcctggga

SEQ ID NO: 2987858 - DNA, 25 bp, Homo sapien
taggaaggagtggttcccagaggcc

SEQ ID NO: 2987859 - DNA, 25 bp, Homo sapien
ccaagtgaacgccattcggagaaat

SEQ ID NO: 2987860 - DNA, 25 bp, Homo sapien
gagaaatgtccctcggcttccactg

SEQ ID NO: 2987861 - DNA, 25 bp, Homo sapien
tcccagaggccgagatgaggactca

SEQ ID NO: 2987862 - DNA, 25 bp, Homo sapien
agtcagtattgtgactgacagtggc

SEQ ID NO: 2987863 - DNA, 25 bp, Homo sapien
gtcagtattgtgactgacagtggca

SEQ ID NO: 2987864 - DNA, 25 bp, Homo sapien
ctagtcagtattgtgactgacagtg

SEQ ID NO: 2987865 - DNA, 25 bp, Homo sapien
tagtcagtattgtgactgacagtgg

SEQ ID NO: 2987866 - DNA, 25 bp, Homo sapien
ccataggcgcccctgcattcctgct

SEQ ID NO: 2987867 - DNA, 25 bp, Homo sapien
ctgacctggagtccggcctgccata

SEQ ID NO: 2987868 - DNA, 25 bp, Homo sapien
cctgcattcctgctgatgaccagag

SEQ ID NO: 2987869 - DNA, 25 bp, Homo sapien
gaccagagggcttcagtggtcttgc

SEQ ID NO: 2987870 - DNA, 25 bp, Homo sapien
ccaacagcggtgtgaggaccaggac

SEQ ID NO: 2987871 - DNA, 25 bp, Homo sapien
tgaggaccaggacggggaccctgta

SEQ ID NO: 2987872 - DNA, 25 bp, Homo sapien
gggccaacagcggtgtgaggaccag

SEQ ID NO: 2987873 - DNA, 25 bp, Homo sapien
cttgtccagggccaacagcggtgtg

SEQ ID NO: 2987874 - DNA, 25 bp, Homo sapien
gaagaaggacgtgcacaggcagggg

SEQ ID NO: 2987875 - DNA, 25 bp, Homo sapien
aagaaggacgtgcacaggcaggggc

SEQ ID NO: 2987876 - DNA, 25 bp, Homo sapien
cagagccagtcccacgtccaggacc

SEQ ID NO: 2987877 - DNA, 25 bp, Homo sapien
ggctagaatcagagccagtcccacg

SEQ ID NO: 2987878 - DNA, 25 bp, Homo sapien
aggctagaatcagagccagtcccac

SEQ ID NO: 2987879 - DNA, 25 bp, Homo sapien
cccagagaagacatgtagcagactg

SEQ ID NO: 2987880 - DNA, 25 bp, Homo sapien
cctggcccagagaagacatgtagca

SEQ ID NO: 2987881 - DNA, 25 bp, Homo sapien
cagagaagacatgtagcagactggt

SEQ ID NO: 2987882 - DNA, 25 bp, Homo sapien
tggcccagagaagacatgtagcaga

SEQ ID NO: 2987883 - DNA, 25 bp, Homo sapien
ccacacatcctaggacactcgggca

SEQ ID NO: 2987884 - DNA, 25 bp, Homo sapien
acacatcctaggacactcgggcaca

SEQ ID NO: 2987885 - DNA, 25 bp, Homo sapien
cacatcctaggacactcgggcacat

SEQ ID NO: 2987886 - DNA, 25 bp, Homo sapien
cacacatcctaggacactcgggcac

SEQ ID NO: 2987887 - DNA, 25 bp, Homo sapien
tgagtaggaagacagctgtggaccc

SEQ ID NO: 2987888 - DNA, 25 bp, Homo sapien
gctggctggacatccggatctctct

SEQ ID NO: 2987889 - DNA, 25 bp, Homo sapien
tagatctgatatgccccgtgagagg

SEQ ID NO: 2987890 - DNA, 25 bp, Homo sapien
tggctacagcaaggaggtccccaca

SEQ ID NO: 2987891 - DNA, 25 bp, Homo sapien
cccctgggacagggagtggtccaca

SEQ ID NO: 2987892 - DNA, 25 bp, Homo sapien
ggagctctccaaatagggccctgga

SEQ ID NO: 2987893 - DNA, 25 bp, Homo sapien
ggacagggagtggtccacaggaagg

SEQ ID NO: 2987894 - DNA, 25 bp, Homo sapien
accaggcagtgaagcagggtcagca

SEQ ID NO: 2987895 - DNA, 25 bp, Homo sapien
ccagtaagcgcgagcaagtggagcc

SEQ ID NO: 2987896 - DNA, 25 bp, Homo sapien
tgcatccgcaccacgatcaatgcgc

SEQ ID NO: 2987897 - DNA, 25 bp, Homo sapien
agccttgcgccgctcgggagcacgt

SEQ ID NO: 2987898 - DNA, 25 bp, Homo sapien
ccgctcgggagcacgtttccagtaa

SEQ ID NO: 2987899 - DNA, 25 bp, Homo sapien
gggtggcacgcgcccagggtggccc

SEQ ID NO: 2987900 - DNA, 25 bp, Homo sapien
ggtggcacgcgcccagggtggccca

SEQ ID NO: 2987901 - DNA, 25 bp, Homo sapien
cgccttccattttccctgtttcctg

SEQ ID NO: 2987902 - DNA, 25 bp, Homo sapien
ttccctgtttcctggggattctcat

SEQ ID NO: 2987903 - DNA, 25 bp, Homo sapien
tttccctgtttcctggggattctca

SEQ ID NO: 2987904 - DNA, 25 bp, Homo sapien
cacactccccagaattggggtggag

SEQ ID NO: 2987905 - DNA, 25 bp, Homo sapien
aattggggtggagtttcagaggtgg

SEQ ID NO: 2987906 - DNA, 25 bp, Homo sapien
cccagaattggggtggagtttcaga

SEQ ID NO: 2987907 - DNA, 25 bp, Homo sapien
tccacactccccagaattggggtgg

SEQ ID NO: 2987908 - DNA, 25 bp, Homo sapien
gatctacgtctttgaaccacatgag

SEQ ID NO: 2987909 - DNA, 25 bp, Homo sapien
ggtctgagtcatcggccatcggagt

SEQ ID NO: 2987910 - DNA, 25 bp, Homo sapien
ttggctcacggcaaaacgcttctag

SEQ ID NO: 2987911 - DNA, 25 bp, Homo sapien
gtacatcgtgcattcccgtccttgg

SEQ ID NO: 2987912 - DNA, 25 bp, Homo sapien
ccagcaataatggttgcatcatacc

SEQ ID NO: 2987913 - DNA, 25 bp, Homo sapien
caggactggctctttgctggtactt

SEQ ID NO: 2987914 - DNA, 25 bp, Homo sapien
agcaggactggctctttgctggtac

SEQ ID NO: 2987915 - DNA, 25 bp, Homo sapien
gctggtactttctcccccagcaata

SEQ ID NO: 2987916 - DNA, 25 bp, Homo sapien
ccagggaactgagcctttggcggtc

SEQ ID NO: 2987917 - DNA, 25 bp, Homo sapien
ggtctgcatgcctgctgagtgctaa

SEQ ID NO: 2987918 - DNA, 25 bp, Homo sapien
caccaaccagtggaacttgagcctg

SEQ ID NO: 2987919 - DNA, 25 bp, Homo sapien
gatgagacagtagacaagtcactgg

SEQ ID NO: 2987920 - DNA, 25 bp, Homo sapien
aactccgagagaaagtagggtgagg

SEQ ID NO: 2987921 - DNA, 25 bp, Homo sapien
agccccggactcttgctggctttca

SEQ ID NO: 2987922 - DNA, 25 bp, Homo sapien
cacattgacttgaaagtgggctggg

SEQ ID NO: 2987923 - DNA, 25 bp, Homo sapien
agggcgagctgggaagctccacatt

SEQ ID NO: 2987924 - DNA, 25 bp, Homo sapien
gaaattccggatcacggcgtcactg

SEQ ID NO: 2987925 - DNA, 25 bp, Homo sapien
ggccatttgcatatgtctcgttgaa

SEQ ID NO: 2987926 - DNA, 25 bp, Homo sapien
tgcggggtagtgttgaccgccccaa

SEQ ID NO: 2987927 - DNA, 25 bp, Homo sapien
gtgaccggagcatcactaggagcca

SEQ ID NO: 2987928 - DNA, 25 bp, Homo sapien
tctcaagtagctagaaccacaggtg

SEQ ID NO: 2987929 - DNA, 25 bp, Homo sapien
ctctcaagtagctagaaccacaggt

SEQ ID NO: 2987930 - DNA, 25 bp, Homo sapien
agttgaaaggaaccttacaaggctg

SEQ ID NO: 2987931 - DNA, 25 bp, Homo sapien
tagtgggggctcaactggagattct

SEQ ID NO: 2987932 - DNA, 25 bp, Homo sapien
tgacagacttgggtaattgggtaaa

SEQ ID NO: 2987933 - DNA, 25 bp, Homo sapien
tcttttacagatgggtactttgaca

SEQ ID NO: 2987934 - DNA, 25 bp, Homo sapien
tgcaggttccgacaataggctggac

SEQ ID NO: 2987935 - DNA, 25 bp, Homo sapien
gctgggcctccgctaatattcttgg

SEQ ID NO: 2987936 - DNA, 25 bp, Homo sapien
taatattcttgggtcgcagcctggg

SEQ ID NO: 2987937 - DNA, 25 bp, Homo sapien
taggctggaccatcctcttgtagga

SEQ ID NO: 2987938 - DNA, 25 bp, Homo sapien
ccaccactcttccgggccacactgg

SEQ ID NO: 2987939 - DNA, 25 bp, Homo sapien
accactcttccgggccacactggtt

SEQ ID NO: 2987940 - DNA, 25 bp, Homo sapien
cttccgggccacactggttcccacg

SEQ ID NO: 2987941 - DNA, 25 bp, Homo sapien
ctcttccgggccacactggttccca

SEQ ID NO: 2987942 - DNA, 25 bp, Homo sapien
gggtgggggcacctgggcagtcagc

SEQ ID NO: 2987943 - DNA, 25 bp, Homo sapien
gggcacctgggcagtcagctgggcc

SEQ ID NO: 2987944 - DNA, 25 bp, Homo sapien
ggcacctgggcagtcagctgggcca

SEQ ID NO: 2987945 - DNA, 25 bp, Homo sapien
tgggggcacctgggcagtcagctgg

SEQ ID NO: 2987946 - DNA, 25 bp, Homo sapien
agtaccgagcaagccgcatgcccat

SEQ ID NO: 2987947 - DNA, 25 bp, Homo sapien
ggaagtcagctgagtaccgagcaag

SEQ ID NO: 2987948 - DNA, 25 bp, Homo sapien
ccccagcataccggcagctgctctt

SEQ ID NO: 2987949 - DNA, 25 bp, Homo sapien
agctgagtaccgagcaagccgcatg

SEQ ID NO: 2987950 - DNA, 25 bp, Homo sapien
cacgcccagatagaagctccttgca

SEQ ID NO: 2987951 - DNA, 25 bp, Homo sapien
cagcgtgatacagaaagccctgtct

SEQ ID NO: 2987952 - DNA, 25 bp, Homo sapien
ccctcatcatcgtcaggcagcgtga

SEQ ID NO: 2987953 - DNA, 25 bp, Homo sapien
ccctgtctggtcttcagtagctgaa

SEQ ID NO: 2987954 - DNA, 25 bp, Homo sapien
tcccaccctcaggtggttcgctcgc

SEQ ID NO: 2987955 - DNA, 25 bp, Homo sapien
caccctcaggtggttcgctcgcctc

SEQ ID NO: 2987956 - DNA, 25 bp, Homo sapien
accctcaggtggttcgctcgcctca

SEQ ID NO: 2987957 - DNA, 25 bp, Homo sapien
ccaccctcaggtggttcgctcgcct

SEQ ID NO: 2987958 - DNA, 25 bp, Homo sapien
ccaggcctgtggagtacatcttaat

SEQ ID NO: 2987959 - DNA, 25 bp, Homo sapien
tcaaggtgtactgggaccgtgctcc

SEQ ID NO: 2987960 - DNA, 25 bp, Homo sapien
gggccatcctcatacaacatgctgt

SEQ ID NO: 2987961 - DNA, 25 bp, Homo sapien
catataagggcatcagtcattggac

SEQ ID NO: 2987962 - DNA, 25 bp, Homo sapien
gtcttttctttacgtgcctcatgca

SEQ ID NO: 2987963 - DNA, 25 bp, Homo sapien
tcttttctttacgtgcctcatgcat

SEQ ID NO: 2987964 - DNA, 25 bp, Homo sapien
aataggtagccgcttcttccaaggc

SEQ ID NO: 2987965 - DNA, 25 bp, Homo sapien
ggggaataggtagccgcttcttcca

SEQ ID NO: 2987966 - DNA, 25 bp, Homo sapien
aggtagccgcttcttccaaggctca

SEQ ID NO: 2987967 - DNA, 25 bp, Homo sapien
ggaataggtagccgcttcttccaag

SEQ ID NO: 2987968 - DNA, 25 bp, Homo sapien
cttctcattcatccgacatccaagc

SEQ ID NO: 2987969 - DNA, 25 bp, Homo sapien
ttctcattcatccgacatccaagct

SEQ ID NO: 2987970 - DNA, 25 bp, Homo sapien
tcattcatccgacatccaagctcac

SEQ ID NO: 2987971 - DNA, 25 bp, Homo sapien
tctcattcatccgacatccaagctc

SEQ ID NO: 2987972 - DNA, 25 bp, Homo sapien
tctaagcacctgaaacgtactgacc

SEQ ID NO: 2987973 - DNA, 25 bp, Homo sapien
gagttacgtactattcttgtcccta

SEQ ID NO: 2987974 - DNA, 25 bp, Homo sapien
cgtactgacccatggaggtctccag

SEQ ID NO: 2987975 - DNA, 25 bp, Homo sapien
caccaaggcactggacatgggcact

SEQ ID NO: 2987976 - DNA, 25 bp, Homo sapien
ggtcttgagggttctatgggaaata

SEQ ID NO: 2987977 - DNA, 25 bp, Homo sapien
cttgagggttctatgggaaatagaa

SEQ ID NO: 2987978 - DNA, 25 bp, Homo sapien
tgctggtcttgagggttctatggga

SEQ ID NO: 2987979 - DNA, 25 bp, Homo sapien
aactgcatgagaatgctattggcct

SEQ ID NO: 2987980 - DNA, 25 bp, Homo sapien
cacagggtgtatacacgttgctgca

SEQ ID NO: 2987981 - DNA, 25 bp, Homo sapien
gtgccatgcgtaaaggtgacggtta

SEQ ID NO: 2987982 - DNA, 25 bp, Homo sapien
accactctgcgcattctgagtgcca

SEQ ID NO: 2987983 - DNA, 25 bp, Homo sapien
ggaggacctcccagatgcacagggt

SEQ ID NO: 2987984 - DNA, 25 bp, Homo sapien
gagtcaattaaaagagccacctctg

SEQ ID NO: 2987985 - DNA, 25 bp, Homo sapien
gaactcagtaaggaccctgaccagg

SEQ ID NO: 2987986 - DNA, 25 bp, Homo sapien
gctggcgcttggctgagaactcagt

SEQ ID NO: 2987987 - DNA, 25 bp, Homo sapien
tctccagtctaagagaaggagctga

SEQ ID NO: 2987988 - DNA, 25 bp, Homo sapien
ccatccgttctggaaacttggtgaa

SEQ ID NO: 2987989 - DNA, 25 bp, Homo sapien
catccgttctggaaacttggtgaag

SEQ ID NO: 2987990 - DNA, 25 bp, Homo sapien
cccatccgttctggaaacttggtga

SEQ ID NO: 2987991 - DNA, 25 bp, Homo sapien
tggaacacatcccacggtcaaggac

SEQ ID NO: 2987992 - DNA, 25 bp, Homo sapien
tccagaggttaagtgggagcaacca

SEQ ID NO: 2987993 - DNA, 25 bp, Homo sapien
aatatagcctgtgccttgaagacgc

SEQ ID NO: 2987994 - DNA, 25 bp, Homo sapien
gacagttggtctctgtaccctcagg

SEQ ID NO: 2987995 - DNA, 25 bp, Homo sapien
tgcttgaagaactcaacaaaatccc

SEQ ID NO: 2987996 - DNA, 25 bp, Homo sapien
tgtttacaatctgcctcaatcactc

SEQ ID NO: 2987997 - DNA, 25 bp, Homo sapien
cccttgaggctattaggagatgctt

SEQ ID NO: 2987998 - DNA, 25 bp, Homo sapien
acaaaatcccaatccaagtcaaact

SEQ ID NO: 2987999 - DNA, 25 bp, Homo sapien
tggaggagacgggacatctttcacc

SEQ ID NO: 2988000 - DNA, 25 bp, Homo sapien
actatgtctggctaagagattcgcc

SEQ ID NO: 2988001 - DNA, 25 bp, Homo sapien
gagattcgccttaaatgctccctgt

SEQ ID NO: 2988002 - DNA, 25 bp, Homo sapien
taggaaagccacatactcagcctgg

SEQ ID NO: 2988003 - DNA, 25 bp, Homo sapien
caagaacctgcgcatccagtgtgag

SEQ ID NO: 2988004 - DNA, 25 bp, Homo sapien
gctccaagagcgagtaccagctggt

SEQ ID NO: 2988005 - DNA, 25 bp, Homo sapien
gactgcgtgctcaagctggtgcacc

SEQ ID NO: 2988006 - DNA, 25 bp, Homo sapien
gacccagtctgggaccaagaacctg

SEQ ID NO: 2988007 - DNA, 25 bp, Homo sapien
ccctctggaatctgcccgcaggtga

SEQ ID NO: 2988008 - DNA, 25 bp, Homo sapien
ggtgactgtcgcacgtctccaacct

SEQ ID NO: 2988009 - DNA, 25 bp, Homo sapien
cctgacccgcagttgggccctcggg

SEQ ID NO: 2988010 - DNA, 25 bp, Homo sapien
gaggctgggtagctgccacgaaggg

SEQ ID NO: 2988011 - DNA, 25 bp, Homo sapien
tccactgggctctacccagaagtgt

SEQ ID NO: 2988012 - DNA, 25 bp, Homo sapien
ccagaagtgtatggtcatgcagcca

SEQ ID NO: 2988013 - DNA, 25 bp, Homo sapien
ggctctacccagaagtgtatggtca

SEQ ID NO: 2988014 - DNA, 25 bp, Homo sapien
acccagaagtgtatggtcatgcagc

SEQ ID NO: 2988015 - DNA, 25 bp, Homo sapien
agcaagcaagcctgcgactctctgg

SEQ ID NO: 2988016 - DNA, 25 bp, Homo sapien
cagctctggagcgtaccctgtaaag

SEQ ID NO: 2988017 - DNA, 25 bp, Homo sapien
gcacctttgcctggaaatgggattg

SEQ ID NO: 2988018 - DNA, 25 bp, Homo sapien
taatctccagcgagccatggatggg

SEQ ID NO: 2988019 - DNA, 25 bp, Homo sapien
tgcctcttagacatcggagccacaa

SEQ ID NO: 2988020 - DNA, 25 bp, Homo sapien
ctgctccggaaaggtcatctgggcc

SEQ ID NO: 2988021 - DNA, 25 bp, Homo sapien
atgtcaggcttgaaagaactcctcc

SEQ ID NO: 2988022 - DNA, 25 bp, Homo sapien
caacctggtctgagacctgtgaact

SEQ ID NO: 2988023 - DNA, 25 bp, Homo sapien
tcttctagcccacttctctgccttc

SEQ ID NO: 2988024 - DNA, 25 bp, Homo sapien
tctgccttcaaagttggttcaggat

SEQ ID NO: 2988025 - DNA, 25 bp, Homo sapien
caaccccacttcttctagcccactt

SEQ ID NO: 2988026 - DNA, 25 bp, Homo sapien
ctctgccttcaaagttggttcagga

SEQ ID NO: 2988027 - DNA, 25 bp, Homo sapien
tcctcctggcgaagtggggtcttct

SEQ ID NO: 2988028 - DNA, 25 bp, Homo sapien
gccacttcagcttgagctggaagca

SEQ ID NO: 2988029 - DNA, 25 bp, Homo sapien
tcttagctcagctcacagccacttc

SEQ ID NO: 2988030 - DNA, 25 bp, Homo sapien
acttcagcttgagctggaagcaggg

SEQ ID NO: 2988031 - DNA, 25 bp, Homo sapien
tgccttctcgttagtcgcactcgct

SEQ ID NO: 2988032 - DNA, 25 bp, Homo sapien
actgccttctcgttagtcgcactcg

SEQ ID NO: 2988033 - DNA, 25 bp, Homo sapien
cgacgggattgacggcagatcccat

SEQ ID NO: 2988034 - DNA, 25 bp, Homo sapien
tagaaagacagggtcgacgggattg

SEQ ID NO: 2988035 - DNA, 25 bp, Homo sapien
ccgcttccgctcccggcgggcgcga

SEQ ID NO: 2988036 - DNA, 25 bp, Homo sapien
cgcttccgctcccggcgggcgcgaa

SEQ ID NO: 2988037 - DNA, 25 bp, Homo sapien
tccgcttccgctcccggcgggcgcg

SEQ ID NO: 2988038 - DNA, 25 bp, Homo sapien
ttccgcttccgctcccggcgggcgc

SEQ ID NO: 2988039 - DNA, 25 bp, Homo sapien
ctccagaacacgggtcccgccgcag

SEQ ID NO: 2988040 - DNA, 25 bp, Homo sapien
cctgcgctggcggtcccggttcctg

SEQ ID NO: 2988041 - DNA, 25 bp, Homo sapien
cggttcctgccgaggcggtcggaca

SEQ ID NO: 2988042 - DNA, 25 bp, Homo sapien
tgccgaggcggtcggacaggcgtcc

SEQ ID NO: 2988043 - DNA, 25 bp, Homo sapien
ttaacgtgtaagtgcacggtggccg

SEQ ID NO: 2988044 - DNA, 25 bp, Homo sapien
gatataaacagcctctggagcttga

SEQ ID NO: 2988045 - DNA, 25 bp, Homo sapien
ggctcgccaacaagcacggtgtaga

SEQ ID NO: 2988046 - DNA, 25 bp, Homo sapien
acccggccgataatggagcacgagc

SEQ ID NO: 2988047 - DNA, 25 bp, Homo sapien
ggtttgatgccaggacgtagaagtc

SEQ ID NO: 2988048 - DNA, 25 bp, Homo sapien
gagatgagcaggtcttttgttaaac

SEQ ID NO: 2988049 - DNA, 25 bp, Homo sapien
gaagtcatctgacttcgtcacccag

SEQ ID NO: 2988050 - DNA, 25 bp, Homo sapien
gacttcgtcacccagagatgagcag

SEQ ID NO: 2988051 - DNA, 25 bp, Homo sapien
ttcagtgtgtgacctcaagagggac

SEQ ID NO: 2988052 - DNA, 25 bp, Homo sapien
gaatcctagtcctgcaaacagcagc

SEQ ID NO: 2988053 - DNA, 25 bp, Homo sapien
tgaatggccacaaattccaggaaga

SEQ ID NO: 2988054 - DNA, 25 bp, Homo sapien
ggatgctcaaacatcccaaggcctg

SEQ ID NO: 2988055 - DNA, 25 bp, Homo sapien
gggacagcaagggagccaataacag

SEQ ID NO: 2988056 - DNA, 25 bp, Homo sapien
ctggggacagcaagggagccaataa

SEQ ID NO: 2988057 - DNA, 25 bp, Homo sapien
tggggacagcaagggagccaataac

SEQ ID NO: 2988058 - DNA, 25 bp, Homo sapien
gacagcaagggagccaataacagcc

SEQ ID NO: 2988059 - DNA, 25 bp, Homo sapien
gacacaggcagcaaggtggggaggt

SEQ ID NO: 2988060 - DNA, 25 bp, Homo sapien
cctaacgtgagaactggagactcca

SEQ ID NO: 2988061 - DNA, 25 bp, Homo sapien
ctggaaccaggtttctgatccactg

SEQ ID NO: 2988062 - DNA, 25 bp, Homo sapien
aagcaccctaacgtgagaactggag

SEQ ID NO: 2988063 - DNA, 25 bp, Homo sapien
gatccactggaaccggtgcacgcct

SEQ ID NO: 2988064 - DNA, 25 bp, Homo sapien
ccaggtagagggatgccatcacgac

SEQ ID NO: 2988065 - DNA, 25 bp, Homo sapien
gcctcttggctactcttatctgccc

SEQ ID NO: 2988066 - DNA, 25 bp, Homo sapien
ctgttccaaaggacctgtccccagg

SEQ ID NO: 2988067 - DNA, 25 bp, Homo sapien
cacgacccgcctcttggctactctt

SEQ ID NO: 2988068 - DNA, 25 bp, Homo sapien
gccttttgtgtaaacggccagagag

SEQ ID NO: 2988069 - DNA, 25 bp, Homo sapien
caggtccgtttgtctagtacagggt

SEQ ID NO: 2988070 - DNA, 25 bp, Homo sapien
tgacaccagcccttggcagaacgag

SEQ ID NO: 2988071 - DNA, 25 bp, Homo sapien
cagcaagtccgagggaaacaaggct

SEQ ID NO: 2988072 - DNA, 25 bp, Homo sapien
agaacctgcgctggccccaacacct

SEQ ID NO: 2988073 - DNA, 25 bp, Homo sapien
tgagccccgcgtgaagtctaagaga

SEQ ID NO: 2988074 - DNA, 25 bp, Homo sapien
cccgcgtgaagtctaagagaatgga

SEQ ID NO: 2988075 - DNA, 25 bp, Homo sapien
cgtgagccccgcgtgaagtctaaga

SEQ ID NO: 2988076 - DNA, 25 bp, Homo sapien
tgaagtctaagagaatggagacctt

SEQ ID NO: 2988077 - DNA, 25 bp, Homo sapien
ctgttgtcgaagaggtacaccttaa

SEQ ID NO: 2988078 - DNA, 25 bp, Homo sapien
tacaccttaatgtgctggaggccga

SEQ ID NO: 2988079 - DNA, 25 bp, Homo sapien
tggtctcgttgaagcgctcagggat

SEQ ID NO: 2988080 - DNA, 25 bp, Homo sapien
ccgctcaagatgacgctgttgtcga

SEQ ID NO: 2988081 - DNA, 25 bp, Homo sapien
tctgtcccactaagtgacagctgcc

SEQ ID NO: 2988082 - DNA, 25 bp, Homo sapien
ctgtcccactaagtgacagctgcca

SEQ ID NO: 2988083 - DNA, 25 bp, Homo sapien
ctctgtcccactaagtgacagctgc

SEQ ID NO: 2988084 - DNA, 25 bp, Homo sapien
ggtgaagtaggagtcactcaggttt

SEQ ID NO: 2988085 - DNA, 25 bp, Homo sapien
ctggcggttggtgaagtaggagtca

SEQ ID NO: 2988086 - DNA, 25 bp, Homo sapien
cggttggtgaagtaggagtcactca

SEQ ID NO: 2988087 - DNA, 25 bp, Homo sapien
ttggtgaagtaggagtcactcaggt

SEQ ID NO: 2988088 - DNA, 25 bp, Homo sapien
aagaagtcggcaatctccgcacagt

SEQ ID NO: 2988089 - DNA, 25 bp, Homo sapien
ccgtgaagaagtcggcaatctccgc

SEQ ID NO: 2988090 - DNA, 25 bp, Homo sapien
agaagtcggcaatctccgcacagtc

SEQ ID NO: 2988091 - DNA, 25 bp, Homo sapien
gctccgtgaagaagtcggcaatctc

SEQ ID NO: 2988092 - DNA, 25 bp, Homo sapien
gagtcctcctcacctgcgtcttccc

SEQ ID NO: 2988093 - DNA, 25 bp, Homo sapien
ggacacgctgctgcatacccttgcc

SEQ ID NO: 2988094 - DNA, 25 bp, Homo sapien
agtcctcctcacctgcgtcttccct

SEQ ID NO: 2988095 - DNA, 25 bp, Homo sapien
gacacgctgctgcatacccttgcct

SEQ ID NO: 2988096 - DNA, 25 bp, Homo sapien
tattggctgccttgcagtactcggc

SEQ ID NO: 2988097 - DNA, 25 bp, Homo sapien
caacagggtctcagtgacaatctca

SEQ ID NO: 2988098 - DNA, 25 bp, Homo sapien
gcgggtcctggctgagttgatcaca

SEQ ID NO: 2988099 - DNA, 25 bp, Homo sapien
tggtgaggtagacctttgccccgcg

SEQ ID NO: 2988100 - DNA, 25 bp, Homo sapien
agtactcctgaagctggacccgctc

SEQ ID NO: 2988101 - DNA, 25 bp, Homo sapien
gaagaactgtcgctcgatgtgcaca

SEQ ID NO: 2988102 - DNA, 25 bp, Homo sapien
ctttggcgtggaacgtccagcccct

SEQ ID NO: 2988103 - DNA, 25 bp, Homo sapien
cccaggctgcacacctcactgaaga

SEQ ID NO: 2988104 - DNA, 25 bp, Homo sapien
catgtttgtggctgtcccacactgg

SEQ ID NO: 2988105 - DNA, 25 bp, Homo sapien
ccatgtttgtggctgtcccacactg

SEQ ID NO: 2988106 - DNA, 25 bp, Homo sapien
atgtttgtggctgtcccacactgga

SEQ ID NO: 2988107 - DNA, 25 bp, Homo sapien
cacactggaacgtcctccagccagc

SEQ ID NO: 2988108 - DNA, 25 bp, Homo sapien
tacagcactctaacaggtaggcgcc

SEQ ID NO: 2988109 - DNA, 25 bp, Homo sapien
ctatgatgtgcctgcaagggctgct

SEQ ID NO: 2988110 - DNA, 25 bp, Homo sapien
ggaagggagaagtacagcactctaa

SEQ ID NO: 2988111 - DNA, 25 bp, Homo sapien
actctaacaggtaggcgccagggct

SEQ ID NO: 2988112 - DNA, 25 bp, Homo sapien
cagcaagactgtgcacagagcctcc

SEQ ID NO: 2988113 - DNA, 25 bp, Homo sapien
actgtgcacagagcctccatttcct

SEQ ID NO: 2988114 - DNA, 25 bp, Homo sapien
gcaagactgtgcacagagcctccat

SEQ ID NO: 2988115 - DNA, 25 bp, Homo sapien
aagactgtgcacagagcctccattt

SEQ ID NO: 2988116 - DNA, 25 bp, Homo sapien
tcttccgaaagccactagaaccagg

SEQ ID NO: 2988117 - DNA, 25 bp, Homo sapien
gaaaggagtcatggtcccgctgcta

SEQ ID NO: 2988118 - DNA, 25 bp, Homo sapien
tgtcttagagagctgcccctgggat

SEQ ID NO: 2988119 - DNA, 25 bp, Homo sapien
tagacagactagctccaggattggg

SEQ ID NO: 2988120 - DNA, 25 bp, Homo sapien
gggagtcagctcacgtttatcaaag

SEQ ID NO: 2988121 - DNA, 25 bp, Homo sapien
gaaataacccgtggcagagtcagaa

SEQ ID NO: 2988122 - DNA, 25 bp, Homo sapien
gacagtggttcttaaggctaggcta

SEQ ID NO: 2988123 - DNA, 25 bp, Homo sapien
atcagtccgggaaaaggcaagacgc

SEQ ID NO: 2988124 - DNA, 25 bp, Homo sapien
gaatccacagagtcctggctacctg

SEQ ID NO: 2988125 - DNA, 25 bp, Homo sapien
tatcaggctgttgaacgatcggcaa

SEQ ID NO: 2988126 - DNA, 25 bp, Homo sapien
ggcacagagcctgtacccagcaagt

SEQ ID NO: 2988127 - DNA, 25 bp, Homo sapien
tagccaccggcaggaattttctggg

SEQ ID NO: 2988128 - DNA, 25 bp, Homo sapien
tcacctttgggcagaacgccaattg

SEQ ID NO: 2988129 - DNA, 25 bp, Homo sapien
acctttgggcagaacgccaattggc

SEQ ID NO: 2988130 - DNA, 25 bp, Homo sapien
cacctttgggcagaacgccaattgg

SEQ ID NO: 2988131 - DNA, 25 bp, Homo sapien
cctctgcggaccaagtgcttttggg

SEQ ID NO: 2988132 - DNA, 25 bp, Homo sapien
gaaccatcagatgagggagacgtgc

SEQ ID NO: 2988133 - DNA, 25 bp, Homo sapien
gagacgtgcagcaggaacgatagcc

SEQ ID NO: 2988134 - DNA, 25 bp, Homo sapien
gggcctgacatctttactattccag

SEQ ID NO: 2988135 - DNA, 25 bp, Homo sapien
gctctgatccagatggctcacgctg

SEQ ID NO: 2988136 - DNA, 25 bp, Homo sapien
ggccctacgcctgttcctgtaatgg

SEQ ID NO: 2988137 - DNA, 25 bp, Homo sapien
cacaactgtcatgggcgagtcaaca

SEQ ID NO: 2988138 - DNA, 25 bp, Homo sapien
gacggtttcctaatcttcactcaga

SEQ ID NO: 2988139 - DNA, 25 bp, Homo sapien
acctgccgacctgctctcatacacc

SEQ ID NO: 2988140 - DNA, 25 bp, Homo sapien
ttcccagagggaacatggtgacgcc

SEQ ID NO: 2988141 - DNA, 25 bp, Homo sapien
gccttgtgtcccaagcaggacgaga

SEQ ID NO: 2988142 - DNA, 25 bp, Homo sapien
gaagcagggacccaggatcagggcg

SEQ ID NO: 2988143 - DNA, 25 bp, Homo sapien
ttaggagagccaatcagcgtgagac

SEQ ID NO: 2988144 - DNA, 25 bp, Homo sapien
aattaggagagccaatcagcgtgag

SEQ ID NO: 2988145 - DNA, 25 bp, Homo sapien
aggagagccaatcagcgtgagacag

SEQ ID NO: 2988146 - DNA, 25 bp, Homo sapien
gagccaatcagcgtgagacagggca

SEQ ID NO: 2988147 - DNA, 25 bp, Homo sapien
tctccgtcacgatcgcaatctgggc

SEQ ID NO: 2988148 - DNA, 25 bp, Homo sapien
cctggttctccgtcacgatcgcaat

SEQ ID NO: 2988149 - DNA, 25 bp, Homo sapien
agggcctggttctccgtcacgatcg

SEQ ID NO: 2988150 - DNA, 25 bp, Homo sapien
tcacgatcgcaatctgggcctccag

SEQ ID NO: 2988151 - DNA, 25 bp, Homo sapien
agcttttctcaagatccaggatgtg

SEQ ID NO: 2988152 - DNA, 25 bp, Homo sapien
tatgtcatttgagaaagcagctgct

SEQ ID NO: 2988153 - DNA, 25 bp, Homo sapien
gagctacagtggaagtctctgcgaa

SEQ ID NO: 2988154 - DNA, 25 bp, Homo sapien
ggaaagcccgctgttgaaagctgca

SEQ ID NO: 2988155 - DNA, 25 bp, Homo sapien
tgaatacccggccaagattgcaact

SEQ ID NO: 2988156 - DNA, 25 bp, Homo sapien
tacgacgctgttcgagggagtcttt

SEQ ID NO: 2988157 - DNA, 25 bp, Homo sapien
gggctggtttgcaggagtctccaca

SEQ ID NO: 2988158 - DNA, 25 bp, Homo sapien
gaagtcagctgacgaggttacgacg

SEQ ID NO: 2988159 - DNA, 25 bp, Homo sapien
atccacaccgccgtgaggaccacag

SEQ ID NO: 2988160 - DNA, 25 bp, Homo sapien
agcagcggtggcctgtgccactcaa

SEQ ID NO: 2988161 - DNA, 25 bp, Homo sapien
aagcacagtgccaaccgcaggacag

SEQ ID NO: 2988162 - DNA, 25 bp, Homo sapien
ggtggcctgtgccactcaaagtggc

SEQ ID NO: 2988163 - DNA, 25 bp, Homo sapien
tcttgatcagtggagtcaccatctt

SEQ ID NO: 2988164 - DNA, 25 bp, Homo sapien
tcagaagaagttcttgatcagtgga

SEQ ID NO: 2988165 - DNA, 25 bp, Homo sapien
acctgacctcaggtagagctgctct

SEQ ID NO: 2988166 - DNA, 25 bp, Homo sapien
ttcacctggcgactcggctgctcga

SEQ ID NO: 2988167 - DNA, 25 bp, Homo sapien
cacaggcgccttgggacttagtgga

SEQ ID NO: 2988168 - DNA, 25 bp, Homo sapien
tgaactctcgggaaaatcgtgctga

SEQ ID NO: 2988169 - DNA, 25 bp, Homo sapien
cactggtgcctctggtgaagcggca

SEQ ID NO: 2988170 - DNA, 25 bp, Homo sapien
tgtaaccgcagcacagggatgtcag

SEQ ID NO: 2988171 - DNA, 25 bp, Homo sapien
gcccatgaggtcaagtacgcagcga

SEQ ID NO: 2988172 - DNA, 25 bp, Homo sapien
tgcacacatgagatgccggcactag

SEQ ID NO: 2988173 - DNA, 25 bp, Homo sapien
tacggacacgtgtgcacatcagaag

SEQ ID NO: 2988174 - DNA, 25 bp, Homo sapien
acaacaatcttagcgcccagtaggg

SEQ ID NO: 2988175 - DNA, 25 bp, Homo sapien
tggcgctgctcctacaggtttagct

SEQ ID NO: 2988176 - DNA, 25 bp, Homo sapien
taaccaagcacatcggaaccagagg

SEQ ID NO: 2988177 - DNA, 25 bp, Homo sapien
tgtggaccgcatggagaccaagaac

SEQ ID NO: 2988178 - DNA, 25 bp, Homo sapien
caagaacatctatgagtgtcccgtg

SEQ ID NO: 2988179 - DNA, 25 bp, Homo sapien
gagtcatcgctgaagcgcggctgaa

SEQ ID NO: 2988180 - DNA, 25 bp, Homo sapien
acccagactggagtcatcgctgaag

SEQ ID NO: 2988181 - DNA, 25 bp, Homo sapien
tccctgcaggggctcgctgggacac

SEQ ID NO: 2988182 - DNA, 25 bp, Homo sapien
gcggctgaaagagctgaccccggcc

SEQ ID NO: 2988183 - DNA, 25 bp, Homo sapien
ggtagttacaacatgcaggccatca

SEQ ID NO: 2988184 - DNA, 25 bp, Homo sapien
cagatttaaacggatggaacccgag

SEQ ID NO: 2988185 - DNA, 25 bp, Homo sapien
gaacccgagggctttagctgagctg

SEQ ID NO: 2988186 - DNA, 25 bp, Homo sapien
tacacatagggcagacattacacat

SEQ ID NO: 2988187 - DNA, 25 bp, Homo sapien
aaacagcagagcttgtgagagagca

SEQ ID NO: 2988188 - DNA, 25 bp, Homo sapien
cagggcagaagtgcgttttgtggct

SEQ ID NO: 2988189 - DNA, 25 bp, Homo sapien
gagagcagctccgacgtgatgaaaa

SEQ ID NO: 2988190 - DNA, 25 bp, Homo sapien
tgaaaagcgctgaaaagcccaggct

SEQ ID NO: 2988191 - DNA, 25 bp, Homo sapien
accgtgcctgatacgtgggtggccc

SEQ ID NO: 2988192 - DNA, 25 bp, Homo sapien
cacgaccgacgtggaagatctgtcc

SEQ ID NO: 2988193 - DNA, 25 bp, Homo sapien
gctctcttctatgacaccgtgcctg

SEQ ID NO: 2988194 - DNA, 25 bp, Homo sapien
ggtaagtgccgttttctctgagagg

SEQ ID NO: 2988195 - DNA, 25 bp, Homo sapien
tattcctattaggtccaggactttc

SEQ ID NO: 2988196 - DNA, 25 bp, Homo sapien
ggaaaggctctattacgtactagct

SEQ ID NO: 2988197 - DNA, 25 bp, Homo sapien
tactagctaagtacaggacttcccg

SEQ ID NO: 2988198 - DNA, 25 bp, Homo sapien
actgaattcttgatgtgagaccctt

SEQ ID NO: 2988199 - DNA, 25 bp, Homo sapien
gaaatgcagccaaaagagacggact

SEQ ID NO: 2988200 - DNA, 25 bp, Homo sapien
gaatacatcgatgagaacctgcccc

SEQ ID NO: 2988201 - DNA, 25 bp, Homo sapien
gaatgcttaaccaacaggacatggg

SEQ ID NO: 2988202 - DNA, 25 bp, Homo sapien
tctgtacagacagcaaggtgtgggt

SEQ ID NO: 2988203 - DNA, 25 bp, Homo sapien
tctgctaacagctgtagtggctgct

SEQ ID NO: 2988204 - DNA, 25 bp, Homo sapien
tgtactcgctgaggctctggatctg

SEQ ID NO: 2988205 - DNA, 25 bp, Homo sapien
ggcaaaacacagctagctagggagc

SEQ ID NO: 2988206 - DNA, 25 bp, Homo sapien
cctggggctcgaggaccctccttgg

SEQ ID NO: 2988207 - DNA, 25 bp, Homo sapien
gccttgtcccgctgaagaaagtcca

SEQ ID NO: 2988208 - DNA, 25 bp, Homo sapien
aatccctcgcagaaaggaaagcccg

SEQ ID NO: 2988209 - DNA, 25 bp, Homo sapien
tgaccccttgaaagacgtggaagcc

SEQ ID NO: 2988210 - DNA, 25 bp, Homo sapien
gaaagcccggtaaagactctgctct

SEQ ID NO: 2988211 - DNA, 25 bp, Homo sapien
tcagagggcagacctggtccagcct

SEQ ID NO: 2988212 - DNA, 25 bp, Homo sapien
tgttgcccacacagccatcgggcag

SEQ ID NO: 2988213 - DNA, 25 bp, Homo sapien
tcaacgaagcgagagagaactaccg

SEQ ID NO: 2988214 - DNA, 25 bp, Homo sapien
ccccaggagagggtatgagctgctc

SEQ ID NO: 2988215 - DNA, 25 bp, Homo sapien
gcttctcatacgacaggatggctca

SEQ ID NO: 2988216 - DNA, 25 bp, Homo sapien
taaagaacatgagtcacagcggtcc

SEQ ID NO: 2988217 - DNA, 25 bp, Homo sapien
tctggaacagctgaaggtaatggcc

SEQ ID NO: 2988218 - DNA, 25 bp, Homo sapien
taatggcctgaagtttggtcacacg

SEQ ID NO: 2988219 - DNA, 25 bp, Homo sapien
gaacccgcgttcacagggcatggtg

SEQ ID NO: 2988220 - DNA, 25 bp, Homo sapien
ccaatgtgacgagggaaaagcagct

SEQ ID NO: 2988221 - DNA, 25 bp, Homo sapien
tgggctgccatccaaagggtcaggc

SEQ ID NO: 2988222 - DNA, 25 bp, Homo sapien
tgctgggccaaggtgcaagtgtccc

SEQ ID NO: 2988223 - DNA, 25 bp, Homo sapien
tgtgtctccagagcaaacgtgatcc

SEQ ID NO: 2988224 - DNA, 25 bp, Homo sapien
aacgtgatccagagaagggttcagc

SEQ ID NO: 2988225 - DNA, 25 bp, Homo sapien
aaacgtgatccagagaagggttcag

SEQ ID NO: 2988226 - DNA, 25 bp, Homo sapien
gccactccgtgttcatcgtcgggaa

SEQ ID NO: 2988227 - DNA, 25 bp, Homo sapien
tgtctccccagatcatcaagcagag

SEQ ID NO: 2988228 - DNA, 25 bp, Homo sapien
cagagcatcgtggagctcaagctgc

SEQ ID NO: 2988229 - DNA, 25 bp, Homo sapien
agcggcaaatctcaggtgtgtcacc

SEQ ID NO: 2988230 - DNA, 25 bp, Homo sapien
ggcaacagagtgacactcagtctta

SEQ ID NO: 2988231 - DNA, 25 bp, Homo sapien
gggcaacagagtgacactcagtctt

SEQ ID NO: 2988232 - DNA, 25 bp, Homo sapien
aacagagtgacactcagtcttaaaa

SEQ ID NO: 2988233 - DNA, 25 bp, Homo sapien
gcaacagagtgacactcagtcttaa

SEQ ID NO: 2988234 - DNA, 25 bp, Homo sapien
tcctgcaacagcctgggtgcatctc

SEQ ID NO: 2988235 - DNA, 25 bp, Homo sapien
gcaacagcctgggtgcatctccaga

SEQ ID NO: 2988236 - DNA, 25 bp, Homo sapien
ggtgcatctccagagaattctgctg

SEQ ID NO: 2988237 - DNA, 25 bp, Homo sapien
gctgagtgataaaagtccatctggg

SEQ ID NO: 2988238 - DNA, 25 bp, Homo sapien
tggaaatatctacaagggcctggcc

SEQ ID NO: 2988239 - DNA, 25 bp, Homo sapien
tatagaagcagatcctagcaccctg

SEQ ID NO: 2988240 - DNA, 25 bp, Homo sapien
ctatgagtatctgggcaacacgccg

SEQ ID NO: 2988241 - DNA, 25 bp, Homo sapien
caacgttccaagcaccgaagggtgg

SEQ ID NO: 2988242 - DNA, 25 bp, Homo sapien
agggtcctggttggacttgtctgca

SEQ ID NO: 2988243 - DNA, 25 bp, Homo sapien
cctggttggacttgtctgcattctc

SEQ ID NO: 2988244 - DNA, 25 bp, Homo sapien
ttctcgtgagcgtcctcggtagccg

SEQ ID NO: 2988245 - DNA, 25 bp, Homo sapien
aggtactgtggttctcgtgagcgtc

SEQ ID NO: 2988246 - DNA, 25 bp, Homo sapien
tccctcctcgtgaggcccctttctc

SEQ ID NO: 2988247 - DNA, 25 bp, Homo sapien
aggcccagtggctgcctgcgttggg

SEQ ID NO: 2988248 - DNA, 25 bp, Homo sapien
cagctccaacatgggtgtgacttag

SEQ ID NO: 2988249 - DNA, 25 bp, Homo sapien
tcttgtccctcctcgtgaggcccct

SEQ ID NO: 2988250 - DNA, 25 bp, Homo sapien
gtactcacgtaaatatcaaacactg

SEQ ID NO: 2988251 - DNA, 25 bp, Homo sapien
taagtcttcatcgttcaccccagag

SEQ ID NO: 2988252 - DNA, 25 bp, Homo sapien
cagctgaattgatgatgtagagtcc

SEQ ID NO: 2988253 - DNA, 25 bp, Homo sapien
tgtagagtccgtaaatgataagagt

SEQ ID NO: 2988254 - DNA, 25 bp, Homo sapien
agcaacgatgggacgtgccgaagac

SEQ ID NO: 2988255 - DNA, 25 bp, Homo sapien
gtgccaccgcgagaagatctaccag

SEQ ID NO: 2988256 - DNA, 25 bp, Homo sapien
aacttcagcaaagcggtgggtgcca

SEQ ID NO: 2988257 - DNA, 25 bp, Homo sapien
tatgacgagatgatggagctgctga

SEQ ID NO: 2988258 - DNA, 25 bp, Homo sapien
tcaaaattgcagtcacagagcgcgg

SEQ ID NO: 2988259 - DNA, 25 bp, Homo sapien
cagagcgcggactaatgcctgaaat

SEQ ID NO: 2988260 - DNA, 25 bp, Homo sapien
agcattgacttaagggtggacacca

SEQ ID NO: 2988261 - DNA, 25 bp, Homo sapien
gaaatctcccagaccgagaatgtgg

SEQ ID NO: 2988262 - DNA, 25 bp, Homo sapien
tgcaaccgccctgatatgtgagacc

SEQ ID NO: 2988263 - DNA, 25 bp, Homo sapien
ggagggactctcagcaggtacatgc

SEQ ID NO: 2988264 - DNA, 25 bp, Homo sapien
catgcaagtctgtgtagaggctgcg

SEQ ID NO: 2988265 - DNA, 25 bp, Homo sapien
gtttccctgcagagtggcttcacat

SEQ ID NO: 2988266 - DNA, 25 bp, Homo sapien
gagtactggcagataggtttctcca

SEQ ID NO: 2988267 - DNA, 25 bp, Homo sapien
tctctggacagcattgagactgcca

SEQ ID NO: 2988268 - DNA, 25 bp, Homo sapien
gctgtctaacaagacctccaggtgg

SEQ ID NO: 2988269 - DNA, 25 bp, Homo sapien
ctgccatgctgtgccgggtacggtt

SEQ ID NO: 2988270 - DNA, 25 bp, Homo sapien
tctgctcgccaccgggagctgttca

SEQ ID NO: 2988271 - DNA, 25 bp, Homo sapien
ggctctgctcgccaccgggagctgt

SEQ ID NO: 2988272 - DNA, 25 bp, Homo sapien
ctgctcgccaccgggagctgttcat

SEQ ID NO: 2988273 - DNA, 25 bp, Homo sapien
gctctgctcgccaccgggagctgtt

SEQ ID NO: 2988274 - DNA, 25 bp, Homo sapien
cagctggtgagcggccttcaaccat

SEQ ID NO: 2988275 - DNA, 25 bp, Homo sapien
gagttgctcatcagtttgcgggaga

SEQ ID NO: 2988276 - DNA, 25 bp, Homo sapien
gtttgggaaagagttgctcatcagt

SEQ ID NO: 2988277 - DNA, 25 bp, Homo sapien
gctcatcagtttgcgggagaagctg

SEQ ID NO: 2988278 - DNA, 25 bp, Homo sapien
tggaggacagtatccctcgagcacc

SEQ ID NO: 2988279 - DNA, 25 bp, Homo sapien
tctcaaatctcacttggcgaagtcg

SEQ ID NO: 2988280 - DNA, 25 bp, Homo sapien
caatggtcagggctgcgttctcaaa

SEQ ID NO: 2988281 - DNA, 25 bp, Homo sapien
tctggaccttcttagggacaatggt

SEQ ID NO: 2988282 - DNA, 25 bp, Homo sapien
gacccgatgatgatgttttcctcca

SEQ ID NO: 2988283 - DNA, 25 bp, Homo sapien
ctgcctctgtttgcagacccgatga

SEQ ID NO: 2988284 - DNA, 25 bp, Homo sapien
gcagacccgatgatgatgttttcct

SEQ ID NO: 2988285 - DNA, 25 bp, Homo sapien
tctgtttgcagacccgatgatgatg

SEQ ID NO: 2988286 - DNA, 25 bp, Homo sapien
gattctctcgcgtcctggaggtcag

SEQ ID NO: 2988287 - DNA, 25 bp, Homo sapien
tggcttgatacagggcagcgtcttc

SEQ ID NO: 2988288 - DNA, 25 bp, Homo sapien
aacaaatgttcatgcattgggcagc

SEQ ID NO: 2988289 - DNA, 25 bp, Homo sapien
ctctgctcagacacggtgggactct

SEQ ID NO: 2988290 - DNA, 25 bp, Homo sapien
accacacccagatagttttgcattt

SEQ ID NO: 2988291 - DNA, 25 bp, Homo sapien
tctttagcacagatggaaccatgaa

SEQ ID NO: 2988292 - DNA, 25 bp, Homo sapien
aatacctcaggtaatgccgctgcct

SEQ ID NO: 2988293 - DNA, 25 bp, Homo sapien
cacggtcacatctgcctgacgatta

SEQ ID NO: 2988294 - DNA, 25 bp, Homo sapien
gaacttctatgatcaactgccagga

SEQ ID NO: 2988295 - DNA, 25 bp, Homo sapien
tatggcctcagcttaatgaaagaca

SEQ ID NO: 2988296 - DNA, 25 bp, Homo sapien
ttctggaggccaaactgcaacatca

SEQ ID NO: 2988297 - DNA, 25 bp, Homo sapien
gaggagaattcgacgctctgtcccc

SEQ ID NO: 2988298 - DNA, 25 bp, Homo sapien
catcctgggcgtcctttggcttgtg

SEQ ID NO: 2988299 - DNA, 25 bp, Homo sapien
tgctcagacattcctatgacagggc

SEQ ID NO: 2988300 - DNA, 25 bp, Homo sapien
tgcaagggtttctcggagcccaggt

SEQ ID NO: 2988301 - DNA, 25 bp, Homo sapien
gcattagtgtcatggcctctggccg

SEQ ID NO: 2988302 - DNA, 25 bp, Homo sapien
tgaaagcttcatcgctcacagagaa

SEQ ID NO: 2988303 - DNA, 25 bp, Homo sapien
gttaatggtgttttcactaaatgca

SEQ ID NO: 2988304 - DNA, 25 bp, Homo sapien
tgcatcagagatacgagtattaccc

SEQ ID NO: 2988305 - DNA, 25 bp, Homo sapien
tctgtggcgaggcaacgataacgtc

SEQ ID NO: 2988306 - DNA, 25 bp, Homo sapien
cgataacgtcgttgaatggcttgtt

SEQ ID NO: 2988307 - DNA, 25 bp, Homo sapien
cttaggaagttttcccgacattgat

SEQ ID NO: 2988308 - DNA, 25 bp, Homo sapien
agctgttcttctgggggtgaacttc

SEQ ID NO: 2988309 - DNA, 25 bp, Homo sapien
gacattgatacactccctgataaac

SEQ ID NO: 2988310 - DNA, 25 bp, Homo sapien
tttcccgacattgatacactccctg

SEQ ID NO: 2988311 - DNA, 25 bp, Homo sapien
acatgtagtaaaatatagggaaact

SEQ ID NO: 2988312 - DNA, 25 bp, Homo sapien
gattgaagaactagtgcattttaac

SEQ ID NO: 2988313 - DNA, 25 bp, Homo sapien
aaatatagggaaacttgattgaaga

SEQ ID NO: 2988314 - DNA, 25 bp, Homo sapien
ttgattgaagaactagtgcatttta

SEQ ID NO: 2988315 - DNA, 25 bp, Homo sapien
tggctgcaatgcattgaggaggacc

SEQ ID NO: 2988316 - DNA, 25 bp, Homo sapien
ccaaggcagggcctgcgcatctgaa

SEQ ID NO: 2988317 - DNA, 25 bp, Homo sapien
agggcctgcgcatctgaactgcctt

SEQ ID NO: 2988318 - DNA, 25 bp, Homo sapien
gcagagtcctttttcccgtcattgg

SEQ ID NO: 2988319 - DNA, 25 bp, Homo sapien
ggcgaatggccatgtggccaccact

SEQ ID NO: 2988320 - DNA, 25 bp, Homo sapien
gatccttaagtatccatcgggcgaa

SEQ ID NO: 2988321 - DNA, 25 bp, Homo sapien
accactgtgatccttaagtatccat

SEQ ID NO: 2988322 - DNA, 25 bp, Homo sapien
tatccatcgggcgaatggccatgtg

SEQ ID NO: 2988323 - DNA, 25 bp, Homo sapien
ggctggtccgcgttcttccacacag

SEQ ID NO: 2988324 - DNA, 25 bp, Homo sapien
tgtgggtccatctccacgggctggt

SEQ ID NO: 2988325 - DNA, 25 bp, Homo sapien
ttctgtgggtccatctccacgggct

SEQ ID NO: 2988326 - DNA, 25 bp, Homo sapien
gggctggtccgcgttcttccacaca

SEQ ID NO: 2988327 - DNA, 25 bp, Homo sapien
ctagcgccaaggaactgcagcaaat

SEQ ID NO: 2988328 - DNA, 25 bp, Homo sapien
tgctgaccggacacttgtgcaggag

SEQ ID NO: 2988329 - DNA, 25 bp, Homo sapien
aactctgcccaagccatctttgttg

SEQ ID NO: 2988330 - DNA, 25 bp, Homo sapien
tccagctgcaccttgagttcagttg

SEQ ID NO: 2988331 - DNA, 25 bp, Homo sapien
ggaatggctttaggcacttttgtgc

SEQ ID NO: 2988332 - DNA, 25 bp, Homo sapien
ggctttaggcacttttgtgccagag

SEQ ID NO: 2988333 - DNA, 25 bp, Homo sapien
gagggaatggctttaggcacttttg

SEQ ID NO: 2988334 - DNA, 25 bp, Homo sapien
gcacttttgtgccagagcttgtgag

SEQ ID NO: 2988335 - DNA, 25 bp, Homo sapien
tatcgggacagaggttccggataac

SEQ ID NO: 2988336 - DNA, 25 bp, Homo sapien
tgagctaaatacctaataaccaaaa

SEQ ID NO: 2988337 - DNA, 25 bp, Homo sapien
gagagctgactggacgcttacgtta

SEQ ID NO: 2988338 - DNA, 25 bp, Homo sapien
tctagaggaaggagtaggacttccc

SEQ ID NO: 2988339 - DNA, 25 bp, Homo sapien
gtgcagtccggcatctcccgcggat

SEQ ID NO: 2988340 - DNA, 25 bp, Homo sapien
cagtcggcagcagcgtgcagtccgg

SEQ ID NO: 2988341 - DNA, 25 bp, Homo sapien
gcatctcccgcggatgcttttccat

SEQ ID NO: 2988342 - DNA, 25 bp, Homo sapien
ggcagcagcgtgcagtccggcatct

SEQ ID NO: 2988343 - DNA, 25 bp, Homo sapien
ctggtgcttgtctgggcgagatgga

SEQ ID NO: 2988344 - DNA, 25 bp, Homo sapien
tgaggtcgaggacgcagagggcaga

SEQ ID NO: 2988345 - DNA, 25 bp, Homo sapien
tgcattctgccctggctgcgctggg

SEQ ID NO: 2988346 - DNA, 25 bp, Homo sapien
aacgtagggctgttcaggtgcattc

SEQ ID NO: 2988347 - DNA, 25 bp, Homo sapien
ccatcgagtgtgtcggctaggcgct

SEQ ID NO: 2988348 - DNA, 25 bp, Homo sapien
tcagcggtaacagcggctgccatcg

SEQ ID NO: 2988349 - DNA, 25 bp, Homo sapien
gaatatgggatctctttttgactct

SEQ ID NO: 2988350 - DNA, 25 bp, Homo sapien
ccagcttgcatgtgaggaagcggga

SEQ ID NO: 2988351 - DNA, 25 bp, Homo sapien
cacctttcttggtcattgtaagggc

SEQ ID NO: 2988352 - DNA, 25 bp, Homo sapien
cttggtcattgtaagggcaaagcgg

SEQ ID NO: 2988353 - DNA, 25 bp, Homo sapien
caaagcgggcatactcccatggcat

SEQ ID NO: 2988354 - DNA, 25 bp, Homo sapien
gggcaaagcgggcatactcccatgg

SEQ ID NO: 2988355 - DNA, 25 bp, Homo sapien
ctaggcgcacattgatctgtctgct

SEQ ID NO: 2988356 - DNA, 25 bp, Homo sapien
cagtgatgctttatggtagaggtct

SEQ ID NO: 2988357 - DNA, 25 bp, Homo sapien
tgtccaggcataataaccaagcttt

SEQ ID NO: 2988358 - DNA, 25 bp, Homo sapien
tccatgatctcctatgtccgaaggg

SEQ ID NO: 2988359 - DNA, 25 bp, Homo sapien
taaaattactaaccccataggcagc

SEQ ID NO: 2988360 - DNA, 25 bp, Homo sapien
cattcctattgccaagtggatggag

SEQ ID NO: 2988361 - DNA, 25 bp, Homo sapien
gaagtcagtactctcttggtcatta

SEQ ID NO: 2988362 - DNA, 25 bp, Homo sapien
gcctttgatgagttgggttctcaca

SEQ ID NO: 2988363 - DNA, 25 bp, Homo sapien
tccgatggcctgaagtactaaaatg

SEQ ID NO: 2988364 - DNA, 25 bp, Homo sapien
ccaggttcaggcttcaggtttcagt

SEQ ID NO: 2988365 - DNA, 25 bp, Homo sapien
catgcagaggaacaaacaggtagcc

SEQ ID NO: 2988366 - DNA, 25 bp, Homo sapien
tctgttccagggtagaaggagcaaa

SEQ ID NO: 2988367 - DNA, 25 bp, Homo sapien
tgttcctggcgtccctgatggccca

SEQ ID NO: 2988368 - DNA, 25 bp, Homo sapien
cgtagagccaggtgcccactcaaag

SEQ ID NO: 2988369 - DNA, 25 bp, Homo sapien
gacaccactcggggggcatgtttca

SEQ ID NO: 2988370 - DNA, 25 bp, Homo sapien
gccaggtgcccactcaaagggagct

SEQ ID NO: 2988371 - DNA, 25 bp, Homo sapien
cgtgggtttcttgttcatgatcctt

SEQ ID NO: 2988372 - DNA, 25 bp, Homo sapien
tatttacagcgtgggtttcttgttc

SEQ ID NO: 2988373 - DNA, 25 bp, Homo sapien
ggcatatttacagcgtgggtttctt

SEQ ID NO: 2988374 - DNA, 25 bp, Homo sapien
tacagcgtgggtttcttgttcatga

SEQ ID NO: 2988375 - DNA, 25 bp, Homo sapien
gagacatcctggtcctaaagcatgc

SEQ ID NO: 2988376 - DNA, 25 bp, Homo sapien
cacgttcatttgacggtacccacgg

SEQ ID NO: 2988377 - DNA, 25 bp, Homo sapien
cagagagctgcgttttccgtggaac

SEQ ID NO: 2988378 - DNA, 25 bp, Homo sapien
gaactttatggcatatccccgggca

SEQ ID NO: 2988379 - DNA, 25 bp, Homo sapien
cagtaggagctgatgtgtgcgtggc

SEQ ID NO: 2988380 - DNA, 25 bp, Homo sapien
agtaggagctgatgtgtgcgtggct

SEQ ID NO: 2988381 - DNA, 25 bp, Homo sapien
ctggtggatggcgtgtggagccctg

SEQ ID NO: 2988382 - DNA, 25 bp, Homo sapien
gctggtggatggcgtgtggagccct

SEQ ID NO: 2988383 - DNA, 25 bp, Homo sapien
tggtggatggcgtgtggagccctgt

SEQ ID NO: 2988384 - DNA, 25 bp, Homo sapien
aggctggtggatggcgtgtggagcc

SEQ ID NO: 2988385 - DNA, 25 bp, Homo sapien
ggtgtcctcaaaggcgatgccacag

SEQ ID NO: 2988386 - DNA, 25 bp, Homo sapien
gaggcgagtccttcttggtgaaaag

SEQ ID NO: 2988387 - DNA, 25 bp, Homo sapien
ccattggtggctgcgagtgtactga

SEQ ID NO: 2988388 - DNA, 25 bp, Homo sapien
tgccacagcctctggtgaagaaata

SEQ ID NO: 2988389 - DNA, 25 bp, Homo sapien
catggctggaggaatctgagttctc

SEQ ID NO: 2988390 - DNA, 25 bp, Homo sapien
taatatgggtaaactgagcagggag

SEQ ID NO: 2988391 - DNA, 25 bp, Homo sapien
ctgagttctccctgtaggaggtaag

SEQ ID NO: 2988392 - DNA, 25 bp, Homo sapien
taagactcgacggatggcggatggt

SEQ ID NO: 2988393 - DNA, 25 bp, Homo sapien
tggaagctggccatgttaaagagag

SEQ ID NO: 2988394 - DNA, 25 bp, Homo sapien
ggtaaaccccggctgtgatccactc

SEQ ID NO: 2988395 - DNA, 25 bp, Homo sapien
ctgtcggcgtagtggaagctggcca

SEQ ID NO: 2988396 - DNA, 25 bp, Homo sapien
agagagtcatagtgagccttgcaca

SEQ ID NO: 2988397 - DNA, 25 bp, Homo sapien
ctctaagtgcaaatgatcctggaca

SEQ ID NO: 2988398 - DNA, 25 bp, Homo sapien
atgcacaggtgtccataacgatact

SEQ ID NO: 2988399 - DNA, 25 bp, Homo sapien
ggtgtccataacgatacttctgtat

SEQ ID NO: 2988400 - DNA, 25 bp, Homo sapien
tggacagtgtccacgggcgacactg

SEQ ID NO: 2988401 - DNA, 25 bp, Homo sapien
gggcctcccggtgatcctgctcctg

SEQ ID NO: 2988402 - DNA, 25 bp, Homo sapien
tctgggtgtgttccatggtccactg

SEQ ID NO: 2988403 - DNA, 25 bp, Homo sapien
gtgtgttccatggtccactgaggaa

SEQ ID NO: 2988404 - DNA, 25 bp, Homo sapien
ctcccggtgatcctgctcctgttcc

SEQ ID NO: 2988405 - DNA, 25 bp, Homo sapien
gacaaagacttctgcgatttctctg

SEQ ID NO: 2988406 - DNA, 25 bp, Homo sapien
tattgaagacggagacttcttcaac

SEQ ID NO: 2988407 - DNA, 25 bp, Homo sapien
cttcaacttgttctctaactttgac

SEQ ID NO: 2988408 - DNA, 25 bp, Homo sapien
atttattgaagacggagacttcttc

SEQ ID NO: 2988409 - DNA, 25 bp, Homo sapien
caatgattccgagccagtcttgaat

SEQ ID NO: 2988410 - DNA, 25 bp, Homo sapien
attcatatgtgatgtgttgtaaacc

SEQ ID NO: 2988411 - DNA, 25 bp, Homo sapien
tttggacaatgattccgagccagtc

SEQ ID NO: 2988412 - DNA, 25 bp, Homo sapien
caggacgatcggtctcacatttcat

SEQ ID NO: 2988413 - DNA, 25 bp, Homo sapien
agtttccggccgctctcggcgtcag

SEQ ID NO: 2988414 - DNA, 25 bp, Homo sapien
cggtagccgccggtccggtgcgtcg

SEQ ID NO: 2988415 - DNA, 25 bp, Homo sapien
gggtcgccgcgagctctgaggaatg

SEQ ID NO: 2988416 - DNA, 25 bp, Homo sapien
gcgtcagcgagttgtgcccggtcca

SEQ ID NO: 2988417 - DNA, 25 bp, Homo sapien
cttccttccatagggcacagggcag

SEQ ID NO: 2988418 - DNA, 25 bp, Homo sapien
agcttccttccatagggcacagggc

SEQ ID NO: 2988419 - DNA, 25 bp, Homo sapien
ctgtaacaagagctaagggaggtat

SEQ ID NO: 2988420 - DNA, 25 bp, Homo sapien
caagagctaagggaggtatgtgcca

SEQ ID NO: 2988421 - DNA, 25 bp, Homo sapien
ccactgcgcctggctgatctccatc

SEQ ID NO: 2988422 - DNA, 25 bp, Homo sapien
actgcgcctggctgatctccatctc

SEQ ID NO: 2988423 - DNA, 25 bp, Homo sapien
tgcagtggcacgattctccgctcac

SEQ ID NO: 2988424 - DNA, 25 bp, Homo sapien
tgcgcctggctgatctccatctctt

SEQ ID NO: 2988425 - DNA, 25 bp, Homo sapien
tttggctggacaccccaaaatgagg

SEQ ID NO: 2988426 - DNA, 25 bp, Homo sapien
ggtgatctgacaccaacgctgggtg

SEQ ID NO: 2988427 - DNA, 25 bp, Homo sapien
caagtaagaacaagcgaggtgaggc

SEQ ID NO: 2988428 - DNA, 25 bp, Homo sapien
catttgcgttgtagcctgggcagcg

SEQ ID NO: 2988429 - DNA, 25 bp, Homo sapien
tctggctttgtaacttatctggaag

SEQ ID NO: 2988430 - DNA, 25 bp, Homo sapien
gaaagcacatgccttcacgggcagg

SEQ ID NO: 2988431 - DNA, 25 bp, Homo sapien
gacttgcattcctgtgtgaactgtt

SEQ ID NO: 2988432 - DNA, 25 bp, Homo sapien
gagagaatcaagctcctgtggccac

SEQ ID NO: 2988433 - DNA, 25 bp, Homo sapien
tgtgcaccccttccttgtgagtagc

SEQ ID NO: 2988434 - DNA, 25 bp, Homo sapien
tgcaccccttccttgtgagtagctc

SEQ ID NO: 2988435 - DNA, 25 bp, Homo sapien
ttccttgtgagtagctctcaactgt

SEQ ID NO: 2988436 - DNA, 25 bp, Homo sapien
tgagtagctctcaactgtcctggag

SEQ ID NO: 2988437 - DNA, 25 bp, Homo sapien
tctcccggtgcatagctggtggctc

SEQ ID NO: 2988438 - DNA, 25 bp, Homo sapien
gaggtggccgcacacctgctggaca

SEQ ID NO: 2988439 - DNA, 25 bp, Homo sapien
catagacagtggtctgtgctggcag

SEQ ID NO: 2988440 - DNA, 25 bp, Homo sapien
gggctgacgccaccgttgtgtccga

SEQ ID NO: 2988441 - DNA, 25 bp, Homo sapien
tttctctctgtcaggactaccgtgg

SEQ ID NO: 2988442 - DNA, 25 bp, Homo sapien
taggttggactcatacccgagggtg

SEQ ID NO: 2988443 - DNA, 25 bp, Homo sapien
tctagatcggaacctctttggtgac

SEQ ID NO: 2988444 - DNA, 25 bp, Homo sapien
tgtcacggtaggagctctcccggta

SEQ ID NO: 2988445 - DNA, 25 bp, Homo sapien
ggaacttctggtctgtgactcaccc

SEQ ID NO: 2988446 - DNA, 25 bp, Homo sapien
agaggagaaacttcaacgccttcca

SEQ ID NO: 2988447 - DNA, 25 bp, Homo sapien
tccagaaacttcagactcgacggaa

SEQ ID NO: 2988448 - DNA, 25 bp, Homo sapien
atcgccgctgactgtgcccctgtgg

SEQ ID NO: 2988449 - DNA, 25 bp, Homo sapien
tgtcggcggtcagtcaggatgctat

SEQ ID NO: 2988450 - DNA, 25 bp, Homo sapien
gacactcttgaagtgaagccacagg

SEQ ID NO: 2988451 - DNA, 25 bp, Homo sapien
gatgactgggacgaagagtttgacc

SEQ ID NO: 2988452 - DNA, 25 bp, Homo sapien
gaagagtgggtctccagagagctca

SEQ ID NO: 2988453 - DNA, 25 bp, Homo sapien
catctgataaagcttacgggagaaa

SEQ ID NO: 2988454 - DNA, 25 bp, Homo sapien
cctgtgtcttggaatggagagcggg

SEQ ID NO: 2988455 - DNA, 25 bp, Homo sapien
agagcgggagtctgatgtggtccag

SEQ ID NO: 2988456 - DNA, 25 bp, Homo sapien
aggaactgctcaaatactcatctga

SEQ ID NO: 2988457 - DNA, 25 bp, Homo sapien
agctgcgcaccatccgcgaatggct

SEQ ID NO: 2988458 - DNA, 25 bp, Homo sapien
ccatccgcgaatggctggtgtcctg

SEQ ID NO: 2988459 - DNA, 25 bp, Homo sapien
cgcaccatccgcgaatggctggtgt

SEQ ID NO: 2988460 - DNA, 25 bp, Homo sapien
gctgcgcaccatccgcgaatggctg

SEQ ID NO: 2988461 - DNA, 25 bp, Homo sapien
tgcctgggaccagcaactcgaatag

SEQ ID NO: 2988462 - DNA, 25 bp, Homo sapien
tgttgtcctctctacctcacctaag

SEQ ID NO: 2988463 - DNA, 25 bp, Homo sapien
agccactgccaacgggcatgggctg

SEQ ID NO: 2988464 - DNA, 25 bp, Homo sapien
acgacgagagcgctggcctcgacag

SEQ ID NO: 2988465 - DNA, 25 bp, Homo sapien
tccgtttctgcagatagaactctta

SEQ ID NO: 2988466 - DNA, 25 bp, Homo sapien
tctagctttgcttacgttgacttcc

SEQ ID NO: 2988467 - DNA, 25 bp, Homo sapien
tctccctgtgtttgcgcatcttcta

SEQ ID NO: 2988468 - DNA, 25 bp, Homo sapien
gtccttgtaaagctgtaggcactaa

SEQ ID NO: 2988469 - DNA, 25 bp, Homo sapien
tttacgtaacgctcgccacggagcc

SEQ ID NO: 2988470 - DNA, 25 bp, Homo sapien
ctggagtggcggccgccaaacccag

SEQ ID NO: 2988471 - DNA, 25 bp, Homo sapien
gccgccaaacccagacacacgagag

SEQ ID NO: 2988472 - DNA, 25 bp, Homo sapien
cgtttacgtaacgctcgccacggag

SEQ ID NO: 2988473 - DNA, 25 bp, Homo sapien
gcctttaagcgtcgcggtgacacgt

SEQ ID NO: 2988474 - DNA, 25 bp, Homo sapien
tccagagcccgggtattcccgagga

SEQ ID NO: 2988475 - DNA, 25 bp, Homo sapien
ccagggctgcgtaggcttgtggcgc

SEQ ID NO: 2988476 - DNA, 25 bp, Homo sapien
cgaacgctgggtgcggcgcctttaa

SEQ ID NO: 2988477 - DNA, 25 bp, Homo sapien
tgtagaaagggtggcatcctgccca

SEQ ID NO: 2988478 - DNA, 25 bp, Homo sapien
aatccgcagactagaagaccagggt

SEQ ID NO: 2988479 - DNA, 25 bp, Homo sapien
tcataagaatggtgccaagcagcca

SEQ ID NO: 2988480 - DNA, 25 bp, Homo sapien
gaggtgacccttgagcttgagagca

SEQ ID NO: 2988481 - DNA, 25 bp, Homo sapien
tgcttcatctatagttgggacctct

SEQ ID NO: 2988482 - DNA, 25 bp, Homo sapien
cctgcgtgcttcatctatagttggg

SEQ ID NO: 2988483 - DNA, 25 bp, Homo sapien
ttgcctgtggggcacctggtccacc

SEQ ID NO: 2988484 - DNA, 25 bp, Homo sapien
tatagttgggacctcttgcctgtgg

SEQ ID NO: 2988485 - DNA, 25 bp, Homo sapien
cagtcttgttcaaattcagctgctc

SEQ ID NO: 2988486 - DNA, 25 bp, Homo sapien
gaggaggttctaagagttgtccagc

SEQ ID NO: 2988487 - DNA, 25 bp, Homo sapien
gctctgattcagcaagcagcaatag

SEQ ID NO: 2988488 - DNA, 25 bp, Homo sapien
tgctgtctacgtctcctaaaaagga

SEQ ID NO: 2988489 - DNA, 25 bp, Homo sapien
gaaacatcttgggtggaaaatccat

SEQ ID NO: 2988490 - DNA, 25 bp, Homo sapien
gttatccaggagaacgggactctcg

SEQ ID NO: 2988491 - DNA, 25 bp, Homo sapien
aatctgaaacatcttgggtggaaaa

SEQ ID NO: 2988492 - DNA, 25 bp, Homo sapien
caggagaacgggactctcgttgaaa

SEQ ID NO: 2988493 - DNA, 25 bp, Homo sapien
tgagcaatcgctcggtccgtggaca

SEQ ID NO: 2988494 - DNA, 25 bp, Homo sapien
gaaagttgacaagcagactgcgcat

SEQ ID NO: 2988495 - DNA, 25 bp, Homo sapien
tgaagtctgagaccttccggtgctg

SEQ ID NO: 2988496 - DNA, 25 bp, Homo sapien
tttgacccagagtggaacgcgtggc

SEQ ID NO: 2988497 - DNA, 25 bp, Homo sapien
gcatgtgacgccagctaagcatagt

SEQ ID NO: 2988498 - DNA, 25 bp, Homo sapien
gactgacagccatcgttctgcacgg

SEQ ID NO: 2988499 - DNA, 25 bp, Homo sapien
tttatccgggcttgtgtgcagggcc

SEQ ID NO: 2988500 - DNA, 25 bp, Homo sapien
tagtaagaagtccagcctaggaagg

SEQ ID NO: 2988501 - DNA, 25 bp, Homo sapien
tgcccattctagacacctcgtacag

SEQ ID NO: 2988502 - DNA, 25 bp, Homo sapien
tttatgagacggaggcaacaaagcc

SEQ ID NO: 2988503 - DNA, 25 bp, Homo sapien
tagagtcatacctccttccatagct

SEQ ID NO: 2988504 - DNA, 25 bp, Homo sapien
cacctttctacttcgtctccatgaa

SEQ ID NO: 2988505 - DNA, 25 bp, Homo sapien
gacgggatttctctgtgttggccag

SEQ ID NO: 2988506 - DNA, 25 bp, Homo sapien
gcaatggcgtggtctcaactcacca

SEQ ID NO: 2988507 - DNA, 25 bp, Homo sapien
actcaccacaacctctgcctcccgg

SEQ ID NO: 2988508 - DNA, 25 bp, Homo sapien
gtgagccaccgcacctgggcggcat

SEQ ID NO: 2988509 - DNA, 25 bp, Homo sapien
ttcaaggttcgttcacgttacagca

SEQ ID NO: 2988510 - DNA, 25 bp, Homo sapien
acgttacagcatacatcagaatttc

SEQ ID NO: 2988511 - DNA, 25 bp, Homo sapien
ggcctcacatgggtggaaccctgca

SEQ ID NO: 2988512 - DNA, 25 bp, Homo sapien
ctcacatgggtggaaccctgcagtg

SEQ ID NO: 2988513 - DNA, 25 bp, Homo sapien
gactgtcgaagtctgaccgtagccc

SEQ ID NO: 2988514 - DNA, 25 bp, Homo sapien
acgcaggacccacgtgttgatggca

SEQ ID NO: 2988515 - DNA, 25 bp, Homo sapien
ggttgtacattccagtagccggcat

SEQ ID NO: 2988516 - DNA, 25 bp, Homo sapien
tagccggcatctggcggtgaattca

SEQ ID NO: 2988517 - DNA, 25 bp, Homo sapien
gcctgtcagtgtagcatcacctctg

SEQ ID NO: 2988518 - DNA, 25 bp, Homo sapien
tttttgcacacggagacctggagcg

SEQ ID NO: 2988519 - DNA, 25 bp, Homo sapien
acctggagcgtagccgcctgtcagt

SEQ ID NO: 2988520 - DNA, 25 bp, Homo sapien
cccagctattttttgcacacggaga

SEQ ID NO: 2988521 - DNA, 25 bp, Homo sapien
tccggaggccagattggtgtccact

SEQ ID NO: 2988522 - DNA, 25 bp, Homo sapien
caagctgtaggccagaggttgcctg

SEQ ID NO: 2988523 - DNA, 25 bp, Homo sapien
tctggtggccaagcacattcctggg

SEQ ID NO: 2988524 - DNA, 25 bp, Homo sapien
cctgactttggtgagaatcgctggg

SEQ ID NO: 2988525 - DNA, 25 bp, Homo sapien
cagcgtgaggcagacgagagaggcg

SEQ ID NO: 2988526 - DNA, 25 bp, Homo sapien
gatctggtatcctgcagccggggtg

SEQ ID NO: 2988527 - DNA, 25 bp, Homo sapien
aggcagacgagagaggcggaggtct

SEQ ID NO: 2988528 - DNA, 25 bp, Homo sapien
ggcagcgtgaggcagacgagagagg

SEQ ID NO: 2988529 - DNA, 25 bp, Homo sapien
ctgtgcatgttgacaaatcaagtac

SEQ ID NO: 2988530 - DNA, 25 bp, Homo sapien
gatgatcgacgtgatgaactcagag

SEQ ID NO: 2988531 - DNA, 25 bp, Homo sapien
ccttctgtgcatgttgacaaatcaa

SEQ ID NO: 2988532 - DNA, 25 bp, Homo sapien
aactcagaggcaccaaccgtggtgt

SEQ ID NO: 2988533 - DNA, 25 bp, Homo sapien
ctgggcaccacagcgttgccgcttg

SEQ ID NO: 2988534 - DNA, 25 bp, Homo sapien
tcctgggcaccacagcgttgccgct

SEQ ID NO: 2988535 - DNA, 25 bp, Homo sapien
cgtcctgggcaccacagcgttgccg

SEQ ID NO: 2988536 - DNA, 25 bp, Homo sapien
gcgctgtgcctgccggcgtcctggg

SEQ ID NO: 2988537 - DNA, 25 bp, Homo sapien
gaagccagactctgttctcggcgct

SEQ ID NO: 2988538 - DNA, 25 bp, Homo sapien
ggcacttcgtagctgttgaccatca

SEQ ID NO: 2988539 - DNA, 25 bp, Homo sapien
gcaccacgtgggtgtctctgccgag

SEQ ID NO: 2988540 - DNA, 25 bp, Homo sapien
ggttcctcgtgcgtggaatccagca

SEQ ID NO: 2988541 - DNA, 25 bp, Homo sapien
aggtcttgaacagttctggacaggt

SEQ ID NO: 2988542 - DNA, 25 bp, Homo sapien
cacctctccctcgttcagatttgct

SEQ ID NO: 2988543 - DNA, 25 bp, Homo sapien
tgaacagttctggacaggtttattc

SEQ ID NO: 2988544 - DNA, 25 bp, Homo sapien
tcagcccgtgcatctcctttaggtc

SEQ ID NO: 2988545 - DNA, 25 bp, Homo sapien
caggtggttgacgggattctttctt

SEQ ID NO: 2988546 - DNA, 25 bp, Homo sapien
ttagaagcgtgaacagatgctgtcc

SEQ ID NO: 2988547 - DNA, 25 bp, Homo sapien
cagtttaacgatggctttctggagc

SEQ ID NO: 2988548 - DNA, 25 bp, Homo sapien
ggctttctggagctgtttagaagcg

SEQ ID NO: 2988549 - DNA, 25 bp, Homo sapien
tgaggcactagaatccctgaacccg

SEQ ID NO: 2988550 - DNA, 25 bp, Homo sapien
gctgaggcactagaatccctgaacc

SEQ ID NO: 2988551 - DNA, 25 bp, Homo sapien
aagctgaggcactagaatccctgaa

SEQ ID NO: 2988552 - DNA, 25 bp, Homo sapien
gaaagctgaggcactagaatccctg

SEQ ID NO: 2988553 - DNA, 25 bp, Homo sapien
atcaagggctgcgaagatggactcc

SEQ ID NO: 2988554 - DNA, 25 bp, Homo sapien
tggatgtcccagctcttgcagaggg

SEQ ID NO: 2988555 - DNA, 25 bp, Homo sapien
cacctggcgaggagggatcttctta

SEQ ID NO: 2988556 - DNA, 25 bp, Homo sapien
caaatttgtggaggatgctggaagc

SEQ ID NO: 2988557 - DNA, 25 bp, Homo sapien
aataggctccatccagctgcgtaag

SEQ ID NO: 2988558 - DNA, 25 bp, Homo sapien
gccttaggccagtagtgaatcccat

SEQ ID NO: 2988559 - DNA, 25 bp, Homo sapien
tggacattctgcaagggccatcgaa

SEQ ID NO: 2988560 - DNA, 25 bp, Homo sapien
tttagaatgggcgtcaaggccacgc

SEQ ID NO: 2988561 - DNA, 25 bp, Homo sapien
gccagatgccctctaacctggtcag

SEQ ID NO: 2988562 - DNA, 25 bp, Homo sapien
tcaggcgggtagaggtctctgttga

SEQ ID NO: 2988563 - DNA, 25 bp, Homo sapien
tgggagccagatgccctctaacctg

SEQ ID NO: 2988564 - DNA, 25 bp, Homo sapien
ctaacctggtcaggagctcaggcgg

SEQ ID NO: 2988565 - DNA, 25 bp, Homo sapien
agatggaaggcaggccctgagcggg

SEQ ID NO: 2988566 - DNA, 25 bp, Homo sapien
acccaggagatggaaggcaggccct

SEQ ID NO: 2988567 - DNA, 25 bp, Homo sapien
tgcactggggaagacccaggagatg

SEQ ID NO: 2988568 - DNA, 25 bp, Homo sapien
gggaagacccaggagatggaaggca

SEQ ID NO: 2988569 - DNA, 25 bp, Homo sapien
tggcagtgggactccggggaaggct

SEQ ID NO: 2988570 - DNA, 25 bp, Homo sapien
ggggggtggagtaagcaggcagatg

SEQ ID NO: 2988571 - DNA, 25 bp, Homo sapien
ggggtggagtaagcaggcagatgag

SEQ ID NO: 2988572 - DNA, 25 bp, Homo sapien
gggggtggagtaagcaggcagatga

SEQ ID NO: 2988573 - DNA, 25 bp, Homo sapien
cctggcctgtcgtttgtgagctgca

SEQ ID NO: 2988574 - DNA, 25 bp, Homo sapien
cagaaccactgactcgatgcagtgg

SEQ ID NO: 2988575 - DNA, 25 bp, Homo sapien
agggcatagatgactcctgggagac

SEQ ID NO: 2988576 - DNA, 25 bp, Homo sapien
gctgtcgcagccaggttgctaggta

SEQ ID NO: 2988577 - DNA, 25 bp, Homo sapien
ccttctgggggtgcagagccacgta

SEQ ID NO: 2988578 - DNA, 25 bp, Homo sapien
cttctgggggtgcagagccacgtac

SEQ ID NO: 2988579 - DNA, 25 bp, Homo sapien
gggcaggatgtagccaaggcccaga

SEQ ID NO: 2988580 - DNA, 25 bp, Homo sapien
cacgtgctggggcaggatgtagcca

SEQ ID NO: 2988581 - DNA, 25 bp, Homo sapien
tgctggggcaggatgtagccaaggc

SEQ ID NO: 2988582 - DNA, 25 bp, Homo sapien
aggatgtagccaaggcccagaagga

SEQ ID NO: 2988583 - DNA, 25 bp, Homo sapien
tttcgggacgtccacaaaagctgga

SEQ ID NO: 2988584 - DNA, 25 bp, Homo sapien
ctggagactttggtgaccggacccg

SEQ ID NO: 2988585 - DNA, 25 bp, Homo sapien
tgaaaaagccggtggcgtctcctgg

SEQ ID NO: 2988586 - DNA, 25 bp, Homo sapien
ccggcacgtgggactgtgctgctgc

SEQ ID NO: 2988587 - DNA, 25 bp, Homo sapien
aaagaggagagaaagtttgcgcggc

SEQ ID NO: 2988588 - DNA, 25 bp, Homo sapien
gagagaaagtttgcgcggccgagcg

SEQ ID NO: 2988589 - DNA, 25 bp, Homo sapien
aagaggagagaaagtttgcgcggcc

SEQ ID NO: 2988590 - DNA, 25 bp, Homo sapien
gaggagagaaagtttgcgcggccga

SEQ ID NO: 2988591 - DNA, 25 bp, Homo sapien
caggccgggcacaacaaaagcgcgg

SEQ ID NO: 2988592 - DNA, 25 bp, Homo sapien
ccgggcgcagaaggccacgcagcgg

SEQ ID NO: 2988593 - DNA, 25 bp, Homo sapien
gtggtgcgggaagcccccgacgtgc

SEQ ID NO: 2988594 - DNA, 25 bp, Homo sapien
ggtcgcgggcgccaggtggtgcggg

SEQ ID NO: 2988595 - DNA, 25 bp, Homo sapien
tgagcagcgacaagtaagggaccct

SEQ ID NO: 2988596 - DNA, 25 bp, Homo sapien
tctgccggttgctaggacgactgca

SEQ ID NO: 2988597 - DNA, 25 bp, Homo sapien
catcggagtagcagtgagtcaccac

SEQ ID NO: 2988598 - DNA, 25 bp, Homo sapien
taatgagagtctggctcgggcctga

SEQ ID NO: 2988599 - DNA, 25 bp, Homo sapien
gccaggacaaggatggatgcaaagc

SEQ ID NO: 2988600 - DNA, 25 bp, Homo sapien
caggacaaggatggatgcaaagcct

SEQ ID NO: 2988601 - DNA, 25 bp, Homo sapien
acaaggatggatgcaaagcctgtgg

SEQ ID NO: 2988602 - DNA, 25 bp, Homo sapien
gaagccaggacaaggatggatgcaa

SEQ ID NO: 2988603 - DNA, 25 bp, Homo sapien
cctcaacatttgtgcgcttgaagaa

SEQ ID NO: 2988604 - DNA, 25 bp, Homo sapien
ggcatgaccacggtgcagagatgca

SEQ ID NO: 2988605 - DNA, 25 bp, Homo sapien
aggccagcgggtgcctgatgctcac

SEQ ID NO: 2988606 - DNA, 25 bp, Homo sapien
gcaccaagctctaacctcaacattt

SEQ ID NO: 2988607 - DNA, 25 bp, Homo sapien
ggatcgaccgagcacaaatgtaggg

SEQ ID NO: 2988608 - DNA, 25 bp, Homo sapien
ttgggtctggaagcttctacttcct

SEQ ID NO: 2988609 - DNA, 25 bp, Homo sapien
tgggagatctctggtcgatcctcac

SEQ ID NO: 2988610 - DNA, 25 bp, Homo sapien
ctcacagtcaggcagtgaggacaaa

SEQ ID NO: 2988611 - DNA, 25 bp, Homo sapien
cgagcccaccgaggcctgggtggct

SEQ ID NO: 2988612 - DNA, 25 bp, Homo sapien
cccatctgattacgggcagtgctcc

SEQ ID NO: 2988613 - DNA, 25 bp, Homo sapien
gctttgccacaatccgaaggctgtg

SEQ ID NO: 2988614 - DNA, 25 bp, Homo sapien
ggagctggaccccactggcaccgag

SEQ ID NO: 2988615 - DNA, 25 bp, Homo sapien
tgttttctaacagagtgggacagag

SEQ ID NO: 2988616 - DNA, 25 bp, Homo sapien
cttaaaaagatccaagaggccgcat

SEQ ID NO: 2988617 - DNA, 25 bp, Homo sapien
gaggccgcatcaaagaaactgtgga

SEQ ID NO: 2988618 - DNA, 25 bp, Homo sapien
cactttaataaggaggtagcagctc

SEQ ID NO: 2988619 - DNA, 25 bp, Homo sapien
acgtttggtgagtcccttggccgca

SEQ ID NO: 2988620 - DNA, 25 bp, Homo sapien
tcacatgaacgtgctgagagctctc

SEQ ID NO: 2988621 - DNA, 25 bp, Homo sapien
caggctcttcgacataactttggca

SEQ ID NO: 2988622 - DNA, 25 bp, Homo sapien
gaacgtctcgagctgtttcccggga

SEQ ID NO: 2988623 - DNA, 25 bp, Homo sapien
gctggaaggagtgaatctccctgcc

SEQ ID NO: 2988624 - DNA, 25 bp, Homo sapien
catgctcgaatgtttgggccaaagc

SEQ ID NO: 2988625 - DNA, 25 bp, Homo sapien
tgctcagctccaaaccgctggatgc

SEQ ID NO: 2988626 - DNA, 25 bp, Homo sapien
ggagggcagctcatgacccatgctc

SEQ ID NO: 2988627 - DNA, 25 bp, Homo sapien
ccttgagctggtgcgtccacaggtg

SEQ ID NO: 2988628 - DNA, 25 bp, Homo sapien
aaggagaaatgcagatgggctcctt

SEQ ID NO: 2988629 - DNA, 25 bp, Homo sapien
gctccttgagctggtgcgtccacag

SEQ ID NO: 2988630 - DNA, 25 bp, Homo sapien
ggctccttgagctggtgcgtccaca

SEQ ID NO: 2988631 - DNA, 25 bp, Homo sapien
aagggctcttcgtggcagacgtcac

SEQ ID NO: 2988632 - DNA, 25 bp, Homo sapien
gacgtcaccgatttcgagggctgga

SEQ ID NO: 2988633 - DNA, 25 bp, Homo sapien
tgcctacgaaaacaaagccctgatg

SEQ ID NO: 2988634 - DNA, 25 bp, Homo sapien
caactcctcaggtgtggactagacg

SEQ ID NO: 2988635 - DNA, 25 bp, Homo sapien
tcctcttccaggacaagagggtgtc

SEQ ID NO: 2988636 - DNA, 25 bp, Homo sapien
caactggtctatcagtccagacggg

SEQ ID NO: 2988637 - DNA, 25 bp, Homo sapien
cagacagttcctggagtgcacggaa

SEQ ID NO: 2988638 - DNA, 25 bp, Homo sapien
tgactacagatactacccctaccag

SEQ ID NO: 2988639 - DNA, 25 bp, Homo sapien
gaagatccgcttccccatgatgctc

SEQ ID NO: 2988640 - DNA, 25 bp, Homo sapien
cctggaacttcgaggccttgacgca

SEQ ID NO: 2988641 - DNA, 25 bp, Homo sapien
tgtatgcctatgcagtggccacagg

SEQ ID NO: 2988642 - DNA, 25 bp, Homo sapien
tgctggcccggtacaaaggcctgaa

SEQ ID NO: 2988643 - DNA, 25 bp, Homo sapien
agggctactgcgcaagcctctttgc

SEQ ID NO: 2988644 - DNA, 25 bp, Homo sapien
gctgcagggctactgcgcaagcctc

SEQ ID NO: 2988645 - DNA, 25 bp, Homo sapien
caggacccctcgttccagatgcccc

SEQ ID NO: 2988646 - DNA, 25 bp, Homo sapien
aggacccctcgttccagatgcccct

SEQ ID NO: 2988647 - DNA, 25 bp, Homo sapien
cagatctttgacagccagcggggct

SEQ ID NO: 2988648 - DNA, 25 bp, Homo sapien
gccgggcagcaatgtcaccatgagt

SEQ ID NO: 2988649 - DNA, 25 bp, Homo sapien
tccatcagcgtgaatgtgcagggcg

SEQ ID NO: 2988650 - DNA, 25 bp, Homo sapien
gggctgcgacctgtccatcagcgtg

SEQ ID NO: 2988651 - DNA, 25 bp, Homo sapien
cactgtgtgtgacaacctgtgggac

SEQ ID NO: 2988652 - DNA, 25 bp, Homo sapien
gggcactgtgtgtgacaacctgtgg

SEQ ID NO: 2988653 - DNA, 25 bp, Homo sapien
ccagtggggcactgtgtgtgacaac

SEQ ID NO: 2988654 - DNA, 25 bp, Homo sapien
gccagtggggcactgtgtgtgacaa

SEQ ID NO: 2988655 - DNA, 25 bp, Homo sapien
tgctccgattccacgaggaggcctc

SEQ ID NO: 2988656 - DNA, 25 bp, Homo sapien
gaaaggccttgcgagccccagggga

SEQ ID NO: 2988657 - DNA, 25 bp, Homo sapien
tccgattccacgaggaggcctctgg

SEQ ID NO: 2988658 - DNA, 25 bp, Homo sapien
aaaggccttgcgagccccaggggag

SEQ ID NO: 2988659 - DNA, 25 bp, Homo sapien
tctctgttcgctgctgtcagcataa

SEQ ID NO: 2988660 - DNA, 25 bp, Homo sapien
aaacaataaagcgtctgagggagtg

SEQ ID NO: 2988661 - DNA, 25 bp, Homo sapien
ccacgagagcgcctgcgcaggatgc

SEQ ID NO: 2988662 - DNA, 25 bp, Homo sapien
aatgattgtgttccttccctatggg

SEQ ID NO: 2988663 - DNA, 25 bp, Homo sapien
caggtgcccggaagcagcctcttcg

SEQ ID NO: 2988664 - DNA, 25 bp, Homo sapien
cataggcagtgatttgcgattactt

SEQ ID NO: 2988665 - DNA, 25 bp, Homo sapien
gctgaattgagaccttgctgatgta

SEQ ID NO: 2988666 - DNA, 25 bp, Homo sapien
actgtggctgaattgagaccttgct

SEQ ID NO: 2988667 - DNA, 25 bp, Homo sapien
tcctagatcattgtccttgatgtcc

SEQ ID NO: 2988668 - DNA, 25 bp, Homo sapien
tgtggaaacttcacgagcgttggct

SEQ ID NO: 2988669 - DNA, 25 bp, Homo sapien
ggagggacccctctctcatggttgt

SEQ ID NO: 2988670 - DNA, 25 bp, Homo sapien
ggaagtgaacgctgaatgtgacgca

SEQ ID NO: 2988671 - DNA, 25 bp, Homo sapien
tttgaaactcaagcacagctgcgag

SEQ ID NO: 2988672 - DNA, 25 bp, Homo sapien
aacgcagtgagcatgaggtggacct

SEQ ID NO: 2988673 - DNA, 25 bp, Homo sapien
gcatcatatggccagtgaccgcttt

SEQ ID NO: 2988674 - DNA, 25 bp, Homo sapien
cagggtattgcatggtcacgagtga

SEQ ID NO: 2988675 - DNA, 25 bp, Homo sapien
gataaaaccatctccgcatcatatg

SEQ ID NO: 2988676 - DNA, 25 bp, Homo sapien
gatgtgtttggtattccaatgctgc

SEQ ID NO: 2988677 - DNA, 25 bp, Homo sapien
tgcaggagcctaacccagaggaagt

SEQ ID NO: 2988678 - DNA, 25 bp, Homo sapien
caaacaaaccgataactgtatacaa

SEQ ID NO: 2988679 - DNA, 25 bp, Homo sapien
tatacaatactctaacgtcaggtgg

SEQ ID NO: 2988680 - DNA, 25 bp, Homo sapien
ctgccgtgcaccagggcctcgtggt

SEQ ID NO: 2988681 - DNA, 25 bp, Homo sapien
agaattgcacggagccactggagtc

SEQ ID NO: 2988682 - DNA, 25 bp, Homo sapien
agggaggacagcgtctgcccataaa

SEQ ID NO: 2988683 - DNA, 25 bp, Homo sapien
accagggcctcgtggtccacatatt

SEQ ID NO: 2988684 - DNA, 25 bp, Homo sapien
gaggtctctgcgaccagaagcggaa

SEQ ID NO: 2988685 - DNA, 25 bp, Homo sapien
tcttccggaggacggcagtgcagaa

SEQ ID NO: 2988686 - DNA, 25 bp, Homo sapien
tgcacagactcggtgaaggaaacag

SEQ ID NO: 2988687 - DNA, 25 bp, Homo sapien
gcggaagcgcggtttctcgaaagta

SEQ ID NO: 2988688 - DNA, 25 bp, Homo sapien
tggtgatgatgattgccactgttgt

SEQ ID NO: 2988689 - DNA, 25 bp, Homo sapien
gatggtgatgatgattgccactgtt

SEQ ID NO: 2988690 - DNA, 25 bp, Homo sapien
ctgtggctgacatcatgatgatgat

SEQ ID NO: 2988691 - DNA, 25 bp, Homo sapien
gtgatgatgattgccactgttgttg

SEQ ID NO: 2988692 - DNA, 25 bp, Homo sapien
ggagcatgttccaaaaacactctgt

SEQ ID NO: 2988693 - DNA, 25 bp, Homo sapien
tgcctccctgaatgagctcactggg

SEQ ID NO: 2988694 - DNA, 25 bp, Homo sapien
tttgatgagcaaagttcaatgccag

SEQ ID NO: 2988695 - DNA, 25 bp, Homo sapien
gcagtggtgtcctgtagccgcacag

SEQ ID NO: 2988696 - DNA, 25 bp, Homo sapien
cactgcttttgtagggtgaagagac

SEQ ID NO: 2988697 - DNA, 25 bp, Homo sapien
tgaagagacaccagcatgctggcaa

SEQ ID NO: 2988698 - DNA, 25 bp, Homo sapien
tgcttttgtagggtgaagagacacc

SEQ ID NO: 2988699 - DNA, 25 bp, Homo sapien
aagagacaccagcatgctggcaagc

SEQ ID NO: 2988700 - DNA, 25 bp, Homo sapien
gctgcctgagtagggccggtggcct

SEQ ID NO: 2988701 - DNA, 25 bp, Homo sapien
aaggaaacggagccccgtcctgcag

SEQ ID NO: 2988702 - DNA, 25 bp, Homo sapien
tcctgtgcgtgatgtgcaatggcca

SEQ ID NO: 2988703 - DNA, 25 bp, Homo sapien
gctttgttcgtctttggcccttgct

SEQ ID NO: 2988704 - DNA, 25 bp, Homo sapien
ctctctgtttctttcccctgtaaca

SEQ ID NO: 2988705 - DNA, 25 bp, Homo sapien
ctctgtttctttcccctgtaacagt

SEQ ID NO: 2988706 - DNA, 25 bp, Homo sapien
ggcctctctgtttctttcccctgta

SEQ ID NO: 2988707 - DNA, 25 bp, Homo sapien
ttggcctctctgtttctttcccctg

SEQ ID NO: 2988708 - DNA, 25 bp, Homo sapien
cagagatccaaggtacatcactgtc

SEQ ID NO: 2988709 - DNA, 25 bp, Homo sapien
gacacagagatccaaggtacatcac

SEQ ID NO: 2988710 - DNA, 25 bp, Homo sapien
accagagtgctgactcctggtgtgg

SEQ ID NO: 2988711 - DNA, 25 bp, Homo sapien
agagtgctgactcctggtgtggcca

SEQ ID NO: 2988712 - DNA, 25 bp, Homo sapien
ttcaatcaatcccaagtacagagcc

SEQ ID NO: 2988713 - DNA, 25 bp, Homo sapien
tacagagccatcgtccaaagatgac

SEQ ID NO: 2988714 - DNA, 25 bp, Homo sapien
taactctcaacagggctccaatgct

SEQ ID NO: 2988715 - DNA, 25 bp, Homo sapien
ccagcatccggtgtctaactctcaa

SEQ ID NO: 2988716 - DNA, 25 bp, Homo sapien
cagagctccgattccgtcccagtgg

SEQ ID NO: 2988717 - DNA, 25 bp, Homo sapien
agctccgattccgtcccagtggaaa

SEQ ID NO: 2988718 - DNA, 25 bp, Homo sapien
tgagccgtcaggcatcgggccttcg

SEQ ID NO: 2988719 - DNA, 25 bp, Homo sapien
tgcaaacaaggaggccgcatgagcc

SEQ ID NO: 2988720 - DNA, 25 bp, Homo sapien
tctcagctgaccatctaacacaggc

SEQ ID NO: 2988721 - DNA, 25 bp, Homo sapien
gaaacagacacgtacccaattatag

SEQ ID NO: 2988722 - DNA, 25 bp, Homo sapien
tgtgctgtccggtacagtggctgtt

SEQ ID NO: 2988723 - DNA, 25 bp, Homo sapien
catggcattgtgcaagagcttggga

SEQ ID NO: 2988724 - DNA, 25 bp, Homo sapien
tctactcagcagaccgtgggtgacc

SEQ ID NO: 2988725 - DNA, 25 bp, Homo sapien
ggcctagataatcccctgtggtggg

SEQ ID NO: 2988726 - DNA, 25 bp, Homo sapien
caccattgaggtttgggcctagata

SEQ ID NO: 2988727 - DNA, 25 bp, Homo sapien
actgagattatatgcgtgtgcctcc

SEQ ID NO: 2988728 - DNA, 25 bp, Homo sapien
aagatgaccgcgacgtcttactcat

SEQ ID NO: 2988729 - DNA, 25 bp, Homo sapien
caagatgaccgcgacgtcttactca

SEQ ID NO: 2988730 - DNA, 25 bp, Homo sapien
tacactcacatgcaacccacacatt

SEQ ID NO: 2988731 - DNA, 25 bp, Homo sapien
atacactcacatgcaacccacacat

SEQ ID NO: 2988732 - DNA, 25 bp, Homo sapien
tggaaatcggaggtgcttccccagc

SEQ ID NO: 2988733 - DNA, 25 bp, Homo sapien
tctgggaggacaatcactctcacac

SEQ ID NO: 2988734 - DNA, 25 bp, Homo sapien
tgcatgcatacacgcactcacgacg

SEQ ID NO: 2988735 - DNA, 25 bp, Homo sapien
cagcctcacgccactgggaaatgct

SEQ ID NO: 2988736 - DNA, 25 bp, Homo sapien
agagtccctgtccacgggagcccat

SEQ ID NO: 2988737 - DNA, 25 bp, Homo sapien
acatggggcacacgactcaggacca

SEQ ID NO: 2988738 - DNA, 25 bp, Homo sapien
tctcggcatggtccggaggcgacgg

SEQ ID NO: 2988739 - DNA, 25 bp, Homo sapien
aggcagtacgccagcaagagtccct

SEQ ID NO: 2988740 - DNA, 25 bp, Homo sapien
tcctgcagtgtgataagacgcgtgg

SEQ ID NO: 2988741 - DNA, 25 bp, Homo sapien
gataagacgcgtgggccatggacac

SEQ ID NO: 2988742 - DNA, 25 bp, Homo sapien
tgtcctgcagtgtgataagacgcgt

SEQ ID NO: 2988743 - DNA, 25 bp, Homo sapien
cagtgtgataagacgcgtgggccat

SEQ ID NO: 2988744 - DNA, 25 bp, Homo sapien
aggacaagcccgcaggcaggatgga

SEQ ID NO: 2988745 - DNA, 25 bp, Homo sapien
ggacaagcccgcaggcaggatggac

SEQ ID NO: 2988746 - DNA, 25 bp, Homo sapien
gggatcctcactaccgaacgagccc

SEQ ID NO: 2988747 - DNA, 25 bp, Homo sapien
cccacaaggctctgtgttcacgctg

SEQ ID NO: 2988748 - DNA, 25 bp, Homo sapien
tgggctcacggcccactctgggatc

SEQ ID NO: 2988749 - DNA, 25 bp, Homo sapien
tgttcacgctggtgggctcacggcc

SEQ ID NO: 2988750 - DNA, 25 bp, Homo sapien
ctggtcctgactgggcctgtatttt

SEQ ID NO: 2988751 - DNA, 25 bp, Homo sapien
tgactgggcctgtatttttcatgtt

SEQ ID NO: 2988752 - DNA, 25 bp, Homo sapien
gtcctgactgggcctgtatttttca

SEQ ID NO: 2988753 - DNA, 25 bp, Homo sapien
cctgactgggcctgtatttttcatg

SEQ ID NO: 2988754 - DNA, 25 bp, Homo sapien
acagcagcgcaagcaccgggaagca

SEQ ID NO: 2988755 - DNA, 25 bp, Homo sapien
gcagcgcaagcaccgggaagcaggg

SEQ ID NO: 2988756 - DNA, 25 bp, Homo sapien
gtcacagcagcgcaagcaccgggaa

SEQ ID NO: 2988757 - DNA, 25 bp, Homo sapien
tcacagcagcgcaagcaccgggaag

SEQ ID NO: 2988758 - DNA, 25 bp, Homo sapien
tgatgttgatctggggcacggcggt

SEQ ID NO: 2988759 - DNA, 25 bp, Homo sapien
tggggcacggcggtcgccgggtaca

SEQ ID NO: 2988760 - DNA, 25 bp, Homo sapien
agatagtgatgttgatctggggcac

SEQ ID NO: 2988761 - DNA, 25 bp, Homo sapien
tgatctggggcacggcggtcgccgg

SEQ ID NO: 2988762 - DNA, 25 bp, Homo sapien
gctcgctctgagcaaatgaactcca

SEQ ID NO: 2988763 - DNA, 25 bp, Homo sapien
tgtgcagggttatctgccgtgtgca

SEQ ID NO: 2988764 - DNA, 25 bp, Homo sapien
gaactccagatgtcggggccagctg

SEQ ID NO: 2988765 - DNA, 25 bp, Homo sapien
gagcgagcaggtggcatttcagaaa

SEQ ID NO: 2988766 - DNA, 25 bp, Homo sapien
cgtagcagtagaacttgccggtgaa

SEQ ID NO: 2988767 - DNA, 25 bp, Homo sapien
tccgtgtcgaagatcaccgtctggt

SEQ ID NO: 2988768 - DNA, 25 bp, Homo sapien
tagaggttcacgaactccgtgtcga

SEQ ID NO: 2988769 - DNA, 25 bp, Homo sapien
tgaagatggcgttctcacgttcgcc

SEQ ID NO: 2988770 - DNA, 25 bp, Homo sapien
tgtgcagggcgtctcactgaatgcc

SEQ ID NO: 2988771 - DNA, 25 bp, Homo sapien
tctgggagcaccgatcgctttggct

SEQ ID NO: 2988772 - DNA, 25 bp, Homo sapien
gaagcggtgatgcttagcccacgag

SEQ ID NO: 2988773 - DNA, 25 bp, Homo sapien
tcatagaaacatctgcaggcctggg

SEQ ID NO: 2988774 - DNA, 25 bp, Homo sapien
tgcacgcctctgtctgtgaacacac

SEQ ID NO: 2988775 - DNA, 25 bp, Homo sapien
attgacactacctgggatgcctgcc

SEQ ID NO: 2988776 - DNA, 25 bp, Homo sapien
tcaacaatacattgacactacctgg

SEQ ID NO: 2988777 - DNA, 25 bp, Homo sapien
gcctgcacgcctctgtctgtgaaca

SEQ ID NO: 2988778 - DNA, 25 bp, Homo sapien
ctctgccttcctctgcctcctcctt

SEQ ID NO: 2988779 - DNA, 25 bp, Homo sapien
tgcttgctctgccttcctctgcctc

SEQ ID NO: 2988780 - DNA, 25 bp, Homo sapien
ctgcttgctctgccttcctctgcct

SEQ ID NO: 2988781 - DNA, 25 bp, Homo sapien
tgccttcctctgcctcctccttcat

SEQ ID NO: 2988782 - DNA, 25 bp, Homo sapien
cgtgtagccgaccgggtgaccgtca

SEQ ID NO: 2988783 - DNA, 25 bp, Homo sapien
cgccgccgtgtagccgaccgggtga

SEQ ID NO: 2988784 - DNA, 25 bp, Homo sapien
tgaccgtcaccgccgcggcctccat

SEQ ID NO: 2988785 - DNA, 25 bp, Homo sapien
tagccgaccgggtgaccgtcaccgc

SEQ ID NO: 2988786 - DNA, 25 bp, Homo sapien
ccttactgtgcacggagcggacaca

SEQ ID NO: 2988787 - DNA, 25 bp, Homo sapien
gccacggactctcagccccgcggat

SEQ ID NO: 2988788 - DNA, 25 bp, Homo sapien
tctgtcccttactgtgcacggagcg

SEQ ID NO: 2988789 - DNA, 25 bp, Homo sapien
tactgtgcacggagcggacacaggc

SEQ ID NO: 2988790 - DNA, 25 bp, Homo sapien
catagaccagcgacgtgggaagcag

SEQ ID NO: 2988791 - DNA, 25 bp, Homo sapien
gcggccactcgggtttgcacccgta

SEQ ID NO: 2988792 - DNA, 25 bp, Homo sapien
ggatcttccgcatagaccagcgacg

SEQ ID NO: 2988793 - DNA, 25 bp, Homo sapien
cgccgggatcttccgcatagaccag

SEQ ID NO: 2988794 - DNA, 25 bp, Homo sapien
aaaactgaccacctctcgaaagact

SEQ ID NO: 2988795 - DNA, 25 bp, Homo sapien
gaaaaactgaccacctctcgaaaga

SEQ ID NO: 2988796 - DNA, 25 bp, Homo sapien
gaccacctctcgaaagactgtctct

SEQ ID NO: 2988797 - DNA, 25 bp, Homo sapien
aactgaccacctctcgaaagactgt

SEQ ID NO: 2988798 - DNA, 25 bp, Homo sapien
aagctgattggtttggtggtgtcct

SEQ ID NO: 2988799 - DNA, 25 bp, Homo sapien
caggtacccgcccatcatgtcatga

SEQ ID NO: 2988800 - DNA, 25 bp, Homo sapien
gctcctccagcgaagacaagtaaaa

SEQ ID NO: 2988801 - DNA, 25 bp, Homo sapien
gacacaacaaagtccggggcctctg

SEQ ID NO: 2988802 - DNA, 25 bp, Homo sapien
acaaagacgtcgatgcactgccagt

SEQ ID NO: 2988803 - DNA, 25 bp, Homo sapien
cagtggtagaaagcatagggagtct

SEQ ID NO: 2988804 - DNA, 25 bp, Homo sapien
gaccccatgcctgtgggcagtgttg

SEQ ID NO: 2988805 - DNA, 25 bp, Homo sapien
tctgcaccaccgagccctgaatgaa

SEQ ID NO: 2988806 - DNA, 25 bp, Homo sapien
gccatcaaaacgaaaaaactgagtg

SEQ ID NO: 2988807 - DNA, 25 bp, Homo sapien
gccactgcctggtacgagcgctcat

SEQ ID NO: 2988808 - DNA, 25 bp, Homo sapien
ttctcgatgttgatcagccagccat

SEQ ID NO: 2988809 - DNA, 25 bp, Homo sapien
tcattccactccgtgatgaaagtcc

SEQ ID NO: 2988810 - DNA, 25 bp, Homo sapien
tcttgccatttgagctgcccacttt

SEQ ID NO: 2988811 - DNA, 25 bp, Homo sapien
tgcagctgtgtggtgaggtaccgca

SEQ ID NO: 2988812 - DNA, 25 bp, Homo sapien
tttgcaccacgctgtcataccagag

SEQ ID NO: 2988813 - DNA, 25 bp, Homo sapien
ctgttgtgctggttgagttcgtctt

SEQ ID NO: 2988814 - DNA, 25 bp, Homo sapien
ccaccaaccctgcagtctcagcctt

SEQ ID NO: 2988815 - DNA, 25 bp, Homo sapien
gcaacaaggacctgctgtgaggccc

SEQ ID NO: 2988816 - DNA, 25 bp, Homo sapien
ccaaccctgcagtctcagcctttcc

SEQ ID NO: 2988817 - DNA, 25 bp, Homo sapien
ctgagaagcaacaaggacctgctgt

SEQ ID NO: 2988818 - DNA, 25 bp, Homo sapien
acgttccctcgagcaaacacatcca

SEQ ID NO: 2988819 - DNA, 25 bp, Homo sapien
gaagccgtcgcaggaatcaaagaag

SEQ ID NO: 2988820 - DNA, 25 bp, Homo sapien
ttgtctgtgtcgaatcggcctccga

SEQ ID NO: 2988821 - DNA, 25 bp, Homo sapien
gctcctcccgccagttatagttagt

SEQ ID NO: 2988822 - DNA, 25 bp, Homo sapien
tcattcctttgaggtgcagacggga

SEQ ID NO: 2988823 - DNA, 25 bp, Homo sapien
aagatcaaggaacgcagctgggaca

SEQ ID NO: 2988824 - DNA, 25 bp, Homo sapien
ggaacgacgcgcctctgtctggtaa

SEQ ID NO: 2988825 - DNA, 25 bp, Homo sapien
gaacgggcaggactgatagaccaga

SEQ ID NO: 2988826 - DNA, 25 bp, Homo sapien
tggctgcgcggtcccattgtcctct

SEQ ID NO: 2988827 - DNA, 25 bp, Homo sapien
cattcgattatcagaatcacgggca

SEQ ID NO: 2988828 - DNA, 25 bp, Homo sapien
gagaggcggtcagcgctgctgcaag

SEQ ID NO: 2988829 - DNA, 25 bp, Homo sapien
attgtcctctggcacacctctcatt

SEQ ID NO: 2988830 - DNA, 25 bp, Homo sapien
gccatgctttcggatcagctccaac

SEQ ID NO: 2988831 - DNA, 25 bp, Homo sapien
ccatgctttcggatcagctccaacg

SEQ ID NO: 2988832 - DNA, 25 bp, Homo sapien
agccatgctttcggatcagctccaa

SEQ ID NO: 2988833 - DNA, 25 bp, Homo sapien
catgctttcggatcagctccaacga

SEQ ID NO: 2988834 - DNA, 25 bp, Homo sapien
aaatccttcttctccagacactcat

SEQ ID NO: 2988835 - DNA, 25 bp, Homo sapien
tcctggttctggaagaaatccttct

SEQ ID NO: 2988836 - DNA, 25 bp, Homo sapien
aatccttcttctccagacactcata

SEQ ID NO: 2988837 - DNA, 25 bp, Homo sapien
ttgtcctggttctggaagaaatcct

SEQ ID NO: 2988838 - DNA, 25 bp, Homo sapien
tccccgtctacagatacgctgcaaa

SEQ ID NO: 2988839 - DNA, 25 bp, Homo sapien
caacagctcggtccggaggaaggga

SEQ ID NO: 2988840 - DNA, 25 bp, Homo sapien
gacaggacttccaggaggactgcag

SEQ ID NO: 2988841 - DNA, 25 bp, Homo sapien
tgctggtggaaactcgaggctctcc

SEQ ID NO: 2988842 - DNA, 25 bp, Homo sapien
tgtgggcagataacgctccagtcgg

SEQ ID NO: 2988843 - DNA, 25 bp, Homo sapien
ccaggcagaaggacgtgacgaaagg

SEQ ID NO: 2988844 - DNA, 25 bp, Homo sapien
ctggccatagcagaccctccgtgca

SEQ ID NO: 2988845 - DNA, 25 bp, Homo sapien
caaggagcagatgctatgtgtgggc

SEQ ID NO: 2988846 - DNA, 25 bp, Homo sapien
gcgctcaggtggtaccagggcccta

SEQ ID NO: 2988847 - DNA, 25 bp, Homo sapien
tcaggtggtaccagggccctaccgc

SEQ ID NO: 2988848 - DNA, 25 bp, Homo sapien
caagggctggatctcctgggcgctc

SEQ ID NO: 2988849 - DNA, 25 bp, Homo sapien
tctcctgggcgctcaggtggtacca

SEQ ID NO: 2988850 - DNA, 25 bp, Homo sapien
ggtgggatcacaccccggacgagca

SEQ ID NO: 2988851 - DNA, 25 bp, Homo sapien
tccggtgggatcacaccccggacga

SEQ ID NO: 2988852 - DNA, 25 bp, Homo sapien
catttccaacctccggtgggatcac

SEQ ID NO: 2988853 - DNA, 25 bp, Homo sapien
agccacatttccaacctccggtggg

SEQ ID NO: 2988854 - DNA, 25 bp, Homo sapien
tccatggccaccacgtgtgatggga

SEQ ID NO: 2988855 - DNA, 25 bp, Homo sapien
gccaccacgtgtgatgggagaagct

SEQ ID NO: 2988856 - DNA, 25 bp, Homo sapien
gctggtgggcccaccgtcctccgtc

SEQ ID NO: 2988857 - DNA, 25 bp, Homo sapien
tgtccagttccatggccaccacgtg

SEQ ID NO: 2988858 - DNA, 25 bp, Homo sapien
aaaaaggtcctgtgatgggtgccgt

SEQ ID NO: 2988859 - DNA, 25 bp, Homo sapien
acatcgtggtcctgtccgtagccag

SEQ ID NO: 2988860 - DNA, 25 bp, Homo sapien
cactgagaaatcgaagccagctcca

SEQ ID NO: 2988861 - DNA, 25 bp, Homo sapien
tgaaataccgtatgggattccctca

SEQ ID NO: 2988862 - DNA, 25 bp, Homo sapien
caagcttatacaccatggacaggta

SEQ ID NO: 2988863 - DNA, 25 bp, Homo sapien
gcaactgtgacgtccgtgggcccct

SEQ ID NO: 2988864 - DNA, 25 bp, Homo sapien
gttcaacactgagatgccaccgatg

SEQ ID NO: 2988865 - DNA, 25 bp, Homo sapien
ctgtggtcagctccaaagcaactgt

SEQ ID NO: 2988866 - DNA, 25 bp, Homo sapien
agcagcaaggctgtgcagctcaggt

SEQ ID NO: 2988867 - DNA, 25 bp, Homo sapien
ccgcagcggcccacccatctggcca

SEQ ID NO: 2988868 - DNA, 25 bp, Homo sapien
gggtcggaggctgtgtcttgagctt

SEQ ID NO: 2988869 - DNA, 25 bp, Homo sapien
ctgccggccgcagcggcccacccat

SEQ ID NO: 2988870 - DNA, 25 bp, Homo sapien
cggaggctgtgtcttgagcttgttt

SEQ ID NO: 2988871 - DNA, 25 bp, Homo sapien
gggcgaaagggctgatcactggccg

SEQ ID NO: 2988872 - DNA, 25 bp, Homo sapien
aagggctgatcactggccgggctca

SEQ ID NO: 2988873 - DNA, 25 bp, Homo sapien
ggagatgcatcccagggtcatgggg

SEQ ID NO: 2988874 - DNA, 25 bp, Homo sapien
ctacggggcgaaagggctgatcact

SEQ ID NO: 2988875 - DNA, 25 bp, Homo sapien
tctccaagccgacaggtgaagctct

SEQ ID NO: 2988876 - DNA, 25 bp, Homo sapien
ccgtgagaagcaaacgaggaggtct

SEQ ID NO: 2988877 - DNA, 25 bp, Homo sapien
ctggatctctccaagccgacaggtg

SEQ ID NO: 2988878 - DNA, 25 bp, Homo sapien
gaggaggtctagcagcaggcaccca

SEQ ID NO: 2988879 - DNA, 25 bp, Homo sapien
ccacgcacacatttcccctccctga

SEQ ID NO: 2988880 - DNA, 25 bp, Homo sapien
ctgaacccaagaagggggcggcctg

SEQ ID NO: 2988881 - DNA, 25 bp, Homo sapien
ccagttccccgctgaacccaagaag

SEQ ID NO: 2988882 - DNA, 25 bp, Homo sapien
gggagagggtgcccccacgcacaca

SEQ ID NO: 2988883 - DNA, 25 bp, Homo sapien
ccagcagtggattcggaagcaacgg

SEQ ID NO: 2988884 - DNA, 25 bp, Homo sapien
tcagaggcggatggctgccagcgga

SEQ ID NO: 2988885 - DNA, 25 bp, Homo sapien
gattcggaagcaacggacttgtgag

SEQ ID NO: 2988886 - DNA, 25 bp, Homo sapien
tgagagatggtgacggcctgcacct

SEQ ID NO: 2988887 - DNA, 25 bp, Homo sapien
ggcagctccctgcccggagagtcat

SEQ ID NO: 2988888 - DNA, 25 bp, Homo sapien
gcagctccctgcccggagagtcatc

SEQ ID NO: 2988889 - DNA, 25 bp, Homo sapien
ccggagagtcatcactcatccctcc

SEQ ID NO: 2988890 - DNA, 25 bp, Homo sapien
aaattccatgcgacgatcctggccg

SEQ ID NO: 2988891 - DNA, 25 bp, Homo sapien
accagcaggtccactatccggtact

SEQ ID NO: 2988892 - DNA, 25 bp, Homo sapien
ctatccggtactgggtggcaaaagc

SEQ ID NO: 2988893 - DNA, 25 bp, Homo sapien
gggacaggctccaccagaaattcca

SEQ ID NO: 2988894 - DNA, 25 bp, Homo sapien
tgaataaagcagaactgccctgccc

SEQ ID NO: 2988895 - DNA, 25 bp, Homo sapien
ggctgaataaagcagaactgccctg

SEQ ID NO: 2988896 - DNA, 25 bp, Homo sapien
caggggctgaataaagcagaactgc

SEQ ID NO: 2988897 - DNA, 25 bp, Homo sapien
tgcaggggctgaataaagcagaact

SEQ ID NO: 2988898 - DNA, 25 bp, Homo sapien
gctcagaaatgtctcggcgcctgct

SEQ ID NO: 2988899 - DNA, 25 bp, Homo sapien
gccttccacactgggaggacggttc

SEQ ID NO: 2988900 - DNA, 25 bp, Homo sapien
agaaaatcatcattctcggcatcag

SEQ ID NO: 2988901 - DNA, 25 bp, Homo sapien
tgcgatcccactgcttggtttcctg

SEQ ID NO: 2988902 - DNA, 25 bp, Homo sapien
gtaaattgccaacgccaggaaacac

SEQ ID NO: 2988903 - DNA, 25 bp, Homo sapien
attgccaacgccaggaaacacggag

SEQ ID NO: 2988904 - DNA, 25 bp, Homo sapien
gcacagtaaattgccaacgccagga

SEQ ID NO: 2988905 - DNA, 25 bp, Homo sapien
tcagcagcacagtaaattgccaacg

SEQ ID NO: 2988906 - DNA, 25 bp, Homo sapien
agcccggaagagacgccgcagagcc

SEQ ID NO: 2988907 - DNA, 25 bp, Homo sapien
agcgcagactgcctcagagccactt

SEQ ID NO: 2988908 - DNA, 25 bp, Homo sapien
gggctgctgaaaacgctccggagat

SEQ ID NO: 2988909 - DNA, 25 bp, Homo sapien
aaaacgctccggagatgacctcaca

SEQ ID NO: 2988910 - DNA, 25 bp, Homo sapien
cctgaagggcggcttgtccagagcc

SEQ ID NO: 2988911 - DNA, 25 bp, Homo sapien
cttgtccagagcccacggcctctcg

SEQ ID NO: 2988912 - DNA, 25 bp, Homo sapien
cagcctgaagggcggcttgtccaga

SEQ ID NO: 2988913 - DNA, 25 bp, Homo sapien
aagggcggcttgtccagagcccacg

SEQ ID NO: 2988914 - DNA, 25 bp, Homo sapien
agagtagctggaaaagcccccgcgg

SEQ ID NO: 2988915 - DNA, 25 bp, Homo sapien
ggaacagagtagctggaaaagcccc

SEQ ID NO: 2988916 - DNA, 25 bp, Homo sapien
aaggaacagagtagctggaaaagcc

SEQ ID NO: 2988917 - DNA, 25 bp, Homo sapien
agaagggaggacgtgaaggaacaga

SEQ ID NO: 2988918 - DNA, 25 bp, Homo sapien
ctgctgctcaaggggtcagcctgga

SEQ ID NO: 2988919 - DNA, 25 bp, Homo sapien
ggtcagcctggaggtcttcccggtg

SEQ ID NO: 2988920 - DNA, 25 bp, Homo sapien
gtcagcctggaggtcttcccggtgc

SEQ ID NO: 2988921 - DNA, 25 bp, Homo sapien
tgactgctgctcaaggggtcagcct

SEQ ID NO: 2988922 - DNA, 25 bp, Homo sapien
aaggacagaggaaggcgcctgtggt

SEQ ID NO: 2988923 - DNA, 25 bp, Homo sapien
ggcgcctgtggtgaagaccctgcct

SEQ ID NO: 2988924 - DNA, 25 bp, Homo sapien
agaggaaggcgcctgtggtgaagac

SEQ ID NO: 2988925 - DNA, 25 bp, Homo sapien
aaggcgcctgtggtgaagaccctgc

SEQ ID NO: 2988926 - DNA, 25 bp, Homo sapien
gccacaggatgacccaaggccgtgg

SEQ ID NO: 2988927 - DNA, 25 bp, Homo sapien
aaggccgtggggtccagacaccaca

SEQ ID NO: 2988928 - DNA, 25 bp, Homo sapien
gcccaggtgtagcagaggctgtgca

SEQ ID NO: 2988929 - DNA, 25 bp, Homo sapien
tcaggccactgacaccgtggaagga

SEQ ID NO: 2988930 - DNA, 25 bp, Homo sapien
tgggaccacacaagagacatgggag

SEQ ID NO: 2988931 - DNA, 25 bp, Homo sapien
ttggcatgagtacccaggcaggcaa

SEQ ID NO: 2988932 - DNA, 25 bp, Homo sapien
tcagcactgcccgacatagagggaa

SEQ ID NO: 2988933 - DNA, 25 bp, Homo sapien
taccactggccctatgtggcctggg

SEQ ID NO: 2988934 - DNA, 25 bp, Homo sapien
acccaggacagtccccgggctggct

SEQ ID NO: 2988935 - DNA, 25 bp, Homo sapien
ccaggacagtccccggcagcagctt

SEQ ID NO: 2988936 - DNA, 25 bp, Homo sapien
ccaggacagtccccgggctggctcc

SEQ ID NO: 2988937 - DNA, 25 bp, Homo sapien
cacccaggacagtccccgggctggc

SEQ ID NO: 2988938 - DNA, 25 bp, Homo sapien
gcatattagttttcccgcacgcgag

SEQ ID NO: 2988939 - DNA, 25 bp, Homo sapien
tgagtggctacatgcggcagccgct

SEQ ID NO: 2988940 - DNA, 25 bp, Homo sapien
aagagctcccgggaatggtcacagc

SEQ ID NO: 2988941 - DNA, 25 bp, Homo sapien
ttatttcagcgcagttacacccagc

SEQ ID NO: 2988942 - DNA, 25 bp, Homo sapien
aaaagccagccaagacaggcacagt

SEQ ID NO: 2988943 - DNA, 25 bp, Homo sapien
ccaagacaggcacagtcctttcctg

SEQ ID NO: 2988944 - DNA, 25 bp, Homo sapien
aagacaggcacagtcctttcctggc

SEQ ID NO: 2988945 - DNA, 25 bp, Homo sapien
aagccagccaagacaggcacagtcc

SEQ ID NO: 2988946 - DNA, 25 bp, Homo sapien
tcacttgagcacagccgtgggcagc

SEQ ID NO: 2988947 - DNA, 25 bp, Homo sapien
cacttgagcacagccgtgggcagct

SEQ ID NO: 2988948 - DNA, 25 bp, Homo sapien
agccgtgggcagcttgctggcctgc

SEQ ID NO: 2988949 - DNA, 25 bp, Homo sapien
cacagccgtgggcagcttgctggcc

SEQ ID NO: 2988950 - DNA, 25 bp, Homo sapien
tcttgccgacgtagtcacaagcgtg

SEQ ID NO: 2988951 - DNA, 25 bp, Homo sapien
ggtcagtcccctccctgcattaggg

SEQ ID NO: 2988952 - DNA, 25 bp, Homo sapien
caagcgtgtcgcgtggtgtgcaaac

SEQ ID NO: 2988953 - DNA, 25 bp, Homo sapien
tggaggcacagcctactttccctgt

SEQ ID NO: 2988954 - DNA, 25 bp, Homo sapien
tgagcaggggtcctaacacactggg

SEQ ID NO: 2988955 - DNA, 25 bp, Homo sapien
ccagggtggctgagcgtcagaccca

SEQ ID NO: 2988956 - DNA, 25 bp, Homo sapien
cttcagcaaggacgcggactcctgc

SEQ ID NO: 2988957 - DNA, 25 bp, Homo sapien
ggctgagcgtcagacccatccacat

SEQ ID NO: 2988958 - DNA, 25 bp, Homo sapien
gtaagtggcctctgttgttcaggag

SEQ ID NO: 2988959 - DNA, 25 bp, Homo sapien
tccaccagggctgcatgtcagtctc

SEQ ID NO: 2988960 - DNA, 25 bp, Homo sapien
tggacacttctctaggtgactggga

SEQ ID NO: 2988961 - DNA, 25 bp, Homo sapien
agtgcggcccaggtgtggacacttc

SEQ ID NO: 2988962 - DNA, 25 bp, Homo sapien
aatcctctagtgtataaggccccat

SEQ ID NO: 2988963 - DNA, 25 bp, Homo sapien
cctgtggtaccagaaatcctctagt

SEQ ID NO: 2988964 - DNA, 25 bp, Homo sapien
gaatggtcagttccctgtggtacca

SEQ ID NO: 2988965 - DNA, 25 bp, Homo sapien
ctgggaatggtcagttccctgtggt

SEQ ID NO: 2988966 - DNA, 25 bp, Homo sapien
aacacactgggccagcgacgtgggc

SEQ ID NO: 2988967 - DNA, 25 bp, Homo sapien
aggcaggaccggagagcacattggc

SEQ ID NO: 2988968 - DNA, 25 bp, Homo sapien
tctgggggtcctcagctctaggtct

SEQ ID NO: 2988969 - DNA, 25 bp, Homo sapien
ggataggccgggtagagaacacact

SEQ ID NO: 2988970 - DNA, 25 bp, Homo sapien
gctggcccggattcagatccaacca

SEQ ID NO: 2988971 - DNA, 25 bp, Homo sapien
accagagccatttgcctgtgactct

SEQ ID NO: 2988972 - DNA, 25 bp, Homo sapien
tgataatttggaaggctggcccgga

SEQ ID NO: 2988973 - DNA, 25 bp, Homo sapien
ctgcatgatggtgacgtcgggtgat

SEQ ID NO: 2988974 - DNA, 25 bp, Homo sapien
tctgcactcaggtatcaagaagtga

SEQ ID NO: 2988975 - DNA, 25 bp, Homo sapien
gcactcaggtatcaagaagtgaagc

SEQ ID NO: 2988976 - DNA, 25 bp, Homo sapien
tcaggtatcaagaagtgaagctgct

SEQ ID NO: 2988977 - DNA, 25 bp, Homo sapien
cctttctgcactcaggtatcaagaa

SEQ ID NO: 2988978 - DNA, 25 bp, Homo sapien
tcttcatccgttttagataatcttt

SEQ ID NO: 2988979 - DNA, 25 bp, Homo sapien
cagcttaatcttcatccgttttaga

SEQ ID NO: 2988980 - DNA, 25 bp, Homo sapien
atgttttccagcttaatcttcatcc

SEQ ID NO: 2988981 - DNA, 25 bp, Homo sapien
gttttccagcttaatcttcatccgt

SEQ ID NO: 2988982 - DNA, 25 bp, Homo sapien
ctcggtatcgggctctgtgagaccc

SEQ ID NO: 2988983 - DNA, 25 bp, Homo sapien
agggcactccactcgttccagggac

SEQ ID NO: 2988984 - DNA, 25 bp, Homo sapien
agggactgtgtcagaagactgctcg

SEQ ID NO: 2988985 - DNA, 25 bp, Homo sapien
ggctgcatgccgaggcctggagttt

SEQ ID NO: 2988986 - DNA, 25 bp, Homo sapien
gctgattttccccaggcaagacgca

SEQ ID NO: 2988987 - DNA, 25 bp, Homo sapien
attttccccaggcaagacgcagagt

SEQ ID NO: 2988988 - DNA, 25 bp, Homo sapien
ctgcacctgccgaccaagccccatc

SEQ ID NO: 2988989 - DNA, 25 bp, Homo sapien
gcacctgccgaccaagccccatcag

SEQ ID NO: 2988990 - DNA, 25 bp, Homo sapien
gggagccgcccagtgccgggtgctg

SEQ ID NO: 2988991 - DNA, 25 bp, Homo sapien
gaccagcaatgtacgctgtttcctg

SEQ ID NO: 2988992 - DNA, 25 bp, Homo sapien
cagaccagcaatgtacgctgtttcc

SEQ ID NO: 2988993 - DNA, 25 bp, Homo sapien
agcaatgtacgctgtttcctgttgg

SEQ ID NO: 2988994 - DNA, 25 bp, Homo sapien
cagcagctctggcactcctgccaat

SEQ ID NO: 2988995 - DNA, 25 bp, Homo sapien
cccagcagctctggcactcctgcca

SEQ ID NO: 2988996 - DNA, 25 bp, Homo sapien
gcagctctggcactcctgccaatct

SEQ ID NO: 2988997 - DNA, 25 bp, Homo sapien
gctctggcactcctgccaatctcac

SEQ ID NO: 2988998 - DNA, 25 bp, Homo sapien
gaggagttgggtgctctcttcccaa

SEQ ID NO: 2988999 - DNA, 25 bp, Homo sapien
tctcagaggagttgggtgctctctt

SEQ ID NO: 2989000 - DNA, 25 bp, Homo sapien
tcttcccaatccttgcggctttcct

SEQ ID NO: 2989001 - DNA, 25 bp, Homo sapien
tgcggctttcctcatgtcgcctgca

SEQ ID NO: 2989002 - DNA, 25 bp, Homo sapien
ctcagaacccttgctccccaccctg

SEQ ID NO: 2989003 - DNA, 25 bp, Homo sapien
agaacccttgctccccaccctgctc

SEQ ID NO: 2989004 - DNA, 25 bp, Homo sapien
cgggatctcagaacccttgctcccc

SEQ ID NO: 2989005 - DNA, 25 bp, Homo sapien
gggatctcagaacccttgctcccca

SEQ ID NO: 2989006 - DNA, 25 bp, Homo sapien
gggaactgtgcccctgcatggtgtc

SEQ ID NO: 2989007 - DNA, 25 bp, Homo sapien
tggcgtccttttgggcccaggcgca

SEQ ID NO: 2989008 - DNA, 25 bp, Homo sapien
gaatgccagtgtccaccggtggctg

SEQ ID NO: 2989009 - DNA, 25 bp, Homo sapien
gctgtccctgatgttccgagtggcg

SEQ ID NO: 2989010 - DNA, 25 bp, Homo sapien
tcatcctgggtgtgctgagtgtcct

SEQ ID NO: 2989011 - DNA, 25 bp, Homo sapien
cctcatcctgggtgtgctgagtgtc

SEQ ID NO: 2989012 - DNA, 25 bp, Homo sapien
cgtgaccgcgtatcctcatcctggg

SEQ ID NO: 2989013 - DNA, 25 bp, Homo sapien
ctcgtgaccgcgtatcctcatcctg

SEQ ID NO: 2989014 - DNA, 25 bp, Homo sapien
cctggctggcgtcttagggagggac

SEQ ID NO: 2989015 - DNA, 25 bp, Homo sapien
gattttagggacgtgggtgaggaca

SEQ ID NO: 2989016 - DNA, 25 bp, Homo sapien
tgccaggccgcttgtggattttagg

SEQ ID NO: 2989017 - DNA, 25 bp, Homo sapien
gaatggtcccacagagatcctgtat

SEQ ID NO: 2989018 - DNA, 25 bp, Homo sapien
gatgcctgtgtatctgtggtctccc

SEQ ID NO: 2989019 - DNA, 25 bp, Homo sapien
ggagacatagtcacctggcatgcag

SEQ ID NO: 2989020 - DNA, 25 bp, Homo sapien
ccaagatgcggctgggcaggtcatc

SEQ ID NO: 2989021 - DNA, 25 bp, Homo sapien
gtgtaaatcgtccttccaggccctg

SEQ ID NO: 2989022 - DNA, 25 bp, Homo sapien
catccacagaactgtccccagaata

SEQ ID NO: 2989023 - DNA, 25 bp, Homo sapien
aggaacaggcttggggaactctcca

SEQ ID NO: 2989024 - DNA, 25 bp, Homo sapien
gtccccagaatatccaggtccccca

SEQ ID NO: 2989025 - DNA, 25 bp, Homo sapien
aacaggcttggggaactctccaggg

SEQ ID NO: 2989026 - DNA, 25 bp, Homo sapien
ccttcgtggccacccttcagtggaa

SEQ ID NO: 2989027 - DNA, 25 bp, Homo sapien
gccaagcaggtctgtcccccttcgt

SEQ ID NO: 2989028 - DNA, 25 bp, Homo sapien
gcaccggccaagcaggtctgtcccc

SEQ ID NO: 2989029 - DNA, 25 bp, Homo sapien
gaaggatgggggtgtccgtcctggc

SEQ ID NO: 2989030 - DNA, 25 bp, Homo sapien
actcggaacctggtgacagctcgga

SEQ ID NO: 2989031 - DNA, 25 bp, Homo sapien
agcggcccgtctgccccttttgtgg

SEQ ID NO: 2989032 - DNA, 25 bp, Homo sapien
gcgctcgtctcctttggactcggaa

SEQ ID NO: 2989033 - DNA, 25 bp, Homo sapien
gggaaccagcgtgtgggagcacagg

SEQ ID NO: 2989034 - DNA, 25 bp, Homo sapien
caccacagcggggcaaacacagcca

SEQ ID NO: 2989035 - DNA, 25 bp, Homo sapien
ccaccacagcggggcaaacacagcc

SEQ ID NO: 2989036 - DNA, 25 bp, Homo sapien
atggacggcagctgggctctccgca

SEQ ID NO: 2989037 - DNA, 25 bp, Homo sapien
cagtgcctgggtgctgatggacgcc

SEQ ID NO: 2989038 - DNA, 25 bp, Homo sapien
ctccgcagaggggatggacaactgt

SEQ ID NO: 2989039 - DNA, 25 bp, Homo sapien
tggaaggggtgcatggacggcagct

SEQ ID NO: 2989040 - DNA, 25 bp, Homo sapien
agtcccttgggcacatcagtaagtg

SEQ ID NO: 2989041 - DNA, 25 bp, Homo sapien
tgttcttggcaggttccctcggagg

SEQ ID NO: 2989042 - DNA, 25 bp, Homo sapien
gggtcctcatactctaccacgctga

SEQ ID NO: 2989043 - DNA, 25 bp, Homo sapien
ccctcggagggtcctgatcagattc

SEQ ID NO: 2989044 - DNA, 25 bp, Homo sapien
gcctgggagggactgttgatgccct

SEQ ID NO: 2989045 - DNA, 25 bp, Homo sapien
cctgggagggactgttgatgccctg

SEQ ID NO: 2989046 - DNA, 25 bp, Homo sapien
tcatctgggccagcatgtgccgagc

SEQ ID NO: 2989047 - DNA, 25 bp, Homo sapien
tctgggccagcatgtgccgagctgg

SEQ ID NO: 2989048 - DNA, 25 bp, Homo sapien
tgggccagcatgtgccgagctgggt

SEQ ID NO: 2989049 - DNA, 25 bp, Homo sapien
catctgggccagcatgtgccgagct

SEQ ID NO: 2989050 - DNA, 25 bp, Homo sapien
tcttgcttctcgtgtggcctcggta

SEQ ID NO: 2989051 - DNA, 25 bp, Homo sapien
cctggaagccgtgagagtccatctc

SEQ ID NO: 2989052 - DNA, 25 bp, Homo sapien
gcagcctcgccttcactgtatgaaa

SEQ ID NO: 2989053 - DNA, 25 bp, Homo sapien
tatgaaagcgcttagtatacagcag

SEQ ID NO: 2989054 - DNA, 25 bp, Homo sapien
gctccgtccgggtgaatgagaacat

SEQ ID NO: 2989055 - DNA, 25 bp, Homo sapien
tgagaacatgtgtgtgcaggcggcc

SEQ ID NO: 2989056 - DNA, 25 bp, Homo sapien
tccgtccgggtgaatgagaacatgt

SEQ ID NO: 2989057 - DNA, 25 bp, Homo sapien
gaacatgtgtgtgcaggcggcccca

SEQ ID NO: 2989058 - DNA, 25 bp, Homo sapien
gacgtctcaccttgcagggtgggcc

SEQ ID NO: 2989059 - DNA, 25 bp, Homo sapien
ggggcggccttgtccgacgtctcac

SEQ ID NO: 2989060 - DNA, 25 bp, Homo sapien
cttgtccgacgtctcaccttgcagg

SEQ ID NO: 2989061 - DNA, 25 bp, Homo sapien
tccgacgtctcaccttgcagggtgg

SEQ ID NO: 2989062 - DNA, 25 bp, Homo sapien
ctggtacagaaggattcctggagcc

SEQ ID NO: 2989063 - DNA, 25 bp, Homo sapien
cctcggaaatccatagagcctttgg

SEQ ID NO: 2989064 - DNA, 25 bp, Homo sapien
cctcctcggaaatccatagagcctt

SEQ ID NO: 2989065 - DNA, 25 bp, Homo sapien
tgggggaggcccatctttgtcctgc

SEQ ID NO: 2989066 - DNA, 25 bp, Homo sapien
cggaaatccatagagcctttggagg

SEQ ID NO: 2989067 - DNA, 25 bp, Homo sapien
tgggtcccttaccagctcaacagag

SEQ ID NO: 2989068 - DNA, 25 bp, Homo sapien
caagcaccacagtaggccctgagtt

SEQ ID NO: 2989069 - DNA, 25 bp, Homo sapien
acagccacagaagggcaatggagca

SEQ ID NO: 2989070 - DNA, 25 bp, Homo sapien
tctttgtatccaagggccatgccct

SEQ ID NO: 2989071 - DNA, 25 bp, Homo sapien
ttcttgtgtcaccagcgcagctgga

SEQ ID NO: 2989072 - DNA, 25 bp, Homo sapien
ccagcgcagctggaatatggccatt

SEQ ID NO: 2989073 - DNA, 25 bp, Homo sapien
ttggtttcacagtccctccggggca

SEQ ID NO: 2989074 - DNA, 25 bp, Homo sapien
agaccagaaggactgactccgactt

SEQ ID NO: 2989075 - DNA, 25 bp, Homo sapien
cccctggctctccaaccggtatggg

SEQ ID NO: 2989076 - DNA, 25 bp, Homo sapien
cagaggggggtaagctgacggccat

SEQ ID NO: 2989077 - DNA, 25 bp, Homo sapien
tctccaaccggtatgggccagagga

SEQ ID NO: 2989078 - DNA, 25 bp, Homo sapien
gcatgggtgtgccagtgtgccccct

SEQ ID NO: 2989079 - DNA, 25 bp, Homo sapien
ggagcccggcagtgatggccgagga

SEQ ID NO: 2989080 - DNA, 25 bp, Homo sapien
gctgctcggtggaggatcggcgggt

SEQ ID NO: 2989081 - DNA, 25 bp, Homo sapien
gaggagaaagctccggccctggaca

SEQ ID NO: 2989082 - DNA, 25 bp, Homo sapien
tggacacaggataagcatggctggt

SEQ ID NO: 2989083 - DNA, 25 bp, Homo sapien
cagaaaagcggaagggtcctgtctc

SEQ ID NO: 2989084 - DNA, 25 bp, Homo sapien
tcagaaaagcggaagggtcctgtct

SEQ ID NO: 2989085 - DNA, 25 bp, Homo sapien
agaaaagcggaagggtcctgtctcg

SEQ ID NO: 2989086 - DNA, 25 bp, Homo sapien
cagcccccggaggtaaaggccacag

SEQ ID NO: 2989087 - DNA, 25 bp, Homo sapien
cagcagcccccggaggtaaaggcca

SEQ ID NO: 2989088 - DNA, 25 bp, Homo sapien
ctgcagcagcccccggaggtaaagg

SEQ ID NO: 2989089 - DNA, 25 bp, Homo sapien
ccggaggtaaaggccacaggaggag

SEQ ID NO: 2989090 - DNA, 25 bp, Homo sapien
gacaccccgatttctccagagctag

SEQ ID NO: 2989091 - DNA, 25 bp, Homo sapien
gctaggtgaatgcatccctgacttg

SEQ ID NO: 2989092 - DNA, 25 bp, Homo sapien
gatttctccagagctaggtgaatgc

SEQ ID NO: 2989093 - DNA, 25 bp, Homo sapien
ggaagacaccccgatttctccagag

SEQ ID NO: 2989094 - DNA, 25 bp, Homo sapien
agcatgctcccgcactccgtgccct

SEQ ID NO: 2989095 - DNA, 25 bp, Homo sapien
tgctgtccaactccggcagcatgct

SEQ ID NO: 2989096 - DNA, 25 bp, Homo sapien
gctccatggcgaactcgggctgcct

SEQ ID NO: 2989097 - DNA, 25 bp, Homo sapien
gcgcgcgcacactccgagggacgca

SEQ ID NO: 2989098 - DNA, 25 bp, Homo sapien
aggtgatgagggcatggttcctgcc

SEQ ID NO: 2989099 - DNA, 25 bp, Homo sapien
agaatctgaaaagcttcgtaccgcc

SEQ ID NO: 2989100 - DNA, 25 bp, Homo sapien
cttcgtaccgccctggtgccaggta

SEQ ID NO: 2989101 - DNA, 25 bp, Homo sapien
tgaaaagcttcgtaccgccctggtg

SEQ ID NO: 2989102 - DNA, 25 bp, Homo sapien
actgtcctcacggcgcaggggaagc

SEQ ID NO: 2989103 - DNA, 25 bp, Homo sapien
gaagcctgaggatggtcggcctggg

SEQ ID NO: 2989104 - DNA, 25 bp, Homo sapien
gcacactgtcctcacggcgcagggg

SEQ ID NO: 2989105 - DNA, 25 bp, Homo sapien
gcctgaggatggtcggcctgggcgc

SEQ ID NO: 2989106 - DNA, 25 bp, Homo sapien
gcggaaagcacgatgtatttgtcga

SEQ ID NO: 2989107 - DNA, 25 bp, Homo sapien
gcttggcgcggccaagcacagctgc

SEQ ID NO: 2989108 - DNA, 25 bp, Homo sapien
tttgtcgatgaaggctcggcttggc

SEQ ID NO: 2989109 - DNA, 25 bp, Homo sapien
gaaggtctggctctgcggaaagcac

SEQ ID NO: 2989110 - DNA, 25 bp, Homo sapien
cccgctgagccggaaggtgagtgct

SEQ ID NO: 2989111 - DNA, 25 bp, Homo sapien
gggctgggcttagctttccctctgc

SEQ ID NO: 2989112 - DNA, 25 bp, Homo sapien
gacagtgccagtgggtgggggaccc

SEQ ID NO: 2989113 - DNA, 25 bp, Homo sapien
ggaaggtgagtgctggccccggcag

SEQ ID NO: 2989114 - DNA, 25 bp, Homo sapien
gatgttccttttgctcggtgtagag

SEQ ID NO: 2989115 - DNA, 25 bp, Homo sapien
tccttttgctcggtgtagagctcgc

SEQ ID NO: 2989116 - DNA, 25 bp, Homo sapien
ccctggggtggaacatcacagtgct

SEQ ID NO: 2989117 - DNA, 25 bp, Homo sapien
tttgctcggtgtagagctcgctcgc

SEQ ID NO: 2989118 - DNA, 25 bp, Homo sapien
agctgccttaaatacagtctctgtt

SEQ ID NO: 2989119 - DNA, 25 bp, Homo sapien
gctgccttaaatacagtctctgttg

SEQ ID NO: 2989120 - DNA, 25 bp, Homo sapien
ggtaaaaggtggccatcagcagggc

SEQ ID NO: 2989121 - DNA, 25 bp, Homo sapien
tcaacaggcgaggatgttttggtaa

SEQ ID NO: 2989122 - DNA, 25 bp, Homo sapien
catcagcagggctagccgctggcca

SEQ ID NO: 2989123 - DNA, 25 bp, Homo sapien
acaggcgaggatgttttggtaaaag

SEQ ID NO: 2989124 - DNA, 25 bp, Homo sapien
gaggccagacagatagtcctcacag

SEQ ID NO: 2989125 - DNA, 25 bp, Homo sapien
gccagacagatagtcctcacagcag

SEQ ID NO: 2989126 - DNA, 25 bp, Homo sapien
acagaggccagacagatagtcctca

SEQ ID NO: 2989127 - DNA, 25 bp, Homo sapien
ggccagacagatagtcctcacagca

SEQ ID NO: 2989128 - DNA, 25 bp, Homo sapien
aggaaactgttggccccacagaagc

SEQ ID NO: 2989129 - DNA, 25 bp, Homo sapien
tcagccaggaaggaaactgttggcc

SEQ ID NO: 2989130 - DNA, 25 bp, Homo sapien
gaaggaaactgttggccccacagaa

SEQ ID NO: 2989131 - DNA, 25 bp, Homo sapien
caggaaggaaactgttggccccaca

SEQ ID NO: 2989132 - DNA, 25 bp, Homo sapien
cgttccactccattggcatagataa

SEQ ID NO: 2989133 - DNA, 25 bp, Homo sapien
ctgaattatcagtggaacgttccac

SEQ ID NO: 2989134 - DNA, 25 bp, Homo sapien
gataattgagagttaactgtacttt

SEQ ID NO: 2989135 - DNA, 25 bp, Homo sapien
ttggcatagataattgagagttaac

SEQ ID NO: 2989136 - DNA, 25 bp, Homo sapien
acagaggcactcgggatggattcac

SEQ ID NO: 2989137 - DNA, 25 bp, Homo sapien
agaggcactcgggatggattcactc

SEQ ID NO: 2989138 - DNA, 25 bp, Homo sapien
aggcactcgggatggattcactcgg

SEQ ID NO: 2989139 - DNA, 25 bp, Homo sapien
cactcgggatggattcactcggcat

SEQ ID NO: 2989140 - DNA, 25 bp, Homo sapien
gccagaggcggttgtcacccatgat

SEQ ID NO: 2989141 - DNA, 25 bp, Homo sapien
tgtgcctgcaaggtcgcctcatgtg

SEQ ID NO: 2989142 - DNA, 25 bp, Homo sapien
aaccgtagcacttccgggatgacaa

SEQ ID NO: 2989143 - DNA, 25 bp, Homo sapien
gatggtccagcgatgcaaccgtagc

SEQ ID NO: 2989144 - DNA, 25 bp, Homo sapien
gagacccccaagatctgcaactcct

SEQ ID NO: 2989145 - DNA, 25 bp, Homo sapien
aagatctgcaactcctgcagtaggg

SEQ ID NO: 2989146 - DNA, 25 bp, Homo sapien
ctgggctgatttcccccactgagag

SEQ ID NO: 2989147 - DNA, 25 bp, Homo sapien
tccctcctctgagtctgaccctccc

SEQ ID NO: 2989148 - DNA, 25 bp, Homo sapien
ggcagccctaagtcagtgactgggt

SEQ ID NO: 2989149 - DNA, 25 bp, Homo sapien
cctaagtcagtgactgggttcaggc

SEQ ID NO: 2989150 - DNA, 25 bp, Homo sapien
cacagaggtcactggcagccctaag

SEQ ID NO: 2989151 - DNA, 25 bp, Homo sapien
gaggtcactggcagccctaagtcag

SEQ ID NO: 2989152 - DNA, 25 bp, Homo sapien
caggaggaggaggatgagacagtaa

SEQ ID NO: 2989153 - DNA, 25 bp, Homo sapien
cggcaggaggaggaggatgagacag

SEQ ID NO: 2989154 - DNA, 25 bp, Homo sapien
ctgtgagtgaagccggcaggaggag

SEQ ID NO: 2989155 - DNA, 25 bp, Homo sapien
ccggcaggaggaggaggatgagaca

SEQ ID NO: 2989156 - DNA, 25 bp, Homo sapien
gggaccgaggtcattctcctggtaa

SEQ ID NO: 2989157 - DNA, 25 bp, Homo sapien
gtgcacccaggggaccgaggtcatt

SEQ ID NO: 2989158 - DNA, 25 bp, Homo sapien
cctggtaatgactgctgagattcca

SEQ ID NO: 2989159 - DNA, 25 bp, Homo sapien
gtcattctcctggtaatgactgctg

SEQ ID NO: 2989160 - DNA, 25 bp, Homo sapien
tccaccaaagtagttccagcgcgtc

SEQ ID NO: 2989161 - DNA, 25 bp, Homo sapien
cagcgcgtcgacctcgttgactgaa

SEQ ID NO: 2989162 - DNA, 25 bp, Homo sapien
caaggagctgttcactggactggta

SEQ ID NO: 2989163 - DNA, 25 bp, Homo sapien
tgtcggtatgtgtgcgcttcaagga

SEQ ID NO: 2989164 - DNA, 25 bp, Homo sapien
cccaggactgagaccgccggacgct

SEQ ID NO: 2989165 - DNA, 25 bp, Homo sapien
gactgagaccgccggacgctggaga

SEQ ID NO: 2989166 - DNA, 25 bp, Homo sapien
tgttggaacctccaaaactcggcac

SEQ ID NO: 2989167 - DNA, 25 bp, Homo sapien
gtgttggaacctccaaaactcggca

SEQ ID NO: 2989168 - DNA, 25 bp, Homo sapien
cagaccagcccgcatcgggccgtgc

SEQ ID NO: 2989169 - DNA, 25 bp, Homo sapien
agcccgcatcgggccgtgctgcctg

SEQ ID NO: 2989170 - DNA, 25 bp, Homo sapien
agaccagcccgcatcgggccgtgct

SEQ ID NO: 2989171 - DNA, 25 bp, Homo sapien
accagcccgcatcgggccgtgctgc

SEQ ID NO: 2989172 - DNA, 25 bp, Homo sapien
aaattgggaacgggcagcgccagga

SEQ ID NO: 2989173 - DNA, 25 bp, Homo sapien
gagaaattgggaacgggcagcgcca

SEQ ID NO: 2989174 - DNA, 25 bp, Homo sapien
agaaattgggaacgggcagcgccag

SEQ ID NO: 2989175 - DNA, 25 bp, Homo sapien
ggagaaattgggaacgggcagcgcc

SEQ ID NO: 2989176 - DNA, 25 bp, Homo sapien
tattttggggacttgacgcgaggcc

SEQ ID NO: 2989177 - DNA, 25 bp, Homo sapien
cccgtctggctgttgctggatttag

SEQ ID NO: 2989178 - DNA, 25 bp, Homo sapien
gaagacacagcttcccttgtggaat

SEQ ID NO: 2989179 - DNA, 25 bp, Homo sapien
tcctggtagcagttgcgggtgcata

SEQ ID NO: 2989180 - DNA, 25 bp, Homo sapien
gctgggcggcgccatgcgagggttg

SEQ ID NO: 2989181 - DNA, 25 bp, Homo sapien
gttggctgtagttcaccgggcctcc

SEQ ID NO: 2989182 - DNA, 25 bp, Homo sapien
gctggcaccaccttcggaaacggaa

SEQ ID NO: 2989183 - DNA, 25 bp, Homo sapien
tcggaaacggaaccaagtctgatcc

SEQ ID NO: 2989184 - DNA, 25 bp, Homo sapien
gagtctgagtggtcggtcagcagtg

SEQ ID NO: 2989185 - DNA, 25 bp, Homo sapien
ctgtgagctccgtgtgggcaggaga

SEQ ID NO: 2989186 - DNA, 25 bp, Homo sapien
ccgtgtgggcaggagatgagtctga

SEQ ID NO: 2989187 - DNA, 25 bp, Homo sapien
caggagatgagtctgagtggtcggt

SEQ ID NO: 2989188 - DNA, 25 bp, Homo sapien
tcaggacgacgtccaaatgcctgca

SEQ ID NO: 2989189 - DNA, 25 bp, Homo sapien
gacgacgtccaaatgcctgcaccag

SEQ ID NO: 2989190 - DNA, 25 bp, Homo sapien
gacgtccaaatgcctgcaccagcat

SEQ ID NO: 2989191 - DNA, 25 bp, Homo sapien
aggacgacgtccaaatgcctgcacc

SEQ ID NO: 2989192 - DNA, 25 bp, Homo sapien
tcaagggcagcactggagatattgt

SEQ ID NO: 2989193 - DNA, 25 bp, Homo sapien
tgatttctgtgctcattgtgaaggg

SEQ ID NO: 2989194 - DNA, 25 bp, Homo sapien
gctggcaaacttgcggccaatgatt

SEQ ID NO: 2989195 - DNA, 25 bp, Homo sapien
catgggcatggcttttcaagggcag

SEQ ID NO: 2989196 - DNA, 25 bp, Homo sapien
gctgaggccgcaggagccatggcag

SEQ ID NO: 2989197 - DNA, 25 bp, Homo sapien
ggcagccgtggagaagggacggatg

SEQ ID NO: 2989198 - DNA, 25 bp, Homo sapien
agccgtggagaagggacggatggcc

SEQ ID NO: 2989199 - DNA, 25 bp, Homo sapien
gaggccgcaggagccatggcagccg

SEQ ID NO: 2989200 - DNA, 25 bp, Homo sapien
ttttgggtatgtaccaagcgtggac

SEQ ID NO: 2989201 - DNA, 25 bp, Homo sapien
gcggccgcttccctgattgggtctc

SEQ ID NO: 2989202 - DNA, 25 bp, Homo sapien
tgtggagccgcggttccgaaatgat

SEQ ID NO: 2989203 - DNA, 25 bp, Homo sapien
gcgtggactgcgtgttgctttctca

SEQ ID NO: 2989204 - DNA, 25 bp, Homo sapien
ttgatgagcgctggaatcaggacgc

SEQ ID NO: 2989205 - DNA, 25 bp, Homo sapien
ggaatcaggacgctgtagttcaact

SEQ ID NO: 2989206 - DNA, 25 bp, Homo sapien
ccctgcttgatgagcgctggaatca

SEQ ID NO: 2989207 - DNA, 25 bp, Homo sapien
cgctggaatcaggacgctgtagttc

SEQ ID NO: 2989208 - DNA, 25 bp, Homo sapien
tcaggctgccggtagaaatcaggct

SEQ ID NO: 2989209 - DNA, 25 bp, Homo sapien
ctagaaatcaggctgccggtagaaa

SEQ ID NO: 2989210 - DNA, 25 bp, Homo sapien
gcaggtagaaatcaggcagcaggta

SEQ ID NO: 2989211 - DNA, 25 bp, Homo sapien
agaaatcaggctgccggtagaaatc

SEQ ID NO: 2989212 - DNA, 25 bp, Homo sapien
gacacaggctacagaggaaactgct

SEQ ID NO: 2989213 - DNA, 25 bp, Homo sapien
cctgtgagcccatttttcgagggtg

SEQ ID NO: 2989214 - DNA, 25 bp, Homo sapien
caccccagaatttagaggatgcagg

SEQ ID NO: 2989215 - DNA, 25 bp, Homo sapien
gacaggcagcttgtttgaggaagcc

SEQ ID NO: 2989216 - DNA, 25 bp, Homo sapien
agattgggagacagccgaactttcc

SEQ ID NO: 2989217 - DNA, 25 bp, Homo sapien
ggcatgttttgcataggtgacgtgt

SEQ ID NO: 2989218 - DNA, 25 bp, Homo sapien
ccgaactttccaaagagggagagag

SEQ ID NO: 2989219 - DNA, 25 bp, Homo sapien
gttgactgtgcaagccatgtgggct

SEQ ID NO: 2989220 - DNA, 25 bp, Homo sapien
tccccgtgaataccaaccattacaa

SEQ ID NO: 2989221 - DNA, 25 bp, Homo sapien
ctccccgtgaataccaaccattaca

SEQ ID NO: 2989222 - DNA, 25 bp, Homo sapien
gatttctgacatccatggggacacc

SEQ ID NO: 2989223 - DNA, 25 bp, Homo sapien
ggatttctgacatccatggggacac

SEQ ID NO: 2989224 - DNA, 25 bp, Homo sapien
atttctgacatccatggggacacct

SEQ ID NO: 2989225 - DNA, 25 bp, Homo sapien
ttaagacagaacaggtgacgagaga

SEQ ID NO: 2989226 - DNA, 25 bp, Homo sapien
taagacagaacaggtgacgagagag

SEQ ID NO: 2989227 - DNA, 25 bp, Homo sapien
cttaagacagaacaggtgacgagag

SEQ ID NO: 2989228 - DNA, 25 bp, Homo sapien
agacagaacaggtgacgagagagac

SEQ ID NO: 2989229 - DNA, 25 bp, Homo sapien
ctccggagcggacagctttgccaag

SEQ ID NO: 2989230 - DNA, 25 bp, Homo sapien
gaggagaggcgagatagtgaggtct

SEQ ID NO: 2989231 - DNA, 25 bp, Homo sapien
agggaacacggagagcccacggata

SEQ ID NO: 2989232 - DNA, 25 bp, Homo sapien
cacggatagcgccagggaggagagg

SEQ ID NO: 2989233 - DNA, 25 bp, Homo sapien
caaatcagctcccaaacgctcaagt

SEQ ID NO: 2989234 - DNA, 25 bp, Homo sapien
ggctttctggatgtatccagttggg

SEQ ID NO: 2989235 - DNA, 25 bp, Homo sapien
gcatcacggaacctgaagagggtcc

SEQ ID NO: 2989236 - DNA, 25 bp, Homo sapien
gatgtatccagttgggtggttttgt

SEQ ID NO: 2989237 - DNA, 25 bp, Homo sapien
tttgacagagtctcattcacactgt

SEQ ID NO: 2989238 - DNA, 25 bp, Homo sapien
tctgcctaccgtgctcaagccattc

SEQ ID NO: 2989239 - DNA, 25 bp, Homo sapien
cacccaggctggagtgcgatggcac

SEQ ID NO: 2989240 - DNA, 25 bp, Homo sapien
aacctctgcctaccgtgctcaagcc

SEQ ID NO: 2989241 - DNA, 25 bp, Homo sapien
aatcctttatctgggcacagcatct

SEQ ID NO: 2989242 - DNA, 25 bp, Homo sapien
ccaatcctttatctgggcacagcat

SEQ ID NO: 2989243 - DNA, 25 bp, Homo sapien
ggacacaggtcatcacaagtgaaac

SEQ ID NO: 2989244 - DNA, 25 bp, Homo sapien
gcatctccagctgattaggagcttg

SEQ ID NO: 2989245 - DNA, 25 bp, Homo sapien
ccgcaagtgttcaccacgaggaggg

SEQ ID NO: 2989246 - DNA, 25 bp, Homo sapien
aggcgcccgcaagtgttcaccacga

SEQ ID NO: 2989247 - DNA, 25 bp, Homo sapien
gcccgcaagtgttcaccacgaggag

SEQ ID NO: 2989248 - DNA, 25 bp, Homo sapien
caagtgttcaccacgaggagggcag

SEQ ID NO: 2989249 - DNA, 25 bp, Homo sapien
agtagacaggaaggccgccgggtgt

SEQ ID NO: 2989250 - DNA, 25 bp, Homo sapien
tgcagttttccgtgggagtagacag

SEQ ID NO: 2989251 - DNA, 25 bp, Homo sapien
gaaggccgccgggtgttggcctcac

SEQ ID NO: 2989252 - DNA, 25 bp, Homo sapien
tgtgtgtcagggttagatgcagttt

SEQ ID NO: 2989253 - DNA, 25 bp, Homo sapien
gcagaggcagctcgggctctgctgc

SEQ ID NO: 2989254 - DNA, 25 bp, Homo sapien
ttttcctgaatagtttttgacagat

SEQ ID NO: 2989255 - DNA, 25 bp, Homo sapien
tttgacagatatgagcatgttgaac

SEQ ID NO: 2989256 - DNA, 25 bp, Homo sapien
gcctcggggaaaattggctgaataa

SEQ ID NO: 2989257 - DNA, 25 bp, Homo sapien
gacagatatgagcatgttgaacatc

SEQ ID NO: 2989258 - DNA, 25 bp, Homo sapien
tccacgtcaacatcagttagttgtg

SEQ ID NO: 2989259 - DNA, 25 bp, Homo sapien
caacatcagttagttgtgctcccct

SEQ ID NO: 2989260 - DNA, 25 bp, Homo sapien
cgtcaacatcagttagttgtgctcc

SEQ ID NO: 2989261 - DNA, 25 bp, Homo sapien
ccttccacgtcaacatcagttagtt

SEQ ID NO: 2989262 - DNA, 25 bp, Homo sapien
ctcctcaggtagcaccccctccacc

SEQ ID NO: 2989263 - DNA, 25 bp, Homo sapien
gctgcaggaactcgtacaatgccaa

SEQ ID NO: 2989264 - DNA, 25 bp, Homo sapien
gcaggaactcgtacaatgccaaata

SEQ ID NO: 2989265 - DNA, 25 bp, Homo sapien
tcctcaggtagcaccccctccacca

SEQ ID NO: 2989266 - DNA, 25 bp, Homo sapien
gacagaacctctaatatatcaccca

SEQ ID NO: 2989267 - DNA, 25 bp, Homo sapien
tggtcgactccacagtcccaaatga

SEQ ID NO: 2989268 - DNA, 25 bp, Homo sapien
tatatcacccaagcaattgactgtg

SEQ ID NO: 2989269 - DNA, 25 bp, Homo sapien
ctgatgttgggcgttgaggctgcac

SEQ ID NO: 2989270 - DNA, 25 bp, Homo sapien
ccagagtgagtagggtgcaggcagg

SEQ ID NO: 2989271 - DNA, 25 bp, Homo sapien
cagcaagcccagagtgagtagggtg

SEQ ID NO: 2989272 - DNA, 25 bp, Homo sapien
gggtgaaaaccaggcccactgtgcg

SEQ ID NO: 2989273 - DNA, 25 bp, Homo sapien
tgcaggcagggggtgaaaaccaggc

SEQ ID NO: 2989274 - DNA, 25 bp, Homo sapien
tcgtggaagagcaatgaccgtgaag

SEQ ID NO: 2989275 - DNA, 25 bp, Homo sapien
tcatggagaagtcgtggaagagcaa

SEQ ID NO: 2989276 - DNA, 25 bp, Homo sapien
cagtgtttgtgtggtcaggaataac

SEQ ID NO: 2989277 - DNA, 25 bp, Homo sapien
ggaataacatcatggagaagtcgtg

SEQ ID NO: 2989278 - DNA, 25 bp, Homo sapien
ggactggacggccatctggacacca

SEQ ID NO: 2989279 - DNA, 25 bp, Homo sapien
tctggacaccatcattgctgaactc

SEQ ID NO: 2989280 - DNA, 25 bp, Homo sapien
tggacggccatctggacaccatcat

SEQ ID NO: 2989281 - DNA, 25 bp, Homo sapien
ggccatctggacaccatcattgctg

SEQ ID NO: 2989282 - DNA, 25 bp, Homo sapien
tctctgtcccacacgttgagtgacg

SEQ ID NO: 2989283 - DNA, 25 bp, Homo sapien
gtaaacctacatgcaggagttcctg

SEQ ID NO: 2989284 - DNA, 25 bp, Homo sapien
tagtaagatctaggaggtgccagag

SEQ ID NO: 2989285 - DNA, 25 bp, Homo sapien
ttgagtgacgttggcaccagtaacc

SEQ ID NO: 2989286 - DNA, 25 bp, Homo sapien
ctgaaacaaggagaaggcaaccaga

SEQ ID NO: 2989287 - DNA, 25 bp, Homo sapien
gcaaccagagctggcgctttgcagc

SEQ ID NO: 2989288 - DNA, 25 bp, Homo sapien
tggcgctttgcagccaagaagcaag

SEQ ID NO: 2989289 - DNA, 25 bp, Homo sapien
caagaaggagcctcgccctattggg

SEQ ID NO: 2989290 - DNA, 25 bp, Homo sapien
ctgcagagttcatcagcccagcaag

SEQ ID NO: 2989291 - DNA, 25 bp, Homo sapien
tgccaacagctttggcagccaggcc

SEQ ID NO: 2989292 - DNA, 25 bp, Homo sapien
catcagcccagcaagtgtctgccaa

SEQ ID NO: 2989293 - DNA, 25 bp, Homo sapien
cccagcaagtgtctgccaacagctt

SEQ ID NO: 2989294 - DNA, 25 bp, Homo sapien
ctctcgcactgagggtctccaaggg

SEQ ID NO: 2989295 - DNA, 25 bp, Homo sapien
tctccaagggcattcgtggcagtaa

SEQ ID NO: 2989296 - DNA, 25 bp, Homo sapien
gaaagtctgcttggaacagagctgc

SEQ ID NO: 2989297 - DNA, 25 bp, Homo sapien
tcactgccgagcgtggcatctggca

SEQ ID NO: 2989298 - DNA, 25 bp, Homo sapien
aaagcttttgatgaggtccttcatg

SEQ ID NO: 2989299 - DNA, 25 bp, Homo sapien
gcttttgatgaggtccttcatgaga

SEQ ID NO: 2989300 - DNA, 25 bp, Homo sapien
ttttgatgaggtccttcatgagaga

SEQ ID NO: 2989301 - DNA, 25 bp, Homo sapien
aagcttttgatgaggtccttcatga

SEQ ID NO: 2989302 - DNA, 25 bp, Homo sapien
atcccagcccactaaatctccggaa

SEQ ID NO: 2989303 - DNA, 25 bp, Homo sapien
gcccactaaatctccggaatgggag

SEQ ID NO: 2989304 - DNA, 25 bp, Homo sapien
ccagcccactaaatctccggaatgg

SEQ ID NO: 2989305 - DNA, 25 bp, Homo sapien
taaatctccggaatgggagagaatt

SEQ ID NO: 2989306 - DNA, 25 bp, Homo sapien
cggatgatgcggagggttgaaagag

SEQ ID NO: 2989307 - DNA, 25 bp, Homo sapien
gagatgggagagacaacggatgatg

SEQ ID NO: 2989308 - DNA, 25 bp, Homo sapien
ggcagccaggaaacgcatctactcc

SEQ ID NO: 2989309 - DNA, 25 bp, Homo sapien
aacgcatctactccgcctccaggag

SEQ ID NO: 2989310 - DNA, 25 bp, Homo sapien
aggggacaccctcgcagactcgcag

SEQ ID NO: 2989311 - DNA, 25 bp, Homo sapien
ctcgcagactcgcagacgagaagcc

SEQ ID NO: 2989312 - DNA, 25 bp, Homo sapien
accctcgcagactcgcagacgagaa

SEQ ID NO: 2989313 - DNA, 25 bp, Homo sapien
cagactcgcagacgagaagccactc

SEQ ID NO: 2989314 - DNA, 25 bp, Homo sapien
ctagatggtctgcaacccgccagtc

SEQ ID NO: 2989315 - DNA, 25 bp, Homo sapien
gcaacccgccagtcctgagcagatg

SEQ ID NO: 2989316 - DNA, 25 bp, Homo sapien
aacccgccagtcctgagcagatgct

SEQ ID NO: 2989317 - DNA, 25 bp, Homo sapien
gatggtctgcaacccgccagtcctg

SEQ ID NO: 2989318 - DNA, 25 bp, Homo sapien
ctaattaggcccaggaccaatgtcc

SEQ ID NO: 2989319 - DNA, 25 bp, Homo sapien
taattaggcccaggaccaatgtcct

SEQ ID NO: 2989320 - DNA, 25 bp, Homo sapien
agctgacgatgggccactgccctat

SEQ ID NO: 2989321 - DNA, 25 bp, Homo sapien
tgtggatgcatcttcgtcctggaca

SEQ ID NO: 2989322 - DNA, 25 bp, Homo sapien
cctggacagggtagaggcttaagtc

SEQ ID NO: 2989323 - DNA, 25 bp, Homo sapien
ctgccctatgcatgtggatgcatct

SEQ ID NO: 2989324 - DNA, 25 bp, Homo sapien
ccgggccgggccatgctgtgccgtg

SEQ ID NO: 2989325 - DNA, 25 bp, Homo sapien
cccactggaatctcagcatcaaggt

SEQ ID NO: 2989326 - DNA, 25 bp, Homo sapien
gggccgggccatgctgtgccgtgag

SEQ ID NO: 2989327 - DNA, 25 bp, Homo sapien
acccactggaatctcagcatcaagg

SEQ ID NO: 2989328 - DNA, 25 bp, Homo sapien
gatgatgaaattaacgggctgcacc

SEQ ID NO: 2989329 - DNA, 25 bp, Homo sapien
cgtttccccgatgatggcttccttc

SEQ ID NO: 2989330 - DNA, 25 bp, Homo sapien
cagcctaatggcttgttcgtttccc

SEQ ID NO: 2989331 - DNA, 25 bp, Homo sapien
ccacggacccgctcagtgatgatga

SEQ ID NO: 2989332 - DNA, 25 bp, Homo sapien
tgctcacggaaacatggcccagatg

SEQ ID NO: 2989333 - DNA, 25 bp, Homo sapien
gcaaatgatacgatggtcctggaga

SEQ ID NO: 2989334 - DNA, 25 bp, Homo sapien
gcccagatgagaatcaactgtcctg

SEQ ID NO: 2989335 - DNA, 25 bp, Homo sapien
ttggaaacggactgtccactcgtgc

SEQ ID NO: 2989336 - DNA, 25 bp, Homo sapien
caaaatactgatcaccagagaaagc

SEQ ID NO: 2989337 - DNA, 25 bp, Homo sapien
aattcagagcaaccccaaaatactg

SEQ ID NO: 2989338 - DNA, 25 bp, Homo sapien
tggaagattcatagtaattcagagc

SEQ ID NO: 2989339 - DNA, 25 bp, Homo sapien
tcctgtggttttcaggcaacccctc

SEQ ID NO: 2989340 - DNA, 25 bp, Homo sapien
gggcagagctgaaccaaggcctcct

SEQ ID NO: 2989341 - DNA, 25 bp, Homo sapien
ttaatgaaggcagatccgcaatggc

SEQ ID NO: 2989342 - DNA, 25 bp, Homo sapien
tgataaatgtgtgtcccgtgaggca

SEQ ID NO: 2989343 - DNA, 25 bp, Homo sapien
ttcctgagcactggccgctgtttcc

SEQ ID NO: 2989344 - DNA, 25 bp, Homo sapien
tcctgaccctctccatcaagtgaag

SEQ ID NO: 2989345 - DNA, 25 bp, Homo sapien
caagcatggacttggcgacctggtg

SEQ ID NO: 2989346 - DNA, 25 bp, Homo sapien
cctggtggccgcagaatcttcctga

SEQ ID NO: 2989347 - DNA, 25 bp, Homo sapien
gcttgttgaccgctgcacccttggt

SEQ ID NO: 2989348 - DNA, 25 bp, Homo sapien
acatgtgcaaagtccttcttgacat

SEQ ID NO: 2989349 - DNA, 25 bp, Homo sapien
gcaaagtccttcttgacataaaggg

SEQ ID NO: 2989350 - DNA, 25 bp, Homo sapien
ttaaagggcttggtccacatgtgca

SEQ ID NO: 2989351 - DNA, 25 bp, Homo sapien
tggtccacatgtgcaaagtccttct

SEQ ID NO: 2989352 - DNA, 25 bp, Homo sapien
aagagctttcactgactcaccgttc

SEQ ID NO: 2989353 - DNA, 25 bp, Homo sapien
gagctttcactgactcaccgttcct

SEQ ID NO: 2989354 - DNA, 25 bp, Homo sapien
ctcatgtctggggaacttacaatcg

SEQ ID NO: 2989355 - DNA, 25 bp, Homo sapien
gaaagagctttcactgactcaccgt

SEQ ID NO: 2989356 - DNA, 25 bp, Homo sapien
agaggctgaaggtatttggtgcagc

SEQ ID NO: 2989357 - DNA, 25 bp, Homo sapien
cagaggctgaaggtatttggtgcag

SEQ ID NO: 2989358 - DNA, 25 bp, Homo sapien
tcagaggctgaaggtatttggtgca

SEQ ID NO: 2989359 - DNA, 25 bp, Homo sapien
tgaaggtatttggtgcagccccaca

SEQ ID NO: 2989360 - DNA, 25 bp, Homo sapien
cactcatgataggaatcagccatca

SEQ ID NO: 2989361 - DNA, 25 bp, Homo sapien
tcctgttccactcatgataggaatc

SEQ ID NO: 2989362 - DNA, 25 bp, Homo sapien
aacaccacccggagcatccagatct

SEQ ID NO: 2989363 - DNA, 25 bp, Homo sapien
tcaggcccaaaatgctcctgttcca

SEQ ID NO: 2989364 - DNA, 25 bp, Homo sapien
cagagccagaaactggtgagagtca

SEQ ID NO: 2989365 - DNA, 25 bp, Homo sapien
gggctggattttgcccgtcccagag

SEQ ID NO: 2989366 - DNA, 25 bp, Homo sapien
gcccgtcccagagccagaaactggt

SEQ ID NO: 2989367 - DNA, 25 bp, Homo sapien
ttttgcccgtcccagagccagaaac

SEQ ID NO: 2989368 - DNA, 25 bp, Homo sapien
gctggcgatgccactgtctgagatg

SEQ ID NO: 2989369 - DNA, 25 bp, Homo sapien
catgattccactttgttgtctggat

SEQ ID NO: 2989370 - DNA, 25 bp, Homo sapien
gatgcaggagaagcattgggtgcca

SEQ ID NO: 2989371 - DNA, 25 bp, Homo sapien
catgaggagtgggtgaccatgattc

SEQ ID NO: 2989372 - DNA, 25 bp, Homo sapien
cagcgtcagaagcagtggataccca

SEQ ID NO: 2989373 - DNA, 25 bp, Homo sapien
caggatctgaacactaaggatgcaa

SEQ ID NO: 2989374 - DNA, 25 bp, Homo sapien
ccagaaagggacaggttccgagaca

SEQ ID NO: 2989375 - DNA, 25 bp, Homo sapien
gatgcaattccaagaatccaggccc

SEQ ID NO: 2989376 - DNA, 25 bp, Homo sapien
catctccttttggtcgcaaatggac

SEQ ID NO: 2989377 - DNA, 25 bp, Homo sapien
gtttcatttgcaaatcaagcatact

SEQ ID NO: 2989378 - DNA, 25 bp, Homo sapien
cttttggtcgcaaatggacatctcc

SEQ ID NO: 2989379 - DNA, 25 bp, Homo sapien
tccttttggtcgcaaatggacatct

SEQ ID NO: 2989380 - DNA, 25 bp, Homo sapien
gcacgtgggagcagggccagaccca

SEQ ID NO: 2989381 - DNA, 25 bp, Homo sapien
gccagacccagcgtggttgtagatg

SEQ ID NO: 2989382 - DNA, 25 bp, Homo sapien
ctgtgagcatgagcacgtgggagca

SEQ ID NO: 2989383 - DNA, 25 bp, Homo sapien
cagacccagcgtggttgtagatgtc

SEQ ID NO: 2989384 - DNA, 25 bp, Homo sapien
cttttcagaagctcggttgccccac

SEQ ID NO: 2989385 - DNA, 25 bp, Homo sapien
agcttttcagaagctcggttgcccc

SEQ ID NO: 2989386 - DNA, 25 bp, Homo sapien
gcttttcagaagctcggttgcccca

SEQ ID NO: 2989387 - DNA, 25 bp, Homo sapien
agcagtctgtgttttaaggaaccac

SEQ ID NO: 2989388 - DNA, 25 bp, Homo sapien
ggcgatgggtaattctcactttgag

SEQ ID NO: 2989389 - DNA, 25 bp, Homo sapien
ttctactgagctcgtgggtgaggct

SEQ ID NO: 2989390 - DNA, 25 bp, Homo sapien
ccttttcttgaggtaggcgatgggt

SEQ ID NO: 2989391 - DNA, 25 bp, Homo sapien
cggctggcatgtgagccgtggtcat

SEQ ID NO: 2989392 - DNA, 25 bp, Homo sapien
ccagtgcctttgtgttgatgagcaa

SEQ ID NO: 2989393 - DNA, 25 bp, Homo sapien
tgaaagggctgaactatggaaccac

SEQ ID NO: 2989394 - DNA, 25 bp, Homo sapien
gcaggaacctggcttgcgctgaacg

SEQ ID NO: 2989395 - DNA, 25 bp, Homo sapien
ccccgtggtggaagtgaagtctgtc

SEQ ID NO: 2989396 - DNA, 25 bp, Homo sapien
tggaatccgagagtcagaatgatcc

SEQ ID NO: 2989397 - DNA, 25 bp, Homo sapien
cacatgcttgttcagagccaaagcc

SEQ ID NO: 2989398 - DNA, 25 bp, Homo sapien
cagagccctcgatacgttctgcagg

SEQ ID NO: 2989399 - DNA, 25 bp, Homo sapien
tgattacacggtcatgttttaaacc

SEQ ID NO: 2989400 - DNA, 25 bp, Homo sapien
gttcacgtccctgctgagcgcgggc

SEQ ID NO: 2989401 - DNA, 25 bp, Homo sapien
cagggtgcggcgcttggcggggctg

SEQ ID NO: 2989402 - DNA, 25 bp, Homo sapien
gccccagggtgcggcgcttggcggg

SEQ ID NO: 2989403 - DNA, 25 bp, Homo sapien
cacctttgcagaagctgacgggtgg

SEQ ID NO: 2989404 - DNA, 25 bp, Homo sapien
tggcaaatggatcaaggcgccaacc

SEQ ID NO: 2989405 - DNA, 25 bp, Homo sapien
ttagcgggtaagcacctcgatgagc

SEQ ID NO: 2989406 - DNA, 25 bp, Homo sapien
gcgtctcagatagccccgatggcaa

SEQ ID NO: 2989407 - DNA, 25 bp, Homo sapien
taagcacctcgatgagcgtctcaga

SEQ ID NO: 2989408 - DNA, 25 bp, Homo sapien
cgaagtgtccgagaatgaggtctgc

SEQ ID NO: 2989409 - DNA, 25 bp, Homo sapien
ggcgttcagggttgtctgatgttcc

SEQ ID NO: 2989410 - DNA, 25 bp, Homo sapien
gctctggtggccttgagcagtccca

SEQ ID NO: 2989411 - DNA, 25 bp, Homo sapien
ctttacccctctctcatagctgtgg

SEQ ID NO: 2989412 - DNA, 25 bp, Homo sapien
tagtgaccgggttgattgatgcctc

SEQ ID NO: 2989413 - DNA, 25 bp, Homo sapien
gagatgcctgatcgtctaccagaaa

SEQ ID NO: 2989414 - DNA, 25 bp, Homo sapien
tgacttggaccacaggctgatcgtg

SEQ ID NO: 2989415 - DNA, 25 bp, Homo sapien
taccagaaagactagtgcggtgcct

SEQ ID NO: 2989416 - DNA, 25 bp, Homo sapien
ggcttctcaattgtcctgcagagga

SEQ ID NO: 2989417 - DNA, 25 bp, Homo sapien
cacgggcttctcaattgtcctgcag

SEQ ID NO: 2989418 - DNA, 25 bp, Homo sapien
ggtggaacccacgactgactcccaa

SEQ ID NO: 2989419 - DNA, 25 bp, Homo sapien
cccaagtgtggcatttttgtccatc

SEQ ID NO: 2989420 - DNA, 25 bp, Homo sapien
ctcagccaaggccactctgcaccga

SEQ ID NO: 2989421 - DNA, 25 bp, Homo sapien
ctgcaccgacgtagctggaattctc

SEQ ID NO: 2989422 - DNA, 25 bp, Homo sapien
aaggccactctgcaccgacgtagct

SEQ ID NO: 2989423 - DNA, 25 bp, Homo sapien
ccactctgcaccgacgtagctggaa

SEQ ID NO: 2989424 - DNA, 25 bp, Homo sapien
ggctgcacacgtggcaacccgggca

SEQ ID NO: 2989425 - DNA, 25 bp, Homo sapien
ttggctctgtgagcgttggctcctg

SEQ ID NO: 2989426 - DNA, 25 bp, Homo sapien
aacccgggcagagtggtgtctccag

SEQ ID NO: 2989427 - DNA, 25 bp, Homo sapien
gcttccttggggaatctatctggaa

SEQ ID NO: 2989428 - DNA, 25 bp, Homo sapien
ccgaggtttggtggttagtgctctc

SEQ ID NO: 2989429 - DNA, 25 bp, Homo sapien
accaactctcgttgcacaccaaagg

SEQ ID NO: 2989430 - DNA, 25 bp, Homo sapien
cacaccaaaggggtgagtgacccga

SEQ ID NO: 2989431 - DNA, 25 bp, Homo sapien
tgagtgacccgaggtttggtggtta

SEQ ID NO: 2989432 - DNA, 25 bp, Homo sapien
tgtgcaggaccgcagacgagaatat

SEQ ID NO: 2989433 - DNA, 25 bp, Homo sapien
tcttgcaaagcactagattgggctc

SEQ ID NO: 2989434 - DNA, 25 bp, Homo sapien
tctggtgcataatgagcctcccgag

SEQ ID NO: 2989435 - DNA, 25 bp, Homo sapien
atattctgaaaatccgccgccggac

SEQ ID NO: 2989436 - DNA, 25 bp, Homo sapien
tctgcaggagaccgtcctgccccgc

SEQ ID NO: 2989437 - DNA, 25 bp, Homo sapien
ttgttcctggatgcgaaggctgggc

SEQ ID NO: 2989438 - DNA, 25 bp, Homo sapien
ttcctggatgcgaaggctgggcggg

SEQ ID NO: 2989439 - DNA, 25 bp, Homo sapien
tgcaggagaccgtcctgccccgcga

SEQ ID NO: 2989440 - DNA, 25 bp, Homo sapien
atctcaagggggaagagtctctctg

SEQ ID NO: 2989441 - DNA, 25 bp, Homo sapien
aatctcaagggggaagagtctctct

SEQ ID NO: 2989442 - DNA, 25 bp, Homo sapien
gagaatctcaagggggaagagtctc

SEQ ID NO: 2989443 - DNA, 25 bp, Homo sapien
gaatctcaagggggaagagtctctc

SEQ ID NO: 2989444 - DNA, 25 bp, Homo sapien
ctttggcagaggtgttgttggcatc

SEQ ID NO: 2989445 - DNA, 25 bp, Homo sapien
cagaggtgttgttggcatcaacagc

SEQ ID NO: 2989446 - DNA, 25 bp, Homo sapien
ggtgttgttggcatcaacagcagca

SEQ ID NO: 2989447 - DNA, 25 bp, Homo sapien
cacagcacgtggacctggggctgct

SEQ ID NO: 2989448 - DNA, 25 bp, Homo sapien
ctttccaaggtctcgcccagctctg

SEQ ID NO: 2989449 - DNA, 25 bp, Homo sapien
gctccacggccgtgtgtgagcgtgt

SEQ ID NO: 2989450 - DNA, 25 bp, Homo sapien
agctctgtgctggtgtccctgaaga

SEQ ID NO: 2989451 - DNA, 25 bp, Homo sapien
ctctgtgctggtgtccctgaagagg

SEQ ID NO: 2989452 - DNA, 25 bp, Homo sapien
cctggattccccgatccttttcatg

SEQ ID NO: 2989453 - DNA, 25 bp, Homo sapien
gattccccgatccttttcatgtgca

SEQ ID NO: 2989454 - DNA, 25 bp, Homo sapien
tggattccccgatccttttcatgtg

SEQ ID NO: 2989455 - DNA, 25 bp, Homo sapien
gccctggattccccgatccttttca

SEQ ID NO: 2989456 - DNA, 25 bp, Homo sapien
ttggtggtgacacaggcaagcttgc

SEQ ID NO: 2989457 - DNA, 25 bp, Homo sapien
gacacaggcaagcttgccaaccaca

SEQ ID NO: 2989458 - DNA, 25 bp, Homo sapien
gcgtctgagtgaccgtgtctccctg

SEQ ID NO: 2989459 - DNA, 25 bp, Homo sapien
ctcctggccctgagcgtctgagtga

SEQ ID NO: 2989460 - DNA, 25 bp, Homo sapien
gaaaaagttctctccccattaatga

SEQ ID NO: 2989461 - DNA, 25 bp, Homo sapien
gccatgcttggccatcacctgattc

SEQ ID NO: 2989462 - DNA, 25 bp, Homo sapien
gcttggagcacagtcattctttgag

SEQ ID NO: 2989463 - DNA, 25 bp, Homo sapien
tgattccccgtagccccggagtcca

SEQ ID NO: 2989464 - DNA, 25 bp, Homo sapien
ctatgtggtactgggccaggctttc

SEQ ID NO: 2989465 - DNA, 25 bp, Homo sapien
agcccctgacttcacctatgtggta

SEQ ID NO: 2989466 - DNA, 25 bp, Homo sapien
ctagtccgattgtaggcacggcccc

SEQ ID NO: 2989467 - DNA, 25 bp, Homo sapien
cgattgtaggcacggcccctgctgg

SEQ ID NO: 2989468 - DNA, 25 bp, Homo sapien
tccaagtcccctcgtatggggtgtg

SEQ ID NO: 2989469 - DNA, 25 bp, Homo sapien
agggctgggcctgaaaagagctcca

SEQ ID NO: 2989470 - DNA, 25 bp, Homo sapien
aaagagctccaagtcccctcgtatg

SEQ ID NO: 2989471 - DNA, 25 bp, Homo sapien
ggcctgaaaagagctccaagtcccc

SEQ ID NO: 2989472 - DNA, 25 bp, Homo sapien
ctgagctccggttttgtccacaggg

SEQ ID NO: 2989473 - DNA, 25 bp, Homo sapien
tgtctcgtccatgtgcacctttggc

SEQ ID NO: 2989474 - DNA, 25 bp, Homo sapien
ccttcggctgatctgacttcctcgg

SEQ ID NO: 2989475 - DNA, 25 bp, Homo sapien
acgctgggccccttcggctgatctg

SEQ ID NO: 2989476 - DNA, 25 bp, Homo sapien
cagccacccaccacaatggtgtgcc

SEQ ID NO: 2989477 - DNA, 25 bp, Homo sapien
agccacccaccacaatggtgtgccc

SEQ ID NO: 2989478 - DNA, 25 bp, Homo sapien
cagacccattagttgcattttgggc

SEQ ID NO: 2989479 - DNA, 25 bp, Homo sapien
ccattagttgcattttgggcttttt

SEQ ID NO: 2989480 - DNA, 25 bp, Homo sapien
gacccattagttgcattttgggctt

SEQ ID NO: 2989481 - DNA, 25 bp, Homo sapien
cacagacccattagttgcattttgg

SEQ ID NO: 2989482 - DNA, 25 bp, Homo sapien
tgaacagttgagctgcagtcaaggt

SEQ ID NO: 2989483 - DNA, 25 bp, Homo sapien
ccctgattcaggctgaacagttgag

SEQ ID NO: 2989484 - DNA, 25 bp, Homo sapien
ttccctcctgccagttgcaattcaa

SEQ ID NO: 2989485 - DNA, 25 bp, Homo sapien
ccctcctgccagttgcaattcaagg

SEQ ID NO: 2989486 - DNA, 25 bp, Homo sapien
taggtgatccccatctgagagtagg

SEQ ID NO: 2989487 - DNA, 25 bp, Homo sapien
gtgatccccatctgagagtaggtca

SEQ ID NO: 2989488 - DNA, 25 bp, Homo sapien
tgtgatggttcgtaggtgatcccca

SEQ ID NO: 2989489 - DNA, 25 bp, Homo sapien
tggttcgtaggtgatccccatctga

SEQ ID NO: 2989490 - DNA, 25 bp, Homo sapien
aaacatcccatgttcctgccagatc

SEQ ID NO: 2989491 - DNA, 25 bp, Homo sapien
acctccatgcttccgtctgccccat

SEQ ID NO: 2989492 - DNA, 25 bp, Homo sapien
aacatcccatgttcctgccagatca

SEQ ID NO: 2989493 - DNA, 25 bp, Homo sapien
caaacatcccatgttcctgccagat

SEQ ID NO: 2989494 - DNA, 25 bp, Homo sapien
ttaatgacccattcgctgctgcatg

SEQ ID NO: 2989495 - DNA, 25 bp, Homo sapien
tgacccattcgctgctgcatgccag

SEQ ID NO: 2989496 - DNA, 25 bp, Homo sapien
cccattcgctgctgcatgccagaag

SEQ ID NO: 2989497 - DNA, 25 bp, Homo sapien
attcgctgctgcatgccagaagcca

SEQ ID NO: 2989498 - DNA, 25 bp, Homo sapien
ggctggcctaggacgcattcattct

SEQ ID NO: 2989499 - DNA, 25 bp, Homo sapien
tggctggcctaggacgcattcattc

SEQ ID NO: 2989500 - DNA, 25 bp, Homo sapien
ggcctggctggcctaggacgcattc

SEQ ID NO: 2989501 - DNA, 25 bp, Homo sapien
cctggctggcctaggacgcattcat

SEQ ID NO: 2989502 - DNA, 25 bp, Homo sapien
gctgtgttcttcaagtcgcctctgc

SEQ ID NO: 2989503 - DNA, 25 bp, Homo sapien
cattgactgccacaccctttcctga

SEQ ID NO: 2989504 - DNA, 25 bp, Homo sapien
ttttctggaggaatccattgactgc

SEQ ID NO: 2989505 - DNA, 25 bp, Homo sapien
tttccttatgcactgaagggtctca

SEQ ID NO: 2989506 - DNA, 25 bp, Homo sapien
aggtagagaggacaaaactcagaac

SEQ ID NO: 2989507 - DNA, 25 bp, Homo sapien
gagtgtggtggatgatagactggaa

SEQ ID NO: 2989508 - DNA, 25 bp, Homo sapien
ggtggatgatagactggaagccttt

SEQ ID NO: 2989509 - DNA, 25 bp, Homo sapien
gtgggagtgtggtggatgatagact

SEQ ID NO: 2989510 - DNA, 25 bp, Homo sapien
tagctggcacagtcctgcgagctct

SEQ ID NO: 2989511 - DNA, 25 bp, Homo sapien
ctagctggcacagtcctgcgagctc

SEQ ID NO: 2989512 - DNA, 25 bp, Homo sapien
gctggcacagtcctgcgagctctgc

SEQ ID NO: 2989513 - DNA, 25 bp, Homo sapien
tggcacagtcctgcgagctctgcct

SEQ ID NO: 2989514 - DNA, 25 bp, Homo sapien
catttcctgatgtgcgcccgtttcg

SEQ ID NO: 2989515 - DNA, 25 bp, Homo sapien
ttgaaggagaggaaatcggccagtc

SEQ ID NO: 2989516 - DNA, 25 bp, Homo sapien
tggtgaagggagagcgaacatttcc

SEQ ID NO: 2989517 - DNA, 25 bp, Homo sapien
ttggcggtattgatggacggcacct

SEQ ID NO: 2989518 - DNA, 25 bp, Homo sapien
tccttcctctgtgggccgaggtgca

SEQ ID NO: 2989519 - DNA, 25 bp, Homo sapien
gaggtgcacgtgacacctctgtgtc

SEQ ID NO: 2989520 - DNA, 25 bp, Homo sapien
ccccgacagatgtactgggcatcct

SEQ ID NO: 2989521 - DNA, 25 bp, Homo sapien
gggaatctgtcgcctgtcctcgggc

SEQ ID NO: 2989522 - DNA, 25 bp, Homo sapien
tccttgcctccccccggcgtctgca

SEQ ID NO: 2989523 - DNA, 25 bp, Homo sapien
ttgctataaaaagagttgcctccct

SEQ ID NO: 2989524 - DNA, 25 bp, Homo sapien
tctccttgcctccccccggcgtctg

SEQ ID NO: 2989525 - DNA, 25 bp, Homo sapien
ctcccttcctcccttctccttgcct

SEQ ID NO: 2989526 - DNA, 25 bp, Homo sapien
aggtcgtggtgcgtttcatcggctc

SEQ ID NO: 2989527 - DNA, 25 bp, Homo sapien
tgcacaatgtcagctcccgtgtcgg

SEQ ID NO: 2989528 - DNA, 25 bp, Homo sapien
tatgtggcctgaacaaagggagctc

SEQ ID NO: 2989529 - DNA, 25 bp, Homo sapien
tcgtggtgcgtttcatcggctcgag

SEQ ID NO: 2989530 - DNA, 25 bp, Homo sapien
cagtcctccgtggtgtgtacttaac

SEQ ID NO: 2989531 - DNA, 25 bp, Homo sapien
tacttaacaggattgcgtgagattg

SEQ ID NO: 2989532 - DNA, 25 bp, Homo sapien
aggaggctggtacctaacgcccacg

SEQ ID NO: 2989533 - DNA, 25 bp, Homo sapien
cagatgttcagattgccaggaggct

SEQ ID NO: 2989534 - DNA, 25 bp, Homo sapien
cagggagtagcctgggtctgtgctc

SEQ ID NO: 2989535 - DNA, 25 bp, Homo sapien
aaggagggaggttctgccctcgact

SEQ ID NO: 2989536 - DNA, 25 bp, Homo sapien
ggcatgcatggcctgaggtcactgt

SEQ ID NO: 2989537 - DNA, 25 bp, Homo sapien
gtcactgtggcatgttattggtccc

SEQ ID NO: 2989538 - DNA, 25 bp, Homo sapien
gagagccacgatggctgcttcccat

SEQ ID NO: 2989539 - DNA, 25 bp, Homo sapien
gacccttcgtgtgtcctggcctctt

SEQ ID NO: 2989540 - DNA, 25 bp, Homo sapien
acccttcgtgtgtcctggcctcttc

SEQ ID NO: 2989541 - DNA, 25 bp, Homo sapien
tgcttcccatgagagacccttcgtg

SEQ ID NO: 2989542 - DNA, 25 bp, Homo sapien
tcctgaggcgtatttgatataatgt

SEQ ID NO: 2989543 - DNA, 25 bp, Homo sapien
cacatagtaggtttccataaagggt

SEQ ID NO: 2989544 - DNA, 25 bp, Homo sapien
tttagtcgcctctcttgaagtgttc

SEQ ID NO: 2989545 - DNA, 25 bp, Homo sapien
cataaagggttttcctgaggcgtat

SEQ ID NO: 2989546 - DNA, 25 bp, Homo sapien
cagctgggcggtcgtcgtcatctgt

SEQ ID NO: 2989547 - DNA, 25 bp, Homo sapien
catctgtgcatggagctgcctcttt

SEQ ID NO: 2989548 - DNA, 25 bp, Homo sapien
tctgtgcatggagctgcctctttgg

SEQ ID NO: 2989549 - DNA, 25 bp, Homo sapien
gcggtcgtcgtcatctgtgcatgga

SEQ ID NO: 2989550 - DNA, 25 bp, Homo sapien
ggatatacaaagtgtttgcaggatt

SEQ ID NO: 2989551 - DNA, 25 bp, Homo sapien
tgcaaggatatacaaagtgtttgca

SEQ ID NO: 2989552 - DNA, 25 bp, Homo sapien
caaggatatacaaagtgtttgcagg

SEQ ID NO: 2989553 - DNA, 25 bp, Homo sapien
aaggatatacaaagtgtttgcagga

SEQ ID NO: 2989554 - DNA, 25 bp, Homo sapien
gacgagtgaggatttgtatagattt

SEQ ID NO: 2989555 - DNA, 25 bp, Homo sapien
caaaggtgaatggacgagtgaggat

SEQ ID NO: 2989556 - DNA, 25 bp, Homo sapien
aatggacgagtgaggatttgtatag

SEQ ID NO: 2989557 - DNA, 25 bp, Homo sapien
tgaatggacgagtgaggatttgtat

SEQ ID NO: 2989558 - DNA, 25 bp, Homo sapien
ctgtgtatcctgtcgcgcacgacct

SEQ ID NO: 2989559 - DNA, 25 bp, Homo sapien
tgcacctgtgtgttctcattcccct

SEQ ID NO: 2989560 - DNA, 25 bp, Homo sapien
tgtcgcgcacgaccttcctgtgtgt

SEQ ID NO: 2989561 - DNA, 25 bp, Homo sapien
tccatcatcatgaggcaaccccacc

SEQ ID NO: 2989562 - DNA, 25 bp, Homo sapien
ggcaacacatgacttcccataaatc

SEQ ID NO: 2989563 - DNA, 25 bp, Homo sapien
gagcgtgcttcctgcactcatccat

SEQ ID NO: 2989564 - DNA, 25 bp, Homo sapien
ctccaaatgagcgtgcttcctgcac

SEQ ID NO: 2989565 - DNA, 25 bp, Homo sapien
ccatgagcggcaacacatgacttcc

SEQ ID NO: 2989566 - DNA, 25 bp, Homo sapien
tgtggagatcctcgaggggaccggg

SEQ ID NO: 2989567 - DNA, 25 bp, Homo sapien
ctgtggagatcctcgaggggaccgg

SEQ ID NO: 2989568 - DNA, 25 bp, Homo sapien
tggagatcctcgaggggaccgggaa

SEQ ID NO: 2989569 - DNA, 25 bp, Homo sapien
ctcgaggggaccgggaaacaggatg

SEQ ID NO: 2989570 - DNA, 25 bp, Homo sapien
gcttcacaggatctcttgcagaagt

SEQ ID NO: 2989571 - DNA, 25 bp, Homo sapien
tgccctcaacgtcattcttcctggg

SEQ ID NO: 2989572 - DNA, 25 bp, Homo sapien
ctgccctcaacgtcattcttcctgg

SEQ ID NO: 2989573 - DNA, 25 bp, Homo sapien
cctcaacgtcattcttcctgggctt

SEQ ID NO: 2989574 - DNA, 25 bp, Homo sapien
ttagtttttgttgtcataaccatgg

SEQ ID NO: 2989575 - DNA, 25 bp, Homo sapien
cggctcggaggaagataatagcttt

SEQ ID NO: 2989576 - DNA, 25 bp, Homo sapien
tcttgagcatttagcggctcggagg

SEQ ID NO: 2989577 - DNA, 25 bp, Homo sapien
gaaaatcgacctttgagcccctcat

SEQ ID NO: 2989578 - DNA, 25 bp, Homo sapien
gccagctctcactaggcaatgctag

SEQ ID NO: 2989579 - DNA, 25 bp, Homo sapien
gggtgccagctctcactaggcaatg

SEQ ID NO: 2989580 - DNA, 25 bp, Homo sapien
ctaggcaatgctagaatctccccaa

SEQ ID NO: 2989581 - DNA, 25 bp, Homo sapien
tctcactaggcaatgctagaatctc

SEQ ID NO: 2989582 - DNA, 25 bp, Homo sapien
gcttttctagaaggccagcgagcgc

SEQ ID NO: 2989583 - DNA, 25 bp, Homo sapien
gggcttttctagaaggccagcgagc

SEQ ID NO: 2989584 - DNA, 25 bp, Homo sapien
cgggtgggcttttctagaaggccag

SEQ ID NO: 2989585 - DNA, 25 bp, Homo sapien
gtgggcttttctagaaggccagcga

SEQ ID NO: 2989586 - DNA, 25 bp, Homo sapien
caaccccagatgagtcattaaaact

SEQ ID NO: 2989587 - DNA, 25 bp, Homo sapien
acagcccgaagcttcccttgctggg

SEQ ID NO: 2989588 - DNA, 25 bp, Homo sapien
ctggcaaggatccagcaggtggacc

SEQ ID NO: 2989589 - DNA, 25 bp, Homo sapien
tcagcttcggccgagccagcgcggt

SEQ ID NO: 2989590 - DNA, 25 bp, Homo sapien
tcttcttgtccgtttgtgtagcctc

SEQ ID NO: 2989591 - DNA, 25 bp, Homo sapien
tgtccgtttgtgtagcctccgtagc

SEQ ID NO: 2989592 - DNA, 25 bp, Homo sapien
tcttgtccgtttgtgtagcctccgt

SEQ ID NO: 2989593 - DNA, 25 bp, Homo sapien
cttctcttcttgtccgtttgtgtag

SEQ ID NO: 2989594 - DNA, 25 bp, Homo sapien
tgccctcaccccacacgggcagaac

SEQ ID NO: 2989595 - DNA, 25 bp, Homo sapien
tatgtatccgggtgtatatcccctg

SEQ ID NO: 2989596 - DNA, 25 bp, Homo sapien
ggtaatatgtatccgggtgtatatc

SEQ ID NO: 2989597 - DNA, 25 bp, Homo sapien
ggctataggactgtactcgatggta

SEQ ID NO: 2989598 - DNA, 25 bp, Homo sapien
tggctataggactgtactcgatggt

SEQ ID NO: 2989599 - DNA, 25 bp, Homo sapien
gtgtcccctggccatggggccgtac

SEQ ID NO: 2989600 - DNA, 25 bp, Homo sapien
gatggtaacatgtatctgcatgtgt

SEQ ID NO: 2989601 - DNA, 25 bp, Homo sapien
ctgcatgtgtgtcccctggccatgg

SEQ ID NO: 2989602 - DNA, 25 bp, Homo sapien
ccgatggtaacatgtatctgcatgt

SEQ ID NO: 2989603 - DNA, 25 bp, Homo sapien
ccgtgtgtcggatacccaggtgcat

SEQ ID NO: 2989604 - DNA, 25 bp, Homo sapien
tgtcggatacccaggtgcatgttct

SEQ ID NO: 2989605 - DNA, 25 bp, Homo sapien
caggtgcatgttctgaatgtagccc

SEQ ID NO: 2989606 - DNA, 25 bp, Homo sapien
gatacccaggtgcatgttctgaatg

SEQ ID NO: 2989607 - DNA, 25 bp, Homo sapien
agaggacgttcacatgcactgggcc

SEQ ID NO: 2989608 - DNA, 25 bp, Homo sapien
cacggttccatttcacagtgcacag

SEQ ID NO: 2989609 - DNA, 25 bp, Homo sapien
caagctgtggccttaaccaaataga

SEQ ID NO: 2989610 - DNA, 25 bp, Homo sapien
cagatgccacccagaggcttgtgct

SEQ ID NO: 2989611 - DNA, 25 bp, Homo sapien
ggtgagcgcctcgattaaagctagg

SEQ ID NO: 2989612 - DNA, 25 bp, Homo sapien
gagcgcctcgattaaagctaggttt

SEQ ID NO: 2989613 - DNA, 25 bp, Homo sapien
ggaggtgagcgcctcgattaaagct

SEQ ID NO: 2989614 - DNA, 25 bp, Homo sapien
tcctggaggtgagcgcctcgattaa

SEQ ID NO: 2989615 - DNA, 25 bp, Homo sapien
attgtttccatagctcagcctctgc

SEQ ID NO: 2989616 - DNA, 25 bp, Homo sapien
gctgacttcacaggataatttattt

SEQ ID NO: 2989617 - DNA, 25 bp, Homo sapien
gtttccatagctcagcctctgctga

SEQ ID NO: 2989618 - DNA, 25 bp, Homo sapien
tctgctgacttcacaggataattta

SEQ ID NO: 2989619 - DNA, 25 bp, Homo sapien
aatgttctatttatgccatctccac

SEQ ID NO: 2989620 - DNA, 25 bp, Homo sapien
aaatgttctatttatgccatctcca

SEQ ID NO: 2989621 - DNA, 25 bp, Homo sapien
tgttctatttatgccatctccaccc

SEQ ID NO: 2989622 - DNA, 25 bp, Homo sapien
atgttctatttatgccatctccacc

SEQ ID NO: 2989623 - DNA, 25 bp, Homo sapien
cagccccgggcttctcttggtgctt

SEQ ID NO: 2989624 - DNA, 25 bp, Homo sapien
ggtgcttcccgggtacagcatcctg

SEQ ID NO: 2989625 - DNA, 25 bp, Homo sapien
tgaagacgcgtctcccgcgatggct

SEQ ID NO: 2989626 - DNA, 25 bp, Homo sapien
ccccaggccttagggggagctgcca

SEQ ID NO: 2989627 - DNA, 25 bp, Homo sapien
gccgtcactggcaggtctcttgctc

SEQ ID NO: 2989628 - DNA, 25 bp, Homo sapien
tgccgtcactggcaggtctcttgct

SEQ ID NO: 2989629 - DNA, 25 bp, Homo sapien
ccgtcactggcaggtctcttgctct

SEQ ID NO: 2989630 - DNA, 25 bp, Homo sapien
ccaagattccgtcgggtgaaggtca

SEQ ID NO: 2989631 - DNA, 25 bp, Homo sapien
ctggtccaagattccgtcgggtgaa

SEQ ID NO: 2989632 - DNA, 25 bp, Homo sapien
tggtccaagattccgtcgggtgaag

SEQ ID NO: 2989633 - DNA, 25 bp, Homo sapien
tccaagattccgtcgggtgaaggtc

SEQ ID NO: 2989634 - DNA, 25 bp, Homo sapien
agtttttcagcattagaggcaacca

SEQ ID NO: 2989635 - DNA, 25 bp, Homo sapien
caggctgtaggtcagcgattcccat

SEQ ID NO: 2989636 - DNA, 25 bp, Homo sapien
acttttctcgggctttcctcgcagg

SEQ ID NO: 2989637 - DNA, 25 bp, Homo sapien
ccgcagcagagccaatggccgtcgg

SEQ ID NO: 2989638 - DNA, 25 bp, Homo sapien
agccagctcgtcctactgaatccag

SEQ ID NO: 2989639 - DNA, 25 bp, Homo sapien
tgggtggtgtcagtgcccctggtgt

SEQ ID NO: 2989640 - DNA, 25 bp, Homo sapien
tggtgtcagtgcccctggtgtaccc

SEQ ID NO: 2989641 - DNA, 25 bp, Homo sapien
tgtcagtgcccctggtgtaccccaa

SEQ ID NO: 2989642 - DNA, 25 bp, Homo sapien
ggtggtgtcagtgcccctggtgtac

SEQ ID NO: 2989643 - DNA, 25 bp, Homo sapien
gcaggatgggcgtttccaaaaagac

SEQ ID NO: 2989644 - DNA, 25 bp, Homo sapien
tagtgttgagatttcaacgctggtg

SEQ ID NO: 2989645 - DNA, 25 bp, Homo sapien
gagatttcaacgctggtggatcttc

SEQ ID NO: 2989646 - DNA, 25 bp, Homo sapien
ttgcagtggcaggatgggcgtttcc

SEQ ID NO: 2989647 - DNA, 25 bp, Homo sapien
ccagtgcacgtttgaggggaagcat

SEQ ID NO: 2989648 - DNA, 25 bp, Homo sapien
cacccagtgcacgtttgaggggaag

SEQ ID NO: 2989649 - DNA, 25 bp, Homo sapien
cagcacccagtgcacgtttgagggg

SEQ ID NO: 2989650 - DNA, 25 bp, Homo sapien
cccagtgcacgtttgaggggaagca

SEQ ID NO: 2989651 - DNA, 25 bp, Homo sapien
tgcctgacacgctgaggaggattct

SEQ ID NO: 2989652 - DNA, 25 bp, Homo sapien
agccctgcctgacacgctgaggagg

SEQ ID NO: 2989653 - DNA, 25 bp, Homo sapien
ccctgcctgacacgctgaggaggat

SEQ ID NO: 2989654 - DNA, 25 bp, Homo sapien
cctgcctgacacgctgaggaggatt

SEQ ID NO: 2989655 - DNA, 25 bp, Homo sapien
tgcttttggaagcagggcccgggcc

SEQ ID NO: 2989656 - DNA, 25 bp, Homo sapien
tctgcttttggaagcagggcccggg

SEQ ID NO: 2989657 - DNA, 25 bp, Homo sapien
agtctgcttttggaagcagggcccg

SEQ ID NO: 2989658 - DNA, 25 bp, Homo sapien
ggagtctgcttttggaagcagggcc

SEQ ID NO: 2989659 - DNA, 25 bp, Homo sapien
ggctccaggcccgagtgtagctccc

SEQ ID NO: 2989660 - DNA, 25 bp, Homo sapien
ccacgtctgtgcaccacggcggtat

SEQ ID NO: 2989661 - DNA, 25 bp, Homo sapien
tgcaccacggcggtatgtgaatgac

SEQ ID NO: 2989662 - DNA, 25 bp, Homo sapien
gtagctccccgctctcagcccacgt

SEQ ID NO: 2989663 - DNA, 25 bp, Homo sapien
tttcttgcagctagtggccccgtgt

SEQ ID NO: 2989664 - DNA, 25 bp, Homo sapien
gttaagcagcagttcctcggaggat

SEQ ID NO: 2989665 - DNA, 25 bp, Homo sapien
tactggagcgtaattgacaaagatc

SEQ ID NO: 2989666 - DNA, 25 bp, Homo sapien
gaggctcgacaagcactcgggttaa

SEQ ID NO: 2989667 - DNA, 25 bp, Homo sapien
actctgccctcgaaactggtgccat

SEQ ID NO: 2989668 - DNA, 25 bp, Homo sapien
gacatcggcaggaggtgtcactctg

SEQ ID NO: 2989669 - DNA, 25 bp, Homo sapien
actggtgccatcaaacgtgagggcc

SEQ ID NO: 2989670 - DNA, 25 bp, Homo sapien
gcaggaggtgtcactctgccctcga

SEQ ID NO: 2989671 - DNA, 25 bp, Homo sapien
tccttggcccttgctgacagcattg

SEQ ID NO: 2989672 - DNA, 25 bp, Homo sapien
tctccttggcccttgctgacagcat

SEQ ID NO: 2989673 - DNA, 25 bp, Homo sapien
cttggcccttgctgacagcattggg

SEQ ID NO: 2989674 - DNA, 25 bp, Homo sapien
tgctgacagcattggggagcccctt

SEQ ID NO: 2989675 - DNA, 25 bp, Homo sapien
ggctgattctggtacttttccgttg

SEQ ID NO: 2989676 - DNA, 25 bp, Homo sapien
tcatggcatccttgggggctgattc

SEQ ID NO: 2989677 - DNA, 25 bp, Homo sapien
ccttgggggctgattctggtacttt

SEQ ID NO: 2989678 - DNA, 25 bp, Homo sapien
tctggtacttttccgttgtatagat

SEQ ID NO: 2989679 - DNA, 25 bp, Homo sapien
cattcttgattgaacgttagctcgg

SEQ ID NO: 2989680 - DNA, 25 bp, Homo sapien
tatgacgattcgacattcttgattg

SEQ ID NO: 2989681 - DNA, 25 bp, Homo sapien
acgttagctcggaccaggctgaggc

SEQ ID NO: 2989682 - DNA, 25 bp, Homo sapien
tctccattgtgatatttggccccat

SEQ ID NO: 2989683 - DNA, 25 bp, Homo sapien
gccagctctcactaggcaatgctag

SEQ ID NO: 2989684 - DNA, 25 bp, Homo sapien
gggtgccagctctcactaggcaatg

SEQ ID NO: 2989685 - DNA, 25 bp, Homo sapien
ctaggcaatgctagaatctccccaa

SEQ ID NO: 2989686 - DNA, 25 bp, Homo sapien
tctcactaggcaatgctagaatctc

SEQ ID NO: 2989687 - DNA, 25 bp, Homo sapien
acagcccgaagcttcccttgctggg

SEQ ID NO: 2989688 - DNA, 25 bp, Homo sapien
tcagcttcggccgagccagcgcggt

SEQ ID NO: 2989689 - DNA, 25 bp, Homo sapien
caaccccagatgagtcattaaaact

SEQ ID NO: 2989690 - DNA, 25 bp, Homo sapien
ctggcaaggatccagcaggtggacc

SEQ ID NO: 2989691 - DNA, 25 bp, Homo sapien
tcttcttgtccgtttgtgtagcctc

SEQ ID NO: 2989692 - DNA, 25 bp, Homo sapien
tgtccgtttgtgtagcctccgtagc

SEQ ID NO: 2989693 - DNA, 25 bp, Homo sapien
cttctcttcttgtccgtttgtgtag

SEQ ID NO: 2989694 - DNA, 25 bp, Homo sapien
tcttgtccgtttgtgtagcctccgt

SEQ ID NO: 2989695 - DNA, 25 bp, Homo sapien
tgccctcaccccacacgggcagaac

SEQ ID NO: 2989696 - DNA, 25 bp, Homo sapien
gggctgtacccgatggtaacatgta

SEQ ID NO: 2989697 - DNA, 25 bp, Homo sapien
gccgtagccgatggtaacacgtatc

SEQ ID NO: 2989698 - DNA, 25 bp, Homo sapien
ccgatggtaacacgtatccgggtgg

SEQ ID NO: 2989699 - DNA, 25 bp, Homo sapien
tagccgatggtaacacgtatccggg

SEQ ID NO: 2989700 - DNA, 25 bp, Homo sapien
gggctgtacccgatggtaacatgta

SEQ ID NO: 2989701 - DNA, 25 bp, Homo sapien
gctgtacccgatggtaacatgtatc

SEQ ID NO: 2989702 - DNA, 25 bp, Homo sapien
catggggctgtacccgatggtaaca

SEQ ID NO: 2989703 - DNA, 25 bp, Homo sapien
ccgatggtaacacgtatccgggtgg

SEQ ID NO: 2989704 - DNA, 25 bp, Homo sapien
cagccccgggcttctcttggtgctt

SEQ ID NO: 2989705 - DNA, 25 bp, Homo sapien
tcggccctcccttcatttggaggaa

SEQ ID NO: 2989706 - DNA, 25 bp, Homo sapien
tgcttcccgggtacagcatcctgaa

SEQ ID NO: 2989707 - DNA, 25 bp, Homo sapien
tgaagacgcgtctcccgcgatggct

SEQ ID NO: 2989708 - DNA, 25 bp, Homo sapien
tgccgtcactggcaggtctcttgct

SEQ ID NO: 2989709 - DNA, 25 bp, Homo sapien
gccgtcactggcaggtctcttgctc

SEQ ID NO: 2989710 - DNA, 25 bp, Homo sapien
ccgtcactggcaggtctcttgctct

SEQ ID NO: 2989711 - DNA, 25 bp, Homo sapien
tgcactggtccaagattccgtcggg

SEQ ID NO: 2989712 - DNA, 25 bp, Homo sapien
ccaagattccgtcgggtgaaggtca

SEQ ID NO: 2989713 - DNA, 25 bp, Homo sapien
gcaattccagttgcccgagtttttc

SEQ ID NO: 2989714 - DNA, 25 bp, Homo sapien
tggtccaagattccgtcgggtgaag

SEQ ID NO: 2989715 - DNA, 25 bp, Homo sapien
tcctttgcacgctgcccaactgtct

SEQ ID NO: 2989716 - DNA, 25 bp, Homo sapien
tgtgcctggactgcctcccagtttc

SEQ ID NO: 2989717 - DNA, 25 bp, Homo sapien
gccttcctttgcacgctgcccaact

SEQ ID NO: 2989718 - DNA, 25 bp, Homo sapien
cagtttcctatgtccccctccagtg

SEQ ID NO: 2989719 - DNA, 25 bp, Homo sapien
tggcgtgcagcctcccgatggtgca

SEQ ID NO: 2989720 - DNA, 25 bp, Homo sapien
taagacactcatggcgtgcagcctc

SEQ ID NO: 2989721 - DNA, 25 bp, Homo sapien
tggtgtgttgtcccttaagacactc

SEQ ID NO: 2989722 - DNA, 25 bp, Homo sapien
accttagttcctgtctgttgaggga

SEQ ID NO: 2989723 - DNA, 25 bp, Homo sapien
gatcttccgaactcggagaggaagt

SEQ ID NO: 2989724 - DNA, 25 bp, Homo sapien
tttgaacttgagaatcggatatgca

SEQ ID NO: 2989725 - DNA, 25 bp, Homo sapien
gcctccaccggctctccagggaaga

SEQ ID NO: 2989726 - DNA, 25 bp, Homo sapien
cagaaagatcttccgaactcggaga

SEQ ID NO: 2989727 - DNA, 25 bp, Homo sapien
ccccatgtgaatgtggacgggtcca

SEQ ID NO: 2989728 - DNA, 25 bp, Homo sapien
tggaatgggtggatccagcatgaat

SEQ ID NO: 2989729 - DNA, 25 bp, Homo sapien
ccagcatgaaagtgggcaggtccag

SEQ ID NO: 2989730 - DNA, 25 bp, Homo sapien
cccagcttccgtgcatcctaagtga

SEQ ID NO: 2989731 - DNA, 25 bp, Homo sapien
ttcggacaggctcggaagtcacgct

SEQ ID NO: 2989732 - DNA, 25 bp, Homo sapien
tgcagcaatggctttcgatcggctg

SEQ ID NO: 2989733 - DNA, 25 bp, Homo sapien
tgcggcttctgtggaacagcttcgg

SEQ ID NO: 2989734 - DNA, 25 bp, Homo sapien
gaacagcttcggtgtctttggcgtt

SEQ ID NO: 2989735 - DNA, 25 bp, Homo sapien
gggaccgtccatggaagcaactcct

SEQ ID NO: 2989736 - DNA, 25 bp, Homo sapien
tgcgcccatgatgggtcccacaggc

SEQ ID NO: 2989737 - DNA, 25 bp, Homo sapien
cagggcctggcgattgctgcgccca

SEQ ID NO: 2989738 - DNA, 25 bp, Homo sapien
ccagcttgcactgggaccgtccatg

SEQ ID NO: 2989739 - DNA, 25 bp, Homo sapien
tgctcagggcaggtggcaagtaggg

SEQ ID NO: 2989740 - DNA, 25 bp, Homo sapien
gctgctcagggcaggtggcaagtag

SEQ ID NO: 2989741 - DNA, 25 bp, Homo sapien
tcctccctgcgggtgctctcctggg

SEQ ID NO: 2989742 - DNA, 25 bp, Homo sapien
agcatcctccctgcgggtgctctcc

SEQ ID NO: 2989743 - DNA, 25 bp, Homo sapien
ttgtgtggttatccgtggccacccc

SEQ ID NO: 2989744 - DNA, 25 bp, Homo sapien
gatccgtggagagtgagtgtcagcg

SEQ ID NO: 2989745 - DNA, 25 bp, Homo sapien
tgggctccaggatccgtggagagtg

SEQ ID NO: 2989746 - DNA, 25 bp, Homo sapien
tttgtgtggttatccgtggccaccc

SEQ ID NO: 2989747 - DNA, 25 bp, Homo sapien
ttccgggccttctccgtcctgttga

SEQ ID NO: 2989748 - DNA, 25 bp, Homo sapien
aagcatcccagcgaagcaggctgag

SEQ ID NO: 2989749 - DNA, 25 bp, Homo sapien
tgagtttggtggtgccgtcccgacc

SEQ ID NO: 2989750 - DNA, 25 bp, Homo sapien
ggaaggcccagctaagacccaatta

SEQ ID NO: 2989751 - DNA, 25 bp, Homo sapien
tccatcctgtagcaaaaacgttctg

SEQ ID NO: 2989752 - DNA, 25 bp, Homo sapien
tatgaacttcaggttgcaaggcgcc

SEQ ID NO: 2989753 - DNA, 25 bp, Homo sapien
caaatgtgtggcctatcgcgctgct

SEQ ID NO: 2989754 - DNA, 25 bp, Homo sapien
caagtacgggaaactctggaacaca

SEQ ID NO: 2989755 - DNA, 25 bp, Homo sapien
tccaggagggctggcgtgaggtgtc

SEQ ID NO: 2989756 - DNA, 25 bp, Homo sapien
agggtgtgcgggagcgaccagacct

SEQ ID NO: 2989757 - DNA, 25 bp, Homo sapien
cctctgctttcgagccacgtctgct

SEQ ID NO: 2989758 - DNA, 25 bp, Homo sapien
gctgtcatattgacctcatccccag

SEQ ID NO: 2989759 - DNA, 25 bp, Homo sapien
ccctgtgacacctggtgcgttggag

SEQ ID NO: 2989760 - DNA, 25 bp, Homo sapien
ggtgccctgtgacacctggtgcgtt

SEQ ID NO: 2989761 - DNA, 25 bp, Homo sapien
tcatcaccaccttcagtctctggac

SEQ ID NO: 2989762 - DNA, 25 bp, Homo sapien
gccatcggtgttggcctcatcatca

SEQ ID NO: 2989763 - DNA, 25 bp, Homo sapien
tgggatttcctgtggaaacggtgaa

SEQ ID NO: 2989764 - DNA, 25 bp, Homo sapien
gatttcctgtggaaacggtgaagag

SEQ ID NO: 2989765 - DNA, 25 bp, Homo sapien
ccagccagcgtctggtcgccctggt

SEQ ID NO: 2989766 - DNA, 25 bp, Homo sapien
ccagcgtctggtcgccctggtgggc

SEQ ID NO: 2989767 - DNA, 25 bp, Homo sapien
acccgggaaagcactcggacagcct

SEQ ID NO: 2989768 - DNA, 25 bp, Homo sapien
ggtttttcaacagtgcctctgcccc

SEQ ID NO: 2989769 - DNA, 25 bp, Homo sapien
gtttttcaacagtgcctctgccccg

SEQ ID NO: 2989770 - DNA, 25 bp, Homo sapien
actcggacagcctcggggaagatga

SEQ ID NO: 2989771 - DNA, 25 bp, Homo sapien
cactggaccagggaggtcgggccgt

SEQ ID NO: 2989772 - DNA, 25 bp, Homo sapien
tcactggaccagggaggtcgggccg

SEQ ID NO: 2989773 - DNA, 25 bp, Homo sapien
actggaccagggaggtcgggccgtg

SEQ ID NO: 2989774 - DNA, 25 bp, Homo sapien
ctggaccagggaggtcgggccgtgg

SEQ ID NO: 2989775 - DNA, 25 bp, Homo sapien
ctgggccttccagatggacaggcac

SEQ ID NO: 2989776 - DNA, 25 bp, Homo sapien
cctgccgaggaggacaaagtcccag

SEQ ID NO: 2989777 - DNA, 25 bp, Homo sapien
aagtcccagggtcacccgggctgat

SEQ ID NO: 2989778 - DNA, 25 bp, Homo sapien
catcccgtgcgcctttggaatgtgg

SEQ ID NO: 2989779 - DNA, 25 bp, Homo sapien
gggagccctgactttgtaccggtgc

SEQ ID NO: 2989780 - DNA, 25 bp, Homo sapien
tctcgggccatggcgtccaggttgg

SEQ ID NO: 2989781 - DNA, 25 bp, Homo sapien
tcatggtgacaaaggcgggggtcat

SEQ ID NO: 2989782 - DNA, 25 bp, Homo sapien
gggtcatgtagcgtgccttcacccc

SEQ ID NO: 2989783 - DNA, 25 bp, Homo sapien
caaaggcgggggtcatgtagcgtgc

SEQ ID NO: 2989784 - DNA, 25 bp, Homo sapien
agatgggcacgctgccgttgtccca

SEQ ID NO: 2989785 - DNA, 25 bp, Homo sapien
tgggctgtgatccagatgggcacgc

SEQ ID NO: 2989786 - DNA, 25 bp, Homo sapien
gtgaaccaccccgtggttctcgata

SEQ ID NO: 2989787 - DNA, 25 bp, Homo sapien
accccgtggttctcgatatatttgc

SEQ ID NO: 2989788 - DNA, 25 bp, Homo sapien
gagctcaaactcgatgtcccggaag

SEQ ID NO: 2989789 - DNA, 25 bp, Homo sapien
gagcagcatcccgtttggtccgtag

SEQ ID NO: 2989790 - DNA, 25 bp, Homo sapien
catggatgacgtagccaaggtcgct

SEQ ID NO: 2989791 - DNA, 25 bp, Homo sapien
tccggctccccgaagtagagtgtga

SEQ ID NO: 2989792 - DNA, 25 bp, Homo sapien
tacacgtggacgctctcaaagggct

SEQ ID NO: 2989793 - DNA, 25 bp, Homo sapien
tccttgttgtcaaagccgtgctccc

SEQ ID NO: 2989794 - DNA, 25 bp, Homo sapien
gcagcagagtagctaggtgcccatc

SEQ ID NO: 2989795 - DNA, 25 bp, Homo sapien
cccacagcgcggaagatggtcttca

SEQ ID NO: 2989796 - DNA, 25 bp, Homo sapien
gtccccagcagtcccatcacgagga

SEQ ID NO: 2989797 - DNA, 25 bp, Homo sapien
ctgggcgggagagcagatcttccct

SEQ ID NO: 2989798 - DNA, 25 bp, Homo sapien
agatcttcccttgggcaggagagta

SEQ ID NO: 2989799 - DNA, 25 bp, Homo sapien
gagagtaggccttccatcaggcgga

SEQ ID NO: 2989800 - DNA, 25 bp, Homo sapien
tgttcgctgcatatcctgagcccag

SEQ ID NO: 2989801 - DNA, 25 bp, Homo sapien
tgacggtttccgagctatcccagtg

SEQ ID NO: 2989802 - DNA, 25 bp, Homo sapien
tcatgcgtgtcctaggaggctcctg

SEQ ID NO: 2989803 - DNA, 25 bp, Homo sapien
ttccaggccgggcaaatgacaaggt

SEQ ID NO: 2989804 - DNA, 25 bp, Homo sapien
tggaagagcaagcagcacgcgttgg

SEQ ID NO: 2989805 - DNA, 25 bp, Homo sapien
ctggaagagcaagcagcacgcgttg

SEQ ID NO: 2989806 - DNA, 25 bp, Homo sapien
ggaagagcaagcagcacgcgttggt

SEQ ID NO: 2989807 - DNA, 25 bp, Homo sapien
ggtccgtccgcgaccagcagagcat

SEQ ID NO: 2989808 - DNA, 25 bp, Homo sapien
aggcagggtccgtccgcgaccagca

SEQ ID NO: 2989809 - DNA, 25 bp, Homo sapien
gcagagcatcgcagcgagacagccg

SEQ ID NO: 2989810 - DNA, 25 bp, Homo sapien
gcgaccagcagagcatcgcagcgag

SEQ ID NO: 2989811 - DNA, 25 bp, Homo sapien
tcgggagcgggttttgcaggaggag

SEQ ID NO: 2989812 - DNA, 25 bp, Homo sapien
tggacctgggctgcgaggcttatta

SEQ ID NO: 2989813 - DNA, 25 bp, Homo sapien
cagcgccgcttcgggagcgggtttt

SEQ ID NO: 2989814 - DNA, 25 bp, Homo sapien
ggctcgccgggggctctggacctgg

SEQ ID NO: 2989815 - DNA, 25 bp, Homo sapien
tctgcaggttccagcgcccgcagag

SEQ ID NO: 2989816 - DNA, 25 bp, Homo sapien
gactgtcgcggcttggcctttattc

SEQ ID NO: 2989817 - DNA, 25 bp, Homo sapien
ctgtcgcggcttggcctttattccc

SEQ ID NO: 2989818 - DNA, 25 bp, Homo sapien
tcccagctgaccgaggccgggtctg

SEQ ID NO: 2989819 - DNA, 25 bp, Homo sapien
cgctggggtcaatggtgggaccgtc

SEQ ID NO: 2989820 - DNA, 25 bp, Homo sapien
ccacgctggggtcaatggtgggacc

SEQ ID NO: 2989821 - DNA, 25 bp, Homo sapien
cacgctggggtcaatggtgggaccg

SEQ ID NO: 2989822 - DNA, 25 bp, Homo sapien
ctggggtcaatggtgggaccgtcgg

SEQ ID NO: 2989823 - DNA, 25 bp, Homo sapien
tccaggttcaaacgtttctcgtgcc

SEQ ID NO: 2989824 - DNA, 25 bp, Homo sapien
gcgcccagccaaaaccattcattct

SEQ ID NO: 2989825 - DNA, 25 bp, Homo sapien
aacgtttctcgtgcctcagtgtccc

SEQ ID NO: 2989826 - DNA, 25 bp, Homo sapien
ttcattctttatcaaagtccgaaga

SEQ ID NO: 2989827 - DNA, 25 bp, Homo sapien
tctgggaagcggagatccttgacct

SEQ ID NO: 2989828 - DNA, 25 bp, Homo sapien
accacgcgtggccttgagatgggat

SEQ ID NO: 2989829 - DNA, 25 bp, Homo sapien
cggtgttttgtgacagcagcaggaa

SEQ ID NO: 2989830 - DNA, 25 bp, Homo sapien
gacacagcattttacccctctggag

SEQ ID NO: 2989831 - DNA, 25 bp, Homo sapien
ggtgcttgttctcaagtccggagac

SEQ ID NO: 2989832 - DNA, 25 bp, Homo sapien
aaaaccaccacctctggacagcagc

SEQ ID NO: 2989833 - DNA, 25 bp, Homo sapien
tccggagacactggtggtttcactt

SEQ ID NO: 2989834 - DNA, 25 bp, Homo sapien
acactggtggtttcacttaaggaag

SEQ ID NO: 2989835 - DNA, 25 bp, Homo sapien
ccagaggagtagcaaatgagtgacc

SEQ ID NO: 2989836 - DNA, 25 bp, Homo sapien
gccagcgtggatcctttcttcggtg

SEQ ID NO: 2989837 - DNA, 25 bp, Homo sapien
cacagcaagttgcatggaagccatg

SEQ ID NO: 2989838 - DNA, 25 bp, Homo sapien
gaagccatgtgaggtaaactccaac

SEQ ID NO: 2989839 - DNA, 25 bp, Homo sapien
tccctactgccatcagcggtgttgg

SEQ ID NO: 2989840 - DNA, 25 bp, Homo sapien
taaaagcactgtctccctactgcca

SEQ ID NO: 2989841 - DNA, 25 bp, Homo sapien
ttctaaaagcactgtctccctactg

SEQ ID NO: 2989842 - DNA, 25 bp, Homo sapien
tctaaaagcactgtctccctactgc

SEQ ID NO: 2989843 - DNA, 25 bp, Homo sapien
cagtagtataagaccgtagcagcag

SEQ ID NO: 2989844 - DNA, 25 bp, Homo sapien
tataagaccgtagcagcagctccat

SEQ ID NO: 2989845 - DNA, 25 bp, Homo sapien
tatccagtagtataagaccgtagca

SEQ ID NO: 2989846 - DNA, 25 bp, Homo sapien
tagatatccagtagtataagaccgt

SEQ ID NO: 2989847 - DNA, 25 bp, Homo sapien
cgccgccagtcacccgcccggaccg

SEQ ID NO: 2989848 - DNA, 25 bp, Homo sapien
ccgcgcgctgcccaaatcccgtgcg

SEQ ID NO: 2989849 - DNA, 25 bp, Homo sapien
cgcgctgcccaaatcccgtgcgggc

SEQ ID NO: 2989850 - DNA, 25 bp, Homo sapien
gcgccccgccggcagcacacaaagc

SEQ ID NO: 2989851 - DNA, 25 bp, Homo sapien
cttgcggagccgcttgctcaggatg

SEQ ID NO: 2989852 - DNA, 25 bp, Homo sapien
gcttgctcaggatgcactcggcggc

SEQ ID NO: 2989853 - DNA, 25 bp, Homo sapien
tgcggagccgcttgctcaggatgca

SEQ ID NO: 2989854 - DNA, 25 bp, Homo sapien
gagccgcttgctcaggatgcactcg

SEQ ID NO: 2989855 - DNA, 25 bp, Homo sapien
ttggaggaccagccgcgccacttga

SEQ ID NO: 2989856 - DNA, 25 bp, Homo sapien
agccgcgccacttgaccaggtactc

SEQ ID NO: 2989857 - DNA, 25 bp, Homo sapien
cgccacttgaccaggtactccagct

SEQ ID NO: 2989858 - DNA, 25 bp, Homo sapien
accagccgcgccacttgaccaggta

SEQ ID NO: 2989859 - DNA, 25 bp, Homo sapien
ccaggagcagcctcgggtccaggat

SEQ ID NO: 2989860 - DNA, 25 bp, Homo sapien
gggtccaggatgttctcctccggct

SEQ ID NO: 2989861 - DNA, 25 bp, Homo sapien
ctcctccggctcccagctgttatgt

SEQ ID NO: 2989862 - DNA, 25 bp, Homo sapien
ttcttctggaaggccaggagcagcc

SEQ ID NO: 2989863 - DNA, 25 bp, Homo sapien
agcacgactccaaccagccaccgtc

SEQ ID NO: 2989864 - DNA, 25 bp, Homo sapien
gggacttttacagccagccacagag

SEQ ID NO: 2989865 - DNA, 25 bp, Homo sapien
caatcttgctaagggacctcagacc

SEQ ID NO: 2989866 - DNA, 25 bp, Homo sapien
gcgagcagcgcccagcacgactcca

SEQ ID NO: 2989867 - DNA, 25 bp, Homo sapien
ttcttctcagggatggatacaggct

SEQ ID NO: 2989868 - DNA, 25 bp, Homo sapien
gttcttctcagggatggatacaggc

SEQ ID NO: 2989869 - DNA, 25 bp, Homo sapien
cttctcagggatggatacaggctgg

SEQ ID NO: 2989870 - DNA, 25 bp, Homo sapien
tcttctcagggatggatacaggctg

SEQ ID NO: 2989871 - DNA, 25 bp, Homo sapien
gcaactgaaaaagttggtttttgca

SEQ ID NO: 2989872 - DNA, 25 bp, Homo sapien
tgcaagtatggctgtcggaaacacc

SEQ ID NO: 2989873 - DNA, 25 bp, Homo sapien
tatggctgtcggaaacaccaaagca

SEQ ID NO: 2989874 - DNA, 25 bp, Homo sapien
aagttggtttttgcaagtatggctg

SEQ ID NO: 2989875 - DNA, 25 bp, Homo sapien
ccggcctctcggcctcttgcctctc

SEQ ID NO: 2989876 - DNA, 25 bp, Homo sapien
cagtgagcttccttggccggcctct

SEQ ID NO: 2989877 - DNA, 25 bp, Homo sapien
gcagtgagcttccttggccggcctc

SEQ ID NO: 2989878 - DNA, 25 bp, Homo sapien
cttgcctctcttccggttctgcacc

SEQ ID NO: 2989879 - DNA, 25 bp, Homo sapien
tgttttccgagtagagggacagact

SEQ ID NO: 2989880 - DNA, 25 bp, Homo sapien
ggctcctgttttccgagtagaggga

SEQ ID NO: 2989881 - DNA, 25 bp, Homo sapien
ctcctgttttccgagtagagggaca

SEQ ID NO: 2989882 - DNA, 25 bp, Homo sapien
ggtcagcatacccagcgcagccacc

SEQ ID NO: 2989883 - DNA, 25 bp, Homo sapien
tcccgagaaggccaaagcacatcat

SEQ ID NO: 2989884 - DNA, 25 bp, Homo sapien
gcttttgagtcacatccagccggca

SEQ ID NO: 2989885 - DNA, 25 bp, Homo sapien
tcgatttaaggtgcacccgcaggtg

SEQ ID NO: 2989886 - DNA, 25 bp, Homo sapien
acagtgcccggaggagggaatcaaa

SEQ ID NO: 2989887 - DNA, 25 bp, Homo sapien
ccgtccaccatcagctttcaagggg

SEQ ID NO: 2989888 - DNA, 25 bp, Homo sapien
catcagctttcaagggggatgcaga

SEQ ID NO: 2989889 - DNA, 25 bp, Homo sapien
tcaagggggatgcagatttagctcc

SEQ ID NO: 2989890 - DNA, 25 bp, Homo sapien
ttcaagggggatgcagatttagctc

SEQ ID NO: 2989891 - DNA, 25 bp, Homo sapien
ttggatttggagggagcatcgggtt

SEQ ID NO: 2989892 - DNA, 25 bp, Homo sapien
tggatttggagggagcatcgggttc

SEQ ID NO: 2989893 - DNA, 25 bp, Homo sapien
tgtagtgcacgatggagctctgcca

SEQ ID NO: 2989894 - DNA, 25 bp, Homo sapien
ggatccttcagctcgggtttggcca

SEQ ID NO: 2989895 - DNA, 25 bp, Homo sapien
tcctggctggtctgaacggacactg

SEQ ID NO: 2989896 - DNA, 25 bp, Homo sapien
caaatacgtgctcgatgaggctgcg

SEQ ID NO: 2989897 - DNA, 25 bp, Homo sapien
gaaatggaacatgcttcagtgggcc

SEQ ID NO: 2989898 - DNA, 25 bp, Homo sapien
tagcccttcaattcgccgaggtggg

SEQ ID NO: 2989899 - DNA, 25 bp, Homo sapien
tcttcaggtggaacccagctgtggg

SEQ ID NO: 2989900 - DNA, 25 bp, Homo sapien
gtgattcagtcacgcaggccaggga

SEQ ID NO: 2989901 - DNA, 25 bp, Homo sapien
ggttcaaagcttgatcctcccctga

SEQ ID NO: 2989902 - DNA, 25 bp, Homo sapien
tccagctaggtcagaatttcgagtg

SEQ ID NO: 2989903 - DNA, 25 bp, Homo sapien
cagaagtgccagatacctagctaca

SEQ ID NO: 2989904 - DNA, 25 bp, Homo sapien
gtctccccttagtgaaagctctcgg

SEQ ID NO: 2989905 - DNA, 25 bp, Homo sapien
gatgcacttgagtaaaatctggtca

SEQ ID NO: 2989906 - DNA, 25 bp, Homo sapien
gtaggcactacctgttcccaactca

SEQ ID NO: 2989907 - DNA, 25 bp, Homo sapien
ggaagcatttccttaaactggttga

SEQ ID NO: 2989908 - DNA, 25 bp, Homo sapien
aaaaatcttctgacgccatttgctg

SEQ ID NO: 2989909 - DNA, 25 bp, Homo sapien
ggatgaccgtcctcccagcccctcc

SEQ ID NO: 2989910 - DNA, 25 bp, Homo sapien
tgaggcccggcgctcgagccacgaa

SEQ ID NO: 2989911 - DNA, 25 bp, Homo sapien
gaggtccagccgcccggatgaccgt

SEQ ID NO: 2989912 - DNA, 25 bp, Homo sapien
gcacccatcgctcccggtgccctcg

SEQ ID NO: 2989913 - DNA, 25 bp, Homo sapien
ctgaagtccgagactggcgtggctc

SEQ ID NO: 2989914 - DNA, 25 bp, Homo sapien
ggcttcgcaccaatcctgatccagg

SEQ ID NO: 2989915 - DNA, 25 bp, Homo sapien
tctgtccgtttgatgctggcttcgc

SEQ ID NO: 2989916 - DNA, 25 bp, Homo sapien
gactccgtgctgtccgtcgtggaag

SEQ ID NO: 2989917 - DNA, 25 bp, Homo sapien
tcgaaacatgggtttgtccccgcca

SEQ ID NO: 2989918 - DNA, 25 bp, Homo sapien
gaaacatgggtttgtccccgccagc

SEQ ID NO: 2989919 - DNA, 25 bp, Homo sapien
cgaaacatgggtttgtccccgccag

SEQ ID NO: 2989920 - DNA, 25 bp, Homo sapien
cagttgacttaaatcggcccctaga

SEQ ID NO: 2989921 - DNA, 25 bp, Homo sapien
cagcaagtgcattggaacccaggca

SEQ ID NO: 2989922 - DNA, 25 bp, Homo sapien
tttagggacgtgagcttacggcttc

SEQ ID NO: 2989923 - DNA, 25 bp, Homo sapien
tgaaattcacaaggatccaaagccc

SEQ ID NO: 2989924 - DNA, 25 bp, Homo sapien
agctcggtggcacagcccggctgta

SEQ ID NO: 2989925 - DNA, 25 bp, Homo sapien
ttcgattccgggctcagctcggtgg

SEQ ID NO: 2989926 - DNA, 25 bp, Homo sapien
tccgaccgtccgtttcgcaatgtgg

SEQ ID NO: 2989927 - DNA, 25 bp, Homo sapien
gctgttctgggacctcgagcagtcg

SEQ ID NO: 2989928 - DNA, 25 bp, Homo sapien
ttgacgccttggaaacccgtgcgcg

SEQ ID NO: 2989929 - DNA, 25 bp, Homo sapien
gggcgcagtcgctttcttgcagcga

SEQ ID NO: 2989930 - DNA, 25 bp, Homo sapien
cagcgaccaggtgaattgcccttga

SEQ ID NO: 2989931 - DNA, 25 bp, Homo sapien
agagccgtcaccacgtggcgggtgg

SEQ ID NO: 2989932 - DNA, 25 bp, Homo sapien
agaaacccaatcccaggttgatgtc

SEQ ID NO: 2989933 - DNA, 25 bp, Homo sapien
ttctcggcacctttttcataccagc

SEQ ID NO: 2989934 - DNA, 25 bp, Homo sapien
tcttgtcttatcttgagatctccaa

SEQ ID NO: 2989935 - DNA, 25 bp, Homo sapien
aggctggtgatgcatgggaccttct

SEQ ID NO: 2989936 - DNA, 25 bp, Homo sapien
cctgggtgacagattgaaactccat

SEQ ID NO: 2989937 - DNA, 25 bp, Homo sapien
aagattgtgccactgtgctctagcc

SEQ ID NO: 2989938 - DNA, 25 bp, Homo sapien
agcctgggtgacagattgaaactcc

SEQ ID NO: 2989939 - DNA, 25 bp, Homo sapien
ctagcctgggtgacagattgaaact

SEQ ID NO: 2989940 - DNA, 25 bp, Homo sapien
gagcaccgaagtcaaagtcatcagc

SEQ ID NO: 2989941 - DNA, 25 bp, Homo sapien
tgctgctatggccattgcgtcccct

SEQ ID NO: 2989942 - DNA, 25 bp, Homo sapien
gagaaatccagggaagacgaatgct

SEQ ID NO: 2989943 - DNA, 25 bp, Homo sapien
gagagttatcgagcctgcgagctga

SEQ ID NO: 2989944 - DNA, 25 bp, Homo sapien
gttattcctcttgcctgccaacaag

SEQ ID NO: 2989945 - DNA, 25 bp, Homo sapien
gagttattcctcttgcctgccaaca

SEQ ID NO: 2989946 - DNA, 25 bp, Homo sapien
atgagttattcctcttgcctgccaa

SEQ ID NO: 2989947 - DNA, 25 bp, Homo sapien
ttattcctcttgcctgccaacaagt

SEQ ID NO: 2989948 - DNA, 25 bp, Homo sapien
atcatgatagccgtttcctgccttg

SEQ ID NO: 2989949 - DNA, 25 bp, Homo sapien
tcccttctaggaagagcggaagtga

SEQ ID NO: 2989950 - DNA, 25 bp, Homo sapien
gctgggagtacaaaatcctgtgcat

SEQ ID NO: 2989951 - DNA, 25 bp, Homo sapien
gattgccgagcagaatcccttctag

SEQ ID NO: 2989952 - DNA, 25 bp, Homo sapien
tcagggccacgtgagtcttagtacc

SEQ ID NO: 2989953 - DNA, 25 bp, Homo sapien
gctgcccgagtgaaggaccctttca

SEQ ID NO: 2989954 - DNA, 25 bp, Homo sapien
tgagccaggtgtaatgtaaacccct

SEQ ID NO: 2989955 - DNA, 25 bp, Homo sapien
gcgatgcaacctatcctggcaggaa

SEQ ID NO: 2989956 - DNA, 25 bp, Homo sapien
gtgtgcatgcatgtgcgtgcacacg

SEQ ID NO: 2989957 - DNA, 25 bp, Homo sapien
catgtgcgtgcacacgtgtgcgcgc

SEQ ID NO: 2989958 - DNA, 25 bp, Homo sapien
tgcgcgcgtgtgtgcatgtatgcat

SEQ ID NO: 2989959 - DNA, 25 bp, Homo sapien
tgcatgcatgtgcgtgcacacgtgt

SEQ ID NO: 2989960 - DNA, 25 bp, Homo sapien
gcctgacacataagagcttactaac

SEQ ID NO: 2989961 - DNA, 25 bp, Homo sapien
cgtgtgaactgtttggataaggcct

SEQ ID NO: 2989962 - DNA, 25 bp, Homo sapien
ctaactgttggctgggattatttct

SEQ ID NO: 2989963 - DNA, 25 bp, Homo sapien
ttatttttggatctggtcttcgtgt

SEQ ID NO: 2989964 - DNA, 25 bp, Homo sapien
ctgtccacagctccatttcttggtt

SEQ ID NO: 2989965 - DNA, 25 bp, Homo sapien
tgtccacagctccatttcttggtta

SEQ ID NO: 2989966 - DNA, 25 bp, Homo sapien
gtccacagctccatttcttggttac

SEQ ID NO: 2989967 - DNA, 25 bp, Homo sapien
tgtgcatgcgatacaacccagagaa

SEQ ID NO: 2989968 - DNA, 25 bp, Homo sapien
gggagaccagaatgggtccctctgc

SEQ ID NO: 2989969 - DNA, 25 bp, Homo sapien
tctgccatttgacccacattgggct

SEQ ID NO: 2989970 - DNA, 25 bp, Homo sapien
ctgggtgggagttctcaggttctct

SEQ ID NO: 2989971 - DNA, 25 bp, Homo sapien
tgctagcagagccctcgagtggaga

SEQ ID NO: 2989972 - DNA, 25 bp, Homo sapien
ctagcagagccctcgagtggagaag

SEQ ID NO: 2989973 - DNA, 25 bp, Homo sapien
cctgctagcagagccctcgagtgga

SEQ ID NO: 2989974 - DNA, 25 bp, Homo sapien
cagagccctcgagtggagaagggtg

SEQ ID NO: 2989975 - DNA, 25 bp, Homo sapien
caggaagccgcgacccgggaacgcg

SEQ ID NO: 2989976 - DNA, 25 bp, Homo sapien
ttctgcagacgcagcgatcttcctc

SEQ ID NO: 2989977 - DNA, 25 bp, Homo sapien
cctcctggttgaggtggccgcacag

SEQ ID NO: 2989978 - DNA, 25 bp, Homo sapien
gcggtggccagctttctgcagacgc

SEQ ID NO: 2989979 - DNA, 25 bp, Homo sapien
cccctccatccagtatttcggttga

SEQ ID NO: 2989980 - DNA, 25 bp, Homo sapien
ccatccagtatttcggttgatttca

SEQ ID NO: 2989981 - DNA, 25 bp, Homo sapien
gaactgcaataccagtaaccttggt

SEQ ID NO: 2989982 - DNA, 25 bp, Homo sapien
tcttccccttccacgaactgcaata

SEQ ID NO: 2989983 - DNA, 25 bp, Homo sapien
catcgtgatcgtgatgagcaaatac

SEQ ID NO: 2989984 - DNA, 25 bp, Homo sapien
tgtccggggttagcgatccgcagcc

SEQ ID NO: 2989985 - DNA, 25 bp, Homo sapien
caagaacaagaacggacgcatcgtg

SEQ ID NO: 2989986 - DNA, 25 bp, Homo sapien
catgcaggcggtgaagatcaagtcc

SEQ ID NO: 2989987 - DNA, 25 bp, Homo sapien
gggcagttgccctcccgcaatgcag

SEQ ID NO: 2989988 - DNA, 25 bp, Homo sapien
tttgcactatttcctgtggcgcgtt

SEQ ID NO: 2989989 - DNA, 25 bp, Homo sapien
ctctgagctagccaccggcggggca

SEQ ID NO: 2989990 - DNA, 25 bp, Homo sapien
gcgcgtttggcgctaaaactgtaaa

SEQ ID NO: 2989991 - DNA, 25 bp, Homo sapien
tgagcggaaagtcctttgcctggga

SEQ ID NO: 2989992 - DNA, 25 bp, Homo sapien
caggacacgtatcgttttctctctc

SEQ ID NO: 2989993 - DNA, 25 bp, Homo sapien
aaggtgcaggagtcgtcaccaggac

SEQ ID NO: 2989994 - DNA, 25 bp, Homo sapien
gaagagacctgccagcacatgtttg

SEQ ID NO: 2989995 - DNA, 25 bp, Homo sapien
gagacgttgggatcctctgcatcac

SEQ ID NO: 2989996 - DNA, 25 bp, Homo sapien
gagacagaatcagaccactcacctg

SEQ ID NO: 2989997 - DNA, 25 bp, Homo sapien
aaactggcccgccaaaatgccatgc

SEQ ID NO: 2989998 - DNA, 25 bp, Homo sapien
catttcccaggcaaggaagtctgag

SEQ ID NO: 2989999 - DNA, 25 bp, Homo sapien
gtagcaccgggcaaggctgtctccc

SEQ ID NO: 2990000 - DNA, 25 bp, Homo sapien
tggttcctggatcacggagcagtgc

SEQ ID NO: 2990001 - DNA, 25 bp, Homo sapien
tgactagcttgctgggtagcaccgg

SEQ ID NO: 2990002 - DNA, 25 bp, Homo sapien
cttgacatccggtgagggccgctcc

SEQ ID NO: 2990003 - DNA, 25 bp, Homo sapien
tagccactggcacacggatctgcat

SEQ ID NO: 2990004 - DNA, 25 bp, Homo sapien
taaggtgtaccattcggcggcattt

SEQ ID NO: 2990005 - DNA, 25 bp, Homo sapien
tacctccgtgacattgggcttcagt

SEQ ID NO: 2990006 - DNA, 25 bp, Homo sapien
tagtaccctcacaaggtggcacagc

SEQ ID NO: 2990007 - DNA, 25 bp, Homo sapien
atgtgccacagaggctcacctgtct

SEQ ID NO: 2990008 - DNA, 25 bp, Homo sapien
catgatcccagctcggagaaggtaa

SEQ ID NO: 2990009 - DNA, 25 bp, Homo sapien
tctcttccaggcgttttcaccggct

SEQ ID NO: 2990010 - DNA, 25 bp, Homo sapien
gaaaatggcgtttactctcttccag

SEQ ID NO: 2990011 - DNA, 25 bp, Homo sapien
gcagatcaagttccgaggccgggaa

SEQ ID NO: 2990012 - DNA, 25 bp, Homo sapien
gagagatggctcacaaatggtcgtc

SEQ ID NO: 2990013 - DNA, 25 bp, Homo sapien
ccagggttcaatgggagcaggtttc

SEQ ID NO: 2990014 - DNA, 25 bp, Homo sapien
agcaggtttcgttggcatgtagcac

SEQ ID NO: 2990015 - DNA, 25 bp, Homo sapien
gtagcggcagccagtcacatcgtgt

SEQ ID NO: 2990016 - DNA, 25 bp, Homo sapien
tagataattttcactccctgcctgt

SEQ ID NO: 2990017 - DNA, 25 bp, Homo sapien
tcatctgagtgcgacgtagcggcag

SEQ ID NO: 2990018 - DNA, 25 bp, Homo sapien
ggcatagctatgtggccccgggaac

SEQ ID NO: 2990019 - DNA, 25 bp, Homo sapien
gaaggcatccggagactgtgtccca

SEQ ID NO: 2990020 - DNA, 25 bp, Homo sapien
tcattaaaccaagcactcgggcctc

SEQ ID NO: 2990021 - DNA, 25 bp, Homo sapien
caacagacttaactaggcgctgacg

SEQ ID NO: 2990022 - DNA, 25 bp, Homo sapien
tgactcccgaggagcacagagcgtt

SEQ ID NO: 2990023 - DNA, 25 bp, Homo sapien
cagccgtgcctgtatgtgtgtttaa

SEQ ID NO: 2990024 - DNA, 25 bp, Homo sapien
gaagtgtggcgatcatcacataacc

SEQ ID NO: 2990025 - DNA, 25 bp, Homo sapien
tgcggttcccggacagcaacggcct

SEQ ID NO: 2990026 - DNA, 25 bp, Homo sapien
ccctggagcagatttgcggcgtgtt

SEQ ID NO: 2990027 - DNA, 25 bp, Homo sapien
tatgcctgacgcagtagagggctct

SEQ ID NO: 2990028 - DNA, 25 bp, Homo sapien
gactcgagacctgccctgtgttgtg

SEQ ID NO: 2990029 - DNA, 25 bp, Homo sapien
cagccccgcggttcaatgagcagat

SEQ ID NO: 2990030 - DNA, 25 bp, Homo sapien
ggaagatgtcaggagccctcggtct

SEQ ID NO: 2990031 - DNA, 25 bp, Homo sapien
gtttaagccaactcctgcctggagg

SEQ ID NO: 2990032 - DNA, 25 bp, Homo sapien
cccaatgaaagcgaactgaggtctc

SEQ ID NO: 2990033 - DNA, 25 bp, Homo sapien
gctgtaggtcccaagcacagtatct

SEQ ID NO: 2990034 - DNA, 25 bp, Homo sapien
tctgtgtgttctgcgccaagccagg

SEQ ID NO: 2990035 - DNA, 25 bp, Homo sapien
aacggcctccattgacaggtgtcgg

SEQ ID NO: 2990036 - DNA, 25 bp, Homo sapien
gctgactgccagttgcgtgtctctc

SEQ ID NO: 2990037 - DNA, 25 bp, Homo sapien
catgagctctcgtctgtctgtcttg

SEQ ID NO: 2990038 - DNA, 25 bp, Homo sapien
caaaaaaggcccacctagattcagg

SEQ ID NO: 2990039 - DNA, 25 bp, Homo sapien
catgccacctgctccgagaggaagc

SEQ ID NO: 2990040 - DNA, 25 bp, Homo sapien
ccacctgctccgagaggaagccttc

SEQ ID NO: 2990041 - DNA, 25 bp, Homo sapien
cccacagccgtgttgggcaggcctg

SEQ ID NO: 2990042 - DNA, 25 bp, Homo sapien
aggtgcaaggatgggctgcccagag

SEQ ID NO: 2990043 - DNA, 25 bp, Homo sapien
ctgagggcttcttgtgtttggccat

SEQ ID NO: 2990044 - DNA, 25 bp, Homo sapien
gtttggccataatggatgtgtctgg

SEQ ID NO: 2990045 - DNA, 25 bp, Homo sapien
cacagattcgggcagtcccaggtgt

SEQ ID NO: 2990046 - DNA, 25 bp, Homo sapien
cactgagtccgagaagatttttggg

SEQ ID NO: 2990047 - DNA, 25 bp, Homo sapien
tccagcctgcaggaacagtaacggg

SEQ ID NO: 2990048 - DNA, 25 bp, Homo sapien
gatttttgggaagcaccagtcagtc

SEQ ID NO: 2990049 - DNA, 25 bp, Homo sapien
tttgcgtcaaatcctctgagccggg

SEQ ID NO: 2990050 - DNA, 25 bp, Homo sapien
taagaattttctgtcggccagggcc

SEQ ID NO: 2990051 - DNA, 25 bp, Homo sapien
caagcagtgcattggtgcggaagat

SEQ ID NO: 2990052 - DNA, 25 bp, Homo sapien
tgaacagccattttgctctaagaat

SEQ ID NO: 2990053 - DNA, 25 bp, Homo sapien
ccatcttcccgtggacctgatcgga

SEQ ID NO: 2990054 - DNA, 25 bp, Homo sapien
cccgtggacctgatcggaggtgtca

SEQ ID NO: 2990055 - DNA, 25 bp, Homo sapien
ggagggccgggtgtgtagagccttc

SEQ ID NO: 2990056 - DNA, 25 bp, Homo sapien
tgatcggaggtgtcatctcccgctg

SEQ ID NO: 2990057 - DNA, 25 bp, Homo sapien
tttcaataccgttctctggtgggac

SEQ ID NO: 2990058 - DNA, 25 bp, Homo sapien
tagagctgctggagaatacatgagc

SEQ ID NO: 2990059 - DNA, 25 bp, Homo sapien
tggcctctcggcctttggcattgcc

SEQ ID NO: 2990060 - DNA, 25 bp, Homo sapien
gaacaaaggttgtagtgtcttggcc

SEQ ID NO: 2990061 - DNA, 25 bp, Homo sapien
gccttccctgctgactttccgcctc

SEQ ID NO: 2990062 - DNA, 25 bp, Homo sapien
cttccctgctgactttccgcctctt

SEQ ID NO: 2990063 - DNA, 25 bp, Homo sapien
tggtcagggtcagccagacgccact

SEQ ID NO: 2990064 - DNA, 25 bp, Homo sapien
gcatcctgtccactcttagcagcct

SEQ ID NO: 2990065 - DNA, 25 bp, Homo sapien
cacagtttgatgtgggtcacggttt

SEQ ID NO: 2990066 - DNA, 25 bp, Homo sapien
tctcgggcgcgaccagcagggattc

SEQ ID NO: 2990067 - DNA, 25 bp, Homo sapien
ttccccttctaggagacgcagagag

SEQ ID NO: 2990068 - DNA, 25 bp, Homo sapien
gcagggattcctcgtccacacagtt

SEQ ID NO: 2990069 - DNA, 25 bp, Homo sapien
gcatagtacactctccaaaccagga

SEQ ID NO: 2990070 - DNA, 25 bp, Homo sapien
ggtgacatcctgcatagaagcatag

SEQ ID NO: 2990071 - DNA, 25 bp, Homo sapien
gaaattgaggttggtacagtccaca

SEQ ID NO: 2990072 - DNA, 25 bp, Homo sapien
caggtctcacgggtattacaggcac

SEQ ID NO: 2990073 - DNA, 25 bp, Homo sapien
tgtggaccatgaggtgggccaaacc

SEQ ID NO: 2990074 - DNA, 25 bp, Homo sapien
gagaaccgtggatctcacacacgtg

SEQ ID NO: 2990075 - DNA, 25 bp, Homo sapien
acacgtgtttgtcacatgtgcagcg

SEQ ID NO: 2990076 - DNA, 25 bp, Homo sapien
cagagcgtgtgatagtatgagaacc

SEQ ID NO: 2990077 - DNA, 25 bp, Homo sapien
tgtccgccggagctctttcctcccg

SEQ ID NO: 2990078 - DNA, 25 bp, Homo sapien
ttggtcctccaacctcgtcctggag

SEQ ID NO: 2990079 - DNA, 25 bp, Homo sapien
ggatcgggttaaactcagatttctc

SEQ ID NO: 2990080 - DNA, 25 bp, Homo sapien
ctcccgctcttctgacaggatcggg

SEQ ID NO: 2990081 - DNA, 25 bp, Homo sapien
cagtttctgcgtggcggacttcatt

SEQ ID NO: 2990082 - DNA, 25 bp, Homo sapien
tggattgagagtccttaaggaggcc

SEQ ID NO: 2990083 - DNA, 25 bp, Homo sapien
taaggaggcctggacgccattctct

SEQ ID NO: 2990084 - DNA, 25 bp, Homo sapien
tctcggttgcttctgagtgttggca

SEQ ID NO: 2990085 - DNA, 25 bp, Homo sapien
tacggagactccttgcatggacgcc

SEQ ID NO: 2990086 - DNA, 25 bp, Homo sapien
atcttcccttcctagtccgaaatag

SEQ ID NO: 2990087 - DNA, 25 bp, Homo sapien
ataggagaaatctccctgcagaggg

SEQ ID NO: 2990088 - DNA, 25 bp, Homo sapien
gtcttccggagcgtatcttcccttc

SEQ ID NO: 2990089 - DNA, 25 bp, Homo sapien
tggggaccccggactgctaagcgcc

SEQ ID NO: 2990090 - DNA, 25 bp, Homo sapien
ctggggaccccggactgctaagcgc

SEQ ID NO: 2990091 - DNA, 25 bp, Homo sapien
cccggactgctaagcgcccgggaat

SEQ ID NO: 2990092 - DNA, 25 bp, Homo sapien
actgctaagcgcccgggaatggcag

SEQ ID NO: 2990093 - DNA, 25 bp, Homo sapien
ccgccgcgccgcccggttccgccat

SEQ ID NO: 2990094 - DNA, 25 bp, Homo sapien
tctctccctcagaagccgatccatc

SEQ ID NO: 2990095 - DNA, 25 bp, Homo sapien
ttctctccctcagaagccgatccat

SEQ ID NO: 2990096 - DNA, 25 bp, Homo sapien
ctctccctcagaagccgatccatct

SEQ ID NO: 2990097 - DNA, 25 bp, Homo sapien
tctccctcagaagccgatccatctt

SEQ ID NO: 2990098 - DNA, 25 bp, Homo sapien
ggccatcatccttctctggtggtga

SEQ ID NO: 2990099 - DNA, 25 bp, Homo sapien
tggccatcatccttctctggtggtg

SEQ ID NO: 2990100 - DNA, 25 bp, Homo sapien
ctttctggccatcatccttctctgg

SEQ ID NO: 2990101 - DNA, 25 bp, Homo sapien
catcatccttctctggtggtgacac

SEQ ID NO: 2990102 - DNA, 25 bp, Homo sapien
tccgcttgggttgtgacttcctcag

SEQ ID NO: 2990103 - DNA, 25 bp, Homo sapien
tacgggtaagtcgtatctgcagcac

SEQ ID NO: 2990104 - DNA, 25 bp, Homo sapien
ggatgctctgtgctaccgacagctt

SEQ ID NO: 2990105 - DNA, 25 bp, Homo sapien
tgcagcactgatttgcccttccggg

SEQ ID NO: 2990106 - DNA, 25 bp, Homo sapien
gattctggtggaccggtggcctctt

SEQ ID NO: 2990107 - DNA, 25 bp, Homo sapien
gctccgacgggcctaagactccgtg

SEQ ID NO: 2990108 - DNA, 25 bp, Homo sapien
gcctccccgctaacactatcgtatg

SEQ ID NO: 2990109 - DNA, 25 bp, Homo sapien
ctaagactccgtgggatggctctgg

SEQ ID NO: 2990110 - DNA, 25 bp, Homo sapien
caaaacagaagtcagggctactcac

SEQ ID NO: 2990111 - DNA, 25 bp, Homo sapien
tgggccgtgcgacactggcacaaaa

SEQ ID NO: 2990112 - DNA, 25 bp, Homo sapien
cacatagggtgacaaaccccgtggg

SEQ ID NO: 2990113 - DNA, 25 bp, Homo sapien
tttctaacagggattgcaatttgta

SEQ ID NO: 2990114 - DNA, 25 bp, Homo sapien
tagtgagggactttagcaacgtggc

SEQ ID NO: 2990115 - DNA, 25 bp, Homo sapien
caacatggtgctggcggttctagcc

SEQ ID NO: 2990116 - DNA, 25 bp, Homo sapien
gggttataacccagtgaatcacatg

SEQ ID NO: 2990117 - DNA, 25 bp, Homo sapien
ggagagccctgagtctatgcagatg

SEQ ID NO: 2990118 - DNA, 25 bp, Homo sapien
tcagtccaagtttcgacaggcagtt

SEQ ID NO: 2990119 - DNA, 25 bp, Homo sapien
gctggcagctgtcctagcagaagtg

SEQ ID NO: 2990120 - DNA, 25 bp, Homo sapien
tggctgtaaggatcaataacagggt

SEQ ID NO: 2990121 - DNA, 25 bp, Homo sapien
aaaggaagatgaaagttgacacagg

SEQ ID NO: 2990122 - DNA, 25 bp, Homo sapien
atgtcgctcccgtggctcagccgga

SEQ ID NO: 2990123 - DNA, 25 bp, Homo sapien
tgctggacgcccattgggagcacct

SEQ ID NO: 2990124 - DNA, 25 bp, Homo sapien
ccaggtctgaggactcgatgtcgct

SEQ ID NO: 2990125 - DNA, 25 bp, Homo sapien
tgcgagacgaactcctccaggtctg

SEQ ID NO: 2990126 - DNA, 25 bp, Homo sapien
gcagcatgatgggaaagtgacagca

SEQ ID NO: 2990127 - DNA, 25 bp, Homo sapien
acagctgctgtcatgcctcatgcag

SEQ ID NO: 2990128 - DNA, 25 bp, Homo sapien
atgcatcccagagaaagcgtcccgt

SEQ ID NO: 2990129 - DNA, 25 bp, Homo sapien
gcaaaagcatcccaacggtctgtgg

SEQ ID NO: 2990130 - DNA, 25 bp, Homo sapien
ggagagacagcgacaccattgagga

SEQ ID NO: 2990131 - DNA, 25 bp, Homo sapien
agaagcctcagtgattctattctgg

SEQ ID NO: 2990132 - DNA, 25 bp, Homo sapien
gaagcctcagtgattctattctggg

SEQ ID NO: 2990133 - DNA, 25 bp, Homo sapien
agcgacaccattgaggagctgctgg

SEQ ID NO: 2990134 - DNA, 25 bp, Homo sapien
ctgcttcctcgtcactcccctcgga

SEQ ID NO: 2990135 - DNA, 25 bp, Homo sapien
ggctgctggatctggtcctggaaca

SEQ ID NO: 2990136 - DNA, 25 bp, Homo sapien
tgggcatcgggcacccctgggggga

SEQ ID NO: 2990137 - DNA, 25 bp, Homo sapien
tggaacactggcaggtctccttccc

SEQ ID NO: 2990138 - DNA, 25 bp, Homo sapien
gtggtctgggtccaaaaccaccagc

SEQ ID NO: 2990139 - DNA, 25 bp, Homo sapien
tgggtccaaaaccaccagctgggac

SEQ ID NO: 2990140 - DNA, 25 bp, Homo sapien
accaccagctgggacccttcgtctt

SEQ ID NO: 2990141 - DNA, 25 bp, Homo sapien
caaaaccaccagctgggacccttcg

SEQ ID NO: 2990142 - DNA, 25 bp, Homo sapien
cagcttcaacttttcgatctgtcgg

SEQ ID NO: 2990143 - DNA, 25 bp, Homo sapien
gcagcctggaatcttaccatcaggg

SEQ ID NO: 2990144 - DNA, 25 bp, Homo sapien
ttcgatctgtcggttcaggtagttc

SEQ ID NO: 2990145 - DNA, 25 bp, Homo sapien
tcagggcagcctggaatcttaccat

SEQ ID NO: 2990146 - DNA, 25 bp, Homo sapien
cctcgttggcggctgcgcaggtctt

SEQ ID NO: 2990147 - DNA, 25 bp, Homo sapien
tgcgctcgctcgaggccattgcgtg

SEQ ID NO: 2990148 - DNA, 25 bp, Homo sapien
ggtgctgctgcacctcatagagatt

SEQ ID NO: 2990149 - DNA, 25 bp, Homo sapien
cattgcgtggcggtcgtgactcttc

SEQ ID NO: 2990150 - DNA, 25 bp, Homo sapien
atcttacttttctagatgcctggcc

SEQ ID NO: 2990151 - DNA, 25 bp, Homo sapien
aaccctccaggaccggatggcgtgt

SEQ ID NO: 2990152 - DNA, 25 bp, Homo sapien
tgcctggccatggtacatggagaca

SEQ ID NO: 2990153 - DNA, 25 bp, Homo sapien
tggtacatggagacacccctgggaa

SEQ ID NO: 2990154 - DNA, 25 bp, Homo sapien
tccaaggcgcagctgatggaggcct

SEQ ID NO: 2990155 - DNA, 25 bp, Homo sapien
catcatctggaagcttaagggtcaa

SEQ ID NO: 2990156 - DNA, 25 bp, Homo sapien
gaggccttgatgaaagcgtagccca

SEQ ID NO: 2990157 - DNA, 25 bp, Homo sapien
gaaatcccaccagctatgtctgcgg

SEQ ID NO: 2990158 - DNA, 25 bp, Homo sapien
taaggcttcgggttgattgcataga

SEQ ID NO: 2990159 - DNA, 25 bp, Homo sapien
cagagatcctcctggtagtctaagg

SEQ ID NO: 2990160 - DNA, 25 bp, Homo sapien
gatgtcttaccactgaaaggctggc

SEQ ID NO: 2990161 - DNA, 25 bp, Homo sapien
tggagtcttaagtcccctgggagga

SEQ ID NO: 2990162 - DNA, 25 bp, Homo sapien
acgcatgtcctggtcgatgttctgc

SEQ ID NO: 2990163 - DNA, 25 bp, Homo sapien
ggatcctctccgtctcggccttctt

SEQ ID NO: 2990164 - DNA, 25 bp, Homo sapien
gatgtcgtcacgcatgtcctggtcg

SEQ ID NO: 2990165 - DNA, 25 bp, Homo sapien
accacttgtgtcatcacgcggatgt

SEQ ID NO: 2990166 - DNA, 25 bp, Homo sapien
tcagcttgggccaagtactgagcct

SEQ ID NO: 2990167 - DNA, 25 bp, Homo sapien
agtactgagcctcaaacagggcaat

SEQ ID NO: 2990168 - DNA, 25 bp, Homo sapien
tccttaaaatccgggtgtcctcagc

SEQ ID NO: 2990169 - DNA, 25 bp, Homo sapien
tcttccagttgctgggctcgagtgg

SEQ ID NO: 2990170 - DNA, 25 bp, Homo sapien
tggccttggcggtcatgaagcgact

SEQ ID NO: 2990171 - DNA, 25 bp, Homo sapien
tcactggagggtcgaacactgagag

SEQ ID NO: 2990172 - DNA, 25 bp, Homo sapien
tctgtcacccactagccagggaagg

SEQ ID NO: 2990173 - DNA, 25 bp, Homo sapien
gaagcgactagagtacctgaaccct

SEQ ID NO: 2990174 - DNA, 25 bp, Homo sapien
gaaggaggtgtttgtctcaagaatg

SEQ ID NO: 2990175 - DNA, 25 bp, Homo sapien
ggtgtcattgattcggactgaggtc

SEQ ID NO: 2990176 - DNA, 25 bp, Homo sapien
ccgcttcctgtagggaggccatgat

SEQ ID NO: 2990177 - DNA, 25 bp, Homo sapien
ccatgatggaaggaggtgtttgtct

SEQ ID NO: 2990178 - DNA, 25 bp, Homo sapien
tgtgcgcctcgtcgcggtgcttcat

SEQ ID NO: 2990179 - DNA, 25 bp, Homo sapien
gtgcttcatgcccaccaggctgctg

SEQ ID NO: 2990180 - DNA, 25 bp, Homo sapien
atgatgcgcctcttctccacgctga

SEQ ID NO: 2990181 - DNA, 25 bp, Homo sapien
aggctgctggcccattgctgcatga

SEQ ID NO: 2990182 - DNA, 25 bp, Homo sapien
ttaaagctcagcgggtgagacacgt

SEQ ID NO: 2990183 - DNA, 25 bp, Homo sapien
tttccgcgtcccgagacctggtcac

SEQ ID NO: 2990184 - DNA, 25 bp, Homo sapien
ctcagcgggtgagacacgtgccacc

SEQ ID NO: 2990185 - DNA, 25 bp, Homo sapien
aaagctcagcgggtgagacacgtgc

SEQ ID NO: 2990186 - DNA, 25 bp, Homo sapien
gaaaagcatctcctggttgtgtgac

SEQ ID NO: 2990187 - DNA, 25 bp, Homo sapien
tggtccagcctttcttgagcgcttg

SEQ ID NO: 2990188 - DNA, 25 bp, Homo sapien
ctacaacctccgcaattcaagcagt

SEQ ID NO: 2990189 - DNA, 25 bp, Homo sapien
cctggccagaaatgagtatggttaa

SEQ ID NO: 2990190 - DNA, 25 bp, Homo sapien
tgcagggttcacaggccatgagcct

SEQ ID NO: 2990191 - DNA, 25 bp, Homo sapien
gatggccaagtcctctcgtcctggt

SEQ ID NO: 2990192 - DNA, 25 bp, Homo sapien
ggcagctgagccgtgtaattaaaca

SEQ ID NO: 2990193 - DNA, 25 bp, Homo sapien
ggtgctggaccctcagagagaacct

SEQ ID NO: 2990194 - DNA, 25 bp, Homo sapien
ctccgggtgaacgcatatgctttct

SEQ ID NO: 2990195 - DNA, 25 bp, Homo sapien
tggtgtgctcccacggagcaagaga

SEQ ID NO: 2990196 - DNA, 25 bp, Homo sapien
caaagaggtgcagaacagtgagtgt

SEQ ID NO: 2990197 - DNA, 25 bp, Homo sapien
gagagggaaggaagactccgggtga

SEQ ID NO: 2990198 - DNA, 25 bp, Homo sapien
ttgacttgggaagcgctctagggac

SEQ ID NO: 2990199 - DNA, 25 bp, Homo sapien
gacattccgggcttgataggcaata

SEQ ID NO: 2990200 - DNA, 25 bp, Homo sapien
gcggatccggttatctacagcagca

SEQ ID NO: 2990201 - DNA, 25 bp, Homo sapien
tgagcgttagcattcgcggatccgg

SEQ ID NO: 2990202 - DNA, 25 bp, Homo sapien
taggttgtagactcgacatcagacg

SEQ ID NO: 2990203 - DNA, 25 bp, Homo sapien
gcttctgagctaagcttgcagcttg

SEQ ID NO: 2990204 - DNA, 25 bp, Homo sapien
cgcccatgtggacggacaggccatg

SEQ ID NO: 2990205 - DNA, 25 bp, Homo sapien
catcagacgaagagagacacaaagg

SEQ ID NO: 2990206 - DNA, 25 bp, Homo sapien
ccagttacgtgtgagacatcagaga

SEQ ID NO: 2990207 - DNA, 25 bp, Homo sapien
gccagtgcacagagctgcgccccac

SEQ ID NO: 2990208 - DNA, 25 bp, Homo sapien
ggagagccagttacgtgtgagacat

SEQ ID NO: 2990209 - DNA, 25 bp, Homo sapien
gagccagttacgtgtgagacatcag

SEQ ID NO: 2990210 - DNA, 25 bp, Homo sapien
tataggcctcaatctcgccgtcggt

SEQ ID NO: 2990211 - DNA, 25 bp, Homo sapien
gcagtgtggcttccgtctctgtccg

SEQ ID NO: 2990212 - DNA, 25 bp, Homo sapien
taggtattgaactggctctgcaggg

SEQ ID NO: 2990213 - DNA, 25 bp, Homo sapien
ccgtcggtggatttggcttgatgct

SEQ ID NO: 2990214 - DNA, 25 bp, Homo sapien
tgaagaggcaccaccgtgcgccagg

SEQ ID NO: 2990215 - DNA, 25 bp, Homo sapien
cgtgcctgaagaggcaccaccgtgc

SEQ ID NO: 2990216 - DNA, 25 bp, Homo sapien
ccaccgtgcgccaggtgtgacctgt

SEQ ID NO: 2990217 - DNA, 25 bp, Homo sapien
gtgcacgtgcctgaagaggcaccac

SEQ ID NO: 2990218 - DNA, 25 bp, Homo sapien
ctgcaactcctccgtgagtatcatt

SEQ ID NO: 2990219 - DNA, 25 bp, Homo sapien
gcaactcctccgtgagtatcatttg

SEQ ID NO: 2990220 - DNA, 25 bp, Homo sapien
actcctccgtgagtatcatttgttc

SEQ ID NO: 2990221 - DNA, 25 bp, Homo sapien
caactcctccgtgagtatcatttgt

SEQ ID NO: 2990222 - DNA, 25 bp, Homo sapien
agctcgccctggatggcttggcgga

SEQ ID NO: 2990223 - DNA, 25 bp, Homo sapien
tggtcttgttggaggtcatgtgctc

SEQ ID NO: 2990224 - DNA, 25 bp, Homo sapien
tttggtggtcttgttggaggtcatg

SEQ ID NO: 2990225 - DNA, 25 bp, Homo sapien
ccggatggcagcatccgtcttcctc

SEQ ID NO: 2990226 - DNA, 25 bp, Homo sapien
cagctggactggcatcggttggaaa

SEQ ID NO: 2990227 - DNA, 25 bp, Homo sapien
tgtgttggtccaagactctttgctg

SEQ ID NO: 2990228 - DNA, 25 bp, Homo sapien
tgagcagttcaaacatcgtgtcggg

SEQ ID NO: 2990229 - DNA, 25 bp, Homo sapien
agcaaaacacgtatgacctatcggg

SEQ ID NO: 2990230 - DNA, 25 bp, Homo sapien
tgttgaggaagttgatgagcccttg

SEQ ID NO: 2990231 - DNA, 25 bp, Homo sapien
caatgtcaccgttgattttggaaag

SEQ ID NO: 2990232 - DNA, 25 bp, Homo sapien
gccgggagatctcgctctggctgtt

SEQ ID NO: 2990233 - DNA, 25 bp, Homo sapien
tctcgatcaggatcgtgcgccggga

SEQ ID NO: 2990234 - DNA, 25 bp, Homo sapien
tgggcctggaccgccttgccatcgt

SEQ ID NO: 2990235 - DNA, 25 bp, Homo sapien
ctccatgatgtggagctccttcttg

SEQ ID NO: 2990236 - DNA, 25 bp, Homo sapien
tcgatcagcttgctcagccttttga

SEQ ID NO: 2990237 - DNA, 25 bp, Homo sapien
ttttgatttcaagctccaggggccc

SEQ ID NO: 2990238 - DNA, 25 bp, Homo sapien
tacagggagcatgcgcgtttgttat

SEQ ID NO: 2990239 - DNA, 25 bp, Homo sapien
tgggaggtgcccacgtcccagagct

SEQ ID NO: 2990240 - DNA, 25 bp, Homo sapien
aagtccgtgagcttggagccatttc

SEQ ID NO: 2990241 - DNA, 25 bp, Homo sapien
taaggctgcgtgcaaatccagcgac

SEQ ID NO: 2990242 - DNA, 25 bp, Homo sapien
tctcacagcatggtatttcggcagc

SEQ ID NO: 2990243 - DNA, 25 bp, Homo sapien
gacttgctactcaccaacagacggg

SEQ ID NO: 2990244 - DNA, 25 bp, Homo sapien
tgggacaccgatactcagctgacag

SEQ ID NO: 2990245 - DNA, 25 bp, Homo sapien
gcctggtcctccaacggaactgaga

SEQ ID NO: 2990246 - DNA, 25 bp, Homo sapien
tgtcacccggttgttctgctccagc

SEQ ID NO: 2990247 - DNA, 25 bp, Homo sapien
gagcttcttcaggtcgttgtccagg

SEQ ID NO: 2990248 - DNA, 25 bp, Homo sapien
tcatgtggtgctcgatctccttctg

SEQ ID NO: 2990249 - DNA, 25 bp, Homo sapien
gagctgcaccggtttttattcatca

SEQ ID NO: 2990250 - DNA, 25 bp, Homo sapien
gccctccatcgtcctgagccccggg

SEQ ID NO: 2990251 - DNA, 25 bp, Homo sapien
cctgagccccgggactgcgtggaca

SEQ ID NO: 2990252 - DNA, 25 bp, Homo sapien
tccatcgtcctgagccccgggactg

SEQ ID NO: 2990253 - DNA, 25 bp, Homo sapien
cgggactgcgtggacacggccggac

SEQ ID NO: 2990254 - DNA, 25 bp, Homo sapien
tacatcctggtgcagaacgcccacc

SEQ ID NO: 2990255 - DNA, 25 bp, Homo sapien
ggtgccctctatcccggcaccgagg

SEQ ID NO: 2990256 - DNA, 25 bp, Homo sapien
gagggccatgggattgtggatgccg

SEQ ID NO: 2990257 - DNA, 25 bp, Homo sapien
tctaatacccctacaagcatcttga

SEQ ID NO: 2990258 - DNA, 25 bp, Homo sapien
tgcttccaccagttgattcaggagg

SEQ ID NO: 2990259 - DNA, 25 bp, Homo sapien
tctgcttccaccagttgattcagga

SEQ ID NO: 2990260 - DNA, 25 bp, Homo sapien
ttgattcaggagggtcgccttctcc

SEQ ID NO: 2990261 - DNA, 25 bp, Homo sapien
gcttccaccagttgattcaggaggg

SEQ ID NO: 2990262 - DNA, 25 bp, Homo sapien
acctggcctcctacatggtcttcaa

SEQ ID NO: 2990263 - DNA, 25 bp, Homo sapien
tggtcttcaacggacagaggcctgt

SEQ ID NO: 2990264 - DNA, 25 bp, Homo sapien
tgcagtgaccttcatgacccacgtg

SEQ ID NO: 2990265 - DNA, 25 bp, Homo sapien
gtgaccttcatgacccacgtgtggc

SEQ ID NO: 2990266 - DNA, 25 bp, Homo sapien
agcctgtgggatagagcaagactgt

SEQ ID NO: 2990267 - DNA, 25 bp, Homo sapien
gcctgtgggatagagcaagactgtc

SEQ ID NO: 2990268 - DNA, 25 bp, Homo sapien
cctgtgggatagagcaagactgtct

SEQ ID NO: 2990269 - DNA, 25 bp, Homo sapien
cagcctgtgggatagagcaagactg

SEQ ID NO: 2990270 - DNA, 25 bp, Homo sapien
tgccaccaaggggggtagacagact

SEQ ID NO: 2990271 - DNA, 25 bp, Homo sapien
ttctagcagtaactcgtttggctca

SEQ ID NO: 2990272 - DNA, 25 bp, Homo sapien
cttcaatttctagcagtaactcgtt

SEQ ID NO: 2990273 - DNA, 25 bp, Homo sapien
gcagtaactcgtttggctcaagaac

SEQ ID NO: 2990274 - DNA, 25 bp, Homo sapien
ctgaggaacgcatctcttttgccag

SEQ ID NO: 2990275 - DNA, 25 bp, Homo sapien
tcggaatccactgaggaacgcatct

SEQ ID NO: 2990276 - DNA, 25 bp, Homo sapien
ggatctccgtctggccgatctcgga

SEQ ID NO: 2990277 - DNA, 25 bp, Homo sapien
tggccgatctcggaatccactgagg

SEQ ID NO: 2990278 - DNA, 25 bp, Homo sapien
tgttgttcgtgcacgtgcccgcgcg

SEQ ID NO: 2990279 - DNA, 25 bp, Homo sapien
gtgttgttcgtgcacgtgcccgcgc

SEQ ID NO: 2990280 - DNA, 25 bp, Homo sapien
gtgttgttcatgcacgtgctgtgtg

SEQ ID NO: 2990281 - DNA, 25 bp, Homo sapien
catttaaaaataccagcgtgctgtg

SEQ ID NO: 2990282 - DNA, 25 bp, Homo sapien
ttgtgaccatggagagacaacgcgg

SEQ ID NO: 2990283 - DNA, 25 bp, Homo sapien
cagcgttttgtgagatgacatgcac

SEQ ID NO: 2990284 - DNA, 25 bp, Homo sapien
gaacctttagcttgatgaccacttg

SEQ ID NO: 2990285 - DNA, 25 bp, Homo sapien
tccggcgcagctcaagctgcttgtg

SEQ ID NO: 2990286 - DNA, 25 bp, Homo sapien
gaacgtccctgattttccggcgcag

SEQ ID NO: 2990287 - DNA, 25 bp, Homo sapien
ccaactccatggcacggatcatctt

SEQ ID NO: 2990288 - DNA, 25 bp, Homo sapien
gtgacggtctctctgcgggcaaccg

SEQ ID NO: 2990289 - DNA, 25 bp, Homo sapien
gcaaggcccacatactccgaggtca

SEQ ID NO: 2990290 - DNA, 25 bp, Homo sapien
aaggcccacatactccgaggtcaca

SEQ ID NO: 2990291 - DNA, 25 bp, Homo sapien
ggcccacatactccgaggtcacaca

SEQ ID NO: 2990292 - DNA, 25 bp, Homo sapien
ggcaaggcccacatactccgaggtc

SEQ ID NO: 2990293 - DNA, 25 bp, Homo sapien
tgcttctctaggagggagctgctca

SEQ ID NO: 2990294 - DNA, 25 bp, Homo sapien
ccagttccaggacggttttggtgca

SEQ ID NO: 2990295 - DNA, 25 bp, Homo sapien
tcggcctcgagtgtgtcgaagtctg

SEQ ID NO: 2990296 - DNA, 25 bp, Homo sapien
tcgaagtctgcctgaatcaccgaca

SEQ ID NO: 2990297 - DNA, 25 bp, Homo sapien
tattttgtaaccctcgcacgctgaa

SEQ ID NO: 2990298 - DNA, 25 bp, Homo sapien
caaacatgtgagcagccggtggtgc

SEQ ID NO: 2990299 - DNA, 25 bp, Homo sapien
tggtgctattactggcctgggatca

SEQ ID NO: 2990300 - DNA, 25 bp, Homo sapien
gacctgatcaggagaggccgtgact

SEQ ID NO: 2990301 - DNA, 25 bp, Homo sapien
ttggagcggaacaggaacacgtagc

SEQ ID NO: 2990302 - DNA, 25 bp, Homo sapien
gctccagcactagggactgcttgga

SEQ ID NO: 2990303 - DNA, 25 bp, Homo sapien
gcagggccacgatctctgaaaggtt

SEQ ID NO: 2990304 - DNA, 25 bp, Homo sapien
gatgagagccagtcgcttgtccagg

SEQ ID NO: 2990305 - DNA, 25 bp, Homo sapien
gagggccctggtgactcgagcttgt

SEQ ID NO: 2990306 - DNA, 25 bp, Homo sapien
ctggtgactcgagcttgttggcgat

SEQ ID NO: 2990307 - DNA, 25 bp, Homo sapien
agcttgttggcgatcatctggctga

SEQ ID NO: 2990308 - DNA, 25 bp, Homo sapien
gcttgttggcgatcatctggctgac

SEQ ID NO: 2990309 - DNA, 25 bp, Homo sapien
tcatgacaaacacaattccggatct

SEQ ID NO: 2990310 - DNA, 25 bp, Homo sapien
taaacgatgcccttctgagggtaca

SEQ ID NO: 2990311 - DNA, 25 bp, Homo sapien
taggaacacaaaagattccaagtcc

SEQ ID NO: 2990312 - DNA, 25 bp, Homo sapien
ggtacatgtggtttttaggaacaca

SEQ ID NO: 2990313 - DNA, 25 bp, Homo sapien
agtcacaggctctgtctttgcgatg

SEQ ID NO: 2990314 - DNA, 25 bp, Homo sapien
ccaaagtgttacctggacgagtaag

SEQ ID NO: 2990315 - DNA, 25 bp, Homo sapien
tacctggacgagtaagcccagtgtg

SEQ ID NO: 2990316 - DNA, 25 bp, Homo sapien
tgtgtgggtctgcagtcacaggctc

SEQ ID NO: 2990317 - DNA, 25 bp, Homo sapien
tcagtgctcaccctgttacgtgtgt

SEQ ID NO: 2990318 - DNA, 25 bp, Homo sapien
gttttcagatgcacctagtagaggg

SEQ ID NO: 2990319 - DNA, 25 bp, Homo sapien
taaactgcaaagaagccccaaggtc

SEQ ID NO: 2990320 - DNA, 25 bp, Homo sapien
ccagcttgtggacctgtggcagcgt

SEQ ID NO: 2990321 - DNA, 25 bp, Homo sapien
cgcggagactccggggtcgtgcccg

SEQ ID NO: 2990322 - DNA, 25 bp, Homo sapien
cgggtcacgtgaccggcgggagctc

SEQ ID NO: 2990323 - DNA, 25 bp, Homo sapien
gtgaccggcgggagctcgtcgcggg

SEQ ID NO: 2990324 - DNA, 25 bp, Homo sapien
aggcgggtcacgtgaccggcgggag

SEQ ID NO: 2990325 - DNA, 25 bp, Homo sapien
tttcccaactgagaggccgcgcggg

SEQ ID NO: 2990326 - DNA, 25 bp, Homo sapien
accgaggtcactgtcctacctgctg

SEQ ID NO: 2990327 - DNA, 25 bp, Homo sapien
gggtccttcgcgtcaccgaggtcac

SEQ ID NO: 2990328 - DNA, 25 bp, Homo sapien
ggccccggcgacaacctcagctttc

SEQ ID NO: 2990329 - DNA, 25 bp, Homo sapien
agcctccctcgctgaacaacgggcg

SEQ ID NO: 2990330 - DNA, 25 bp, Homo sapien
cctcgctgaacaacgggcggacgag

SEQ ID NO: 2990331 - DNA, 25 bp, Homo sapien
gtcagctgcggcacgcgcagagcct

SEQ ID NO: 2990332 - DNA, 25 bp, Homo sapien
tttccccgtcagctgcggcacgcgc

SEQ ID NO: 2990333 - DNA, 25 bp, Homo sapien
gcgcggggcagacgtcaggtgtctc

SEQ ID NO: 2990334 - DNA, 25 bp, Homo sapien
cagcgcggggcagacgtcaggtgtc

SEQ ID NO: 2990335 - DNA, 25 bp, Homo sapien
gcggggcagacgtcaggtgtctcac

SEQ ID NO: 2990336 - DNA, 25 bp, Homo sapien
ggcagcgcggggcagacgtcaggtg

SEQ ID NO: 2990337 - DNA, 25 bp, Homo sapien
caagggtttcgggtgctatgtgcca

SEQ ID NO: 2990338 - DNA, 25 bp, Homo sapien
tccagtgccttggtgtgttccacaa

SEQ ID NO: 2990339 - DNA, 25 bp, Homo sapien
gataaaactcagacagccgtatgga

SEQ ID NO: 2990340 - DNA, 25 bp, Homo sapien
gcaaaaggctctctcatcactcggt

SEQ ID NO: 2990341 - DNA, 25 bp, Homo sapien
gatggcctggacagctcctacaggc

SEQ ID NO: 2990342 - DNA, 25 bp, Homo sapien
gagatggcctggacagctcctacag

SEQ ID NO: 2990343 - DNA, 25 bp, Homo sapien
tggagatggcctggacagctcctac

SEQ ID NO: 2990344 - DNA, 25 bp, Homo sapien
ggttggagatggcctggacagctcc

SEQ ID NO: 2990345 - DNA, 25 bp, Homo sapien
acacgagggcgcagacggccaggag

SEQ ID NO: 2990346 - DNA, 25 bp, Homo sapien
atcatggagtaggatgtgccccagg

SEQ ID NO: 2990347 - DNA, 25 bp, Homo sapien
agcaggaaatcatggagtaggatgt

SEQ ID NO: 2990348 - DNA, 25 bp, Homo sapien
tgcagcggttgccaaggacacgagg

SEQ ID NO: 2990349 - DNA, 25 bp, Homo sapien
ctgctttgcagggatgtagcaacag

SEQ ID NO: 2990350 - DNA, 25 bp, Homo sapien
gatgtagcaacagccgcgggcctcg

SEQ ID NO: 2990351 - DNA, 25 bp, Homo sapien
gaagtggaggcggttctcagtctcc

SEQ ID NO: 2990352 - DNA, 25 bp, Homo sapien
ggccgtgtagcccatttcagaggag

SEQ ID NO: 2990353 - DNA, 25 bp, Homo sapien
atgtccacgcgcaccctctgccctg

SEQ ID NO: 2990354 - DNA, 25 bp, Homo sapien
cgatgtccacgcgcaccctctgccc

SEQ ID NO: 2990355 - DNA, 25 bp, Homo sapien
tgtcgatgtccacgcgcaccctctg

SEQ ID NO: 2990356 - DNA, 25 bp, Homo sapien
ggtgtcgatgtccacgcgcaccctc

SEQ ID NO: 2990357 - DNA, 25 bp, Homo sapien
tagcgcctgttagctggatctttga

SEQ ID NO: 2990358 - DNA, 25 bp, Homo sapien
cggagaactccacgctgtagagtgg

SEQ ID NO: 2990359 - DNA, 25 bp, Homo sapien
cgaagggctcctcggagaactccac

SEQ ID NO: 2990360 - DNA, 25 bp, Homo sapien
gacatgcggggtctccaagggcacc

SEQ ID NO: 2990361 - DNA, 25 bp, Homo sapien
tccacagggtgatcctggtccagct

SEQ ID NO: 2990362 - DNA, 25 bp, Homo sapien
ctcggcgaggcctgtgatatactgc

SEQ ID NO: 2990363 - DNA, 25 bp, Homo sapien
gtgggcgcaaggtcccggttccaca

SEQ ID NO: 2990364 - DNA, 25 bp, Homo sapien
agctgaaggaactggtccgcaaaga

SEQ ID NO: 2990365 - DNA, 25 bp, Homo sapien
tcctccagcgccaggtagaaagggt

SEQ ID NO: 2990366 - DNA, 25 bp, Homo sapien
gtgagacccgtagaggttcgcaccg

SEQ ID NO: 2990367 - DNA, 25 bp, Homo sapien
tttagcaggaacaccccgtgtgccg

SEQ ID NO: 2990368 - DNA, 25 bp, Homo sapien
attgctgtttagcaggaacaccccg

SEQ ID NO: 2990369 - DNA, 25 bp, Homo sapien
caggtactgctgcaccacgctcttg

SEQ ID NO: 2990370 - DNA, 25 bp, Homo sapien
tactgctgcaccacgctcttgggct

SEQ ID NO: 2990371 - DNA, 25 bp, Homo sapien
acctccagctaagggcagggctcgg

SEQ ID NO: 2990372 - DNA, 25 bp, Homo sapien
tgtcgacctccagctaagggcaggg

SEQ ID NO: 2990373 - DNA, 25 bp, Homo sapien
agcccaggccccagtatggcggcat

SEQ ID NO: 2990374 - DNA, 25 bp, Homo sapien
cacctggcgggtgatagcggtggag

SEQ ID NO: 2990375 - DNA, 25 bp, Homo sapien
gaagtgggccctggtcatgttctcc

SEQ ID NO: 2990376 - DNA, 25 bp, Homo sapien
cagtatggcggcatgaacgggtatc

SEQ ID NO: 2990377 - DNA, 25 bp, Homo sapien
ctccgggagtccatgtagtccaggt

SEQ ID NO: 2990378 - DNA, 25 bp, Homo sapien
tgaacgtgaagtccctccgggagtc

SEQ ID NO: 2990379 - DNA, 25 bp, Homo sapien
cacgatcatcatgtagcgccggccg

SEQ ID NO: 2990380 - DNA, 25 bp, Homo sapien
atccttgttgaacgtgaagtccctc

SEQ ID NO: 2990381 - DNA, 25 bp, Homo sapien
ttcccaatcagcggctggccggtct

SEQ ID NO: 2990382 - DNA, 25 bp, Homo sapien
cgcagaccctcgtcgtagggcctgt

SEQ ID NO: 2990383 - DNA, 25 bp, Homo sapien
gaccctcgtcgtagggcctgtagct

SEQ ID NO: 2990384 - DNA, 25 bp, Homo sapien
ggctggccggtctcgttggtgatga

SEQ ID NO: 2990385 - DNA, 25 bp, Homo sapien
aatccacatgccgtcgaagggcacc

SEQ ID NO: 2990386 - DNA, 25 bp, Homo sapien
ccgtcgaagggcacctggtcatgga

SEQ ID NO: 2990387 - DNA, 25 bp, Homo sapien
gaagggcacctggtcatggaactca

SEQ ID NO: 2990388 - DNA, 25 bp, Homo sapien
cacatgccgtcgaagggcacctggt

SEQ ID NO: 2990389 - DNA, 25 bp, Homo sapien
caagagaagcgctgctggtaggtga

SEQ ID NO: 2990390 - DNA, 25 bp, Homo sapien
agagaagcgctgctggtaggtgact

SEQ ID NO: 2990391 - DNA, 25 bp, Homo sapien
gcaagagaagcgctgctggtaggtg

SEQ ID NO: 2990392 - DNA, 25 bp, Homo sapien
ctgcaagagaagcgctgctggtagg

SEQ ID NO: 2990393 - DNA, 25 bp, Homo sapien
tagggtgggttctccagctcattgt

SEQ ID NO: 2990394 - DNA, 25 bp, Homo sapien
cagctcattgttggggcagccgtcc

SEQ ID NO: 2990395 - DNA, 25 bp, Homo sapien
tcagagcccctgatgaagttggaag

SEQ ID NO: 2990396 - DNA, 25 bp, Homo sapien
ggcacgtagggtgggttctccagct

SEQ ID NO: 2990397 - DNA, 25 bp, Homo sapien
ctgtgggaggcgatggcttcggtca

SEQ ID NO: 2990398 - DNA, 25 bp, Homo sapien
gcttcggtcaggccgtagaggttgt

SEQ ID NO: 2990399 - DNA, 25 bp, Homo sapien
tcaggccgtagaggttgtgcaggtt

SEQ ID NO: 2990400 - DNA, 25 bp, Homo sapien
acagatggtggccgcctggagggtc

SEQ ID NO: 2990401 - DNA, 25 bp, Homo sapien
ggagatcacaaatgggcgtgtcccc

SEQ ID NO: 2990402 - DNA, 25 bp, Homo sapien
cagtggccggcgtatcggccgtggc

SEQ ID NO: 2990403 - DNA, 25 bp, Homo sapien
gccgtggccagcaaaggtcgagcgg

SEQ ID NO: 2990404 - DNA, 25 bp, Homo sapien
acggaggaggcgagctgctcccagg

SEQ ID NO: 2990405 - DNA, 25 bp, Homo sapien
ctgggagggcagagtcaggctggtc

SEQ ID NO: 2990406 - DNA, 25 bp, Homo sapien
gggagggcagagtcaggctggtcct

SEQ ID NO: 2990407 - DNA, 25 bp, Homo sapien
gagggcagagtcaggctggtcctca

SEQ ID NO: 2990408 - DNA, 25 bp, Homo sapien
agggcagagtcaggctggtcctcag

SEQ ID NO: 2990409 - DNA, 25 bp, Homo sapien
ctgagcaggctgttgtggttccgca

SEQ ID NO: 2990410 - DNA, 25 bp, Homo sapien
agctgggtccagcgcacacacagct

SEQ ID NO: 2990411 - DNA, 25 bp, Homo sapien
aggaagccgcagacgtcggccccga

SEQ ID NO: 2990412 - DNA, 25 bp, Homo sapien
caggctgttgtggttccgcatgaag

SEQ ID NO: 2990413 - DNA, 25 bp, Homo sapien
tgctgggccggctcgctgaagctgt

SEQ ID NO: 2990414 - DNA, 25 bp, Homo sapien
cccgcgacgtgggcctggtggaaca

SEQ ID NO: 2990415 - DNA, 25 bp, Homo sapien
cctggtggaacagtgtgtagaggtg

SEQ ID NO: 2990416 - DNA, 25 bp, Homo sapien
gaggagtgcgtagcgcagggtgagg

SEQ ID NO: 2990417 - DNA, 25 bp, Homo sapien
gtgtagtgacagaaacaacaaggtc

SEQ ID NO: 2990418 - DNA, 25 bp, Homo sapien
cagaaacaacaaggtcattaaaata

SEQ ID NO: 2990419 - DNA, 25 bp, Homo sapien
aaagcaagttggcatcagttccaac

SEQ ID NO: 2990420 - DNA, 25 bp, Homo sapien
tccaacgaggctaaaattaagatgt

SEQ ID NO: 2990421 - DNA, 25 bp, Homo sapien
gatggggctggctcatatgcccacc

SEQ ID NO: 2990422 - DNA, 25 bp, Homo sapien
ggatgggcacacaggcatacgggtg

SEQ ID NO: 2990423 - DNA, 25 bp, Homo sapien
cacacaggcatacgggtgatgaatg

SEQ ID NO: 2990424 - DNA, 25 bp, Homo sapien
ggggctggctcatatgcccaccctg

SEQ ID NO: 2990425 - DNA, 25 bp, Homo sapien
tccaggtgctagagtccttggggaa

SEQ ID NO: 2990426 - DNA, 25 bp, Homo sapien
tagccagtcacttcggccttcccgg

SEQ ID NO: 2990427 - DNA, 25 bp, Homo sapien
tcacttcggccttcccggcctggag

SEQ ID NO: 2990428 - DNA, 25 bp, Homo sapien
tctgcaggtcgtaccatgtgcccaa

SEQ ID NO: 2990429 - DNA, 25 bp, Homo sapien
actgcccctcgctgtggatggctgg

SEQ ID NO: 2990430 - DNA, 25 bp, Homo sapien
cccggaggtggacgttgatggtgtc

SEQ ID NO: 2990431 - DNA, 25 bp, Homo sapien
ggatgatgtacccagcccggaggtg

SEQ ID NO: 2990432 - DNA, 25 bp, Homo sapien
cctcgctgtggatggctggctcacg

SEQ ID NO: 2990433 - DNA, 25 bp, Homo sapien
ctctctccatcgtcccagaacagct

SEQ ID NO: 2990434 - DNA, 25 bp, Homo sapien
ctgctggcgggactctgtggttgtg

SEQ ID NO: 2990435 - DNA, 25 bp, Homo sapien
aagatgacctgtgtgtaggcccctc

SEQ ID NO: 2990436 - DNA, 25 bp, Homo sapien
gcgggactctgtggttgtgaggcca

SEQ ID NO: 2990437 - DNA, 25 bp, Homo sapien
gtaccagctcattcacgatcgtgtt

SEQ ID NO: 2990438 - DNA, 25 bp, Homo sapien
ggtcacacgtaccagctcattcacg

SEQ ID NO: 2990439 - DNA, 25 bp, Homo sapien
tcacacgtaccagctcattcacgat

SEQ ID NO: 2990440 - DNA, 25 bp, Homo sapien
acgtaccagctcattcacgatcgtg

SEQ ID NO: 2990441 - DNA, 25 bp, Homo sapien
ctgctggggcgccgtggccacgccc

SEQ ID NO: 2990442 - DNA, 25 bp, Homo sapien
ctggggcgccgtggccacgcccagg

SEQ ID NO: 2990443 - DNA, 25 bp, Homo sapien
ccgtggccacgcccaggacagtcac

SEQ ID NO: 2990444 - DNA, 25 bp, Homo sapien
ggcgccgtggccacgcccaggacag

SEQ ID NO: 2990445 - DNA, 25 bp, Homo sapien
ggtgtcggggctgtaggtgaagttg

SEQ ID NO: 2990446 - DNA, 25 bp, Homo sapien
tgaagttggagacagggacaccgtt

SEQ ID NO: 2990447 - DNA, 25 bp, Homo sapien
gttggagacagggacaccgttggag

SEQ ID NO: 2990448 - DNA, 25 bp, Homo sapien
agacagggacaccgttggagaggac

SEQ ID NO: 2990449 - DNA, 25 bp, Homo sapien
ctgcaccacggctgggggacgcgat

SEQ ID NO: 2990450 - DNA, 25 bp, Homo sapien
atcggtcaccaggacgcccagcacc

SEQ ID NO: 2990451 - DNA, 25 bp, Homo sapien
catcctctgttcctggcatcggtca

SEQ ID NO: 2990452 - DNA, 25 bp, Homo sapien
ctgggggacgcgatccctgtgccac

SEQ ID NO: 2990453 - DNA, 25 bp, Homo sapien
taacaccagctgacgagaaactgct

SEQ ID NO: 2990454 - DNA, 25 bp, Homo sapien
ctaacaccagctgacgagaaactgc

SEQ ID NO: 2990455 - DNA, 25 bp, Homo sapien
gagaaagctctcctagacacgttgg

SEQ ID NO: 2990456 - DNA, 25 bp, Homo sapien
ggaatggttagtgcccagctccagg

SEQ ID NO: 2990457 - DNA, 25 bp, Homo sapien
cacagtgcgatctagggagaaagct

SEQ ID NO: 2990458 - DNA, 25 bp, Homo sapien
gatttagaatctcccaagtcctgtg

SEQ ID NO: 2990459 - DNA, 25 bp, Homo sapien
tcataaatggcctgccgtctccctt

SEQ ID NO: 2990460 - DNA, 25 bp, Homo sapien
ggatatggggattctgctctctttt

SEQ ID NO: 2990461 - DNA, 25 bp, Homo sapien
cctttgaagaggatatggggattct

SEQ ID NO: 2990462 - DNA, 25 bp, Homo sapien
ctttcttctcataaatggcctgccg

SEQ ID NO: 2990463 - DNA, 25 bp, Homo sapien
ttgggagatcaggtcgatacggccg

SEQ ID NO: 2990464 - DNA, 25 bp, Homo sapien
agaatgacgacatccgcatcctcag

SEQ ID NO: 2990465 - DNA, 25 bp, Homo sapien
tcgatacggccggaagggtgtggcc

SEQ ID NO: 2990466 - DNA, 25 bp, Homo sapien
tccgcatcctcagagatatcgagca

SEQ ID NO: 2990467 - DNA, 25 bp, Homo sapien
tcaggtgtccctcatcattaactat

SEQ ID NO: 2990468 - DNA, 25 bp, Homo sapien
cattaactatgatctccctaataac

SEQ ID NO: 2990469 - DNA, 25 bp, Homo sapien
gatctccctaataacagagaattgt

SEQ ID NO: 2990470 - DNA, 25 bp, Homo sapien
ccagggggttggatgtccctcaggt

SEQ ID NO: 2990471 - DNA, 25 bp, Homo sapien
gcctcctcgcagttaagatgttatt

SEQ ID NO: 2990472 - DNA, 25 bp, Homo sapien
tcttcatggacacttaacaagctgt

SEQ ID NO: 2990473 - DNA, 25 bp, Homo sapien
tctgacacctatgaaacacctcttg

SEQ ID NO: 2990474 - DNA, 25 bp, Homo sapien
gaaggtacctaagtgcctctggagc

SEQ ID NO: 2990475 - DNA, 25 bp, Homo sapien
atcatggcgaccacggccacgatgg

SEQ ID NO: 2990476 - DNA, 25 bp, Homo sapien
ctcggcgcgaaagcggctgctcaaa

SEQ ID NO: 2990477 - DNA, 25 bp, Homo sapien
tcttccgcggactctgaatcatggc

SEQ ID NO: 2990478 - DNA, 25 bp, Homo sapien
gccacgatggcgacctcgggctcgg

SEQ ID NO: 2990479 - DNA, 25 bp, Homo sapien
gatcccgcgggaactgcatatggcg

SEQ ID NO: 2990480 - DNA, 25 bp, Homo sapien
cggccgtgagggtttccactcgaat

SEQ ID NO: 2990481 - DNA, 25 bp, Homo sapien
ggcgcgagagcagaaacaccttact

SEQ ID NO: 2990482 - DNA, 25 bp, Homo sapien
tttccagggaattcaggtccacacg

SEQ ID NO: 2990483 - DNA, 25 bp, Homo sapien
acacacacaaaatagcggggcgcgg

SEQ ID NO: 2990484 - DNA, 25 bp, Homo sapien
tgagattcactcttggagaaggctg

SEQ ID NO: 2990485 - DNA, 25 bp, Homo sapien
gggtaacaccagcatccttacaagg

SEQ ID NO: 2990486 - DNA, 25 bp, Homo sapien
gaaatactgcaatccaccgacttct

SEQ ID NO: 2990487 - DNA, 25 bp, Homo sapien
tgcatttacttgttcacccttgaaa

SEQ ID NO: 2990488 - DNA, 25 bp, Homo sapien
acaagctcgaccacctgataaggca

SEQ ID NO: 2990489 - DNA, 25 bp, Homo sapien
taatggtctgcccacaaaagtgcca

SEQ ID NO: 2990490 - DNA, 25 bp, Homo sapien
taaggcactggagctagcatgaacc

SEQ ID NO: 2990491 - DNA, 25 bp, Homo sapien
taattggactctgcaagtggccagc

SEQ ID NO: 2990492 - DNA, 25 bp, Homo sapien
tctatgagccatcgaagcaccagtg

SEQ ID NO: 2990493 - DNA, 25 bp, Homo sapien
gaagcgaggactgaatgtggcccaa

SEQ ID NO: 2990494 - DNA, 25 bp, Homo sapien
cacagggatggctgagaacagtccg

SEQ ID NO: 2990495 - DNA, 25 bp, Homo sapien
gacattgccgtaagaaccacaggga

SEQ ID NO: 2990496 - DNA, 25 bp, Homo sapien
tcccacggcaatagcgaagagatga

SEQ ID NO: 2990497 - DNA, 25 bp, Homo sapien
gtataaaacagagatccctttcatc

SEQ ID NO: 2990498 - DNA, 25 bp, Homo sapien
tgtctttcatcccacggcaatagcg

SEQ ID NO: 2990499 - DNA, 25 bp, Homo sapien
ttcatcccacggcaatagcgaagag

SEQ ID NO: 2990500 - DNA, 25 bp, Homo sapien
tctctgcggatatcctgaggaccag

SEQ ID NO: 2990501 - DNA, 25 bp, Homo sapien
gggagttctggacagccaggtctct

SEQ ID NO: 2990502 - DNA, 25 bp, Homo sapien
gaggactacaggtttctcgggtgcc

SEQ ID NO: 2990503 - DNA, 25 bp, Homo sapien
gactggtggtcagccgaggactaca

SEQ ID NO: 2990504 - DNA, 25 bp, Homo sapien
atggtggtagattgtaaagaaatct

SEQ ID NO: 2990505 - DNA, 25 bp, Homo sapien
tcatggtggtagattgtaaagaaat

SEQ ID NO: 2990506 - DNA, 25 bp, Homo sapien
gttcatggtggtagattgtaaagaa

SEQ ID NO: 2990507 - DNA, 25 bp, Homo sapien
catggtggtagattgtaaagaaatc

SEQ ID NO: 2990508 - DNA, 25 bp, Homo sapien
ctgaagtcaaagcagcaccaggtga

SEQ ID NO: 2990509 - DNA, 25 bp, Homo sapien
tgaagtcaaagcagcaccaggtgaa

SEQ ID NO: 2990510 - DNA, 25 bp, Homo sapien
cctcctttctctgcgggctgctggg

SEQ ID NO: 2990511 - DNA, 25 bp, Homo sapien
gtggggtccacagtccccgcagtgt

SEQ ID NO: 2990512 - DNA, 25 bp, Homo sapien
ggggtccacagtccccgcagtgtct

SEQ ID NO: 2990513 - DNA, 25 bp, Homo sapien
cacagtccccgcagtgtctccaaag

SEQ ID NO: 2990514 - DNA, 25 bp, Homo sapien
ggagcgattccttacagacccatga

SEQ ID NO: 2990515 - DNA, 25 bp, Homo sapien
gggcacagatgggagcgattcctta

SEQ ID NO: 2990516 - DNA, 25 bp, Homo sapien
tacagacccatgaattcctgtgact

SEQ ID NO: 2990517 - DNA, 25 bp, Homo sapien
gatgggagcgattccttacagaccc

SEQ ID NO: 2990518 - DNA, 25 bp, Homo sapien
ggcagatgcagcgtacgatcctgtg

SEQ ID NO: 2990519 - DNA, 25 bp, Homo sapien
gtacgatcctgtggcggtggctctc

SEQ ID NO: 2990520 - DNA, 25 bp, Homo sapien
tgtctcctcgtccagtgccgtgagt

SEQ ID NO: 2990521 - DNA, 25 bp, Homo sapien
gtgagtgcggagtccctgcggcaca

SEQ ID NO: 2990522 - DNA, 25 bp, Homo sapien
tggcgctgttggtgagccgggggct

SEQ ID NO: 2990523 - DNA, 25 bp, Homo sapien
ttactgaagtcaacatcaggctgca

SEQ ID NO: 2990524 - DNA, 25 bp, Homo sapien
ccggtgaccagggtgtagacgtcag

SEQ ID NO: 2990525 - DNA, 25 bp, Homo sapien
cagggttgtggaacttcaggctctc

SEQ ID NO: 2990526 - DNA, 25 bp, Homo sapien
gttcttccctcgagtcttcagcaaa

SEQ ID NO: 2990527 - DNA, 25 bp, Homo sapien
gagcctgaggttcctagaagtgcct

SEQ ID NO: 2990528 - DNA, 25 bp, Homo sapien
aggagcctgaggttcctagaagtgc

SEQ ID NO: 2990529 - DNA, 25 bp, Homo sapien
gcctgaggttcctagaagtgcctgc

SEQ ID NO: 2990530 - DNA, 25 bp, Homo sapien
cctgaggttcctagaagtgcctgcc

SEQ ID NO: 2990531 - DNA, 25 bp, Homo sapien
ttcagcctcagcacctcatggaagt

SEQ ID NO: 2990532 - DNA, 25 bp, Homo sapien
tcatggaagtgtgcgctaacctcac

SEQ ID NO: 2990533 - DNA, 25 bp, Homo sapien
taacctcacgcttcatgcggctgtg

SEQ ID NO: 2990534 - DNA, 25 bp, Homo sapien
cattgctatagtgcagcgagaggct

SEQ ID NO: 2990535 - DNA, 25 bp, Homo sapien
cttccagggactatcccaccaggtc

SEQ ID NO: 2990536 - DNA, 25 bp, Homo sapien
ccggggctgttcagacagcaaagct

SEQ ID NO: 2990537 - DNA, 25 bp, Homo sapien
gcaaagctcctgtgttgacttgcag

SEQ ID NO: 2990538 - DNA, 25 bp, Homo sapien
tgtgttgacttgcagtctgtgtgca

SEQ ID NO: 2990539 - DNA, 25 bp, Homo sapien
ctgcagctcctgcttcagtagatac

SEQ ID NO: 2990540 - DNA, 25 bp, Homo sapien
gcagctcctgcttcagtagatacag

SEQ ID NO: 2990541 - DNA, 25 bp, Homo sapien
tgcagctcctgcttcagtagataca

SEQ ID NO: 2990542 - DNA, 25 bp, Homo sapien
actcctggtcgctggctgtcctcag

SEQ ID NO: 2990543 - DNA, 25 bp, Homo sapien
tcatccccggactcctggtcgctgg

SEQ ID NO: 2990544 - DNA, 25 bp, Homo sapien
cagcgagcgcagtttctcattctcc

SEQ ID NO: 2990545 - DNA, 25 bp, Homo sapien
tgaaagtcagcgagcgcagtttctc

SEQ ID NO: 2990546 - DNA, 25 bp, Homo sapien
agctcctgtcggctcccccgcgcct

SEQ ID NO: 2990547 - DNA, 25 bp, Homo sapien
cccgctcccgcagcgagtggatgcg

SEQ ID NO: 2990548 - DNA, 25 bp, Homo sapien
tctcgctgcctctcggcagccacgg

SEQ ID NO: 2990549 - DNA, 25 bp, Homo sapien
tcccgcagcgagtggatgcgctcca

SEQ ID NO: 2990550 - DNA, 25 bp, Homo sapien
agtgggacacatggaccgtgaagct

SEQ ID NO: 2990551 - DNA, 25 bp, Homo sapien
gggacacatggaccgtgaagctcag

SEQ ID NO: 2990552 - DNA, 25 bp, Homo sapien
acagagtgggacacatggaccgtga

SEQ ID NO: 2990553 - DNA, 25 bp, Homo sapien
cagagtgggacacatggaccgtgaa

SEQ ID NO: 2990554 - DNA, 25 bp, Homo sapien
ttggcaggccatcttactcttctgg

SEQ ID NO: 2990555 - DNA, 25 bp, Homo sapien
tggcaggccatcttactcttctgga

SEQ ID NO: 2990556 - DNA, 25 bp, Homo sapien
tgggcctgcagcgcattcaccttct

SEQ ID NO: 2990557 - DNA, 25 bp, Homo sapien
ctgggcctgcagcgcattcaccttc

SEQ ID NO: 2990558 - DNA, 25 bp, Homo sapien
gggcctgcagcgcattcaccttctc

SEQ ID NO: 2990559 - DNA, 25 bp, Homo sapien
cagctggcgaagctgtgtgcgcagc

SEQ ID NO: 2990560 - DNA, 25 bp, Homo sapien
cctgcagctggcgaagctgtgtgcg

SEQ ID NO: 2990561 - DNA, 25 bp, Homo sapien
tcgcagacctggtccgtcagctcga

SEQ ID NO: 2990562 - DNA, 25 bp, Homo sapien
gtcagctcgaacacctgcctgcgga

SEQ ID NO: 2990563 - DNA, 25 bp, Homo sapien
aggccagacaggctggttaattcgg

SEQ ID NO: 2990564 - DNA, 25 bp, Homo sapien
gagtttctaccaggtcagcaccacc

SEQ ID NO: 2990565 - DNA, 25 bp, Homo sapien
cagacaggctggttaattcgggaaa

SEQ ID NO: 2990566 - DNA, 25 bp, Homo sapien
gctttgaggcccgtggagtttctac

SEQ ID NO: 2990567 - DNA, 25 bp, Homo sapien
agccgctgcttctcccgtggacagg

SEQ ID NO: 2990568 - DNA, 25 bp, Homo sapien
agatggcatgcatccgcaccagccg

SEQ ID NO: 2990569 - DNA, 25 bp, Homo sapien
gggcagatggcatgcatccgcacca

SEQ ID NO: 2990570 - DNA, 25 bp, Homo sapien
cgaggctgcagtcgctgtcgtctct

SEQ ID NO: 2990571 - DNA, 25 bp, Homo sapien
cactcaggtccgacaagagctgaga

SEQ ID NO: 2990572 - DNA, 25 bp, Homo sapien
accagctcgcggctggacgtggcac

SEQ ID NO: 2990573 - DNA, 25 bp, Homo sapien
tcggccacccgcttgtacagggact

SEQ ID NO: 2990574 - DNA, 25 bp, Homo sapien
tggacgtggcactcaggtccgacaa

SEQ ID NO: 2990575 - DNA, 25 bp, Homo sapien
cgtgtctaggagctcataatccagg

SEQ ID NO: 2990576 - DNA, 25 bp, Homo sapien
taatccaggtgtgggtcgcctgcct

SEQ ID NO: 2990577 - DNA, 25 bp, Homo sapien
tcgcctgccttagctcccggcaggg

SEQ ID NO: 2990578 - DNA, 25 bp, Homo sapien
ctgccgtgtctaggagctcataatc

SEQ ID NO: 2990579 - DNA, 25 bp, Homo sapien
gaagatttctgattctgcgacccac

SEQ ID NO: 2990580 - DNA, 25 bp, Homo sapien
gaagcccaagcgttacagatcagag

SEQ ID NO: 2990581 - DNA, 25 bp, Homo sapien
gcattacgcagaatcctcacagagg

SEQ ID NO: 2990582 - DNA, 25 bp, Homo sapien
tcccaaagtgcaaggtcgaggccaa

SEQ ID NO: 2990583 - DNA, 25 bp, Homo sapien
atcaagccttccaggggagactggc

SEQ ID NO: 2990584 - DNA, 25 bp, Homo sapien
caggctgctttccagctgcggaagg

SEQ ID NO: 2990585 - DNA, 25 bp, Homo sapien
tctccgagacatcaagccttccagg

SEQ ID NO: 2990586 - DNA, 25 bp, Homo sapien
gggagactggctgcaggctgctttc

SEQ ID NO: 2990587 - DNA, 25 bp, Homo sapien
tgcaggccgggagacgaccggcttg

SEQ ID NO: 2990588 - DNA, 25 bp, Homo sapien
gcaggccgggagacgaccggcttgt

SEQ ID NO: 2990589 - DNA, 25 bp, Homo sapien
caggccgggagacgaccggcttgtg

SEQ ID NO: 2990590 - DNA, 25 bp, Homo sapien
ggccgggagacgaccggcttgtgca

SEQ ID NO: 2990591 - DNA, 25 bp, Homo sapien
gctggcctccgccgcatgaggacgc

SEQ ID NO: 2990592 - DNA, 25 bp, Homo sapien
tggcctccgccgcatgaggacgccg

SEQ ID NO: 2990593 - DNA, 25 bp, Homo sapien
ggctggcctccgccgcatgaggacg

SEQ ID NO: 2990594 - DNA, 25 bp, Homo sapien
cgggctggcctccgccgcatgagga

SEQ ID NO: 2990595 - DNA, 25 bp, Homo sapien
aaggccatctggtccgccgccgagc

SEQ ID NO: 2990596 - DNA, 25 bp, Homo sapien
gttcccgccgatgacgctgatctgc

SEQ ID NO: 2990597 - DNA, 25 bp, Homo sapien
tgacccggtggatgaagatgcccgt

SEQ ID NO: 2990598 - DNA, 25 bp, Homo sapien
atgaagatgcccgtgaggttcccgc

SEQ ID NO: 2990599 - DNA, 25 bp, Homo sapien
ccagagtggatctgcatcgtctggg

SEQ ID NO: 2990600 - DNA, 25 bp, Homo sapien
ccagcccagagtggatctgcatcgt

SEQ ID NO: 2990601 - DNA, 25 bp, Homo sapien
taaatgagcagaacgctttacgtca

SEQ ID NO: 2990602 - DNA, 25 bp, Homo sapien
cgctttacgtcagcccaggaaagag

SEQ ID NO: 2990603 - DNA, 25 bp, Homo sapien
tgcaaagacccctggtcagaagcgc

SEQ ID NO: 2990604 - DNA, 25 bp, Homo sapien
gctgggttctgcacggcacgactct

SEQ ID NO: 2990605 - DNA, 25 bp, Homo sapien
tggcagcagcaccacgggtgacatg

SEQ ID NO: 2990606 - DNA, 25 bp, Homo sapien
tttactgtacacacccaaagtgacc

SEQ ID NO: 2990607 - DNA, 25 bp, Homo sapien
agggctctgaggcttcgtaatcaac

SEQ ID NO: 2990608 - DNA, 25 bp, Homo sapien
gtccgtgttgaccttcacagacagg

SEQ ID NO: 2990609 - DNA, 25 bp, Homo sapien
gcagaagccgtccaccctcctgaga

SEQ ID NO: 2990610 - DNA, 25 bp, Homo sapien
gaacaagggctctgaggcttcgtaa

SEQ ID NO: 2990611 - DNA, 25 bp, Homo sapien
tgtcggtgacgtgcaggacctcgtt

SEQ ID NO: 2990612 - DNA, 25 bp, Homo sapien
cgtgcgcggcagtatccttcatggt

SEQ ID NO: 2990613 - DNA, 25 bp, Homo sapien
ttgacccggatgtagaatgagtccc

SEQ ID NO: 2990614 - DNA, 25 bp, Homo sapien
ggacctcgttgcaatgcacctgcag

SEQ ID NO: 2990615 - DNA, 25 bp, Homo sapien
cgcccaccctctattgctgggcagg

SEQ ID NO: 2990616 - DNA, 25 bp, Homo sapien
cacgcccaccctctattgctgggca

SEQ ID NO: 2990617 - DNA, 25 bp, Homo sapien
gggacgcaccgagctcgaggcagct

SEQ ID NO: 2990618 - DNA, 25 bp, Homo sapien
ggcctctctggggacgcaccgagct

SEQ ID NO: 2990619 - DNA, 25 bp, Homo sapien
gctgatttacttgtcctggggcggg

SEQ ID NO: 2990620 - DNA, 25 bp, Homo sapien
tgatttacttgtcctggggcgggac

SEQ ID NO: 2990621 - DNA, 25 bp, Homo sapien
cctggcggccatgccagtctccaga

SEQ ID NO: 2990622 - DNA, 25 bp, Homo sapien
atcctggcggccatgccagtctcca

SEQ ID NO: 2990623 - DNA, 25 bp, Homo sapien
cagcagaggccctgacccagctgcc

SEQ ID NO: 2990624 - DNA, 25 bp, Homo sapien
cagaggccctgacccagctgcctcc

SEQ ID NO: 2990625 - DNA, 25 bp, Homo sapien
cagctgcctcctgccaggtgagcag

SEQ ID NO: 2990626 - DNA, 25 bp, Homo sapien
cagggcaggggagagccgagcaggg

SEQ ID NO: 2990627 - DNA, 25 bp, Homo sapien
tgctgagtcatgtcctggatgaggg

SEQ ID NO: 2990628 - DNA, 25 bp, Homo sapien
tcctggatgagggctatgagctgct

SEQ ID NO: 2990629 - DNA, 25 bp, Homo sapien
gtcctggatgagggctatgagctgc

SEQ ID NO: 2990630 - DNA, 25 bp, Homo sapien
cctggatgagggctatgagctgctg

SEQ ID NO: 2990631 - DNA, 25 bp, Homo sapien
actggcccctgtcaaaggacaaacg

SEQ ID NO: 2990632 - DNA, 25 bp, Homo sapien
caactggcccctgtcaaaggacaaa

SEQ ID NO: 2990633 - DNA, 25 bp, Homo sapien
tccatactgacgatgcggaccagct

SEQ ID NO: 2990634 - DNA, 25 bp, Homo sapien
cttggctttgtccatactgacgatg

SEQ ID NO: 2990635 - DNA, 25 bp, Homo sapien
tgaggcagctctcggcccagaagca

SEQ ID NO: 2990636 - DNA, 25 bp, Homo sapien
tctcggcccagaagcacgtgctgga

SEQ ID NO: 2990637 - DNA, 25 bp, Homo sapien
gccgcaccagggtatagggcaccag

SEQ ID NO: 2990638 - DNA, 25 bp, Homo sapien
ggccgcaccagggtatagggcacca

SEQ ID NO: 2990639 - DNA, 25 bp, Homo sapien
aggcacagtttctcgctcaggatct

SEQ ID NO: 2990640 - DNA, 25 bp, Homo sapien
ggcacagtttctcgctcaggatctt

SEQ ID NO: 2990641 - DNA, 25 bp, Homo sapien
ttcttaaacccttggaggaggcaca

SEQ ID NO: 2990642 - DNA, 25 bp, Homo sapien
gaggcacagtttctcgctcaggatc

SEQ ID NO: 2990643 - DNA, 25 bp, Homo sapien
actccacagcatggcgggtcaccca

SEQ ID NO: 2990644 - DNA, 25 bp, Homo sapien
cacagcatggcgggtcacccagcag

SEQ ID NO: 2990645 - DNA, 25 bp, Homo sapien
tccacagcatggcgggtcacccagc

SEQ ID NO: 2990646 - DNA, 25 bp, Homo sapien
ctccacagcatggcgggtcacccag

SEQ ID NO: 2990647 - DNA, 25 bp, Homo sapien
gtgcagggtgcagacactgtccagc

SEQ ID NO: 2990648 - DNA, 25 bp, Homo sapien
tcttctcgttgacagagacgtggat

SEQ ID NO: 2990649 - DNA, 25 bp, Homo sapien
ttctcgttgacagagacgtggatga

SEQ ID NO: 2990650 - DNA, 25 bp, Homo sapien
tccagctggacgtccaggagggcat

SEQ ID NO: 2990651 - DNA, 25 bp, Homo sapien
gggttctggccttacaatggtcctc

SEQ ID NO: 2990652 - DNA, 25 bp, Homo sapien
gccaagcaccagtaagtggagggtc

SEQ ID NO: 2990653 - DNA, 25 bp, Homo sapien
ccagtgactaggctacttttgccca

SEQ ID NO: 2990654 - DNA, 25 bp, Homo sapien
actgtaaaaggcaccgtcatcctgg

SEQ ID NO: 2990655 - DNA, 25 bp, Homo sapien
gtcgctccagccgtcaggagccagg

SEQ ID NO: 2990656 - DNA, 25 bp, Homo sapien
tctgaggtgcccaaccgctgtaggc

SEQ ID NO: 2990657 - DNA, 25 bp, Homo sapien
gctgagcaggccgtccaggtcgctc

SEQ ID NO: 2990658 - DNA, 25 bp, Homo sapien
ctgctgtatagacagggcgcccggt

SEQ ID NO: 2990659 - DNA, 25 bp, Homo sapien
gaggaacaggactgcattaacaggc

SEQ ID NO: 2990660 - DNA, 25 bp, Homo sapien
aaaaggtggccagcgtcacagcata

SEQ ID NO: 2990661 - DNA, 25 bp, Homo sapien
agttcagaccatgccaagcctggta

SEQ ID NO: 2990662 - DNA, 25 bp, Homo sapien
tgcagacaggcggttttccagagaa

SEQ ID NO: 2990663 - DNA, 25 bp, Homo sapien
catagatttgaatcgggcctgcaga

SEQ ID NO: 2990664 - DNA, 25 bp, Homo sapien
gcttccttgagtaggtgggctcccc

SEQ ID NO: 2990665 - DNA, 25 bp, Homo sapien
gaacagcttcctgattcttggacac

SEQ ID NO: 2990666 - DNA, 25 bp, Homo sapien
ggttaattcttggatgacgtcggcg

SEQ ID NO: 2990667 - DNA, 25 bp, Homo sapien
tgctgggagaatgtgccgttcctgc

SEQ ID NO: 2990668 - DNA, 25 bp, Homo sapien
caagatctttattcgtgaagttccc

SEQ ID NO: 2990669 - DNA, 25 bp, Homo sapien
ggtttagggcctacctgagcacttc

SEQ ID NO: 2990670 - DNA, 25 bp, Homo sapien
ccattgggaagaactacagggtgct

SEQ ID NO: 2990671 - DNA, 25 bp, Homo sapien
tccatgggacagacacgagattccg

SEQ ID NO: 2990672 - DNA, 25 bp, Homo sapien
ccgcagctgggtccgcaggaatcgc

SEQ ID NO: 2990673 - DNA, 25 bp, Homo sapien
ccactcggcgatgcagcttggggtc

SEQ ID NO: 2990674 - DNA, 25 bp, Homo sapien
agcttggggtctcctggcgtcgccg

SEQ ID NO: 2990675 - DNA, 25 bp, Homo sapien
ctcggcgatgcagcttggggtctcc

SEQ ID NO: 2990676 - DNA, 25 bp, Homo sapien
gggctccgaggttttccaactgcgc

SEQ ID NO: 2990677 - DNA, 25 bp, Homo sapien
ttccaactgcgcaccaaggcgggct

SEQ ID NO: 2990678 - DNA, 25 bp, Homo sapien
actgcggcgctcgagggagagtggg

SEQ ID NO: 2990679 - DNA, 25 bp, Homo sapien
aaggcgggctccacccgctacggtg

SEQ ID NO: 2990680 - DNA, 25 bp, Homo sapien
gaagccaacaatgtgtgcaagatgg

SEQ ID NO: 2990681 - DNA, 25 bp, Homo sapien
gataagaaactgataagcgattcct

SEQ ID NO: 2990682 - DNA, 25 bp, Homo sapien
gactaattaggctcaacacttctgg

SEQ ID NO: 2990683 - DNA, 25 bp, Homo sapien
tgcaaatcctgggtgccttctgtcc

SEQ ID NO: 2990684 - DNA, 25 bp, Homo sapien
tgtcaggagaggtcactatgggtct

SEQ ID NO: 2990685 - DNA, 25 bp, Homo sapien
acagaccagcagtcagagcgtggcc

SEQ ID NO: 2990686 - DNA, 25 bp, Homo sapien
agagcgtggcctttgaagaacccgg

SEQ ID NO: 2990687 - DNA, 25 bp, Homo sapien
cccggcaacactggtcagggtcggc

SEQ ID NO: 2990688 - DNA, 25 bp, Homo sapien
tgacccagcgccgtcaccgaagaag

SEQ ID NO: 2990689 - DNA, 25 bp, Homo sapien
acccagcgccgtcaccgaagaaggc

SEQ ID NO: 2990690 - DNA, 25 bp, Homo sapien
ctgacccagcgccgtcaccgaagaa

SEQ ID NO: 2990691 - DNA, 25 bp, Homo sapien
ccagcgccgtcaccgaagaaggcat

SEQ ID NO: 2990692 - DNA, 25 bp, Homo sapien
cacttcagcataggccagcgcctgg

SEQ ID NO: 2990693 - DNA, 25 bp, Homo sapien
ggccggcgacgaaatccatcttcag

SEQ ID NO: 2990694 - DNA, 25 bp, Homo sapien
ccactgcagggagtagctgggcagc

SEQ ID NO: 2990695 - DNA, 25 bp, Homo sapien
caactgagaggccggcgacgaaatc

SEQ ID NO: 2990696 - DNA, 25 bp, Homo sapien
acctggaatcgctgatggtgtctgg

SEQ ID NO: 2990697 - DNA, 25 bp, Homo sapien
gcgtcacacactgtaaaccaaaggt

SEQ ID NO: 2990698 - DNA, 25 bp, Homo sapien
tgggtcggcccagagacaatctgcg

SEQ ID NO: 2990699 - DNA, 25 bp, Homo sapien
cactgtttctgagatatggctggca

SEQ ID NO: 2990700 - DNA, 25 bp, Homo sapien
atggaaggtgtagaaggagaccagg

SEQ ID NO: 2990701 - DNA, 25 bp, Homo sapien
agcacagcgtaggcgggctcatgga

SEQ ID NO: 2990702 - DNA, 25 bp, Homo sapien
gaccaggagggacataatggcggtg

SEQ ID NO: 2990703 - DNA, 25 bp, Homo sapien
gaaatacacgaagcagcccatgaag

SEQ ID NO: 2990704 - DNA, 25 bp, Homo sapien
agcaaatgctgaggtcgagggcatc

SEQ ID NO: 2990705 - DNA, 25 bp, Homo sapien
cccttggcaagaaggtagagcctca

SEQ ID NO: 2990706 - DNA, 25 bp, Homo sapien
ccttggcaagaaggtagagcctcac

SEQ ID NO: 2990707 - DNA, 25 bp, Homo sapien
ccccttggcaagaaggtagagcctc

SEQ ID NO: 2990708 - DNA, 25 bp, Homo sapien
gggacatcgagctggtcccggctcc

SEQ ID NO: 2990709 - DNA, 25 bp, Homo sapien
ggccagccaagaggggacatcgagc

SEQ ID NO: 2990710 - DNA, 25 bp, Homo sapien
ggggacatcgagctggtcccggctc

SEQ ID NO: 2990711 - DNA, 25 bp, Homo sapien
ggacatcgagctggtcccggctcca

SEQ ID NO: 2990712 - DNA, 25 bp, Homo sapien
cttgatctgtccaaagccgatggtg

SEQ ID NO: 2990713 - DNA, 25 bp, Homo sapien
tgaagcctttaatgacggggtagga

SEQ ID NO: 2990714 - DNA, 25 bp, Homo sapien
tgtccaaagccgatggtgacggcag

SEQ ID NO: 2990715 - DNA, 25 bp, Homo sapien
aaagccgatggtgacggcagcagca

SEQ ID NO: 2990716 - DNA, 25 bp, Homo sapien
gcatgaacaagggatgccttccact

SEQ ID NO: 2990717 - DNA, 25 bp, Homo sapien
acgtagctgggatccacagtgcagg

SEQ ID NO: 2990718 - DNA, 25 bp, Homo sapien
tcactgggatcctacaaaagaacat

SEQ ID NO: 2990719 - DNA, 25 bp, Homo sapien
tagttctttacatcgcctgagaccc

SEQ ID NO: 2990720 - DNA, 25 bp, Homo sapien
gaagaacggcctggggatgttctgt

SEQ ID NO: 2990721 - DNA, 25 bp, Homo sapien
ctgcaggaagaacggcctggggatg

SEQ ID NO: 2990722 - DNA, 25 bp, Homo sapien
aggaagaacggcctggggatgttct

SEQ ID NO: 2990723 - DNA, 25 bp, Homo sapien
aacggcctggggatgttctgtagtc

SEQ ID NO: 2990724 - DNA, 25 bp, Homo sapien
ggtctctgcaatcctgaggaaggtg

SEQ ID NO: 2990725 - DNA, 25 bp, Homo sapien
caatcctgaggaaggtgtggtacac

SEQ ID NO: 2990726 - DNA, 25 bp, Homo sapien
ctggtctctgcaatcctgaggaagg

SEQ ID NO: 2990727 - DNA, 25 bp, Homo sapien
tgcaatcctgaggaaggtgtggtac

SEQ ID NO: 2990728 - DNA, 25 bp, Homo sapien
tggacgggaggcacgtggtcccgca

SEQ ID NO: 2990729 - DNA, 25 bp, Homo sapien
acggctgagccgcacaccagggggc

SEQ ID NO: 2990730 - DNA, 25 bp, Homo sapien
ggcatctcggggtggacgggaggca

SEQ ID NO: 2990731 - DNA, 25 bp, Homo sapien
acgtggtcccgcatcagcttcagca

SEQ ID NO: 2990732 - DNA, 25 bp, Homo sapien
tcacctcgaaggagtacgcaaccag

SEQ ID NO: 2990733 - DNA, 25 bp, Homo sapien
gagatcgtcccgttggctgtggtca

SEQ ID NO: 2990734 - DNA, 25 bp, Homo sapien
acgcaaccagggctgcgaaggagac

SEQ ID NO: 2990735 - DNA, 25 bp, Homo sapien
agctgtctcccctgttaggatgaaa

SEQ ID NO: 2990736 - DNA, 25 bp, Homo sapien
caccacggccagcccggctcccatg

SEQ ID NO: 2990737 - DNA, 25 bp, Homo sapien
cgaaggctttggccaccgcaatgct

SEQ ID NO: 2990738 - DNA, 25 bp, Homo sapien
ccacggccagcccggctcccatgtc

SEQ ID NO: 2990739 - DNA, 25 bp, Homo sapien
aaggctttggccaccgcaatgctct

SEQ ID NO: 2990740 - DNA, 25 bp, Homo sapien
gttggcatcgatgcggtaattattc

SEQ ID NO: 2990741 - DNA, 25 bp, Homo sapien
catcgatgcggtaattattctgaga

SEQ ID NO: 2990742 - DNA, 25 bp, Homo sapien
ctcctggttggcatcgatgcggtaa

SEQ ID NO: 2990743 - DNA, 25 bp, Homo sapien
cctggttggcatcgatgcggtaatt

SEQ ID NO: 2990744 - DNA, 25 bp, Homo sapien
ccaaagctgcctgtgaccgggtagg

SEQ ID NO: 2990745 - DNA, 25 bp, Homo sapien
aggagacgagggagcccaacatgtt

SEQ ID NO: 2990746 - DNA, 25 bp, Homo sapien
cgtccaaagctgcctgtgaccgggt

SEQ ID NO: 2990747 - DNA, 25 bp, Homo sapien
tgaccgggtaggaggagacgaggga

SEQ ID NO: 2990748 - DNA, 25 bp, Homo sapien
ccccgactgagcgttcacggctgtc

SEQ ID NO: 2990749 - DNA, 25 bp, Homo sapien
cccccgactgagcgttcacggctgt

SEQ ID NO: 2990750 - DNA, 25 bp, Homo sapien
acccccgactgagcgttcacggctg

SEQ ID NO: 2990751 - DNA, 25 bp, Homo sapien
tgaagatcttggtgtcgaacagcgg

SEQ ID NO: 2990752 - DNA, 25 bp, Homo sapien
tcttaacacgccagagcgtcctgaa

SEQ ID NO: 2990753 - DNA, 25 bp, Homo sapien
aacagcggggccacggccatgatga

SEQ ID NO: 2990754 - DNA, 25 bp, Homo sapien
tagaacagtgaggtcaggtagtcca

SEQ ID NO: 2990755 - DNA, 25 bp, Homo sapien
agcacagcaggaaggtcacgcacag

SEQ ID NO: 2990756 - DNA, 25 bp, Homo sapien
gatgccgtactgcacctcccagaag

SEQ ID NO: 2990757 - DNA, 25 bp, Homo sapien
gggccccggccaggatgccgtactg

SEQ ID NO: 2990758 - DNA, 25 bp, Homo sapien
cacagcaggaaggtcacgcacaggg

SEQ ID NO: 2990759 - DNA, 25 bp, Homo sapien
ccagggcccggcttaggatctcctc

SEQ ID NO: 2990760 - DNA, 25 bp, Homo sapien
tccagggcccggcttaggatctcct

SEQ ID NO: 2990761 - DNA, 25 bp, Homo sapien
ttccagggcccggcttaggatctcc

SEQ ID NO: 2990762 - DNA, 25 bp, Homo sapien
cagggcccggcttaggatctcctcc

SEQ ID NO: 2990763 - DNA, 25 bp, Homo sapien
agcaccacagtgtagtcgatgctgc

SEQ ID NO: 2990764 - DNA, 25 bp, Homo sapien
aggagctcgccgagtcccagcacca

SEQ ID NO: 2990765 - DNA, 25 bp, Homo sapien
agtgtagtcgatgctgcagacatgg

SEQ ID NO: 2990766 - DNA, 25 bp, Homo sapien
gcagacatgggtgcactccaggacc

SEQ ID NO: 2990767 - DNA, 25 bp, Homo sapien
caggtcagcggacagcaggacacgg

SEQ ID NO: 2990768 - DNA, 25 bp, Homo sapien
agagaagtactggaaccccttcagg

SEQ ID NO: 2990769 - DNA, 25 bp, Homo sapien
gtagagaagtactggaaccccttca

SEQ ID NO: 2990770 - DNA, 25 bp, Homo sapien
aagtactggaaccccttcaggtcag

SEQ ID NO: 2990771 - DNA, 25 bp, Homo sapien
tacgtaaaaccgcaaacatatatcc

SEQ ID NO: 2990772 - DNA, 25 bp, Homo sapien
tgatcccccgggatgtggactttcg

SEQ ID NO: 2990773 - DNA, 25 bp, Homo sapien
ttccagagcaccaggtatgaaatgg

SEQ ID NO: 2990774 - DNA, 25 bp, Homo sapien
gcaccaggtatgaaatggtcccatt

SEQ ID NO: 2990775 - DNA, 25 bp, Homo sapien
ccaggccagtgtcactaactccatg

SEQ ID NO: 2990776 - DNA, 25 bp, Homo sapien
ggtcagttcacaggaagggattaag

SEQ ID NO: 2990777 - DNA, 25 bp, Homo sapien
tcagttcacaggaagggattaagga

SEQ ID NO: 2990778 - DNA, 25 bp, Homo sapien
tcagaagtgaggatgggtcagttca

SEQ ID NO: 2990779 - DNA, 25 bp, Homo sapien
tgagcagggcaaccttttggtccag

SEQ ID NO: 2990780 - DNA, 25 bp, Homo sapien
ttgagcagggcaaccttttggtcca

SEQ ID NO: 2990781 - DNA, 25 bp, Homo sapien
cttgagcagggcaaccttttggtcc

SEQ ID NO: 2990782 - DNA, 25 bp, Homo sapien
ccttgagcagggcaaccttttggtc

SEQ ID NO: 2990783 - DNA, 25 bp, Homo sapien
aactgtggatgcccacgggtggccc

SEQ ID NO: 2990784 - DNA, 25 bp, Homo sapien
caaactgtggatgcccacgggtggc

SEQ ID NO: 2990785 - DNA, 25 bp, Homo sapien
ctgcaaactgtggatgcccacgggt

SEQ ID NO: 2990786 - DNA, 25 bp, Homo sapien
ctgtggatgcccacgggtggcccca

SEQ ID NO: 2990787 - DNA, 25 bp, Homo sapien
acagtgacaagaaccttccggaaca

SEQ ID NO: 2990788 - DNA, 25 bp, Homo sapien
tctatcaggcggcatccagcatcca

SEQ ID NO: 2990789 - DNA, 25 bp, Homo sapien
ctcaggggtttctcagccaggccag

SEQ ID NO: 2990790 - DNA, 25 bp, Homo sapien
caggccagcatgtctatcaggcggc

SEQ ID NO: 2990791 - DNA, 25 bp, Homo sapien
cagcagcgaggtcattttccagtca

SEQ ID NO: 2990792 - DNA, 25 bp, Homo sapien
tctggaatgatcacccaagtggaca

SEQ ID NO: 2990793 - DNA, 25 bp, Homo sapien
tcgcacagtctgtcattctagaagg

SEQ ID NO: 2990794 - DNA, 25 bp, Homo sapien
cttccaaagagggtcatgccaggga

SEQ ID NO: 2990795 - DNA, 25 bp, Homo sapien
ggcccccgagctcgccgcctgccgc

SEQ ID NO: 2990796 - DNA, 25 bp, Homo sapien
gcggcccccgagctcgccgcctgcc

SEQ ID NO: 2990797 - DNA, 25 bp, Homo sapien
ccccgagctcgccgcctgccgcgcg

SEQ ID NO: 2990798 - DNA, 25 bp, Homo sapien
ctgcggcccccgagctcgccgcctg

SEQ ID NO: 2990799 - DNA, 25 bp, Homo sapien
gagccccaggcacccaacactgttg

SEQ ID NO: 2990800 - DNA, 25 bp, Homo sapien
aagcatcttattgttccatctgctc

SEQ ID NO: 2990801 - DNA, 25 bp, Homo sapien
tctaggggccggaagacacaagaga

SEQ ID NO: 2990802 - DNA, 25 bp, Homo sapien
ccacaaccaaagtcaacaaggtggg

SEQ ID NO: 2990803 - DNA, 25 bp, Homo sapien
tacatgtcctgtcacgtgaccacgg

SEQ ID NO: 2990804 - DNA, 25 bp, Homo sapien
gaagcaagagcaggagtcgctggca

SEQ ID NO: 2990805 - DNA, 25 bp, Homo sapien
catgtcctgtcacgtgaccacggct

SEQ ID NO: 2990806 - DNA, 25 bp, Homo sapien
ctacatgtcctgtcacgtgaccacg

SEQ ID NO: 2990807 - DNA, 25 bp, Homo sapien
gagacatgctggcacgaaggacact

SEQ ID NO: 2990808 - DNA, 25 bp, Homo sapien
catgctggcacgaaggacactccat

SEQ ID NO: 2990809 - DNA, 25 bp, Homo sapien
tcctccttggagacatgctggcacg

SEQ ID NO: 2990810 - DNA, 25 bp, Homo sapien
cttggagacatgctggcacgaagga

SEQ ID NO: 2990811 - DNA, 25 bp, Homo sapien
cacgcctagtaaggtgggccacctt

SEQ ID NO: 2990812 - DNA, 25 bp, Homo sapien
gattctgatccagggcacactaaga

SEQ ID NO: 2990813 - DNA, 25 bp, Homo sapien
cataatctctgctagtgggcccaca

SEQ ID NO: 2990814 - DNA, 25 bp, Homo sapien
tgaaccacggcatccggcttaagtg

SEQ ID NO: 2990815 - DNA, 25 bp, Homo sapien
taacatgtgggtcatttgccaacca

SEQ ID NO: 2990816 - DNA, 25 bp, Homo sapien
cattcacgcagaggagatgtctaga

SEQ ID NO: 2990817 - DNA, 25 bp, Homo sapien
ggttatccagagagcagaactatag

SEQ ID NO: 2990818 - DNA, 25 bp, Homo sapien
gaatgtgacagtcctggcccagggt

SEQ ID NO: 2990819 - DNA, 25 bp, Homo sapien
gactagcctaatccaatcagggccg

SEQ ID NO: 2990820 - DNA, 25 bp, Homo sapien
caggctcgggtactcttatggcaac

SEQ ID NO: 2990821 - DNA, 25 bp, Homo sapien
gattgactaagggaagggccaacca

SEQ ID NO: 2990822 - DNA, 25 bp, Homo sapien
gagtactcagtgttggcgtagccaa

SEQ ID NO: 2990823 - DNA, 25 bp, Homo sapien
gtgtgagccaccccacccggcctct

SEQ ID NO: 2990824 - DNA, 25 bp, Homo sapien
tcatgatccacccgtcttgccctct

SEQ ID NO: 2990825 - DNA, 25 bp, Homo sapien
atgatccacccgtcttgccctctca

SEQ ID NO: 2990826 - DNA, 25 bp, Homo sapien
tgtgagccaccccacccggcctctt

SEQ ID NO: 2990827 - DNA, 25 bp, Homo sapien
ccattgtggagttattgttctcaga

SEQ ID NO: 2990828 - DNA, 25 bp, Homo sapien
cctccgaggccgacgccattgtgga

SEQ ID NO: 2990829 - DNA, 25 bp, Homo sapien
tctgagcccgggaacaagcacgggc

SEQ ID NO: 2990830 - DNA, 25 bp, Homo sapien
cacactccatttcaccctccgaggc

SEQ ID NO: 2990831 - DNA, 25 bp, Homo sapien
ggcagagtgagcgggggcggagggg

SEQ ID NO: 2990832 - DNA, 25 bp, Homo sapien
cggaggggagccgaggcagtgcact

SEQ ID NO: 2990833 - DNA, 25 bp, Homo sapien
aggggagccgaggcagtgcactcac

SEQ ID NO: 2990834 - DNA, 25 bp, Homo sapien
gaggggagccgaggcagtgcactca

SEQ ID NO: 2990835 - DNA, 25 bp, Homo sapien
cgccccgggcctccacacgaatgcc

SEQ ID NO: 2990836 - DNA, 25 bp, Homo sapien
ccccgggcctccacacgaatgcctt

SEQ ID NO: 2990837 - DNA, 25 bp, Homo sapien
ccgggcctccacacgaatgccttgg

SEQ ID NO: 2990838 - DNA, 25 bp, Homo sapien
cccgggcctccacacgaatgccttg

SEQ ID NO: 2990839 - DNA, 25 bp, Homo sapien
catcggatatgaggtctacagcagc

SEQ ID NO: 2990840 - DNA, 25 bp, Homo sapien
agcttcccattcatcggatatgagg

SEQ ID NO: 2990841 - DNA, 25 bp, Homo sapien
tcttgctgggtatggcattagcagc

SEQ ID NO: 2990842 - DNA, 25 bp, Homo sapien
ctgcagaaggcacgctggcggcctc

SEQ ID NO: 2990843 - DNA, 25 bp, Homo sapien
agctctgaggaagcggacttgttcc

SEQ ID NO: 2990844 - DNA, 25 bp, Homo sapien
tctgaggaagcggacttgttcccct

SEQ ID NO: 2990845 - DNA, 25 bp, Homo sapien
cagctctgaggaagcggacttgttc

SEQ ID NO: 2990846 - DNA, 25 bp, Homo sapien
tgaggaagcggacttgttccccttc

SEQ ID NO: 2990847 - DNA, 25 bp, Homo sapien
ctgaggccacgggtttgaaagcaaa

SEQ ID NO: 2990848 - DNA, 25 bp, Homo sapien
gtctgcagttctgtcccgggctcag

SEQ ID NO: 2990849 - DNA, 25 bp, Homo sapien
ggaattgcgggctgctctgagcctc

SEQ ID NO: 2990850 - DNA, 25 bp, Homo sapien
cctgcctgttgctcggtggtctgca

SEQ ID NO: 2990851 - DNA, 25 bp, Homo sapien
tcaccctccagtggcgtggtggctg

SEQ ID NO: 2990852 - DNA, 25 bp, Homo sapien
ccggcccctttaactgcattggctg

SEQ ID NO: 2990853 - DNA, 25 bp, Homo sapien
ggtggctgtttcattctctgggtct

SEQ ID NO: 2990854 - DNA, 25 bp, Homo sapien
ctggctcagctacagcatcaactgc

SEQ ID NO: 2990855 - DNA, 25 bp, Homo sapien
tgttttgaaaggaggagtggttgct

SEQ ID NO: 2990856 - DNA, 25 bp, Homo sapien
tgctccttctcgtttttcacagcag

SEQ ID NO: 2990857 - DNA, 25 bp, Homo sapien
tctggcttcttgaggtcttcaggct

SEQ ID NO: 2990858 - DNA, 25 bp, Homo sapien
ttgctccttctcgtttttcacagca

SEQ ID NO: 2990859 - DNA, 25 bp, Homo sapien
tggcttcttgaggtcttcaggctcc

SEQ ID NO: 2990860 - DNA, 25 bp, Homo sapien
ggaagaacacggtgactcctccacc

SEQ ID NO: 2990861 - DNA, 25 bp, Homo sapien
tgatgaagactttatggaggtcagg

SEQ ID NO: 2990862 - DNA, 25 bp, Homo sapien
tggaagaacacggtgactcctccac

SEQ ID NO: 2990863 - DNA, 25 bp, Homo sapien
ctttatggaggtcaggattgaatgg

SEQ ID NO: 2990864 - DNA, 25 bp, Homo sapien
tctgctggtgcttgtaaatgaactc

SEQ ID NO: 2990865 - DNA, 25 bp, Homo sapien
gattccccattataaatgacgtact

SEQ ID NO: 2990866 - DNA, 25 bp, Homo sapien
cttggaaatgcagacaatgccttca

SEQ ID NO: 2990867 - DNA, 25 bp, Homo sapien
ggttgacgtactcgcccttcttctg

SEQ ID NO: 2990868 - DNA, 25 bp, Homo sapien
ccagaagtgaagattttatgaacag

SEQ ID NO: 2990869 - DNA, 25 bp, Homo sapien
tgttgcaggacaaagcaaaactgct

SEQ ID NO: 2990870 - DNA, 25 bp, Homo sapien
caaaactgctcgaactgggtgaaga

SEQ ID NO: 2990871 - DNA, 25 bp, Homo sapien
tgtactgcaaatcggtccacagctg

SEQ ID NO: 2990872 - DNA, 25 bp, Homo sapien
tctggagtctcccatgaggcttcat

SEQ ID NO: 2990873 - DNA, 25 bp, Homo sapien
ccatggacttgaattcaccggcagt

SEQ ID NO: 2990874 - DNA, 25 bp, Homo sapien
ccccagcaccacagctagggcagca

SEQ ID NO: 2990875 - DNA, 25 bp, Homo sapien
tagggcagcagaccccattccgtgc

SEQ ID NO: 2990876 - DNA, 25 bp, Homo sapien
tggacttgaattcaccggcagtgtc

SEQ ID NO: 2990877 - DNA, 25 bp, Homo sapien
ttcagatgttgccacaggtatctct

SEQ ID NO: 2990878 - DNA, 25 bp, Homo sapien
cagatgttgccacaggtatctcttc

SEQ ID NO: 2990879 - DNA, 25 bp, Homo sapien
tccgtgctttttccgtccggcaatg

SEQ ID NO: 2990880 - DNA, 25 bp, Homo sapien
caatggtaccacgtgttttttcaga

SEQ ID NO: 2990881 - DNA, 25 bp, Homo sapien
gaggtgacacaaccagtccaggctg

SEQ ID NO: 2990882 - DNA, 25 bp, Homo sapien
tccaggctgccttctaataaaagct

SEQ ID NO: 2990883 - DNA, 25 bp, Homo sapien
tctgaggtatcccaaggatgtggct

SEQ ID NO: 2990884 - DNA, 25 bp, Homo sapien
tggcttaggtcacggtgaaactcat

SEQ ID NO: 2990885 - DNA, 25 bp, Homo sapien
gaacggtgagaaggagagtccctcc

SEQ ID NO: 2990886 - DNA, 25 bp, Homo sapien
gcccagccaggtgtacgtccttgtg

SEQ ID NO: 2990887 - DNA, 25 bp, Homo sapien
ctagcatttgttcccggaacggtga

SEQ ID NO: 2990888 - DNA, 25 bp, Homo sapien
gcatctttggcacaggttcaccagg

SEQ ID NO: 2990889 - DNA, 25 bp, Homo sapien
gaggctcgtctatgctcagcaaatg

SEQ ID NO: 2990890 - DNA, 25 bp, Homo sapien
cagaggtagcagactaaaccaggac

SEQ ID NO: 2990891 - DNA, 25 bp, Homo sapien
caggatatgagcaggaaaacgaccc

SEQ ID NO: 2990892 - DNA, 25 bp, Homo sapien
acttgctcaagtcccggaagccggt

SEQ ID NO: 2990893 - DNA, 25 bp, Homo sapien
ttgtcccggtaagtgtccaggagtc

SEQ ID NO: 2990894 - DNA, 25 bp, Homo sapien
aatgttctgaacgttctgaacatcc

SEQ ID NO: 2990895 - DNA, 25 bp, Homo sapien
tctaaaatgttctgaacgttctgaa

SEQ ID NO: 2990896 - DNA, 25 bp, Homo sapien
tccaggagtcgcaacagcatttcta

SEQ ID NO: 2990897 - DNA, 25 bp, Homo sapien
tgcagatggcttcatgcagtttcag

SEQ ID NO: 2990898 - DNA, 25 bp, Homo sapien
acaatctcggcagataaggctggca

SEQ ID NO: 2990899 - DNA, 25 bp, Homo sapien
aggtaggatggtgacaaggcctcct

SEQ ID NO: 2990900 - DNA, 25 bp, Homo sapien
ggctggcagctcgtaaaacttaagt

SEQ ID NO: 2990901 - DNA, 25 bp, Homo sapien
gaacacagcgtcactatacctggga

SEQ ID NO: 2990902 - DNA, 25 bp, Homo sapien
caaagcatgtaagagggaccaggat

SEQ ID NO: 2990903 - DNA, 25 bp, Homo sapien
cacatcgtgcaagtgtcaggagcca

SEQ ID NO: 2990904 - DNA, 25 bp, Homo sapien
gtgctgctgtgaaagagagcccgca

SEQ ID NO: 2990905 - DNA, 25 bp, Homo sapien
ccttgacgtatgtgaatgaggcacc

SEQ ID NO: 2990906 - DNA, 25 bp, Homo sapien
tctcggagccaccttttcgtagcag

SEQ ID NO: 2990907 - DNA, 25 bp, Homo sapien
gactgtttggactgaattatttcca

SEQ ID NO: 2990908 - DNA, 25 bp, Homo sapien
caagggtcccttggaagactgtttg

SEQ ID NO: 2990909 - DNA, 25 bp, Homo sapien
gaattggatttccaccagccgcctc

SEQ ID NO: 2990910 - DNA, 25 bp, Homo sapien
tcccagcaacgactccttccagcca

SEQ ID NO: 2990911 - DNA, 25 bp, Homo sapien
agcaacgactccttccagccatgct

SEQ ID NO: 2990912 - DNA, 25 bp, Homo sapien
tccgcggggaattggatttccacca

SEQ ID NO: 2990913 - DNA, 25 bp, Homo sapien
ggtgtcccagcaactattgcagtag

SEQ ID NO: 2990914 - DNA, 25 bp, Homo sapien
cagcaactattgcagtaggcagtga

SEQ ID NO: 2990915 - DNA, 25 bp, Homo sapien
gtcctctaagcctttggtgtcccag

SEQ ID NO: 2990916 - DNA, 25 bp, Homo sapien
tcctctaagcctttggtgtcccagc

SEQ ID NO: 2990917 - DNA, 25 bp, Homo sapien
agctcacggcttcaatgatgcattt

SEQ ID NO: 2990918 - DNA, 25 bp, Homo sapien
gagctcacggcttcaatgatgcatt

SEQ ID NO: 2990919 - DNA, 25 bp, Homo sapien
tgagctcacggcttcaatgatgcat

SEQ ID NO: 2990920 - DNA, 25 bp, Homo sapien
ctgagctcacggcttcaatgatgca

SEQ ID NO: 2990921 - DNA, 25 bp, Homo sapien
gagctgagacccagcgggtgcttca

SEQ ID NO: 2990922 - DNA, 25 bp, Homo sapien
atggcagaacacagctgtgagcccg

SEQ ID NO: 2990923 - DNA, 25 bp, Homo sapien
gggtgcttcatagcccttagctggg

SEQ ID NO: 2990924 - DNA, 25 bp, Homo sapien
gatttcagcgccattgcccttggcg

SEQ ID NO: 2990925 - DNA, 25 bp, Homo sapien
tgcagcacactgaggaatccggaga

SEQ ID NO: 2990926 - DNA, 25 bp, Homo sapien
caaaaggaaccgagtgtggcggcac

SEQ ID NO: 2990927 - DNA, 25 bp, Homo sapien
cgcacggccgtgattccatatggaa

SEQ ID NO: 2990928 - DNA, 25 bp, Homo sapien
ttcaaaacattatgctcggccgggc

SEQ ID NO: 2990929 - DNA, 25 bp, Homo sapien
cacagcagacaagacgatgccaaat

SEQ ID NO: 2990930 - DNA, 25 bp, Homo sapien
aaatttccgcaaatcagagtaagag

SEQ ID NO: 2990931 - DNA, 25 bp, Homo sapien
aagagaacccctgaaggatactggt

SEQ ID NO: 2990932 - DNA, 25 bp, Homo sapien
acccctgaaggatactggtctgaga

SEQ ID NO: 2990933 - DNA, 25 bp, Homo sapien
cattgaagttgtccgcggtcctagg

SEQ ID NO: 2990934 - DNA, 25 bp, Homo sapien
tgcttgacatctgccaacgtgagca

SEQ ID NO: 2990935 - DNA, 25 bp, Homo sapien
cacacaatctgaagacgtgcttgac

SEQ ID NO: 2990936 - DNA, 25 bp, Homo sapien
caacgtgagcagatgctttaaaatg

SEQ ID NO: 2990937 - DNA, 25 bp, Homo sapien
catagcccactgtaacctcattttc

SEQ ID NO: 2990938 - DNA, 25 bp, Homo sapien
caaccatagcccactgtaacctcat

SEQ ID NO: 2990939 - DNA, 25 bp, Homo sapien
ccatagcccactgtaacctcatttt

SEQ ID NO: 2990940 - DNA, 25 bp, Homo sapien
ccatgcctggcaaactttcaaaatt

SEQ ID NO: 2990941 - DNA, 25 bp, Homo sapien
ggaggtcaccaacaactttcgtcaa

SEQ ID NO: 2990942 - DNA, 25 bp, Homo sapien
aaatcgtgccacttaggaggtcacc

SEQ ID NO: 2990943 - DNA, 25 bp, Homo sapien
tcaacacagagtcggcaacagctat

SEQ ID NO: 2990944 - DNA, 25 bp, Homo sapien
gctttataatcagctccagttgtcc

SEQ ID NO: 2990945 - DNA, 25 bp, Homo sapien
tatcagatgtttcacgttcccacac

SEQ ID NO: 2990946 - DNA, 25 bp, Homo sapien
gatgtttcacgttcccacacatctt

SEQ ID NO: 2990947 - DNA, 25 bp, Homo sapien
caggagactatcaacacatcttttc

SEQ ID NO: 2990948 - DNA, 25 bp, Homo sapien
catcttcaggagactatcaacacat

SEQ ID NO: 2990949 - DNA, 25 bp, Homo sapien
tctctgcaagggtgacctctcctga

SEQ ID NO: 2990950 - DNA, 25 bp, Homo sapien
ggtccacggtgcacatgatcttaag

SEQ ID NO: 2990951 - DNA, 25 bp, Homo sapien
tagatcctggtgcaacttaatgaac

SEQ ID NO: 2990952 - DNA, 25 bp, Homo sapien
tggtaatgcgttgccctctgcgagt

SEQ ID NO: 2990953 - DNA, 25 bp, Homo sapien
accttggctgcgtggacagcctggt

SEQ ID NO: 2990954 - DNA, 25 bp, Homo sapien
tccttgatctgttcgactcggtcct

SEQ ID NO: 2990955 - DNA, 25 bp, Homo sapien
ttgacctgcaagatgaccttggctg

SEQ ID NO: 2990956 - DNA, 25 bp, Homo sapien
tgaagtcaccgttcagtcccaggct

SEQ ID NO: 2990957 - DNA, 25 bp, Homo sapien
cgggcctcgctgatgtcctggagca

SEQ ID NO: 2990958 - DNA, 25 bp, Homo sapien
tggagcagctttttggcctggatga

SEQ ID NO: 2990959 - DNA, 25 bp, Homo sapien
tggtccagtgtttcacggcgaaagt

SEQ ID NO: 2990960 - DNA, 25 bp, Homo sapien
ggatgagctcctggttgatctggtc

SEQ ID NO: 2990961 - DNA, 25 bp, Homo sapien
tgccctttacgtagtccttggccaa

SEQ ID NO: 2990962 - DNA, 25 bp, Homo sapien
tttaggaacgccacacagtgcgcca

SEQ ID NO: 2990963 - DNA, 25 bp, Homo sapien
cacgcaaccccaaaggctgatttta

SEQ ID NO: 2990964 - DNA, 25 bp, Homo sapien
cagtgcgccatctgaaaactttctc

SEQ ID NO: 2990965 - DNA, 25 bp, Homo sapien
taaatagcagggatgcgtagccctg

SEQ ID NO: 2990966 - DNA, 25 bp, Homo sapien
tgggcaggtactggtccttatccag

SEQ ID NO: 2990967 - DNA, 25 bp, Homo sapien
atgcttcatgaatgcactgaagtcc

SEQ ID NO: 2990968 - DNA, 25 bp, Homo sapien
cattctcccccgctgagatggaggc

SEQ ID NO: 2990969 - DNA, 25 bp, Homo sapien
tgaaaacggctgtgtacaaacctac

SEQ ID NO: 2990970 - DNA, 25 bp, Homo sapien
aggtgtgccaccatttccacagtca

SEQ ID NO: 2990971 - DNA, 25 bp, Homo sapien
gaaaactcctggcaacgtttcagca

SEQ ID NO: 2990972 - DNA, 25 bp, Homo sapien
actgccctaacgttgctaagcaatg

SEQ ID NO: 2990973 - DNA, 25 bp, Homo sapien
gaacacgggccacggttggagcgag

SEQ ID NO: 2990974 - DNA, 25 bp, Homo sapien
agaacacgggccacggttggagcga

SEQ ID NO: 2990975 - DNA, 25 bp, Homo sapien
agagaacacgggccacggttggagc

SEQ ID NO: 2990976 - DNA, 25 bp, Homo sapien
acacgggccacggttggagcgagga

SEQ ID NO: 2990977 - DNA, 25 bp, Homo sapien
tggttgatggccgtggccagggtca

SEQ ID NO: 2990978 - DNA, 25 bp, Homo sapien
ttttggccacctttgggcgcctgga

SEQ ID NO: 2990979 - DNA, 25 bp, Homo sapien
ggatgagcgttccacagacccatga

SEQ ID NO: 2990980 - DNA, 25 bp, Homo sapien
ctggatcacatagatgcctctttgg

SEQ ID NO: 2990981 - DNA, 25 bp, Homo sapien
gtactctcgtgactcctcgtggctg

SEQ ID NO: 2990982 - DNA, 25 bp, Homo sapien
tctcaggaaggatcaagtgcagaac

SEQ ID NO: 2990983 - DNA, 25 bp, Homo sapien
gatcaagtgcagaaccgtgtctggg

SEQ ID NO: 2990984 - DNA, 25 bp, Homo sapien
tgttgttacgatccttcttgccaga

SEQ ID NO: 2990985 - DNA, 25 bp, Homo sapien
tagaccggtacaccattctcaatat

SEQ ID NO: 2990986 - DNA, 25 bp, Homo sapien
taaaggataccatttgtaaagtaca

SEQ ID NO: 2990987 - DNA, 25 bp, Homo sapien
tgcacccagcagagataaaggatac

SEQ ID NO: 2990988 - DNA, 25 bp, Homo sapien
tctgttttgtccatctaaatcttag

SEQ ID NO: 2990989 - DNA, 25 bp, Homo sapien
ggctgtagaccttgtgccccaggga

SEQ ID NO: 2990990 - DNA, 25 bp, Homo sapien
gatagcatcgttagggcggcatcac

SEQ ID NO: 2990991 - DNA, 25 bp, Homo sapien
cacagattgtggaaaagctcctccg

SEQ ID NO: 2990992 - DNA, 25 bp, Homo sapien
caagggtctctaggtcgaggcagtc

SEQ ID NO: 2990993 - DNA, 25 bp, Homo sapien
gaccctgattgacacccacagatga

SEQ ID NO: 2990994 - DNA, 25 bp, Homo sapien
tttatcccaacaggacgaggtactg

SEQ ID NO: 2990995 - DNA, 25 bp, Homo sapien
agaagtaaacttcaggccgggcgtg

SEQ ID NO: 2990996 - DNA, 25 bp, Homo sapien
gcagtgtcgtatttgcagctcacca

SEQ ID NO: 2990997 - DNA, 25 bp, Homo sapien
cgtgcaacctcttcacgtacagaga

SEQ ID NO: 2990998 - DNA, 25 bp, Homo sapien
tgatactgcgcatccaggaagggca

SEQ ID NO: 2990999 - DNA, 25 bp, Homo sapien
tccacctgagggtcgatcagtcgaa

SEQ ID NO: 2991000 - DNA, 25 bp, Homo sapien
tcacgtccaggtgaaagagcacggg

SEQ ID NO: 2991001 - DNA, 25 bp, Homo sapien
tatacaaatggcaggggttccgaag

SEQ ID NO: 2991002 - DNA, 25 bp, Homo sapien
tgaagagctcctcgacggcactgac

SEQ ID NO: 2991003 - DNA, 25 bp, Homo sapien
ctttccaggatttcaacgatataca

SEQ ID NO: 2991004 - DNA, 25 bp, Homo sapien
cggcactgacgtcctcctttccagg

SEQ ID NO: 2991005 - DNA, 25 bp, Homo sapien
tcaaagtcgacattgaagggcaccc

SEQ ID NO: 2991006 - DNA, 25 bp, Homo sapien
cacgccgcaggtcgctaaggaattt

SEQ ID NO: 2991007 - DNA, 25 bp, Homo sapien
caaagttccgaagctctgaccagga

SEQ ID NO: 2991008 - DNA, 25 bp, Homo sapien
aaaacgtatgggtgaggctccgact

SEQ ID NO: 2991009 - DNA, 25 bp, Homo sapien
agagcatcgcgctgtgctcgtggaa

SEQ ID NO: 2991010 - DNA, 25 bp, Homo sapien
tgtgatttttgctgacgctggactt

SEQ ID NO: 2991011 - DNA, 25 bp, Homo sapien
gaaaggcattcagctgcgctaagag

SEQ ID NO: 2991012 - DNA, 25 bp, Homo sapien
tgctgacgctggacttggagagaaa

SEQ ID NO: 2991013 - DNA, 25 bp, Homo sapien
tgtagtagtcacgaagcccgaagaa

SEQ ID NO: 2991014 - DNA, 25 bp, Homo sapien
tctaaagaggcatggtaacacaccc

SEQ ID NO: 2991015 - DNA, 25 bp, Homo sapien
tgtgaaagtactcctgcgacagcca

SEQ ID NO: 2991016 - DNA, 25 bp, Homo sapien
tttcggaaagaacctggcgatggct

SEQ ID NO: 2991017 - DNA, 25 bp, Homo sapien
tgcaggatccctaaccgctgcctgg

SEQ ID NO: 2991018 - DNA, 25 bp, Homo sapien
gcgtctcagcatctccctgcaggat

SEQ ID NO: 2991019 - DNA, 25 bp, Homo sapien
agggatttaggactcttgggtgaca

SEQ ID NO: 2991020 - DNA, 25 bp, Homo sapien
gaagaatcttgaatcctgacacgag

SEQ ID NO: 2991021 - DNA, 25 bp, Homo sapien
tctaaaatttcacagtcgtgacttg

SEQ ID NO: 2991022 - DNA, 25 bp, Homo sapien
tgggtttcggagccctgcctgtgac

SEQ ID NO: 2991023 - DNA, 25 bp, Homo sapien
tttcacagtcgtgacttgttagcag

SEQ ID NO: 2991024 - DNA, 25 bp, Homo sapien
aggagtgtgggtttcggagccctgc

SEQ ID NO: 2991025 - DNA, 25 bp, Homo sapien
ctttgaggaatgagtactcggtgtc

SEQ ID NO: 2991026 - DNA, 25 bp, Homo sapien
gacttctttgaggaatgagtactcg

SEQ ID NO: 2991027 - DNA, 25 bp, Homo sapien
ggaatgagtactcggtgtcaaactg

SEQ ID NO: 2991028 - DNA, 25 bp, Homo sapien
cggacttctttgaggaatgagtact

SEQ ID NO: 2991029 - DNA, 25 bp, Homo sapien
gtgactgtggcgctcattaaccggc

SEQ ID NO: 2991030 - DNA, 25 bp, Homo sapien
tggcgctcattaaccggcgcgggta

SEQ ID NO: 2991031 - DNA, 25 bp, Homo sapien
gggtaccatcgccacgcagaagcca

SEQ ID NO: 2991032 - DNA, 25 bp, Homo sapien
ggcgcgggtaccatcgccacgcaga

SEQ ID NO: 2991033 - DNA, 25 bp, Homo sapien
ggattttacatttggctgtattcgt

SEQ ID NO: 2991034 - DNA, 25 bp, Homo sapien
gattttacatttggctgtattcgtt

SEQ ID NO: 2991035 - DNA, 25 bp, Homo sapien
ctgggcgctacggattccatcttca

SEQ ID NO: 2991036 - DNA, 25 bp, Homo sapien
gcaatgagctgggcgctacggattc

SEQ ID NO: 2991037 - DNA, 25 bp, Homo sapien
agctgggcgctacggattccatctt

SEQ ID NO: 2991038 - DNA, 25 bp, Homo sapien
atgagctgggcgctacggattccat

SEQ ID NO: 2991039 - DNA, 25 bp, Homo sapien
tgtgatgaaatagacgaagatacgg

SEQ ID NO: 2991040 - DNA, 25 bp, Homo sapien
gaagatacggtcctcattttctcgt

SEQ ID NO: 2991041 - DNA, 25 bp, Homo sapien
cccacccgggacagttttgtgatga

SEQ ID NO: 2991042 - DNA, 25 bp, Homo sapien
tccgtggaagcccacataggctgtt

SEQ ID NO: 2991043 - DNA, 25 bp, Homo sapien
gatctccggaggtcatcgatgtgga

SEQ ID NO: 2991044 - DNA, 25 bp, Homo sapien
aagtctccgggcgcgaacagctggc

SEQ ID NO: 2991045 - DNA, 25 bp, Homo sapien
gaaaccatgagggtggatctccgga

SEQ ID NO: 2991046 - DNA, 25 bp, Homo sapien
agcctggtcacatcagaaaccatga

SEQ ID NO: 2991047 - DNA, 25 bp, Homo sapien
tcttccgcccggtgttccaagccca

SEQ ID NO: 2991048 - DNA, 25 bp, Homo sapien
catggccgtcttccgcccggtgttc

SEQ ID NO: 2991049 - DNA, 25 bp, Homo sapien
tggccgtcttccgcccggtgttcca

SEQ ID NO: 2991050 - DNA, 25 bp, Homo sapien
tcatggccgtcttccgcccggtgtt

SEQ ID NO: 2991051 - DNA, 25 bp, Homo sapien
tgcctccgagttcagaggtttcctt

SEQ ID NO: 2991052 - DNA, 25 bp, Homo sapien
actgcctccgagttcagaggtttcc

SEQ ID NO: 2991053 - DNA, 25 bp, Homo sapien
atcactgcctccgagttcagaggtt

SEQ ID NO: 2991054 - DNA, 25 bp, Homo sapien
tcactgcctccgagttcagaggttt

SEQ ID NO: 2991055 - DNA, 25 bp, Homo sapien
cgcatattgcgcgtgcagctctcgt

SEQ ID NO: 2991056 - DNA, 25 bp, Homo sapien
gtgcagctctcgttctggtctctga

SEQ ID NO: 2991057 - DNA, 25 bp, Homo sapien
cagctctcgttctggtctctgagca

SEQ ID NO: 2991058 - DNA, 25 bp, Homo sapien
tgcgcgtgcagctctcgttctggtc

SEQ ID NO: 2991059 - DNA, 25 bp, Homo sapien
acgcgtcatcctcattcaagaggcc

SEQ ID NO: 2991060 - DNA, 25 bp, Homo sapien
gtggcacgcgtcatcctcattcaag

SEQ ID NO: 2991061 - DNA, 25 bp, Homo sapien
ggcacgcgtcatcctcattcaagag

SEQ ID NO: 2991062 - DNA, 25 bp, Homo sapien
cgtggcacgcgtcatcctcattcaa

SEQ ID NO: 2991063 - DNA, 25 bp, Homo sapien
ggcaagaggggtggggaggctcata

SEQ ID NO: 2991064 - DNA, 25 bp, Homo sapien
gggcaagaggggtggggaggctcat

SEQ ID NO: 2991065 - DNA, 25 bp, Homo sapien
ggggcaagaggggtggggaggctca

SEQ ID NO: 2991066 - DNA, 25 bp, Homo sapien
gcaagaggggtggggaggctcatac

SEQ ID NO: 2991067 - DNA, 25 bp, Homo sapien
ttgcaggcttcccttgccaaccact

SEQ ID NO: 2991068 - DNA, 25 bp, Homo sapien
tttaaaaagacactgaggcgcatct

SEQ ID NO: 2991069 - DNA, 25 bp, Homo sapien
aaccactccagagggtgaaactggc

SEQ ID NO: 2991070 - DNA, 25 bp, Homo sapien
ctcctggagagcgtcctggttgcag

SEQ ID NO: 2991071 - DNA, 25 bp, Homo sapien
gaatgttcagaagcatcgtgtcact

SEQ ID NO: 2991072 - DNA, 25 bp, Homo sapien
ctaggttgccgtctctgtcgatgaa

SEQ ID NO: 2991073 - DNA, 25 bp, Homo sapien
tctggcctggtcagtaactctaggt

SEQ ID NO: 2991074 - DNA, 25 bp, Homo sapien
gaatgatatcatgctcgccagcaga

SEQ ID NO: 2991075 - DNA, 25 bp, Homo sapien
gacgttgttggaagcgttctcggaa

SEQ ID NO: 2991076 - DNA, 25 bp, Homo sapien
agggacgttgttggaagcgttctcg

SEQ ID NO: 2991077 - DNA, 25 bp, Homo sapien
gttctcggaaaggttcatgtggttc

SEQ ID NO: 2991078 - DNA, 25 bp, Homo sapien
ttggaagcgttctcggaaaggttca

SEQ ID NO: 2991079 - DNA, 25 bp, Homo sapien
aagaaggccaccctgagtcttccaa

SEQ ID NO: 2991080 - DNA, 25 bp, Homo sapien
caaatggtacgataagtaaacgtgg

SEQ ID NO: 2991081 - DNA, 25 bp, Homo sapien
agaaaagaaggccaccctgagtctt

SEQ ID NO: 2991082 - DNA, 25 bp, Homo sapien
cctgagtcttccaaatggtacgata

SEQ ID NO: 2991083 - DNA, 25 bp, Homo sapien
gctggagtgcggtgggtagcgtgat

SEQ ID NO: 2991084 - DNA, 25 bp, Homo sapien
cttggcctcccaaggtgttgtgaac

SEQ ID NO: 2991085 - DNA, 25 bp, Homo sapien
agtgcggtgggtagcgtgatctctg

SEQ ID NO: 2991086 - DNA, 25 bp, Homo sapien
gccttggcctcccaaggtgttgtga

SEQ ID NO: 2991087 - DNA, 25 bp, Homo sapien
gatgtccacgaacttcttgggcagt

SEQ ID NO: 2991088 - DNA, 25 bp, Homo sapien
catggagctgggcaagaaacctgcc

SEQ ID NO: 2991089 - DNA, 25 bp, Homo sapien
gctgaaagatgtccacgaacttctt

SEQ ID NO: 2991090 - DNA, 25 bp, Homo sapien
ttcctgctgcggctctccatggagc

SEQ ID NO: 2991091 - DNA, 25 bp, Homo sapien
tcctccgttgacacacgcatggtca

SEQ ID NO: 2991092 - DNA, 25 bp, Homo sapien
tttaattcctcctccgttgacacac

SEQ ID NO: 2991093 - DNA, 25 bp, Homo sapien
ttgacacacgcatggtcaagagaat

SEQ ID NO: 2991094 - DNA, 25 bp, Homo sapien
ttaattcctcctccgttgacacacg

SEQ ID NO: 2991095 - DNA, 25 bp, Homo sapien
cggcttctgaaacgctggtaggcaa

SEQ ID NO: 2991096 - DNA, 25 bp, Homo sapien
agctcatggttccaacgggcttcca

SEQ ID NO: 2991097 - DNA, 25 bp, Homo sapien
gcaaggtgcacccacggtaaggaaa

SEQ ID NO: 2991098 - DNA, 25 bp, Homo sapien
ggaaaagttctgcagacggcttctg

SEQ ID NO: 2991099 - DNA, 25 bp, Homo sapien
gcgtcagcgagatgtgtccttaaca

SEQ ID NO: 2991100 - DNA, 25 bp, Homo sapien
tgtcccaggcttgcgacctaaactt

SEQ ID NO: 2991101 - DNA, 25 bp, Homo sapien
gctgttagctgcatgtatacttgtg

SEQ ID NO: 2991102 - DNA, 25 bp, Homo sapien
tctaggatgtgagaagcgtcagcga

SEQ ID NO: 2991103 - DNA, 25 bp, Homo sapien
agcatctccgtgcaggccattgcgg

SEQ ID NO: 2991104 - DNA, 25 bp, Homo sapien
ccagcggcatggaaagattcttcac

SEQ ID NO: 2991105 - DNA, 25 bp, Homo sapien
ccattgcggcaaatgcgtccagggt

SEQ ID NO: 2991106 - DNA, 25 bp, Homo sapien
caactgtagccacgcctggggactg

SEQ ID NO: 2991107 - DNA, 25 bp, Homo sapien
tctcggttcctaggagcacgtgctc

SEQ ID NO: 2991108 - DNA, 25 bp, Homo sapien
agtgcggtggagaaaatccgactcc

SEQ ID NO: 2991109 - DNA, 25 bp, Homo sapien
cacgtgctccacgaagagtgcggtg

SEQ ID NO: 2991110 - DNA, 25 bp, Homo sapien
gtaagaagacgtgctcggtcaccag

SEQ ID NO: 2991111 - DNA, 25 bp, Homo sapien
acatggaaaatgtaatggcctagtg

SEQ ID NO: 2991112 - DNA, 25 bp, Homo sapien
ggcctagtgatgaaatcaccttcct

SEQ ID NO: 2991113 - DNA, 25 bp, Homo sapien
atcagcagagggtaaataattaaac

SEQ ID NO: 2991114 - DNA, 25 bp, Homo sapien
aatgtaatggcctagtgatgaaatc

SEQ ID NO: 2991115 - DNA, 25 bp, Homo sapien
tctggatgtgctcacgtgaaggtca

SEQ ID NO: 2991116 - DNA, 25 bp, Homo sapien
gacagcactgttttgaagaccccaa

SEQ ID NO: 2991117 - DNA, 25 bp, Homo sapien
gggtcactccaaaggccaggtaatc

SEQ ID NO: 2991118 - DNA, 25 bp, Homo sapien
tgtgctccaaaggtcggacagccag

SEQ ID NO: 2991119 - DNA, 25 bp, Homo sapien
acaggtgttgcccatgatgtggaga

SEQ ID NO: 2991120 - DNA, 25 bp, Homo sapien
tcaggcttccagcaggaaaactaac

SEQ ID NO: 2991121 - DNA, 25 bp, Homo sapien
gaaaacaatacagtgcctctgcata

SEQ ID NO: 2991122 - DNA, 25 bp, Homo sapien
cacaatgaattatcacggtggccat

SEQ ID NO: 2991123 - DNA, 25 bp, Homo sapien
caatgataccacgttgtataaaggc

SEQ ID NO: 2991124 - DNA, 25 bp, Homo sapien
ctgtaagcatatctgaacatggagt

SEQ ID NO: 2991125 - DNA, 25 bp, Homo sapien
ccagatcactcctgtacccactgat

SEQ ID NO: 2991126 - DNA, 25 bp, Homo sapien
tctcttcatgataccttaggtccag

SEQ ID NO: 2991127 - DNA, 25 bp, Homo sapien
ttcacagagagtgcgcatcacggcc

SEQ ID NO: 2991128 - DNA, 25 bp, Homo sapien
gcatcacggcctcaaaaggcccgtg

SEQ ID NO: 2991129 - DNA, 25 bp, Homo sapien
gctgtctccttgcattcacagagag

SEQ ID NO: 2991130 - DNA, 25 bp, Homo sapien
cgtgcgtcttcacgtcagagttctc

SEQ ID NO: 2991131 - DNA, 25 bp, Homo sapien
gatggagcacggctgaatcccaaac

SEQ ID NO: 2991132 - DNA, 25 bp, Homo sapien
aggcagtgcacgtggtcgcagggca

SEQ ID NO: 2991133 - DNA, 25 bp, Homo sapien
catatcatctgctctgaggcaaacc

SEQ ID NO: 2991134 - DNA, 25 bp, Homo sapien
acagctggagagaattcgtctggca

SEQ ID NO: 2991135 - DNA, 25 bp, Homo sapien
gatatttacatgcatccctttctgg

SEQ ID NO: 2991136 - DNA, 25 bp, Homo sapien
caaaacctcagcagatgatatttac

SEQ ID NO: 2991137 - DNA, 25 bp, Homo sapien
taaattgaaagattcaagtcactcc

SEQ ID NO: 2991138 - DNA, 25 bp, Homo sapien
cacccgttagagctagtcttcaaaa

SEQ ID NO: 2991139 - DNA, 25 bp, Homo sapien
gcgccccttttggacgaagaggaga

SEQ ID NO: 2991140 - DNA, 25 bp, Homo sapien
aactgttgcacatctgccggaagcg

SEQ ID NO: 2991141 - DNA, 25 bp, Homo sapien
ccaggtctacgaagaaactgttgca

SEQ ID NO: 2991142 - DNA, 25 bp, Homo sapien
gcggagcgttgtccttgaagcaaat

SEQ ID NO: 2991143 - DNA, 25 bp, Homo sapien
aagcagtttcagtatcactgagcgg

SEQ ID NO: 2991144 - DNA, 25 bp, Homo sapien
gtttcagtatcactgagcggatgac

SEQ ID NO: 2991145 - DNA, 25 bp, Homo sapien
tatcactgagcggatgacaggagtc

SEQ ID NO: 2991146 - DNA, 25 bp, Homo sapien
gatgacaggagtcttatccacaaca

SEQ ID NO: 2991147 - DNA, 25 bp, Homo sapien
aaccttttagcataatactggagga

SEQ ID NO: 2991148 - DNA, 25 bp, Homo sapien
aaaaagagcatctatctatcggtcg

SEQ ID NO: 2991149 - DNA, 25 bp, Homo sapien
cagatctggagacataccttactaa

SEQ ID NO: 2991150 - DNA, 25 bp, Homo sapien
catacatatacgtggtttctaagat

SEQ ID NO: 2991151 - DNA, 25 bp, Homo sapien
tattcctgaatataatcttttacat

SEQ ID NO: 2991152 - DNA, 25 bp, Homo sapien
gttttatcttcagttatgaatgctt

SEQ ID NO: 2991153 - DNA, 25 bp, Homo sapien
gagcatgtacagttcagttttatct

SEQ ID NO: 2991154 - DNA, 25 bp, Homo sapien
ccaggcagttgatgaagagcatgta

SEQ ID NO: 2991155 - DNA, 25 bp, Homo sapien
taagcactggtcttctcaagtattg

SEQ ID NO: 2991156 - DNA, 25 bp, Homo sapien
ctggagtaagcactggtcttctcaa

SEQ ID NO: 2991157 - DNA, 25 bp, Homo sapien
cttcctcttctaggtggttcagttc

SEQ ID NO: 2991158 - DNA, 25 bp, Homo sapien
tctaggtggttcagttcatcatttc

SEQ ID NO: 2991159 - DNA, 25 bp, Homo sapien
ggagaatatgccttaaggaaacgac

SEQ ID NO: 2991160 - DNA, 25 bp, Homo sapien
tcggccccggcttgctggagaatat

SEQ ID NO: 2991161 - DNA, 25 bp, Homo sapien
tcaggctccgagaggaaatctgcag

SEQ ID NO: 2991162 - DNA, 25 bp, Homo sapien
ttgcaggtattcaaccgaggcctcg

SEQ ID NO: 2991163 - DNA, 25 bp, Homo sapien
ccaaaggaaagcaaggcagagaaga

SEQ ID NO: 2991164 - DNA, 25 bp, Homo sapien
caaaggaaagcaaggcagagaagac

SEQ ID NO: 2991165 - DNA, 25 bp, Homo sapien
cctgaatttctaaataacggagtct

SEQ ID NO: 2991166 - DNA, 25 bp, Homo sapien
ctgaatttctaaataacggagtctt

SEQ ID NO: 2991167 - DNA, 25 bp, Homo sapien
acaaggccaaccagagggcatcgga

SEQ ID NO: 2991168 - DNA, 25 bp, Homo sapien
tgacttagggcatttattgtaggac

SEQ ID NO: 2991169 - DNA, 25 bp, Homo sapien
ggcatcggacctacccacaggcatt

SEQ ID NO: 2991170 - DNA, 25 bp, Homo sapien
gaaaagcccagtagtagtctattcg

SEQ ID NO: 2991171 - DNA, 25 bp, Homo sapien
tgctgcttgacaacgtccttgggaa

SEQ ID NO: 2991172 - DNA, 25 bp, Homo sapien
tccttgggaaacacccactggtgcg

SEQ ID NO: 2991173 - DNA, 25 bp, Homo sapien
caggtacacccggtgccagtcgttc

SEQ ID NO: 2991174 - DNA, 25 bp, Homo sapien
tctccacccggatacagaactgctt

SEQ ID NO: 2991175 - DNA, 25 bp, Homo sapien
tgcctgccagaggtaaaaaggtcgc

SEQ ID NO: 2991176 - DNA, 25 bp, Homo sapien
taattcgctgaaagcaaaggccaca

SEQ ID NO: 2991177 - DNA, 25 bp, Homo sapien
gatcattcgaggtttaaaggcagcc

SEQ ID NO: 2991178 - DNA, 25 bp, Homo sapien
catgtcaactctaaaccccaggtgg

SEQ ID NO: 2991179 - DNA, 25 bp, Homo sapien
gcttgcactcgaggacagctttggc

SEQ ID NO: 2991180 - DNA, 25 bp, Homo sapien
tcagagcagtcttaatgcccagtgg

SEQ ID NO: 2991181 - DNA, 25 bp, Homo sapien
tattcatcgccgtacaccaggtacc

SEQ ID NO: 2991182 - DNA, 25 bp, Homo sapien
tttggccacagcatcacggagagcc

SEQ ID NO: 2991183 - DNA, 25 bp, Homo sapien
gctaggattataggatagacgcccc

SEQ ID NO: 2991184 - DNA, 25 bp, Homo sapien
cagggtctcaaaggaagtaatgggc

SEQ ID NO: 2991185 - DNA, 25 bp, Homo sapien
tgccagatctacctaagggccagag

SEQ ID NO: 2991186 - DNA, 25 bp, Homo sapien
ggcataaatcaaaaggcgctgctga

SEQ ID NO: 2991187 - DNA, 25 bp, Homo sapien
gaggcttgcattgtgggatctgtac

SEQ ID NO: 2991188 - DNA, 25 bp, Homo sapien
cacctctctaaacagtgttaacagg

SEQ ID NO: 2991189 - DNA, 25 bp, Homo sapien
taaacagtgttaacaggaagtaggc

SEQ ID NO: 2991190 - DNA, 25 bp, Homo sapien
gatctgtacaaaatagccacctctc

SEQ ID NO: 2991191 - DNA, 25 bp, Homo sapien
aatggcacagaattgtccacgagcg

SEQ ID NO: 2991192 - DNA, 25 bp, Homo sapien
catcaaggttgctgtcactaggccc

SEQ ID NO: 2991193 - DNA, 25 bp, Homo sapien
tccacgagcgatgttgcaaaacggc

SEQ ID NO: 2991194 - DNA, 25 bp, Homo sapien
tgtccacacagaaggacggctgcag

SEQ ID NO: 2991195 - DNA, 25 bp, Homo sapien
tgtaccagtggactcgctccagacc

SEQ ID NO: 2991196 - DNA, 25 bp, Homo sapien
acctccgagcttgagccagcaagtc

SEQ ID NO: 2991197 - DNA, 25 bp, Homo sapien
ccttccacctccgagcttgagccag

SEQ ID NO: 2991198 - DNA, 25 bp, Homo sapien
cagcaagtcttcaggcatggttgga

SEQ ID NO: 2991199 - DNA, 25 bp, Homo sapien
cagacgccaccggtagaatgcaggt

SEQ ID NO: 2991200 - DNA, 25 bp, Homo sapien
catagcatctggacaccctttgaag

SEQ ID NO: 2991201 - DNA, 25 bp, Homo sapien
gtttggatcatctagccggcggagt

SEQ ID NO: 2991202 - DNA, 25 bp, Homo sapien
tccagagaacagaagtgcatcacag

SEQ ID NO: 2991203 - DNA, 25 bp, Homo sapien
tggctaatgaggtttcacccaatga

SEQ ID NO: 2991204 - DNA, 25 bp, Homo sapien
tgaggtttcacccaatgacccacat

SEQ ID NO: 2991205 - DNA, 25 bp, Homo sapien
aagagaacaggacacacattggcta

SEQ ID NO: 2991206 - DNA, 25 bp, Homo sapien
gaacaggacacacattggctaatga

SEQ ID NO: 2991207 - DNA, 25 bp, Homo sapien
ctctcccacggagcaaggatggccg

SEQ ID NO: 2991208 - DNA, 25 bp, Homo sapien
tctcccacggagcaaggatggccgt

SEQ ID NO: 2991209 - DNA, 25 bp, Homo sapien
cccacggagcaaggatggccgttgg

SEQ ID NO: 2991210 - DNA, 25 bp, Homo sapien
cggagcaaggatggccgttgggaca

SEQ ID NO: 2991211 - DNA, 25 bp, Homo sapien
tgaacacctccttatcaccggcaga

SEQ ID NO: 2991212 - DNA, 25 bp, Homo sapien
tgagcaccctcagattgtcccagtg

SEQ ID NO: 2991213 - DNA, 25 bp, Homo sapien
tctggagcagtaccattttatgcac

SEQ ID NO: 2991214 - DNA, 25 bp, Homo sapien
cagtgtgtgcttgtttcgggtgggt

SEQ ID NO: 2991215 - DNA, 25 bp, Homo sapien
cgtcccgaggtttgtggtcaatgcc

SEQ ID NO: 2991216 - DNA, 25 bp, Homo sapien
catggcagtcaatgcagatgctctg

SEQ ID NO: 2991217 - DNA, 25 bp, Homo sapien
tgtggtcaatgcctccaatcggcgc

SEQ ID NO: 2991218 - DNA, 25 bp, Homo sapien
ttgaccagatgaaagccgtcccgag

SEQ ID NO: 2991219 - DNA, 25 bp, Homo sapien
gactgctgggactttggcattgcta

SEQ ID NO: 2991220 - DNA, 25 bp, Homo sapien
gcccacatgtactggagtaattagt

SEQ ID NO: 2991221 - DNA, 25 bp, Homo sapien
agtatcactttatcagctggaataa

SEQ ID NO: 2991222 - DNA, 25 bp, Homo sapien
tttgagtacttaggaaatagaatcc

SEQ ID NO: 2991223 - DNA, 25 bp, Homo sapien
cgtggccggtctgcgttctgtctgc

SEQ ID NO: 2991224 - DNA, 25 bp, Homo sapien
tccgctgcgggttgcccagcacgtg

SEQ ID NO: 2991225 - DNA, 25 bp, Homo sapien
catgtcaccacgtctctccgctgcg

SEQ ID NO: 2991226 - DNA, 25 bp, Homo sapien
gccaagtgagtgagtagccggataa

SEQ ID NO: 2991227 - DNA, 25 bp, Homo sapien
ttggatccctcactggaggcttaat

SEQ ID NO: 2991228 - DNA, 25 bp, Homo sapien
cacgccgatggtctcgtcggcactg

SEQ ID NO: 2991229 - DNA, 25 bp, Homo sapien
tggtctcgtcggcactgtgtcccag

SEQ ID NO: 2991230 - DNA, 25 bp, Homo sapien
cctcactggaggcttaatgatgttt

SEQ ID NO: 2991231 - DNA, 25 bp, Homo sapien
gaagcctgcgcaggacgaggtggac

SEQ ID NO: 2991232 - DNA, 25 bp, Homo sapien
gagaagcctgcgcaggacgaggtgg

SEQ ID NO: 2991233 - DNA, 25 bp, Homo sapien
agaagcctgcgcaggacgaggtgga

SEQ ID NO: 2991234 - DNA, 25 bp, Homo sapien
cactgaacacttgcgtgcagacgct

SEQ ID NO: 2991235 - DNA, 25 bp, Homo sapien
tgattgatcctttgacacgcacgct

SEQ ID NO: 2991236 - DNA, 25 bp, Homo sapien
gcatcgccttccctagacacggttt

SEQ ID NO: 2991237 - DNA, 25 bp, Homo sapien
gaactgaagactccccatatatgca

SEQ ID NO: 2991238 - DNA, 25 bp, Homo sapien
tgaaatcccaccagaataagaggct

SEQ ID NO: 2991239 - DNA, 25 bp, Homo sapien
tccaaatgtgtaggttacccaaggc

SEQ ID NO: 2991240 - DNA, 25 bp, Homo sapien
tgagctcaatagtaagagtggccca

SEQ ID NO: 2991241 - DNA, 25 bp, Homo sapien
ggagtgctgcgggaactgtccacct

SEQ ID NO: 2991242 - DNA, 25 bp, Homo sapien
tcctcatttctttagttgacaattc

SEQ ID NO: 2991243 - DNA, 25 bp, Homo sapien
agctgcgatttccttttcccagttg

SEQ ID NO: 2991244 - DNA, 25 bp, Homo sapien
ccagttcaggagaaatcacagctgc

SEQ ID NO: 2991245 - DNA, 25 bp, Homo sapien
caattctgtgtcaaaatttaaaagc

SEQ ID NO: 2991246 - DNA, 25 bp, Homo sapien
cagggttagagctgatacgcttatc

SEQ ID NO: 2991247 - DNA, 25 bp, Homo sapien
gagcaatggaccacacttttccggg

SEQ ID NO: 2991248 - DNA, 25 bp, Homo sapien
gcaggaaggtcactgggtcaccata

SEQ ID NO: 2991249 - DNA, 25 bp, Homo sapien
gatacgcttatcttggctgatgaga

SEQ ID NO: 2991250 - DNA, 25 bp, Homo sapien
ctgcgagacttgtatttgtagctta

SEQ ID NO: 2991251 - DNA, 25 bp, Homo sapien
gtagcttaatctggtcagtgtcatt

SEQ ID NO: 2991252 - DNA, 25 bp, Homo sapien
tggggttacagactttgagactggc

SEQ ID NO: 2991253 - DNA, 25 bp, Homo sapien
ttaatctggtcagtgtcatttcctg

SEQ ID NO: 2991254 - DNA, 25 bp, Homo sapien
tgctggacgttctggaactgcttca

SEQ ID NO: 2991255 - DNA, 25 bp, Homo sapien
gatggagctgtattcaacttgctgg

SEQ ID NO: 2991256 - DNA, 25 bp, Homo sapien
ctttgcaaggccaaaatctcaggca

SEQ ID NO: 2991257 - DNA, 25 bp, Homo sapien
aactgcttcactagatccctttgca

SEQ ID NO: 2991258 - DNA, 25 bp, Homo sapien
cgtctcaagcgatctcctcagtttg

SEQ ID NO: 2991259 - DNA, 25 bp, Homo sapien
tcaagcgatctcctcagtttgttcc

SEQ ID NO: 2991260 - DNA, 25 bp, Homo sapien
gaaagactgtgatcctgttgtgaag

SEQ ID NO: 2991261 - DNA, 25 bp, Homo sapien
cgttcgtctcaagcgatctcctcag

SEQ ID NO: 2991262 - DNA, 25 bp, Homo sapien
tagctgacgagagcggtagcacaga

SEQ ID NO: 2991263 - DNA, 25 bp, Homo sapien
gacaatttcattgtgtaggcgaatc

SEQ ID NO: 2991264 - DNA, 25 bp, Homo sapien
ggagagtttttccacggcgtagaca

SEQ ID NO: 2991265 - DNA, 25 bp, Homo sapien
cgtcggcgtggcaagaggatctcaa

SEQ ID NO: 2991266 - DNA, 25 bp, Homo sapien
gttcagtgacctcggcggcatccac

SEQ ID NO: 2991267 - DNA, 25 bp, Homo sapien
ggtcccgctccacttcataactgat

SEQ ID NO: 2991268 - DNA, 25 bp, Homo sapien
tccagatcgaactcctgcacggtct

SEQ ID NO: 2991269 - DNA, 25 bp, Homo sapien
acgatctgccgctgaatcttctcca

SEQ ID NO: 2991270 - DNA, 25 bp, Homo sapien
caccagttaggagtggctagcagtc

SEQ ID NO: 2991271 - DNA, 25 bp, Homo sapien
gctagcagtccaacgtacaggatgc

SEQ ID NO: 2991272 - DNA, 25 bp, Homo sapien
gctttatcccatatgccatgagagg

SEQ ID NO: 2991273 - DNA, 25 bp, Homo sapien
gacaacagagtgtcggctttatccc

SEQ ID NO: 2991274 - DNA, 25 bp, Homo sapien
tgcagctggaaggaacaagtgcgtc

SEQ ID NO: 2991275 - DNA, 25 bp, Homo sapien
gcccagttgcgggtggtaccgtaca

SEQ ID NO: 2991276 - DNA, 25 bp, Homo sapien
gcttcagtgcatgaggtcacgggat

SEQ ID NO: 2991277 - DNA, 25 bp, Homo sapien
caagtgcgtccagtcaaagaacaga

SEQ ID NO: 2991278 - DNA, 25 bp, Homo sapien
aattaaatccatcgtggacatttcc

SEQ ID NO: 2991279 - DNA, 25 bp, Homo sapien
ttaaaattaaatccatcgtggacat

SEQ ID NO: 2991280 - DNA, 25 bp, Homo sapien
aaatccatcgtggacatttccagca

SEQ ID NO: 2991281 - DNA, 25 bp, Homo sapien
ccatcgtggacatttccagcagatg

SEQ ID NO: 2991282 - DNA, 25 bp, Homo sapien
tccagtcgtgtctgtacaccagagt

SEQ ID NO: 2991283 - DNA, 25 bp, Homo sapien
tagttccagtcgtgtctgtacacca

SEQ ID NO: 2991284 - DNA, 25 bp, Homo sapien
tgttcatagttccagtcgtgtctgt

SEQ ID NO: 2991285 - DNA, 25 bp, Homo sapien
tcatagttccagtcgtgtctgtaca

SEQ ID NO: 2991286 - DNA, 25 bp, Homo sapien
gaaagccccgtgcacaggatcaggt

SEQ ID NO: 2991287 - DNA, 25 bp, Homo sapien
aaagccccgtgcacaggatcaggtt

SEQ ID NO: 2991288 - DNA, 25 bp, Homo sapien
agaaagccccgtgcacaggatcagg

SEQ ID NO: 2991289 - DNA, 25 bp, Homo sapien
tatcagtacccgcatgcggagagca

SEQ ID NO: 2991290 - DNA, 25 bp, Homo sapien
caaggctggagtaggcctaacacgg

SEQ ID NO: 2991291 - DNA, 25 bp, Homo sapien
cttgctctctgtaagggaggccgca

SEQ ID NO: 2991292 - DNA, 25 bp, Homo sapien
tggacttcccgcttcagcaggcatg

SEQ ID NO: 2991293 - DNA, 25 bp, Homo sapien
gaatcgtctgatcacccatttgcag

SEQ ID NO: 2991294 - DNA, 25 bp, Homo sapien
tcacaggcatcgctgtaggactgca

SEQ ID NO: 2991295 - DNA, 25 bp, Homo sapien
tgatggcactaatgaccgagctggg

SEQ ID NO: 2991296 - DNA, 25 bp, Homo sapien
cagagtgacttctacgacagacagc

SEQ ID NO: 2991297 - DNA, 25 bp, Homo sapien
tgccagagggcaatggtgtgtttta

SEQ ID NO: 2991298 - DNA, 25 bp, Homo sapien
gttttaactggcatctgtttaaggc

SEQ ID NO: 2991299 - DNA, 25 bp, Homo sapien
agctgttcagacttatgagcagaca

SEQ ID NO: 2991300 - DNA, 25 bp, Homo sapien
agcagctgttcagacttatgagcag

SEQ ID NO: 2991301 - DNA, 25 bp, Homo sapien
agatccgctttgtaccttgaactga

SEQ ID NO: 2991302 - DNA, 25 bp, Homo sapien
gagcttagcattttccgggctcaga

SEQ ID NO: 2991303 - DNA, 25 bp, Homo sapien
gattatcatttcgtgcagctctagc

SEQ ID NO: 2991304 - DNA, 25 bp, Homo sapien
cagctctagcaggaaggcgtctagg

SEQ ID NO: 2991305 - DNA, 25 bp, Homo sapien
tgggattctgtggtaagaaaagaac

SEQ ID NO: 2991306 - DNA, 25 bp, Homo sapien
tgtctatagaagatcacaggagaga

SEQ ID NO: 2991307 - DNA, 25 bp, Homo sapien
acagcacaacattgtgtctgccccg

SEQ ID NO: 2991308 - DNA, 25 bp, Homo sapien
cctcaggtgccctggtaatgacaaa

SEQ ID NO: 2991309 - DNA, 25 bp, Homo sapien
tggcgagcagtatctcttctgggaa

SEQ ID NO: 2991310 - DNA, 25 bp, Homo sapien
gacacagctggcgagcagtatctct

SEQ ID NO: 2991311 - DNA, 25 bp, Homo sapien
cagctggcgagcagtatctcttctg

SEQ ID NO: 2991312 - DNA, 25 bp, Homo sapien
gcgagcagtatctcttctgggaact

SEQ ID NO: 2991313 - DNA, 25 bp, Homo sapien
tcatttctcgattccatttcagcac

SEQ ID NO: 2991314 - DNA, 25 bp, Homo sapien
tctcatttctcgattccatttcagc

SEQ ID NO: 2991315 - DNA, 25 bp, Homo sapien
tctcgattccatttcagcacagcag

SEQ ID NO: 2991316 - DNA, 25 bp, Homo sapien
tcgattccatttcagcacagcagct

SEQ ID NO: 2991317 - DNA, 25 bp, Homo sapien
tgaatgcaaaggcaccagtccatga

SEQ ID NO: 2991318 - DNA, 25 bp, Homo sapien
catggttcagaaacagctcggcttt

SEQ ID NO: 2991319 - DNA, 25 bp, Homo sapien
tagcacgccttggtcttgaattcgg

SEQ ID NO: 2991320 - DNA, 25 bp, Homo sapien
tgaattcggtgctacgctgacagct

SEQ ID NO: 2991321 - DNA, 25 bp, Homo sapien
tttcacatcatcgtgggaacccaga

SEQ ID NO: 2991322 - DNA, 25 bp, Homo sapien
ttttggctcttaccctctgaagtgg

SEQ ID NO: 2991323 - DNA, 25 bp, Homo sapien
gaacgggcacaggtcattactgcgt

SEQ ID NO: 2991324 - DNA, 25 bp, Homo sapien
attttatgcgtgagaaaaccaaggc

SEQ ID NO: 2991325 - DNA, 25 bp, Homo sapien
tttggcataatgctagaaaaaagtc

SEQ ID NO: 2991326 - DNA, 25 bp, Homo sapien
tgctagaaaaaagtccgcaaagaac

SEQ ID NO: 2991327 - DNA, 25 bp, Homo sapien
gaaccaggcctgtgaccaagtttac

SEQ ID NO: 2991328 - DNA, 25 bp, Homo sapien
agtccgcaaagaactgccagaacca

SEQ ID NO: 2991329 - DNA, 25 bp, Homo sapien
cagtcggaatgcagatctcggtggc

SEQ ID NO: 2991330 - DNA, 25 bp, Homo sapien
catgacagtgaggagaacggagcac

SEQ ID NO: 2991331 - DNA, 25 bp, Homo sapien
aaaagcagcacaagatccgggctcg

SEQ ID NO: 2991332 - DNA, 25 bp, Homo sapien
cacagatgactaaatgccagggact

SEQ ID NO: 2991333 - DNA, 25 bp, Homo sapien
caaagtgagtcttccggtgcaggcc

SEQ ID NO: 2991334 - DNA, 25 bp, Homo sapien
tgtgccataaatagaagctctgccc

SEQ ID NO: 2991335 - DNA, 25 bp, Homo sapien
tgtaagcgtttcagtcccagatcgg

SEQ ID NO: 2991336 - DNA, 25 bp, Homo sapien
tgtccagaggaaaagtccaccgtct

SEQ ID NO: 2991337 - DNA, 25 bp, Homo sapien
ttctgttgcgcttcagggcacaggt

SEQ ID NO: 2991338 - DNA, 25 bp, Homo sapien
caaagatcgtgggttctgaggaagt

SEQ ID NO: 2991339 - DNA, 25 bp, Homo sapien
gggcaaagatcgtgggttctgagga

SEQ ID NO: 2991340 - DNA, 25 bp, Homo sapien
aggttctgttgcgcttcagggcaca

SEQ ID NO: 2991341 - DNA, 25 bp, Homo sapien
tctgaggccacaagatcagaaatta

SEQ ID NO: 2991342 - DNA, 25 bp, Homo sapien
gaggccacaagatcagaaattacta

SEQ ID NO: 2991343 - DNA, 25 bp, Homo sapien
ggaggaaccatagatcatcctttcc

SEQ ID NO: 2991344 - DNA, 25 bp, Homo sapien
gaggaaccatagatcatcctttcct

SEQ ID NO: 2991345 - DNA, 25 bp, Homo sapien
ggcgggctgattctgaaaagagtca

SEQ ID NO: 2991346 - DNA, 25 bp, Homo sapien
aggcgggctgattctgaaaagagtc

SEQ ID NO: 2991347 - DNA, 25 bp, Homo sapien
cgggctgattctgaaaagagtcagc

SEQ ID NO: 2991348 - DNA, 25 bp, Homo sapien
ggctgattctgaaaagagtcagcaa

SEQ ID NO: 2991349 - DNA, 25 bp, Homo sapien
cttttgagggcaggtgtcgtgtatt

SEQ ID NO: 2991350 - DNA, 25 bp, Homo sapien
aattcttcacagtttagcgggctgg

SEQ ID NO: 2991351 - DNA, 25 bp, Homo sapien
catctgggtcggaccttgctgggca

SEQ ID NO: 2991352 - DNA, 25 bp, Homo sapien
tgcagacttggacggggtttcatct

SEQ ID NO: 2991353 - DNA, 25 bp, Homo sapien
atggagacgcttgcgctttcccggg

SEQ ID NO: 2991354 - DNA, 25 bp, Homo sapien
acgtcacttccggaagcgactcgct

SEQ ID NO: 2991355 - DNA, 25 bp, Homo sapien
ggaagcgactcgctctgacgccgtc

SEQ ID NO: 2991356 - DNA, 25 bp, Homo sapien
gccgtccgccctcgttgccatggag

SEQ ID NO: 2991357 - DNA, 25 bp, Homo sapien
ttccacagtgacagcgtttcctccg

SEQ ID NO: 2991358 - DNA, 25 bp, Homo sapien
cgtttccacagtgacagcgtttcct

SEQ ID NO: 2991359 - DNA, 25 bp, Homo sapien
agtgacagcgtttcctccggcggcc

SEQ ID NO: 2991360 - DNA, 25 bp, Homo sapien
acagtgacagcgtttcctccggcgg

SEQ ID NO: 2991361 - DNA, 25 bp, Homo sapien
acaaactggccggaagcgagaaccg

SEQ ID NO: 2991362 - DNA, 25 bp, Homo sapien
aagactatgagctcggagggtccgc

SEQ ID NO: 2991363 - DNA, 25 bp, Homo sapien
acagtccctaggagcccaggcggcg

SEQ ID NO: 2991364 - DNA, 25 bp, Homo sapien
gcaagcgcaggccagacaaactggc

SEQ ID NO: 2991365 - DNA, 25 bp, Homo sapien
ctcccgcttcaagggaaagcaaggg

SEQ ID NO: 2991366 - DNA, 25 bp, Homo sapien
gctgcagcggacagagcgcctctgc

SEQ ID NO: 2991367 - DNA, 25 bp, Homo sapien
gtcttctcccgcttcaagggaaagc

SEQ ID NO: 2991368 - DNA, 25 bp, Homo sapien
acagagcgcctctgccgggtcttct

SEQ ID NO: 2991369 - DNA, 25 bp, Homo sapien
aggaggacagaagcgtcaaacttgg

SEQ ID NO: 2991370 - DNA, 25 bp, Homo sapien
gacagaagcgtcaaacttggtcggg

SEQ ID NO: 2991371 - DNA, 25 bp, Homo sapien
gcgtcaaacttggtcggggtcacac

SEQ ID NO: 2991372 - DNA, 25 bp, Homo sapien
gaggacagaagcgtcaaacttggtc

SEQ ID NO: 2991373 - DNA, 25 bp, Homo sapien
gggtctcgctgccacgcctcggtgt

SEQ ID NO: 2991374 - DNA, 25 bp, Homo sapien
ccagggaagcacaagcgcggacact

SEQ ID NO: 2991375 - DNA, 25 bp, Homo sapien
tttcacgaaggacacgtcaacgccc

SEQ ID NO: 2991376 - DNA, 25 bp, Homo sapien
ctcggtgtcccggtctacgacgtgg

SEQ ID NO: 2991377 - DNA, 25 bp, Homo sapien
catcctacaaaacgagaagccgggt

SEQ ID NO: 2991378 - DNA, 25 bp, Homo sapien
cagactattaatgacatcctacaaa

SEQ ID NO: 2991379 - DNA, 25 bp, Homo sapien
cgagaagccgggttctacgcttgca

SEQ ID NO: 2991380 - DNA, 25 bp, Homo sapien
aagccgggttctacgcttgcactgc

SEQ ID NO: 2991381 - DNA, 25 bp, Homo sapien
catgagctgattcttaatagtcaca

SEQ ID NO: 2991382 - DNA, 25 bp, Homo sapien
gattccagcgacatttaagaggcag

SEQ ID NO: 2991383 - DNA, 25 bp, Homo sapien
gaggcagaataaaagcgagctagtg

SEQ ID NO: 2991384 - DNA, 25 bp, Homo sapien
ccaagataacaatcagacttgaaga

SEQ ID NO: 2991385 - DNA, 25 bp, Homo sapien
gagaagggcacttcaatgttctaag

SEQ ID NO: 2991386 - DNA, 25 bp, Homo sapien
catgagaagggcacttcaatgttct

SEQ ID NO: 2991387 - DNA, 25 bp, Homo sapien
tcatgagaagggcacttcaatgttc

SEQ ID NO: 2991388 - DNA, 25 bp, Homo sapien
ggtcatgagaagggcacttcaatgt

SEQ ID NO: 2991389 - DNA, 25 bp, Homo sapien
gaacacggttaagaagctggccctg

SEQ ID NO: 2991390 - DNA, 25 bp, Homo sapien
taaattcctgctgtgggtaggccac

SEQ ID NO: 2991391 - DNA, 25 bp, Homo sapien
agttccatcccagcaagacaagagg

SEQ ID NO: 2991392 - DNA, 25 bp, Homo sapien
tacggtctaaatgctggtgtcctcc

SEQ ID NO: 2991393 - DNA, 25 bp, Homo sapien
tcttgagaacctacagtcagtggga

SEQ ID NO: 2991394 - DNA, 25 bp, Homo sapien
tgtgcattcaaaagaggcccaggat

SEQ ID NO: 2991395 - DNA, 25 bp, Homo sapien
tgtgagcatgagtagtcaggaccct

SEQ ID NO: 2991396 - DNA, 25 bp, Homo sapien
tatgctagcctacacaatggccagg

SEQ ID NO: 2991397 - DNA, 25 bp, Homo sapien
atggaatgggctccgccagaggcct

SEQ ID NO: 2991398 - DNA, 25 bp, Homo sapien
gattcttatgctatactctgggaga

SEQ ID NO: 2991399 - DNA, 25 bp, Homo sapien
ggacagtgttcttcacggtgggaaa

SEQ ID NO: 2991400 - DNA, 25 bp, Homo sapien
cgggctccgccatcgtttgtcaggg

SEQ ID NO: 2991401 - DNA, 25 bp, Homo sapien
tagccattgctcagcgtccagcaca

SEQ ID NO: 2991402 - DNA, 25 bp, Homo sapien
cagacaagtaggagtcagctccctg

SEQ ID NO: 2991403 - DNA, 25 bp, Homo sapien
gctccctgcggagcagaacacacta

SEQ ID NO: 2991404 - DNA, 25 bp, Homo sapien
gatcgatgggagtcacagacaagta

SEQ ID NO: 2991405 - DNA, 25 bp, Homo sapien
cagtgaagaagctggacgtcatcgc

SEQ ID NO: 2991406 - DNA, 25 bp, Homo sapien
tggacgtcatcgcagcctcttggga

SEQ ID NO: 2991407 - DNA, 25 bp, Homo sapien
gaagatccgttctgttttgctacct

SEQ ID NO: 2991408 - DNA, 25 bp, Homo sapien
cctcttgggacagtgtggtcaagga

SEQ ID NO: 2991409 - DNA, 25 bp, Homo sapien
cagaatttgggttcacagagaagcc

SEQ ID NO: 2991410 - DNA, 25 bp, Homo sapien
gaatgtcattctcaggacaggcctg

SEQ ID NO: 2991411 - DNA, 25 bp, Homo sapien
cagtcgctgggatgtacggtacaca

SEQ ID NO: 2991412 - DNA, 25 bp, Homo sapien
catgtgcgcgagagagaatattcca

SEQ ID NO: 2991413 - DNA, 25 bp, Homo sapien
tgatgtgtatagtaggagcccctgg

SEQ ID NO: 2991414 - DNA, 25 bp, Homo sapien
gattccccgggatctagttcatagg

SEQ ID NO: 2991415 - DNA, 25 bp, Homo sapien
tagactgtagaaggattccctggaa

SEQ ID NO: 2991416 - DNA, 25 bp, Homo sapien
ccctggaatctagtccataggagga

SEQ ID NO: 2991417 - DNA, 25 bp, Homo sapien
aaggccaggaagcccgacacgtagg

SEQ ID NO: 2991418 - DNA, 25 bp, Homo sapien
cagctccagcaagaagggcacctct

SEQ ID NO: 2991419 - DNA, 25 bp, Homo sapien
cagcaagaagggcacctctcggaag

SEQ ID NO: 2991420 - DNA, 25 bp, Homo sapien
aggctgaccatgcggctctcctcat

SEQ ID NO: 2991421 - DNA, 25 bp, Homo sapien
gtggagtaccccgtttccatccaca

SEQ ID NO: 2991422 - DNA, 25 bp, Homo sapien
tggagtaccccgtttccatccacaa

SEQ ID NO: 2991423 - DNA, 25 bp, Homo sapien
tggtggagtaccccgtttccatcca

SEQ ID NO: 2991424 - DNA, 25 bp, Homo sapien
ctcgctggcgtgctgggatactgca

SEQ ID NO: 2991425 - DNA, 25 bp, Homo sapien
tgcccgatgtcctgggtgcaaggcc

SEQ ID NO: 2991426 - DNA, 25 bp, Homo sapien
caaaagcttccctaagtgagcagag

SEQ ID NO: 2991427 - DNA, 25 bp, Homo sapien
gaaaccagatctaagtcccaagcag

SEQ ID NO: 2991428 - DNA, 25 bp, Homo sapien
tgcagaagtttcttggccaccccaa

SEQ ID NO: 2991429 - DNA, 25 bp, Homo sapien
cccaacacacggcaggtctgtaagg

SEQ ID NO: 2991430 - DNA, 25 bp, Homo sapien
taaggacgccaaggtggcaggccac

SEQ ID NO: 2991431 - DNA, 25 bp, Homo sapien
tctccttgtgcagggcgttgttctc

SEQ ID NO: 2991432 - DNA, 25 bp, Homo sapien
gtgtctcactcccagtgccaacatg

SEQ ID NO: 2991433 - DNA, 25 bp, Homo sapien
cattgtgagtgtctcactcccagtg

SEQ ID NO: 2991434 - DNA, 25 bp, Homo sapien
tctgccatccagtgaaacagctggg

SEQ ID NO: 2991435 - DNA, 25 bp, Homo sapien
aatctgccatccagtgaaacagctg

SEQ ID NO: 2991436 - DNA, 25 bp, Homo sapien
tctcccagcagagggaatgagtctc

SEQ ID NO: 2991437 - DNA, 25 bp, Homo sapien
agagtctcccagcagagggaatgag

SEQ ID NO: 2991438 - DNA, 25 bp, Homo sapien
gagggaatgagtctcctcgagtctg

SEQ ID NO: 2991439 - DNA, 25 bp, Homo sapien
gggaatgagtctcctcgagtctgca

SEQ ID NO: 2991440 - DNA, 25 bp, Homo sapien
acaaggaaggcgagggctgtcctgt

SEQ ID NO: 2991441 - DNA, 25 bp, Homo sapien
tgtgacaaggaaggcgagggctgtc

SEQ ID NO: 2991442 - DNA, 25 bp, Homo sapien
tgacaaggaaggcgagggctgtcct

SEQ ID NO: 2991443 - DNA, 25 bp, Homo sapien
ctgtgacaaggaaggcgagggctgt

SEQ ID NO: 2991444 - DNA, 25 bp, Homo sapien
ctgtggcccacggagatgtagaggg

SEQ ID NO: 2991445 - DNA, 25 bp, Homo sapien
agcagcaagtcaggcgcacagcggc

SEQ ID NO: 2991446 - DNA, 25 bp, Homo sapien
ctctgggatccggaacctgcagcag

SEQ ID NO: 2991447 - DNA, 25 bp, Homo sapien
tggtgctgcggtcgtggctcctcag

SEQ ID NO: 2991448 - DNA, 25 bp, Homo sapien
ctggaggccacactgcgcgccagca

SEQ ID NO: 2991449 - DNA, 25 bp, Homo sapien
ggttttccaccggtgctgcggctgc

SEQ ID NO: 2991450 - DNA, 25 bp, Homo sapien
ctgtggagcccgctctcagacgcca

SEQ ID NO: 2991451 - DNA, 25 bp, Homo sapien
cagggcgagggccattgtggtatgt

SEQ ID NO: 2991452 - DNA, 25 bp, Homo sapien
tcccctcccttgcaaggatgggcca

SEQ ID NO: 2991453 - DNA, 25 bp, Homo sapien
gacctaaagttcctgtggctgaagg

SEQ ID NO: 2991454 - DNA, 25 bp, Homo sapien
caaggatgggccactgtcctactct

SEQ ID NO: 2991455 - DNA, 25 bp, Homo sapien
agcagcagcacgacctaaagttcct

SEQ ID NO: 2991456 - DNA, 25 bp, Homo sapien
aggaccttctggaacagagcaggag

SEQ ID NO: 2991457 - DNA, 25 bp, Homo sapien
aggagagcctggacctggcaaccag

SEQ ID NO: 2991458 - DNA, 25 bp, Homo sapien
gggagagagcagaccaacactaacc

SEQ ID NO: 2991459 - DNA, 25 bp, Homo sapien
gcccggcgcggagccagggagagag

SEQ ID NO: 2991460 - DNA, 25 bp, Homo sapien
tgcggatgtgctctcgggagcagat

SEQ ID NO: 2991461 - DNA, 25 bp, Homo sapien
ttgcggatgtgctctcgggagcaga

SEQ ID NO: 2991462 - DNA, 25 bp, Homo sapien
gaggactctccggagtctcctttgg

SEQ ID NO: 2991463 - DNA, 25 bp, Homo sapien
aggactctccggagtctcctttggg

SEQ ID NO: 2991464 - DNA, 25 bp, Homo sapien
ctgccagtccttgcccgcctgctcc

SEQ ID NO: 2991465 - DNA, 25 bp, Homo sapien
gccagtccttgcccgcctgctcctg

SEQ ID NO: 2991466 - DNA, 25 bp, Homo sapien
tgccagtccttgcccgcctgctcct

SEQ ID NO: 2991467 - DNA, 25 bp, Homo sapien
gatgaggttcccctaagtccctaga

SEQ ID NO: 2991468 - DNA, 25 bp, Homo sapien
tggtcagtgtcctgaggccagaacg

SEQ ID NO: 2991469 - DNA, 25 bp, Homo sapien
gtggccggtggccttcttgtcttca

SEQ ID NO: 2991470 - DNA, 25 bp, Homo sapien
tgtcttcatggtgcccagttccacc

SEQ ID NO: 2991471 - DNA, 25 bp, Homo sapien
tgaccagccgatgacggagcaaaga

SEQ ID NO: 2991472 - DNA, 25 bp, Homo sapien
aagcaagttccatctattgaaaggg

SEQ ID NO: 2991473 - DNA, 25 bp, Homo sapien
gaaagcgtctcatgcgctctcagga

SEQ ID NO: 2991474 - DNA, 25 bp, Homo sapien
acttgcccccatagagatctgtcct

SEQ ID NO: 2991475 - DNA, 25 bp, Homo sapien
gagacgaggacgtgtgctctcacca

SEQ ID NO: 2991476 - DNA, 25 bp, Homo sapien
tcaccaccgcgttcgatcaggaacg

SEQ ID NO: 2991477 - DNA, 25 bp, Homo sapien
ttcgatcaggaacgagacgaggacg

SEQ ID NO: 2991478 - DNA, 25 bp, Homo sapien
agacgaggacgtgtgctctcaccac

SEQ ID NO: 2991479 - DNA, 25 bp, Homo sapien
gaacgacggtatgccaacagatgag

SEQ ID NO: 2991480 - DNA, 25 bp, Homo sapien
tggtgaaagactgcaaacgttccct

SEQ ID NO: 2991481 - DNA, 25 bp, Homo sapien
tgaaggcagggacgttctcagagac

SEQ ID NO: 2991482 - DNA, 25 bp, Homo sapien
gaagggaccgtcttcagctggatga

SEQ ID NO: 2991483 - DNA, 25 bp, Homo sapien
tcatgtgcacgaaaagccaaggacc

SEQ ID NO: 2991484 - DNA, 25 bp, Homo sapien
cacttaggtttgctgctgacacgcc

SEQ ID NO: 2991485 - DNA, 25 bp, Homo sapien
tactgagaatcctagacccaggtcc

SEQ ID NO: 2991486 - DNA, 25 bp, Homo sapien
tagagagctcctgtttgactgcccg

SEQ ID NO: 2991487 - DNA, 25 bp, Homo sapien
tcactggttctcacaagggtgggac

SEQ ID NO: 2991488 - DNA, 25 bp, Homo sapien
ggtgggacacatcgcaggtgaccca

SEQ ID NO: 2991489 - DNA, 25 bp, Homo sapien
cactggttctcacaagggtgggaca

SEQ ID NO: 2991490 - DNA, 25 bp, Homo sapien
acatcgcaggtgacccaagggcctt

SEQ ID NO: 2991491 - DNA, 25 bp, Homo sapien
catctgtgtgcggaggacgccttca

SEQ ID NO: 2991492 - DNA, 25 bp, Homo sapien
aggcatctgtgtgcggaggacgcct

SEQ ID NO: 2991493 - DNA, 25 bp, Homo sapien
tgtgtgcggaggacgccttcatcct

SEQ ID NO: 2991494 - DNA, 25 bp, Homo sapien
gacgccttcatcctgccaaggcaca

SEQ ID NO: 2991495 - DNA, 25 bp, Homo sapien
gatgctgtctctactatatatgtgt

SEQ ID NO: 2991496 - DNA, 25 bp, Homo sapien
gcctgagcaacatctcaagatgctg

SEQ ID NO: 2991497 - DNA, 25 bp, Homo sapien
cgtgaggaatgctatccctgctgaa

SEQ ID NO: 2991498 - DNA, 25 bp, Homo sapien
cacagggactcagtcccgtgaggaa

SEQ ID NO: 2991499 - DNA, 25 bp, Homo sapien
ccaatacaagatattaggaggctca

SEQ ID NO: 2991500 - DNA, 25 bp, Homo sapien
gaggctcatagaaccttccggagag

SEQ ID NO: 2991501 - DNA, 25 bp, Homo sapien
agatctctggcatgtgacgcgccca

SEQ ID NO: 2991502 - DNA, 25 bp, Homo sapien
ggccagcttaatggaacccaataca

SEQ ID NO: 2991503 - DNA, 25 bp, Homo sapien
ggctatgaacacatctccctcctga

SEQ ID NO: 2991504 - DNA, 25 bp, Homo sapien
ttctgtgacccgagcccaggtgtgt

SEQ ID NO: 2991505 - DNA, 25 bp, Homo sapien
aggtgtgtcccgaacccaggtgcct

SEQ ID NO: 2991506 - DNA, 25 bp, Homo sapien
caggtgcctcgagtgccggctatga

SEQ ID NO: 2991507 - DNA, 25 bp, Homo sapien
ctgtgacgtgccctgccggcgggca

SEQ ID NO: 2991508 - DNA, 25 bp, Homo sapien
ctgccggcgggcagaggcatccggt

SEQ ID NO: 2991509 - DNA, 25 bp, Homo sapien
gtgacgtgccctgccggcgggcaga

SEQ ID NO: 2991510 - DNA, 25 bp, Homo sapien
ggcgggcagaggcatccggtctgct

SEQ ID NO: 2991511 - DNA, 25 bp, Homo sapien
taggcttccggcgtgggttgtgtgg

SEQ ID NO: 2991512 - DNA, 25 bp, Homo sapien
acagcaacgcagacaggagcgcggc

SEQ ID NO: 2991513 - DNA, 25 bp, Homo sapien
agctccacgcgtttctgggcgccgg

SEQ ID NO: 2991514 - DNA, 25 bp, Homo sapien
cgagagttaggcttcgcgggcttcc

SEQ ID NO: 2991515 - DNA, 25 bp, Homo sapien
cagtcaggtttctgggtgaatccaa

SEQ ID NO: 2991516 - DNA, 25 bp, Homo sapien
cgcgcgggacctgaggaaaagctac

SEQ ID NO: 2991517 - DNA, 25 bp, Homo sapien
cattcttccttcgttgggccggctc

SEQ ID NO: 2991518 - DNA, 25 bp, Homo sapien
tcagggagtttccagctagtggcct

SEQ ID NO: 2991519 - DNA, 25 bp, Homo sapien
accaaagaacatctgaggatccatg

SEQ ID NO: 2991520 - DNA, 25 bp, Homo sapien
tggtcttggagcagaaccaacggtc

SEQ ID NO: 2991521 - DNA, 25 bp, Homo sapien
caggaataaacgcaccagcgtgtca

SEQ ID NO: 2991522 - DNA, 25 bp, Homo sapien
atgtgggaaccacactgccccagga

SEQ ID NO: 2991523 - DNA, 25 bp, Homo sapien
cagaagaggagaggtctccggaggc

SEQ ID NO: 2991524 - DNA, 25 bp, Homo sapien
gggtatgagtctgcgtgctcgtgtg

SEQ ID NO: 2991525 - DNA, 25 bp, Homo sapien
tgtggggggcgggtatgagtctgcg

SEQ ID NO: 2991526 - DNA, 25 bp, Homo sapien
agagtccgtgaaggcgagttgtggg

SEQ ID NO: 2991527 - DNA, 25 bp, Homo sapien
aaccttgggttacatgtggttcaca

SEQ ID NO: 2991528 - DNA, 25 bp, Homo sapien
tctgtacacagtggactgaagtgca

SEQ ID NO: 2991529 - DNA, 25 bp, Homo sapien
aaccaaatgtggcttgacgaagtcg

SEQ ID NO: 2991530 - DNA, 25 bp, Homo sapien
gacgaagtcgtggtttcatctctta

SEQ ID NO: 2991531 - DNA, 25 bp, Homo sapien
gggccacctgttctcaaaagcatgt

SEQ ID NO: 2991532 - DNA, 25 bp, Homo sapien
catgaggttcagtcattccagtgag

SEQ ID NO: 2991533 - DNA, 25 bp, Homo sapien
tccaccaaaacgtagaactgaaagc

SEQ ID NO: 2991534 - DNA, 25 bp, Homo sapien
tttctaagactgcaaagatcacttt

SEQ ID NO: 2991535 - DNA, 25 bp, Homo sapien
tggcgtgttccttgctccctgggtc

SEQ ID NO: 2991536 - DNA, 25 bp, Homo sapien
tgtgttcccgcacctgcatggactg

SEQ ID NO: 2991537 - DNA, 25 bp, Homo sapien
ttctgtgttgtgtgccgagtgccgc

SEQ ID NO: 2991538 - DNA, 25 bp, Homo sapien
agtgttctgtgaccacccgtgtagc

SEQ ID NO: 2991539 - DNA, 25 bp, Homo sapien
tggcccggaagtctgttacgggcga

SEQ ID NO: 2991540 - DNA, 25 bp, Homo sapien
cggccggcctgtgtcggcaccacca

SEQ ID NO: 2991541 - DNA, 25 bp, Homo sapien
cccggaagtctgttacgggcgacat

SEQ ID NO: 2991542 - DNA, 25 bp, Homo sapien
ccggccggcctgtgtcggcaccacc

SEQ ID NO: 2991543 - DNA, 25 bp, Homo sapien
aggggcccccggctttcgtgccatg

SEQ ID NO: 2991544 - DNA, 25 bp, Homo sapien
gccatggttttgatagttagacgtt

SEQ ID NO: 2991545 - DNA, 25 bp, Homo sapien
cgtttactcttcatgccagcggctt

SEQ ID NO: 2991546 - DNA, 25 bp, Homo sapien
attccacggcctccaaattttgcag

SEQ ID NO: 2991547 - DNA, 25 bp, Homo sapien
tccgctgggttaaaggcctctgtga

SEQ ID NO: 2991548 - DNA, 25 bp, Homo sapien
gccttccagggagcttcggagaacc

SEQ ID NO: 2991549 - DNA, 25 bp, Homo sapien
acagcagacggcatctctcagagca

SEQ ID NO: 2991550 - DNA, 25 bp, Homo sapien
aaaaagcatgtacctgccaagctgg

SEQ ID NO: 2991551 - DNA, 25 bp, Homo sapien
gacgctcagaataagccatctccag

SEQ ID NO: 2991552 - DNA, 25 bp, Homo sapien
aatgcatgtttctagcaaggaggcc

SEQ ID NO: 2991553 - DNA, 25 bp, Homo sapien
acagcggcagcttcggtctgatggc

SEQ ID NO: 2991554 - DNA, 25 bp, Homo sapien
tctggtttgcttgtcacagcggcag

SEQ ID NO: 2991555 - DNA, 25 bp, Homo sapien
gcttaatcgtgacacatcggtctga

SEQ ID NO: 2991556 - DNA, 25 bp, Homo sapien
gttacgcttaatcgtgacacatcgg

SEQ ID NO: 2991557 - DNA, 25 bp, Homo sapien
aatcgtgacacatcggtctgactgg

SEQ ID NO: 2991558 - DNA, 25 bp, Homo sapien
ccagttacgcttaatcgtgacacat

SEQ ID NO: 2991559 - DNA, 25 bp, Homo sapien
gcgatctcagcgcagtaagaagtgt

SEQ ID NO: 2991560 - DNA, 25 bp, Homo sapien
ttctgtggtggcttcgcggttcctg

SEQ ID NO: 2991561 - DNA, 25 bp, Homo sapien
aagaagtgttgtacatcagcagcac

SEQ ID NO: 2991562 - DNA, 25 bp, Homo sapien
gtggcttcgcggttcctggaggaaa

SEQ ID NO: 2991563 - DNA, 25 bp, Homo sapien
ccctctggtttggagctacagtgaa

SEQ ID NO: 2991564 - DNA, 25 bp, Homo sapien
caaatggataaagagtgcggagacc

SEQ ID NO: 2991565 - DNA, 25 bp, Homo sapien
caaaagcgtaagagacttcaggcct

SEQ ID NO: 2991566 - DNA, 25 bp, Homo sapien
tatctctaactctgagcgggaagtg

SEQ ID NO: 2991567 - DNA, 25 bp, Homo sapien
tccttggcagcaagcgctcgagaac

SEQ ID NO: 2991568 - DNA, 25 bp, Homo sapien
tggcagcaagcgctcgagaacctcc

SEQ ID NO: 2991569 - DNA, 25 bp, Homo sapien
gcagcaagcgctcgagaacctccag

SEQ ID NO: 2991570 - DNA, 25 bp, Homo sapien
ggagtccttggcagcaagcgctcga

SEQ ID NO: 2991571 - DNA, 25 bp, Homo sapien
gctaaggatttggagccttcaattt

SEQ ID NO: 2991572 - DNA, 25 bp, Homo sapien
tcataaaagccaaaggtaggttcca

SEQ ID NO: 2991573 - DNA, 25 bp, Homo sapien
cccagaagaggcgattgcagcattt

SEQ ID NO: 2991574 - DNA, 25 bp, Homo sapien
taggttccagtctgtaagatcagcc

SEQ ID NO: 2991575 - DNA, 25 bp, Homo sapien
ttctcggcgactgtctcctcttcag

SEQ ID NO: 2991576 - DNA, 25 bp, Homo sapien
aattcaaacttgttctcggcgactg

SEQ ID NO: 2991577 - DNA, 25 bp, Homo sapien
ctgaaaaatataccgacagctgggt

SEQ ID NO: 2991578 - DNA, 25 bp, Homo sapien
cctgttcggcctctgaaggcatgac

SEQ ID NO: 2991579 - DNA, 25 bp, Homo sapien
aactgggactctcacacaaagctag

SEQ ID NO: 2991580 - DNA, 25 bp, Homo sapien
ggcattggcgcagtcatccaacagt

SEQ ID NO: 2991581 - DNA, 25 bp, Homo sapien
tctcaagggtaaggactgtaggtgt

SEQ ID NO: 2991582 - DNA, 25 bp, Homo sapien
catgcgttccaggtattggcaagca

SEQ ID NO: 2991583 - DNA, 25 bp, Homo sapien
agtgatgtggacataaggctcccgc

SEQ ID NO: 2991584 - DNA, 25 bp, Homo sapien
cacagtgatgtggacataaggctcc

SEQ ID NO: 2991585 - DNA, 25 bp, Homo sapien
tgatgtggacataaggctcccgcct

SEQ ID NO: 2991586 - DNA, 25 bp, Homo sapien
gctcacagtgatgtggacataaggc

SEQ ID NO: 2991587 - DNA, 25 bp, Homo sapien
accagctcacaaggtcccacgtggg

SEQ ID NO: 2991588 - DNA, 25 bp, Homo sapien
acaaggtcccacgtgggacaggcct

SEQ ID NO: 2991589 - DNA, 25 bp, Homo sapien
aaggtcccacgtgggacaggcctca

SEQ ID NO: 2991590 - DNA, 25 bp, Homo sapien
cagctcacaaggtcccacgtgggac

SEQ ID NO: 2991591 - DNA, 25 bp, Homo sapien
caggtctgggagcaaacaaccaaca

SEQ ID NO: 2991592 - DNA, 25 bp, Homo sapien
ggtctgggagcaaacaaccaacagc

SEQ ID NO: 2991593 - DNA, 25 bp, Homo sapien
gccaggtctgggagcaaacaaccaa

SEQ ID NO: 2991594 - DNA, 25 bp, Homo sapien
aaacaaccaacagcaccttcaccgc

SEQ ID NO: 2991595 - DNA, 25 bp, Homo sapien
tccatccggacaggcccgtgaagct

SEQ ID NO: 2991596 - DNA, 25 bp, Homo sapien
atgatggcgtccacgttccatccgg

SEQ ID NO: 2991597 - DNA, 25 bp, Homo sapien
ggtaacaatgtttctaagtggctaa

SEQ ID NO: 2991598 - DNA, 25 bp, Homo sapien
caatgtttctaagtggctaagagat

SEQ ID NO: 2991599 - DNA, 25 bp, Homo sapien
tttcaaccagggaatggcccgattc

SEQ ID NO: 2991600 - DNA, 25 bp, Homo sapien
ttgaaggatgccctaagaccgtggg

SEQ ID NO: 2991601 - DNA, 25 bp, Homo sapien
taacctgagtagctccctctagaaa

SEQ ID NO: 2991602 - DNA, 25 bp, Homo sapien
gcatctgtaatacgacctactgtag

SEQ ID NO: 2991603 - DNA, 25 bp, Homo sapien
agtgctttctccccgtttatccaca

SEQ ID NO: 2991604 - DNA, 25 bp, Homo sapien
ctgctgctcccgtggccaagtgcca

SEQ ID NO: 2991605 - DNA, 25 bp, Homo sapien
ccgtggccaagtgccaccgccgctg

SEQ ID NO: 2991606 - DNA, 25 bp, Homo sapien
ctggggcttgtctggcagtgctttc

SEQ ID NO: 2991607 - DNA, 25 bp, Homo sapien
cattcaggcacaaaactaaggcaac

SEQ ID NO: 2991608 - DNA, 25 bp, Homo sapien
ggagggtccacaccaacattcaggc

SEQ ID NO: 2991609 - DNA, 25 bp, Homo sapien
tggtcttcaccacatcgggagggtc

SEQ ID NO: 2991610 - DNA, 25 bp, Homo sapien
tccagcattccaagcgtgcacaggg

SEQ ID NO: 2991611 - DNA, 25 bp, Homo sapien
tagctggcacacaaaaccatttccg

SEQ ID NO: 2991612 - DNA, 25 bp, Homo sapien
agctcttcagcaggattgtttttag

SEQ ID NO: 2991613 - DNA, 25 bp, Homo sapien
tgtagtatttaatgtcgggccataa

SEQ ID NO: 2991614 - DNA, 25 bp, Homo sapien
gctaaatgacactccctgctcagca

SEQ ID NO: 2991615 - DNA, 25 bp, Homo sapien
tttctgaggacccatcgacagagga

SEQ ID NO: 2991616 - DNA, 25 bp, Homo sapien
ttctgtaaatttgcaccgatggttt

SEQ ID NO: 2991617 - DNA, 25 bp, Homo sapien
aatttgcaccgatggtttccagagc

SEQ ID NO: 2991618 - DNA, 25 bp, Homo sapien
gccagttctcgtactgcttctgtaa

SEQ ID NO: 2991619 - DNA, 25 bp, Homo sapien
gatccaaagagtgttggaaaccaag

SEQ ID NO: 2991620 - DNA, 25 bp, Homo sapien
tggatccaaagagtgttggaaacca

SEQ ID NO: 2991621 - DNA, 25 bp, Homo sapien
ggatccaaagagtgttggaaaccaa

SEQ ID NO: 2991622 - DNA, 25 bp, Homo sapien
ttggatccaaagagtgttggaaacc

SEQ ID NO: 2991623 - DNA, 25 bp, Homo sapien
gcgcaggcgccatgccacacaaggg

SEQ ID NO: 2991624 - DNA, 25 bp, Homo sapien
aggcagaacgcaggcacacgaaacg

SEQ ID NO: 2991625 - DNA, 25 bp, Homo sapien
taatgcggacgctgtcaagacaaca

SEQ ID NO: 2991626 - DNA, 25 bp, Homo sapien
gcacacgaaacgcagtgcgcaggcg

SEQ ID NO: 2991627 - DNA, 25 bp, Homo sapien
tgggcagggaatcctccatcctgta

SEQ ID NO: 2991628 - DNA, 25 bp, Homo sapien
tgtgctcgctgtccgaatacaactg

SEQ ID NO: 2991629 - DNA, 25 bp, Homo sapien
catcctgtactgagtctacactgtc

SEQ ID NO: 2991630 - DNA, 25 bp, Homo sapien
tgccactgtcatgggcagggaatcc

SEQ ID NO: 2991631 - DNA, 25 bp, Homo sapien
gacgctaccgttgagaaaacaggca

SEQ ID NO: 2991632 - DNA, 25 bp, Homo sapien
cctacaaggtaataaggcaaagcct

SEQ ID NO: 2991633 - DNA, 25 bp, Homo sapien
gaggcaacgactccgacaaacttta

SEQ ID NO: 2991634 - DNA, 25 bp, Homo sapien
caatgggcctaagcaaggaaatacg

SEQ ID NO: 2991635 - DNA, 25 bp, Homo sapien
caccccaagtaaagaggtgtggcct

SEQ ID NO: 2991636 - DNA, 25 bp, Homo sapien
aaatgatagatattcccatagaaac

SEQ ID NO: 2991637 - DNA, 25 bp, Homo sapien
tatttttaaggcaccagaagaatta

SEQ ID NO: 2991638 - DNA, 25 bp, Homo sapien
acttggtcagtggaggcaccgccat

SEQ ID NO: 2991639 - DNA, 25 bp, Homo sapien
gaatgagctcctacaacaacgtggc

SEQ ID NO: 2991640 - DNA, 25 bp, Homo sapien
acaatttctactgggctaatggacc

SEQ ID NO: 2991641 - DNA, 25 bp, Homo sapien
taactgtgacacatctgagaagcac

SEQ ID NO: 2991642 - DNA, 25 bp, Homo sapien
cacggtgaactgaagggaagctgac

SEQ ID NO: 2991643 - DNA, 25 bp, Homo sapien
tggaaaagctttcaggcgagaagca

SEQ ID NO: 2991644 - DNA, 25 bp, Homo sapien
gtggaaaagctttcaggcgagaagc

SEQ ID NO: 2991645 - DNA, 25 bp, Homo sapien
tcactaaggtattcggagggatagc

SEQ ID NO: 2991646 - DNA, 25 bp, Homo sapien
tgcaattggtctaaagagtccggaa

SEQ ID NO: 2991647 - DNA, 25 bp, Homo sapien
gagggatagcagtaggtgacaacac

SEQ ID NO: 2991648 - DNA, 25 bp, Homo sapien
gagtccggaataaactgcttcgcat

SEQ ID NO: 2991649 - DNA, 25 bp, Homo sapien
tttttgagacggagtctcacgctgt

SEQ ID NO: 2991650 - DNA, 25 bp, Homo sapien
ttttgagacggagtctcacgctgtc

SEQ ID NO: 2991651 - DNA, 25 bp, Homo sapien
gattctcttacctcagcctccggaa

SEQ ID NO: 2991652 - DNA, 25 bp, Homo sapien
tctcttacctcagcctccggaatag

SEQ ID NO: 2991653 - DNA, 25 bp, Homo sapien
aacaaaaaatatggctcatacctat

SEQ ID NO: 2991654 - DNA, 25 bp, Homo sapien
cagttgaagacaatgatggagtagg

SEQ ID NO: 2991655 - DNA, 25 bp, Homo sapien
catacagttgaagacaatgatggag

SEQ ID NO: 2991656 - DNA, 25 bp, Homo sapien
gaagacaatgatggagtaggaatca

SEQ ID NO: 2991657 - DNA, 25 bp, Homo sapien
acaatgatggagtaggaatcatatc

SEQ ID NO: 2991658 - DNA, 25 bp, Homo sapien
ggtgtaagagaactagaaatgttga

SEQ ID NO: 2991659 - DNA, 25 bp, Homo sapien
ccacacacacagaattggtcctcga

SEQ ID NO: 2991660 - DNA, 25 bp, Homo sapien
gaattggtcctcgataccgcaccac

SEQ ID NO: 2991661 - DNA, 25 bp, Homo sapien
gaactagaaatgttgaaccacacac

SEQ ID NO: 2991662 - DNA, 25 bp, Homo sapien
tcaacctcaagaaggtgtaagagac

SEQ ID NO: 2991663 - DNA, 25 bp, Homo sapien
cttcctcagtgttcatgacaggaga

SEQ ID NO: 2991664 - DNA, 25 bp, Homo sapien
catgacaggagagattgtaactacg

SEQ ID NO: 2991665 - DNA, 25 bp, Homo sapien
accaatattctaatacaccgagaga

SEQ ID NO: 2991666 - DNA, 25 bp, Homo sapien
gacccatgagagtaagcagaccttg

SEQ ID NO: 2991667 - DNA, 25 bp, Homo sapien
gagtgcctcagcagcggctatgcct

SEQ ID NO: 2991668 - DNA, 25 bp, Homo sapien
ttgctttctgaaactgccaggtgtg

SEQ ID NO: 2991669 - DNA, 25 bp, Homo sapien
ctcagtaaccgcgtcagtggcagtg

SEQ ID NO: 2991670 - DNA, 25 bp, Homo sapien
agccggccttgccccgggaggccat

SEQ ID NO: 2991671 - DNA, 25 bp, Homo sapien
cagccggccttgccccgggaggcca

SEQ ID NO: 2991672 - DNA, 25 bp, Homo sapien
tgcaccagggtaccgtgcacagcac

SEQ ID NO: 2991673 - DNA, 25 bp, Homo sapien
ccgtgcacagcacctctagctcccc

SEQ ID NO: 2991674 - DNA, 25 bp, Homo sapien
cgtgcacagcacctctagctcccca

SEQ ID NO: 2991675 - DNA, 25 bp, Homo sapien
actgcaccagggtaccgtgcacagc

SEQ ID NO: 2991676 - DNA, 25 bp, Homo sapien
gttggctgatcccatacaacacacc

SEQ ID NO: 2991677 - DNA, 25 bp, Homo sapien
gaatgttggctgatcccatacaaca

SEQ ID NO: 2991678 - DNA, 25 bp, Homo sapien
atgttggctgatcccatacaacaca

SEQ ID NO: 2991679 - DNA, 25 bp, Homo sapien
ctgaatgttggctgatcccatacaa

SEQ ID NO: 2991680 - DNA, 25 bp, Homo sapien
catgcgaggagctactccagttcta

SEQ ID NO: 2991681 - DNA, 25 bp, Homo sapien
cacaggtgggtcatgcgaggagcta

SEQ ID NO: 2991682 - DNA, 25 bp, Homo sapien
ggagctactccagttctatcattgc

SEQ ID NO: 2991683 - DNA, 25 bp, Homo sapien
tccagttctatcattgctcttttcc

SEQ ID NO: 2991684 - DNA, 25 bp, Homo sapien
tcatccacagttgggtcaaggctct

SEQ ID NO: 2991685 - DNA, 25 bp, Homo sapien
tcctccttggcgttgcgacgtaagg

SEQ ID NO: 2991686 - DNA, 25 bp, Homo sapien
taaggacgtgcagagcttcttgact

SEQ ID NO: 2991687 - DNA, 25 bp, Homo sapien
agacctccccgttgactgtgggccg

SEQ ID NO: 2991688 - DNA, 25 bp, Homo sapien
taggcgggaaccgagagttcagtgt

SEQ ID NO: 2991689 - DNA, 25 bp, Homo sapien
tgctagctgcgaacccgggacggta

SEQ ID NO: 2991690 - DNA, 25 bp, Homo sapien
ttctaacttccgaggctggctactc

SEQ ID NO: 2991691 - DNA, 25 bp, Homo sapien
tgcttcaccacctgtgccgaatgct

SEQ ID NO: 2991692 - DNA, 25 bp, Homo sapien
cgtatcagcagcgatctcccggatt

SEQ ID NO: 2991693 - DNA, 25 bp, Homo sapien
cactgcggaagagcgcgccagcgtc

SEQ ID NO: 2991694 - DNA, 25 bp, Homo sapien
caagtgagcaaagcgcactgcggaa

SEQ ID NO: 2991695 - DNA, 25 bp, Homo sapien
tcggtggcatgaatctgcagagcct

SEQ ID NO: 2991696 - DNA, 25 bp, Homo sapien
gccttcttcggctctagaaactgta

SEQ ID NO: 2991697 - DNA, 25 bp, Homo sapien
cttcggctctagaaactgtattttg

SEQ ID NO: 2991698 - DNA, 25 bp, Homo sapien
gctctagaaactgtattttgggaac

SEQ ID NO: 2991699 - DNA, 25 bp, Homo sapien
ggccttcttcggctctagaaactgt

SEQ ID NO: 2991700 - DNA, 25 bp, Homo sapien
ctgggatacacaggaagactgccat

SEQ ID NO: 2991701 - DNA, 25 bp, Homo sapien
gggatacacaggaagactgccatca

SEQ ID NO: 2991702 - DNA, 25 bp, Homo sapien
ggatacacaggaagactgccatcag

SEQ ID NO: 2991703 - DNA, 25 bp, Homo sapien
tgggatacacaggaagactgccatc

SEQ ID NO: 2991704 - DNA, 25 bp, Homo sapien
ggtagaactcgcaagcatctctgtg

SEQ ID NO: 2991705 - DNA, 25 bp, Homo sapien
gcctcgccgctgttgcgatggtaga

SEQ ID NO: 2991706 - DNA, 25 bp, Homo sapien
tgcgatggtagaactcgcaagcatc

SEQ ID NO: 2991707 - DNA, 25 bp, Homo sapien
cgctgttgcgatggtagaactcgca

SEQ ID NO: 2991708 - DNA, 25 bp, Homo sapien
aggtagatgtgatgagcctggaaat

SEQ ID NO: 2991709 - DNA, 25 bp, Homo sapien
gtgatgagcctggaaatttctggcc

SEQ ID NO: 2991710 - DNA, 25 bp, Homo sapien
gatgtgatgagcctggaaatttctg

SEQ ID NO: 2991711 - DNA, 25 bp, Homo sapien
ctgagcaggtagatgtgatgagcct

SEQ ID NO: 2991712 - DNA, 25 bp, Homo sapien
ccaggttaccggcagggtcctcgtg

SEQ ID NO: 2991713 - DNA, 25 bp, Homo sapien
tctgtgggcggcgagcaccaggtta

SEQ ID NO: 2991714 - DNA, 25 bp, Homo sapien
gatgatccgtcataaccatgaggta

SEQ ID NO: 2991715 - DNA, 25 bp, Homo sapien
tgcaaagttcaggaagatgatccgt

SEQ ID NO: 2991716 - DNA, 25 bp, Homo sapien
cagagttcacgttctcggagcagga

SEQ ID NO: 2991717 - DNA, 25 bp, Homo sapien
acgttctcggagcatgatgcggtca

SEQ ID NO: 2991718 - DNA, 25 bp, Homo sapien
gcgtccacgttctcggagcacgatg

SEQ ID NO: 2991719 - DNA, 25 bp, Homo sapien
cgttcttgaagcgtgacatgatcag

SEQ ID NO: 2991720 - DNA, 25 bp, Homo sapien
tcgtagacgaagatcgacgggctgc

SEQ ID NO: 2991721 - DNA, 25 bp, Homo sapien
gacttgacgatcaagccagcattgg

SEQ ID NO: 2991722 - DNA, 25 bp, Homo sapien
cacgtctgcaggtcatatatggaca

SEQ ID NO: 2991723 - DNA, 25 bp, Homo sapien
ccagcattggagcagtcgtagacga

SEQ ID NO: 2991724 - DNA, 25 bp, Homo sapien
tgagagagaagtaaacaataaataa

SEQ ID NO: 2991725 - DNA, 25 bp, Homo sapien
gagagagaagtaaacaataaataaa

SEQ ID NO: 2991726 - DNA, 25 bp, Homo sapien
ctgagagagaagtaaacaataaata

SEQ ID NO: 2991727 - DNA, 25 bp, Homo sapien
gagacaccctccagaagaactagaa

SEQ ID NO: 2991728 - DNA, 25 bp, Homo sapien
caagaagcagtggtctcagcatgtc

SEQ ID NO: 2991729 - DNA, 25 bp, Homo sapien
gggccagggactactttattcatca

SEQ ID NO: 2991730 - DNA, 25 bp, Homo sapien
tctttgctaacaggcttccacatcg

SEQ ID NO: 2991731 - DNA, 25 bp, Homo sapien
cactatcgataatggatgtggttag

SEQ ID NO: 2991732 - DNA, 25 bp, Homo sapien
ggtgctacgtgacctggctctggcc

SEQ ID NO: 2991733 - DNA, 25 bp, Homo sapien
ggctgatggtcctcattggatcatc

SEQ ID NO: 2991734 - DNA, 25 bp, Homo sapien
taccactggaagagtgaaaattgcc

SEQ ID NO: 2991735 - DNA, 25 bp, Homo sapien
aggcctccctcggtccttgtggctt

SEQ ID NO: 2991736 - DNA, 25 bp, Homo sapien
tctacggctcaggttagacatctcc

SEQ ID NO: 2991737 - DNA, 25 bp, Homo sapien
tggcaacttcttacgttctacggct

SEQ ID NO: 2991738 - DNA, 25 bp, Homo sapien
gcttcttctctgcacggcggaacct

SEQ ID NO: 2991739 - DNA, 25 bp, Homo sapien
gaaataatgaagttcacaagaattc

SEQ ID NO: 2991740 - DNA, 25 bp, Homo sapien
tggccatttcggtaatccacaagag

SEQ ID NO: 2991741 - DNA, 25 bp, Homo sapien
aatgaagttcacaagaattcctggc

SEQ ID NO: 2991742 - DNA, 25 bp, Homo sapien
gttgcctgcatgtggccatttcggt

SEQ ID NO: 2991743 - DNA, 25 bp, Homo sapien
tttcatcgacggaggcaaaggcatc

SEQ ID NO: 2991744 - DNA, 25 bp, Homo sapien
agctcggtggcctcgcaggctgcca

SEQ ID NO: 2991745 - DNA, 25 bp, Homo sapien
ggtgaataggtcagccgggaggtcg

SEQ ID NO: 2991746 - DNA, 25 bp, Homo sapien
ggtgatttgggttgattgcagctac

SEQ ID NO: 2991747 - DNA, 25 bp, Homo sapien
gagtgggtcccaggggcacagcagg

SEQ ID NO: 2991748 - DNA, 25 bp, Homo sapien
ctgcgggagagcccagttgagtggg

SEQ ID NO: 2991749 - DNA, 25 bp, Homo sapien
caggggcacagcaggggccactcac

SEQ ID NO: 2991750 - DNA, 25 bp, Homo sapien
cgggagagcccagttgagtgggtcc

SEQ ID NO: 2991751 - DNA, 25 bp, Homo sapien
ctggaatcccgaatgacacaaaaag

SEQ ID NO: 2991752 - DNA, 25 bp, Homo sapien
aaagaaggcggggacactcatgtct

SEQ ID NO: 2991753 - DNA, 25 bp, Homo sapien
ggaccaggtgaatgcctggggccca

SEQ ID NO: 2991754 - DNA, 25 bp, Homo sapien
tcatgtctgtcacgtgggctcctgg

SEQ ID NO: 2991755 - DNA, 25 bp, Homo sapien
gacgcctccgcagtgaacaaaggta

SEQ ID NO: 2991756 - DNA, 25 bp, Homo sapien
tcttggaaatcgcaaagcagtgagc

SEQ ID NO: 2991757 - DNA, 25 bp, Homo sapien
ctatcctggtactaagacgcctccg

SEQ ID NO: 2991758 - DNA, 25 bp, Homo sapien
tgagctgcccacgaacagatcagaa

SEQ ID NO: 2991759 - DNA, 25 bp, Homo sapien
gctggatatcggaggagccccttag

SEQ ID NO: 2991760 - DNA, 25 bp, Homo sapien
ctggccggcaatggaatacaccttc

SEQ ID NO: 2991761 - DNA, 25 bp, Homo sapien
gaacaaggctaattgcaagggctct

SEQ ID NO: 2991762 - DNA, 25 bp, Homo sapien
tccacggaggtaacgcttatgagca

SEQ ID NO: 2991763 - DNA, 25 bp, Homo sapien
tctatcaaatccagtgtgacgccag

SEQ ID NO: 2991764 - DNA, 25 bp, Homo sapien
ttttctatcaaatccagtgtgacgc

SEQ ID NO: 2991765 - DNA, 25 bp, Homo sapien
tatcaaatccagtgtgacgccaggc

SEQ ID NO: 2991766 - DNA, 25 bp, Homo sapien
tcaaatccagtgtgacgccaggcac

SEQ ID NO: 2991767 - DNA, 25 bp, Homo sapien
tgcctcactttgtaactgcaaaatc

SEQ ID NO: 2991768 - DNA, 25 bp, Homo sapien
gaagatcacttgattaacaagatca

SEQ ID NO: 2991769 - DNA, 25 bp, Homo sapien
tttctgcctcactttgtaactgcaa

SEQ ID NO: 2991770 - DNA, 25 bp, Homo sapien
agatcacttgattaacaagatcact

SEQ ID NO: 2991771 - DNA, 25 bp, Homo sapien
aacgtcgtcctcacacttagtggca

SEQ ID NO: 2991772 - DNA, 25 bp, Homo sapien
tctcaagggcaagaaatttccatgt

SEQ ID NO: 2991773 - DNA, 25 bp, Homo sapien
tattctccttgcgtcacgtgactcg

SEQ ID NO: 2991774 - DNA, 25 bp, Homo sapien
tcacactagtcaggtgggacccagg

SEQ ID NO: 2991775 - DNA, 25 bp, Homo sapien
gctcggcgatctctcgggttttgct

SEQ ID NO: 2991776 - DNA, 25 bp, Homo sapien
tcagcgtctagtgcctcgttactca

SEQ ID NO: 2991777 - DNA, 25 bp, Homo sapien
atttctaaatcagcgtctagtgcct

SEQ ID NO: 2991778 - DNA, 25 bp, Homo sapien
cctcgctcggcgatctctcgggttt

SEQ ID NO: 2991779 - DNA, 25 bp, Homo sapien
tccggatgagctaaggaggccttgc

SEQ ID NO: 2991780 - DNA, 25 bp, Homo sapien
caatccggatgagctaaggaggcct

SEQ ID NO: 2991781 - DNA, 25 bp, Homo sapien
ccttgctggggtgcacatcgaacac

SEQ ID NO: 2991782 - DNA, 25 bp, Homo sapien
catcgaacacgaaggggacccggtg

SEQ ID NO: 2991783 - DNA, 25 bp, Homo sapien
ggtccccggttatgctggcgcctca

SEQ ID NO: 2991784 - DNA, 25 bp, Homo sapien
gccacactgctttatcaccgattgc

SEQ ID NO: 2991785 - DNA, 25 bp, Homo sapien
taggaacaacggcagggcactgaat

SEQ ID NO: 2991786 - DNA, 25 bp, Homo sapien
aagtctgcagccacgcacataggaa

SEQ ID NO: 2991787 - DNA, 25 bp, Homo sapien
agacaacacacgcacatcagaacgg

SEQ ID NO: 2991788 - DNA, 25 bp, Homo sapien
agggcacagcgaccaggctctgaca

SEQ ID NO: 2991789 - DNA, 25 bp, Homo sapien
gcaaaacatactggcatcgaggtca

SEQ ID NO: 2991790 - DNA, 25 bp, Homo sapien
tgaaaagtgcgctcgagcctggaac

SEQ ID NO: 2991791 - DNA, 25 bp, Homo sapien
cacgctgcatctcatcagggagctt

SEQ ID NO: 2991792 - DNA, 25 bp, Homo sapien
tgcacgctgcatctcatcagggagc

SEQ ID NO: 2991793 - DNA, 25 bp, Homo sapien
cgctgcatctcatcagggagcttct

SEQ ID NO: 2991794 - DNA, 25 bp, Homo sapien
ctgcacgctgcatctcatcagggag

SEQ ID NO: 2991795 - DNA, 25 bp, Homo sapien
gagcacttccctccggaggcactgg

SEQ ID NO: 2991796 - DNA, 25 bp, Homo sapien
aagcaggacgggctccagcagagcc

SEQ ID NO: 2991797 - DNA, 25 bp, Homo sapien
aggctgtctccagacgccactctca

SEQ ID NO: 2991798 - DNA, 25 bp, Homo sapien
tccaggctgtctccagacgccactc

SEQ ID NO: 2991799 - DNA, 25 bp, Homo sapien
ggcctgccacatcgagaaaagcagc

SEQ ID NO: 2991800 - DNA, 25 bp, Homo sapien
aaaggcctgccacatcgagaaaagc

SEQ ID NO: 2991801 - DNA, 25 bp, Homo sapien
aggagtcacatgggagaagccacct

SEQ ID NO: 2991802 - DNA, 25 bp, Homo sapien
cctgccacatcgagaaaagcagctc

SEQ ID NO: 2991803 - DNA, 25 bp, Homo sapien
tatgagacagagaccttacatggcc

SEQ ID NO: 2991804 - DNA, 25 bp, Homo sapien
taaagcaggtcaccaaaactatggc

SEQ ID NO: 2991805 - DNA, 25 bp, Homo sapien
taacaatgggaagactatgagacag

SEQ ID NO: 2991806 - DNA, 25 bp, Homo sapien
gtctaaggcatatactatctggcag

SEQ ID NO: 2991807 - DNA, 25 bp, Homo sapien
tgtaaaagtcggaaaaatctacata

SEQ ID NO: 2991808 - DNA, 25 bp, Homo sapien
ggaaaaatctacatagctcagtaca

SEQ ID NO: 2991809 - DNA, 25 bp, Homo sapien
aagtcggaaaaatctacatagctca

SEQ ID NO: 2991810 - DNA, 25 bp, Homo sapien
tacatagctcagtacatcaacttcc

SEQ ID NO: 2991811 - DNA, 25 bp, Homo sapien
ggcgtcctcctgtcgttcaggcggc

SEQ ID NO: 2991812 - DNA, 25 bp, Homo sapien
ggagcacgttccacgcgatggtgtc

SEQ ID NO: 2991813 - DNA, 25 bp, Homo sapien
tcctgtcgttcaggcggccagggat

SEQ ID NO: 2991814 - DNA, 25 bp, Homo sapien
tgaagatccagttcagttcacccag

SEQ ID NO: 2991815 - DNA, 25 bp, Homo sapien
tgacgggagtgcagttatacgacct

SEQ ID NO: 2991816 - DNA, 25 bp, Homo sapien
tcataatcctttccgccaataaaaa

SEQ ID NO: 2991817 - DNA, 25 bp, Homo sapien
caagtcctgtctgaagagcttttgg

SEQ ID NO: 2991818 - DNA, 25 bp, Homo sapien
aatttcgaaacagactagccaccag

SEQ ID NO: 2991819 - DNA, 25 bp, Homo sapien
ttctccagagcgatcttgcatgtgc

SEQ ID NO: 2991820 - DNA, 25 bp, Homo sapien
taccctcccgagttgcagagctgtg

SEQ ID NO: 2991821 - DNA, 25 bp, Homo sapien
gtgcagtcctaaaaggccctccaag

SEQ ID NO: 2991822 - DNA, 25 bp, Homo sapien
gcacggcacctggaggatcctgaaa

SEQ ID NO: 2991823 - DNA, 25 bp, Homo sapien
tagtccagacctgcggttactgcca

SEQ ID NO: 2991824 - DNA, 25 bp, Homo sapien
gaagtgtcactttcccggatgagga

SEQ ID NO: 2991825 - DNA, 25 bp, Homo sapien
gaaacatgtttcttgcaaatgggct

SEQ ID NO: 2991826 - DNA, 25 bp, Homo sapien
gctgtgcgcttgtggaagagctcct

SEQ ID NO: 2991827 - DNA, 25 bp, Homo sapien
agccttaacctgatgggaccctgca

SEQ ID NO: 2991828 - DNA, 25 bp, Homo sapien
ccacgtgctgttctgagctgccaag

SEQ ID NO: 2991829 - DNA, 25 bp, Homo sapien
gaactggatctggaggccacgtgct

SEQ ID NO: 2991830 - DNA, 25 bp, Homo sapien
gtggacaggcttgaacgtggcccca

SEQ ID NO: 2991831 - DNA, 25 bp, Homo sapien
tgctcctaagccaggtcacattggt

SEQ ID NO: 2991832 - DNA, 25 bp, Homo sapien
tctgttaggtagtagagttattccc

SEQ ID NO: 2991833 - DNA, 25 bp, Homo sapien
tcagaacatcccattagtcccgttg

SEQ ID NO: 2991834 - DNA, 25 bp, Homo sapien
gacctgcttcagctatgctcctaag

SEQ ID NO: 2991835 - DNA, 25 bp, Homo sapien
cagcccgacgccgtgagaaggccgt

SEQ ID NO: 2991836 - DNA, 25 bp, Homo sapien
cagcggcccgtgcaagatggcccag

SEQ ID NO: 2991837 - DNA, 25 bp, Homo sapien
cactggacagcagcggcccgtgcaa

SEQ ID NO: 2991838 - DNA, 25 bp, Homo sapien
actggagcagcgcacctgcggtctc

SEQ ID NO: 2991839 - DNA, 25 bp, Homo sapien
ggccatggtggtgggcttcggcggc

SEQ ID NO: 2991840 - DNA, 25 bp, Homo sapien
gccatggtggtgggcttcggcggca

SEQ ID NO: 2991841 - DNA, 25 bp, Homo sapien
catggtggtgggcttcggcggcagc

SEQ ID NO: 2991842 - DNA, 25 bp, Homo sapien
tggtggtgggcttcggcggcagcag

SEQ ID NO: 2991843 - DNA, 25 bp, Homo sapien
tgtgtcagagccacgggtgacaatc

SEQ ID NO: 2991844 - DNA, 25 bp, Homo sapien
gatgccgcccagcaaagctgtgtca

SEQ ID NO: 2991845 - DNA, 25 bp, Homo sapien
cctcgcttggtgttgaaggcctgaa

SEQ ID NO: 2991846 - DNA, 25 bp, Homo sapien
tgacaatctctctcggacacgtgac

SEQ ID NO: 2991847 - DNA, 25 bp, Homo sapien
tgccttcctcgatgatcgtcggcag

SEQ ID NO: 2991848 - DNA, 25 bp, Homo sapien
gcagtgccttcctcgatgatcgtcg

SEQ ID NO: 2991849 - DNA, 25 bp, Homo sapien
ccgaaacgcagtgccttcctcgatg

SEQ ID NO: 2991850 - DNA, 25 bp, Homo sapien
cctcgatgatcgtcggcagctgaga

SEQ ID NO: 2991851 - DNA, 25 bp, Homo sapien
gcaggtgcggcgactaaacccaggt

SEQ ID NO: 2991852 - DNA, 25 bp, Homo sapien
ccaggttccgccgtagggtggctca

SEQ ID NO: 2991853 - DNA, 25 bp, Homo sapien
ccgtgggtcactgtcccacagggct

SEQ ID NO: 2991854 - DNA, 25 bp, Homo sapien
gcagaacgccctccagggttcagca

SEQ ID NO: 2991855 - DNA, 25 bp, Homo sapien
gctctcccagggcgatttggatgcc

SEQ ID NO: 2991856 - DNA, 25 bp, Homo sapien
gtgtgctaggcagtttgacatattc

SEQ ID NO: 2991857 - DNA, 25 bp, Homo sapien
tgtgtgctaggcagtttgacatatt

SEQ ID NO: 2991858 - DNA, 25 bp, Homo sapien
ctcccagggcgatttggatgccagg

SEQ ID NO: 2991859 - DNA, 25 bp, Homo sapien
acctggaatgcggtcagctgctcgg

SEQ ID NO: 2991860 - DNA, 25 bp, Homo sapien
caggacgatgggcagctgttcgggt

SEQ ID NO: 2991861 - DNA, 25 bp, Homo sapien
tccacgcccatggtgagccacacct

SEQ ID NO: 2991862 - DNA, 25 bp, Homo sapien
gctgctcggcgaagaacgggctgtg

SEQ ID NO: 2991863 - DNA, 25 bp, Homo sapien
actgacatgacacgggccccgtggg

SEQ ID NO: 2991864 - DNA, 25 bp, Homo sapien
atggcctcccatcctatctcagtga

SEQ ID NO: 2991865 - DNA, 25 bp, Homo sapien
gtgacgaactcctcaatttccatgg

SEQ ID NO: 2991866 - DNA, 25 bp, Homo sapien
tctgcacgtgaacagcactgacatg

SEQ ID NO: 2991867 - DNA, 25 bp, Homo sapien
tgctctcagccggtgcacttggctt

SEQ ID NO: 2991868 - DNA, 25 bp, Homo sapien
aatgctctcagccggtgcacttggc

SEQ ID NO: 2991869 - DNA, 25 bp, Homo sapien
ctctcagccggtgcacttggcttaa

SEQ ID NO: 2991870 - DNA, 25 bp, Homo sapien
ccaatgctctcagccggtgcacttg

SEQ ID NO: 2991871 - DNA, 25 bp, Homo sapien
taaggtttactgtacatggcagctg

SEQ ID NO: 2991872 - DNA, 25 bp, Homo sapien
cgtttccgaattgtgcctgccatga

SEQ ID NO: 2991873 - DNA, 25 bp, Homo sapien
gagttatttgttaaacgcacgtcgc

SEQ ID NO: 2991874 - DNA, 25 bp, Homo sapien
tgaggaaccagaagagcgtttccga

SEQ ID NO: 2991875 - DNA, 25 bp, Homo sapien
atggccacctctccgtgacaccacg

SEQ ID NO: 2991876 - DNA, 25 bp, Homo sapien
acggccacctctccgtgacggcatg

SEQ ID NO: 2991877 - DNA, 25 bp, Homo sapien
tgacggcacggccagcttgctcaac

SEQ ID NO: 2991878 - DNA, 25 bp, Homo sapien
tgtgttgctcacgtacgagccacgg

SEQ ID NO: 2991879 - DNA, 25 bp, Homo sapien
atgaaaacgagaagtggccgcagct

SEQ ID NO: 2991880 - DNA, 25 bp, Homo sapien
gcccagatgaaaacgagaagtggcc

SEQ ID NO: 2991881 - DNA, 25 bp, Homo sapien
cagatgaaaacgagaagtggccgca

SEQ ID NO: 2991882 - DNA, 25 bp, Homo sapien
cacgtaggggaagatgccgacagac

SEQ ID NO: 2991883 - DNA, 25 bp, Homo sapien
ggtgttcttggcactctcctgtact

SEQ ID NO: 2991884 - DNA, 25 bp, Homo sapien
ctctgtgactttgctagaccttcca

SEQ ID NO: 2991885 - DNA, 25 bp, Homo sapien
tcttggcactctcctgtacttgctc

SEQ ID NO: 2991886 - DNA, 25 bp, Homo sapien
gctctgtgactttgctagaccttcc

SEQ ID NO: 2991887 - DNA, 25 bp, Homo sapien
tcctggtggccagtgcgacatggct

SEQ ID NO: 2991888 - DNA, 25 bp, Homo sapien
gctgtgacaccaaagtagtacgtga

SEQ ID NO: 2991889 - DNA, 25 bp, Homo sapien
cagggtcagtgaatttggctgaaca

SEQ ID NO: 2991890 - DNA, 25 bp, Homo sapien
aacagggcagcttcagcgagcacag

SEQ ID NO: 2991891 - DNA, 25 bp, Homo sapien
gcagacggccgaaggctcatgattt

SEQ ID NO: 2991892 - DNA, 25 bp, Homo sapien
gatgtgagatttacgtggtgcccct

SEQ ID NO: 2991893 - DNA, 25 bp, Homo sapien
tacacagcagttttccacgtcctgg

SEQ ID NO: 2991894 - DNA, 25 bp, Homo sapien
gcaaatgcggtgatgggatcaaact

SEQ ID NO: 2991895 - DNA, 25 bp, Homo sapien
taataatctgaagaggcatccattg

SEQ ID NO: 2991896 - DNA, 25 bp, Homo sapien
gaggcatccattgatttttcaatcc

SEQ ID NO: 2991897 - DNA, 25 bp, Homo sapien
tttgtacctgtgttcaagagaatac

SEQ ID NO: 2991898 - DNA, 25 bp, Homo sapien
tcttttcttgtaacgtgtgtctaac

SEQ ID NO: 2991899 - DNA, 25 bp, Homo sapien
aacttcgaattgttgattgctagtg

SEQ ID NO: 2991900 - DNA, 25 bp, Homo sapien
tggattctccacatagacaatcatg

SEQ ID NO: 2991901 - DNA, 25 bp, Homo sapien
taaactggattctccacatagacaa

SEQ ID NO: 2991902 - DNA, 25 bp, Homo sapien
tttaatttcaacttcgaattgttga

SEQ ID NO: 2991903 - DNA, 25 bp, Homo sapien
catagcaaaatcactggcatgcttt

SEQ ID NO: 2991904 - DNA, 25 bp, Homo sapien
caaaatcactggcatgctttccatc

SEQ ID NO: 2991905 - DNA, 25 bp, Homo sapien
tccatagcaaaatcactggcatgct

SEQ ID NO: 2991906 - DNA, 25 bp, Homo sapien
tagcaaaatcactggcatgctttcc

SEQ ID NO: 2991907 - DNA, 25 bp, Homo sapien
cagagacaatcacagagatacgggc

SEQ ID NO: 2991908 - DNA, 25 bp, Homo sapien
gatacgggccgtgtttcatgtccac

SEQ ID NO: 2991909 - DNA, 25 bp, Homo sapien
gcgttctgacgtgaacacagagaca

SEQ ID NO: 2991910 - DNA, 25 bp, Homo sapien
tgtttcatgtccactgggtagaaga

SEQ ID NO: 2991911 - DNA, 25 bp, Homo sapien
gaagacccggcaggcgacacacaca

SEQ ID NO: 2991912 - DNA, 25 bp, Homo sapien
tgccggcagcgtgaatctgccaaag

SEQ ID NO: 2991913 - DNA, 25 bp, Homo sapien
gtggcacgggctcggtggaagaccc

SEQ ID NO: 2991914 - DNA, 25 bp, Homo sapien
cttggtggaagacccggcagagact

SEQ ID NO: 2991915 - DNA, 25 bp, Homo sapien
aatacactgatgaggcgggttatgg

SEQ ID NO: 2991916 - DNA, 25 bp, Homo sapien
ccaggcgccggcctcagattgcaag

SEQ ID NO: 2991917 - DNA, 25 bp, Homo sapien
gcgccggcctcagattgcaagctgc

SEQ ID NO: 2991918 - DNA, 25 bp, Homo sapien
catcaatacactgatgaggcgggtt

SEQ ID NO: 2991919 - DNA, 25 bp, Homo sapien
aggaccgacaggaagtacttgtggc

SEQ ID NO: 2991920 - DNA, 25 bp, Homo sapien
ttgtccttcacgaggtccgcttggc

SEQ ID NO: 2991921 - DNA, 25 bp, Homo sapien
tgtggccgttgtccttcacgaggtc

SEQ ID NO: 2991922 - DNA, 25 bp, Homo sapien
acaggaagtacttgtggccgttgtc

SEQ ID NO: 2991923 - DNA, 25 bp, Homo sapien
gctgtgacccttgacctttctcctg

SEQ ID NO: 2991924 - DNA, 25 bp, Homo sapien
agcagttgctgaccccgtggacgtg

SEQ ID NO: 2991925 - DNA, 25 bp, Homo sapien
tcatggtagtaagcaaagggccatg

SEQ ID NO: 2991926 - DNA, 25 bp, Homo sapien
gccatgtctaacgtgaagcagttgc

SEQ ID NO: 2991927 - DNA, 25 bp, Homo sapien
tcttggctttttgccgtgtcctgca

SEQ ID NO: 2991928 - DNA, 25 bp, Homo sapien
tgccaacacgtgtgccaacttcttg

SEQ ID NO: 2991929 - DNA, 25 bp, Homo sapien
taaactgttggtgtctgaacgctgc

SEQ ID NO: 2991930 - DNA, 25 bp, Homo sapien
ggtctttctagccatggtctgtggg

SEQ ID NO: 2991931 - DNA, 25 bp, Homo sapien
aagccgtcatggtccggtgttcagc

SEQ ID NO: 2991932 - DNA, 25 bp, Homo sapien
gacgatcacggcgagaatgaaagcc

SEQ ID NO: 2991933 - DNA, 25 bp, Homo sapien
tgatagctgttgacgatcacggcga

SEQ ID NO: 2991934 - DNA, 25 bp, Homo sapien
tgccccgtgtgatagctgttgacga

SEQ ID NO: 2991935 - DNA, 25 bp, Homo sapien
tagagcttctcatgagcgctgtccc

SEQ ID NO: 2991936 - DNA, 25 bp, Homo sapien
acctcgccgagtcgaagttctgcca

SEQ ID NO: 2991937 - DNA, 25 bp, Homo sapien
cagatcctgccgaggcagatggcca

SEQ ID NO: 2991938 - DNA, 25 bp, Homo sapien
atggccacccactggcgcagcaagg

SEQ ID NO: 2991939 - DNA, 25 bp, Homo sapien
gagttgcccacgaacgtgccaaggg

SEQ ID NO: 2991940 - DNA, 25 bp, Homo sapien
tgggccagcatcatggccacgttgt

SEQ ID NO: 2991941 - DNA, 25 bp, Homo sapien
tgccaagggcgaagaccgctgcgca

SEQ ID NO: 2991942 - DNA, 25 bp, Homo sapien
tggtggtggagtggtccgtcctctc

SEQ ID NO: 2991943 - DNA, 25 bp, Homo sapien
ctcttctatgaactgcagggccacg

SEQ ID NO: 2991944 - DNA, 25 bp, Homo sapien
tggagaaggcaaggcgtagttcttt

SEQ ID NO: 2991945 - DNA, 25 bp, Homo sapien
tgcagggccacggtgcagaaattgc

SEQ ID NO: 2991946 - DNA, 25 bp, Homo sapien
tgctttcatactgaaccacaagatg

SEQ ID NO: 2991947 - DNA, 25 bp, Homo sapien
cacgggctgtctcgcactggggtca

SEQ ID NO: 2991948 - DNA, 25 bp, Homo sapien
aggagctcacagaacgaagtctggg

SEQ ID NO: 2991949 - DNA, 25 bp, Homo sapien
tgcaaagatttgttgaggctcctgg

SEQ ID NO: 2991950 - DNA, 25 bp, Homo sapien
ggcgacagcacggatgtttccatag

SEQ ID NO: 2991951 - DNA, 25 bp, Homo sapien
gcgcggcgcatcttgtcgatggtct

SEQ ID NO: 2991952 - DNA, 25 bp, Homo sapien
acaggatatgctcctcattctcggg

SEQ ID NO: 2991953 - DNA, 25 bp, Homo sapien
ggtctcgaaggacaggatatgctcc

SEQ ID NO: 2991954 - DNA, 25 bp, Homo sapien
tcttgtcgatggtctcgaaggacag

SEQ ID NO: 2991955 - DNA, 25 bp, Homo sapien
ggtgtcggcgcggccgtggatggga

SEQ ID NO: 2991956 - DNA, 25 bp, Homo sapien
gggtgtgtcggtgcggccgtgggat

SEQ ID NO: 2991957 - DNA, 25 bp, Homo sapien
ggatgtgtcggtgcggccgtgtggg

SEQ ID NO: 2991958 - DNA, 25 bp, Homo sapien
ccgtggggtgtcagcgaggccgcgt

SEQ ID NO: 2991959 - DNA, 25 bp, Homo sapien
gaaaggtaacgtcatgcctgtgacc

SEQ ID NO: 2991960 - DNA, 25 bp, Homo sapien
gaagacataaagaagacttaagtaa

SEQ ID NO: 2991961 - DNA, 25 bp, Homo sapien
ctttatgcagaaagttagactgtct

SEQ ID NO: 2991962 - DNA, 25 bp, Homo sapien
gaaagttagactgtcttgaagacat

SEQ ID NO: 2991963 - DNA, 25 bp, Homo sapien
agaaacaagcaggatggagacatca

SEQ ID NO: 2991964 - DNA, 25 bp, Homo sapien
gattctagaacctgacacagtgctg

SEQ ID NO: 2991965 - DNA, 25 bp, Homo sapien
ggcctgcccagttgtggtctgcaga

SEQ ID NO: 2991966 - DNA, 25 bp, Homo sapien
tgtcaggccagacgaagggctgagt

SEQ ID NO: 2991967 - DNA, 25 bp, Homo sapien
aaacaagagagcataaccactgttg

SEQ ID NO: 2991968 - DNA, 25 bp, Homo sapien
taaccactgttgacacactgtgctg

SEQ ID NO: 2991969 - DNA, 25 bp, Homo sapien
acaagagagcataaccactgttgac

SEQ ID NO: 2991970 - DNA, 25 bp, Homo sapien
aacaagagagcataaccactgttga

SEQ ID NO: 2991971 - DNA, 25 bp, Homo sapien
tgtactgggacagaaccgaagcctt

SEQ ID NO: 2991972 - DNA, 25 bp, Homo sapien
ggaactgctccgtgcaacacaagga

SEQ ID NO: 2991973 - DNA, 25 bp, Homo sapien
agatgcaccttctgctcaaccgtgg

SEQ ID NO: 2991974 - DNA, 25 bp, Homo sapien
gattgcacagctctgcgatagccgt

SEQ ID NO: 2991975 - DNA, 25 bp, Homo sapien
gagcgagagtgactccttctgtcag

SEQ ID NO: 2991976 - DNA, 25 bp, Homo sapien
catcaaacctttgagccatgctacg

SEQ ID NO: 2991977 - DNA, 25 bp, Homo sapien
gaaggagcgagagtgactccttctg

SEQ ID NO: 2991978 - DNA, 25 bp, Homo sapien
atgctacgtccacgacagcgtgcgg

SEQ ID NO: 2991979 - DNA, 25 bp, Homo sapien
cttgtaggcgatgctgttgagtact

SEQ ID NO: 2991980 - DNA, 25 bp, Homo sapien
tgagtactttcatggccacgtccga

SEQ ID NO: 2991981 - DNA, 25 bp, Homo sapien
tctccaaatctgagtgtaaacactg

SEQ ID NO: 2991982 - DNA, 25 bp, Homo sapien
gccacgtccgagacctctggatagg

SEQ ID NO: 2991983 - DNA, 25 bp, Homo sapien
tactcgtaaccgagaaccagcagct

SEQ ID NO: 2991984 - DNA, 25 bp, Homo sapien
tcctggcatgcatactcgtaaccga

SEQ ID NO: 2991985 - DNA, 25 bp, Homo sapien
tgcatactcgtaaccgagaaccagc

SEQ ID NO: 2991986 - DNA, 25 bp, Homo sapien
tggcatgcatactcgtaaccgagaa

SEQ ID NO: 2991987 - DNA, 25 bp, Homo sapien
tcaacaggccagtagcacataaaag

SEQ ID NO: 2991988 - DNA, 25 bp, Homo sapien
tccgctgcagggatgcggtgacgaa

SEQ ID NO: 2991989 - DNA, 25 bp, Homo sapien
tggggatgaacgtctccaggtgccc

SEQ ID NO: 2991990 - DNA, 25 bp, Homo sapien
tggccacaccacacggtgacgaagg

SEQ ID NO: 2991991 - DNA, 25 bp, Homo sapien
tggagtctgcatctccgcaggggaa

SEQ ID NO: 2991992 - DNA, 25 bp, Homo sapien
actgagaacagattcccggccgcca

SEQ ID NO: 2991993 - DNA, 25 bp, Homo sapien
gcacagtactgtctcactgagaaca

SEQ ID NO: 2991994 - DNA, 25 bp, Homo sapien
tatgacccccgcgagggtgctcatg

SEQ ID NO: 2991995 - DNA, 25 bp, Homo sapien
tttcccactggatcttgacacagtc

SEQ ID NO: 2991996 - DNA, 25 bp, Homo sapien
ggctgcggatgccagcgtcagcttc

SEQ ID NO: 2991997 - DNA, 25 bp, Homo sapien
gggcgtctgatccaatgcagatgaa

SEQ ID NO: 2991998 - DNA, 25 bp, Homo sapien
gaaaataccgtacatttcagagact

SEQ ID NO: 2991999 - DNA, 25 bp, Homo sapien
taacagtcgaatgctcagcacagac

SEQ ID NO: 2992000 - DNA, 25 bp, Homo sapien
tcttgggccagtgcgcacatgaaca

SEQ ID NO: 2992001 - DNA, 25 bp, Homo sapien
cttcggtggtggcagatacgacttt

SEQ ID NO: 2992002 - DNA, 25 bp, Homo sapien
actctcttgggccagtgcgcacatg

SEQ ID NO: 2992003 - DNA, 25 bp, Homo sapien
tgcctgcctgcggtgtcggtgtgag

SEQ ID NO: 2992004 - DNA, 25 bp, Homo sapien
gggtgaacagagagggcacggcaat

SEQ ID NO: 2992005 - DNA, 25 bp, Homo sapien
gaccagggagagtcctttctgctgg

SEQ ID NO: 2992006 - DNA, 25 bp, Homo sapien
tcggtgtgaggacagggtacgcagc

SEQ ID NO: 2992007 - DNA, 25 bp, Homo sapien
ttttctgtggatctggagaccagct

SEQ ID NO: 2992008 - DNA, 25 bp, Homo sapien
gaatttaggaaccttgaacctgcaa

SEQ ID NO: 2992009 - DNA, 25 bp, Homo sapien
tgagaaaccacgcaaggcagggcgt

SEQ ID NO: 2992010 - DNA, 25 bp, Homo sapien
tccagaggctgtgcgcgttcagaag

SEQ ID NO: 2992011 - DNA, 25 bp, Homo sapien
tggcgggggccgactgcgtgaggga

SEQ ID NO: 2992012 - DNA, 25 bp, Homo sapien
aggtgtccaggacgcgctgcggccg

SEQ ID NO: 2992013 - DNA, 25 bp, Homo sapien
aggaggtgtccaggacgcgctgcgg

SEQ ID NO: 2992014 - DNA, 25 bp, Homo sapien
gatgtgcacgcccttgttggtgggg

SEQ ID NO: 2992015 - DNA, 25 bp, Homo sapien
tgcttggccacatcgttggtcaggc

SEQ ID NO: 2992016 - DNA, 25 bp, Homo sapien
gaaggcaagtctcggctgaccggct

SEQ ID NO: 2992017 - DNA, 25 bp, Homo sapien
acatcttccgtgtccgggggaactg

SEQ ID NO: 2992018 - DNA, 25 bp, Homo sapien
tgcccggccggccagaaggcaagtc

SEQ ID NO: 2992019 - DNA, 25 bp, Homo sapien
tgtttcgttacatggaagctgccca

SEQ ID NO: 2992020 - DNA, 25 bp, Homo sapien
gaagcaacgctctcagtgtccagat

SEQ ID NO: 2992021 - DNA, 25 bp, Homo sapien
gggcagagccaggtaactccgtgct

SEQ ID NO: 2992022 - DNA, 25 bp, Homo sapien
tatgcagcgtacttggatgttcaca

SEQ ID NO: 2992023 - DNA, 25 bp, Homo sapien
tcatgacgggctgggcaaaatagcg

SEQ ID NO: 2992024 - DNA, 25 bp, Homo sapien
ccgtggcggagatgaaacttttgtg

SEQ ID NO: 2992025 - DNA, 25 bp, Homo sapien
cgtctgcaccgtggcggagatgaaa

SEQ ID NO: 2992026 - DNA, 25 bp, Homo sapien
aaatagcgggcgctccagtcgcaga

SEQ ID NO: 2992027 - DNA, 25 bp, Homo sapien
cttggctatttgaggtcacagatag

SEQ ID NO: 2992028 - DNA, 25 bp, Homo sapien
tccagacttcatgtgtagaacagca

SEQ ID NO: 2992029 - DNA, 25 bp, Homo sapien
tagaacagcagagactaaggtgtat

SEQ ID NO: 2992030 - DNA, 25 bp, Homo sapien
tctgggttgcccttgggtctttctc

SEQ ID NO: 2992031 - DNA, 25 bp, Homo sapien
gtaccaatggttgaaaagagtatcc

SEQ ID NO: 2992032 - DNA, 25 bp, Homo sapien
tcttgaaataagatagtgtgaggct

SEQ ID NO: 2992033 - DNA, 25 bp, Homo sapien
tgatctacgcatctaacctttcacc

SEQ ID NO: 2992034 - DNA, 25 bp, Homo sapien
tagtgtgaggcttctaactttgttc

SEQ ID NO: 2992035 - DNA, 25 bp, Homo sapien
tcttctccccgcaacatgaggttga

SEQ ID NO: 2992036 - DNA, 25 bp, Homo sapien
gaatttcgccctctgtaggtacagg

SEQ ID NO: 2992037 - DNA, 25 bp, Homo sapien
catacaggatacagtcttttgagca

SEQ ID NO: 2992038 - DNA, 25 bp, Homo sapien
taacttacgtacagtgaatttcgcc

SEQ ID NO: 2992039 - DNA, 25 bp, Homo sapien
ggctgtttcgcaggaaccgccactc

SEQ ID NO: 2992040 - DNA, 25 bp, Homo sapien
tctccaggtcgtgctcttctgggat

SEQ ID NO: 2992041 - DNA, 25 bp, Homo sapien
ggcctgcctcctgacacggctgttt

SEQ ID NO: 2992042 - DNA, 25 bp, Homo sapien
cttgcggatctgactctccaggtcg

SEQ ID NO: 2992043 - DNA, 25 bp, Homo sapien
ttcatctccaccagccttgatgtgc

SEQ ID NO: 2992044 - DNA, 25 bp, Homo sapien
ctctgggctgcagaaccttgaggag

SEQ ID NO: 2992045 - DNA, 25 bp, Homo sapien
agcttcatctccaccagccttgatg

SEQ ID NO: 2992046 - DNA, 25 bp, Homo sapien
cccactctgggctgcagaaccttga

SEQ ID NO: 2992047 - DNA, 25 bp, Homo sapien
ggacatctgtcctacgggtcatcaa

SEQ ID NO: 2992048 - DNA, 25 bp, Homo sapien
cagtgttttcggtgatcagcagagc

SEQ ID NO: 2992049 - DNA, 25 bp, Homo sapien
tgggaatgcgcttcagaaacgttgc

SEQ ID NO: 2992050 - DNA, 25 bp, Homo sapien
gccaccgtctgcgttaatgcgagat

SEQ ID NO: 2992051 - DNA, 25 bp, Homo sapien
gatgctttaaacctggtctgccgcc

SEQ ID NO: 2992052 - DNA, 25 bp, Homo sapien
gggcagcacgcaccggattgcaaca

SEQ ID NO: 2992053 - DNA, 25 bp, Homo sapien
tggtctgccgccagctcttcagatg

SEQ ID NO: 2992054 - DNA, 25 bp, Homo sapien
accctggctgcaaggttcagcggcg

SEQ ID NO: 2992055 - DNA, 25 bp, Homo sapien
tactaaccgtgtcctcacctgaact

SEQ ID NO: 2992056 - DNA, 25 bp, Homo sapien
cttactaaccgtgtcctcacctgaa

SEQ ID NO: 2992057 - DNA, 25 bp, Homo sapien
aaccgtgtcctcacctgaacttctg

SEQ ID NO: 2992058 - DNA, 25 bp, Homo sapien
tggctcagaggaccgttgcccgcct

SEQ ID NO: 2992059 - DNA, 25 bp, Homo sapien
acaagagtggatccaggagccagca

SEQ ID NO: 2992060 - DNA, 25 bp, Homo sapien
gttcagaaatatttggtcgtccaat

SEQ ID NO: 2992061 - DNA, 25 bp, Homo sapien
cagatgctgtccttgtcggctacgg

SEQ ID NO: 2992062 - DNA, 25 bp, Homo sapien
gaatttcaccacagaggggacgccg

SEQ ID NO: 2992063 - DNA, 25 bp, Homo sapien
atttggtcgtccaatctcgtaatgc

SEQ ID NO: 2992064 - DNA, 25 bp, Homo sapien
gtgtaccgagggttcccattgtgga

SEQ ID NO: 2992065 - DNA, 25 bp, Homo sapien
agaagcgagcagtcctggccgttca

SEQ ID NO: 2992066 - DNA, 25 bp, Homo sapien
atggcagtgaccctcgtgtaccgag

SEQ ID NO: 2992067 - DNA, 25 bp, Homo sapien
ccgttcagatactccatggcagtga

SEQ ID NO: 2992068 - DNA, 25 bp, Homo sapien
agtgctcgctctctcagccaaggaa

SEQ ID NO: 2992069 - DNA, 25 bp, Homo sapien
aaagacgggctttcgacatcggttg

SEQ ID NO: 2992070 - DNA, 25 bp, Homo sapien
tggtctctccgaaaccgctggctga

SEQ ID NO: 2992071 - DNA, 25 bp, Homo sapien
cggtcacgtctgacagctacaggga

SEQ ID NO: 2992072 - DNA, 25 bp, Homo sapien
tcgttggcagcatgtccgagagccc

SEQ ID NO: 2992073 - DNA, 25 bp, Homo sapien
gccacgcggtcaccatctctgggtt

SEQ ID NO: 2992074 - DNA, 25 bp, Homo sapien
cgtcgttggcagcatgtccgagagc

SEQ ID NO: 2992075 - DNA, 25 bp, Homo sapien
gagcccctgccacgcggtcaccatc

SEQ ID NO: 2992076 - DNA, 25 bp, Homo sapien
tctgagcatcgccaagggctgcagg

SEQ ID NO: 2992077 - DNA, 25 bp, Homo sapien
caggatccgctgaagagcgatgact

SEQ ID NO: 2992078 - DNA, 25 bp, Homo sapien
gggtaacgcgttcactctgagcatc

SEQ ID NO: 2992079 - DNA, 25 bp, Homo sapien
agaaatcacaaaccggcaggagccg

SEQ ID NO: 2992080 - DNA, 25 bp, Homo sapien
tcttaatgccgtctgcgcctcttca

SEQ ID NO: 2992081 - DNA, 25 bp, Homo sapien
ccttttctatatggcatcagctgtc

SEQ ID NO: 2992082 - DNA, 25 bp, Homo sapien
tgccaatctccacaatgatgagtct

SEQ ID NO: 2992083 - DNA, 25 bp, Homo sapien
ttccctagtgcgcagaggtaccctg

SEQ ID NO: 2992084 - DNA, 25 bp, Homo sapien
tgaggttttcctgcttacgcacgct

SEQ ID NO: 2992085 - DNA, 25 bp, Homo sapien
gaggatttatctggcccaagacaca

SEQ ID NO: 2992086 - DNA, 25 bp, Homo sapien
agtaaaagcatcgtctgcccctgcg

SEQ ID NO: 2992087 - DNA, 25 bp, Homo sapien
aactaaccccgtcatttgagctgcc

SEQ ID NO: 2992088 - DNA, 25 bp, Homo sapien
ccggacgatccgcacgtctcctgag

SEQ ID NO: 2992089 - DNA, 25 bp, Homo sapien
tctgtgtcccagatccggacgatcc

SEQ ID NO: 2992090 - DNA, 25 bp, Homo sapien
tgtgtcccagatccggacgatccgc

SEQ ID NO: 2992091 - DNA, 25 bp, Homo sapien
ggacgatccgcacgtctcctgagct

SEQ ID NO: 2992092 - DNA, 25 bp, Homo sapien
ctctaagcccccactggtgaccaga

SEQ ID NO: 2992093 - DNA, 25 bp, Homo sapien
cctgggcctctaagcccccactggt

SEQ ID NO: 2992094 - DNA, 25 bp, Homo sapien
gcctctaagcccccactggtgacca

SEQ ID NO: 2992095 - DNA, 25 bp, Homo sapien
tgggcctctaagcccccactggtga

SEQ ID NO: 2992096 - DNA, 25 bp, Homo sapien
accgaggccagccacgatgagtgag

SEQ ID NO: 2992097 - DNA, 25 bp, Homo sapien
gtgggaatcacaggacagactcgtc

SEQ ID NO: 2992098 - DNA, 25 bp, Homo sapien
acacagctgtctgcgcccgtaggga

SEQ ID NO: 2992099 - DNA, 25 bp, Homo sapien
gccatccttctgtcgtagacgcgga

SEQ ID NO: 2992100 - DNA, 25 bp, Homo sapien
cacactcacgatgtggccgtcggga

SEQ ID NO: 2992101 - DNA, 25 bp, Homo sapien
gccgtcgggacgcttctgcagggag

SEQ ID NO: 2992102 - DNA, 25 bp, Homo sapien
ctcacactcacgatgtggccgtcgg

SEQ ID NO: 2992103 - DNA, 25 bp, Homo sapien
cactcacgatgtggccgtcgggacg

SEQ ID NO: 2992104 - DNA, 25 bp, Homo sapien
gtcagccccttcacgatctgaagca

SEQ ID NO: 2992105 - DNA, 25 bp, Homo sapien
gaagcacatttaccgactcaggcat

SEQ ID NO: 2992106 - DNA, 25 bp, Homo sapien
gggtggatgtccagggccgtcagcc

SEQ ID NO: 2992107 - DNA, 25 bp, Homo sapien
aaagatgcgcacatctccattgacg

SEQ ID NO: 2992108 - DNA, 25 bp, Homo sapien
gcccatgaagccgtcgtagtacttg

SEQ ID NO: 2992109 - DNA, 25 bp, Homo sapien
atgagctctccgctgctgttgtaga

SEQ ID NO: 2992110 - DNA, 25 bp, Homo sapien
tgtagatggcggtgaactgattgac

SEQ ID NO: 2992111 - DNA, 25 bp, Homo sapien
gaagccgtcgtagtacttgatgttg

SEQ ID NO: 2992112 - DNA, 25 bp, Homo sapien
tacacggagatgtagtagtcgttgc

SEQ ID NO: 2992113 - DNA, 25 bp, Homo sapien
tagtcgttgcttcccacggccaggt

SEQ ID NO: 2992114 - DNA, 25 bp, Homo sapien
ttctccaccgagtacacggagatgt

SEQ ID NO: 2992115 - DNA, 25 bp, Homo sapien
gagatgtagtagtcgttgcttccca

SEQ ID NO: 2992116 - DNA, 25 bp, Homo sapien
aagattctggtgttgccgcctggca

SEQ ID NO: 2992117 - DNA, 25 bp, Homo sapien
aaccttcttctggtgggagctcgca

SEQ ID NO: 2992118 - DNA, 25 bp, Homo sapien
tagataatgagcctctaggccggcg

SEQ ID NO: 2992119 - DNA, 25 bp, Homo sapien
ttcactatgtacagcaggcggccgt

SEQ ID NO: 2992120 - DNA, 25 bp, Homo sapien
tgggatcctgctgtgagcggcacca

SEQ ID NO: 2992121 - DNA, 25 bp, Homo sapien
aaagggcgagtgcttggttcccaag

SEQ ID NO: 2992122 - DNA, 25 bp, Homo sapien
attcggagcgctctctgcacagcta

SEQ ID NO: 2992123 - DNA, 25 bp, Homo sapien
gagagaacccacgagcttgggagct

SEQ ID NO: 2992124 - DNA, 25 bp, Homo sapien
cgactttgctcttgttggggtggaa

SEQ ID NO: 2992125 - DNA, 25 bp, Homo sapien
caggtgtacgactttgctcttgttg

SEQ ID NO: 2992126 - DNA, 25 bp, Homo sapien
ctcaggtgtacgactttgctcttgt

SEQ ID NO: 2992127 - DNA, 25 bp, Homo sapien
ggtgtacgactttgctcttgttggg

SEQ ID NO: 2992128 - DNA, 25 bp, Homo sapien
tggcaccgactttgcccccgctgca

SEQ ID NO: 2992129 - DNA, 25 bp, Homo sapien
tgcagacgtggcaccgactttgccc

SEQ ID NO: 2992130 - DNA, 25 bp, Homo sapien
acgtggcaccgactttgcccccgct

SEQ ID NO: 2992131 - DNA, 25 bp, Homo sapien
gtgcagacgtggcaccgactttgcc

SEQ ID NO: 2992132 - DNA, 25 bp, Homo sapien
gttgccttggcaatgtcatcaccag

SEQ ID NO: 2992133 - DNA, 25 bp, Homo sapien
cggttgccttggcaatgtcatcacc

SEQ ID NO: 2992134 - DNA, 25 bp, Homo sapien
ggttgccttggcaatgtcatcacca

SEQ ID NO: 2992135 - DNA, 25 bp, Homo sapien
ttgccttggcaatgtcatcaccagc

SEQ ID NO: 2992136 - DNA, 25 bp, Homo sapien
ctgtaatcctcagaccaccagtcac

SEQ ID NO: 2992137 - DNA, 25 bp, Homo sapien
tcctggcagttccttgagggcgttg

SEQ ID NO: 2992138 - DNA, 25 bp, Homo sapien
tctcctggcagttccttgagggcgt

SEQ ID NO: 2992139 - DNA, 25 bp, Homo sapien
ctggcagttccttgagggcgttgat

SEQ ID NO: 2992140 - DNA, 25 bp, Homo sapien
gtctcctggcagttccttgagggcg

SEQ ID NO: 2992141 - DNA, 25 bp, Homo sapien
tcagtgccacatctgtggagcaatg

SEQ ID NO: 2992142 - DNA, 25 bp, Homo sapien
gtgccacatctgtggagcaatgttg

SEQ ID NO: 2992143 - DNA, 25 bp, Homo sapien
cagtgccacatctgtggagcaatgt

SEQ ID NO: 2992144 - DNA, 25 bp, Homo sapien
gccacatctgtggagcaatgttgac

SEQ ID NO: 2992145 - DNA, 25 bp, Homo sapien
tccccggcaccattgttgatgtcat

SEQ ID NO: 2992146 - DNA, 25 bp, Homo sapien
tagctgggcattccccggcaccatt

SEQ ID NO: 2992147 - DNA, 25 bp, Homo sapien
ggcattccccggcaccattgttgat

SEQ ID NO: 2992148 - DNA, 25 bp, Homo sapien
atggaggccatcagcattgcagccc

SEQ ID NO: 2992149 - DNA, 25 bp, Homo sapien
ctgggtgcaggaactgaccaatgca

SEQ ID NO: 2992150 - DNA, 25 bp, Homo sapien
gaccaatgcagtcaccagtggagga

SEQ ID NO: 2992151 - DNA, 25 bp, Homo sapien
gcaccaatgacgtggacatgacatc

SEQ ID NO: 2992152 - DNA, 25 bp, Homo sapien
aaagggccttttgccgtgttgcagg

SEQ ID NO: 2992153 - DNA, 25 bp, Homo sapien
atatgttatatggaggaacctgccc

SEQ ID NO: 2992154 - DNA, 25 bp, Homo sapien
atcatctccaactgaggtcccattc

SEQ ID NO: 2992155 - DNA, 25 bp, Homo sapien
ggacaatatgttatatggaggaacc

SEQ ID NO: 2992156 - DNA, 25 bp, Homo sapien
caacaccacccacattaactaatta

SEQ ID NO: 2992157 - DNA, 25 bp, Homo sapien
gctttcatagactgtccatcttttt

SEQ ID NO: 2992158 - DNA, 25 bp, Homo sapien
tgacccctgtggcactctctgctcc

SEQ ID NO: 2992159 - DNA, 25 bp, Homo sapien
taagctttcatagactgtccatctt

SEQ ID NO: 2992160 - DNA, 25 bp, Homo sapien
atttaagctttcatagactgtccat

SEQ ID NO: 2992161 - DNA, 25 bp, Homo sapien
ttcgggcccgggatgttctaaatga

SEQ ID NO: 2992162 - DNA, 25 bp, Homo sapien
ctggatgttagggcccgcgatgttc

SEQ ID NO: 2992163 - DNA, 25 bp, Homo sapien
cgatgttcgggcccgggatgttcta

SEQ ID NO: 2992164 - DNA, 25 bp, Homo sapien
cgggatgttctaaatgacgtgtttc

SEQ ID NO: 2992165 - DNA, 25 bp, Homo sapien
accaagtccaatcgccaccgccgcc

SEQ ID NO: 2992166 - DNA, 25 bp, Homo sapien
ccaccaagtccaatcgccaccgccg

SEQ ID NO: 2992167 - DNA, 25 bp, Homo sapien
caagtccaatcgccaccgccgcccc

SEQ ID NO: 2992168 - DNA, 25 bp, Homo sapien
acccaccaagtccaatcgccaccgc

SEQ ID NO: 2992169 - DNA, 25 bp, Homo sapien
tccgtgacgcggctctgcttcttgc

SEQ ID NO: 2992170 - DNA, 25 bp, Homo sapien
gctctgcttcttgcggccgaacagg

SEQ ID NO: 2992171 - DNA, 25 bp, Homo sapien
ggccttgtcctgctccgtgacgcgg

SEQ ID NO: 2992172 - DNA, 25 bp, Homo sapien
ttcttgcggccgaacaggttaccca

SEQ ID NO: 2992173 - DNA, 25 bp, Homo sapien
tcggccgctcctcggaccagggcag

SEQ ID NO: 2992174 - DNA, 25 bp, Homo sapien
gctcctcggaccagggcagacttcc

SEQ ID NO: 2992175 - DNA, 25 bp, Homo sapien
gccgctcctcggaccagggcagact

SEQ ID NO: 2992176 - DNA, 25 bp, Homo sapien
ctgtcggccgctcctcggaccaggg

SEQ ID NO: 2992177 - DNA, 25 bp, Homo sapien
acagtgacccttggcaagtggaaag

SEQ ID NO: 2992178 - DNA, 25 bp, Homo sapien
cagcccgcaacacgggtctgcacag

SEQ ID NO: 2992179 - DNA, 25 bp, Homo sapien
ccacagtgacccttggcaagtggaa

SEQ ID NO: 2992180 - DNA, 25 bp, Homo sapien
ggcagcccgcaacacgggtctgcac

SEQ ID NO: 2992181 - DNA, 25 bp, Homo sapien
gttttccaaacgtcatcacttcaga

SEQ ID NO: 2992182 - DNA, 25 bp, Homo sapien
cccgtgcaggcacagggattatggc

SEQ ID NO: 2992183 - DNA, 25 bp, Homo sapien
tctcatctgtgtgccgtcccagaga

SEQ ID NO: 2992184 - DNA, 25 bp, Homo sapien
agtcctgctctatcaggtccttaag

SEQ ID NO: 2992185 - DNA, 25 bp, Homo sapien
gctgtgggtccaccctcgaggctgc

SEQ ID NO: 2992186 - DNA, 25 bp, Homo sapien
gaagaccaccgtggcattgctgtgg

SEQ ID NO: 2992187 - DNA, 25 bp, Homo sapien
gggaagaccaccgtggcattgctgt

SEQ ID NO: 2992188 - DNA, 25 bp, Homo sapien
gcattgctgtgggtccaccctcgag

SEQ ID NO: 2992189 - DNA, 25 bp, Homo sapien
tcttctggtactgcctcagcttgtc

SEQ ID NO: 2992190 - DNA, 25 bp, Homo sapien
tgctgggcgatcctcttctggtact

SEQ ID NO: 2992191 - DNA, 25 bp, Homo sapien
gcgatcctcttctggtactgcctca

SEQ ID NO: 2992192 - DNA, 25 bp, Homo sapien
tccttcctgccgtcccgcagcagct

SEQ ID NO: 2992193 - DNA, 25 bp, Homo sapien
tgctcctggtatcgcttcttcttga

SEQ ID NO: 2992194 - DNA, 25 bp, Homo sapien
gagctgctcctggtatcgcttcttc

SEQ ID NO: 2992195 - DNA, 25 bp, Homo sapien
gctgctcctggtatcgcttcttctt

SEQ ID NO: 2992196 - DNA, 25 bp, Homo sapien
ggagctgctcctggtatcgcttctt

SEQ ID NO: 2992197 - DNA, 25 bp, Homo sapien
ctggtgcatcttgttcagacactca

SEQ ID NO: 2992198 - DNA, 25 bp, Homo sapien
tctgggtgaactcaatactctgaac

SEQ ID NO: 2992199 - DNA, 25 bp, Homo sapien
agacactcatttccaaactgcagcc

SEQ ID NO: 2992200 - DNA, 25 bp, Homo sapien
tcatttcgatctgggtgaactcaat

SEQ ID NO: 2992201 - DNA, 25 bp, Homo sapien
ctcctgcgtctcgtccaggatcctc

SEQ ID NO: 2992202 - DNA, 25 bp, Homo sapien
acggcctcctgcgtctcgtccagga

SEQ ID NO: 2992203 - DNA, 25 bp, Homo sapien
cggcctcctgcgtctcgtccaggat

SEQ ID NO: 2992204 - DNA, 25 bp, Homo sapien
gcctcctgcgtctcgtccaggatcc

SEQ ID NO: 2992205 - DNA, 25 bp, Homo sapien
ctgagtgattgcgctcagctcctcc

SEQ ID NO: 2992206 - DNA, 25 bp, Homo sapien
ttcctgccaggagctcgtctatttg

SEQ ID NO: 2992207 - DNA, 25 bp, Homo sapien
tcatcctcctgagtgaagcttcctg

SEQ ID NO: 2992208 - DNA, 25 bp, Homo sapien
gctcctccaggatggcgtcttcatc

SEQ ID NO: 2992209 - DNA, 25 bp, Homo sapien
ggaacctctggcagctctatttgtt

SEQ ID NO: 2992210 - DNA, 25 bp, Homo sapien
gaatccacttttctcctgcgaattc

SEQ ID NO: 2992211 - DNA, 25 bp, Homo sapien
tatgaggttgcccagttaccgaacc

SEQ ID NO: 2992212 - DNA, 25 bp, Homo sapien
tcctgcgaattccaaccattcaaaa

SEQ ID NO: 2992213 - DNA, 25 bp, Homo sapien
gaaggcctgggagcattctgtcttg

SEQ ID NO: 2992214 - DNA, 25 bp, Homo sapien
caaacaggaagccaatggggctgac

SEQ ID NO: 2992215 - DNA, 25 bp, Homo sapien
aaacaggaagccaatggggctgaca

SEQ ID NO: 2992216 - DNA, 25 bp, Homo sapien
cacaggggtggcaagggccagttcc

SEQ ID NO: 2992217 - DNA, 25 bp, Homo sapien
ttcgcactagggaagggcacgccca

SEQ ID NO: 2992218 - DNA, 25 bp, Homo sapien
cctccagagagggacgaggccacag

SEQ ID NO: 2992219 - DNA, 25 bp, Homo sapien
gccagttccggggacttcgcactag

SEQ ID NO: 2992220 - DNA, 25 bp, Homo sapien
gaaacagagatgtttatgacacgcc

SEQ ID NO: 2992221 - DNA, 25 bp, Homo sapien
tgggcctggccttgacagggacgtt

SEQ ID NO: 2992222 - DNA, 25 bp, Homo sapien
agtgcgttcaggctcaaggtctcca

SEQ ID NO: 2992223 - DNA, 25 bp, Homo sapien
ccaaggtctggaggtgtcttcctca

SEQ ID NO: 2992224 - DNA, 25 bp, Homo sapien
ttaatccggactgagagcaggccag

SEQ ID NO: 2992225 - DNA, 25 bp, Homo sapien
tggccgtgacccaaactctctgtgg

SEQ ID NO: 2992226 - DNA, 25 bp, Homo sapien
taacggaagcctgcaccagctaatg

SEQ ID NO: 2992227 - DNA, 25 bp, Homo sapien
gaccccttaacggaagcctgcacca

SEQ ID NO: 2992228 - DNA, 25 bp, Homo sapien
tgcaccagctaatgggagcagcgag

SEQ ID NO: 2992229 - DNA, 25 bp, Homo sapien
gaagcctgcaccagctaatgggagc

SEQ ID NO: 2992230 - DNA, 25 bp, Homo sapien
tctcggagtcgtcaattcagcaaga

SEQ ID NO: 2992231 - DNA, 25 bp, Homo sapien
agggctctcggagtcgtcaattcag

SEQ ID NO: 2992232 - DNA, 25 bp, Homo sapien
acagagccgtgagtggcaaggcggg

SEQ ID NO: 2992233 - DNA, 25 bp, Homo sapien
gctgagccctagtggacagagccgt

SEQ ID NO: 2992234 - DNA, 25 bp, Homo sapien
ggtctcgcagttccatgagccccag

SEQ ID NO: 2992235 - DNA, 25 bp, Homo sapien
acctgccggagcagcgtctcccaag

SEQ ID NO: 2992236 - DNA, 25 bp, Homo sapien
tcccgggtctcgcagttccatgagc

SEQ ID NO: 2992237 - DNA, 25 bp, Homo sapien
gagggtcccgggtctcgcagttcca

SEQ ID NO: 2992238 - DNA, 25 bp, Homo sapien
gagatcgtctcataaccaaaccagc

SEQ ID NO: 2992239 - DNA, 25 bp, Homo sapien
gtcccagcgagatcgtctcataacc

SEQ ID NO: 2992240 - DNA, 25 bp, Homo sapien
tgcagggccaactttaatacgggcc

SEQ ID NO: 2992241 - DNA, 25 bp, Homo sapien
ctttaatacgggccggcctgtctgg

SEQ ID NO: 2992242 - DNA, 25 bp, Homo sapien
ggcaggagccctccagtgagcgtcc

SEQ ID NO: 2992243 - DNA, 25 bp, Homo sapien
aggattacacacagccacgcgaggg

SEQ ID NO: 2992244 - DNA, 25 bp, Homo sapien
gagcttccatctcacgtgtgcagag

SEQ ID NO: 2992245 - DNA, 25 bp, Homo sapien
acagagggagccacgcctaggtgcc

SEQ ID NO: 2992246 - DNA, 25 bp, Homo sapien
cctgaccaggaacttggcacaaggg

SEQ ID NO: 2992247 - DNA, 25 bp, Homo sapien
aagcccctgggttctaatggaggca

SEQ ID NO: 2992248 - DNA, 25 bp, Homo sapien
cacagaacacggctgagtagtagtc

SEQ ID NO: 2992249 - DNA, 25 bp, Homo sapien
gcaaagtcctgccacaaaatgccgc

SEQ ID NO: 2992250 - DNA, 25 bp, Homo sapien
ggaatcagctcaaggtcactctggg

SEQ ID NO: 2992251 - DNA, 25 bp, Homo sapien
tccgggcagactcttgcgaggtcca

SEQ ID NO: 2992252 - DNA, 25 bp, Homo sapien
ccaatgccagagttgggaatcagct

SEQ ID NO: 2992253 - DNA, 25 bp, Homo sapien
acataaccaggagccggccagccag

SEQ ID NO: 2992254 - DNA, 25 bp, Homo sapien
cttttaacagtatcgagtgggacct

SEQ ID NO: 2992255 - DNA, 25 bp, Homo sapien
tgacagcagcacaaaacggacagag

SEQ ID NO: 2992256 - DNA, 25 bp, Homo sapien
gacccaaaggattctgcggccaagt

SEQ ID NO: 2992257 - DNA, 25 bp, Homo sapien
tgtccagtaccgtgagccagttgat

SEQ ID NO: 2992258 - DNA, 25 bp, Homo sapien
cagaagcgtctttacccgaggttgg

SEQ ID NO: 2992259 - DNA, 25 bp, Homo sapien
tgtgcatcgacgaacagcaagggcg

SEQ ID NO: 2992260 - DNA, 25 bp, Homo sapien
aagggacaagcgtttggcacgtgac

SEQ ID NO: 2992261 - DNA, 25 bp, Homo sapien
ggttacacgagtccacatgtgctga

SEQ ID NO: 2992262 - DNA, 25 bp, Homo sapien
tgtatggcaggcgagtaatatctca

SEQ ID NO: 2992263 - DNA, 25 bp, Homo sapien
tttgtcaatacacgcaggacccctg

SEQ ID NO: 2992264 - DNA, 25 bp, Homo sapien
ttaggtgaacgtcagaacagacccc

SEQ ID NO: 2992265 - DNA, 25 bp, Homo sapien
ttcccttgcgggatcatcgttgccg

SEQ ID NO: 2992266 - DNA, 25 bp, Homo sapien
gccacctccacagctttggtttact

SEQ ID NO: 2992267 - DNA, 25 bp, Homo sapien
cacctccacagctttggtttactgg

SEQ ID NO: 2992268 - DNA, 25 bp, Homo sapien
ggccacctccacagctttggtttac

SEQ ID NO: 2992269 - DNA, 25 bp, Homo sapien
cctccacagctttggtttactggtt

SEQ ID NO: 2992270 - DNA, 25 bp, Homo sapien
gttagttccaaccacaaagttctgc

SEQ ID NO: 2992271 - DNA, 25 bp, Homo sapien
ccccacacaggtgcagctcgggtgg

SEQ ID NO: 2992272 - DNA, 25 bp, Homo sapien
caaggtttctatgggagttttagct

SEQ ID NO: 2992273 - DNA, 25 bp, Homo sapien
ttctgtgcagttccgtaactgaggc

SEQ ID NO: 2992274 - DNA, 25 bp, Homo sapien
ggtgagccacgaacttgacatcggt

SEQ ID NO: 2992275 - DNA, 25 bp, Homo sapien
gccacgaacttgacatcggtgacct

SEQ ID NO: 2992276 - DNA, 25 bp, Homo sapien
ggagggtgagccacgaacttgacat

SEQ ID NO: 2992277 - DNA, 25 bp, Homo sapien
acgaacttgacatcggtgaccttca

SEQ ID NO: 2992278 - DNA, 25 bp, Homo sapien
tgtacctgcgggtgccgcttcgcat

SEQ ID NO: 2992279 - DNA, 25 bp, Homo sapien
tcatttaccgcctgaaacgttgtct

SEQ ID NO: 2992280 - DNA, 25 bp, Homo sapien
gcttcgcatgccgtcagggaggacc

SEQ ID NO: 2992281 - DNA, 25 bp, Homo sapien
ggaggacccagacgtctccatgctg

SEQ ID NO: 2992282 - DNA, 25 bp, Homo sapien
gaggccactgtctctaaggcaggga

SEQ ID NO: 2992283 - DNA, 25 bp, Homo sapien
tgaggccactgtctctaaggcaggg

SEQ ID NO: 2992284 - DNA, 25 bp, Homo sapien
tggccatagccagggagatgcattg

SEQ ID NO: 2992285 - DNA, 25 bp, Homo sapien
cgcagagagtacgtggcccgtgatg

SEQ ID NO: 2992286 - DNA, 25 bp, Homo sapien
gcagccatagtgttggccagacttc

SEQ ID NO: 2992287 - DNA, 25 bp, Homo sapien
agatgcattgctgcccatccgggca

SEQ ID NO: 2992288 - DNA, 25 bp, Homo sapien
taaatgtcacgtgggatcctgggtg

SEQ ID NO: 2992289 - DNA, 25 bp, Homo sapien
aatgtcacgtgggatcctgggtggg

SEQ ID NO: 2992290 - DNA, 25 bp, Homo sapien
cctaaatgtcacgtgggatcctggg

SEQ ID NO: 2992291 - DNA, 25 bp, Homo sapien
tccctaaatgtcacgtgggatcctg

SEQ ID NO: 2992292 - DNA, 25 bp, Homo sapien
tggatgggacattccgaagagctcc

SEQ ID NO: 2992293 - DNA, 25 bp, Homo sapien
tctgagcaccctctaagtggaggac

SEQ ID NO: 2992294 - DNA, 25 bp, Homo sapien
cataaacagcgcagagaatgggacc

SEQ ID NO: 2992295 - DNA, 25 bp, Homo sapien
catcatttggcataggcgggcccgg

SEQ ID NO: 2992296 - DNA, 25 bp, Homo sapien
tgtggggtcaggagtcccgctcctt

SEQ ID NO: 2992297 - DNA, 25 bp, Homo sapien
cacacttcggctttgtccagcataa

SEQ ID NO: 2992298 - DNA, 25 bp, Homo sapien
ttgccgcgggaagcctggctcagcc

SEQ ID NO: 2992299 - DNA, 25 bp, Homo sapien
ccacctccagcacacttcggctttg

SEQ ID NO: 2992300 - DNA, 25 bp, Homo sapien
atggcagcgttaccagcaccaatgg

SEQ ID NO: 2992301 - DNA, 25 bp, Homo sapien
tggcagcgttaccagcaccaatggc

SEQ ID NO: 2992302 - DNA, 25 bp, Homo sapien
caatggcagcgttaccagcaccaat

SEQ ID NO: 2992303 - DNA, 25 bp, Homo sapien
aatggcagcgttaccagcaccaatg

SEQ ID NO: 2992304 - DNA, 25 bp, Homo sapien
ttaggagggcactcttgtcccgacg

SEQ ID NO: 2992305 - DNA, 25 bp, Homo sapien
ggtaggtttcgcaatccagactgtg

SEQ ID NO: 2992306 - DNA, 25 bp, Homo sapien
tcaagcaagctgttctcctggcaag

SEQ ID NO: 2992307 - DNA, 25 bp, Homo sapien
tgaaggaaaccatcgactgagcgga

SEQ ID NO: 2992308 - DNA, 25 bp, Homo sapien
tgcagaacaagggcaagaaactcgg

SEQ ID NO: 2992309 - DNA, 25 bp, Homo sapien
gaacaagggcaagaaactcggtgcc

SEQ ID NO: 2992310 - DNA, 25 bp, Homo sapien
caagggcaagaaactcggtgcccgc

SEQ ID NO: 2992311 - DNA, 25 bp, Homo sapien
cagaacaagggcaagaaactcggtg

SEQ ID NO: 2992312 - DNA, 25 bp, Homo sapien
cgcggccgatgacaggcgcagagca

SEQ ID NO: 2992313 - DNA, 25 bp, Homo sapien
gcggccgatgacaggcgcagagcag

SEQ ID NO: 2992314 - DNA, 25 bp, Homo sapien
caggtggctgaatgcgggctggagg

SEQ ID NO: 2992315 - DNA, 25 bp, Homo sapien
cagtggctcagcagtctcggtgcct

SEQ ID NO: 2992316 - DNA, 25 bp, Homo sapien
aagacggttatccatgctgtacatg

SEQ ID NO: 2992317 - DNA, 25 bp, Homo sapien
gaggccttccctgagaagacggtta

SEQ ID NO: 2992318 - DNA, 25 bp, Homo sapien
tggatcccgctccaccttctagaag

SEQ ID NO: 2992319 - DNA, 25 bp, Homo sapien
tggcctgcacatcgttgcgctactc

SEQ ID NO: 2992320 - DNA, 25 bp, Homo sapien
gagaggtaggcttctccggaaaagc

SEQ ID NO: 2992321 - DNA, 25 bp, Homo sapien
ccagcgttacttcctgagctggcct

SEQ ID NO: 2992322 - DNA, 25 bp, Homo sapien
tctgctcgcctggaggaaagttgaa

SEQ ID NO: 2992323 - DNA, 25 bp, Homo sapien
cgggctcaggccgatggaaagacca

SEQ ID NO: 2992324 - DNA, 25 bp, Homo sapien
agaaagctcgctcaaactggcccta

SEQ ID NO: 2992325 - DNA, 25 bp, Homo sapien
gacagacgtccactggcctgagttg

SEQ ID NO: 2992326 - DNA, 25 bp, Homo sapien
acagagcccggcgtccggcggcggc

SEQ ID NO: 2992327 - DNA, 25 bp, Homo sapien
accacagagcccggcgtccggcggc

SEQ ID NO: 2992328 - DNA, 25 bp, Homo sapien
agagcccggcgtccggcggcggcca

SEQ ID NO: 2992329 - DNA, 25 bp, Homo sapien
gaaccacagagcccggcgtccggcg

SEQ ID NO: 2992330 - DNA, 25 bp, Homo sapien
ggtaacggcagcaggacggagacga

SEQ ID NO: 2992331 - DNA, 25 bp, Homo sapien
cagcaggacggagacgaaagcggac

SEQ ID NO: 2992332 - DNA, 25 bp, Homo sapien
taacggcagcaggacggagacgaaa

SEQ ID NO: 2992333 - DNA, 25 bp, Homo sapien
gcaggacggagacgaaagcggaccc

SEQ ID NO: 2992334 - DNA, 25 bp, Homo sapien
cattttccgtgagccggtgcatctc

SEQ ID NO: 2992335 - DNA, 25 bp, Homo sapien
cttatagacattttccgtgagccgg

SEQ ID NO: 2992336 - DNA, 25 bp, Homo sapien
tatagacattttccgtgagccggtg

SEQ ID NO: 2992337 - DNA, 25 bp, Homo sapien
tagacattttccgtgagccggtgca

SEQ ID NO: 2992338 - DNA, 25 bp, Homo sapien
aactctcaccacgaaagttcctgct

SEQ ID NO: 2992339 - DNA, 25 bp, Homo sapien
ccacgaaagttcctgctttctggtt

SEQ ID NO: 2992340 - DNA, 25 bp, Homo sapien
tctcaccacgaaagttcctgctttc

SEQ ID NO: 2992341 - DNA, 25 bp, Homo sapien
gccaactctcaccacgaaagttcct

SEQ ID NO: 2992342 - DNA, 25 bp, Homo sapien
gtgggccaatggcactatgcccaga

SEQ ID NO: 2992343 - DNA, 25 bp, Homo sapien
atattctaggacaggctgtgggcca

SEQ ID NO: 2992344 - DNA, 25 bp, Homo sapien
tgtgggccaatggcactatgcccag

SEQ ID NO: 2992345 - DNA, 25 bp, Homo sapien
ctgtgggccaatggcactatgccca

SEQ ID NO: 2992346 - DNA, 25 bp, Homo sapien
acggcagccggtctttgtgccctgg

SEQ ID NO: 2992347 - DNA, 25 bp, Homo sapien
caccctgcggcaagatggtgcccat

SEQ ID NO: 2992348 - DNA, 25 bp, Homo sapien
gccaacaaccggcaggacagtgcct

SEQ ID NO: 2992349 - DNA, 25 bp, Homo sapien
cgagggcgggtaacacagacatgca

SEQ ID NO: 2992350 - DNA, 25 bp, Homo sapien
cccttgttgcaggaccaacaccaag

SEQ ID NO: 2992351 - DNA, 25 bp, Homo sapien
ttgttgcaggaccaacaccaagagc

SEQ ID NO: 2992352 - DNA, 25 bp, Homo sapien
ctttctggtccccttgttgcaggac

SEQ ID NO: 2992353 - DNA, 25 bp, Homo sapien
ggtccccttgttgcaggaccaacac

SEQ ID NO: 2992354 - DNA, 25 bp, Homo sapien
attccaccattcacgtcctgcgact

SEQ ID NO: 2992355 - DNA, 25 bp, Homo sapien
ttcacgtcctgcgactcccactggg

SEQ ID NO: 2992356 - DNA, 25 bp, Homo sapien
gcagccatgacaagcaggcggtcac

SEQ ID NO: 2992357 - DNA, 25 bp, Homo sapien
tgtgctaccccagcgcattccacca

SEQ ID NO: 2992358 - DNA, 25 bp, Homo sapien
cacacgggacggtgcattccggctg

SEQ ID NO: 2992359 - DNA, 25 bp, Homo sapien
tgccagctgactgctcgtccaatag

SEQ ID NO: 2992360 - DNA, 25 bp, Homo sapien
caatagaatcagctgtccccatgga

SEQ ID NO: 2992361 - DNA, 25 bp, Homo sapien
gggacggtgcattccggctgccttt

SEQ ID NO: 2992362 - DNA, 25 bp, Homo sapien
tcttacttggtttgagtcggagaca

SEQ ID NO: 2992363 - DNA, 25 bp, Homo sapien
gtcctgtcccctctaaacacttgga

SEQ ID NO: 2992364 - DNA, 25 bp, Homo sapien
gatcttgaactgcatcttacttggt

SEQ ID NO: 2992365 - DNA, 25 bp, Homo sapien
cacacacaggagcaccgatgagctc

SEQ ID NO: 2992366 - DNA, 25 bp, Homo sapien
tcagagcttgctgtccgggggccac

SEQ ID NO: 2992367 - DNA, 25 bp, Homo sapien
ggccacaggctcagttcccttggct

SEQ ID NO: 2992368 - DNA, 25 bp, Homo sapien
gggccacaggctcagttcccttggc

SEQ ID NO: 2992369 - DNA, 25 bp, Homo sapien
tcgcgggaggacacctcagagcttg

SEQ ID NO: 2992370 - DNA, 25 bp, Homo sapien
cgcgacaggcagaagccggtggcag

SEQ ID NO: 2992371 - DNA, 25 bp, Homo sapien
tgtcgcgacaggcagaagccggtgg

SEQ ID NO: 2992372 - DNA, 25 bp, Homo sapien
tcgcgacaggcagaagccggtggca

SEQ ID NO: 2992373 - DNA, 25 bp, Homo sapien
ctgtcgcgacaggcagaagccggtg

SEQ ID NO: 2992374 - DNA, 25 bp, Homo sapien
tccctcgcccacggaccagcacagc

SEQ ID NO: 2992375 - DNA, 25 bp, Homo sapien
caggccgctgttgcccactggacca

SEQ ID NO: 2992376 - DNA, 25 bp, Homo sapien
ccctcgcccacggaccagcacagct

SEQ ID NO: 2992377 - DNA, 25 bp, Homo sapien
aggccgctgttgcccactggaccac

SEQ ID NO: 2992378 - DNA, 25 bp, Homo sapien
gggacacgctgtgccatcctcaaga

SEQ ID NO: 2992379 - DNA, 25 bp, Homo sapien
ccaggagagagaaaccgcacaagaa

SEQ ID NO: 2992380 - DNA, 25 bp, Homo sapien
acaagaaaataacctcaagccctca

SEQ ID NO: 2992381 - DNA, 25 bp, Homo sapien
gacagaaatcctacaccatgagcaa

SEQ ID NO: 2992382 - DNA, 25 bp, Homo sapien
tcagacgcccagacgccctgacagt

SEQ ID NO: 2992383 - DNA, 25 bp, Homo sapien
tccgagtcactgagcgagtgtatct

SEQ ID NO: 2992384 - DNA, 25 bp, Homo sapien
gagcgagtgtatctttttgcaggat

SEQ ID NO: 2992385 - DNA, 25 bp, Homo sapien
cgacgtggcttttccgagtcactga

SEQ ID NO: 2992386 - DNA, 25 bp, Homo sapien
gggcagcaccaaggtttcgcttcct

SEQ ID NO: 2992387 - DNA, 25 bp, Homo sapien
gctgagctcacacggaaggaatgca

SEQ ID NO: 2992388 - DNA, 25 bp, Homo sapien
tcacacggaaggaatgcaggagaca

SEQ ID NO: 2992389 - DNA, 25 bp, Homo sapien
tttcgcttccttagtgcagcagctg

SEQ ID NO: 2992390 - DNA, 25 bp, Homo sapien
gctcagccacctcccgtgtcttccg

SEQ ID NO: 2992391 - DNA, 25 bp, Homo sapien
cgtgtcttccggtcatttgttatga

SEQ ID NO: 2992392 - DNA, 25 bp, Homo sapien
gtcatttgttatgatgtgatcctga

SEQ ID NO: 2992393 - DNA, 25 bp, Homo sapien
tgttatgatgtgatcctgatctttc

SEQ ID NO: 2992394 - DNA, 25 bp, Homo sapien
gccaaatgagaattctaccggcata

SEQ ID NO: 2992395 - DNA, 25 bp, Homo sapien
aaatgagaattctaccggcataaca

SEQ ID NO: 2992396 - DNA, 25 bp, Homo sapien
caaatgagaattctaccggcataac

SEQ ID NO: 2992397 - DNA, 25 bp, Homo sapien
atgagaattctaccggcataacata

SEQ ID NO: 2992398 - DNA, 25 bp, Homo sapien
gggtcgacaccacaaatgctcaagg

SEQ ID NO: 2992399 - DNA, 25 bp, Homo sapien
ccgaagggtccgaacacagaggaga

SEQ ID NO: 2992400 - DNA, 25 bp, Homo sapien
aggtcaccctggtgactccgaaggg

SEQ ID NO: 2992401 - DNA, 25 bp, Homo sapien
tggtgactccgaagggtccgaacac

SEQ ID NO: 2992402 - DNA, 25 bp, Homo sapien
ggaggctagggttgaactgctccat

SEQ ID NO: 2992403 - DNA, 25 bp, Homo sapien
agtgccttctcgtaattcttcccca

SEQ ID NO: 2992404 - DNA, 25 bp, Homo sapien
ttccggaggctagggttgaactgct

SEQ ID NO: 2992405 - DNA, 25 bp, Homo sapien
tccccatggcgatgaagttccggag

SEQ ID NO: 2992406 - DNA, 25 bp, Homo sapien
cacttccccgtgtgcggacgacggg

SEQ ID NO: 2992407 - DNA, 25 bp, Homo sapien
acacctcggagagccacgtgagggc

SEQ ID NO: 2992408 - DNA, 25 bp, Homo sapien
acgtgagggctacggaagactctac

SEQ ID NO: 2992409 - DNA, 25 bp, Homo sapien
gactctaccgtagatgaggtcacca

SEQ ID NO: 2992410 - DNA, 25 bp, Homo sapien
aggcccaaccctgtctcctgcccag

SEQ ID NO: 2992411 - DNA, 25 bp, Homo sapien
aaccctgtctcctgcccagacaagc

SEQ ID NO: 2992412 - DNA, 25 bp, Homo sapien
gcccaaccctgtctcctgcccagac

SEQ ID NO: 2992413 - DNA, 25 bp, Homo sapien
ccaaccctgtctcctgcccagacaa

SEQ ID NO: 2992414 - DNA, 25 bp, Homo sapien
agtagcctttggctgcatacgtcac

SEQ ID NO: 2992415 - DNA, 25 bp, Homo sapien
aaagtagcctttggctgcatacgtc

SEQ ID NO: 2992416 - DNA, 25 bp, Homo sapien
tagcctttggctgcatacgtcacac

SEQ ID NO: 2992417 - DNA, 25 bp, Homo sapien
caaagtagcctttggctgcatacgt

SEQ ID NO: 2992418 - DNA, 25 bp, Homo sapien
gtgactcttccccatccgagggtct

SEQ ID NO: 2992419 - DNA, 25 bp, Homo sapien
tgcagaccacctcccagattggcgg

SEQ ID NO: 2992420 - DNA, 25 bp, Homo sapien
gggtctccagacctgcagaccacct

SEQ ID NO: 2992421 - DNA, 25 bp, Homo sapien
gcctcagcattagggagacggagcc

SEQ ID NO: 2992422 - DNA, 25 bp, Homo sapien
agacctgcagcaaacacgccagcgg

SEQ ID NO: 2992423 - DNA, 25 bp, Homo sapien
ccagtctgtcagcacagcggtgcct

SEQ ID NO: 2992424 - DNA, 25 bp, Homo sapien
gcggtgcctcgagaaactccagccg

SEQ ID NO: 2992425 - DNA, 25 bp, Homo sapien
cgggcatcaccagacctgcagcaaa

SEQ ID NO: 2992426 - DNA, 25 bp, Homo sapien
ggagcagagcaaactgcggcgtctc

SEQ ID NO: 2992427 - DNA, 25 bp, Homo sapien
aagcatcctccacaacctagacggg

SEQ ID NO: 2992428 - DNA, 25 bp, Homo sapien
gtattctcgcctgcttatagccgaa

SEQ ID NO: 2992429 - DNA, 25 bp, Homo sapien
tatagccgaaatgtctcctggcaag

SEQ ID NO: 2992430 - DNA, 25 bp, Homo sapien
gggactgcagatgtgcgccaccacg

SEQ ID NO: 2992431 - DNA, 25 bp, Homo sapien
caggtgatccacccaccccgtcctc

SEQ ID NO: 2992432 - DNA, 25 bp, Homo sapien
tgggactgcagatgtgcgccaccac

SEQ ID NO: 2992433 - DNA, 25 bp, Homo sapien
tcaggtgatccacccaccccgtcct

SEQ ID NO: 2992434 - DNA, 25 bp, Homo sapien
tacacagtcatcctgaaaacgaggc

SEQ ID NO: 2992435 - DNA, 25 bp, Homo sapien
gtcgccaggctaagagtgaaacccg

SEQ ID NO: 2992436 - DNA, 25 bp, Homo sapien
tcaagaccagataacaagcacgtgt

SEQ ID NO: 2992437 - DNA, 25 bp, Homo sapien
gccaagaccctaagatcagcagtga

SEQ ID NO: 2992438 - DNA, 25 bp, Homo sapien
agcagacgcaggaagcttcaggccg

SEQ ID NO: 2992439 - DNA, 25 bp, Homo sapien
ccagggaactgtcctgcggttttca

SEQ ID NO: 2992440 - DNA, 25 bp, Homo sapien
ctttggcatcctataaattcccagg

SEQ ID NO: 2992441 - DNA, 25 bp, Homo sapien
agggctcctcgtgcttctcggcgtt

SEQ ID NO: 2992442 - DNA, 25 bp, Homo sapien
tgcggcaaatggctccatttcctgg

SEQ ID NO: 2992443 - DNA, 25 bp, Homo sapien
ccctgcggcaaatggctccatttcc

SEQ ID NO: 2992444 - DNA, 25 bp, Homo sapien
gcggcaaatggctccatttcctggt

SEQ ID NO: 2992445 - DNA, 25 bp, Homo sapien
cctgcggcaaatggctccatttcct

SEQ ID NO: 2992446 - DNA, 25 bp, Homo sapien
ccatttgagacatgaccgccaaggc

SEQ ID NO: 2992447 - DNA, 25 bp, Homo sapien
aggacccagccctgatactcatcag

SEQ ID NO: 2992448 - DNA, 25 bp, Homo sapien
tcagcaccacatgggacagaagcat

SEQ ID NO: 2992449 - DNA, 25 bp, Homo sapien
gctccctcggagctgtgatcccatt

SEQ ID NO: 2992450 - DNA, 25 bp, Homo sapien
taagaaatcaaaatcgtggcggcac

SEQ ID NO: 2992451 - DNA, 25 bp, Homo sapien
tgggctcgccttgccatcgctgagg

SEQ ID NO: 2992452 - DNA, 25 bp, Homo sapien
ctgatgtctcctcggcccgtgtgca

SEQ ID NO: 2992453 - DNA, 25 bp, Homo sapien
cccgtgtgcaaaatgcagattaaga

SEQ ID NO: 2992454 - DNA, 25 bp, Homo sapien
tcagccatctggaagagaacgtctc

SEQ ID NO: 2992455 - DNA, 25 bp, Homo sapien
tgaacaggagtctggaacgtcggac

SEQ ID NO: 2992456 - DNA, 25 bp, Homo sapien
gccttgcaaccttgtgaaccccagg

SEQ ID NO: 2992457 - DNA, 25 bp, Homo sapien
ggatcactgcgacacaggctgagag

SEQ ID NO: 2992458 - DNA, 25 bp, Homo sapien
gccacaagggaaacaaacggccatc

SEQ ID NO: 2992459 - DNA, 25 bp, Homo sapien
cagctgcgtaagcagctcgttgtga

SEQ ID NO: 2992460 - DNA, 25 bp, Homo sapien
gctgcgtaagcagctcgttgtgaaa

SEQ ID NO: 2992461 - DNA, 25 bp, Homo sapien
tccagctgcgtaagcagctcgttgt

SEQ ID NO: 2992462 - DNA, 25 bp, Homo sapien
gctccagctgcgtaagcagctcgtt

SEQ ID NO: 2992463 - DNA, 25 bp, Homo sapien
ccagggcgtcgcctttgctcctttg

SEQ ID NO: 2992464 - DNA, 25 bp, Homo sapien
ctgacacttgtccagggcgtcgcct

SEQ ID NO: 2992465 - DNA, 25 bp, Homo sapien
agctccttgtccgagtacttctgag

SEQ ID NO: 2992466 - DNA, 25 bp, Homo sapien
gctcttcttccgaagcttcttcagc

SEQ ID NO: 2992467 - DNA, 25 bp, Homo sapien
tgacgccggcgggacggtgagagaa

SEQ ID NO: 2992468 - DNA, 25 bp, Homo sapien
aagccgctccctcgaggaacctgaa

SEQ ID NO: 2992469 - DNA, 25 bp, Homo sapien
gaagtaccaccttccctcgagtggc

SEQ ID NO: 2992470 - DNA, 25 bp, Homo sapien
gtgagagaaacaacaccgaagccgc

SEQ ID NO: 2992471 - DNA, 25 bp, Homo sapien
ccggagtgcaaaacggaaaggatca

SEQ ID NO: 2992472 - DNA, 25 bp, Homo sapien
acggaaaggatcaaaagacccatca

SEQ ID NO: 2992473 - DNA, 25 bp, Homo sapien
gatcaaaagacccatcacagcttac

SEQ ID NO: 2992474 - DNA, 25 bp, Homo sapien
tgcaaaacggaaaggatcaaaagac

SEQ ID NO: 2992475 - DNA, 25 bp, Homo sapien
tgctgcagctttcccacgttcttta

SEQ ID NO: 2992476 - DNA, 25 bp, Homo sapien
tgcagctttcccacgttctttaacc

SEQ ID NO: 2992477 - DNA, 25 bp, Homo sapien
ctgcagctttcccacgttctttaac

SEQ ID NO: 2992478 - DNA, 25 bp, Homo sapien
gctgctgcagctttcccacgttctt

SEQ ID NO: 2992479 - DNA, 25 bp, Homo sapien
cactgactcctcatacagagaggcc

SEQ ID NO: 2992480 - DNA, 25 bp, Homo sapien
tacagagaggccacgactgtacagg

SEQ ID NO: 2992481 - DNA, 25 bp, Homo sapien
gaggccacgactgtacagggcagat

SEQ ID NO: 2992482 - DNA, 25 bp, Homo sapien
ccaggacactgactcctcatacaga

SEQ ID NO: 2992483 - DNA, 25 bp, Homo sapien
ccgtaaatggctgggagtggcacac

SEQ ID NO: 2992484 - DNA, 25 bp, Homo sapien
tggcacacaggtcacaagagaaacc

SEQ ID NO: 2992485 - DNA, 25 bp, Homo sapien
agacagaaagtacggctgcacggtg

SEQ ID NO: 2992486 - DNA, 25 bp, Homo sapien
caaaggagccccgtaaatggctggg

SEQ ID NO: 2992487 - DNA, 25 bp, Homo sapien
aaggggtagagtgcgacagccagat

SEQ ID NO: 2992488 - DNA, 25 bp, Homo sapien
tcccaagaacctccagtgacctctg

SEQ ID NO: 2992489 - DNA, 25 bp, Homo sapien
ggtagagtgcgacagccagattcag

SEQ ID NO: 2992490 - DNA, 25 bp, Homo sapien
aggaaggggtagagtgcgacagcca

SEQ ID NO: 2992491 - DNA, 25 bp, Homo sapien
tccaccgggattgcccgtcaaggag

SEQ ID NO: 2992492 - DNA, 25 bp, Homo sapien
attgcccgtcaaggagtggtcagtt

SEQ ID NO: 2992493 - DNA, 25 bp, Homo sapien
gctgagcccctaccggcctcaggca

SEQ ID NO: 2992494 - DNA, 25 bp, Homo sapien
cgtccaccgggattgcccgtcaagg

SEQ ID NO: 2992495 - DNA, 25 bp, Homo sapien
tagccgtcggacacgtaattctcca

SEQ ID NO: 2992496 - DNA, 25 bp, Homo sapien
aagcgcctgcgctcctctgtcagtg

SEQ ID NO: 2992497 - DNA, 25 bp, Homo sapien
ccgcggagttcttggccacggcgca

SEQ ID NO: 2992498 - DNA, 25 bp, Homo sapien
ccctgcttgttgctgatggcgtcga

SEQ ID NO: 2992499 - DNA, 25 bp, Homo sapien
gacagccgagctatggcagctgctg

SEQ ID NO: 2992500 - DNA, 25 bp, Homo sapien
gtcctcagtgcctcgggtgagcaga

SEQ ID NO: 2992501 - DNA, 25 bp, Homo sapien
cctcgggtgagcagagccatgagcc

SEQ ID NO: 2992502 - DNA, 25 bp, Homo sapien
ccagtggcacagtggtcttgggtgg

SEQ ID NO: 2992503 - DNA, 25 bp, Homo sapien
tgctgcagcccgtccctgaggaact

SEQ ID NO: 2992504 - DNA, 25 bp, Homo sapien
ttggtcctgggacatggcggatccc

SEQ ID NO: 2992505 - DNA, 25 bp, Homo sapien
ccccacaaggaacgacaaggctggg

SEQ ID NO: 2992506 - DNA, 25 bp, Homo sapien
aactcgctcctggttcagcagggcc

SEQ ID NO: 2992507 - DNA, 25 bp, Homo sapien
ctcggggggcaccggcaggggcttg

SEQ ID NO: 2992508 - DNA, 25 bp, Homo sapien
ggttggacttggaggccgacagggc

SEQ ID NO: 2992509 - DNA, 25 bp, Homo sapien
atcttgctggggtcggcacaggcct

SEQ ID NO: 2992510 - DNA, 25 bp, Homo sapien
tggacttggaggccgacagggcgct

SEQ ID NO: 2992511 - DNA, 25 bp, Homo sapien
tgtagtcctcgccatccgggcctgt

SEQ ID NO: 2992512 - DNA, 25 bp, Homo sapien
tgggtgtgctctcctgggcagacat

SEQ ID NO: 2992513 - DNA, 25 bp, Homo sapien
ctgagcttgctctgagactgcggag

SEQ ID NO: 2992514 - DNA, 25 bp, Homo sapien
tgacgccgttcatgatgggtgtgct

SEQ ID NO: 2992515 - DNA, 25 bp, Homo sapien
ggtggcatagctgttttttggggtc

SEQ ID NO: 2992516 - DNA, 25 bp, Homo sapien
tggtggcatagctgttttttggggt

SEQ ID NO: 2992517 - DNA, 25 bp, Homo sapien
gtggcatagctgttttttggggtca

SEQ ID NO: 2992518 - DNA, 25 bp, Homo sapien
gcagggtaatgaggtcaccctcctt

SEQ ID NO: 2992519 - DNA, 25 bp, Homo sapien
tccaggccggctgccatggagctcg

SEQ ID NO: 2992520 - DNA, 25 bp, Homo sapien
tctccgtagtgccagccatcgcggg

SEQ ID NO: 2992521 - DNA, 25 bp, Homo sapien
ttcacccgcatacggccattgcgct

SEQ ID NO: 2992522 - DNA, 25 bp, Homo sapien
agtgtcacgctaagccacggatggc

SEQ ID NO: 2992523 - DNA, 25 bp, Homo sapien
tgctctgcacctgcgaactgtggga

SEQ ID NO: 2992524 - DNA, 25 bp, Homo sapien
gaaagccacagaaagcctgcggtct

SEQ ID NO: 2992525 - DNA, 25 bp, Homo sapien
cactagactctgtggtgaaagaccc

SEQ ID NO: 2992526 - DNA, 25 bp, Homo sapien
gtgcagcctgtcactgccatcgctg

SEQ ID NO: 2992527 - DNA, 25 bp, Homo sapien
atcgctgtccaagacccgggtgtag

SEQ ID NO: 2992528 - DNA, 25 bp, Homo sapien
tgccatcgctgtccaagacccgggt

SEQ ID NO: 2992529 - DNA, 25 bp, Homo sapien
cgctgtccaagacccgggtgtagga

SEQ ID NO: 2992530 - DNA, 25 bp, Homo sapien
gatggccaggtcgtccttgtccagg

SEQ ID NO: 2992531 - DNA, 25 bp, Homo sapien
ccttgtccaggaggttgcccgtgct

SEQ ID NO: 2992532 - DNA, 25 bp, Homo sapien
tgtccaggaggttgcccgtgctgct

SEQ ID NO: 2992533 - DNA, 25 bp, Homo sapien
ggatggccaggtcgtccttgtccag

SEQ ID NO: 2992534 - DNA, 25 bp, Homo sapien
gcctctgcttgaagccgctggccgt

SEQ ID NO: 2992535 - DNA, 25 bp, Homo sapien
gcctagataccaggaccgccatgat

SEQ ID NO: 2992536 - DNA, 25 bp, Homo sapien
caaacagatgcaagactggccgcct

SEQ ID NO: 2992537 - DNA, 25 bp, Homo sapien
tcaatagctgagtagtcacccaggc

SEQ ID NO: 2992538 - DNA, 25 bp, Homo sapien
cagctcaggctgtcaatctagggac

SEQ ID NO: 2992539 - DNA, 25 bp, Homo sapien
gctcatggaccgcgctccatagtca

SEQ ID NO: 2992540 - DNA, 25 bp, Homo sapien
tcatggaccgcgctccatagtcatc

SEQ ID NO: 2992541 - DNA, 25 bp, Homo sapien
ctgctcatggaccgcgctccatagt

SEQ ID NO: 2992542 - DNA, 25 bp, Homo sapien
catggaccgcgctccatagtcatcc

SEQ ID NO: 2992543 - DNA, 25 bp, Homo sapien
caggctgggccctaaaggaaaagag

SEQ ID NO: 2992544 - DNA, 25 bp, Homo sapien
gttggcctcctgaccctccaggaag

SEQ ID NO: 2992545 - DNA, 25 bp, Homo sapien
gaaacaaagcacaggacggctgcct

SEQ ID NO: 2992546 - DNA, 25 bp, Homo sapien
tcccgtgtcactcggagaaagcagg

SEQ ID NO: 2992547 - DNA, 25 bp, Homo sapien
ctgtggacaccagcgtgccgctgcc

SEQ ID NO: 2992548 - DNA, 25 bp, Homo sapien
tgtggacaccagcgtgccgctgcca

SEQ ID NO: 2992549 - DNA, 25 bp, Homo sapien
actgtggacaccagcgtgccgctgc

SEQ ID NO: 2992550 - DNA, 25 bp, Homo sapien
tcacggcgagccttagaaaagcagt

SEQ ID NO: 2992551 - DNA, 25 bp, Homo sapien
tctttggaatgtccgtgtgcggcca

SEQ ID NO: 2992552 - DNA, 25 bp, Homo sapien
cacatcagataaaggagcgccgcag

SEQ ID NO: 2992553 - DNA, 25 bp, Homo sapien
gatgccctcacaaggctggtcaaag

SEQ ID NO: 2992554 - DNA, 25 bp, Homo sapien
caagtaactgcagtacagggcacaa

SEQ ID NO: 2992555 - DNA, 25 bp, Homo sapien
atccattgagcatggaatcccctgg

SEQ ID NO: 2992556 - DNA, 25 bp, Homo sapien
gccggcgcggaagggtctctacaca

SEQ ID NO: 2992557 - DNA, 25 bp, Homo sapien
aatctttagcggagcgggaacgccg

SEQ ID NO: 2992558 - DNA, 25 bp, Homo sapien
cagaatctggccacttccacatcgg

SEQ ID NO: 2992559 - DNA, 25 bp, Homo sapien
tcagaatctggccacttccacatcg

SEQ ID NO: 2992560 - DNA, 25 bp, Homo sapien
agaatctggccacttccacatcggc

SEQ ID NO: 2992561 - DNA, 25 bp, Homo sapien
gaatctggccacttccacatcggcg

SEQ ID NO: 2992562 - DNA, 25 bp, Homo sapien
gatctactctcaacgtgctggagcc

SEQ ID NO: 2992563 - DNA, 25 bp, Homo sapien
gaagtgctctgtggcccgagttcct

SEQ ID NO: 2992564 - DNA, 25 bp, Homo sapien
ggcaccctgctgaaaggatcttttg

SEQ ID NO: 2992565 - DNA, 25 bp, Homo sapien
cagatggcgtctaagcattggcacc

SEQ ID NO: 2992566 - DNA, 25 bp, Homo sapien
gatggcacgtggacatgaagacgca

SEQ ID NO: 2992567 - DNA, 25 bp, Homo sapien
aaagctgtgcttggactctggagcc

SEQ ID NO: 2992568 - DNA, 25 bp, Homo sapien
ggccacagctgatgcacaaatacga

SEQ ID NO: 2992569 - DNA, 25 bp, Homo sapien
ggagccattacctggagcagaatca

SEQ ID NO: 2992570 - DNA, 25 bp, Homo sapien
ccaagtccactatgtgccctagaca

SEQ ID NO: 2992571 - DNA, 25 bp, Homo sapien
cactatgtgccctagacaaggcagg

SEQ ID NO: 2992572 - DNA, 25 bp, Homo sapien
aggaccaggcgctgtctgcaaggct

SEQ ID NO: 2992573 - DNA, 25 bp, Homo sapien
cccgatccatcaccctcccagcagt

SEQ ID NO: 2992574 - DNA, 25 bp, Homo sapien
gtgctggatgcctacggtccgatct

SEQ ID NO: 2992575 - DNA, 25 bp, Homo sapien
gatgcctacggtccgatctcagggc

SEQ ID NO: 2992576 - DNA, 25 bp, Homo sapien
tacggtccgatctcagggcacagag

SEQ ID NO: 2992577 - DNA, 25 bp, Homo sapien
tgggctgcccgatgccccagggatt

SEQ ID NO: 2992578 - DNA, 25 bp, Homo sapien
ctgtcgttggtcactgtcggcttca

SEQ ID NO: 2992579 - DNA, 25 bp, Homo sapien
gggtacccaaggctccatggccatg

SEQ ID NO: 2992580 - DNA, 25 bp, Homo sapien
caggagaagcctgtttattaggcag

SEQ ID NO: 2992581 - DNA, 25 bp, Homo sapien
acagaacaggctacatgggaagggc

SEQ ID NO: 2992582 - DNA, 25 bp, Homo sapien
catgtgaccagaggcgtgtaccctc

SEQ ID NO: 2992583 - DNA, 25 bp, Homo sapien
agggtgcgggcgctcccatccccgt

SEQ ID NO: 2992584 - DNA, 25 bp, Homo sapien
catccccgtgctcccggccttctgg

SEQ ID NO: 2992585 - DNA, 25 bp, Homo sapien
cgtgctcccggccttctggcccttg

SEQ ID NO: 2992586 - DNA, 25 bp, Homo sapien
cttctggcccttgggcggacagatc

SEQ ID NO: 2992587 - DNA, 25 bp, Homo sapien
cggacctgcagggaattacgtgctt

SEQ ID NO: 2992588 - DNA, 25 bp, Homo sapien
tgtttgaggcttagaacgctggtgc

SEQ ID NO: 2992589 - DNA, 25 bp, Homo sapien
ccttgtgacattgccagtgggagtg

SEQ ID NO: 2992590 - DNA, 25 bp, Homo sapien
ggtctgccgatgataaagtcctgga

SEQ ID NO: 2992591 - DNA, 25 bp, Homo sapien
ccccggtgacccaggtcttgctttg

SEQ ID NO: 2992592 - DNA, 25 bp, Homo sapien
tcttgctttgctggccgccccctgc

SEQ ID NO: 2992593 - DNA, 25 bp, Homo sapien
tcctcactccaagccgtcctggttc

SEQ ID NO: 2992594 - DNA, 25 bp, Homo sapien
cgttggctcgtctccacatgcggca

SEQ ID NO: 2992595 - DNA, 25 bp, Homo sapien
gagggcatgggcgaaggtgttagag

SEQ ID NO: 2992596 - DNA, 25 bp, Homo sapien
cagttccgaagagcgctggctgctt

SEQ ID NO: 2992597 - DNA, 25 bp, Homo sapien
ggcaccatggcaacttgcagttccg

SEQ ID NO: 2992598 - DNA, 25 bp, Homo sapien
tgttgagtgcctcgtgagcccctgc

SEQ ID NO: 2992599 - DNA, 25 bp, Homo sapien
cccagccggaacagacatttttacg

SEQ ID NO: 2992600 - DNA, 25 bp, Homo sapien
cggaacagacatttttacggagcca

SEQ ID NO: 2992601 - DNA, 25 bp, Homo sapien
tgtgcccagccggaacagacatttt

SEQ ID NO: 2992602 - DNA, 25 bp, Homo sapien
catttttacggagccaaagccttca

SEQ ID NO: 2992603 - DNA, 25 bp, Homo sapien
tgtgcgtctatgagcaagtgcagcc

SEQ ID NO: 2992604 - DNA, 25 bp, Homo sapien
gcggtgcccgcggtgtcggatggac

SEQ ID NO: 2992605 - DNA, 25 bp, Homo sapien
ccccaggttggaggcgagcgtgtgc

SEQ ID NO: 2992606 - DNA, 25 bp, Homo sapien
cagcgtgtgcggcaggcatgtgcgt

SEQ ID NO: 2992607 - DNA, 25 bp, Homo sapien
gagaggcggacttagagatgctggg

SEQ ID NO: 2992608 - DNA, 25 bp, Homo sapien
caggagaggcggacttagagatgct

SEQ ID NO: 2992609 - DNA, 25 bp, Homo sapien
ggttggctgtcgaggggcaggagag

SEQ ID NO: 2992610 - DNA, 25 bp, Homo sapien
gggttggctgtcgaggggcaggaga

SEQ ID NO: 2992611 - DNA, 25 bp, Homo sapien
caggtctgtgcgcagtgagcaggtg

SEQ ID NO: 2992612 - DNA, 25 bp, Homo sapien
ttcacttcccgtgaccctgtgcagg

SEQ ID NO: 2992613 - DNA, 25 bp, Homo sapien
cttcccgtgaccctgtgcagggctg

SEQ ID NO: 2992614 - DNA, 25 bp, Homo sapien
tgctgcttcacttcccgtgaccctg

SEQ ID NO: 2992615 - DNA, 25 bp, Homo sapien
agggctctgccgagtcacctctgtg

SEQ ID NO: 2992616 - DNA, 25 bp, Homo sapien
cttgaggccgttgtgggatggagct

SEQ ID NO: 2992617 - DNA, 25 bp, Homo sapien
tgtccctggtatcgggtagccctgg

SEQ ID NO: 2992618 - DNA, 25 bp, Homo sapien
tgtgccaaggccacggtttgaggct

SEQ ID NO: 2992619 - DNA, 25 bp, Homo sapien
gcagagacgcccgatagtgcagggc

SEQ ID NO: 2992620 - DNA, 25 bp, Homo sapien
ctccatagaggtgacggcagttgtg

SEQ ID NO: 2992621 - DNA, 25 bp, Homo sapien
tcatcgcaggaactggtgccagtct

SEQ ID NO: 2992622 - DNA, 25 bp, Homo sapien
cggctccttgttcatcgcaggaact

SEQ ID NO: 2992623 - DNA, 25 bp, Homo sapien
gccctggcgtgggaggcttcttccc

SEQ ID NO: 2992624 - DNA, 25 bp, Homo sapien
cggggccctggcgtgggaggcttct

SEQ ID NO: 2992625 - DNA, 25 bp, Homo sapien
gggccctggcgtgggaggcttcttc

SEQ ID NO: 2992626 - DNA, 25 bp, Homo sapien
cctggcgtgggaggcttcttcccag

SEQ ID NO: 2992627 - DNA, 25 bp, Homo sapien
gtggtcgtgactccgtggctgcctc

SEQ ID NO: 2992628 - DNA, 25 bp, Homo sapien
gagagttggtctcagactaagggcc

SEQ ID NO: 2992629 - DNA, 25 bp, Homo sapien
gcgtgggcccctggtgtccaggaga

SEQ ID NO: 2992630 - DNA, 25 bp, Homo sapien
tccagggcacaggtaactggggcac

SEQ ID NO: 2992631 - DNA, 25 bp, Homo sapien
gctgtcgcagcacggtacaggagca

SEQ ID NO: 2992632 - DNA, 25 bp, Homo sapien
gcaggtggagactcagccaggttct

SEQ ID NO: 2992633 - DNA, 25 bp, Homo sapien
acaggtgccacccaaagggcatggg

SEQ ID NO: 2992634 - DNA, 25 bp, Homo sapien
ttccttcatggctgtcgcagcacgg

SEQ ID NO: 2992635 - DNA, 25 bp, Homo sapien
gcggcagcgccccttagaaccttgg

SEQ ID NO: 2992636 - DNA, 25 bp, Homo sapien
gcagcgccccttagaaccttggctg

SEQ ID NO: 2992637 - DNA, 25 bp, Homo sapien
ttggctggccacatgatcagggcca

SEQ ID NO: 2992638 - DNA, 25 bp, Homo sapien
tgccccaggtgcagttggtgtcttg

SEQ ID NO: 2992639 - DNA, 25 bp, Homo sapien
gctggcaccaaccatccctgccact

SEQ ID NO: 2992640 - DNA, 25 bp, Homo sapien
tgctggcaccaaccatccctgccac

SEQ ID NO: 2992641 - DNA, 25 bp, Homo sapien
acactggagcactccaggatcacag

SEQ ID NO: 2992642 - DNA, 25 bp, Homo sapien
tggcctttttcctcttcgacgggca

SEQ ID NO: 2992643 - DNA, 25 bp, Homo sapien
tcgacgggcaatgcttctgcaccga

SEQ ID NO: 2992644 - DNA, 25 bp, Homo sapien
agccaatctgggctcctcggtcagc

SEQ ID NO: 2992645 - DNA, 25 bp, Homo sapien
ttttcctcttcgacgggcaatgctt

SEQ ID NO: 2992646 - DNA, 25 bp, Homo sapien
ccccgcagggttggcactgcccacc

SEQ ID NO: 2992647 - DNA, 25 bp, Homo sapien
gcagggttggcactgcccaccttcc

SEQ ID NO: 2992648 - DNA, 25 bp, Homo sapien
agggttggcactgcccaccttcctg

SEQ ID NO: 2992649 - DNA, 25 bp, Homo sapien
ccgcagggttggcactgcccacctt

SEQ ID NO: 2992650 - DNA, 25 bp, Homo sapien
gctgtctggaaggagacgcttcact

SEQ ID NO: 2992651 - DNA, 25 bp, Homo sapien
aggtacacatcaccgaggagctccc

SEQ ID NO: 2992652 - DNA, 25 bp, Homo sapien
tgataccccaataacgacagtgaag

SEQ ID NO: 2992653 - DNA, 25 bp, Homo sapien
gtgaagaaggcctcacgccgccgct

SEQ ID NO: 2992654 - DNA, 25 bp, Homo sapien
tgtttgaggagctgccgtagagttt

SEQ ID NO: 2992655 - DNA, 25 bp, Homo sapien
accaacagcgcacaggggccgatag

SEQ ID NO: 2992656 - DNA, 25 bp, Homo sapien
ggccgatagccccacgtcctcacca

SEQ ID NO: 2992657 - DNA, 25 bp, Homo sapien
gagctgccgtagagtttccacggca

SEQ ID NO: 2992658 - DNA, 25 bp, Homo sapien
cctggcttctttcgagagttctgga

SEQ ID NO: 2992659 - DNA, 25 bp, Homo sapien
tacctgcaagcctgtttacatctcg

SEQ ID NO: 2992660 - DNA, 25 bp, Homo sapien
gagttctggaaggtgggtcaggctg

SEQ ID NO: 2992661 - DNA, 25 bp, Homo sapien
ggctccagcttttatacctgcaagc

SEQ ID NO: 2992662 - DNA, 25 bp, Homo sapien
cccttggggcttgtagtggtgctgc

SEQ ID NO: 2992663 - DNA, 25 bp, Homo sapien
agccgcctcttgtagccgtgcccac

SEQ ID NO: 2992664 - DNA, 25 bp, Homo sapien
ctcttgtagccgtgcccacagaggc

SEQ ID NO: 2992665 - DNA, 25 bp, Homo sapien
gcagctgtcttccatccgggggccc

SEQ ID NO: 2992666 - DNA, 25 bp, Homo sapien
acaggcgtcacagtgttggggtcat

SEQ ID NO: 2992667 - DNA, 25 bp, Homo sapien
tgacaggcgtcacagtgttggggtc

SEQ ID NO: 2992668 - DNA, 25 bp, Homo sapien
cagggccccgagacatgctgggatc

SEQ ID NO: 2992669 - DNA, 25 bp, Homo sapien
aagtgggaatggtgacaggcgtcac

SEQ ID NO: 2992670 - DNA, 25 bp, Homo sapien
tgggccagagcagacgtagacgccg

SEQ ID NO: 2992671 - DNA, 25 bp, Homo sapien
gtagacgccgcgtggtgctggatcc

SEQ ID NO: 2992672 - DNA, 25 bp, Homo sapien
ggccagagcagacgtagacgccgcg

SEQ ID NO: 2992673 - DNA, 25 bp, Homo sapien
tagacgccgcgtggtgctggatcct

SEQ ID NO: 2992674 - DNA, 25 bp, Homo sapien
gagtcaattcgtggggtgcacgcac

SEQ ID NO: 2992675 - DNA, 25 bp, Homo sapien
ggtggatagggagtcaattcgtggg

SEQ ID NO: 2992676 - DNA, 25 bp, Homo sapien
tagggagtcaattcgtggggtgcac

SEQ ID NO: 2992677 - DNA, 25 bp, Homo sapien
tgggtggatagggagtcaattcgtg

SEQ ID NO: 2992678 - DNA, 25 bp, Homo sapien
tgtccttgtctgatagggacgtgcc

SEQ ID NO: 2992679 - DNA, 25 bp, Homo sapien
tcttcatctgggaggagaagtcctc

SEQ ID NO: 2992680 - DNA, 25 bp, Homo sapien
tgtctgatagggacgtgcccatggc

SEQ ID NO: 2992681 - DNA, 25 bp, Homo sapien
tgatagggacgtgcccatggccaag

SEQ ID NO: 2992682 - DNA, 25 bp, Homo sapien
ggtgtctcatgtctgtgggcagcag

SEQ ID NO: 2992683 - DNA, 25 bp, Homo sapien
cgtggtgtctcatgtctgtgggcag

SEQ ID NO: 2992684 - DNA, 25 bp, Homo sapien
tggtgtctcatgtctgtgggcagca

SEQ ID NO: 2992685 - DNA, 25 bp, Homo sapien
gtgtctcatgtctgtgggcagcagc

SEQ ID NO: 2992686 - DNA, 25 bp, Homo sapien
gagcttgcggatgtgcttgaagaac

SEQ ID NO: 2992687 - DNA, 25 bp, Homo sapien
ctggcccgaggcgtggagcttgcgg

SEQ ID NO: 2992688 - DNA, 25 bp, Homo sapien
tgtggatggcgtcgtccagctggcc

SEQ ID NO: 2992689 - DNA, 25 bp, Homo sapien
gaagaacttgaggtagttgaaggac

SEQ ID NO: 2992690 - DNA, 25 bp, Homo sapien
cattcggcgtggtctgggtggcctg

SEQ ID NO: 2992691 - DNA, 25 bp, Homo sapien
tgggcttctagctggttctggccca

SEQ ID NO: 2992692 - DNA, 25 bp, Homo sapien
tgcccagtgactcacgagccgttcg

SEQ ID NO: 2992693 - DNA, 25 bp, Homo sapien
cgggtccgccatgtgggcattcggc

SEQ ID NO: 2992694 - DNA, 25 bp, Homo sapien
gctggggatgatggacaggatgtac

SEQ ID NO: 2992695 - DNA, 25 bp, Homo sapien
cgtagttgatcctcccgtccccgtg

SEQ ID NO: 2992696 - DNA, 25 bp, Homo sapien
tcggcctcctcgtctgtcagcgggg

SEQ ID NO: 2992697 - DNA, 25 bp, Homo sapien
cgctgctggggatgatggacaggat

SEQ ID NO: 2992698 - DNA, 25 bp, Homo sapien
catggtgctacttcttctttggaat

SEQ ID NO: 2992699 - DNA, 25 bp, Homo sapien
ctggccagggctagtcatggtgcta

SEQ ID NO: 2992700 - DNA, 25 bp, Homo sapien
gcttctgcccaggtgcgtggtcacc

SEQ ID NO: 2992701 - DNA, 25 bp, Homo sapien
aaaagctgggtccaccctcacggct

SEQ ID NO: 2992702 - DNA, 25 bp, Homo sapien
tccctgagaggctggaacattgagg

SEQ ID NO: 2992703 - DNA, 25 bp, Homo sapien
gtgtccctgagaggctggaacattg

SEQ ID NO: 2992704 - DNA, 25 bp, Homo sapien
gccaggcggcttcacctggacaggg

SEQ ID NO: 2992705 - DNA, 25 bp, Homo sapien
tgctgatgagaaaggtgtccctgag

SEQ ID NO: 2992706 - DNA, 25 bp, Homo sapien
ctgcctccacgagcccatatgtgtg

SEQ ID NO: 2992707 - DNA, 25 bp, Homo sapien
cctccacgagcccatatgtgtggat

SEQ ID NO: 2992708 - DNA, 25 bp, Homo sapien
agctgcctccacgagcccatatgtg

SEQ ID NO: 2992709 - DNA, 25 bp, Homo sapien
tccacgagcccatatgtgtggatag

SEQ ID NO: 2992710 - DNA, 25 bp, Homo sapien
tgttggccacctgcgacgtagggct

SEQ ID NO: 2992711 - DNA, 25 bp, Homo sapien
acatggcaccggcttctttggcagg

SEQ ID NO: 2992712 - DNA, 25 bp, Homo sapien
tctgggacaggtggaatcaaagcct

SEQ ID NO: 2992713 - DNA, 25 bp, Homo sapien
ggattccgtcttccagatgtaaacg

SEQ ID NO: 2992714 - DNA, 25 bp, Homo sapien
cgcgctccaagaaccagctgttgaa

SEQ ID NO: 2992715 - DNA, 25 bp, Homo sapien
ggcattgttgagtatccccacctac

SEQ ID NO: 2992716 - DNA, 25 bp, Homo sapien
ccaaattggcagatgagccgcgctc

SEQ ID NO: 2992717 - DNA, 25 bp, Homo sapien
ggttattcacaccacccaaattggc

SEQ ID NO: 2992718 - DNA, 25 bp, Homo sapien
ctgctgcgggagagtcctgtcctga

SEQ ID NO: 2992719 - DNA, 25 bp, Homo sapien
gcagcttgacttgagaggacgaccc

SEQ ID NO: 2992720 - DNA, 25 bp, Homo sapien
tggctcagagccgtcagctttcgcg

SEQ ID NO: 2992721 - DNA, 25 bp, Homo sapien
gaggctctggctatttggacttgaa

SEQ ID NO: 2992722 - DNA, 25 bp, Homo sapien
agaaccctgcgtccaacagttggaa

SEQ ID NO: 2992723 - DNA, 25 bp, Homo sapien
ttcagtcagagcgacgagtgagcct

SEQ ID NO: 2992724 - DNA, 25 bp, Homo sapien
ctaaaacgggcatgctggaagaacc

SEQ ID NO: 2992725 - DNA, 25 bp, Homo sapien
caccgcaggcgaacctcatagtggg

SEQ ID NO: 2992726 - DNA, 25 bp, Homo sapien
catctctgtgcacttgaacactctg

SEQ ID NO: 2992727 - DNA, 25 bp, Homo sapien
gctccggagggcagaaatggttcca

SEQ ID NO: 2992728 - DNA, 25 bp, Homo sapien
atgcagtttgccacccatgacacag

SEQ ID NO: 2992729 - DNA, 25 bp, Homo sapien
tctgaactgcctggcggccactgga

SEQ ID NO: 2992730 - DNA, 25 bp, Homo sapien
gcgaggaggcacagcacttcatcaa

SEQ ID NO: 2992731 - DNA, 25 bp, Homo sapien
ttcatcaaagcgtgagtgcgcccgg

SEQ ID NO: 2992732 - DNA, 25 bp, Homo sapien
tacagtgggagatacgctgcagtcc

SEQ ID NO: 2992733 - DNA, 25 bp, Homo sapien
tgggaccagtgaatgcacgcagctg

SEQ ID NO: 2992734 - DNA, 25 bp, Homo sapien
tgggaatgccaaagcggagtccact

SEQ ID NO: 2992735 - DNA, 25 bp, Homo sapien
ccagggtttcggctacagcaaggaa

SEQ ID NO: 2992736 - DNA, 25 bp, Homo sapien
tcaccgttaggctgtgtcacgccgt

SEQ ID NO: 2992737 - DNA, 25 bp, Homo sapien
ttgctgctaacggaggaccctctgc

SEQ ID NO: 2992738 - DNA, 25 bp, Homo sapien
ccagcctctggggaccccgcctgcc

SEQ ID NO: 2992739 - DNA, 25 bp, Homo sapien
ctcccagcctctggggaccccgcct

SEQ ID NO: 2992740 - DNA, 25 bp, Homo sapien
tcccagcctctggggaccccgcctg

SEQ ID NO: 2992741 - DNA, 25 bp, Homo sapien
agcctctggggaccccgcctgccac

SEQ ID NO: 2992742 - DNA, 25 bp, Homo sapien
cagtgtcgctctgcggggtgcccct

SEQ ID NO: 2992743 - DNA, 25 bp, Homo sapien
caggagcagtgtcgctctgcggggt

SEQ ID NO: 2992744 - DNA, 25 bp, Homo sapien
agcagtgtcgctctgcggggtgccc

SEQ ID NO: 2992745 - DNA, 25 bp, Homo sapien
ggagcagtgtcgctctgcggggtgc

SEQ ID NO: 2992746 - DNA, 25 bp, Homo sapien
agcttgataggtcggcgcttccgcc

SEQ ID NO: 2992747 - DNA, 25 bp, Homo sapien
gcttccgcccataacctttcctgaa

SEQ ID NO: 2992748 - DNA, 25 bp, Homo sapien
cctcttccggtgtcaaacagcttga

SEQ ID NO: 2992749 - DNA, 25 bp, Homo sapien
catcttaggtccgtcctcttccggt

SEQ ID NO: 2992750 - DNA, 25 bp, Homo sapien
aggcggcttcgcacgcggccccaca

SEQ ID NO: 2992751 - DNA, 25 bp, Homo sapien
ggaaggcgcggaggcggcttcgcac

SEQ ID NO: 2992752 - DNA, 25 bp, Homo sapien
ccccacaccgctccgttagccgaca

SEQ ID NO: 2992753 - DNA, 25 bp, Homo sapien
acgcggccccacaccgctccgttag

SEQ ID NO: 2992754 - DNA, 25 bp, Homo sapien
ggccgtggaggcctgcacgcacctg

SEQ ID NO: 2992755 - DNA, 25 bp, Homo sapien
gcagaagtccttactcaggcggccg

SEQ ID NO: 2992756 - DNA, 25 bp, Homo sapien
tggaggcctgcacgcacctgccgta

SEQ ID NO: 2992757 - DNA, 25 bp, Homo sapien
agaagtccttactcaggcggccgcc

SEQ ID NO: 2992758 - DNA, 25 bp, Homo sapien
agccggggcccgctggctcttggag

SEQ ID NO: 2992759 - DNA, 25 bp, Homo sapien
aaagccggggcccgctggctcttgg

SEQ ID NO: 2992760 - DNA, 25 bp, Homo sapien
agcaaaggaaagccggggcccgctg

SEQ ID NO: 2992761 - DNA, 25 bp, Homo sapien
ccggggcccgctggctcttggaggg

SEQ ID NO: 2992762 - DNA, 25 bp, Homo sapien
agtcccgctttacaaacatgcaggg

SEQ ID NO: 2992763 - DNA, 25 bp, Homo sapien
ggtgattttgtcagccggcgtctaa

SEQ ID NO: 2992764 - DNA, 25 bp, Homo sapien
ccatcctttctgaggttggtgccag

SEQ ID NO: 2992765 - DNA, 25 bp, Homo sapien
gctcgtcgatggctcggtgattttg

SEQ ID NO: 2992766 - DNA, 25 bp, Homo sapien
tcagaatgacttaaagccccacggg

SEQ ID NO: 2992767 - DNA, 25 bp, Homo sapien
gatacactgaggtggtacccggtgc

SEQ ID NO: 2992768 - DNA, 25 bp, Homo sapien
gacacgtgctgaaggaatccaccac

SEQ ID NO: 2992769 - DNA, 25 bp, Homo sapien
aagaagccctatcgtgccagttgtg

SEQ ID NO: 2992770 - DNA, 25 bp, Homo sapien
gacaagggcctcatgacactatcac

SEQ ID NO: 2992771 - DNA, 25 bp, Homo sapien
ctctgggtcacttgtccacgggaca

SEQ ID NO: 2992772 - DNA, 25 bp, Homo sapien
gcttccaagttagatacgcctcaaa

SEQ ID NO: 2992773 - DNA, 25 bp, Homo sapien
ccttacagagaacttgggtgctggc

SEQ ID NO: 2992774 - DNA, 25 bp, Homo sapien
taggcattcgatatgtgccaccagg

SEQ ID NO: 2992775 - DNA, 25 bp, Homo sapien
gagaggccaagacccacatgttgca

SEQ ID NO: 2992776 - DNA, 25 bp, Homo sapien
gatttgaccgagtctttatcgtggc

SEQ ID NO: 2992777 - DNA, 25 bp, Homo sapien
caggatctaacaccgaggaatgtca

SEQ ID NO: 2992778 - DNA, 25 bp, Homo sapien
gggcagcctgaagactggaaatttt

SEQ ID NO: 2992779 - DNA, 25 bp, Homo sapien
tcctgcaccttttgatatccttttg

SEQ ID NO: 2992780 - DNA, 25 bp, Homo sapien
gcccgtgttggcgaagggtccctgc

SEQ ID NO: 2992781 - DNA, 25 bp, Homo sapien
tggctctttattatagtttcttccc

SEQ ID NO: 2992782 - DNA, 25 bp, Homo sapien
cagcatccgagtctgctttggctcg

SEQ ID NO: 2992783 - DNA, 25 bp, Homo sapien
gtgtccacagcatccgagtctgctt

SEQ ID NO: 2992784 - DNA, 25 bp, Homo sapien
agtctgctttggctcgtcctctggg

SEQ ID NO: 2992785 - DNA, 25 bp, Homo sapien
gtcctctggggagcttgcgccccaa

SEQ ID NO: 2992786 - DNA, 25 bp, Homo sapien
acctgagcgtcgcagtgactggaca

SEQ ID NO: 2992787 - DNA, 25 bp, Homo sapien
tccagatgtgtaaagcagaggccag

SEQ ID NO: 2992788 - DNA, 25 bp, Homo sapien
tgactggacactagacgcagcacag

SEQ ID NO: 2992789 - DNA, 25 bp, Homo sapien
gcctgaggccggctcaggattccag

SEQ ID NO: 2992790 - DNA, 25 bp, Homo sapien
tcaggacgttactggcggttcccaa

SEQ ID NO: 2992791 - DNA, 25 bp, Homo sapien
catgaagcccaagcaagtgagccga

SEQ ID NO: 2992792 - DNA, 25 bp, Homo sapien
cttccatgggcaacgagcaggcttg

SEQ ID NO: 2992793 - DNA, 25 bp, Homo sapien
gcaaaagcgcttgctggaccagcag

SEQ ID NO: 2992794 - DNA, 25 bp, Homo sapien
cagaccgggtgctcctgcaccaagt

SEQ ID NO: 2992795 - DNA, 25 bp, Homo sapien
acataagtcacagccgcttgcggca

SEQ ID NO: 2992796 - DNA, 25 bp, Homo sapien
aagtgtgtgccagccgtaacccggg

SEQ ID NO: 2992797 - DNA, 25 bp, Homo sapien
tggccagtgttgaagcgagtcagac

SEQ ID NO: 2992798 - DNA, 25 bp, Homo sapien
aagtcaagagcctgtctggcgggcc

SEQ ID NO: 2992799 - DNA, 25 bp, Homo sapien
tagcaggtacgaacccaaaggagtg

SEQ ID NO: 2992800 - DNA, 25 bp, Homo sapien
tgtgttacaaatgccgtggtccttc

SEQ ID NO: 2992801 - DNA, 25 bp, Homo sapien
tctcaacgggacgagcagctgaaat

SEQ ID NO: 2992802 - DNA, 25 bp, Homo sapien
tctgagtcttcaccgtgtgtgcagg

SEQ ID NO: 2992803 - DNA, 25 bp, Homo sapien
ggtgatgcccaggtcatcctcggga

SEQ ID NO: 2992804 - DNA, 25 bp, Homo sapien
tgagcagacccctcggagagctttc

SEQ ID NO: 2992805 - DNA, 25 bp, Homo sapien
aaacacctgcggcatcgtcacatgg

SEQ ID NO: 2992806 - DNA, 25 bp, Homo sapien
acacgcgggcggaaaggctccaggg

SEQ ID NO: 2992807 - DNA, 25 bp, Homo sapien
gagacaggggcctgcatcctcggcc

SEQ ID NO: 2992808 - DNA, 25 bp, Homo sapien
gaggaggcgggtgatcttcctgaag

SEQ ID NO: 2992809 - DNA, 25 bp, Homo sapien
ctccatccagacacgcgggcggaaa

SEQ ID NO: 2992810 - DNA, 25 bp, Homo sapien
tgaatgaccgcgtcctcaaaggaag

SEQ ID NO: 2992811 - DNA, 25 bp, Homo sapien
ggatttggtcactgcatgcgctgcc

SEQ ID NO: 2992812 - DNA, 25 bp, Homo sapien
gtcagaaagttgagggtctctccag

SEQ ID NO: 2992813 - DNA, 25 bp, Homo sapien
tgagacccaaatcgaggcgcgtggt

SEQ ID NO: 2992814 - DNA, 25 bp, Homo sapien
tctgtagaaatgggcatgttccggc

SEQ ID NO: 2992815 - DNA, 25 bp, Homo sapien
tgtagaaatgggcatgttccggccg

SEQ ID NO: 2992816 - DNA, 25 bp, Homo sapien
tttatccgagccactcttactctct

SEQ ID NO: 2992817 - DNA, 25 bp, Homo sapien
gctcccagaaccctttatccgagcc

SEQ ID NO: 2992818 - DNA, 25 bp, Homo sapien
tctcttgaacccgataggtggaggc

SEQ ID NO: 2992819 - DNA, 25 bp, Homo sapien
ctcttgaacccgataggtggaggct

SEQ ID NO: 2992820 - DNA, 25 bp, Homo sapien
agaatctcttgaacccgataggtgg

SEQ ID NO: 2992821 - DNA, 25 bp, Homo sapien
aatctcttgaacccgataggtggag

SEQ ID NO: 2992822 - DNA, 25 bp, Homo sapien
aaacccgcatcgaaggacacagagt

SEQ ID NO: 2992823 - DNA, 25 bp, Homo sapien
ataaccaaatgttggagcagaggcc

SEQ ID NO: 2992824 - DNA, 25 bp, Homo sapien
gagcaccgaaattcctcagaacggc

SEQ ID NO: 2992825 - DNA, 25 bp, Homo sapien
caccggactggccaaactgacaata

SEQ ID NO: 2992826 - DNA, 25 bp, Homo sapien
cggcctcatcgtaactaagtatagt

SEQ ID NO: 2992827 - DNA, 25 bp, Homo sapien
tacagggagcctgcctaccaaggct

SEQ ID NO: 2992828 - DNA, 25 bp, Homo sapien
tctgaggtcctggacttcaacatgt

SEQ ID NO: 2992829 - DNA, 25 bp, Homo sapien
ggctctgccgacagctatttctaaa

SEQ ID NO: 2992830 - DNA, 25 bp, Homo sapien
ttcctgcatgggtgaagaccctcgg

SEQ ID NO: 2992831 - DNA, 25 bp, Homo sapien
tgggtggacgtgcaaatgttcctgc

SEQ ID NO: 2992832 - DNA, 25 bp, Homo sapien
cgtcactgtgggtggacgtgcaaat

SEQ ID NO: 2992833 - DNA, 25 bp, Homo sapien
aatgttcctgcatgggtgaagaccc

SEQ ID NO: 2992834 - DNA, 25 bp, Homo sapien
gcttcggtgtacaggctgccgggca

SEQ ID NO: 2992835 - DNA, 25 bp, Homo sapien
tccaccccggctgggcttcggtgta

SEQ ID NO: 2992836 - DNA, 25 bp, Homo sapien
tgggcttcggtgtacaggctgccgg

SEQ ID NO: 2992837 - DNA, 25 bp, Homo sapien
accccggctgggcttcggtgtacag

SEQ ID NO: 2992838 - DNA, 25 bp, Homo sapien
gagctggctgtggtcggtcaggcag

SEQ ID NO: 2992839 - DNA, 25 bp, Homo sapien
ggtcaggcagcatccttcctctggc

SEQ ID NO: 2992840 - DNA, 25 bp, Homo sapien
tctcattcaaaggttggatggggaa

SEQ ID NO: 2992841 - DNA, 25 bp, Homo sapien
ggaaggtgaaatcgtcagggccagg

SEQ ID NO: 2992842 - DNA, 25 bp, Homo sapien
gccctcctgggcgggttctctcttg

SEQ ID NO: 2992843 - DNA, 25 bp, Homo sapien
gctggagttcccgtgctgggccctc

SEQ ID NO: 2992844 - DNA, 25 bp, Homo sapien
cctctgtgaggaggaactcctgttc

SEQ ID NO: 2992845 - DNA, 25 bp, Homo sapien
ctgcattttgctctgctgggagttt

SEQ ID NO: 2992846 - DNA, 25 bp, Homo sapien
ggggaactcagcaggagcagaagat

SEQ ID NO: 2992847 - DNA, 25 bp, Homo sapien
taatttgcttttcatatgcgtgaag

SEQ ID NO: 2992848 - DNA, 25 bp, Homo sapien
tcatatgcgtgaaggggaactcagc

SEQ ID NO: 2992849 - DNA, 25 bp, Homo sapien
atttgcttttcatatgcgtgaaggg

SEQ ID NO: 2992850 - DNA, 25 bp, Homo sapien
tggtgccagccacgtcgtcacagaa

SEQ ID NO: 2992851 - DNA, 25 bp, Homo sapien
cagaacttgtagaccagaggatgcc

SEQ ID NO: 2992852 - DNA, 25 bp, Homo sapien
gcgcaaggacgttccccagcatcaa

SEQ ID NO: 2992853 - DNA, 25 bp, Homo sapien
cgggctccacagactttcacatcta

SEQ ID NO: 2992854 - DNA, 25 bp, Homo sapien
ccagagcccgctgcgaagtggcgat

SEQ ID NO: 2992855 - DNA, 25 bp, Homo sapien
tgcgaagtggcgatcccgcacccat

SEQ ID NO: 2992856 - DNA, 25 bp, Homo sapien
caaaccacggactgcctgatggcca

SEQ ID NO: 2992857 - DNA, 25 bp, Homo sapien
cctgctgttgccacgtgctggggca

SEQ ID NO: 2992858 - DNA, 25 bp, Homo sapien
ccagctccaggtctctcgtgtcaca

SEQ ID NO: 2992859 - DNA, 25 bp, Homo sapien
cagctccaggtctctcgtgtcacac

SEQ ID NO: 2992860 - DNA, 25 bp, Homo sapien
agctccaggtctctcgtgtcacact

SEQ ID NO: 2992861 - DNA, 25 bp, Homo sapien
gcagaacctcgccaccgtccattgc

SEQ ID NO: 2992862 - DNA, 25 bp, Homo sapien
agaacctcgccaccgtccattgctt

SEQ ID NO: 2992863 - DNA, 25 bp, Homo sapien
ggcccctggcagaacctcgccaccg

SEQ ID NO: 2992864 - DNA, 25 bp, Homo sapien
ctggcagaacctcgccaccgtccat

SEQ ID NO: 2992865 - DNA, 25 bp, Homo sapien
tcgcggcatcgggagccaggcgtgg

SEQ ID NO: 2992866 - DNA, 25 bp, Homo sapien
gggacgcgcttgaaattaaatcttc

SEQ ID NO: 2992867 - DNA, 25 bp, Homo sapien
gaggacgcgtgcgtgcggtgcgtgg

SEQ ID NO: 2992868 - DNA, 25 bp, Homo sapien
tcgcagtgcctgaccttgttttttc

SEQ ID NO: 2992869 - DNA, 25 bp, Homo sapien
ttgtggtcttaacgaaaagcgatcg

SEQ ID NO: 2992870 - DNA, 25 bp, Homo sapien
tccgtttaagggagctccggctgat

SEQ ID NO: 2992871 - DNA, 25 bp, Homo sapien
gaaacgtcgacattctcagcgcacg

SEQ ID NO: 2992872 - DNA, 25 bp, Homo sapien
ctttgtgccaaaaactgcgctcccg

SEQ ID NO: 2992873 - DNA, 25 bp, Homo sapien
caaacgtgtctttctgcgggattcg

SEQ ID NO: 2992874 - DNA, 25 bp, Homo sapien
tgtaagagcctttcgctgcaaacgt

SEQ ID NO: 2992875 - DNA, 25 bp, Homo sapien
cagagcgcactctcggtagggaacg

SEQ ID NO: 2992876 - DNA, 25 bp, Homo sapien
aaatcccggctggtgtgtaagagcc

SEQ ID NO: 2992877 - DNA, 25 bp, Homo sapien
ggaactgtatggagggctaccttga

SEQ ID NO: 2992878 - DNA, 25 bp, Homo sapien
tgggagccacaccattaaggccata

SEQ ID NO: 2992879 - DNA, 25 bp, Homo sapien
cagaattctggtgacccctggagtg

SEQ ID NO: 2992880 - DNA, 25 bp, Homo sapien
ctaaacccattcaggtctctggcct

SEQ ID NO: 2992881 - DNA, 25 bp, Homo sapien
agggctcactgaggtccaccaggcc

SEQ ID NO: 2992882 - DNA, 25 bp, Homo sapien
accacgccagggtcaaagaagggct

SEQ ID NO: 2992883 - DNA, 25 bp, Homo sapien
ccagggtcaaagaagggctcactga

SEQ ID NO: 2992884 - DNA, 25 bp, Homo sapien
atgaggaggcactggcggccaccac

SEQ ID NO: 2992885 - DNA, 25 bp, Homo sapien
cgggcggtgcggtccctcactgtat

SEQ ID NO: 2992886 - DNA, 25 bp, Homo sapien
gacagatgaaagctgccggcgggcg

SEQ ID NO: 2992887 - DNA, 25 bp, Homo sapien
gcggtgcggtccctcactgtataca

SEQ ID NO: 2992888 - DNA, 25 bp, Homo sapien
tttggtgggtgagtgttcttctcac

SEQ ID NO: 2992889 - DNA, 25 bp, Homo sapien
tgactgggagactgtcaggtacaaa

SEQ ID NO: 2992890 - DNA, 25 bp, Homo sapien
cgaggaggaggcatacagctggggg

SEQ ID NO: 2992891 - DNA, 25 bp, Homo sapien
caccgcgccctgactggggggcatt

SEQ ID NO: 2992892 - DNA, 25 bp, Homo sapien
tggggggcatttctgactgggagac

SEQ ID NO: 2992893 - DNA, 25 bp, Homo sapien
ttgcttgtcctgaccatggagcaca

SEQ ID NO: 2992894 - DNA, 25 bp, Homo sapien
tttgcttattcctgcgccaatcatg

SEQ ID NO: 2992895 - DNA, 25 bp, Homo sapien
tctcttgggcccctaggtcggcttg

SEQ ID NO: 2992896 - DNA, 25 bp, Homo sapien
ataccgctgtcagcgcacgggctgg

SEQ ID NO: 2992897 - DNA, 25 bp, Homo sapien
gattcggacgtcaccagtgtggagt

SEQ ID NO: 2992898 - DNA, 25 bp, Homo sapien
ggttcttgccgccttgactgagggt

SEQ ID NO: 2992899 - DNA, 25 bp, Homo sapien
tgcaggggagcgtggacttggaact

SEQ ID NO: 2992900 - DNA, 25 bp, Homo sapien
tgtggggccacgtccactcaccgag

SEQ ID NO: 2992901 - DNA, 25 bp, Homo sapien
cccaggatatccagtaccgcagtct

SEQ ID NO: 2992902 - DNA, 25 bp, Homo sapien
atctgagccgccatcgggctgtggg

SEQ ID NO: 2992903 - DNA, 25 bp, Homo sapien
ctgctagcctgtggcagaaggacca

SEQ ID NO: 2992904 - DNA, 25 bp, Homo sapien
tccagtaccgcagtctccatctgag

SEQ ID NO: 2992905 - DNA, 25 bp, Homo sapien
atgaacacggctttgtctgcaccca

SEQ ID NO: 2992906 - DNA, 25 bp, Homo sapien
gcttccatgaacacggctttgtctg

SEQ ID NO: 2992907 - DNA, 25 bp, Homo sapien
ggcccggagcttccatgaacacggc

SEQ ID NO: 2992908 - DNA, 25 bp, Homo sapien
ggagcttccatgaacacggctttgt

SEQ ID NO: 2992909 - DNA, 25 bp, Homo sapien
ccgcaaatttatggcccgggtgacg

SEQ ID NO: 2992910 - DNA, 25 bp, Homo sapien
ccctgagtttgtgcgctcgggagcc

SEQ ID NO: 2992911 - DNA, 25 bp, Homo sapien
aacagaaaattgacgagagcggagc

SEQ ID NO: 2992912 - DNA, 25 bp, Homo sapien
taatagcaggacttttccaagcaaa

SEQ ID NO: 2992913 - DNA, 25 bp, Homo sapien
ccagcatcgtggccccagctgacgg

SEQ ID NO: 2992914 - DNA, 25 bp, Homo sapien
ccccagctgacggctcccaagggca

SEQ ID NO: 2992915 - DNA, 25 bp, Homo sapien
ggagctcaggctggcgatctgctca

SEQ ID NO: 2992916 - DNA, 25 bp, Homo sapien
taatttcagaggaacatggtgtggg

SEQ ID NO: 2992917 - DNA, 25 bp, Homo sapien
gggcagctcccgcaataccaaaata

SEQ ID NO: 2992918 - DNA, 25 bp, Homo sapien
gatctgctcagaggaaacctcccta

SEQ ID NO: 2992919 - DNA, 25 bp, Homo sapien
ggctcttgccgtggcctcgggaggc

SEQ ID NO: 2992920 - DNA, 25 bp, Homo sapien
gcttcccgcgtacaccgaggacggc

SEQ ID NO: 2992921 - DNA, 25 bp, Homo sapien
agcagcggccccagcgagtgtgtcg

SEQ ID NO: 2992922 - DNA, 25 bp, Homo sapien
tgtgtcggggaagcgggtgcctccg

SEQ ID NO: 2992923 - DNA, 25 bp, Homo sapien
catcaccgagtgtaaacaaggcgct

SEQ ID NO: 2992924 - DNA, 25 bp, Homo sapien
gaccgctgggattggttggcactcc

SEQ ID NO: 2992925 - DNA, 25 bp, Homo sapien
gattggctgttgtccagtccgcact

SEQ ID NO: 2992926 - DNA, 25 bp, Homo sapien
tccggcagggacacgaaagagttaa

SEQ ID NO: 2992927 - DNA, 25 bp, Homo sapien
tactaataagctcgtgccactcagc

SEQ ID NO: 2992928 - DNA, 25 bp, Homo sapien
gtaaacaggcctcccaataggctgg

SEQ ID NO: 2992929 - DNA, 25 bp, Homo sapien
gagctcgtgccactcattcggcgta

SEQ ID NO: 2992930 - DNA, 25 bp, Homo sapien
agccacgggccctgcatactaataa

SEQ ID NO: 2992931 - DNA, 25 bp, Homo sapien
aatcagtaaatgtgactttgttttg

SEQ ID NO: 2992932 - DNA, 25 bp, Homo sapien
tacaactgaatgcaatacaattaaa

SEQ ID NO: 2992933 - DNA, 25 bp, Homo sapien
gatacaactgaatgcaatacaatta

SEQ ID NO: 2992934 - DNA, 25 bp, Homo sapien
caactgaatgcaatacaattaaatc

SEQ ID NO: 2992935 - DNA, 25 bp, Homo sapien
gaggtggattactgtcgcctgcctg

SEQ ID NO: 2992936 - DNA, 25 bp, Homo sapien
aatcgctgacgagggcatttcggaa

SEQ ID NO: 2992937 - DNA, 25 bp, Homo sapien
ctgaccggattggagagagcttttc

SEQ ID NO: 2992938 - DNA, 25 bp, Homo sapien
catttcggaaggaactgaacctagg

SEQ ID NO: 2992939 - DNA, 25 bp, Homo sapien
caaagttgagaaagcgcgagctgcc

SEQ ID NO: 2992940 - DNA, 25 bp, Homo sapien
ggcgattctcgggacgcgggctcgg

SEQ ID NO: 2992941 - DNA, 25 bp, Homo sapien
gatcgcaggcccgattgttcctttc

SEQ ID NO: 2992942 - DNA, 25 bp, Homo sapien
cgggctcggctacgaagcaacaatt

SEQ ID NO: 2992943 - DNA, 25 bp, Homo sapien
ggtctaacaaatagctcggctccca

SEQ ID NO: 2992944 - DNA, 25 bp, Homo sapien
tctctccccgggtctaacaaatagc

SEQ ID NO: 2992945 - DNA, 25 bp, Homo sapien
cccgggtctaacaaatagctcggct

SEQ ID NO: 2992946 - DNA, 25 bp, Homo sapien
taacaaatagctcggctcccaagcc

SEQ ID NO: 2992947 - DNA, 25 bp, Homo sapien
gttgaggctgtaacaatcaccccgc

SEQ ID NO: 2992948 - DNA, 25 bp, Homo sapien
caacggcccaaatcggccctgggat

SEQ ID NO: 2992949 - DNA, 25 bp, Homo sapien
gtcagaatgctctctctcaacggcc

SEQ ID NO: 2992950 - DNA, 25 bp, Homo sapien
cccaatcaaattcgcccaggatctt

SEQ ID NO: 2992951 - DNA, 25 bp, Homo sapien
tctgctgggtgataaaaacccaaat

SEQ ID NO: 2992952 - DNA, 25 bp, Homo sapien
ctagggcgccgcggcgaagaggctg

SEQ ID NO: 2992953 - DNA, 25 bp, Homo sapien
ggcgccgcggcgaagaggctgctgg

SEQ ID NO: 2992954 - DNA, 25 bp, Homo sapien
ggctctgctgggtgataaaaaccca

SEQ ID NO: 2992955 - DNA, 25 bp, Homo sapien
ccagccgcactgctcgccgcctccc

SEQ ID NO: 2992956 - DNA, 25 bp, Homo sapien
gttctcgtccccgcgggtccctgca

SEQ ID NO: 2992957 - DNA, 25 bp, Homo sapien
ccgcactgctcgccgcctcccgttc

SEQ ID NO: 2992958 - DNA, 25 bp, Homo sapien
agccgcactgctcgccgcctcccgt

SEQ ID NO: 2992959 - DNA, 25 bp, Homo sapien
ccagcggccgctgtgcgggtccatg

SEQ ID NO: 2992960 - DNA, 25 bp, Homo sapien
agcggccgctgtgcgggtccatggt

SEQ ID NO: 2992961 - DNA, 25 bp, Homo sapien
cagcggccgctgtgcgggtccatgg

SEQ ID NO: 2992962 - DNA, 25 bp, Homo sapien
gccagcggccgctgtgcgggtccat

SEQ ID NO: 2992963 - DNA, 25 bp, Homo sapien
aggactgggcttctcggcgggcggc

SEQ ID NO: 2992964 - DNA, 25 bp, Homo sapien
gactgggcttctcggcgggcggccg

SEQ ID NO: 2992965 - DNA, 25 bp, Homo sapien
ggaggactgggcttctcggcgggcg

SEQ ID NO: 2992966 - DNA, 25 bp, Homo sapien
gggaggactgggcttctcggcgggc

SEQ ID NO: 2992967 - DNA, 25 bp, Homo sapien
tgtgtgcgaagccatgggcaacggc

SEQ ID NO: 2992968 - DNA, 25 bp, Homo sapien
gcggcgcaaagtcgcggccatccat

SEQ ID NO: 2992969 - DNA, 25 bp, Homo sapien
tactttcccggctggaagtgtgcgg

SEQ ID NO: 2992970 - DNA, 25 bp, Homo sapien
aggctcccgcgctccgacagcagat

SEQ ID NO: 2992971 - DNA, 25 bp, Homo sapien
caacagccgttttgtttccgcagaa

SEQ ID NO: 2992972 - DNA, 25 bp, Homo sapien
aacgtcttagggaggtgaatgcaga

SEQ ID NO: 2992973 - DNA, 25 bp, Homo sapien
tgcagaaaagaggtttccgtggaat

SEQ ID NO: 2992974 - DNA, 25 bp, Homo sapien
cgcagaaagcgcctcgttgtcccag

SEQ ID NO: 2992975 - DNA, 25 bp, Homo sapien
gcgccgcctggtgacctctagggct

SEQ ID NO: 2992976 - DNA, 25 bp, Homo sapien
aaacaaaagccacccatgtaccagg

SEQ ID NO: 2992977 - DNA, 25 bp, Homo sapien
tattcacagttcatcaagctaccaa

SEQ ID NO: 2992978 - DNA, 25 bp, Homo sapien
ctctagggcttcaggcgtggtagct

SEQ ID NO: 2992979 - DNA, 25 bp, Homo sapien
ttaaatcacccatcgctcaggcaag

SEQ ID NO: 2992980 - DNA, 25 bp, Homo sapien
taaatcacccatcgctcaggcaagt

SEQ ID NO: 2992981 - DNA, 25 bp, Homo sapien
aaatcacccatcgctcaggcaagtg

SEQ ID NO: 2992982 - DNA, 25 bp, Homo sapien
cacgtggccaaacttagaatgagca

SEQ ID NO: 2992983 - DNA, 25 bp, Homo sapien
caaatgggttgaacatctccgagca

SEQ ID NO: 2992984 - DNA, 25 bp, Homo sapien
caagcgttctcttcggtccgcaggg

SEQ ID NO: 2992985 - DNA, 25 bp, Homo sapien
ttggattctactcccagacaggcgg

SEQ ID NO: 2992986 - DNA, 25 bp, Homo sapien
gatattcctacagaaagcgcggcgg

SEQ ID NO: 2992987 - DNA, 25 bp, Homo sapien
tccgtaccgggataatcagacgtgg

SEQ ID NO: 2992988 - DNA, 25 bp, Homo sapien
cccgtaagagagaaagtcaacttgc

SEQ ID NO: 2992989 - DNA, 25 bp, Homo sapien
tactcacgtgacctggatattccta

SEQ ID NO: 2992990 - DNA, 25 bp, Homo sapien
gctgcccatagagaacgttgctgtt

SEQ ID NO: 2992991 - DNA, 25 bp, Homo sapien
gaaacggtgctgcccatagagaacg

SEQ ID NO: 2992992 - DNA, 25 bp, Homo sapien
cggtgctgcccatagagaacgttgc

SEQ ID NO: 2992993 - DNA, 25 bp, Homo sapien
cccatagagaacgttgctgtttcca

SEQ ID NO: 2992994 - DNA, 25 bp, Homo sapien
agctcccagcccctcggcctctcat

SEQ ID NO: 2992995 - DNA, 25 bp, Homo sapien
tgggagctcccagcccctcggcctc

SEQ ID NO: 2992996 - DNA, 25 bp, Homo sapien
acctgctggacaccctgggagctcc

SEQ ID NO: 2992997 - DNA, 25 bp, Homo sapien
ccacctgctggacaccctgggagct

SEQ ID NO: 2992998 - DNA, 25 bp, Homo sapien
ctttgcccacgaggaagcggtcgaa

SEQ ID NO: 2992999 - DNA, 25 bp, Homo sapien
tgcgctgctgagatagtcgaggccc

SEQ ID NO: 2993000 - DNA, 25 bp, Homo sapien
taggagactccatagggtgcagcgt

SEQ ID NO: 2993001 - DNA, 25 bp, Homo sapien
gaagtagccgcttttgtccagaccg

SEQ ID NO: 2993002 - DNA, 25 bp, Homo sapien
gccccaggcggtcatcacatagcct

SEQ ID NO: 2993003 - DNA, 25 bp, Homo sapien
ggcggtcatcacatagcctcgtcct

SEQ ID NO: 2993004 - DNA, 25 bp, Homo sapien
ccaggcggtcatcacatagcctcgt

SEQ ID NO: 2993005 - DNA, 25 bp, Homo sapien
caggtccagcgcgtgtgtggaacgg

SEQ ID NO: 2993006 - DNA, 25 bp, Homo sapien
tggatccgggcgaactctacgcggt

SEQ ID NO: 2993007 - DNA, 25 bp, Homo sapien
cggtgggtggatccgggcgaactct

SEQ ID NO: 2993008 - DNA, 25 bp, Homo sapien
gaactctacgcggtctttgctgtcc

SEQ ID NO: 2993009 - DNA, 25 bp, Homo sapien
gctgctcggtgggtggatccgggcg

SEQ ID NO: 2993010 - DNA, 25 bp, Homo sapien
gggtgcggggcagccaggggggatg

SEQ ID NO: 2993011 - DNA, 25 bp, Homo sapien
tgcgggtgcggggcagccagggggg

SEQ ID NO: 2993012 - DNA, 25 bp, Homo sapien
cgggtgcggggcagccaggggggat

SEQ ID NO: 2993013 - DNA, 25 bp, Homo sapien
gcgggtgcggggcagccagggggga

SEQ ID NO: 2993014 - DNA, 25 bp, Homo sapien
taggagtgcccccccatccacaggg

SEQ ID NO: 2993015 - DNA, 25 bp, Homo sapien
ggagtgcccccccatccacagggag

SEQ ID NO: 2993016 - DNA, 25 bp, Homo sapien
gagtgcccccccatccacagggagg

SEQ ID NO: 2993017 - DNA, 25 bp, Homo sapien
cgtaggagtgcccccccatccacag

SEQ ID NO: 2993018 - DNA, 25 bp, Homo sapien
ggatgaccagctgtgtgggggcgtc

SEQ ID NO: 2993019 - DNA, 25 bp, Homo sapien
aggatgaccagctgtgtgggggcgt

SEQ ID NO: 2993020 - DNA, 25 bp, Homo sapien
ggcaggatgaccagctgtgtggggg

SEQ ID NO: 2993021 - DNA, 25 bp, Homo sapien
agtgacgcctggtccatgacatccg

SEQ ID NO: 2993022 - DNA, 25 bp, Homo sapien
ctgcatgtgagaggcggggccccgg

SEQ ID NO: 2993023 - DNA, 25 bp, Homo sapien
cacagtgacgcctggtccatgacat

SEQ ID NO: 2993024 - DNA, 25 bp, Homo sapien
gggccacagtgacgcctggtccatg

SEQ ID NO: 2993025 - DNA, 25 bp, Homo sapien
tgctgctgcaaagcatagagctcct

SEQ ID NO: 2993026 - DNA, 25 bp, Homo sapien
atgatgtcggccgtggactgctgac

SEQ ID NO: 2993027 - DNA, 25 bp, Homo sapien
ctggcagggcagacatttaaagtgc

SEQ ID NO: 2993028 - DNA, 25 bp, Homo sapien
taaggcaactggcttgtgggtggac

SEQ ID NO: 2993029 - DNA, 25 bp, Homo sapien
tgggcgggctcctccagatccaggt

SEQ ID NO: 2993030 - DNA, 25 bp, Homo sapien
ttcgagaccagcgtgggcaacagag

SEQ ID NO: 2993031 - DNA, 25 bp, Homo sapien
gcgtgggcaacagagtgagcacgtg

SEQ ID NO: 2993032 - DNA, 25 bp, Homo sapien
tgggcaacagagtgagcacgtgcca

SEQ ID NO: 2993033 - DNA, 25 bp, Homo sapien
tggatggatcatttgaggccaggaa

SEQ ID NO: 2993034 - DNA, 25 bp, Homo sapien
caggagggccgcacattgcagttct

SEQ ID NO: 2993035 - DNA, 25 bp, Homo sapien
cctcgaggttagaagagtgcacgtc

SEQ ID NO: 2993036 - DNA, 25 bp, Homo sapien
catgaatccctgagctatgaggcag

SEQ ID NO: 2993037 - DNA, 25 bp, Homo sapien
actcctctgccgctggattgccagg

SEQ ID NO: 2993038 - DNA, 25 bp, Homo sapien
gcaggttgaaggctagcacgtcctc

SEQ ID NO: 2993039 - DNA, 25 bp, Homo sapien
ggtgtccttgcgctgcaggatctgc

SEQ ID NO: 2993040 - DNA, 25 bp, Homo sapien
ggttgaaggctagcacgtcctcttc

SEQ ID NO: 2993041 - DNA, 25 bp, Homo sapien
gtccaggtgtccttgcgctgcagga

SEQ ID NO: 2993042 - DNA, 25 bp, Homo sapien
cacaggggcctgtgagccgggccag

SEQ ID NO: 2993043 - DNA, 25 bp, Homo sapien
atccccacctcctgcgtgtccagcc

SEQ ID NO: 2993044 - DNA, 25 bp, Homo sapien
ccgccagccgcacgcgcatccccac

SEQ ID NO: 2993045 - DNA, 25 bp, Homo sapien
ttctccttgtagcgccgctgcagct

SEQ ID NO: 2993046 - DNA, 25 bp, Homo sapien
ctccgccagccgcacgcgcatcccc

SEQ ID NO: 2993047 - DNA, 25 bp, Homo sapien
gggggtgctgcgaccctcccaggcc

SEQ ID NO: 2993048 - DNA, 25 bp, Homo sapien
gtgggggtgctgcgaccctcccagg

SEQ ID NO: 2993049 - DNA, 25 bp, Homo sapien
tgggggtgctgcgaccctcccaggc

SEQ ID NO: 2993050 - DNA, 25 bp, Homo sapien
acaggtagggggcagagcccaatcc

SEQ ID NO: 2993051 - DNA, 25 bp, Homo sapien
gagcccaatcctggcctgttcccac

SEQ ID NO: 2993052 - DNA, 25 bp, Homo sapien
ggcagagcccaatcctggcctgttc

SEQ ID NO: 2993053 - DNA, 25 bp, Homo sapien
ctggtgtctgcccacaggtaggggg

SEQ ID NO: 2993054 - DNA, 25 bp, Homo sapien
caccaggctctgacaagcggctctt

SEQ ID NO: 2993055 - DNA, 25 bp, Homo sapien
ctgccacttggtctcgctgctggcc

SEQ ID NO: 2993056 - DNA, 25 bp, Homo sapien
aggctctgacaagcggctcttccac

SEQ ID NO: 2993057 - DNA, 25 bp, Homo sapien
ggccctgccacttggtctcgctgct

SEQ ID NO: 2993058 - DNA, 25 bp, Homo sapien
gggcaggcagcgagcttgagtgttt

SEQ ID NO: 2993059 - DNA, 25 bp, Homo sapien
gcttgagtgtttgcgcttcctcggc

SEQ ID NO: 2993060 - DNA, 25 bp, Homo sapien
tgagtgtttgcgcttcctcggccgg

SEQ ID NO: 2993061 - DNA, 25 bp, Homo sapien
gcagcgagcttgagtgtttgcgctt

SEQ ID NO: 2993062 - DNA, 25 bp, Homo sapien
ctttatacagtgcagataaagaggc

SEQ ID NO: 2993063 - DNA, 25 bp, Homo sapien
gatttatgcaaatgggcctgccggg

SEQ ID NO: 2993064 - DNA, 25 bp, Homo sapien
taatggataataacatcgcgccggc

SEQ ID NO: 2993065 - DNA, 25 bp, Homo sapien
aggacaattataccaggcccgggag

SEQ ID NO: 2993066 - DNA, 25 bp, Homo sapien
catcaggattgatgcagtgcgcaca

SEQ ID NO: 2993067 - DNA, 25 bp, Homo sapien
ggcccgcatagacgctcctctccag

SEQ ID NO: 2993068 - DNA, 25 bp, Homo sapien
gaggcagtctgcaggcccgcataga

SEQ ID NO: 2993069 - DNA, 25 bp, Homo sapien
ccgcacacagcagacccaggcttgt

SEQ ID NO: 2993070 - DNA, 25 bp, Homo sapien
ttgcttcgcttcttcgcaggctcgc

SEQ ID NO: 2993071 - DNA, 25 bp, Homo sapien
ccacagcccctgggcggttaggtgc

SEQ ID NO: 2993072 - DNA, 25 bp, Homo sapien
agcccctgggcggttaggtgcctct

SEQ ID NO: 2993073 - DNA, 25 bp, Homo sapien
ccctgggcggttaggtgcctctctg

SEQ ID NO: 2993074 - DNA, 25 bp, Homo sapien
tgcactctcagggcgccctctgcaa

SEQ ID NO: 2993075 - DNA, 25 bp, Homo sapien
cgccagcccgccctgacagctgctc

SEQ ID NO: 2993076 - DNA, 25 bp, Homo sapien
tgctcttcttacactgcgccttctc

SEQ ID NO: 2993077 - DNA, 25 bp, Homo sapien
ctgctcttcttacactgcgccttct

SEQ ID NO: 2993078 - DNA, 25 bp, Homo sapien
ggcgccagcccgccctgacagctgc

SEQ ID NO: 2993079 - DNA, 25 bp, Homo sapien
acctgggtgtctcccggctgccgtg

SEQ ID NO: 2993080 - DNA, 25 bp, Homo sapien
tgggtgccgtgtggccccagacacc

SEQ ID NO: 2993081 - DNA, 25 bp, Homo sapien
ggcctgtgggcagccctttgctctt

SEQ ID NO: 2993082 - DNA, 25 bp, Homo sapien
cttggcactcttggctcgggacagc

SEQ ID NO: 2993083 - DNA, 25 bp, Homo sapien
agaggagggtgagggccccagcacg

SEQ ID NO: 2993084 - DNA, 25 bp, Homo sapien
caggagaccctcgcagtcctcactg

SEQ ID NO: 2993085 - DNA, 25 bp, Homo sapien
cccaggagaccctcgcagtcctcac

SEQ ID NO: 2993086 - DNA, 25 bp, Homo sapien
ggagaccctcgcagtcctcactgtc

SEQ ID NO: 2993087 - DNA, 25 bp, Homo sapien
tcacggcaggcgaaggcccgagagg

SEQ ID NO: 2993088 - DNA, 25 bp, Homo sapien
tttcttcttgcccagcgcacctggg

SEQ ID NO: 2993089 - DNA, 25 bp, Homo sapien
gtgcccttgcgcgtggccctcttga

SEQ ID NO: 2993090 - DNA, 25 bp, Homo sapien
tgaggcgctcactggccagctggct

SEQ ID NO: 2993091 - DNA, 25 bp, Homo sapien
ttgcgtgtggccagcgtgatggaca

SEQ ID NO: 2993092 - DNA, 25 bp, Homo sapien
caggatggccttggcgttgcgtgtg

SEQ ID NO: 2993093 - DNA, 25 bp, Homo sapien
ccttggcgttgcgtgtggccagcgt

SEQ ID NO: 2993094 - DNA, 25 bp, Homo sapien
tgatggacagggccccgttcttccg

SEQ ID NO: 2993095 - DNA, 25 bp, Homo sapien
agcaggcggctcacggcccggccct

SEQ ID NO: 2993096 - DNA, 25 bp, Homo sapien
tcttcctccacggcgaagctttcca

SEQ ID NO: 2993097 - DNA, 25 bp, Homo sapien
cctccacggcgaagctttccagcag

SEQ ID NO: 2993098 - DNA, 25 bp, Homo sapien
ttcctccacggcgaagctttccagc

SEQ ID NO: 2993099 - DNA, 25 bp, Homo sapien
cttcctcctcgtcctcctcctcttc

SEQ ID NO: 2993100 - DNA, 25 bp, Homo sapien
ctcagagggccgctgtcctcctcct

SEQ ID NO: 2993101 - DNA, 25 bp, Homo sapien
tgagcacgggcagcccgtcccgcag

SEQ ID NO: 2993102 - DNA, 25 bp, Homo sapien
acgctgcccgcgtacagcaggctat

SEQ ID NO: 2993103 - DNA, 25 bp, Homo sapien
gggatgagcacgggcagcccgtccc

SEQ ID NO: 2993104 - DNA, 25 bp, Homo sapien
tgacgctgcccgcgtacagcaggct

SEQ ID NO: 2993105 - DNA, 25 bp, Homo sapien
ctctcgccctcgatgacgatgctat

SEQ ID NO: 2993106 - DNA, 25 bp, Homo sapien
ctcgccctcgatgacgatgctatag

SEQ ID NO: 2993107 - DNA, 25 bp, Homo sapien
tgagtagatcctctgccggttgccc

SEQ ID NO: 2993108 - DNA, 25 bp, Homo sapien
tgctccagtgagtagatcctctgcc

SEQ ID NO: 2993109 - DNA, 25 bp, Homo sapien
aggaacgcgggcgacgacccatgag

SEQ ID NO: 2993110 - DNA, 25 bp, Homo sapien
tgcaggaacgcgggcgacgacccat

SEQ ID NO: 2993111 - DNA, 25 bp, Homo sapien
aacgcgggcgacgacccatgagcag

SEQ ID NO: 2993112 - DNA, 25 bp, Homo sapien
ctgcaggaacgcgggcgacgaccca

SEQ ID NO: 2993113 - DNA, 25 bp, Homo sapien
ttctgactccagtaggcgcagaccc

SEQ ID NO: 2993114 - DNA, 25 bp, Homo sapien
tgccgggcgggaggtaccggctgga

SEQ ID NO: 2993115 - DNA, 25 bp, Homo sapien
tggactgtggccgcacatcgagaac

SEQ ID NO: 2993116 - DNA, 25 bp, Homo sapien
tacagacatcgagacttctgactcc

SEQ ID NO: 2993117 - DNA, 25 bp, Homo sapien
gtcctcatcttcgtcaccggaggcc

SEQ ID NO: 2993118 - DNA, 25 bp, Homo sapien
cagcagcctgacgttggagacggcg

SEQ ID NO: 2993119 - DNA, 25 bp, Homo sapien
gagacggcgatgtggcctgtatccc

SEQ ID NO: 2993120 - DNA, 25 bp, Homo sapien
ttccaccactactgagtccaggtcc

SEQ ID NO: 2993121 - DNA, 25 bp, Homo sapien
tctttgctaatggattttttcccag

SEQ ID NO: 2993122 - DNA, 25 bp, Homo sapien
tgctagacactagcagggctggaga

SEQ ID NO: 2993123 - DNA, 25 bp, Homo sapien
tgtcttcaaagcttcggggccgtcc

SEQ ID NO: 2993124 - DNA, 25 bp, Homo sapien
ggtgcctcactggataccttcttgg

SEQ ID NO: 2993125 - DNA, 25 bp, Homo sapien
gggctgccacggcggcccaggaagt

SEQ ID NO: 2993126 - DNA, 25 bp, Homo sapien
gcggcccaggaagtggtcggaggcc

SEQ ID NO: 2993127 - DNA, 25 bp, Homo sapien
cttccgcttggtctgcgccaccgcg

SEQ ID NO: 2993128 - DNA, 25 bp, Homo sapien
caccgcggaccagctcagcaagggg

SEQ ID NO: 2993129 - DNA, 25 bp, Homo sapien
ctgcagcacccccggccccttgctg

SEQ ID NO: 2993130 - DNA, 25 bp, Homo sapien
cccggccccttgctggccgctgcca

SEQ ID NO: 2993131 - DNA, 25 bp, Homo sapien
cacccccggccccttgctggccgct

SEQ ID NO: 2993132 - DNA, 25 bp, Homo sapien
agcacccccggccccttgctggccg

SEQ ID NO: 2993133 - DNA, 25 bp, Homo sapien
catgagcaacgccttgcaggtcttg

SEQ ID NO: 2993134 - DNA, 25 bp, Homo sapien
agtcggcgcggaagccgttgccaaa

SEQ ID NO: 2993135 - DNA, 25 bp, Homo sapien
ccgttgccaaatatgggtgtggcca

SEQ ID NO: 2993136 - DNA, 25 bp, Homo sapien
gccttcttagcccgcagcagcttgt

SEQ ID NO: 2993137 - DNA, 25 bp, Homo sapien
tgtcgtagggcagcgggaactctgc

SEQ ID NO: 2993138 - DNA, 25 bp, Homo sapien
ggagctgtggcagtcgctgtcgtag

SEQ ID NO: 2993139 - DNA, 25 bp, Homo sapien
gcgaggaagcgggagggcacgccgg

SEQ ID NO: 2993140 - DNA, 25 bp, Homo sapien
cctcgtcctcgtccgagaaggagct

SEQ ID NO: 2993141 - DNA, 25 bp, Homo sapien
gaggctggaggtggacacggagcct

SEQ ID NO: 2993142 - DNA, 25 bp, Homo sapien
gaggtggacgagccagaggaggaag

SEQ ID NO: 2993143 - DNA, 25 bp, Homo sapien
ggaggtggacgagccagaggaggaa

SEQ ID NO: 2993144 - DNA, 25 bp, Homo sapien
aggtggacacggagcctgaggagga

SEQ ID NO: 2993145 - DNA, 25 bp, Homo sapien
gtgggattccccgaccacttccaga

SEQ ID NO: 2993146 - DNA, 25 bp, Homo sapien
tcagggcctctttgcgcttgagctt

SEQ ID NO: 2993147 - DNA, 25 bp, Homo sapien
gaaggctgagatctttggccggttt

SEQ ID NO: 2993148 - DNA, 25 bp, Homo sapien
tgcctccgggagagctctttggctt

SEQ ID NO: 2993149 - DNA, 25 bp, Homo sapien
agctgacaggaagacggcacagtcc

SEQ ID NO: 2993150 - DNA, 25 bp, Homo sapien
cttgtagaacagcttccgggccttc

SEQ ID NO: 2993151 - DNA, 25 bp, Homo sapien
gcacagtccccgacacgcagggtct

SEQ ID NO: 2993152 - DNA, 25 bp, Homo sapien
ttgccgtcgcactgcctcttgccca

SEQ ID NO: 2993153 - DNA, 25 bp, Homo sapien
gggagccctgctctagggcatgccc

SEQ ID NO: 2993154 - DNA, 25 bp, Homo sapien
agccctgctctagggcatgcccatg

SEQ ID NO: 2993155 - DNA, 25 bp, Homo sapien
gctctagggcatgcccatgggctgt

SEQ ID NO: 2993156 - DNA, 25 bp, Homo sapien
cctgctctagggcatgcccatgggc

SEQ ID NO: 2993157 - DNA, 25 bp, Homo sapien
gggcaaggcgcgcggggcatcagtg

SEQ ID NO: 2993158 - DNA, 25 bp, Homo sapien
tgggggcaaggcgcgcggggcatca

SEQ ID NO: 2993159 - DNA, 25 bp, Homo sapien
caaggcgcgcggggcatcagtggcc

SEQ ID NO: 2993160 - DNA, 25 bp, Homo sapien
gcgcgcggggcatcagtggccggcc

SEQ ID NO: 2993161 - DNA, 25 bp, Homo sapien
tcagcataggatgggcacgccatca

SEQ ID NO: 2993162 - DNA, 25 bp, Homo sapien
tcatcctcgtggcaggactggtaca

SEQ ID NO: 2993163 - DNA, 25 bp, Homo sapien
ccaggtagtagaggtcctgccggtc

SEQ ID NO: 2993164 - DNA, 25 bp, Homo sapien
ggagatggtctgcacgtcgttctca

SEQ ID NO: 2993165 - DNA, 25 bp, Homo sapien
catatttgctcagatgcgcccttgg

SEQ ID NO: 2993166 - DNA, 25 bp, Homo sapien
aaatctcccgtgaactgccggtgcg

SEQ ID NO: 2993167 - DNA, 25 bp, Homo sapien
ccaagagatcagagggtgccgtcaa

SEQ ID NO: 2993168 - DNA, 25 bp, Homo sapien
acacacaccttgtcacgcggatggg

SEQ ID NO: 2993169 - DNA, 25 bp, Homo sapien
tggccccggaaacagaaatcagata

SEQ ID NO: 2993170 - DNA, 25 bp, Homo sapien
tttgaacacaggtgagatgctcacg

SEQ ID NO: 2993171 - DNA, 25 bp, Homo sapien
cacggcacctactactttcaggaaa

SEQ ID NO: 2993172 - DNA, 25 bp, Homo sapien
gctgttgtcacactccctggtctgg

SEQ ID NO: 2993173 - DNA, 25 bp, Homo sapien
tctggaactccagtggctcagcatg

SEQ ID NO: 2993174 - DNA, 25 bp, Homo sapien
cactcatgcgagacaaagggtaggc

SEQ ID NO: 2993175 - DNA, 25 bp, Homo sapien
tgttgggctcaggtccaggcagcct

SEQ ID NO: 2993176 - DNA, 25 bp, Homo sapien
tgccttcgtcacgttaaccacggtg

SEQ ID NO: 2993177 - DNA, 25 bp, Homo sapien
tgttaccaggagaaggtggcaggaa

SEQ ID NO: 2993178 - DNA, 25 bp, Homo sapien
ttaccaggagaaggtggcaggaagg

SEQ ID NO: 2993179 - DNA, 25 bp, Homo sapien
ctgttaccaggagaaggtggcagga

SEQ ID NO: 2993180 - DNA, 25 bp, Homo sapien
taccaggagaaggtggcaggaaggc

SEQ ID NO: 2993181 - DNA, 25 bp, Homo sapien
gcagttccagcacgaaacaggggca

SEQ ID NO: 2993182 - DNA, 25 bp, Homo sapien
actctactagaaccacgtgggtcag

SEQ ID NO: 2993183 - DNA, 25 bp, Homo sapien
cgtgggtcaggtgagggcagttcca

SEQ ID NO: 2993184 - DNA, 25 bp, Homo sapien
gacacggccgtgtgatcgtccaggc

SEQ ID NO: 2993185 - DNA, 25 bp, Homo sapien
ccgctcctggaacaccagcctcagt

SEQ ID NO: 2993186 - DNA, 25 bp, Homo sapien
agccaccagcaagcgctggggccgc

SEQ ID NO: 2993187 - DNA, 25 bp, Homo sapien
acacagccaccagcaagcgctgggg

SEQ ID NO: 2993188 - DNA, 25 bp, Homo sapien
gctcctggaacaccagcctcagttc

SEQ ID NO: 2993189 - DNA, 25 bp, Homo sapien
atgcccctgtggatgggagacttac

SEQ ID NO: 2993190 - DNA, 25 bp, Homo sapien
ggactgtaattccccagggcaggga

SEQ ID NO: 2993191 - DNA, 25 bp, Homo sapien
ctcctggatgctccaatgcttgccc

SEQ ID NO: 2993192 - DNA, 25 bp, Homo sapien
gtgcacggtgttgttcaggccctct

SEQ ID NO: 2993193 - DNA, 25 bp, Homo sapien
gtcattgacacctcctactccaggg

SEQ ID NO: 2993194 - DNA, 25 bp, Homo sapien
aagaggcgggcctgccgctggtggt

SEQ ID NO: 2993195 - DNA, 25 bp, Homo sapien
ctgcccacgcgggagggaagcgagc

SEQ ID NO: 2993196 - DNA, 25 bp, Homo sapien
ttcattgagtccgtcattgacacct

SEQ ID NO: 2993197 - DNA, 25 bp, Homo sapien
gcgagcggcgccgtggcttcgggcg

SEQ ID NO: 2993198 - DNA, 25 bp, Homo sapien
ggcgccgtggcttcgggcgcgcggg

SEQ ID NO: 2993199 - DNA, 25 bp, Homo sapien
tgcggttcccggctcggaggcgctg

SEQ ID NO: 2993200 - DNA, 25 bp, Homo sapien
catcgccgggtgctgtgcggttccc

SEQ ID NO: 2993201 - DNA, 25 bp, Homo sapien
gcctcggggacgcggtccgcgccac

SEQ ID NO: 2993202 - DNA, 25 bp, Homo sapien
cgcctcggggacgcggtccgcgcca

SEQ ID NO: 2993203 - DNA, 25 bp, Homo sapien
gcgcctcggggacgcggtccgcgcc

SEQ ID NO: 2993204 - DNA, 25 bp, Homo sapien
ggcgcgtggttcgatcgcgcgctac

SEQ ID NO: 2993205 - DNA, 25 bp, Homo sapien
gggcggggcgcgtggttcgatcgcg

SEQ ID NO: 2993206 - DNA, 25 bp, Homo sapien
aggggctgttagaggaccgcagcgg

SEQ ID NO: 2993207 - DNA, 25 bp, Homo sapien
gggctgttagaggaccgcagcgggc

SEQ ID NO: 2993208 - DNA, 25 bp, Homo sapien
ggctgtgcggcggccaatcgggtga

SEQ ID NO: 2993209 - DNA, 25 bp, Homo sapien
ctgtgcggcggccaatcgggtgagg

SEQ ID NO: 2993210 - DNA, 25 bp, Homo sapien
tgtgcggcggccaatcgggtgaggg

SEQ ID NO: 2993211 - DNA, 25 bp, Homo sapien
gcggcggccaatcgggtgagggggc

SEQ ID NO: 2993212 - DNA, 25 bp, Homo sapien
tctgaacagtgatctgatgcaaata

SEQ ID NO: 2993213 - DNA, 25 bp, Homo sapien
aacagtgatctgatgcaaatatgtc

SEQ ID NO: 2993214 - DNA, 25 bp, Homo sapien
cgtgaatggcaccagtggcgttctg

SEQ ID NO: 2993215 - DNA, 25 bp, Homo sapien
caccagtggcgttctgaacagtgat

SEQ ID NO: 2993216 - DNA, 25 bp, Homo sapien
ttgtcaacacggggggtctcctgcc

SEQ ID NO: 2993217 - DNA, 25 bp, Homo sapien
cttgtcaacacggggggtctcctgc

SEQ ID NO: 2993218 - DNA, 25 bp, Homo sapien
ggacggattggaggggtggccctgc

SEQ ID NO: 2993219 - DNA, 25 bp, Homo sapien
gacggattggaggggtggccctgcg

SEQ ID NO: 2993220 - DNA, 25 bp, Homo sapien
gattggaggggtggccctgcggccc

SEQ ID NO: 2993221 - DNA, 25 bp, Homo sapien
cggattggaggggtggccctgcggc

SEQ ID NO: 2993222 - DNA, 25 bp, Homo sapien
tggcctgactcaagaaacctcgctc

SEQ ID NO: 2993223 - DNA, 25 bp, Homo sapien
gccggtggcctgactcaagaaacct

SEQ ID NO: 2993224 - DNA, 25 bp, Homo sapien
gctgccggtggcctgactcaagaaa

SEQ ID NO: 2993225 - DNA, 25 bp, Homo sapien
tcgctcccctgagcggcagctggag

SEQ ID NO: 2993226 - DNA, 25 bp, Homo sapien
tctgtccagggtgacggtgaccact

SEQ ID NO: 2993227 - DNA, 25 bp, Homo sapien
gggcccaataatggtcacttgacat

SEQ ID NO: 2993228 - DNA, 25 bp, Homo sapien
tcacttgacataaagggacagaggt

SEQ ID NO: 2993229 - DNA, 25 bp, Homo sapien
tggtgagacgctcgtctgcctcagg

SEQ ID NO: 2993230 - DNA, 25 bp, Homo sapien
tggtgcccgccggtgccctcagcct

SEQ ID NO: 2993231 - DNA, 25 bp, Homo sapien
ggatgtgggcgctgggagggtctcc

SEQ ID NO: 2993232 - DNA, 25 bp, Homo sapien
gagggtctccggctgtttcctggtg

SEQ ID NO: 2993233 - DNA, 25 bp, Homo sapien
cctcggccaaaccagcccctgttct

SEQ ID NO: 2993234 - DNA, 25 bp, Homo sapien
cccattttccttgccgacggatgcg

SEQ ID NO: 2993235 - DNA, 25 bp, Homo sapien
gagtgctgatgctagcctggaatct

SEQ ID NO: 2993236 - DNA, 25 bp, Homo sapien
ctttagctgtggtgcgtgcgggaga

SEQ ID NO: 2993237 - DNA, 25 bp, Homo sapien
cagcggtgcccttgtgtgctttagc

SEQ ID NO: 2993238 - DNA, 25 bp, Homo sapien
cctggaacaggttgtgggtctgcct

SEQ ID NO: 2993239 - DNA, 25 bp, Homo sapien
tccaccgaggtcatgagccaagcca

SEQ ID NO: 2993240 - DNA, 25 bp, Homo sapien
cagaaacatccagtattaactgcac

SEQ ID NO: 2993241 - DNA, 25 bp, Homo sapien
gatttattggctcttcaaggagtgt

SEQ ID NO: 2993242 - DNA, 25 bp, Homo sapien
gatgtctttggccagaacaccgtgg

SEQ ID NO: 2993243 - DNA, 25 bp, Homo sapien
tatgtgagaacattaggccccagca

SEQ ID NO: 2993244 - DNA, 25 bp, Homo sapien
tagaggctggcaagaaccagttgtt

SEQ ID NO: 2993245 - DNA, 25 bp, Homo sapien
ggccccagcaacacgtcattgtgta

SEQ ID NO: 2993246 - DNA, 25 bp, Homo sapien
tagtacgtgtggcttggtcacttcg

SEQ ID NO: 2993247 - DNA, 25 bp, Homo sapien
taccctgtacatatctttgagttca

SEQ ID NO: 2993248 - DNA, 25 bp, Homo sapien
cagggtattaacgtgtcagggctga

SEQ ID NO: 2993249 - DNA, 25 bp, Homo sapien
tgtggcttggtcacttcgtggctaa

SEQ ID NO: 2993250 - DNA, 25 bp, Homo sapien
cggactcagcagatgcgtagcattt

SEQ ID NO: 2993251 - DNA, 25 bp, Homo sapien
ctggaataagccttcgaaaagaaat

SEQ ID NO: 2993252 - DNA, 25 bp, Homo sapien
catttgctgcatgggttaattgaga

SEQ ID NO: 2993253 - DNA, 25 bp, Homo sapien
gctagcctcacgaaactggaataag

SEQ ID NO: 2993254 - DNA, 25 bp, Homo sapien
gtatggaatcttgcggcatccacga

SEQ ID NO: 2993255 - DNA, 25 bp, Homo sapien
cttgcggcatccacgagaccacctt

SEQ ID NO: 2993256 - DNA, 25 bp, Homo sapien
ggtatggaatcttgcggcatccacg

SEQ ID NO: 2993257 - DNA, 25 bp, Homo sapien
ggaatcttgcggcatccacgagacc

SEQ ID NO: 2993258 - DNA, 25 bp, Homo sapien
cattgtcatggactctggagacggg

SEQ ID NO: 2993259 - DNA, 25 bp, Homo sapien
tgagcggttccggtgtccggaggcg

SEQ ID NO: 2993260 - DNA, 25 bp, Homo sapien
ccgagcgggaaatcgtgcgcgacat

SEQ ID NO: 2993261 - DNA, 25 bp, Homo sapien
tctgggcgcaccactggcattgtca

SEQ ID NO: 2993262 - DNA, 25 bp, Homo sapien
taccccattgagcatggcatcgtca

SEQ ID NO: 2993263 - DNA, 25 bp, Homo sapien
cccagagcaagcgtggcatcctgac

SEQ ID NO: 2993264 - DNA, 25 bp, Homo sapien
acaccttctacaacgagctgcgcgt

SEQ ID NO: 2993265 - DNA, 25 bp, Homo sapien
agctgcgcgtggccccggaggagca

SEQ ID NO: 2993266 - DNA, 25 bp, Homo sapien
tcagcccttcggccctcccggcgac

SEQ ID NO: 2993267 - DNA, 25 bp, Homo sapien
gccctccccacggcgcggcagtccc

SEQ ID NO: 2993268 - DNA, 25 bp, Homo sapien
cgtcagcccttcggccctcccggcg

SEQ ID NO: 2993269 - DNA, 25 bp, Homo sapien
gtcagcccttcggccctcccggcga

SEQ ID NO: 2993270 - DNA, 25 bp, Homo sapien
gcctcggtcttcaaacgaacggaga

SEQ ID NO: 2993271 - DNA, 25 bp, Homo sapien
cggtcttcaaacgaacggagatccg

SEQ ID NO: 2993272 - DNA, 25 bp, Homo sapien
gacaatcaggcctgtgatttgaggg

SEQ ID NO: 2993273 - DNA, 25 bp, Homo sapien
gcagggatgtgtcgggtcgggtaga

SEQ ID NO: 2993274 - DNA, 25 bp, Homo sapien
tgtgtgacgtcgcatcttgggaccc

SEQ ID NO: 2993275 - DNA, 25 bp, Homo sapien
tagacaaagaagcttcggaggagac

SEQ ID NO: 2993276 - DNA, 25 bp, Homo sapien
ttcgccacgggagggaacatacctg

SEQ ID NO: 2993277 - DNA, 25 bp, Homo sapien
cgagcaggctgtgtggttctgccca

SEQ ID NO: 2993278 - DNA, 25 bp, Homo sapien
gggctgatccggtgcagagggagga

SEQ ID NO: 2993279 - DNA, 25 bp, Homo sapien
tggtgtggaggtgacccagagtccg

SEQ ID NO: 2993280 - DNA, 25 bp, Homo sapien
tgtctgacaagtagccggccaggtg

SEQ ID NO: 2993281 - DNA, 25 bp, Homo sapien
ggccctgggttaagcctcagctctg

SEQ ID NO: 2993282 - DNA, 25 bp, Homo sapien
aagtagacattccaggcaggtagag

SEQ ID NO: 2993283 - DNA, 25 bp, Homo sapien
gtagacattccaggcaggtagagtg

SEQ ID NO: 2993284 - DNA, 25 bp, Homo sapien
agtagacattccaggcaggtagagt

SEQ ID NO: 2993285 - DNA, 25 bp, Homo sapien
cacggtcatgggacaactgccataa

SEQ ID NO: 2993286 - DNA, 25 bp, Homo sapien
gattaaccttgatacttacggccaa

SEQ ID NO: 2993287 - DNA, 25 bp, Homo sapien
gttcagggtccatcgtttcatttag

SEQ ID NO: 2993288 - DNA, 25 bp, Homo sapien
taacctggcatcttacacggtcatg

SEQ ID NO: 2993289 - DNA, 25 bp, Homo sapien
agaccagctcaagtcccagcttccc

SEQ ID NO: 2993290 - DNA, 25 bp, Homo sapien
agctcaagtcccagcttcccggcct

SEQ ID NO: 2993291 - DNA, 25 bp, Homo sapien
ttgcccgaatgcagaccagctcaag

SEQ ID NO: 2993292 - DNA, 25 bp, Homo sapien
cttgcccgaatgcagaccagctcaa

SEQ ID NO: 2993293 - DNA, 25 bp, Homo sapien
cccagagggcaaggaatgcctcagc

SEQ ID NO: 2993294 - DNA, 25 bp, Homo sapien
ccagagggcaaggaatgcctcagcc

SEQ ID NO: 2993295 - DNA, 25 bp, Homo sapien
gcccagagggcaaggaatgcctcag

SEQ ID NO: 2993296 - DNA, 25 bp, Homo sapien
gaggccgtttacagggattccagcc

SEQ ID NO: 2993297 - DNA, 25 bp, Homo sapien
gatggcggctcctcagttctagggc

SEQ ID NO: 2993298 - DNA, 25 bp, Homo sapien
cttaataagtgcctgagattgttgg

SEQ ID NO: 2993299 - DNA, 25 bp, Homo sapien
acctgctaggatcgcttcctctgga

SEQ ID NO: 2993300 - DNA, 25 bp, Homo sapien
tggcagagtgtgcacagactcaggg

SEQ ID NO: 2993301 - DNA, 25 bp, Homo sapien
gtggcagagtgtgcacagactcagg

SEQ ID NO: 2993302 - DNA, 25 bp, Homo sapien
gccctggacagcaaccgtgccaggc

SEQ ID NO: 2993303 - DNA, 25 bp, Homo sapien
taagccctggacagcaaccgtgcca

SEQ ID NO: 2993304 - DNA, 25 bp, Homo sapien
ccgtagggcaggagtctagccaaaa

SEQ ID NO: 2993305 - DNA, 25 bp, Homo sapien
gactggaagtggtcacacctgtcta

SEQ ID NO: 2993306 - DNA, 25 bp, Homo sapien
gggccaagtagtgaaaccagagctg

SEQ ID NO: 2993307 - DNA, 25 bp, Homo sapien
tcttcctcataacagcgtgtgaccc

SEQ ID NO: 2993308 - DNA, 25 bp, Homo sapien
ctttacggatgtggatccaggaggc

SEQ ID NO: 2993309 - DNA, 25 bp, Homo sapien
atgctcccagcggtggcccttggaa

SEQ ID NO: 2993310 - DNA, 25 bp, Homo sapien
tttggagtctttacggatgtggatc

SEQ ID NO: 2993311 - DNA, 25 bp, Homo sapien
aggctggtgggacgatgtccacccc

SEQ ID NO: 2993312 - DNA, 25 bp, Homo sapien
cagcgcactcctgtgcgctctgagc

SEQ ID NO: 2993313 - DNA, 25 bp, Homo sapien
ctgtgcgctctgagcaagttgctgg

SEQ ID NO: 2993314 - DNA, 25 bp, Homo sapien
cccagcgcactcctgtgcgctctga

SEQ ID NO: 2993315 - DNA, 25 bp, Homo sapien
gcgcactcctgtgcgctctgagcaa

SEQ ID NO: 2993316 - DNA, 25 bp, Homo sapien
cagaccggcctctggccacactgct

SEQ ID NO: 2993317 - DNA, 25 bp, Homo sapien
gctcaggccccagaatgacgcactg

SEQ ID NO: 2993318 - DNA, 25 bp, Homo sapien
ggccccagaatgacgcactggactg

SEQ ID NO: 2993319 - DNA, 25 bp, Homo sapien
agaatgacgcactggactgccaccc

SEQ ID NO: 2993320 - DNA, 25 bp, Homo sapien
tgcctgctctgacccgcctctgacc

SEQ ID NO: 2993321 - DNA, 25 bp, Homo sapien
agaagcccgggtcggctcggctggc

SEQ ID NO: 2993322 - DNA, 25 bp, Homo sapien
gatgcgccctctgagtgctcacggc

SEQ ID NO: 2993323 - DNA, 25 bp, Homo sapien
cggcgtcacgaaccccctgcctgct

SEQ ID NO: 2993324 - DNA, 25 bp, Homo sapien
tgtcgttgacgaggccaaactggat

SEQ ID NO: 2993325 - DNA, 25 bp, Homo sapien
tagcggctgtcacaggacttgaggc

SEQ ID NO: 2993326 - DNA, 25 bp, Homo sapien
tctcagctgtcaggtagcggtcagt

SEQ ID NO: 2993327 - DNA, 25 bp, Homo sapien
cagtaccgtcggctccggaagatga

SEQ ID NO: 2993328 - DNA, 25 bp, Homo sapien
tcgcctgggcatggcccgaggccca

SEQ ID NO: 2993329 - DNA, 25 bp, Homo sapien
gcccagaacagacatgtgaacgcac

SEQ ID NO: 2993330 - DNA, 25 bp, Homo sapien
gacatgtgaacgcacagacacgata

SEQ ID NO: 2993331 - DNA, 25 bp, Homo sapien
tgaacgcacagacacgataccactc

SEQ ID NO: 2993332 - DNA, 25 bp, Homo sapien
ctgggcactgcccatcgcctggccc

SEQ ID NO: 2993333 - DNA, 25 bp, Homo sapien
agggcttggctgagacattctccag

SEQ ID NO: 2993334 - DNA, 25 bp, Homo sapien
tgagacattctccagctatgctgag

SEQ ID NO: 2993335 - DNA, 25 bp, Homo sapien
cagtctcagactccgcagctgccca

SEQ ID NO: 2993336 - DNA, 25 bp, Homo sapien
gagaaaaagaaggggagatatggac

SEQ ID NO: 2993337 - DNA, 25 bp, Homo sapien
tgccctaccctgggctcctccccaa

SEQ ID NO: 2993338 - DNA, 25 bp, Homo sapien
actcctgaggacacgaggctccact

SEQ ID NO: 2993339 - DNA, 25 bp, Homo sapien
ggagtcacacagacaggcaactggt

SEQ ID NO: 2993340 - DNA, 25 bp, Homo sapien
aggtgggtagtgactgcccgggcca

SEQ ID NO: 2993341 - DNA, 25 bp, Homo sapien
ccaggccccgggtaaagctgcctgc

SEQ ID NO: 2993342 - DNA, 25 bp, Homo sapien
cttttcagaccacctccgagccact

SEQ ID NO: 2993343 - DNA, 25 bp, Homo sapien
acctcgccttttcagaccacctccg

SEQ ID NO: 2993344 - DNA, 25 bp, Homo sapien
tccccacctcgccttttcagaccac

SEQ ID NO: 2993345 - DNA, 25 bp, Homo sapien
tcgccttttcagaccacctccgagc

SEQ ID NO: 2993346 - DNA, 25 bp, Homo sapien
agctctccttgcccagctgatgctg

SEQ ID NO: 2993347 - DNA, 25 bp, Homo sapien
gagctctccttgcccagctgatgct

SEQ ID NO: 2993348 - DNA, 25 bp, Homo sapien
ctggacatccgtcagggtgggggct

SEQ ID NO: 2993349 - DNA, 25 bp, Homo sapien
tggacatccgtcagggtgggggctt

SEQ ID NO: 2993350 - DNA, 25 bp, Homo sapien
ggacatccgtcagggtgggggcttg

SEQ ID NO: 2993351 - DNA, 25 bp, Homo sapien
tgcaggtgcaggaccccatagccat

SEQ ID NO: 2993352 - DNA, 25 bp, Homo sapien
ggacaggcccgaggatgccaactgc

SEQ ID NO: 2993353 - DNA, 25 bp, Homo sapien
ggtgcaggaccccatagccatggct

SEQ ID NO: 2993354 - DNA, 25 bp, Homo sapien
ggaccccatagccatggctgggctc

SEQ ID NO: 2993355 - DNA, 25 bp, Homo sapien
caggccagcaggcattacagctgga

SEQ ID NO: 2993356 - DNA, 25 bp, Homo sapien
cacggccatgactgccactttgagt

SEQ ID NO: 2993357 - DNA, 25 bp, Homo sapien
taaggattgccacatgcccggcctg

SEQ ID NO: 2993358 - DNA, 25 bp, Homo sapien
tgtccatatacaaatgcctaaaggt

SEQ ID NO: 2993359 - DNA, 25 bp, Homo sapien
ccaccaccatcaggcgctaccctgc

SEQ ID NO: 2993360 - DNA, 25 bp, Homo sapien
accaccatcaggcgctaccctgccc

SEQ ID NO: 2993361 - DNA, 25 bp, Homo sapien
catcaggcgctaccctgccccagtg

SEQ ID NO: 2993362 - DNA, 25 bp, Homo sapien
caccatcaggcgctaccctgcccca

SEQ ID NO: 2993363 - DNA, 25 bp, Homo sapien
ggctttgagtgctacccgccggcca

SEQ ID NO: 2993364 - DNA, 25 bp, Homo sapien
acgtagcgcccgttgctggctttga

SEQ ID NO: 2993365 - DNA, 25 bp, Homo sapien
cgacaaaatcgctgatagccgccag

SEQ ID NO: 2993366 - DNA, 25 bp, Homo sapien
ttcttcatgcacacgtagcgcccgt

SEQ ID NO: 2993367 - DNA, 25 bp, Homo sapien
aagtatgactccatgacagcacccg

SEQ ID NO: 2993368 - DNA, 25 bp, Homo sapien
tcagacctgtttcccttgccaagac

SEQ ID NO: 2993369 - DNA, 25 bp, Homo sapien
gaaacgccacacctggacttaggga

SEQ ID NO: 2993370 - DNA, 25 bp, Homo sapien
ccagcagcggagataaggacactca

SEQ ID NO: 2993371 - DNA, 25 bp, Homo sapien
gagagcgtctgctgcgctgcccctc

SEQ ID NO: 2993372 - DNA, 25 bp, Homo sapien
ggagagcgtctgctgcgctgcccct

SEQ ID NO: 2993373 - DNA, 25 bp, Homo sapien
gggagagcgtctgctgcgctgcccc

SEQ ID NO: 2993374 - DNA, 25 bp, Homo sapien
gcggggagagcgtctgctgcgctgc

SEQ ID NO: 2993375 - DNA, 25 bp, Homo sapien
agacgaagccgtccaggccgcgcag

SEQ ID NO: 2993376 - DNA, 25 bp, Homo sapien
aagctcaggtggaagacgtcgtaga

SEQ ID NO: 2993377 - DNA, 25 bp, Homo sapien
taggcgccgtcgctgaagctcaggt

SEQ ID NO: 2993378 - DNA, 25 bp, Homo sapien
tagacggagcggttggtgtccagct

SEQ ID NO: 2993379 - DNA, 25 bp, Homo sapien
tcagtactcccaaagcgcggtcccg

SEQ ID NO: 2993380 - DNA, 25 bp, Homo sapien
aagacgaagtcctcggcgcgttcgc

SEQ ID NO: 2993381 - DNA, 25 bp, Homo sapien
gtcgctgcacacgctgccgtggctg

SEQ ID NO: 2993382 - DNA, 25 bp, Homo sapien
aggcggccgcgctcacggaactcga

SEQ ID NO: 2993383 - DNA, 25 bp, Homo sapien
gttttaatgcgcgacaggctggtct

SEQ ID NO: 2993384 - DNA, 25 bp, Homo sapien
agacacggttttaatgcgcgacagg

SEQ ID NO: 2993385 - DNA, 25 bp, Homo sapien
tttaatgcgcgacaggctggtctgg

SEQ ID NO: 2993386 - DNA, 25 bp, Homo sapien
cacggttttaatgcgcgacaggctg

SEQ ID NO: 2993387 - DNA, 25 bp, Homo sapien
ctgtgccgccagagtgtacagggac

SEQ ID NO: 2993388 - DNA, 25 bp, Homo sapien
gggcgaaatgtacccaactcacatg

SEQ ID NO: 2993389 - DNA, 25 bp, Homo sapien
tggcaggtccacaatcagcttcttg

SEQ ID NO: 2993390 - DNA, 25 bp, Homo sapien
tcaacactcggcatttgaggagggc

SEQ ID NO: 2993391 - DNA, 25 bp, Homo sapien
tcagcctgggctacggcccacctcc

SEQ ID NO: 2993392 - DNA, 25 bp, Homo sapien
gtaggagccgtgaggtgcttctctg

SEQ ID NO: 2993393 - DNA, 25 bp, Homo sapien
cgatgagtgcgggtaggagccgtga

SEQ ID NO: 2993394 - DNA, 25 bp, Homo sapien
gcactgtccgcgatgagtgcgggta

SEQ ID NO: 2993395 - DNA, 25 bp, Homo sapien
tgcaagtgcccgtggtctcgtgcca

SEQ ID NO: 2993396 - DNA, 25 bp, Homo sapien
cacggtacccttgtcacactgttca

SEQ ID NO: 2993397 - DNA, 25 bp, Homo sapien
aatgctcaacaactaggtgcctccg

SEQ ID NO: 2993398 - DNA, 25 bp, Homo sapien
gagggtgctccctgagaccaaagca

SEQ ID NO: 2993399 - DNA, 25 bp, Homo sapien
ctctgcacaagacgccgaggcagct

SEQ ID NO: 2993400 - DNA, 25 bp, Homo sapien
gctggtctgttctcctgagcggcct

SEQ ID NO: 2993401 - DNA, 25 bp, Homo sapien
catctgggaatttagatccaagccc

SEQ ID NO: 2993402 - DNA, 25 bp, Homo sapien
ggctgggctgcgtgaatgagtgaat

SEQ ID NO: 2993403 - DNA, 25 bp, Homo sapien
ggaaatgagcttcgcctgcgttctc

SEQ ID NO: 2993404 - DNA, 25 bp, Homo sapien
caggaaatgagcttcgcctgcgttc

SEQ ID NO: 2993405 - DNA, 25 bp, Homo sapien
ctcgggcctgtggacatgggctgtt

SEQ ID NO: 2993406 - DNA, 25 bp, Homo sapien
gcctgtggacatgggctgttcctcc

SEQ ID NO: 2993407 - DNA, 25 bp, Homo sapien
tcatggccacctgcgtgctagagaa

SEQ ID NO: 2993408 - DNA, 25 bp, Homo sapien
tcaacgaggccatgaacgtgagctg

SEQ ID NO: 2993409 - DNA, 25 bp, Homo sapien
tgtgcactgctgtcaagcggcacgg

SEQ ID NO: 2993410 - DNA, 25 bp, Homo sapien
ctaaagaaggcggttgaccagcgga

SEQ ID NO: 2993411 - DNA, 25 bp, Homo sapien
cacggtttaatgcaaccttcgcttc

SEQ ID NO: 2993412 - DNA, 25 bp, Homo sapien
ggtgcgatcacggtttaatgcaacc

SEQ ID NO: 2993413 - DNA, 25 bp, Homo sapien
tgcgatcacggtttaatgcaacctt

SEQ ID NO: 2993414 - DNA, 25 bp, Homo sapien
gatcacggtttaatgcaaccttcgc

SEQ ID NO: 2993415 - DNA, 25 bp, Homo sapien
cagtcagaagacctgcggattcctg

SEQ ID NO: 2993416 - DNA, 25 bp, Homo sapien
gacagtcttggcatgttaccatccg

SEQ ID NO: 2993417 - DNA, 25 bp, Homo sapien
gaaattcggtcagaagaccagcgga

SEQ ID NO: 2993418 - DNA, 25 bp, Homo sapien
gagcgagtgactcacaaggcttcag

SEQ ID NO: 2993419 - DNA, 25 bp, Homo sapien
atgtaaagataaaagccgggcgcag

SEQ ID NO: 2993420 - DNA, 25 bp, Homo sapien
ggccatgcagtgagccagtacctga

SEQ ID NO: 2993421 - DNA, 25 bp, Homo sapien
gatcatggccgtcttatgtgagagc

SEQ ID NO: 2993422 - DNA, 25 bp, Homo sapien
tgcagccagctgtgatcgcaagtcc

SEQ ID NO: 2993423 - DNA, 25 bp, Homo sapien
tgcagtggaacctaataaaagcgcc

SEQ ID NO: 2993424 - DNA, 25 bp, Homo sapien
tcaactgttgtctggcatctgctca

SEQ ID NO: 2993425 - DNA, 25 bp, Homo sapien
ggatttgcattacattgaccccagc

SEQ ID NO: 2993426 - DNA, 25 bp, Homo sapien
tcttgtgggaaggaggtctcagccc

SEQ ID NO: 2993427 - DNA, 25 bp, Homo sapien
tctgattctggttttgagttactct

SEQ ID NO: 2993428 - DNA, 25 bp, Homo sapien
tgattctggttttgagttactcttt

SEQ ID NO: 2993429 - DNA, 25 bp, Homo sapien
ctgattctggttttgagttactctt

SEQ ID NO: 2993430 - DNA, 25 bp, Homo sapien
gattctggttttgagttactctttg

SEQ ID NO: 2993431 - DNA, 25 bp, Homo sapien
tcctctcccactcgctcgtccttat

SEQ ID NO: 2993432 - DNA, 25 bp, Homo sapien
tcgtccttatccaccacgctattat

SEQ ID NO: 2993433 - DNA, 25 bp, Homo sapien
tatagtttccgttgtcctccaccag

SEQ ID NO: 2993434 - DNA, 25 bp, Homo sapien
tggacagcacggacttctagagaga

SEQ ID NO: 2993435 - DNA, 25 bp, Homo sapien
tggaaggcccaagcagctcatctgc

SEQ ID NO: 2993436 - DNA, 25 bp, Homo sapien
gggacaccaagtggaaggcccaagc

SEQ ID NO: 2993437 - DNA, 25 bp, Homo sapien
aggtccgcctggcatgggacaccaa

SEQ ID NO: 2993438 - DNA, 25 bp, Homo sapien
gcctggcatgggacaccaagtggaa

SEQ ID NO: 2993439 - DNA, 25 bp, Homo sapien
aagcccacgtgacccacattcttgg

SEQ ID NO: 2993440 - DNA, 25 bp, Homo sapien
gggtaagcccacgtgacccacattc

SEQ ID NO: 2993441 - DNA, 25 bp, Homo sapien
taagcccacgtgacccacattcttg

SEQ ID NO: 2993442 - DNA, 25 bp, Homo sapien
gcccacgtgacccacattcttggca

SEQ ID NO: 2993443 - DNA, 25 bp, Homo sapien
agctgcagactgcttagggacttct

SEQ ID NO: 2993444 - DNA, 25 bp, Homo sapien
gcagactgcttagggacttctgtgt

SEQ ID NO: 2993445 - DNA, 25 bp, Homo sapien
ggcccagctgcagactgcttaggga

SEQ ID NO: 2993446 - DNA, 25 bp, Homo sapien
cccagctgcagactgcttagggact

SEQ ID NO: 2993447 - DNA, 25 bp, Homo sapien
ggcatctcgatgcttctttgcctta

SEQ ID NO: 2993448 - DNA, 25 bp, Homo sapien
ggtgggcatctcgatgcttctttgc

SEQ ID NO: 2993449 - DNA, 25 bp, Homo sapien
gcatctcgatgcttctttgccttaa

SEQ ID NO: 2993450 - DNA, 25 bp, Homo sapien
tgggcatctcgatgcttctttgcct

SEQ ID NO: 2993451 - DNA, 25 bp, Homo sapien
tgcctcttgtgagggccatttggga

SEQ ID NO: 2993452 - DNA, 25 bp, Homo sapien
gggcactgcacaattgatagtgtac

SEQ ID NO: 2993453 - DNA, 25 bp, Homo sapien
tgcagcaactgcagatactgcgggc

SEQ ID NO: 2993454 - DNA, 25 bp, Homo sapien
ggagtgagagagactagtttccaca

SEQ ID NO: 2993455 - DNA, 25 bp, Homo sapien
gctgagtgtgttccctgtaactgcc

SEQ ID NO: 2993456 - DNA, 25 bp, Homo sapien
aagccagaagcgttgctgagtgtgt

SEQ ID NO: 2993457 - DNA, 25 bp, Homo sapien
tgtgttccctgtaactgccccatag

SEQ ID NO: 2993458 - DNA, 25 bp, Homo sapien
agcgttgctgagtgtgttccctgta

SEQ ID NO: 2993459 - DNA, 25 bp, Homo sapien
tgcacgttcatgaaccagccaggca

SEQ ID NO: 2993460 - DNA, 25 bp, Homo sapien
cgttcatgaaccagccaggcacagg

SEQ ID NO: 2993461 - DNA, 25 bp, Homo sapien
tcatgaaccagccaggcacaggcca

SEQ ID NO: 2993462 - DNA, 25 bp, Homo sapien
ctgcacgttcatgaaccagccaggc

SEQ ID NO: 2993463 - DNA, 25 bp, Homo sapien
tctccatgagtacggcgccgtcggg

SEQ ID NO: 2993464 - DNA, 25 bp, Homo sapien
catgagtacggcgccgtcgggggct

SEQ ID NO: 2993465 - DNA, 25 bp, Homo sapien
caggtctccatgagtacggcgccgt

SEQ ID NO: 2993466 - DNA, 25 bp, Homo sapien
aggtctccatgagtacggcgccgtc

SEQ ID NO: 2993467 - DNA, 25 bp, Homo sapien
tctgagagctccaataaacgtaaac

SEQ ID NO: 2993468 - DNA, 25 bp, Homo sapien
tgacttgggaacagcttgtgatgat

SEQ ID NO: 2993469 - DNA, 25 bp, Homo sapien
ttgcttggcaatcatttcgggtctg

SEQ ID NO: 2993470 - DNA, 25 bp, Homo sapien
tagaaaatgtgatcccctcttgcag

SEQ ID NO: 2993471 - DNA, 25 bp, Homo sapien
catctgaggtaactcaccaccttcg

SEQ ID NO: 2993472 - DNA, 25 bp, Homo sapien
gggaatgaggtggagagcactggga

SEQ ID NO: 2993473 - DNA, 25 bp, Homo sapien
caggagctggggaggaggggcagga

SEQ ID NO: 2993474 - DNA, 25 bp, Homo sapien
cttgggggaatgaggtggagagcac

SEQ ID NO: 2993475 - DNA, 25 bp, Homo sapien
aggcaggagctggggaggaggggca

SEQ ID NO: 2993476 - DNA, 25 bp, Homo sapien
aagggctccctgcatcggggagact

SEQ ID NO: 2993477 - DNA, 25 bp, Homo sapien
gccaccccagcggaacgggtagaga

SEQ ID NO: 2993478 - DNA, 25 bp, Homo sapien
ttggagtgccctggtgggtcgagtc

SEQ ID NO: 2993479 - DNA, 25 bp, Homo sapien
gcggaacgggtagagaagcttggag

SEQ ID NO: 2993480 - DNA, 25 bp, Homo sapien
ccattctctcatgtttagagaacac

SEQ ID NO: 2993481 - DNA, 25 bp, Homo sapien
tccattctctcatgtttagagaaca

SEQ ID NO: 2993482 - DNA, 25 bp, Homo sapien
atccattctctcatgtttagagaac

SEQ ID NO: 2993483 - DNA, 25 bp, Homo sapien
catccattctctcatgtttagagaa

SEQ ID NO: 2993484 - DNA, 25 bp, Homo sapien
tcgcacctatgccaagggtctgggc

SEQ ID NO: 2993485 - DNA, 25 bp, Homo sapien
ctggcgccccgggagtatactctct

SEQ ID NO: 2993486 - DNA, 25 bp, Homo sapien
ggctgatttctgtaatcgttgtggg

SEQ ID NO: 2993487 - DNA, 25 bp, Homo sapien
tgtctcctcactgctcgcacctatg

SEQ ID NO: 2993488 - DNA, 25 bp, Homo sapien
acggccctcctggttgtgctgctgc

SEQ ID NO: 2993489 - DNA, 25 bp, Homo sapien
ctcacggccctcctggttgtgctgc

SEQ ID NO: 2993490 - DNA, 25 bp, Homo sapien
gccctcctggttgtgctgctgcagc

SEQ ID NO: 2993491 - DNA, 25 bp, Homo sapien
tcacggccctcctggttgtgctgct

SEQ ID NO: 2993492 - DNA, 25 bp, Homo sapien
ctcctggtacggatgtgacgtgcag

SEQ ID NO: 2993493 - DNA, 25 bp, Homo sapien
ttcatgcccgtcatgccacagctcg

SEQ ID NO: 2993494 - DNA, 25 bp, Homo sapien
tgaaggtgaaactcgggtccatgcc

SEQ ID NO: 2993495 - DNA, 25 bp, Homo sapien
gatgtgacgtgcaggcatcttcagc

SEQ ID NO: 2993496 - DNA, 25 bp, Homo sapien
ctctttcacctttcttgtgaaaggg

SEQ ID NO: 2993497 - DNA, 25 bp, Homo sapien
ttcacctttcttgtgaaagggaaca

SEQ ID NO: 2993498 - DNA, 25 bp, Homo sapien
cacctttcttgtgaaagggaacatt

SEQ ID NO: 2993499 - DNA, 25 bp, Homo sapien
caggtggcaggacgtggggcttttc

SEQ ID NO: 2993500 - DNA, 25 bp, Homo sapien
aagagtgtgcccttgcctcagctta

SEQ ID NO: 2993501 - DNA, 25 bp, Homo sapien
taggctgccgacacacagaattctg

SEQ ID NO: 2993502 - DNA, 25 bp, Homo sapien
cacaagtgtgtagcgggcattcaga

SEQ ID NO: 2993503 - DNA, 25 bp, Homo sapien
gcttctggactgactcgtgaggaca

SEQ ID NO: 2993504 - DNA, 25 bp, Homo sapien
tgggaattctgcattacagaacctg

SEQ ID NO: 2993505 - DNA, 25 bp, Homo sapien
ggttgggaatttgggctaggattga

SEQ ID NO: 2993506 - DNA, 25 bp, Homo sapien
tttcctaagttgttgcttgggttga

SEQ ID NO: 2993507 - DNA, 25 bp, Homo sapien
cattacagaacctgttagggcaccc

SEQ ID NO: 2993508 - DNA, 25 bp, Homo sapien
ttttatgtcttagatcagagagcca

SEQ ID NO: 2993509 - DNA, 25 bp, Homo sapien
tgagtttatacttggccatgtgaaa

SEQ ID NO: 2993510 - DNA, 25 bp, Homo sapien
tgactttgaggtattgggattccaa

SEQ ID NO: 2993511 - DNA, 25 bp, Homo sapien
catgtgaaattgtctgagcgaaggt

SEQ ID NO: 2993512 - DNA, 25 bp, Homo sapien
agtcaaacctggcaccaagttggca

SEQ ID NO: 2993513 - DNA, 25 bp, Homo sapien
tcatagcaattagacgtggactcct

SEQ ID NO: 2993514 - DNA, 25 bp, Homo sapien
tggaaagcagtacccttaagtctga

SEQ ID NO: 2993515 - DNA, 25 bp, Homo sapien
ctgtgagtggagatgcttgttagcc

SEQ ID NO: 2993516 - DNA, 25 bp, Homo sapien
catttgaagctgtcgttccaccgtc

SEQ ID NO: 2993517 - DNA, 25 bp, Homo sapien
tcgtcttcgttgacctctggctttc

SEQ ID NO: 2993518 - DNA, 25 bp, Homo sapien
ctcccacgtgagcttcctagctaat

SEQ ID NO: 2993519 - DNA, 25 bp, Homo sapien
tgtcgttccaccgtcttcttggtct

SEQ ID NO: 2993520 - DNA, 25 bp, Homo sapien
taaagaatggcggtaacatgctctt

SEQ ID NO: 2993521 - DNA, 25 bp, Homo sapien
agaatggcggtaacatgctcttgtt

SEQ ID NO: 2993522 - DNA, 25 bp, Homo sapien
tctgtaaagaatggcggtaacatgc

SEQ ID NO: 2993523 - DNA, 25 bp, Homo sapien
agctctgtaaagaatggcggtaaca

SEQ ID NO: 2993524 - DNA, 25 bp, Homo sapien
cccactagtgtataaggctaggctc

SEQ ID NO: 2993525 - DNA, 25 bp, Homo sapien
tgaaaagtgtttcagacaaggccat

SEQ ID NO: 2993526 - DNA, 25 bp, Homo sapien
tctcattgacagcattggatctcgt

SEQ ID NO: 2993527 - DNA, 25 bp, Homo sapien
ggatctcgttgaatgtctcagattg

SEQ ID NO: 2993528 - DNA, 25 bp, Homo sapien
atgcccggccaagaaacctttgact

SEQ ID NO: 2993529 - DNA, 25 bp, Homo sapien
gaaaaataaaatgtggccatgcagt

SEQ ID NO: 2993530 - DNA, 25 bp, Homo sapien
ttgagggaggggaatcgctcaaacc

SEQ ID NO: 2993531 - DNA, 25 bp, Homo sapien
tggggtcccaaaattgctaggatta

SEQ ID NO: 2993532 - DNA, 25 bp, Homo sapien
aggggccctcttggtgcctccatgt

SEQ ID NO: 2993533 - DNA, 25 bp, Homo sapien
ccgcttgggtttccgaggacgagca

SEQ ID NO: 2993534 - DNA, 25 bp, Homo sapien
gagcagaagtaatctcagacgcaac

SEQ ID NO: 2993535 - DNA, 25 bp, Homo sapien
tatttttgggtgagacttcggatgc

SEQ ID NO: 2993536 - DNA, 25 bp, Homo sapien
tataatacgctataatacgcagcag

SEQ ID NO: 2993537 - DNA, 25 bp, Homo sapien
cagtggcaccctgagcaaactaata

SEQ ID NO: 2993538 - DNA, 25 bp, Homo sapien
tatgttgggtagttacagtggcacc

SEQ ID NO: 2993539 - DNA, 25 bp, Homo sapien
tgtcttgataaagtctaggcagtgg

SEQ ID NO: 2993540 - DNA, 25 bp, Homo sapien
cttagaatctgtgaagtgacgtctt

SEQ ID NO: 2993541 - DNA, 25 bp, Homo sapien
tcggacttaactgaacccatcttgc

SEQ ID NO: 2993542 - DNA, 25 bp, Homo sapien
gctgaaataacttcgggaggcgctt

SEQ ID NO: 2993543 - DNA, 25 bp, Homo sapien
gcacaagaggacagttttgactccc

SEQ ID NO: 2993544 - DNA, 25 bp, Homo sapien
cctcagtaacctgtacaagctggct

SEQ ID NO: 2993545 - DNA, 25 bp, Homo sapien
cacaggcgccgggagaggttcgctg

SEQ ID NO: 2993546 - DNA, 25 bp, Homo sapien
ctgggctggtcctgactgcggccct

SEQ ID NO: 2993547 - DNA, 25 bp, Homo sapien
gccgggagaggttcgctggctcctc

SEQ ID NO: 2993548 - DNA, 25 bp, Homo sapien
gctgggctggtcctgactgcggccc

SEQ ID NO: 2993549 - DNA, 25 bp, Homo sapien
tgggacagtaaggggctcctctccc

SEQ ID NO: 2993550 - DNA, 25 bp, Homo sapien
ctgggacagtaaggggctcctctcc

SEQ ID NO: 2993551 - DNA, 25 bp, Homo sapien
aggggctcctctccccctcctccat

SEQ ID NO: 2993552 - DNA, 25 bp, Homo sapien
cgcactgagtgtggacacggcactg

SEQ ID NO: 2993553 - DNA, 25 bp, Homo sapien
accaacggcccgcactgagtgtgga

SEQ ID NO: 2993554 - DNA, 25 bp, Homo sapien
atcccagcacccattcttcggcccc

SEQ ID NO: 2993555 - DNA, 25 bp, Homo sapien
gcccgcactgagtgtggacacggca

SEQ ID NO: 2993556 - DNA, 25 bp, Homo sapien
ctttagaacagggtgatgagcagac

SEQ ID NO: 2993557 - DNA, 25 bp, Homo sapien
aacagggtgatgagcagactctgaa

SEQ ID NO: 2993558 - DNA, 25 bp, Homo sapien
agaacagggtgatgagcagactctg

SEQ ID NO: 2993559 - DNA, 25 bp, Homo sapien
ttagaacagggtgatgagcagactc

SEQ ID NO: 2993560 - DNA, 25 bp, Homo sapien
tcagcccgagctggacttggtcgag

SEQ ID NO: 2993561 - DNA, 25 bp, Homo sapien
cacgtaacaggcaggtgttctcaca

SEQ ID NO: 2993562 - DNA, 25 bp, Homo sapien
ggaagatcagatacttgacgcagct

SEQ ID NO: 2993563 - DNA, 25 bp, Homo sapien
gatggccacacgcagggtgtgctcc

SEQ ID NO: 2993564 - DNA, 25 bp, Homo sapien
catagaacaaggagaggcaagcacc

SEQ ID NO: 2993565 - DNA, 25 bp, Homo sapien
tgtacacgcacaagggtgtgtggcc

SEQ ID NO: 2993566 - DNA, 25 bp, Homo sapien
tgaaacctgtgagcacgagacgtgc

SEQ ID NO: 2993567 - DNA, 25 bp, Homo sapien
gccatcgtgcccagcagaaaaatga

SEQ ID NO: 2993568 - DNA, 25 bp, Homo sapien
ttactgggaagagcaagggcttgag

SEQ ID NO: 2993569 - DNA, 25 bp, Homo sapien
agagcaagggcttgagaggcagtac

SEQ ID NO: 2993570 - DNA, 25 bp, Homo sapien
aagagcaagggcttgagaggcagta

SEQ ID NO: 2993571 - DNA, 25 bp, Homo sapien
ctgggaagagcaagggcttgagagg

SEQ ID NO: 2993572 - DNA, 25 bp, Homo sapien
taacgtatccctgtgcacggcagtc

SEQ ID NO: 2993573 - DNA, 25 bp, Homo sapien
cagtcctctgcgcttgcaggtaggg

SEQ ID NO: 2993574 - DNA, 25 bp, Homo sapien
caagcattgataagaggacctccct

SEQ ID NO: 2993575 - DNA, 25 bp, Homo sapien
ggctgctgagctcattgagaaggta

SEQ ID NO: 2993576 - DNA, 25 bp, Homo sapien
tgcaaggcgcatggaatcgtcagtt

SEQ ID NO: 2993577 - DNA, 25 bp, Homo sapien
ctgcaaggcgcatggaatcgtcagt

SEQ ID NO: 2993578 - DNA, 25 bp, Homo sapien
aggcagccaggttcgcgcgcagcca

SEQ ID NO: 2993579 - DNA, 25 bp, Homo sapien
cactggtcgttgacagaggctccat

SEQ ID NO: 2993580 - DNA, 25 bp, Homo sapien
cgcgattgcgtagccgcccgaggca

SEQ ID NO: 2993581 - DNA, 25 bp, Homo sapien
caggtacaccactctctgagctgcg

SEQ ID NO: 2993582 - DNA, 25 bp, Homo sapien
ggtcagcttcaggatttcctccggc

SEQ ID NO: 2993583 - DNA, 25 bp, Homo sapien
cgaagcccgagcgaaatcaggcggc

SEQ ID NO: 2993584 - DNA, 25 bp, Homo sapien
cctgtatccctgtgcgtggcggtct

SEQ ID NO: 2993585 - DNA, 25 bp, Homo sapien
cgcaggccgcgctttttagccgggc

SEQ ID NO: 2993586 - DNA, 25 bp, Homo sapien
cagaaggccttggtgcacacccagg

SEQ ID NO: 2993587 - DNA, 25 bp, Homo sapien
acccaggggccatagtcaatgaagc

SEQ ID NO: 2993588 - DNA, 25 bp, Homo sapien
cacagagaggcttggtcggtctcca

SEQ ID NO: 2993589 - DNA, 25 bp, Homo sapien
tcccagctggaaagctagggcaggt

SEQ ID NO: 2993590 - DNA, 25 bp, Homo sapien
tattaataccagtcaccaggagccc

SEQ ID NO: 2993591 - DNA, 25 bp, Homo sapien
gattcctgttgaggagatgcctccc

SEQ ID NO: 2993592 - DNA, 25 bp, Homo sapien
acagactccttgtgtccaacgggaa

SEQ ID NO: 2993593 - DNA, 25 bp, Homo sapien
cctgatgggcgcagaaaattcggga

SEQ ID NO: 2993594 - DNA, 25 bp, Homo sapien
tcctcaggatggagatccggctgca

SEQ ID NO: 2993595 - DNA, 25 bp, Homo sapien
aaattcgggacagaccacgtagagg

SEQ ID NO: 2993596 - DNA, 25 bp, Homo sapien
ttctccagcccggactgctgccaga

SEQ ID NO: 2993597 - DNA, 25 bp, Homo sapien
tctccagcccggactgctgccagag

SEQ ID NO: 2993598 - DNA, 25 bp, Homo sapien
gccggttctccagcccggactgctg

SEQ ID NO: 2993599 - DNA, 25 bp, Homo sapien
gggctcgccggttctccagcccgga

SEQ ID NO: 2993600 - DNA, 25 bp, Homo sapien
gaggggccgcttagccttgggagag

SEQ ID NO: 2993601 - DNA, 25 bp, Homo sapien
ggaagcagcccggtgaacggccact

SEQ ID NO: 2993602 - DNA, 25 bp, Homo sapien
agcagcccggtgaacggccactttc

SEQ ID NO: 2993603 - DNA, 25 bp, Homo sapien
cccggaatctgtggaggggccgctt

SEQ ID NO: 2993604 - DNA, 25 bp, Homo sapien
agccgggaggatcgcgcgctggccg

SEQ ID NO: 2993605 - DNA, 25 bp, Homo sapien
tcttggcagcgccgaagggcacgtc

SEQ ID NO: 2993606 - DNA, 25 bp, Homo sapien
tccacccgcatgtggggacggagcc

SEQ ID NO: 2993607 - DNA, 25 bp, Homo sapien
gcacgtccgagaggccgctgtccgg

SEQ ID NO: 2993608 - DNA, 25 bp, Homo sapien
ctgcggagggtggtcgagggaggcc

SEQ ID NO: 2993609 - DNA, 25 bp, Homo sapien
ccgcggtccgtggctcggcaagtac

SEQ ID NO: 2993610 - DNA, 25 bp, Homo sapien
tgcggagggtggtcgagggaggccg

SEQ ID NO: 2993611 - DNA, 25 bp, Homo sapien
cgggcggtagccgccgcggtccgtg

SEQ ID NO: 2993612 - DNA, 25 bp, Homo sapien
gggattggccggagcgcccgccgct

SEQ ID NO: 2993613 - DNA, 25 bp, Homo sapien
ttgccggatcccgtccgcgggcgat

SEQ ID NO: 2993614 - DNA, 25 bp, Homo sapien
tcacggtcaggggttgccggatccc

SEQ ID NO: 2993615 - DNA, 25 bp, Homo sapien
gacttcctgaaggtccgggattggc

SEQ ID NO: 2993616 - DNA, 25 bp, Homo sapien
cgatcggcacttccgcttcctgcgc

SEQ ID NO: 2993617 - DNA, 25 bp, Homo sapien
acttccgcttcctgcgctcagcctc

SEQ ID NO: 2993618 - DNA, 25 bp, Homo sapien
ttccgcttcctgcgctcagcctcac

SEQ ID NO: 2993619 - DNA, 25 bp, Homo sapien
ggcacttccgcttcctgcgctcagc

SEQ ID NO: 2993620 - DNA, 25 bp, Homo sapien
acgccgggaggctccctagcgaagc

SEQ ID NO: 2993621 - DNA, 25 bp, Homo sapien
ctagcgaagccacttccgccttcct

SEQ ID NO: 2993622 - DNA, 25 bp, Homo sapien
gccacttccgccttcctgcatggtt

SEQ ID NO: 2993623 - DNA, 25 bp, Homo sapien
ctccacgccgggaggctccctagcg

SEQ ID NO: 2993624 - DNA, 25 bp, Homo sapien
ccctggacaccgctgctccgcgacc

SEQ ID NO: 2993625 - DNA, 25 bp, Homo sapien
ggacaccgctgctccgcgaccagct

SEQ ID NO: 2993626 - DNA, 25 bp, Homo sapien
gcaccctggacaccgctgctccgcg

SEQ ID NO: 2993627 - DNA, 25 bp, Homo sapien
ctggacaccgctgctccgcgaccag

SEQ ID NO: 2993628 - DNA, 25 bp, Homo sapien
aggggtccgagcgaacgctccctag

SEQ ID NO: 2993629 - DNA, 25 bp, Homo sapien
tctggggaagtgtggcggcctcgcg

SEQ ID NO: 2993630 - DNA, 25 bp, Homo sapien
tcccgggcggagccttcaaggcgtc

SEQ ID NO: 2993631 - DNA, 25 bp, Homo sapien
gcggagccttcaaggcgtccccttc

SEQ ID NO: 2993632 - DNA, 25 bp, Homo sapien
ttcttgttactgatcgggtttttca

SEQ ID NO: 2993633 - DNA, 25 bp, Homo sapien
ggtttttcatctcttggcggctcct

SEQ ID NO: 2993634 - DNA, 25 bp, Homo sapien
ctcctgttcgtcctggttcttgggc

SEQ ID NO: 2993635 - DNA, 25 bp, Homo sapien
agccggaaaggaatctcctgttcgt

SEQ ID NO: 2993636 - DNA, 25 bp, Homo sapien
ctgtcacagatgtccactgcagcac

SEQ ID NO: 2993637 - DNA, 25 bp, Homo sapien
gtcacagatgtccactgcagcacag

SEQ ID NO: 2993638 - DNA, 25 bp, Homo sapien
tgtcacagatgtccactgcagcaca

SEQ ID NO: 2993639 - DNA, 25 bp, Homo sapien
gtggcaggcaggtgacccatgctca

SEQ ID NO: 2993640 - DNA, 25 bp, Homo sapien
cctctgtttgaacttggggactgcg

SEQ ID NO: 2993641 - DNA, 25 bp, Homo sapien
ctgcgatgtcgggctcctctccctt

SEQ ID NO: 2993642 - DNA, 25 bp, Homo sapien
ctctgtttgaacttggggactgcga

SEQ ID NO: 2993643 - DNA, 25 bp, Homo sapien
tggggactgcgatgtcgggctcctc

SEQ ID NO: 2993644 - DNA, 25 bp, Homo sapien
catgcggtggatataggccccgtca

SEQ ID NO: 2993645 - DNA, 25 bp, Homo sapien
ttgctgcatgcggtggatataggcc

SEQ ID NO: 2993646 - DNA, 25 bp, Homo sapien
gcggtggatataggccccgtcagac

SEQ ID NO: 2993647 - DNA, 25 bp, Homo sapien
ggcctcttgctgcatgcggtggata

SEQ ID NO: 2993648 - DNA, 25 bp, Homo sapien
gctttttttgcttttttctgctcag

SEQ ID NO: 2993649 - DNA, 25 bp, Homo sapien
tttttttgcttttttctgctcagac

SEQ ID NO: 2993650 - DNA, 25 bp, Homo sapien
ctttttttgcttttttctgctcaga

SEQ ID NO: 2993651 - DNA, 25 bp, Homo sapien
agaggccgccccacccacaagggat

SEQ ID NO: 2993652 - DNA, 25 bp, Homo sapien
cacatgtcactcagattcctaaatt

SEQ ID NO: 2993653 - DNA, 25 bp, Homo sapien
acatgtcactcagattcctaaattc

SEQ ID NO: 2993654 - DNA, 25 bp, Homo sapien
acccacaagggatcccctgtggcag

SEQ ID NO: 2993655 - DNA, 25 bp, Homo sapien
tcggactttatctagtcgccgcttc

SEQ ID NO: 2993656 - DNA, 25 bp, Homo sapien
tccgtcggactttatctagtcgccg

SEQ ID NO: 2993657 - DNA, 25 bp, Homo sapien
tttccgtcggactttatctagtcgc

SEQ ID NO: 2993658 - DNA, 25 bp, Homo sapien
cgtcggactttatctagtcgccgct

SEQ ID NO: 2993659 - DNA, 25 bp, Homo sapien
ctgacaccatcgctttgggaagagc

SEQ ID NO: 2993660 - DNA, 25 bp, Homo sapien
gctgacaccatcgctttgggaagag

SEQ ID NO: 2993661 - DNA, 25 bp, Homo sapien
gaacaccaactcatccagtggtcta

SEQ ID NO: 2993662 - DNA, 25 bp, Homo sapien
ccaggggaaaccacaggtgcccagt

SEQ ID NO: 2993663 - DNA, 25 bp, Homo sapien
ggacagaacaccaactcatccagtg

SEQ ID NO: 2993664 - DNA, 25 bp, Homo sapien
agcagaatacaactgaggactgctg

SEQ ID NO: 2993665 - DNA, 25 bp, Homo sapien
gcaggacaacctcaccaaacttcac

SEQ ID NO: 2993666 - DNA, 25 bp, Homo sapien
ctgcaggacaacctcaccaaacttc

SEQ ID NO: 2993667 - DNA, 25 bp, Homo sapien
aggacaacctcaccaaacttcaccg

SEQ ID NO: 2993668 - DNA, 25 bp, Homo sapien
acaacctcaccaaacttcaccgtgt

SEQ ID NO: 2993669 - DNA, 25 bp, Homo sapien
tcctctggggcctggcagtcagctc

SEQ ID NO: 2993670 - DNA, 25 bp, Homo sapien
tggtccttgcttacgctcctctggg

SEQ ID NO: 2993671 - DNA, 25 bp, Homo sapien
ctggtccttgcttacgctcctctgg

SEQ ID NO: 2993672 - DNA, 25 bp, Homo sapien
ctggggcctggcagtcagctctggg

SEQ ID NO: 2993673 - DNA, 25 bp, Homo sapien
aggtggggtcgctccccgtgcagct

SEQ ID NO: 2993674 - DNA, 25 bp, Homo sapien
ttcaacgctctgtaggcctgcacgg

SEQ ID NO: 2993675 - DNA, 25 bp, Homo sapien
tcctcctccacaatccgctggcggg

SEQ ID NO: 2993676 - DNA, 25 bp, Homo sapien
gggaggcggtcagaggctgggacac

SEQ ID NO: 2993677 - DNA, 25 bp, Homo sapien
cagagccctgttaggtaggtgacaa

SEQ ID NO: 2993678 - DNA, 25 bp, Homo sapien
tgatgtgcactgtacgctcggctct

SEQ ID NO: 2993679 - DNA, 25 bp, Homo sapien
gcactggagactgaagcctggcaag

SEQ ID NO: 2993680 - DNA, 25 bp, Homo sapien
tggacccactagtgcccaacgtgtg

SEQ ID NO: 2993681 - DNA, 25 bp, Homo sapien
tgtaaggaatgtgagccgtctccaa

SEQ ID NO: 2993682 - DNA, 25 bp, Homo sapien
gtgtaaggaatgtgagccgtctcca

SEQ ID NO: 2993683 - DNA, 25 bp, Homo sapien
gggcagtgtaaggaatgtgagccgt

SEQ ID NO: 2993684 - DNA, 25 bp, Homo sapien
cagtgtaaggaatgtgagccgtctc

SEQ ID NO: 2993685 - DNA, 25 bp, Homo sapien
gcttgcttggcggaacgttccttta

SEQ ID NO: 2993686 - DNA, 25 bp, Homo sapien
gaagcaatccttgggctggacatgc

SEQ ID NO: 2993687 - DNA, 25 bp, Homo sapien
gagtcctaagagtacgcgtttccca

SEQ ID NO: 2993688 - DNA, 25 bp, Homo sapien
cgtgacttttgctgtgaggcatgaa

SEQ ID NO: 2993689 - DNA, 25 bp, Homo sapien
gaagcatcggtgctgatactcttca

SEQ ID NO: 2993690 - DNA, 25 bp, Homo sapien
tcaataaaatgtacgcgtccctgag

SEQ ID NO: 2993691 - DNA, 25 bp, Homo sapien
gcatcggtgctgatactcttcaata

SEQ ID NO: 2993692 - DNA, 25 bp, Homo sapien
ttcaataaaatgtacgcgtccctga

SEQ ID NO: 2993693 - DNA, 25 bp, Homo sapien
gtcaggtcgtgacttaaggccagcc

SEQ ID NO: 2993694 - DNA, 25 bp, Homo sapien
taagtgcacgccgaggcgcagcggg

SEQ ID NO: 2993695 - DNA, 25 bp, Homo sapien
gggacggcccgagctgaggataatt

SEQ ID NO: 2993696 - DNA, 25 bp, Homo sapien
ctgaggataattggcgcgggatgag

SEQ ID NO: 2993697 - DNA, 25 bp, Homo sapien
cctttagctgctcgggtccttgacc

SEQ ID NO: 2993698 - DNA, 25 bp, Homo sapien
cgacacggcccacggtaggtgtccg

SEQ ID NO: 2993699 - DNA, 25 bp, Homo sapien
ttcgcacaggtgagctcccgggatg

SEQ ID NO: 2993700 - DNA, 25 bp, Homo sapien
ttgaccgcttcgcacaggtgagctc

SEQ ID NO: 2993701 - DNA, 25 bp, Homo sapien
cagcccaaacccgacgccgcgggcg

SEQ ID NO: 2993702 - DNA, 25 bp, Homo sapien
gctcccctgctacgagctggcgcgc

SEQ ID NO: 2993703 - DNA, 25 bp, Homo sapien
ggcgctcccctgctacgagctggcg

SEQ ID NO: 2993704 - DNA, 25 bp, Homo sapien
gccgcgggcgctcccctgctacgag

SEQ ID NO: 2993705 - DNA, 25 bp, Homo sapien
taggagacgctcgaaggtgccgctg

SEQ ID NO: 2993706 - DNA, 25 bp, Homo sapien
ggagacgctcgaaggtgccgctgcc

SEQ ID NO: 2993707 - DNA, 25 bp, Homo sapien
aggagacgctcgaaggtgccgctgc

SEQ ID NO: 2993708 - DNA, 25 bp, Homo sapien
ctaggagacgctcgaaggtgccgct

SEQ ID NO: 2993709 - DNA, 25 bp, Homo sapien
agggtccaggatcggcggctccgaa

SEQ ID NO: 2993710 - DNA, 25 bp, Homo sapien
cccatttgccaacgcccgacggacg

SEQ ID NO: 2993711 - DNA, 25 bp, Homo sapien
cgcgctgactcagcgccgggcggag

SEQ ID NO: 2993712 - DNA, 25 bp, Homo sapien
cggctccgaacccgggaggacagcg

SEQ ID NO: 2993713 - DNA, 25 bp, Homo sapien
cgcggaggagcgaggtcgccgagcg

SEQ ID NO: 2993714 - DNA, 25 bp, Homo sapien
tcaagaggaaatcggccgaatgccc

SEQ ID NO: 2993715 - DNA, 25 bp, Homo sapien
tcgtcggtcaagaggaaatcggccg

SEQ ID NO: 2993716 - DNA, 25 bp, Homo sapien
ggtgctcgtcggtcaagaggaaatc

SEQ ID NO: 2993717 - DNA, 25 bp, Homo sapien
tacagaaacgatctaacaagccaag

SEQ ID NO: 2993718 - DNA, 25 bp, Homo sapien
gtgtggctgagatactcagtctgct

SEQ ID NO: 2993719 - DNA, 25 bp, Homo sapien
tgaagcactgaactacctgtgtggc

SEQ ID NO: 2993720 - DNA, 25 bp, Homo sapien
cacatcgcctttcccggatacagaa

SEQ ID NO: 2993721 - DNA, 25 bp, Homo sapien
gacagaatcctcctgagcgtgctga

SEQ ID NO: 2993722 - DNA, 25 bp, Homo sapien
caaacagcgtaagagcacaccaggt

SEQ ID NO: 2993723 - DNA, 25 bp, Homo sapien
cccgcgagcgaggtaaagacactca

SEQ ID NO: 2993724 - DNA, 25 bp, Homo sapien
caggctcggctgcttctcaacaaag

SEQ ID NO: 2993725 - DNA, 25 bp, Homo sapien
tgtgtgtccccttggcggatcaggt

SEQ ID NO: 2993726 - DNA, 25 bp, Homo sapien
cggatcaggtcgcagatctgcaaaa

SEQ ID NO: 2993727 - DNA, 25 bp, Homo sapien
aaatggactcccaatctgtctccaa

SEQ ID NO: 2993728 - DNA, 25 bp, Homo sapien
ccaacaggagctggctggtcgcctt

SEQ ID NO: 2993729 - DNA, 25 bp, Homo sapien
catcttagtctttgagaaccccgaa

SEQ ID NO: 2993730 - DNA, 25 bp, Homo sapien
taacacggtcagctacgtcgtggag

SEQ ID NO: 2993731 - DNA, 25 bp, Homo sapien
tgtcaaaaaatcctagcatgtagcc

SEQ ID NO: 2993732 - DNA, 25 bp, Homo sapien
catgtagcccatgcagttctccaca

SEQ ID NO: 2993733 - DNA, 25 bp, Homo sapien
aaggaaacattgataaaagcagaga

SEQ ID NO: 2993734 - DNA, 25 bp, Homo sapien
aggaaacattgataaaagcagagaa

SEQ ID NO: 2993735 - DNA, 25 bp, Homo sapien
gcatacaaggcgacgtgtgggttct

SEQ ID NO: 2993736 - DNA, 25 bp, Homo sapien
atacaaggcgacgtgtgggttcttg

SEQ ID NO: 2993737 - DNA, 25 bp, Homo sapien
tccagggcatacaaggcgacgtgtg

SEQ ID NO: 2993738 - DNA, 25 bp, Homo sapien
acaaggcgacgtgtgggttcttgtc

SEQ ID NO: 2993739 - DNA, 25 bp, Homo sapien
ctcctcctcccggacagacccacct

SEQ ID NO: 2993740 - DNA, 25 bp, Homo sapien
tcctcctcccggacagacccacctc

SEQ ID NO: 2993741 - DNA, 25 bp, Homo sapien
gttggccacctcatcatgaactgtc

SEQ ID NO: 2993742 - DNA, 25 bp, Homo sapien
gcttgttggccacctcatcatgaac

SEQ ID NO: 2993743 - DNA, 25 bp, Homo sapien
ggccacagttctttaccacagattc

SEQ ID NO: 2993744 - DNA, 25 bp, Homo sapien
ccacagttctttaccacagattcca

SEQ ID NO: 2993745 - DNA, 25 bp, Homo sapien
caggcctggatcaggtacaggatct

SEQ ID NO: 2993746 - DNA, 25 bp, Homo sapien
tacaggatcttgttacggacgttta

SEQ ID NO: 2993747 - DNA, 25 bp, Homo sapien
gaccaccttgtacttgggctcgttc

SEQ ID NO: 2993748 - DNA, 25 bp, Homo sapien
gctcgttccggaaggcatgcgccca

SEQ ID NO: 2993749 - DNA, 25 bp, Homo sapien
tgcgttcttcccgtgttctccacac

SEQ ID NO: 2993750 - DNA, 25 bp, Homo sapien
ggtccaaggcagctcgtgcagcgcc

SEQ ID NO: 2993751 - DNA, 25 bp, Homo sapien
catccaccaccccaaagttgagggt

SEQ ID NO: 2993752 - DNA, 25 bp, Homo sapien
ccctgcgttcttcccgtgttctcca

SEQ ID NO: 2993753 - DNA, 25 bp, Homo sapien
agtgaccgtgcacccaagtgaaggt

SEQ ID NO: 2993754 - DNA, 25 bp, Homo sapien
tgaccgtgcacccaagtgaaggtgt

SEQ ID NO: 2993755 - DNA, 25 bp, Homo sapien
ctgcaacgcagcagtgaccgtgcac

SEQ ID NO: 2993756 - DNA, 25 bp, Homo sapien
tgcaacgcagcagtgaccgtgcacc

SEQ ID NO: 2993757 - DNA, 25 bp, Homo sapien
tcccacctggcctgcaagacttccg

SEQ ID NO: 2993758 - DNA, 25 bp, Homo sapien
acctggcctgcaagacttccgggag

SEQ ID NO: 2993759 - DNA, 25 bp, Homo sapien
gagagatgaagccatagtcactgcc

SEQ ID NO: 2993760 - DNA, 25 bp, Homo sapien
tggcctgcaagacttccgggagccc

SEQ ID NO: 2993761 - DNA, 25 bp, Homo sapien
cagcaaacatggcatcgctctcttt

SEQ ID NO: 2993762 - DNA, 25 bp, Homo sapien
gcaaacatggcatcgctctctttga

SEQ ID NO: 2993763 - DNA, 25 bp, Homo sapien
agcaaacatggcatcgctctctttg

SEQ ID NO: 2993764 - DNA, 25 bp, Homo sapien
caaacatggcatcgctctctttgaa

SEQ ID NO: 2993765 - DNA, 25 bp, Homo sapien
ttacgggtcatcaccccgaactgca

SEQ ID NO: 2993766 - DNA, 25 bp, Homo sapien
actgcaccctgcagcggtggcattc

SEQ ID NO: 2993767 - DNA, 25 bp, Homo sapien
cttacgggtcatcaccccgaactgc

SEQ ID NO: 2993768 - DNA, 25 bp, Homo sapien
cgaactgcaccctgcagcggtggca

SEQ ID NO: 2993769 - DNA, 25 bp, Homo sapien
tctggccggggctgtagagcccccc

SEQ ID NO: 2993770 - DNA, 25 bp, Homo sapien
ggacctggtgtctggccggggctgt

SEQ ID NO: 2993771 - DNA, 25 bp, Homo sapien
gacctggtgtctggccggggctgta

SEQ ID NO: 2993772 - DNA, 25 bp, Homo sapien
cggggctgtagagccccccaggtgg

SEQ ID NO: 2993773 - DNA, 25 bp, Homo sapien
gcaagggacaagcagaacaagtgcc

SEQ ID NO: 2993774 - DNA, 25 bp, Homo sapien
gtctcaacgccagccaccgttttgg

SEQ ID NO: 2993775 - DNA, 25 bp, Homo sapien
accccgtacgatgccgaagctgggc

SEQ ID NO: 2993776 - DNA, 25 bp, Homo sapien
aacctggacatgctcccgggagtct

SEQ ID NO: 2993777 - DNA, 25 bp, Homo sapien
gggatggtggagtacttggaagaac

SEQ ID NO: 2993778 - DNA, 25 bp, Homo sapien
gctgctcgtagcagggctcacacac

SEQ ID NO: 2993779 - DNA, 25 bp, Homo sapien
cgcacctccttctcgatgccaaact

SEQ ID NO: 2993780 - DNA, 25 bp, Homo sapien
ccaaacttggggatggtggagtact

SEQ ID NO: 2993781 - DNA, 25 bp, Homo sapien
acccacctgccctagtgtggggcag

SEQ ID NO: 2993782 - DNA, 25 bp, Homo sapien
tttgtcggggcagcctcggtccctg

SEQ ID NO: 2993783 - DNA, 25 bp, Homo sapien
agccgcggcgccctgtctctcacac

SEQ ID NO: 2993784 - DNA, 25 bp, Homo sapien
agggtccgagggcatgcggccaccc

SEQ ID NO: 2993785 - DNA, 25 bp, Homo sapien
gaatggcgctgggatgccctgccat

SEQ ID NO: 2993786 - DNA, 25 bp, Homo sapien
acggacgggacttgacgtggctcaa

SEQ ID NO: 2993787 - DNA, 25 bp, Homo sapien
tgagcttcccgaacctaagcaggtg

SEQ ID NO: 2993788 - DNA, 25 bp, Homo sapien
cagactcacgcttgtgggcagtggc

SEQ ID NO: 2993789 - DNA, 25 bp, Homo sapien
acagggggctggtcaggtactcggg

SEQ ID NO: 2993790 - DNA, 25 bp, Homo sapien
gacagggggctggtcaggtactcgg

SEQ ID NO: 2993791 - DNA, 25 bp, Homo sapien
ctgaggacaagcggggagggtgagg

SEQ ID NO: 2993792 - DNA, 25 bp, Homo sapien
gcagggccgtctcgtccctcttggg

SEQ ID NO: 2993793 - DNA, 25 bp, Homo sapien
ccgcctctgactgtgacagcgccag

SEQ ID NO: 2993794 - DNA, 25 bp, Homo sapien
tgcagggccgtctcgtccctcttgg

SEQ ID NO: 2993795 - DNA, 25 bp, Homo sapien
tcctccgcctctgactgtgacagcg

SEQ ID NO: 2993796 - DNA, 25 bp, Homo sapien
gctccgccttggggtacgaagtgta

SEQ ID NO: 2993797 - DNA, 25 bp, Homo sapien
cacaggtgaagagtacaggctgctg

SEQ ID NO: 2993798 - DNA, 25 bp, Homo sapien
acgaagtgtacgtggacttctgtct

SEQ ID NO: 2993799 - DNA, 25 bp, Homo sapien
ggtacgaagtgtacgtggacttctg

SEQ ID NO: 2993800 - DNA, 25 bp, Homo sapien
ggtgacgtggatgccccagaaagca

SEQ ID NO: 2993801 - DNA, 25 bp, Homo sapien
cgtggatgccccagaaagcaagtcc

SEQ ID NO: 2993802 - DNA, 25 bp, Homo sapien
cagggagaggtgacgtggatgcccc

SEQ ID NO: 2993803 - DNA, 25 bp, Homo sapien
agaggtgacgtggatgccccagaaa

SEQ ID NO: 2993804 - DNA, 25 bp, Homo sapien
cactccacggaacctacaaaatgac

SEQ ID NO: 2993805 - DNA, 25 bp, Homo sapien
gcctcaaggtggacactggacagcc

SEQ ID NO: 2993806 - DNA, 25 bp, Homo sapien
taaccttgctatgggaggaacaggg

SEQ ID NO: 2993807 - DNA, 25 bp, Homo sapien
tccagatgcttagaactccacagag

SEQ ID NO: 2993808 - DNA, 25 bp, Homo sapien
aaagggcatctgagtctcacaggtg

SEQ ID NO: 2993809 - DNA, 25 bp, Homo sapien
gtgacagagccagttgcttcggcag

SEQ ID NO: 2993810 - DNA, 25 bp, Homo sapien
agagccagttgcttcggcagggaca

SEQ ID NO: 2993811 - DNA, 25 bp, Homo sapien
cagggatgtccccagtgcgacagat

SEQ ID NO: 2993812 - DNA, 25 bp, Homo sapien
cctcagccagaggcgccgacgagtt

SEQ ID NO: 2993813 - DNA, 25 bp, Homo sapien
tcctcagccagaggcgccgacgagt

SEQ ID NO: 2993814 - DNA, 25 bp, Homo sapien
ccaaggccagaaaccgtgagaggat

SEQ ID NO: 2993815 - DNA, 25 bp, Homo sapien
cagaaaccgtgagaggatgcacccc

SEQ ID NO: 2993816 - DNA, 25 bp, Homo sapien
cgtgagaggatgcaccccatgctgg

SEQ ID NO: 2993817 - DNA, 25 bp, Homo sapien
actcccaaggccagaaaccgtgaga

SEQ ID NO: 2993818 - DNA, 25 bp, Homo sapien
ccagtagttccggttgagataccgt

SEQ ID NO: 2993819 - DNA, 25 bp, Homo sapien
tcttctcccagtagttccggttgag

SEQ ID NO: 2993820 - DNA, 25 bp, Homo sapien
gcgtggggctcttgcgagcctcctc

SEQ ID NO: 2993821 - DNA, 25 bp, Homo sapien
agttccggttgagataccgtgcgag

SEQ ID NO: 2993822 - DNA, 25 bp, Homo sapien
tgagagtctgtctccgggagggggt

SEQ ID NO: 2993823 - DNA, 25 bp, Homo sapien
ggcacccagctatactcaagcctgg

SEQ ID NO: 2993824 - DNA, 25 bp, Homo sapien
cagggttctggatgagtgcggccac

SEQ ID NO: 2993825 - DNA, 25 bp, Homo sapien
ggttctggatgagtgcggccacgcc

SEQ ID NO: 2993826 - DNA, 25 bp, Homo sapien
atggaggcacccagctatactcaag

SEQ ID NO: 2993827 - DNA, 25 bp, Homo sapien
ggttactcttcatgcggttcacgaa

SEQ ID NO: 2993828 - DNA, 25 bp, Homo sapien
ttcacgaaggtggtgacggcgttct

SEQ ID NO: 2993829 - DNA, 25 bp, Homo sapien
aagagtgagagcacggccgagtcat

SEQ ID NO: 2993830 - DNA, 25 bp, Homo sapien
cgagtcattggtgatgctgcggccc

SEQ ID NO: 2993831 - DNA, 25 bp, Homo sapien
gcagctgcgggtgcatgccgttgat

SEQ ID NO: 2993832 - DNA, 25 bp, Homo sapien
agctgcgggtgcatgccgttgatgg

SEQ ID NO: 2993833 - DNA, 25 bp, Homo sapien
gctgcgggtgcatgccgttgatgga

SEQ ID NO: 2993834 - DNA, 25 bp, Homo sapien
cagctgcgggtgcatgccgttgatg

SEQ ID NO: 2993835 - DNA, 25 bp, Homo sapien
tggctgcccctgagccgaggccccg

SEQ ID NO: 2993836 - DNA, 25 bp, Homo sapien
tgcccctgagccgaggccccgtggc

SEQ ID NO: 2993837 - DNA, 25 bp, Homo sapien
acctggctgcccctgagccgaggcc

SEQ ID NO: 2993838 - DNA, 25 bp, Homo sapien
cccctgagccgaggccccgtggcgc

SEQ ID NO: 2993839 - DNA, 25 bp, Homo sapien
gaccacctcctgttgacactctctg

SEQ ID NO: 2993840 - DNA, 25 bp, Homo sapien
aagccacggccccaatgaaggactc

SEQ ID NO: 2993841 - DNA, 25 bp, Homo sapien
ggcatggtcatcactgagaccacct

SEQ ID NO: 2993842 - DNA, 25 bp, Homo sapien
aggactcacaagagctcagcaccct

SEQ ID NO: 2993843 - DNA, 25 bp, Homo sapien
ctgggtggaacggacacgcagatgg

SEQ ID NO: 2993844 - DNA, 25 bp, Homo sapien
cactccggcacagtgccgagaagct

SEQ ID NO: 2993845 - DNA, 25 bp, Homo sapien
tcctgggtggaacggacacgcagat

SEQ ID NO: 2993846 - DNA, 25 bp, Homo sapien
cctgggtggaacggacacgcagatg

SEQ ID NO: 2993847 - DNA, 25 bp, Homo sapien
ctgtgggcagatgacagagcaaccc

SEQ ID NO: 2993848 - DNA, 25 bp, Homo sapien
gggcagatgacagagcaaccctgac

SEQ ID NO: 2993849 - DNA, 25 bp, Homo sapien
tgggcagatgacagagcaaccctga

SEQ ID NO: 2993850 - DNA, 25 bp, Homo sapien
tgtgggcagatgacagagcaaccct

SEQ ID NO: 2993851 - DNA, 25 bp, Homo sapien
ttctcccggtgctcttcgcgcaggg

SEQ ID NO: 2993852 - DNA, 25 bp, Homo sapien
cccgggcatcgcggatctgtgccag

SEQ ID NO: 2993853 - DNA, 25 bp, Homo sapien
cggctgcccggcgaagcttctcccg

SEQ ID NO: 2993854 - DNA, 25 bp, Homo sapien
ccgggcatcgcggatctgtgccagc

SEQ ID NO: 2993855 - DNA, 25 bp, Homo sapien
ccccagccggccccggcctgtggct

SEQ ID NO: 2993856 - DNA, 25 bp, Homo sapien
ctgcgaggtcccccagccggccccg

SEQ ID NO: 2993857 - DNA, 25 bp, Homo sapien
agccggccccggcctgtggctgggc

SEQ ID NO: 2993858 - DNA, 25 bp, Homo sapien
cccagccggccccggcctgtggctg

SEQ ID NO: 2993859 - DNA, 25 bp, Homo sapien
gtgcggcaaaaacatgctggttatg

SEQ ID NO: 2993860 - DNA, 25 bp, Homo sapien
tgtgcggcaaaaacatgctggttat

SEQ ID NO: 2993861 - DNA, 25 bp, Homo sapien
ctgtgcggcaaaaacatgctggtta

SEQ ID NO: 2993862 - DNA, 25 bp, Homo sapien
tgctccagccgcatctgccgctcct

SEQ ID NO: 2993863 - DNA, 25 bp, Homo sapien
tccagccgcatctgccgctccttct

SEQ ID NO: 2993864 - DNA, 25 bp, Homo sapien
gctccagccgcatctgccgctcctt

SEQ ID NO: 2993865 - DNA, 25 bp, Homo sapien
gctgctccagccgcatctgccgctc

SEQ ID NO: 2993866 - DNA, 25 bp, Homo sapien
gcgggcatctgcgcgcgcatctgga

SEQ ID NO: 2993867 - DNA, 25 bp, Homo sapien
cgggcatctgcgcgcgcatctggac

SEQ ID NO: 2993868 - DNA, 25 bp, Homo sapien
ccacaagcctctgggtggcgggagg

SEQ ID NO: 2993869 - DNA, 25 bp, Homo sapien
cccacaagcctctgggtggcgggag

SEQ ID NO: 2993870 - DNA, 25 bp, Homo sapien
tggggacaaaagagacagcggtgag

SEQ ID NO: 2993871 - DNA, 25 bp, Homo sapien
acaagcctctgggtggcgggaggat

SEQ ID NO: 2993872 - DNA, 25 bp, Homo sapien
gcacacctccggctgcgggcatggc

SEQ ID NO: 2993873 - DNA, 25 bp, Homo sapien
ggtagagcacacctccggctgcggg

SEQ ID NO: 2993874 - DNA, 25 bp, Homo sapien
tagagcacacctccggctgcgggca

SEQ ID NO: 2993875 - DNA, 25 bp, Homo sapien
gagcacacctccggctgcgggcatg

SEQ ID NO: 2993876 - DNA, 25 bp, Homo sapien
gggagccctccaccgagccggcagg

SEQ ID NO: 2993877 - DNA, 25 bp, Homo sapien
tggggagccctccaccgagccggca

SEQ ID NO: 2993878 - DNA, 25 bp, Homo sapien
ggagccctccaccgagccggcaggg

SEQ ID NO: 2993879 - DNA, 25 bp, Homo sapien
attggggagccctccaccgagccgg

SEQ ID NO: 2993880 - DNA, 25 bp, Homo sapien
cggctggctcatgtacacgccgtgc

SEQ ID NO: 2993881 - DNA, 25 bp, Homo sapien
gggccggctggctcatgtacacgcc

SEQ ID NO: 2993882 - DNA, 25 bp, Homo sapien
caggggccggctggctcatgtacac

SEQ ID NO: 2993883 - DNA, 25 bp, Homo sapien
gccggctggctcatgtacacgccgt

SEQ ID NO: 2993884 - DNA, 25 bp, Homo sapien
ggcatggtctctgccccgacccgtc

SEQ ID NO: 2993885 - DNA, 25 bp, Homo sapien
ataaagacgagggataaaaggcatg

SEQ ID NO: 2993886 - DNA, 25 bp, Homo sapien
aagacgagggataaaaggcatggtc

SEQ ID NO: 2993887 - DNA, 25 bp, Homo sapien
cgagggataaaaggcatggtctctg

SEQ ID NO: 2993888 - DNA, 25 bp, Homo sapien
tcacatcggggcaactgggaaaacc

SEQ ID NO: 2993889 - DNA, 25 bp, Homo sapien
cagggacaacattcacatcggggca

SEQ ID NO: 2993890 - DNA, 25 bp, Homo sapien
ctgccacgcacggactgaaacacgg

SEQ ID NO: 2993891 - DNA, 25 bp, Homo sapien
ctgaaacacggctccagcaggaaag

SEQ ID NO: 2993892 - DNA, 25 bp, Homo sapien
tggtttcaggaaatgctcgctgtcg

SEQ ID NO: 2993893 - DNA, 25 bp, Homo sapien
tcaggaaatgctcgctgtcgcattc

SEQ ID NO: 2993894 - DNA, 25 bp, Homo sapien
gaaatgctcgctgtcgcattcaggg

SEQ ID NO: 2993895 - DNA, 25 bp, Homo sapien
gtttcaggaaatgctcgctgtcgca

SEQ ID NO: 2993896 - DNA, 25 bp, Homo sapien
cacacctgggaaactttgagcatca

SEQ ID NO: 2993897 - DNA, 25 bp, Homo sapien
tgtgagcacacccagaatcttgatc

SEQ ID NO: 2993898 - DNA, 25 bp, Homo sapien
cagcaatgggactgacgggatgcac

SEQ ID NO: 2993899 - DNA, 25 bp, Homo sapien
cagccttatggtcaccgcgtggaga

SEQ ID NO: 2993900 - DNA, 25 bp, Homo sapien
taggctggtaggatgagtaagcggg

SEQ ID NO: 2993901 - DNA, 25 bp, Homo sapien
gctgggtacatgtaggcactcacca

SEQ ID NO: 2993902 - DNA, 25 bp, Homo sapien
ctgggtacatgtaggcactcaccat

SEQ ID NO: 2993903 - DNA, 25 bp, Homo sapien
ctggtagcccgctgtgggagtaggc

SEQ ID NO: 2993904 - DNA, 25 bp, Homo sapien
tgctggactgcggaggctgagagat

SEQ ID NO: 2993905 - DNA, 25 bp, Homo sapien
ctgcatgttgtaaggctggtagccc

SEQ ID NO: 2993906 - DNA, 25 bp, Homo sapien
gactggctccccatgtagcccatgg

SEQ ID NO: 2993907 - DNA, 25 bp, Homo sapien
gctggtagcccatggagactgactg

SEQ ID NO: 2993908 - DNA, 25 bp, Homo sapien
agaagacgtcagatgtgagagagta

SEQ ID NO: 2993909 - DNA, 25 bp, Homo sapien
aagacgtcagatgtgagagagtagc

SEQ ID NO: 2993910 - DNA, 25 bp, Homo sapien
agacgtcagatgtgagagagtagcc

SEQ ID NO: 2993911 - DNA, 25 bp, Homo sapien
gtgagaagacgtcagatgtgagaga

SEQ ID NO: 2993912 - DNA, 25 bp, Homo sapien
tggcagagacgcatcctggcttggg

SEQ ID NO: 2993913 - DNA, 25 bp, Homo sapien
tgctgccccgcgatgtagggctgct

SEQ ID NO: 2993914 - DNA, 25 bp, Homo sapien
atgggctgctgccccgcgatgtagg

SEQ ID NO: 2993915 - DNA, 25 bp, Homo sapien
ggcttgggagggtggtcatgagatt

SEQ ID NO: 2993916 - DNA, 25 bp, Homo sapien
ggtcccattgctaaaccgtgaagcc

SEQ ID NO: 2993917 - DNA, 25 bp, Homo sapien
ctaaaccgtgaagcctgagggtgcc

SEQ ID NO: 2993918 - DNA, 25 bp, Homo sapien
tgccctgcgggtgccgctgtgaggc

SEQ ID NO: 2993919 - DNA, 25 bp, Homo sapien
cattgctaaaccgtgaagcctgagg

SEQ ID NO: 2993920 - DNA, 25 bp, Homo sapien
gatgcgcgtatctgccctgagactt

SEQ ID NO: 2993921 - DNA, 25 bp, Homo sapien
tcacggtttttcctgtctacacttg

SEQ ID NO: 2993922 - DNA, 25 bp, Homo sapien
tacacttgcggatgcgcgtatctgc

SEQ ID NO: 2993923 - DNA, 25 bp, Homo sapien
tcctgtctacacttgcggatgcgcg

SEQ ID NO: 2993924 - DNA, 25 bp, Homo sapien
tgtgcaggaggaaagcaggcatggc

SEQ ID NO: 2993925 - DNA, 25 bp, Homo sapien
tgcaggaggaaagcaggcatggccc

SEQ ID NO: 2993926 - DNA, 25 bp, Homo sapien
ctgtgcaggaggaaagcaggcatgg

SEQ ID NO: 2993927 - DNA, 25 bp, Homo sapien
gcaggaggaaagcaggcatggccct

SEQ ID NO: 2993928 - DNA, 25 bp, Homo sapien
cctgtgcctgcggttgctgggccac

SEQ ID NO: 2993929 - DNA, 25 bp, Homo sapien
ctgctgggggggaccgccagagggt

SEQ ID NO: 2993930 - DNA, 25 bp, Homo sapien
ggcccctgtgcctgcggttgctggg

SEQ ID NO: 2993931 - DNA, 25 bp, Homo sapien
tcgctgccctgtgccggcggcccct

SEQ ID NO: 2993932 - DNA, 25 bp, Homo sapien
gttactccggacgtgagcatggcct

SEQ ID NO: 2993933 - DNA, 25 bp, Homo sapien
tgaactgtatgtagtgttactccgg

SEQ ID NO: 2993934 - DNA, 25 bp, Homo sapien
gacgaggcgtttcaggtgaactgta

SEQ ID NO: 2993935 - DNA, 25 bp, Homo sapien
caggacgacggcagttagagacgag

SEQ ID NO: 2993936 - DNA, 25 bp, Homo sapien
taactcagggactgcagtaggctga

SEQ ID NO: 2993937 - DNA, 25 bp, Homo sapien
agctcacagtgcggccagagggcac

SEQ ID NO: 2993938 - DNA, 25 bp, Homo sapien
ctcactcgcagagaagggacactac

SEQ ID NO: 2993939 - DNA, 25 bp, Homo sapien
ttttattatcgctgtaccattctgg

SEQ ID NO: 2993940 - DNA, 25 bp, Homo sapien
gccgcagactcggagcgctgagctc

SEQ ID NO: 2993941 - DNA, 25 bp, Homo sapien
caacactcaggaggcgcgtttcagc

SEQ ID NO: 2993942 - DNA, 25 bp, Homo sapien
ggcgcctgccgctttcaacactcag

SEQ ID NO: 2993943 - DNA, 25 bp, Homo sapien
ggatgtgaaggtgagtgagacgccc

SEQ ID NO: 2993944 - DNA, 25 bp, Homo sapien
gccaaagccgcgctcccctaagagg

SEQ ID NO: 2993945 - DNA, 25 bp, Homo sapien
ccaaagccgcgctcccctaagaggc

SEQ ID NO: 2993946 - DNA, 25 bp, Homo sapien
agccaaagccgcgctcccctaagag

SEQ ID NO: 2993947 - DNA, 25 bp, Homo sapien
aagccaaagccgcgctcccctaaga

SEQ ID NO: 2993948 - DNA, 25 bp, Homo sapien
ttcagatcagaacaggcagagcctc

SEQ ID NO: 2993949 - DNA, 25 bp, Homo sapien
caaacgcccaggtggcttcctggga

SEQ ID NO: 2993950 - DNA, 25 bp, Homo sapien
tcctgggagagcacggctgagcctc

SEQ ID NO: 2993951 - DNA, 25 bp, Homo sapien
ttccctgtccgttggagtccattcc

SEQ ID NO: 2993952 - DNA, 25 bp, Homo sapien
ggtttctgtccgtacgcgatgcgag

SEQ ID NO: 2993953 - DNA, 25 bp, Homo sapien
aaaagcgtcgtctgtggcggcagct

SEQ ID NO: 2993954 - DNA, 25 bp, Homo sapien
tgttctttcttcagcgctcacgggt

SEQ ID NO: 2993955 - DNA, 25 bp, Homo sapien
ctgagattacccacaaggcggcgcg

SEQ ID NO: 2993956 - DNA, 25 bp, Homo sapien
gctggaaggtcacacgcggttcccc

SEQ ID NO: 2993957 - DNA, 25 bp, Homo sapien
aggaacgctctagccgccacggctg

SEQ ID NO: 2993958 - DNA, 25 bp, Homo sapien
gaggaggcgacgctctagccgcctc

SEQ ID NO: 2993959 - DNA, 25 bp, Homo sapien
ccgggcattcgagccggaaatgacg

SEQ ID NO: 2993960 - DNA, 25 bp, Homo sapien
aaggcggaacgcagcggcccgaagc

SEQ ID NO: 2993961 - DNA, 25 bp, Homo sapien
cacagggggcgagcggccgccggca

SEQ ID NO: 2993962 - DNA, 25 bp, Homo sapien
ctggcaaggcggaacgcagcggccc

SEQ ID NO: 2993963 - DNA, 25 bp, Homo sapien
cagcggcccgaagcccaaggcaagg

SEQ ID NO: 2993964 - DNA, 25 bp, Homo sapien
atgtcgcacggcacagacacatggc

SEQ ID NO: 2993965 - DNA, 25 bp, Homo sapien
tgtcgcacggcacagacacatggca

SEQ ID NO: 2993966 - DNA, 25 bp, Homo sapien
gtcgcacggcacagacacatggcac

SEQ ID NO: 2993967 - DNA, 25 bp, Homo sapien
gagggcctcacacctctgatggccg

SEQ ID NO: 2993968 - DNA, 25 bp, Homo sapien
cgttatccaggggtgcaccagcgag

SEQ ID NO: 2993969 - DNA, 25 bp, Homo sapien
gagagtgaggctggcgatgtcctgg

SEQ ID NO: 2993970 - DNA, 25 bp, Homo sapien
gctcgttgaggtctgagatttccaa

SEQ ID NO: 2993971 - DNA, 25 bp, Homo sapien
ccgacatcctggatcttcaacgttt

SEQ ID NO: 2993972 - DNA, 25 bp, Homo sapien
cgacatcctggatcttcaacgtttt

SEQ ID NO: 2993973 - DNA, 25 bp, Homo sapien
agcccgacatcctggatcttcaacg

SEQ ID NO: 2993974 - DNA, 25 bp, Homo sapien
gcccgacatcctggatcttcaacgt

SEQ ID NO: 2993975 - DNA, 25 bp, Homo sapien
ggacagccccagacatcacaccacc

SEQ ID NO: 2993976 - DNA, 25 bp, Homo sapien
agggacagccccagacatcacacca

SEQ ID NO: 2993977 - DNA, 25 bp, Homo sapien
cagccccagacatcacaccacccat

SEQ ID NO: 2993978 - DNA, 25 bp, Homo sapien
cagggacagccccagacatcacacc

SEQ ID NO: 2993979 - DNA, 25 bp, Homo sapien
tgcctggtgaccttggtgcctcccc

SEQ ID NO: 2993980 - DNA, 25 bp, Homo sapien
ctctttgaagcccaccttgaacttg

SEQ ID NO: 2993981 - DNA, 25 bp, Homo sapien
ccctgaattgtcagacaccctcttg

SEQ ID NO: 2993982 - DNA, 25 bp, Homo sapien
ccttttccccacaatgcttacaatg

SEQ ID NO: 2993983 - DNA, 25 bp, Homo sapien
gcttcactttgtccacgggcttcgc

SEQ ID NO: 2993984 - DNA, 25 bp, Homo sapien
gacgaggttgatgccttggatgtag

SEQ ID NO: 2993985 - DNA, 25 bp, Homo sapien
tgtccgttctttcgctatggggata

SEQ ID NO: 2993986 - DNA, 25 bp, Homo sapien
gcggacggtgaaatgtgtccgttct

SEQ ID NO: 2993987 - DNA, 25 bp, Homo sapien
tctccgcctcagctttggcgacatt

SEQ ID NO: 2993988 - DNA, 25 bp, Homo sapien
tactccagaaccacggtgccgccca

SEQ ID NO: 2993989 - DNA, 25 bp, Homo sapien
cgcctcagctttggcgacattggct

SEQ ID NO: 2993990 - DNA, 25 bp, Homo sapien
cagctttggcgacattggctttgat

SEQ ID NO: 2993991 - DNA, 25 bp, Homo sapien
acagtaggtctgtgcggcctgtccg

SEQ ID NO: 2993992 - DNA, 25 bp, Homo sapien
agaggcacattcaccggtggcgcgt

SEQ ID NO: 2993993 - DNA, 25 bp, Homo sapien
gccccgctgcgtggcgcaggcaatt

SEQ ID NO: 2993994 - DNA, 25 bp, Homo sapien
caaacggctccactgggcgcctggt

SEQ ID NO: 2993995 - DNA, 25 bp, Homo sapien
taacccctcaaaatggataccatgg

SEQ ID NO: 2993996 - DNA, 25 bp, Homo sapien
gagaaactctaccagaaggccttgg

SEQ ID NO: 2993997 - DNA, 25 bp, Homo sapien
tgagcaagctcacgggacagggctc

SEQ ID NO: 2993998 - DNA, 25 bp, Homo sapien
cacctcctgagggaagaccattaac

SEQ ID NO: 2993999 - DNA, 25 bp, Homo sapien
ccaggagagcccaatcccggcccga

SEQ ID NO: 2994000 - DNA, 25 bp, Homo sapien
ctaccccggcgtgtaccggccgcag

SEQ ID NO: 2994001 - DNA, 25 bp, Homo sapien
cgcgcccggttcaaagcgccgcccg

SEQ ID NO: 2994002 - DNA, 25 bp, Homo sapien
gcaccccgcacagccaatgcgcgcg

SEQ ID NO: 2994003 - DNA, 25 bp, Homo sapien
ggccagccccccgaagtaccagcgc

SEQ ID NO: 2994004 - DNA, 25 bp, Homo sapien
agcgggtgcgtgcagcaggcggccc

SEQ ID NO: 2994005 - DNA, 25 bp, Homo sapien
cccgaagtaccagcgcgacacgcgc

SEQ ID NO: 2994006 - DNA, 25 bp, Homo sapien
aggtccagcgggtgcgtgcagcagg

SEQ ID NO: 2994007 - DNA, 25 bp, Homo sapien
ctgccgagaactgggaagccggctg

SEQ ID NO: 2994008 - DNA, 25 bp, Homo sapien
accactggagggccacccgggatcg

SEQ ID NO: 2994009 - DNA, 25 bp, Homo sapien
cgggatcggccatccgggcgtcggg

SEQ ID NO: 2994010 - DNA, 25 bp, Homo sapien
ctgcctttgcaggcgtctcggcggc

SEQ ID NO: 2994011 - DNA, 25 bp, Homo sapien
aatacaagtcccctggacaggctgc

SEQ ID NO: 2994012 - DNA, 25 bp, Homo sapien
tgctaaaataaaggtcccctagaca

SEQ ID NO: 2994013 - DNA, 25 bp, Homo sapien
gtcagaaaacaacgccccttggctg

SEQ ID NO: 2994014 - DNA, 25 bp, Homo sapien
gttctctgtggcaagacacggtcag

SEQ ID NO: 2994015 - DNA, 25 bp, Homo sapien
tggccttcacgcagcgaccagcatt

SEQ ID NO: 2994016 - DNA, 25 bp, Homo sapien
tcacgcagcgaccagcattgttgct

SEQ ID NO: 2994017 - DNA, 25 bp, Homo sapien
gcattgttgctcattagtaaagcca

SEQ ID NO: 2994018 - DNA, 25 bp, Homo sapien
cattagtaaagccagtcccctcaaa

SEQ ID NO: 2994019 - DNA, 25 bp, Homo sapien
tgaccacagcgccatatgctgccag

SEQ ID NO: 2994020 - DNA, 25 bp, Homo sapien
cctgaccacagcgccatatgctgcc

SEQ ID NO: 2994021 - DNA, 25 bp, Homo sapien
cacagcgccatatgctgccagcagc

SEQ ID NO: 2994022 - DNA, 25 bp, Homo sapien
agcgccatatgctgccagcagctgg

SEQ ID NO: 2994023 - DNA, 25 bp, Homo sapien
tgcacagcgaggcgctcaggccgct

SEQ ID NO: 2994024 - DNA, 25 bp, Homo sapien
gccaggatgccgtcggtacgcacca

SEQ ID NO: 2994025 - DNA, 25 bp, Homo sapien
gcgctcaggccgctgtagagtgcca

SEQ ID NO: 2994026 - DNA, 25 bp, Homo sapien
ccgctgtagagtgccaggatgccgt

SEQ ID NO: 2994027 - DNA, 25 bp, Homo sapien
caacaccttctcgtggaaggggaga

SEQ ID NO: 2994028 - DNA, 25 bp, Homo sapien
gctgacggagcccagcaacaccttc

SEQ ID NO: 2994029 - DNA, 25 bp, Homo sapien
ctcgtagatggcgaaccgagtcagg

SEQ ID NO: 2994030 - DNA, 25 bp, Homo sapien
acacggtcccgcacagtctcgtaga

SEQ ID NO: 2994031 - DNA, 25 bp, Homo sapien
cgtccccacgaagcctccagctaaa

SEQ ID NO: 2994032 - DNA, 25 bp, Homo sapien
ttgaccaagtctgcgggcgtcccca

SEQ ID NO: 2994033 - DNA, 25 bp, Homo sapien
aagtctgcgggcgtccccacgaagc

SEQ ID NO: 2994034 - DNA, 25 bp, Homo sapien
ctgacgttgaccaagtctgcgggcg

SEQ ID NO: 2994035 - DNA, 25 bp, Homo sapien
aggggcgggcgggccgaggggcatg

SEQ ID NO: 2994036 - DNA, 25 bp, Homo sapien
gcgggcgggccgaggggcatgggca

SEQ ID NO: 2994037 - DNA, 25 bp, Homo sapien
ggcatgggcagccctggcagcacag

SEQ ID NO: 2994038 - DNA, 25 bp, Homo sapien
tgaaacagaagcaggtggcgggagg

SEQ ID NO: 2994039 - DNA, 25 bp, Homo sapien
ggggcagcttcacgtcgttctgcat

SEQ ID NO: 2994040 - DNA, 25 bp, Homo sapien
gggcagcttcacgtcgttctgcatc

SEQ ID NO: 2994041 - DNA, 25 bp, Homo sapien
ctggggcagcttcacgtcgttctgc

SEQ ID NO: 2994042 - DNA, 25 bp, Homo sapien
cctggggcagcttcacgtcgttctg

SEQ ID NO: 2994043 - DNA, 25 bp, Homo sapien
cttcacgagctacgcggtacaggcc

SEQ ID NO: 2994044 - DNA, 25 bp, Homo sapien
acaggccatccagcgcatgggcgta

SEQ ID NO: 2994045 - DNA, 25 bp, Homo sapien
gtacaggccatccagcgcatgggcg

SEQ ID NO: 2994046 - DNA, 25 bp, Homo sapien
cgagctacgcggtacaggccatcca

SEQ ID NO: 2994047 - DNA, 25 bp, Homo sapien
ggttgcacccgagaacagtctcctg

SEQ ID NO: 2994048 - DNA, 25 bp, Homo sapien
cacagtgactaaggcccctcggctg

SEQ ID NO: 2994049 - DNA, 25 bp, Homo sapien
gatgccatggttgcacccgagaaca

SEQ ID NO: 2994050 - DNA, 25 bp, Homo sapien
tggcccacagtgactaaggcccctc

SEQ ID NO: 2994051 - DNA, 25 bp, Homo sapien
tgcaggggcacaagggcggtcaggg

SEQ ID NO: 2994052 - DNA, 25 bp, Homo sapien
ctgcaggggcacaagggcggtcagg

SEQ ID NO: 2994053 - DNA, 25 bp, Homo sapien
tgcttggcctggtcgtagcaggaca

SEQ ID NO: 2994054 - DNA, 25 bp, Homo sapien
gagaggtacccggtgctaaggacca

SEQ ID NO: 2994055 - DNA, 25 bp, Homo sapien
agatgttgtcagagaggtacccggt

SEQ ID NO: 2994056 - DNA, 25 bp, Homo sapien
cccggtgctaaggaccagctgcttg

SEQ ID NO: 2994057 - DNA, 25 bp, Homo sapien
ctgtcaggtacgccaggcaccatcg

SEQ ID NO: 2994058 - DNA, 25 bp, Homo sapien
ggtacgccaggcaccatcgccgaat

SEQ ID NO: 2994059 - DNA, 25 bp, Homo sapien
cacgtgccagaacctccacctgact

SEQ ID NO: 2994060 - DNA, 25 bp, Homo sapien
acgtgccagaacctccacctgactc

SEQ ID NO: 2994061 - DNA, 25 bp, Homo sapien
tgaggagggggctcgtcaccagcgg

SEQ ID NO: 2994062 - DNA, 25 bp, Homo sapien
ctgaggagggggctcgtcaccagcg

SEQ ID NO: 2994063 - DNA, 25 bp, Homo sapien
gaggagggggctcgtcaccagcggc

SEQ ID NO: 2994064 - DNA, 25 bp, Homo sapien
tggcacaggaacgtggcacatccac

SEQ ID NO: 2994065 - DNA, 25 bp, Homo sapien
ctggcacaggaacgtggcacatcca

SEQ ID NO: 2994066 - DNA, 25 bp, Homo sapien
ggcacaggaacgtggcacatccacc

SEQ ID NO: 2994067 - DNA, 25 bp, Homo sapien
gatactcccccttggagttcatcag

SEQ ID NO: 2994068 - DNA, 25 bp, Homo sapien
ccccttggagttcatcaggcgagtc

SEQ ID NO: 2994069 - DNA, 25 bp, Homo sapien
tggagttcatcaggcgagtcttcag

SEQ ID NO: 2994070 - DNA, 25 bp, Homo sapien
atcaggcgagtcttcagcacatcca

SEQ ID NO: 2994071 - DNA, 25 bp, Homo sapien
agaggcccgagcttcgctgtctcca

SEQ ID NO: 2994072 - DNA, 25 bp, Homo sapien
aaaaggccagaggcccgagcttcgc

SEQ ID NO: 2994073 - DNA, 25 bp, Homo sapien
tctccacggcgcagtggaaaacgcc

SEQ ID NO: 2994074 - DNA, 25 bp, Homo sapien
gagcttcgctgtctccacggcgcag

SEQ ID NO: 2994075 - DNA, 25 bp, Homo sapien
aaagtttttgcgtagctgttccaga

SEQ ID NO: 2994076 - DNA, 25 bp, Homo sapien
tttgatgccaaagtttttgcgtagc

SEQ ID NO: 2994077 - DNA, 25 bp, Homo sapien
tttgcgtagctgttccagaaacaca

SEQ ID NO: 2994078 - DNA, 25 bp, Homo sapien
aggcggatgccagctgggacgaggc

SEQ ID NO: 2994079 - DNA, 25 bp, Homo sapien
ctaactgttaaagccactgcagggc

SEQ ID NO: 2994080 - DNA, 25 bp, Homo sapien
gctagcacttgggtgagcaacagcc

SEQ ID NO: 2994081 - DNA, 25 bp, Homo sapien
aagtcctcgatggaaagtgctggaa

SEQ ID NO: 2994082 - DNA, 25 bp, Homo sapien
gaagaacctagcgtgtctggcctgg

SEQ ID NO: 2994083 - DNA, 25 bp, Homo sapien
caggaggcccaggttagtaagccaa

SEQ ID NO: 2994084 - DNA, 25 bp, Homo sapien
tcaaccccagcctcaccgtcttgtt

SEQ ID NO: 2994085 - DNA, 25 bp, Homo sapien
caaatgcacagcgaggaccctggct

SEQ ID NO: 2994086 - DNA, 25 bp, Homo sapien
tacttccccaattccttcatccaaa

SEQ ID NO: 2994087 - DNA, 25 bp, Homo sapien
acaagtatgagagatcacacccggc

SEQ ID NO: 2994088 - DNA, 25 bp, Homo sapien
atcgtggcctaaatctcctgggctc

SEQ ID NO: 2994089 - DNA, 25 bp, Homo sapien
gcaatcatggctcatcgtggcctaa

SEQ ID NO: 2994090 - DNA, 25 bp, Homo sapien
ggagatctcaccatatcgtccaggc

SEQ ID NO: 2994091 - DNA, 25 bp, Homo sapien
caaggccatttgctgcgtggtccac

SEQ ID NO: 2994092 - DNA, 25 bp, Homo sapien
ttgtcttcgcgtcgtcagcttcggc

SEQ ID NO: 2994093 - DNA, 25 bp, Homo sapien
gagaagtttccatcccggaagctac

SEQ ID NO: 2994094 - DNA, 25 bp, Homo sapien
tccacgcacgacaggagcagagctt

SEQ ID NO: 2994095 - DNA, 25 bp, Homo sapien
ccacatccaccacctcagggacccc

SEQ ID NO: 2994096 - DNA, 25 bp, Homo sapien
atccaccacctcagggaccccatgc

SEQ ID NO: 2994097 - DNA, 25 bp, Homo sapien
actatggtcctgggtccctccacat

SEQ ID NO: 2994098 - DNA, 25 bp, Homo sapien
ccactatggtcctgggtccctccac

SEQ ID NO: 2994099 - DNA, 25 bp, Homo sapien
tctgccgtgtgctgggtcttttccg

SEQ ID NO: 2994100 - DNA, 25 bp, Homo sapien
gccgtctgccgtgtgctgggtcttt

SEQ ID NO: 2994101 - DNA, 25 bp, Homo sapien
gccactcccctttacctgggcagct

SEQ ID NO: 2994102 - DNA, 25 bp, Homo sapien
tgtgctgggtcttttccggctgccc

SEQ ID NO: 2994103 - DNA, 25 bp, Homo sapien
tgttagcaattgtcaggcgcagccc

SEQ ID NO: 2994104 - DNA, 25 bp, Homo sapien
gagtgtcatcgagggtcctcccatg

SEQ ID NO: 2994105 - DNA, 25 bp, Homo sapien
gacaccctagtgctaagtgacttgg

SEQ ID NO: 2994106 - DNA, 25 bp, Homo sapien
cacctaaagaccatgtagcctgagg

SEQ ID NO: 2994107 - DNA, 25 bp, Homo sapien
gcaggagtggagcagcaggtgacac

SEQ ID NO: 2994108 - DNA, 25 bp, Homo sapien
ggggcaggagtggagcagcaggtga

SEQ ID NO: 2994109 - DNA, 25 bp, Homo sapien
ctgttggggcaggagtggagcagca

SEQ ID NO: 2994110 - DNA, 25 bp, Homo sapien
gttggggcaggagtggagcagcagg

SEQ ID NO: 2994111 - DNA, 25 bp, Homo sapien
gacggccacggaagcaggcagtcac

SEQ ID NO: 2994112 - DNA, 25 bp, Homo sapien
ccctgtaggctggacggccacggaa

SEQ ID NO: 2994113 - DNA, 25 bp, Homo sapien
cacggaagcaggcagtcacgtcctg

SEQ ID NO: 2994114 - DNA, 25 bp, Homo sapien
cagtcacgtcctgcagaatgcacag

SEQ ID NO: 2994115 - DNA, 25 bp, Homo sapien
gctgcatcactttgaatgaggatgc

SEQ ID NO: 2994116 - DNA, 25 bp, Homo sapien
ctgtgggctgcatcactttgaatga

SEQ ID NO: 2994117 - DNA, 25 bp, Homo sapien
tgggctgcatcactttgaatgagga

SEQ ID NO: 2994118 - DNA, 25 bp, Homo sapien
ctcagaggagcttgcccggggcccc

SEQ ID NO: 2994119 - DNA, 25 bp, Homo sapien
cgctgaactggaagttctcagggta

SEQ ID NO: 2994120 - DNA, 25 bp, Homo sapien
gcagcattcgggctgagccccaaat

SEQ ID NO: 2994121 - DNA, 25 bp, Homo sapien
ttggtggcaggctccttcagcgctg

SEQ ID NO: 2994122 - DNA, 25 bp, Homo sapien
agccccaaatgctgtggccccggag

SEQ ID NO: 2994123 - DNA, 25 bp, Homo sapien
ctggaagtctctaaagcccttgggt

SEQ ID NO: 2994124 - DNA, 25 bp, Homo sapien
tggaagtctctaaagcccttgggtc

SEQ ID NO: 2994125 - DNA, 25 bp, Homo sapien
atagatcattttctagcctcgttgg

SEQ ID NO: 2994126 - DNA, 25 bp, Homo sapien
tgacagccgtatcctcgtgcgcctg

SEQ ID NO: 2994127 - DNA, 25 bp, Homo sapien
tcgtgcgcctgcttgggcaatagat

SEQ ID NO: 2994128 - DNA, 25 bp, Homo sapien
gcagctgtgacagccgtatcctcgt

SEQ ID NO: 2994129 - DNA, 25 bp, Homo sapien
gtgcagcgcttagaggctttccctg

SEQ ID NO: 2994130 - DNA, 25 bp, Homo sapien
gtggtgcagcgcttagaggctttcc

SEQ ID NO: 2994131 - DNA, 25 bp, Homo sapien
tgaggaggtggtgcagcgcttagag

SEQ ID NO: 2994132 - DNA, 25 bp, Homo sapien
aggctttccctgggcggtcttcaag

SEQ ID NO: 2994133 - DNA, 25 bp, Homo sapien
aggtggtctttcagctggatcccca

SEQ ID NO: 2994134 - DNA, 25 bp, Homo sapien
tcactgggcggtggttgtgaccgcg

SEQ ID NO: 2994135 - DNA, 25 bp, Homo sapien
tgcccctgggtagccgtcgcaggaa

SEQ ID NO: 2994136 - DNA, 25 bp, Homo sapien
gatgagtaggatagttttgggcaga

SEQ ID NO: 2994137 - DNA, 25 bp, Homo sapien
gggagggcgcggctcggactgagcg

SEQ ID NO: 2994138 - DNA, 25 bp, Homo sapien
cctgaggatgcctccgattctcgga

SEQ ID NO: 2994139 - DNA, 25 bp, Homo sapien
agagccccgctttcccggtctcctg

SEQ ID NO: 2994140 - DNA, 25 bp, Homo sapien
gcgcggctcggactgagcgcctttc

SEQ ID NO: 2994141 - DNA, 25 bp, Homo sapien
gagacttccggatcctgtcagggtg

SEQ ID NO: 2994142 - DNA, 25 bp, Homo sapien
gatgaactgtaatacgcaaagccag

SEQ ID NO: 2994143 - DNA, 25 bp, Homo sapien
aagcctgcggcctcgcttgaaggag

SEQ ID NO: 2994144 - DNA, 25 bp, Homo sapien
gagccggactggacatggtcactca

SEQ ID NO: 2994145 - DNA, 25 bp, Homo sapien
tgccgattcccagcggaggaaagtg

SEQ ID NO: 2994146 - DNA, 25 bp, Homo sapien
caaaagtcaggatactattgcagtc

SEQ ID NO: 2994147 - DNA, 25 bp, Homo sapien
catgggagtacctcccttttgcctg

SEQ ID NO: 2994148 - DNA, 25 bp, Homo sapien
caactttaaaatcagtggcggtgcc

SEQ ID NO: 2994149 - DNA, 25 bp, Homo sapien
tggttgcccctggacgtgtgcgtct

SEQ ID NO: 2994150 - DNA, 25 bp, Homo sapien
tcggtcccgtctaaccatgatgcct

SEQ ID NO: 2994151 - DNA, 25 bp, Homo sapien
ggtgtgggatgcacggcctcgtggg

SEQ ID NO: 2994152 - DNA, 25 bp, Homo sapien
cttaacatgtggagtgtaccgtggg

SEQ ID NO: 2994153 - DNA, 25 bp, Homo sapien
gatcaccctgggattgactggccaa

SEQ ID NO: 2994154 - DNA, 25 bp, Homo sapien
tgtctgtgatcatgtagcctaaggt

SEQ ID NO: 2994155 - DNA, 25 bp, Homo sapien
gactggccaagcatttggtggaaga

SEQ ID NO: 2994156 - DNA, 25 bp, Homo sapien
gttatctatacacgttattgaagcg

SEQ ID NO: 2994157 - DNA, 25 bp, Homo sapien
gattgacaggacattcgcttaggcc

SEQ ID NO: 2994158 - DNA, 25 bp, Homo sapien
gagactgggatttagcaaccaagac

SEQ ID NO: 2994159 - DNA, 25 bp, Homo sapien
tatatatcagtatgaacgcaagggc

SEQ ID NO: 2994160 - DNA, 25 bp, Homo sapien
tgacacgtgcttgtgcatttacccg

SEQ ID NO: 2994161 - DNA, 25 bp, Homo sapien
gtgcggccaatgatggatttgtttc

SEQ ID NO: 2994162 - DNA, 25 bp, Homo sapien
tgcggccaatgatggatttgtttct

SEQ ID NO: 2994163 - DNA, 25 bp, Homo sapien
tcttttcgacagtggcttcggcggt

SEQ ID NO: 2994164 - DNA, 25 bp, Homo sapien
tggagtctcagacgccgatattcag

SEQ ID NO: 2994165 - DNA, 25 bp, Homo sapien
tattcaggtaagagacgagggcttc

SEQ ID NO: 2994166 - DNA, 25 bp, Homo sapien
aaacaacttcccgacaagtggcagc

SEQ ID NO: 2994167 - DNA, 25 bp, Homo sapien
gtttcggccggatcctctcaggccg

SEQ ID NO: 2994168 - DNA, 25 bp, Homo sapien
cggccggatcctctcaggccgggaa

SEQ ID NO: 2994169 - DNA, 25 bp, Homo sapien
agaggaagggtccggagtagccgtg

SEQ ID NO: 2994170 - DNA, 25 bp, Homo sapien
ccggatcctctcaggccgggaagag

SEQ ID NO: 2994171 - DNA, 25 bp, Homo sapien
ggccgacaaaatggacatgtctctg

SEQ ID NO: 2994172 - DNA, 25 bp, Homo sapien
aaaatggacatgtctctggacgaca

SEQ ID NO: 2994173 - DNA, 25 bp, Homo sapien
ccgacaaaatggacatgtctctgga

SEQ ID NO: 2994174 - DNA, 25 bp, Homo sapien
gacaaaatggacatgtctctggacg

SEQ ID NO: 2994175 - DNA, 25 bp, Homo sapien
ccgaggccgtggcaccggaaggcct

SEQ ID NO: 2994176 - DNA, 25 bp, Homo sapien
cggaagtgacgtgccggcgtgctga

SEQ ID NO: 2994177 - DNA, 25 bp, Homo sapien
gcggccaatcagcagccgctccgag

SEQ ID NO: 2994178 - DNA, 25 bp, Homo sapien
gggctcgagccgatgcccgattccg

SEQ ID NO: 2994179 - DNA, 25 bp, Homo sapien
aggtataaaaacgaccacagtcgcg

SEQ ID NO: 2994180 - DNA, 25 bp, Homo sapien
cccttccgttggcagcgccggcgtc

SEQ ID NO: 2994181 - DNA, 25 bp, Homo sapien
tataaaaacgaccacagtcgcggcc

SEQ ID NO: 2994182 - DNA, 25 bp, Homo sapien
agtcgcggcccgactccctcaacag

SEQ ID NO: 2994183 - DNA, 25 bp, Homo sapien
tgggcgggagcggaaacaaggactc

SEQ ID NO: 2994184 - DNA, 25 bp, Homo sapien
cacagtcctgggcgggagcggaaac

SEQ ID NO: 2994185 - DNA, 25 bp, Homo sapien
cgcgcccgccggaccccaccgcgag

SEQ ID NO: 2994186 - DNA, 25 bp, Homo sapien
aggcacccgccgcgcccgtagcgcc

SEQ ID NO: 2994187 - DNA, 25 bp, Homo sapien
aaaagccagctgtggtggcgtgcac

SEQ ID NO: 2994188 - DNA, 25 bp, Homo sapien
tggtggcgtgcaccagctgcctgag

SEQ ID NO: 2994189 - DNA, 25 bp, Homo sapien
aaaaaagccagctgtggtggcgtgc

SEQ ID NO: 2994190 - DNA, 25 bp, Homo sapien
tgacgtgggaggatagctcgagccc

SEQ ID NO: 2994191 - DNA, 25 bp, Homo sapien
agctgagccacaggaatcacttgga

SEQ ID NO: 2994192 - DNA, 25 bp, Homo sapien
gctgagatcacgccagctcccagct

SEQ ID NO: 2994193 - DNA, 25 bp, Homo sapien
aagctgagccacaggaatcacttgg

SEQ ID NO: 2994194 - DNA, 25 bp, Homo sapien
agctcccagctctattcgggaagct

SEQ ID NO: 2994195 - DNA, 25 bp, Homo sapien
atctcaaatgggcctggccaacatg

SEQ ID NO: 2994196 - DNA, 25 bp, Homo sapien
caaagatctcaaatgggcctggcca

SEQ ID NO: 2994197 - DNA, 25 bp, Homo sapien
tcttcaaagatctcaaatgggcctg

SEQ ID NO: 2994198 - DNA, 25 bp, Homo sapien
ttcaaagatctcaaatgggcctggc

SEQ ID NO: 2994199 - DNA, 25 bp, Homo sapien
ctggctaaattgagtctgcagagct

SEQ ID NO: 2994200 - DNA, 25 bp, Homo sapien
caggtataagcctgccacagtgcag

SEQ ID NO: 2994201 - DNA, 25 bp, Homo sapien
gagctagaacgtttaggcaccaaca

SEQ ID NO: 2994202 - DNA, 25 bp, Homo sapien
gagggaacaggacgactggctaaat

SEQ ID NO: 2994203 - DNA, 25 bp, Homo sapien
tggccacgccgttccagcacttaat

SEQ ID NO: 2994204 - DNA, 25 bp, Homo sapien
cgttaaatgccatcctgcagatgcc

SEQ ID NO: 2994205 - DNA, 25 bp, Homo sapien
agttctcatcgttggccacccagag

SEQ ID NO: 2994206 - DNA, 25 bp, Homo sapien
tgcagatgccacagttctcatcgtt

SEQ ID NO: 2994207 - DNA, 25 bp, Homo sapien
gccgctcagacagcatggaggggac

SEQ ID NO: 2994208 - DNA, 25 bp, Homo sapien
agtcggggccgctcagacagcatgg

SEQ ID NO: 2994209 - DNA, 25 bp, Homo sapien
tcggggccgctcagacagcatggag

SEQ ID NO: 2994210 - DNA, 25 bp, Homo sapien
ggggccgctcagacagcatggaggg

SEQ ID NO: 2994211 - DNA, 25 bp, Homo sapien
aggttgcggcaagccgagatcgcgc

SEQ ID NO: 2994212 - DNA, 25 bp, Homo sapien
gaggttgcggcaagccgagatcgcg

SEQ ID NO: 2994213 - DNA, 25 bp, Homo sapien
gatatcggccctttcaaatgagagc

SEQ ID NO: 2994214 - DNA, 25 bp, Homo sapien
ggtctgggccactctgagtactcgg

SEQ ID NO: 2994215 - DNA, 25 bp, Homo sapien
caaaggtgtcacttcgttctagtgc

SEQ ID NO: 2994216 - DNA, 25 bp, Homo sapien
tgatgagtccgcagatgcactgagg

SEQ ID NO: 2994217 - DNA, 25 bp, Homo sapien
gacatcagggatccggtgtgctgcc

SEQ ID NO: 2994218 - DNA, 25 bp, Homo sapien
aaggtcacatgaatggtcaaggcac

SEQ ID NO: 2994219 - DNA, 25 bp, Homo sapien
tcaaggcaccaaggagacgtgcatc

SEQ ID NO: 2994220 - DNA, 25 bp, Homo sapien
gaagactcttccctagacatcaggg

SEQ ID NO: 2994221 - DNA, 25 bp, Homo sapien
gaggtggcgctctggcctagcccac

SEQ ID NO: 2994222 - DNA, 25 bp, Homo sapien
aggcgaagaccagcaatgaccaagg

SEQ ID NO: 2994223 - DNA, 25 bp, Homo sapien
agggacaccggacatgcggcctcca

SEQ ID NO: 2994224 - DNA, 25 bp, Homo sapien
cctcacccaggctcatcatgctcag

SEQ ID NO: 2994225 - DNA, 25 bp, Homo sapien
aaaaggacaggcatgaccaggctgg

SEQ ID NO: 2994226 - DNA, 25 bp, Homo sapien
gaaaaggacaggcatgaccaggctg

SEQ ID NO: 2994227 - DNA, 25 bp, Homo sapien
ttcagagaagccgaaatcaggagtg

SEQ ID NO: 2994228 - DNA, 25 bp, Homo sapien
gagtgttacccaatcggtctcctga

SEQ ID NO: 2994229 - DNA, 25 bp, Homo sapien
cacttgaggatgcaatgcatgtgga

SEQ ID NO: 2994230 - DNA, 25 bp, Homo sapien
aggatgcaatgcatgtggaagcagt

SEQ ID NO: 2994231 - DNA, 25 bp, Homo sapien
accagcgggcagtcgtcgccgggca

SEQ ID NO: 2994232 - DNA, 25 bp, Homo sapien
agccacttgaggatgcaatgcatgt

SEQ ID NO: 2994233 - DNA, 25 bp, Homo sapien
ccctccagcgagagccaggtcgggc

SEQ ID NO: 2994234 - DNA, 25 bp, Homo sapien
gaaggagtctcaggatgcccctcca

SEQ ID NO: 2994235 - DNA, 25 bp, Homo sapien
agccatcggcgccagcatgaggaag

SEQ ID NO: 2994236 - DNA, 25 bp, Homo sapien
catgaggaaggagtctcaggatgcc

SEQ ID NO: 2994237 - DNA, 25 bp, Homo sapien
tttgagtagtttaatgagttttcac

SEQ ID NO: 2994238 - DNA, 25 bp, Homo sapien
acatagtgatggcaaaacaaacgca

SEQ ID NO: 2994239 - DNA, 25 bp, Homo sapien
cacttattggataaaagtgtcaaca

SEQ ID NO: 2994240 - DNA, 25 bp, Homo sapien
gtgtcaacatagtgatggcaaaaca

SEQ ID NO: 2994241 - DNA, 25 bp, Homo sapien
gagaccacatctatatgccgagaac

SEQ ID NO: 2994242 - DNA, 25 bp, Homo sapien
tggcgtttcacggagatgtttattc

SEQ ID NO: 2994243 - DNA, 25 bp, Homo sapien
tctatatgccgagaacacaggcacc

SEQ ID NO: 2994244 - DNA, 25 bp, Homo sapien
gcgtttcacggagatgtttattcat

SEQ ID NO: 2994245 - DNA, 25 bp, Homo sapien
gcatgccccaggctctaccgtctga

SEQ ID NO: 2994246 - DNA, 25 bp, Homo sapien
ccaggctctaccgtctgatcctgct

SEQ ID NO: 2994247 - DNA, 25 bp, Homo sapien
ctcctcccagtcatgactcagggtt

SEQ ID NO: 2994248 - DNA, 25 bp, Homo sapien
cagtcatgactcagggtttgacgag

SEQ ID NO: 2994249 - DNA, 25 bp, Homo sapien
agcagtggccgccagctttgcacag

SEQ ID NO: 2994250 - DNA, 25 bp, Homo sapien
cgccgccggcaatccagcaggcaag

SEQ ID NO: 2994251 - DNA, 25 bp, Homo sapien
gccacaagcagtggccgccagcttt

SEQ ID NO: 2994252 - DNA, 25 bp, Homo sapien
tggaggcgccacaagcagtggccgc

SEQ ID NO: 2994253 - DNA, 25 bp, Homo sapien
cccagtgagaacaatggacgcccac

SEQ ID NO: 2994254 - DNA, 25 bp, Homo sapien
ccgctgcagacagtcccagtgagaa

SEQ ID NO: 2994255 - DNA, 25 bp, Homo sapien
cccgctgcagacagtcccagtgaga

SEQ ID NO: 2994256 - DNA, 25 bp, Homo sapien
agtcccagtgagaacaatggacgcc

SEQ ID NO: 2994257 - DNA, 25 bp, Homo sapien
gcctcagacgtgtggacacacttcc

SEQ ID NO: 2994258 - DNA, 25 bp, Homo sapien
tcagacgtgtggacacacttcccag

SEQ ID NO: 2994259 - DNA, 25 bp, Homo sapien
ctcagacgtgtggacacacttccca

SEQ ID NO: 2994260 - DNA, 25 bp, Homo sapien
ctaggaagggaagcctcagacgtgt

SEQ ID NO: 2994261 - DNA, 25 bp, Homo sapien
gtcaagagacactgggcacgggtca

SEQ ID NO: 2994262 - DNA, 25 bp, Homo sapien
tctgcagcctttggccacaggatga

SEQ ID NO: 2994263 - DNA, 25 bp, Homo sapien
gggtatcttcccaggacaggcactg

SEQ ID NO: 2994264 - DNA, 25 bp, Homo sapien
caagggctccctaggttactggaga

SEQ ID NO: 2994265 - DNA, 25 bp, Homo sapien
ggacgccggctgactggtgggcggc

SEQ ID NO: 2994266 - DNA, 25 bp, Homo sapien
gacgccggctgactggtgggcggcg

SEQ ID NO: 2994267 - DNA, 25 bp, Homo sapien
ggggacgccggctgactggtgggcg

SEQ ID NO: 2994268 - DNA, 25 bp, Homo sapien
acgccggctgactggtgggcggcgg

SEQ ID NO: 2994269 - DNA, 25 bp, Homo sapien
gcggccgccagtgtcgcggaccggg

SEQ ID NO: 2994270 - DNA, 25 bp, Homo sapien
cttgtaccacgcgaggccaggcggc

SEQ ID NO: 2994271 - DNA, 25 bp, Homo sapien
cgccgctggcttgtaccacgcgagg

SEQ ID NO: 2994272 - DNA, 25 bp, Homo sapien
tgtgccccgccgctggcttgtacca

SEQ ID NO: 2994273 - DNA, 25 bp, Homo sapien
gtagggctgggagcgccgcgcgtac

SEQ ID NO: 2994274 - DNA, 25 bp, Homo sapien
ccgcgcgtacggggacctgcggagg

SEQ ID NO: 2994275 - DNA, 25 bp, Homo sapien
gagcgccgcgcgtacggggacctgc

SEQ ID NO: 2994276 - DNA, 25 bp, Homo sapien
tgtagggctgggagcgccgcgcgta

SEQ ID NO: 2994277 - DNA, 25 bp, Homo sapien
tcagtccccggcacgccggactcac

SEQ ID NO: 2994278 - DNA, 25 bp, Homo sapien
tggggggcaggcaagcaaaggctga

SEQ ID NO: 2994279 - DNA, 25 bp, Homo sapien
ccatcagtccccggcacgccggact

SEQ ID NO: 2994280 - DNA, 25 bp, Homo sapien
atcagtccccggcacgccggactca

SEQ ID NO: 2994281 - DNA, 25 bp, Homo sapien
gggcgacgtcctggacgcacacagc

SEQ ID NO: 2994282 - DNA, 25 bp, Homo sapien
ttgcactggtaggtcccgcggccgt

SEQ ID NO: 2994283 - DNA, 25 bp, Homo sapien
aggcggcgaggcagtcggctgcgcg

SEQ ID NO: 2994284 - DNA, 25 bp, Homo sapien
cagggacaggaagacgttcgccttg

SEQ ID NO: 2994285 - DNA, 25 bp, Homo sapien
cccagcggtgccaggagaggtccgg

SEQ ID NO: 2994286 - DNA, 25 bp, Homo sapien
ttatttattcgtttgccattaactg

SEQ ID NO: 2994287 - DNA, 25 bp, Homo sapien
ttattcgtttgccattaactgcggg

SEQ ID NO: 2994288 - DNA, 25 bp, Homo sapien
cctggggtcaccgagtgggacggtg

SEQ ID NO: 2994289 - DNA, 25 bp, Homo sapien
ctctgctgttgtgaggtcgacctca

SEQ ID NO: 2994290 - DNA, 25 bp, Homo sapien
gggaccagccagttccccatagaca

SEQ ID NO: 2994291 - DNA, 25 bp, Homo sapien
gaggtgcacgcgaggctctccacag

SEQ ID NO: 2994292 - DNA, 25 bp, Homo sapien
catagacagattggtgctggacagg

SEQ ID NO: 2994293 - DNA, 25 bp, Homo sapien
ctggctccaggaaaacacgcttgcc

SEQ ID NO: 2994294 - DNA, 25 bp, Homo sapien
tgttctgtttgtacatggctgacgg

SEQ ID NO: 2994295 - DNA, 25 bp, Homo sapien
ttagggagcagtgactgcggtcacc

SEQ ID NO: 2994296 - DNA, 25 bp, Homo sapien
cacccctttagttctctgggtgtag

SEQ ID NO: 2994297 - DNA, 25 bp, Homo sapien
tagagtacataatcagtgccacaca

SEQ ID NO: 2994298 - DNA, 25 bp, Homo sapien
cctgttggctgtctggccttggagc

SEQ ID NO: 2994299 - DNA, 25 bp, Homo sapien
tgagagactaatgcctgtcctgcct

SEQ ID NO: 2994300 - DNA, 25 bp, Homo sapien
tttttcccccagaagccactgaata

SEQ ID NO: 2994301 - DNA, 25 bp, Homo sapien
tggtgttgctggctcagctcttggt

SEQ ID NO: 2994302 - DNA, 25 bp, Homo sapien
ggtggcactggtgttgctggctcag

SEQ ID NO: 2994303 - DNA, 25 bp, Homo sapien
gttgctggctcagctcttggtgcat

SEQ ID NO: 2994304 - DNA, 25 bp, Homo sapien
ctgctcggggtggcactggtgttgc

SEQ ID NO: 2994305 - DNA, 25 bp, Homo sapien
tcagttcctcgccagaggctgctgc

SEQ ID NO: 2994306 - DNA, 25 bp, Homo sapien
tgcagacaagggctacagtctccag

SEQ ID NO: 2994307 - DNA, 25 bp, Homo sapien
ttgggatctgtgtcttccagggatc

SEQ ID NO: 2994308 - DNA, 25 bp, Homo sapien
cagggccgggtcttgtccctcttct

SEQ ID NO: 2994309 - DNA, 25 bp, Homo sapien
gcctgacccgttgcactgaacaaga

SEQ ID NO: 2994310 - DNA, 25 bp, Homo sapien
caaatcgctggttgtgcgcttaacg

SEQ ID NO: 2994311 - DNA, 25 bp, Homo sapien
ccttttgtaccagggccatgcaggc

SEQ ID NO: 2994312 - DNA, 25 bp, Homo sapien
gaaggattcactctctttagcccca

SEQ ID NO: 2994313 - DNA, 25 bp, Homo sapien
tgataggaggcgatggcttgcactt

SEQ ID NO: 2994314 - DNA, 25 bp, Homo sapien
gggcaaaatctgtcgaggaggcact

SEQ ID NO: 2994315 - DNA, 25 bp, Homo sapien
ttcaggccttctgcggagggcaaaa

SEQ ID NO: 2994316 - DNA, 25 bp, Homo sapien
cacttttccgtgtgatctcttcagg

SEQ ID NO: 2994317 - DNA, 25 bp, Homo sapien
catctccaacaagcagcgaagtctc

SEQ ID NO: 2994318 - DNA, 25 bp, Homo sapien
ctaggctgagcactcgagctggaaa

SEQ ID NO: 2994319 - DNA, 25 bp, Homo sapien
agctctgggtacacgtggcgcagga

SEQ ID NO: 2994320 - DNA, 25 bp, Homo sapien
gaggagaaagtccagacacgggatc

SEQ ID NO: 2994321 - DNA, 25 bp, Homo sapien
acccttcccctcccaggattcacag

SEQ ID NO: 2994322 - DNA, 25 bp, Homo sapien
ctgctggcggggcggccacccttcc

SEQ ID NO: 2994323 - DNA, 25 bp, Homo sapien
tgctggcggggcggccacccttccc

SEQ ID NO: 2994324 - DNA, 25 bp, Homo sapien
gccacccttcccctcccaggattca

SEQ ID NO: 2994325 - DNA, 25 bp, Homo sapien
tgagactcgggctgtgtccagagca

SEQ ID NO: 2994326 - DNA, 25 bp, Homo sapien
agcgcacacggcgacaacgtgctgt

SEQ ID NO: 2994327 - DNA, 25 bp, Homo sapien
aggacaccaccgtaagaaccacacg

SEQ ID NO: 2994328 - DNA, 25 bp, Homo sapien
gagcaggtccccgacgactaaggac

SEQ ID NO: 2994329 - DNA, 25 bp, Homo sapien
gcccatctctatgacagtgcccagg

SEQ ID NO: 2994330 - DNA, 25 bp, Homo sapien
tactctttctacaagccaccgtatg

SEQ ID NO: 2994331 - DNA, 25 bp, Homo sapien
aagccaccgtatgctactctgcagg

SEQ ID NO: 2994332 - DNA, 25 bp, Homo sapien
ttgggctgtttccacgtggcacctc

SEQ ID NO: 2994333 - DNA, 25 bp, Homo sapien
tctcagtacagtagcctttcgcggt

SEQ ID NO: 2994334 - DNA, 25 bp, Homo sapien
tgaggagatcttcgtgcagagccag

SEQ ID NO: 2994335 - DNA, 25 bp, Homo sapien
tcaaggccgcacttaaagccggtcg

SEQ ID NO: 2994336 - DNA, 25 bp, Homo sapien
cagctgtgacgggaagtgagctcct

SEQ ID NO: 2994337 - DNA, 25 bp, Homo sapien
gcctgcggggctcagtcccacagaa

SEQ ID NO: 2994338 - DNA, 25 bp, Homo sapien
cctgcggggctcagtcccacagaag

SEQ ID NO: 2994339 - DNA, 25 bp, Homo sapien
cctgcgggggccagtcccacagaag

SEQ ID NO: 2994340 - DNA, 25 bp, Homo sapien
gagggtgcccgggaggtgcctgcgg

SEQ ID NO: 2994341 - DNA, 25 bp, Homo sapien
agactctggaaccagtgggtcagca

SEQ ID NO: 2994342 - DNA, 25 bp, Homo sapien
catggtacttgtgcaggacaggctc

SEQ ID NO: 2994343 - DNA, 25 bp, Homo sapien
ggtcttaaggtcagtcccacagaag

SEQ ID NO: 2994344 - DNA, 25 bp, Homo sapien
tcttggttggaattgccctgactcc

SEQ ID NO: 2994345 - DNA, 25 bp, Homo sapien
gaagcgtcgaaacgctgccaggcag

SEQ ID NO: 2994346 - DNA, 25 bp, Homo sapien
ggccctaggagctttcccactgtgg

SEQ ID NO: 2994347 - DNA, 25 bp, Homo sapien
ggttcctgattaagcagaggccaga

SEQ ID NO: 2994348 - DNA, 25 bp, Homo sapien
catgttttatgtgggcctcagcagg

SEQ ID NO: 2994349 - DNA, 25 bp, Homo sapien
tctggaacttatcccgggaactcat

SEQ ID NO: 2994350 - DNA, 25 bp, Homo sapien
cagaaccatgcttggtatatatggg

SEQ ID NO: 2994351 - DNA, 25 bp, Homo sapien
ttccagagaccccataggctcactg

SEQ ID NO: 2994352 - DNA, 25 bp, Homo sapien
agagtcctggccactccccataaaa

SEQ ID NO: 2994353 - DNA, 25 bp, Homo sapien
cccacatcttggagggcatctgcct

SEQ ID NO: 2994354 - DNA, 25 bp, Homo sapien
tggaatagtggaggccttcaactga

SEQ ID NO: 2994355 - DNA, 25 bp, Homo sapien
tccttcccgtgtgagaagggccaga

SEQ ID NO: 2994356 - DNA, 25 bp, Homo sapien
gaccaccttcctctagagctcggga

SEQ ID NO: 2994357 - DNA, 25 bp, Homo sapien
tctggggcgaaaacagtcaggacat

SEQ ID NO: 2994358 - DNA, 25 bp, Homo sapien
ctctggggcgaaaacagtcaggaca

SEQ ID NO: 2994359 - DNA, 25 bp, Homo sapien
gggcgaaaacagtcaggacattcat

SEQ ID NO: 2994360 - DNA, 25 bp, Homo sapien
tctctggggcgaaaacagtcaggac

SEQ ID NO: 2994361 - DNA, 25 bp, Homo sapien
tcccaggacggttggcgcctttcat

SEQ ID NO: 2994362 - DNA, 25 bp, Homo sapien
ttcccaggacggttggcgcctttca

SEQ ID NO: 2994363 - DNA, 25 bp, Homo sapien
ctggcctgtagctccgcagtgacgg

SEQ ID NO: 2994364 - DNA, 25 bp, Homo sapien
gcagtgacggtgaccccaggctgtc

SEQ ID NO: 2994365 - DNA, 25 bp, Homo sapien
tccgcagtgacggtgaccccaggct

SEQ ID NO: 2994366 - DNA, 25 bp, Homo sapien
tgtagctccgcagtgacggtgaccc

SEQ ID NO: 2994367 - DNA, 25 bp, Homo sapien
tgtagctccgcagtgacggtgaccc

SEQ ID NO: 2994368 - DNA, 25 bp, Homo sapien
ctggcctgtagctccgcagtgacgg

SEQ ID NO: 2994369 - DNA, 25 bp, Homo sapien
gcagtgacggtgaccccaggctgtc

SEQ ID NO: 2994370 - DNA, 25 bp, Homo sapien
tccgcagtgacggtgaccccaggct

SEQ ID NO: 2994371 - DNA, 25 bp, Homo sapien
tgcaaagggtgcacgtgcatagcct

SEQ ID NO: 2994372 - DNA, 25 bp, Homo sapien
gcatagccttgtcgtgtggtcatca

SEQ ID NO: 2994373 - DNA, 25 bp, Homo sapien
gatggctacacactacacactggtg

SEQ ID NO: 2994374 - DNA, 25 bp, Homo sapien
aaattccggtaaacaggtgcacacg

SEQ ID NO: 2994375 - DNA, 25 bp, Homo sapien
agagttgggccaaggctagctggcc

SEQ ID NO: 2994376 - DNA, 25 bp, Homo sapien
tctgtgggggcctatgactgacacc

SEQ ID NO: 2994377 - DNA, 25 bp, Homo sapien
tgactgacacccctggggagagttg

SEQ ID NO: 2994378 - DNA, 25 bp, Homo sapien
ttattgatttagttatgaagctgtg

SEQ ID NO: 2994379 - DNA, 25 bp, Homo sapien
cactgtctgcgtgatgtcccaagag

SEQ ID NO: 2994380 - DNA, 25 bp, Homo sapien
ctgtctgcgtgatgtcccaagaggc

SEQ ID NO: 2994381 - DNA, 25 bp, Homo sapien
actgtctgcgtgatgtcccaagagg

SEQ ID NO: 2994382 - DNA, 25 bp, Homo sapien
cgcggcctgcagctcgtgagggcgg

SEQ ID NO: 2994383 - DNA, 25 bp, Homo sapien
tgcagctcgtgagggcggtggagcc

SEQ ID NO: 2994384 - DNA, 25 bp, Homo sapien
cggcctgcagctcgtgagggcggtg

SEQ ID NO: 2994385 - DNA, 25 bp, Homo sapien
cctgcagctcgtgagggcggtggag

SEQ ID NO: 2994386 - DNA, 25 bp, Homo sapien
aggagcaggagcgtggggaccagca

SEQ ID NO: 2994387 - DNA, 25 bp, Homo sapien
ccctggcctgctgccgctgttgcgg

SEQ ID NO: 2994388 - DNA, 25 bp, Homo sapien
gcctgctgccgctgttgcggcagga

SEQ ID NO: 2994389 - DNA, 25 bp, Homo sapien
gctgccgctgttgcggcaggagcag

SEQ ID NO: 2994390 - DNA, 25 bp, Homo sapien
taatttaattcaatccaagtctgca

SEQ ID NO: 2994391 - DNA, 25 bp, Homo sapien
ataatttaattcaatccaagtctgc

SEQ ID NO: 2994392 - DNA, 25 bp, Homo sapien
ccgcagcagggaaagcacctggcct

SEQ ID NO: 2994393 - DNA, 25 bp, Homo sapien
gacccacaggcactcaaggacttcc

SEQ ID NO: 2994394 - DNA, 25 bp, Homo sapien
ctcaggaaacactcccatcgccagc

SEQ ID NO: 2994395 - DNA, 25 bp, Homo sapien
gccagccaccgcagcagggaaagca

SEQ ID NO: 2994396 - DNA, 25 bp, Homo sapien
aggacgcgcagccacgcggccaggg

SEQ ID NO: 2994397 - DNA, 25 bp, Homo sapien
ctttatcggcaacagccaggacgcg

SEQ ID NO: 2994398 - DNA, 25 bp, Homo sapien
gccggcgtcaaacaactttatcggc

SEQ ID NO: 2994399 - DNA, 25 bp, Homo sapien
aaacaactttatcggcaacagccag

SEQ ID NO: 2994400 - DNA, 25 bp, Homo sapien
ccttcaccgtgtggcgccggccgtt

SEQ ID NO: 2994401 - DNA, 25 bp, Homo sapien
ggccagcaccgacaccgcggagcct

SEQ ID NO: 2994402 - DNA, 25 bp, Homo sapien
tgctcggcgtcaccttcaccgtgtg

SEQ ID NO: 2994403 - DNA, 25 bp, Homo sapien
acggtgctcggcgtcaccttcaccg

SEQ ID NO: 2994404 - DNA, 25 bp, Homo sapien
cctgggaaggctcgccaccgccccg

SEQ ID NO: 2994405 - DNA, 25 bp, Homo sapien
ctgggaaggctcgccaccgccccgc

SEQ ID NO: 2994406 - DNA, 25 bp, Homo sapien
tgggaaggctcgccaccgccccgcc

SEQ ID NO: 2994407 - DNA, 25 bp, Homo sapien
ggccgggcgccgagtactcgatgcg

SEQ ID NO: 2994408 - DNA, 25 bp, Homo sapien
ggaacgcgggtctagggctccactc

SEQ ID NO: 2994409 - DNA, 25 bp, Homo sapien
cgggtgacacgcggcgccgttctac

SEQ ID NO: 2994410 - DNA, 25 bp, Homo sapien
tcccggcgccctcgcgagctgggct

SEQ ID NO: 2994411 - DNA, 25 bp, Homo sapien
tgtgcaccttcggatcctcacggtc

SEQ ID NO: 2994412 - DNA, 25 bp, Homo sapien
cccacgcagcagaggctcaataaat

SEQ ID NO: 2994413 - DNA, 25 bp, Homo sapien
taaaaagccaaagccgtggccttgc

SEQ ID NO: 2994414 - DNA, 25 bp, Homo sapien
tgctcccgcaaactccgagtcgtgt

SEQ ID NO: 2994415 - DNA, 25 bp, Homo sapien
ttgaagtcctgccgccggcacgtgt

SEQ ID NO: 2994416 - DNA, 25 bp, Homo sapien
tgccgccggcacgtgtcctccagaa

SEQ ID NO: 2994417 - DNA, 25 bp, Homo sapien
tattcacaggggttgaagtcctgcc

SEQ ID NO: 2994418 - DNA, 25 bp, Homo sapien
atattcacaggggttgaagtcctgc

SEQ ID NO: 2994419 - DNA, 25 bp, Homo sapien
agacaactagtgaagagagttcaga

SEQ ID NO: 2994420 - DNA, 25 bp, Homo sapien
gagacaactagtgaagagagttcag

SEQ ID NO: 2994421 - DNA, 25 bp, Homo sapien
agctgctgtcggagacaactagtga

SEQ ID NO: 2994422 - DNA, 25 bp, Homo sapien
atgcaagctgctgtcggagacaact

SEQ ID NO: 2994423 - DNA, 25 bp, Homo sapien
tgcagaggcacaaggcgggtccccg

SEQ ID NO: 2994424 - DNA, 25 bp, Homo sapien
gatcatatggggcctcctgcaagca

SEQ ID NO: 2994425 - DNA, 25 bp, Homo sapien
ggtgcacgccgagggggctgctcct

SEQ ID NO: 2994426 - DNA, 25 bp, Homo sapien
cacaaggcgggtccccgatcatatg

SEQ ID NO: 2994427 - DNA, 25 bp, Homo sapien
ctggagagaaaggtcgagcacgctc

SEQ ID NO: 2994428 - DNA, 25 bp, Homo sapien
ggagagaaaggtcgagcacgctcct

SEQ ID NO: 2994429 - DNA, 25 bp, Homo sapien
aaaggtcgagcacgctcctctgaaa

SEQ ID NO: 2994430 - DNA, 25 bp, Homo sapien
gagaaaggtcgagcacgctcctctg

SEQ ID NO: 2994431 - DNA, 25 bp, Homo sapien
gttctcaggcccctcacggctccgg

SEQ ID NO: 2994432 - DNA, 25 bp, Homo sapien
catgttctcaggcccctcacggctc

SEQ ID NO: 2994433 - DNA, 25 bp, Homo sapien
ctcaggcccctcacggctccgggaa

SEQ ID NO: 2994434 - DNA, 25 bp, Homo sapien
ttctcaggcccctcacggctccggg

SEQ ID NO: 2994435 - DNA, 25 bp, Homo sapien
cgtccagctgcaaagcgatgcgaac

SEQ ID NO: 2994436 - DNA, 25 bp, Homo sapien
cctcgagccatcgtccagctgcaaa

SEQ ID NO: 2994437 - DNA, 25 bp, Homo sapien
gagtcctgcaacctcgagccatcgt

SEQ ID NO: 2994438 - DNA, 25 bp, Homo sapien
acagaaagagtcctgcaacctcgag

SEQ ID NO: 2994439 - DNA, 25 bp, Homo sapien
agcgctctcacccacgaacgcaaca

SEQ ID NO: 2994440 - DNA, 25 bp, Homo sapien
acccgtgccatgcagcgcggcacta

SEQ ID NO: 2994441 - DNA, 25 bp, Homo sapien
atgaccactgagacccgacgtgcag

SEQ ID NO: 2994442 - DNA, 25 bp, Homo sapien
gagacccgacgtgcagacctcagcg

SEQ ID NO: 2994443 - DNA, 25 bp, Homo sapien
gccagggctgcgtgctacagtgaca

SEQ ID NO: 2994444 - DNA, 25 bp, Homo sapien
tgctgcttgagacgctggtcgggcc

SEQ ID NO: 2994445 - DNA, 25 bp, Homo sapien
ctccatggccgacgtgtggctcgct

SEQ ID NO: 2994446 - DNA, 25 bp, Homo sapien
tgtggctcgctggtatccctgaggc

SEQ ID NO: 2994447 - DNA, 25 bp, Homo sapien
tggctgttcacacccctctgtgctg

SEQ ID NO: 2994448 - DNA, 25 bp, Homo sapien
aaagctcgaagccagcagtgtgcag

SEQ ID NO: 2994449 - DNA, 25 bp, Homo sapien
ccagagctcggcgtggctgttcaca

SEQ ID NO: 2994450 - DNA, 25 bp, Homo sapien
ccttcagactatagggaaaatggga

SEQ ID NO: 2994451 - DNA, 25 bp, Homo sapien
ctctgagagaggacaaatcccctcc

SEQ ID NO: 2994452 - DNA, 25 bp, Homo sapien
ctgagagaggacaaatcccctccat

SEQ ID NO: 2994453 - DNA, 25 bp, Homo sapien
cacagcccgggggcacctctgagag

SEQ ID NO: 2994454 - DNA, 25 bp, Homo sapien
gggtgcccacgccagcacagcccgg

SEQ ID NO: 2994455 - DNA, 25 bp, Homo sapien
tctgggtatgacaaagccgggcgca

SEQ ID NO: 2994456 - DNA, 25 bp, Homo sapien
tcatgtcctgtctgggtatgacaaa

SEQ ID NO: 2994457 - DNA, 25 bp, Homo sapien
caaggcagtgagtctagagctctct

SEQ ID NO: 2994458 - DNA, 25 bp, Homo sapien
gcaaacacaggtgctgacgagagcc

SEQ ID NO: 2994459 - DNA, 25 bp, Homo sapien
ggcatattctttatgcaccacaaac

SEQ ID NO: 2994460 - DNA, 25 bp, Homo sapien
atgcaccacaaaccccgccccgctg

SEQ ID NO: 2994461 - DNA, 25 bp, Homo sapien
ccgctccggcaaggcgcggctgtgt

SEQ ID NO: 2994462 - DNA, 25 bp, Homo sapien
cagaagccagcgggacggccaggag

SEQ ID NO: 2994463 - DNA, 25 bp, Homo sapien
cggagatggtcatgaggccacttct

SEQ ID NO: 2994464 - DNA, 25 bp, Homo sapien
tccccagcatgacacagatggccag

SEQ ID NO: 2994465 - DNA, 25 bp, Homo sapien
caggggtccggagatggtcatgagg

SEQ ID NO: 2994466 - DNA, 25 bp, Homo sapien
gatggccaggggtccggagatggtc

SEQ ID NO: 2994467 - DNA, 25 bp, Homo sapien
gggaggccgtgcttataagtccatg

SEQ ID NO: 2994468 - DNA, 25 bp, Homo sapien
ggcacagctggacccgtgcatgggt

SEQ ID NO: 2994469 - DNA, 25 bp, Homo sapien
gtgggcaggtatatgcagcacgcct

SEQ ID NO: 2994470 - DNA, 25 bp, Homo sapien
ttataagtccatgtcggactctgcc

SEQ ID NO: 2994471 - DNA, 25 bp, Homo sapien
ctggcaggacgtggagctgccggca

SEQ ID NO: 2994472 - DNA, 25 bp, Homo sapien
gggccgctggcaggacgtggagctg

SEQ ID NO: 2994473 - DNA, 25 bp, Homo sapien
gctccggaatgcggctcacggacac

SEQ ID NO: 2994474 - DNA, 25 bp, Homo sapien
gggaccgcacaggaggggcgagcag

SEQ ID NO: 2994475 - DNA, 25 bp, Homo sapien
catccctcgtgtacacgcagactgg

SEQ ID NO: 2994476 - DNA, 25 bp, Homo sapien
ctcatccctcgtgtacacgcagact

SEQ ID NO: 2994477 - DNA, 25 bp, Homo sapien
ccctcgtgtacacgcagactggggt

SEQ ID NO: 2994478 - DNA, 25 bp, Homo sapien
atccctcgtgtacacgcagactggg

SEQ ID NO: 2994479 - DNA, 25 bp, Homo sapien
ttttccagttggaaagtgggctgaa

SEQ ID NO: 2994480 - DNA, 25 bp, Homo sapien
tccagttggaaagtgggctgaaagt

SEQ ID NO: 2994481 - DNA, 25 bp, Homo sapien
gactgggtgagcaagagcaggccgc

SEQ ID NO: 2994482 - DNA, 25 bp, Homo sapien
tgggtgagcaagagcaggccgccta

SEQ ID NO: 2994483 - DNA, 25 bp, Homo sapien
aagagcccgagtctcccgccactgc

SEQ ID NO: 2994484 - DNA, 25 bp, Homo sapien
agtctcccgccactgccctggagac

SEQ ID NO: 2994485 - DNA, 25 bp, Homo sapien
tcaagagcccgagtctcccgccact

SEQ ID NO: 2994486 - DNA, 25 bp, Homo sapien
tctcccgccactgccctggagacgg

SEQ ID NO: 2994487 - DNA, 25 bp, Homo sapien
tcttgggctttgagagaagctgaaa

SEQ ID NO: 2994488 - DNA, 25 bp, Homo sapien
cacttttgtgactcttgggctttga

SEQ ID NO: 2994489 - DNA, 25 bp, Homo sapien
tttgtgactcttgggctttgagaga

SEQ ID NO: 2994490 - DNA, 25 bp, Homo sapien
aatgaaaccacttttgtgactcttg

SEQ ID NO: 2994491 - DNA, 25 bp, Homo sapien
cagccaggacaggtgcgccttgcac

SEQ ID NO: 2994492 - DNA, 25 bp, Homo sapien
gacaggtgcgccttgcaccgggacc

SEQ ID NO: 2994493 - DNA, 25 bp, Homo sapien
gccaggacaggtgcgccttgcaccg

SEQ ID NO: 2994494 - DNA, 25 bp, Homo sapien
cacaggccacgtgccctctctggcc

SEQ ID NO: 2994495 - DNA, 25 bp, Homo sapien
cgactgcagcgtcgtgccccgcagg

SEQ ID NO: 2994496 - DNA, 25 bp, Homo sapien
gcgactgcagcgtcgtgccccgcag

SEQ ID NO: 2994497 - DNA, 25 bp, Homo sapien
agcgactgcagcgtcgtgccccgca

SEQ ID NO: 2994498 - DNA, 25 bp, Homo sapien
ggggtcgtagcacttcatgacaaac

SEQ ID NO: 2994499 - DNA, 25 bp, Homo sapien
ggctcaagtcgccgcggctgagctc

SEQ ID NO: 2994500 - DNA, 25 bp, Homo sapien
agccgacgctgacgagcccaggctt

SEQ ID NO: 2994501 - DNA, 25 bp, Homo sapien
tcctccggacggctcaagtcgccgc

SEQ ID NO: 2994502 - DNA, 25 bp, Homo sapien
caagggaagtggagcgctggcggct

SEQ ID NO: 2994503 - DNA, 25 bp, Homo sapien
tgaagatgatgtcagaggcctcgtg

SEQ ID NO: 2994504 - DNA, 25 bp, Homo sapien
gatgtcagaggcctcgtgggcccag

SEQ ID NO: 2994505 - DNA, 25 bp, Homo sapien
ttagctgaagatgatgtcagaggcc

SEQ ID NO: 2994506 - DNA, 25 bp, Homo sapien
cagaggcctcgtgggcccaggaggg

SEQ ID NO: 2994507 - DNA, 25 bp, Homo sapien
tccagggctggagagggacttcggc

SEQ ID NO: 2994508 - DNA, 25 bp, Homo sapien
ttctttggcttggaggggcctccag

SEQ ID NO: 2994509 - DNA, 25 bp, Homo sapien
cagggctggagagggacttcggcaa

SEQ ID NO: 2994510 - DNA, 25 bp, Homo sapien
cctccagggctggagagggacttcg

SEQ ID NO: 2994511 - DNA, 25 bp, Homo sapien
ctgctggggatcccgctcccgctcc

SEQ ID NO: 2994512 - DNA, 25 bp, Homo sapien
tgcctcttttggcacaaaacccata

SEQ ID NO: 2994513 - DNA, 25 bp, Homo sapien
aaacccataaatgccacgaacacct

SEQ ID NO: 2994514 - DNA, 25 bp, Homo sapien
ctgtcaccgaaagccgcatgacagt

SEQ ID NO: 2994515 - DNA, 25 bp, Homo sapien
atccctgtcaccgaaagccgcatga

SEQ ID NO: 2994516 - DNA, 25 bp, Homo sapien
atcactgaaagggacccagcagcgg

SEQ ID NO: 2994517 - DNA, 25 bp, Homo sapien
cagcggcatgtggccccgggccctc

SEQ ID NO: 2994518 - DNA, 25 bp, Homo sapien
cccatcactgaaagggacccagcag

SEQ ID NO: 2994519 - DNA, 25 bp, Homo sapien
gaaagggacccagcagcggcatgtg

SEQ ID NO: 2994520 - DNA, 25 bp, Homo sapien
gaggcatagcagggacctgggccac

SEQ ID NO: 2994521 - DNA, 25 bp, Homo sapien
caccgcgtcggatgtgggggctcct

SEQ ID NO: 2994522 - DNA, 25 bp, Homo sapien
agagcccagggttgtcctcagacac

SEQ ID NO: 2994523 - DNA, 25 bp, Homo sapien
tgggagtctgcaccgcgtcggatgt

SEQ ID NO: 2994524 - DNA, 25 bp, Homo sapien
ggagcacgtggacgccatcaaaggc

SEQ ID NO: 2994525 - DNA, 25 bp, Homo sapien
gcacgtggacgccatcaaaggcctg

SEQ ID NO: 2994526 - DNA, 25 bp, Homo sapien
aggcaggcggcggagcacgtggacg

SEQ ID NO: 2994527 - DNA, 25 bp, Homo sapien
cggcggagcacgtggacgccatcaa

SEQ ID NO: 2994528 - DNA, 25 bp, Homo sapien
gaccctgtgtgtggagaaacttcaa

SEQ ID NO: 2994529 - DNA, 25 bp, Homo sapien
caaggaccggaccacaatgatgcta

SEQ ID NO: 2994530 - DNA, 25 bp, Homo sapien
gaagctcaaaatgcgccacagggtg

SEQ ID NO: 2994531 - DNA, 25 bp, Homo sapien
tgagtcaccccgagaacatatggcg

SEQ ID NO: 2994532 - DNA, 25 bp, Homo sapien
gcatactggacagtgccaaggaccc

SEQ ID NO: 2994533 - DNA, 25 bp, Homo sapien
gcctgcgccagagctttttataaca

SEQ ID NO: 2994534 - DNA, 25 bp, Homo sapien
tttataacaagatgccaggcgccag

SEQ ID NO: 2994535 - DNA, 25 bp, Homo sapien
gcagagtacccctgatgggctcgta

SEQ ID NO: 2994536 - DNA, 25 bp, Homo sapien
gggacagcgtcacccctaattggca

SEQ ID NO: 2994537 - DNA, 25 bp, Homo sapien
tgagacctcgactgctgtgggcgac

SEQ ID NO: 2994538 - DNA, 25 bp, Homo sapien
tatgacttgtcacgggagtctggcg

SEQ ID NO: 2994539 - DNA, 25 bp, Homo sapien
gaaattgacaaagccgggccgtgca

SEQ ID NO: 2994540 - DNA, 25 bp, Homo sapien
gacggcgggtgtcacgggctgggcc

SEQ ID NO: 2994541 - DNA, 25 bp, Homo sapien
ggctgacggcgggtgtcacgggctg

SEQ ID NO: 2994542 - DNA, 25 bp, Homo sapien
agagggcgcggctgacggcgggtgt

SEQ ID NO: 2994543 - DNA, 25 bp, Homo sapien
gggcgcggctgacggcgggtgtcac

SEQ ID NO: 2994544 - DNA, 25 bp, Homo sapien
ggtggcacaccaccggctcccggtc

SEQ ID NO: 2994545 - DNA, 25 bp, Homo sapien
gtcttctcacgtcgtccaccgtcag

SEQ ID NO: 2994546 - DNA, 25 bp, Homo sapien
gccaagcgtcttctcacgtcgtcca

SEQ ID NO: 2994547 - DNA, 25 bp, Homo sapien
tccaccgtcagctcaaagaactcat

SEQ ID NO: 2994548 - DNA, 25 bp, Homo sapien
tttatctgcgcctccctgaaggcct

SEQ ID NO: 2994549 - DNA, 25 bp, Homo sapien
tcctttatctgcgcctccctgaagg

SEQ ID NO: 2994550 - DNA, 25 bp, Homo sapien
cagcttctcctttatctgcgcctcc

SEQ ID NO: 2994551 - DNA, 25 bp, Homo sapien
tctcctttatctgcgcctccctgaa

SEQ ID NO: 2994552 - DNA, 25 bp, Homo sapien
gcctgggcgacagagagagactccg

SEQ ID NO: 2994553 - DNA, 25 bp, Homo sapien
agcctgggcgacagagagagactcc

SEQ ID NO: 2994554 - DNA, 25 bp, Homo sapien
tgagctgagatggcaccactgactc

SEQ ID NO: 2994555 - DNA, 25 bp, Homo sapien
gctgagatggcaccactgactccag

SEQ ID NO: 2994556 - DNA, 25 bp, Homo sapien
gcggaagaagccctgtaggacgtag

SEQ ID NO: 2994557 - DNA, 25 bp, Homo sapien
gaagaagccctgtaggacgtagcgg

SEQ ID NO: 2994558 - DNA, 25 bp, Homo sapien
agaagccctgtaggacgtagcggtc

SEQ ID NO: 2994559 - DNA, 25 bp, Homo sapien
cggaagaagccctgtaggacgtagc

SEQ ID NO: 2994560 - DNA, 25 bp, Homo sapien
caggccaggtggctgcagtcctgtg

SEQ ID NO: 2994561 - DNA, 25 bp, Homo sapien
cctggagcccgcaggccaggtggct

SEQ ID NO: 2994562 - DNA, 25 bp, Homo sapien
gccctggagcccgcaggccaggtgg

SEQ ID NO: 2994563 - DNA, 25 bp, Homo sapien
ccagtgccctggagcccgcaggcca

SEQ ID NO: 2994564 - DNA, 25 bp, Homo sapien
ggctcctcacgaagtctcgcaagtc

SEQ ID NO: 2994565 - DNA, 25 bp, Homo sapien
acaggtaaaatgacagctcggggtt

SEQ ID NO: 2994566 - DNA, 25 bp, Homo sapien
caggtaaaatgacagctcggggttc

SEQ ID NO: 2994567 - DNA, 25 bp, Homo sapien
ggtggctcctcacgaagtctcgcaa

SEQ ID NO: 2994568 - DNA, 25 bp, Homo sapien
acagccctcgggcaggagtggcctg

SEQ ID NO: 2994569 - DNA, 25 bp, Homo sapien
tcccacagccctcgggcaggagtgg

SEQ ID NO: 2994570 - DNA, 25 bp, Homo sapien
cacagccctcgggcaggagtggcct

SEQ ID NO: 2994571 - DNA, 25 bp, Homo sapien
ccttcccacagccctcgggcaggag

SEQ ID NO: 2994572 - DNA, 25 bp, Homo sapien
ccatccatgcgcccgaaggaagaca

SEQ ID NO: 2994573 - DNA, 25 bp, Homo sapien
gcaccgtggacctcgcccatccatg

SEQ ID NO: 2994574 - DNA, 25 bp, Homo sapien
aggagagaaggcacctacgtgttag

SEQ ID NO: 2994575 - DNA, 25 bp, Homo sapien
cctacgtgttaggaagcaccgtgga

SEQ ID NO: 2994576 - DNA, 25 bp, Homo sapien
tggtcgtccaggactgtttttggag

SEQ ID NO: 2994577 - DNA, 25 bp, Homo sapien
aagagggtctgcgtgtggtcgtcca

SEQ ID NO: 2994578 - DNA, 25 bp, Homo sapien
tctgcgtgtggtcgtccaggactgt

SEQ ID NO: 2994579 - DNA, 25 bp, Homo sapien
tgcgtgtggtcgtccaggactgttt

SEQ ID NO: 2994580 - DNA, 25 bp, Homo sapien
gccccgccccgcagcaccccaggga

SEQ ID NO: 2994581 - DNA, 25 bp, Homo sapien
ccccgcagcaccccagggaggccct

SEQ ID NO: 2994582 - DNA, 25 bp, Homo sapien
gctctcgtcctgccctccctggagg

SEQ ID NO: 2994583 - DNA, 25 bp, Homo sapien
agcaccccagggaggccctcaggta

SEQ ID NO: 2994584 - DNA, 25 bp, Homo sapien
acccaccggctctcaaaggctttat

SEQ ID NO: 2994585 - DNA, 25 bp, Homo sapien
ccggaaagccgtgtcagaagcaact

SEQ ID NO: 2994586 - DNA, 25 bp, Homo sapien
agacctccaagcggcctcagttcag

SEQ ID NO: 2994587 - DNA, 25 bp, Homo sapien
agcaacttcagaggcgcacggcccc

SEQ ID NO: 2994588 - DNA, 25 bp, Homo sapien
gcagggacccacagaagcagcggac

SEQ ID NO: 2994589 - DNA, 25 bp, Homo sapien
aagcagcggacagctatgggcacca

SEQ ID NO: 2994590 - DNA, 25 bp, Homo sapien
acccacagaagcagcggacagctat

SEQ ID NO: 2994591 - DNA, 25 bp, Homo sapien
gacagctatgggcaccagggcgttc

SEQ ID NO: 2994592 - DNA, 25 bp, Homo sapien
caacccaggcctctgtagaggcctg

SEQ ID NO: 2994593 - DNA, 25 bp, Homo sapien
ggccagagggcttcggaaggcccca

SEQ ID NO: 2994594 - DNA, 25 bp, Homo sapien
taggccagagggcttcggaaggccc

SEQ ID NO: 2994595 - DNA, 25 bp, Homo sapien
aggcctctgtagaggcctgtggcca

SEQ ID NO: 2994596 - DNA, 25 bp, Homo sapien
tgccaaagccaatggaaggaagccc

SEQ ID NO: 2994597 - DNA, 25 bp, Homo sapien
tgagagctccaacaaacggagggtg

SEQ ID NO: 2994598 - DNA, 25 bp, Homo sapien
tgaccgtgacatcaaaggtgggcct

SEQ ID NO: 2994599 - DNA, 25 bp, Homo sapien
tcaacgaggaacatttcagagggtc

SEQ ID NO: 2994600 - DNA, 25 bp, Homo sapien
tttcagcgagggacccagggtgaat

SEQ ID NO: 2994601 - DNA, 25 bp, Homo sapien
ctggtcccaggcaccgtttcagcga

SEQ ID NO: 2994602 - DNA, 25 bp, Homo sapien
gcaagcgtgttctctgctctggtcc

SEQ ID NO: 2994603 - DNA, 25 bp, Homo sapien
ggcaagcgtgttctctgctctggtc

SEQ ID NO: 2994604 - DNA, 25 bp, Homo sapien
actcgggagggatcgccactgctcg

SEQ ID NO: 2994605 - DNA, 25 bp, Homo sapien
ggagaggagggtcggcagactgggt

SEQ ID NO: 2994606 - DNA, 25 bp, Homo sapien
tggcatggaggctgaccagtgcttg

SEQ ID NO: 2994607 - DNA, 25 bp, Homo sapien
tgcttggagaggctcggcctctgga

SEQ ID NO: 2994608 - DNA, 25 bp, Homo sapien
cctgtctgcgcctctgtgcagggag

SEQ ID NO: 2994609 - DNA, 25 bp, Homo sapien
cctgggctccctgtctgcgcctctg

SEQ ID NO: 2994610 - DNA, 25 bp, Homo sapien
tgccccacgggacgcacagaaaggg

SEQ ID NO: 2994611 - DNA, 25 bp, Homo sapien
ggcaggactcgggaacaccaggaga

SEQ ID NO: 2994612 - DNA, 25 bp, Homo sapien
tcatcatagcccccacaggccagga

SEQ ID NO: 2994613 - DNA, 25 bp, Homo sapien
tggttctcatcatagcccccacagg

SEQ ID NO: 2994614 - DNA, 25 bp, Homo sapien
tcatagcccccacaggccaggaccc

SEQ ID NO: 2994615 - DNA, 25 bp, Homo sapien
ctggttctcatcatagcccccacag

SEQ ID NO: 2994616 - DNA, 25 bp, Homo sapien
agaggccaccgatgcagagaggcac

SEQ ID NO: 2994617 - DNA, 25 bp, Homo sapien
tctcccagatggagagcatgctccg

SEQ ID NO: 2994618 - DNA, 25 bp, Homo sapien
gggcctccaagattcacacccaggc

SEQ ID NO: 2994619 - DNA, 25 bp, Homo sapien
acagaagcccagggtacactgccca

SEQ ID NO: 2994620 - DNA, 25 bp, Homo sapien
gggatcaaagccttgtgagcagaga

SEQ ID NO: 2994621 - DNA, 25 bp, Homo sapien
caattgtgccgcctgggatcaaagc

SEQ ID NO: 2994622 - DNA, 25 bp, Homo sapien
agggacacaaacaagggccgtgaat

SEQ ID NO: 2994623 - DNA, 25 bp, Homo sapien
ggccgtgaatgctttgaaaacccaa

SEQ ID NO: 2994624 - DNA, 25 bp, Homo sapien
gatgcgccgggaccaccgtggaggg

SEQ ID NO: 2994625 - DNA, 25 bp, Homo sapien
aggcgtggcgggtcctggcggatgc

SEQ ID NO: 2994626 - DNA, 25 bp, Homo sapien
taataagaggaagcttcaaaggcca

SEQ ID NO: 2994627 - DNA, 25 bp, Homo sapien
ccctgtaagcaaggccagggcgtcc

SEQ ID NO: 2994628 - DNA, 25 bp, Homo sapien
ccaagtgcaccagagcggccgggaa

SEQ ID NO: 2994629 - DNA, 25 bp, Homo sapien
agtgcaccagagcggccgggaagag

SEQ ID NO: 2994630 - DNA, 25 bp, Homo sapien
aagtgcaccagagcggccgggaaga

SEQ ID NO: 2994631 - DNA, 25 bp, Homo sapien
cccaagtgcaccagagcggccggga

SEQ ID NO: 2994632 - DNA, 25 bp, Homo sapien
gggggccgcagatctccctctcaga

SEQ ID NO: 2994633 - DNA, 25 bp, Homo sapien
agaccgaacgccctcccgggcagct

SEQ ID NO: 2994634 - DNA, 25 bp, Homo sapien
ctgggggccgcagatctccctctca

SEQ ID NO: 2994635 - DNA, 25 bp, Homo sapien
ggctggctggactccgacactggcc

SEQ ID NO: 2994636 - DNA, 25 bp, Homo sapien
cagcacatcggccgcagatggggag

SEQ ID NO: 2994637 - DNA, 25 bp, Homo sapien
agcacatcggccgcagatggggaga

SEQ ID NO: 2994638 - DNA, 25 bp, Homo sapien
ccagcacatcggccgcagatgggga

SEQ ID NO: 2994639 - DNA, 25 bp, Homo sapien
gcacatcggccgcagatggggagat

SEQ ID NO: 2994640 - DNA, 25 bp, Homo sapien
agagtggtgagtgccgccacgggag

SEQ ID NO: 2994641 - DNA, 25 bp, Homo sapien
cacagagtggtgagtgccgccacgg

SEQ ID NO: 2994642 - DNA, 25 bp, Homo sapien
tggggaggcgaagacacagagtggt

SEQ ID NO: 2994643 - DNA, 25 bp, Homo sapien
ggaggcgaagacacagagtggtgag

SEQ ID NO: 2994644 - DNA, 25 bp, Homo sapien
ccaggctcctcttcacgggctgggc

SEQ ID NO: 2994645 - DNA, 25 bp, Homo sapien
tcttcacgggctgggccgtccctgg

SEQ ID NO: 2994646 - DNA, 25 bp, Homo sapien
gatgggctcaggggggaccagcgcc

SEQ ID NO: 2994647 - DNA, 25 bp, Homo sapien
cctcttcacgggctgggccgtccct

SEQ ID NO: 2994648 - DNA, 25 bp, Homo sapien
ccggcagcttcagccacttgggcac

SEQ ID NO: 2994649 - DNA, 25 bp, Homo sapien
cacaagtctttattcctgctggcag

SEQ ID NO: 2994650 - DNA, 25 bp, Homo sapien
acaagtctttattcctgctggcaga

SEQ ID NO: 2994651 - DNA, 25 bp, Homo sapien
tggtcctgtggctggcggagtgggc

SEQ ID NO: 2994652 - DNA, 25 bp, Homo sapien
ggtcctgtggctggcggagtgggca

SEQ ID NO: 2994653 - DNA, 25 bp, Homo sapien
ctggaggaagcatgacaggaaggcg

SEQ ID NO: 2994654 - DNA, 25 bp, Homo sapien
agccagggcagacgacgggggccct

SEQ ID NO: 2994655 - DNA, 25 bp, Homo sapien
ctgagccagggcagacgacgggggc

SEQ ID NO: 2994656 - DNA, 25 bp, Homo sapien
gagccagggcagacgacgggggccc

SEQ ID NO: 2994657 - DNA, 25 bp, Homo sapien
tgagccagggcagacgacgggggcc

SEQ ID NO: 2994658 - DNA, 25 bp, Homo sapien
ggggcccacaccatggtccaccagg

SEQ ID NO: 2994659 - DNA, 25 bp, Homo sapien
aggctctcaggcctggacactgcgg

SEQ ID NO: 2994660 - DNA, 25 bp, Homo sapien
ggcccacaccatggtccaccaggct

SEQ ID NO: 2994661 - DNA, 25 bp, Homo sapien
gtccaccaggctctcaggcctggac

SEQ ID NO: 2994662 - DNA, 25 bp, Homo sapien
caggtagcctgtgtgtttgacaaac

SEQ ID NO: 2994663 - DNA, 25 bp, Homo sapien
ccgacatcaaagctggcgtgtgacc

SEQ ID NO: 2994664 - DNA, 25 bp, Homo sapien
gcgtgtgacctttccagccatgcga

SEQ ID NO: 2994665 - DNA, 25 bp, Homo sapien
tccctgggacaatagtgtgcatgcc

SEQ ID NO: 2994666 - DNA, 25 bp, Homo sapien
ggcccaggcagaagacgcgctccgt

SEQ ID NO: 2994667 - DNA, 25 bp, Homo sapien
tggacgtggaccagctggagaaggt

SEQ ID NO: 2994668 - DNA, 25 bp, Homo sapien
agtccgcggcgtgcggcaggcccag

SEQ ID NO: 2994669 - DNA, 25 bp, Homo sapien
cagaagacgcgctccgtgtggacgt

SEQ ID NO: 2994670 - DNA, 25 bp, Homo sapien
ctgcccttttagtggcctgtttctg

SEQ ID NO: 2994671 - DNA, 25 bp, Homo sapien
ttttagtggcctgtttctgggctcc

SEQ ID NO: 2994672 - DNA, 25 bp, Homo sapien
ccttttagtggcctgtttctgggct

SEQ ID NO: 2994673 - DNA, 25 bp, Homo sapien
ttcccggcggctgtgggccggtgcc

SEQ ID NO: 2994674 - DNA, 25 bp, Homo sapien
tttctggtgcctttctggtactgct

SEQ ID NO: 2994675 - DNA, 25 bp, Homo sapien
ttttctggtgcctttctggtactgc

SEQ ID NO: 2994676 - DNA, 25 bp, Homo sapien
tggcatccgccactctctggcgtgg

SEQ ID NO: 2994677 - DNA, 25 bp, Homo sapien
gcgtggtcttccttccaaggcctgg

SEQ ID NO: 2994678 - DNA, 25 bp, Homo sapien
gcagtgttgggggtcccggagcagg

SEQ ID NO: 2994679 - DNA, 25 bp, Homo sapien
caggtggggagatagtgccttctct

SEQ ID NO: 2994680 - DNA, 25 bp, Homo sapien
gggtctcaggcccttgtgaacccat

SEQ ID NO: 2994681 - DNA, 25 bp, Homo sapien
gttggggcaccgagcttcctcgatg

SEQ ID NO: 2994682 - DNA, 25 bp, Homo sapien
tgaaggttggggcaccgagcttcct

SEQ ID NO: 2994683 - DNA, 25 bp, Homo sapien
gggcaccgagcttcctcgatgtcag

SEQ ID NO: 2994684 - DNA, 25 bp, Homo sapien
gcagggcctcgtgggcctctgtggc

SEQ ID NO: 2994685 - DNA, 25 bp, Homo sapien
ttgctccccggtgggcgccagcact

SEQ ID NO: 2994686 - DNA, 25 bp, Homo sapien
tttgtttgctccccggtgggcgcca

SEQ ID NO: 2994687 - DNA, 25 bp, Homo sapien
gtttgctccccggtgggcgccagca

SEQ ID NO: 2994688 - DNA, 25 bp, Homo sapien
ttgtttgctccccggtgggcgccag

SEQ ID NO: 2994689 - DNA, 25 bp, Homo sapien
agtcccagcgccgggtacaggagac

SEQ ID NO: 2994690 - DNA, 25 bp, Homo sapien
cggtagtcaaggtccgctttgggct

SEQ ID NO: 2994691 - DNA, 25 bp, Homo sapien
tgcttggggaccacccgtgcaggaa

SEQ ID NO: 2994692 - DNA, 25 bp, Homo sapien
ccgacccgggcggagagcaatccga

SEQ ID NO: 2994693 - DNA, 25 bp, Homo sapien
gggccggcagggcctcctccgcatg

SEQ ID NO: 2994694 - DNA, 25 bp, Homo sapien
gccggcagggcctcctccgcatgct

SEQ ID NO: 2994695 - DNA, 25 bp, Homo sapien
cggcagggcctcctccgcatgctcc

SEQ ID NO: 2994696 - DNA, 25 bp, Homo sapien
cctcctccgcatgctcccgcagctg

SEQ ID NO: 2994697 - DNA, 25 bp, Homo sapien
tcaggaccagctccgtgcacagcgt

SEQ ID NO: 2994698 - DNA, 25 bp, Homo sapien
tctccctgcacaggcggctgtagga

SEQ ID NO: 2994699 - DNA, 25 bp, Homo sapien
ctttgcgtggccaggtccagccggc

SEQ ID NO: 2994700 - DNA, 25 bp, Homo sapien
aggtctccaccgtcaggctttgcgt

SEQ ID NO: 2994701 - DNA, 25 bp, Homo sapien
gacaactgtcccgatggtctgggtt

SEQ ID NO: 2994702 - DNA, 25 bp, Homo sapien
tgctcgctttaactacggcacagaa

SEQ ID NO: 2994703 - DNA, 25 bp, Homo sapien
tggccaagagtctcgctgcgaagtc

SEQ ID NO: 2994704 - DNA, 25 bp, Homo sapien
taagaccgcgaatgttaaggcctct

SEQ ID NO: 2994705 - DNA, 25 bp, Homo sapien
cagaaagcgcagcacggtgttggca

SEQ ID NO: 2994706 - DNA, 25 bp, Homo sapien
agaaagcgcagcacggtgttggcac

SEQ ID NO: 2994707 - DNA, 25 bp, Homo sapien
ccagaaagcgcagcacggtgttggc

SEQ ID NO: 2994708 - DNA, 25 bp, Homo sapien
ttggaggagttttcccagagcctcg

SEQ ID NO: 2994709 - DNA, 25 bp, Homo sapien
tgttggaggagttttcccagagcct

SEQ ID NO: 2994710 - DNA, 25 bp, Homo sapien
ggaggagttttcccagagcctcggc

SEQ ID NO: 2994711 - DNA, 25 bp, Homo sapien
ctgttggaggagttttcccagagcc

SEQ ID NO: 2994712 - DNA, 25 bp, Homo sapien
tccgcgcccttgtgactgatctggt

SEQ ID NO: 2994713 - DNA, 25 bp, Homo sapien
ttgttgcggaggtccagccgctgca

SEQ ID NO: 2994714 - DNA, 25 bp, Homo sapien
agaaggtggcgaaggcatcgtccca

SEQ ID NO: 2994715 - DNA, 25 bp, Homo sapien
ccaggctgttccactccagcgtgag

SEQ ID NO: 2994716 - DNA, 25 bp, Homo sapien
cccagccaggtccagtctccacagg

SEQ ID NO: 2994717 - DNA, 25 bp, Homo sapien
gaggccaacgttattccagcgcagg

SEQ ID NO: 2994718 - DNA, 25 bp, Homo sapien
tctccagggatgttgttcccagcca

SEQ ID NO: 2994719 - DNA, 25 bp, Homo sapien
ctgaggacgtctccagggatgttgt

SEQ ID NO: 2994720 - DNA, 25 bp, Homo sapien
cactccacacagccctgcaccgtac

SEQ ID NO: 2994721 - DNA, 25 bp, Homo sapien
tcactccacacagccctgcaccgta

SEQ ID NO: 2994722 - DNA, 25 bp, Homo sapien
cccagcactttgggaggtcgaggtg

SEQ ID NO: 2994723 - DNA, 25 bp, Homo sapien
gtgtcagctgggcacaggggctcat

SEQ ID NO: 2994724 - DNA, 25 bp, Homo sapien
gcctggaatcccagcactttgggag

SEQ ID NO: 2994725 - DNA, 25 bp, Homo sapien
ctgtgtcagctgggcacaggggctc

SEQ ID NO: 2994726 - DNA, 25 bp, Homo sapien
cctccttgctgaggacgtgagtgcg

SEQ ID NO: 2994727 - DNA, 25 bp, Homo sapien
acgtgagtgcgggcttggttctcct

SEQ ID NO: 2994728 - DNA, 25 bp, Homo sapien
ctggacctccttgctgaggacgtga

SEQ ID NO: 2994729 - DNA, 25 bp, Homo sapien
aaggtggtgagccggtcctggctgt

SEQ ID NO: 2994730 - DNA, 25 bp, Homo sapien
tctcgctgcttatcaatagtctcca

SEQ ID NO: 2994731 - DNA, 25 bp, Homo sapien
ttatcaatagtctccatcaagtcga

SEQ ID NO: 2994732 - DNA, 25 bp, Homo sapien
tctcttctcgctgcttatcaatagt

SEQ ID NO: 2994733 - DNA, 25 bp, Homo sapien
caatagtctccatcaagtcgaggaa

SEQ ID NO: 2994734 - DNA, 25 bp, Homo sapien
gagcgttgatgatggagtgcctctc

SEQ ID NO: 2994735 - DNA, 25 bp, Homo sapien
ggccttgagagcgttgatgatggag

SEQ ID NO: 2994736 - DNA, 25 bp, Homo sapien
gatggagtgcctctcattcagggct

SEQ ID NO: 2994737 - DNA, 25 bp, Homo sapien
tgaagctgccctacacgggctgccg

SEQ ID NO: 2994738 - DNA, 25 bp, Homo sapien
cttctgctccgacagagccagggcg

SEQ ID NO: 2994739 - DNA, 25 bp, Homo sapien
tctgctccgacagagccagggcggc

SEQ ID NO: 2994740 - DNA, 25 bp, Homo sapien
gggccttctgctccgacagagccag

SEQ ID NO: 2994741 - DNA, 25 bp, Homo sapien
cctgggccttctgctccgacagagc

SEQ ID NO: 2994742 - DNA, 25 bp, Homo sapien
attggcagcagacaagtctctgagg

SEQ ID NO: 2994743 - DNA, 25 bp, Homo sapien
tgaggagtttagactcccgctctgc

SEQ ID NO: 2994744 - DNA, 25 bp, Homo sapien
cagacaagtctctgaggagtttaga

SEQ ID NO: 2994745 - DNA, 25 bp, Homo sapien
ggagtttagactcccgctctgcagc

SEQ ID NO: 2994746 - DNA, 25 bp, Homo sapien
tccctggctccatccaccacagcta

SEQ ID NO: 2994747 - DNA, 25 bp, Homo sapien
cctgggctccctggctccatccacc

SEQ ID NO: 2994748 - DNA, 25 bp, Homo sapien
gggctccctggctccatccaccaca

SEQ ID NO: 2994749 - DNA, 25 bp, Homo sapien
ggctccctggctccatccaccacag

SEQ ID NO: 2994750 - DNA, 25 bp, Homo sapien
ctgaacttccgctccaactcgtcta

SEQ ID NO: 2994751 - DNA, 25 bp, Homo sapien
tgaacttccgctccaactcgtctac

SEQ ID NO: 2994752 - DNA, 25 bp, Homo sapien
cctgaacttccgctccaactcgtct

SEQ ID NO: 2994753 - DNA, 25 bp, Homo sapien
tgggcagagtatgcgtgagcatccc

SEQ ID NO: 2994754 - DNA, 25 bp, Homo sapien
agagtatgcgtgagcatcccctggg

SEQ ID NO: 2994755 - DNA, 25 bp, Homo sapien
ggcagagtatgcgtgagcatcccct

SEQ ID NO: 2994756 - DNA, 25 bp, Homo sapien
ggtgggcagagtatgcgtgagcatc

SEQ ID NO: 2994757 - DNA, 25 bp, Homo sapien
caggctttcggagtcctccaggctc

SEQ ID NO: 2994758 - DNA, 25 bp, Homo sapien
tcggagtcctccaggctctgtctgc

SEQ ID NO: 2994759 - DNA, 25 bp, Homo sapien
tgatgcgcaggctttcggagtcctc

SEQ ID NO: 2994760 - DNA, 25 bp, Homo sapien
ctccttgatgcgcaggctttcggag

SEQ ID NO: 2994761 - DNA, 25 bp, Homo sapien
cattagaggccaacgaagagggcac

SEQ ID NO: 2994762 - DNA, 25 bp, Homo sapien
gagactgaggcgcattagaggccaa

SEQ ID NO: 2994763 - DNA, 25 bp, Homo sapien
gggacacctgcgtgacaccaagacc

SEQ ID NO: 2994764 - DNA, 25 bp, Homo sapien
acctgcgtgacaccaagaccagaga

SEQ ID NO: 2994765 - DNA, 25 bp, Homo sapien
ggtgtctcttcaacggcagcctgta

SEQ ID NO: 2994766 - DNA, 25 bp, Homo sapien
ccaataggaggttctgggtctgaca

SEQ ID NO: 2994767 - DNA, 25 bp, Homo sapien
gatggcctagcaggaaactaccgca

SEQ ID NO: 2994768 - DNA, 25 bp, Homo sapien
tgcacaccctgaacgagtgggcctt

SEQ ID NO: 2994769 - DNA, 25 bp, Homo sapien
taccttctcctcacggactccccac

SEQ ID NO: 2994770 - DNA, 25 bp, Homo sapien
ctaccttctcctcacggactcccca

SEQ ID NO: 2994771 - DNA, 25 bp, Homo sapien
ccaggtgacgggtcatatgctccac

SEQ ID NO: 2994772 - DNA, 25 bp, Homo sapien
ctccaggtgacgggtcatatgctcc

SEQ ID NO: 2994773 - DNA, 25 bp, Homo sapien
cctccaggtgacgggtcatatgctc

SEQ ID NO: 2994774 - DNA, 25 bp, Homo sapien
tccaggtgacgggtcatatgctcca

SEQ ID NO: 2994775 - DNA, 25 bp, Homo sapien
ggccaaggaagtccgaatgccacct

SEQ ID NO: 2994776 - DNA, 25 bp, Homo sapien
tctctggtcctgaggcggcgaacac

SEQ ID NO: 2994777 - DNA, 25 bp, Homo sapien
cacctagctcgctgggcaaggttcc

SEQ ID NO: 2994778 - DNA, 25 bp, Homo sapien
ccttgttcagcccaggactaaggca

SEQ ID NO: 2994779 - DNA, 25 bp, Homo sapien
ctgcacagatggccacctgccagcc

SEQ ID NO: 2994780 - DNA, 25 bp, Homo sapien
gtgccgctgctttcactcggctcag

SEQ ID NO: 2994781 - DNA, 25 bp, Homo sapien
gctgagtgccgctgctttcactcgg

SEQ ID NO: 2994782 - DNA, 25 bp, Homo sapien
tggccacgctcgctgagtgccgctg

SEQ ID NO: 2994783 - DNA, 25 bp, Homo sapien
cgctcgctgagtgccgctgctttca

SEQ ID NO: 2994784 - DNA, 25 bp, Homo sapien
cggagggtggcggacatgtgtggct

SEQ ID NO: 2994785 - DNA, 25 bp, Homo sapien
agggtggcggacatgtgtggctcac

SEQ ID NO: 2994786 - DNA, 25 bp, Homo sapien
gagggtggcggacatgtgtggctca

SEQ ID NO: 2994787 - DNA, 25 bp, Homo sapien
ccccggagggtggcggacatgtgtg

SEQ ID NO: 2994788 - DNA, 25 bp, Homo sapien
tgcgccagcagtctcagcttgtcct

SEQ ID NO: 2994789 - DNA, 25 bp, Homo sapien
gtgcctgcgccagcagtctcagctt

SEQ ID NO: 2994790 - DNA, 25 bp, Homo sapien
ggccctcaacttgcaggcccagctg

SEQ ID NO: 2994791 - DNA, 25 bp, Homo sapien
gcttctgctgtaggcaagcgccctg

SEQ ID NO: 2994792 - DNA, 25 bp, Homo sapien
tgcagctccacgcgcaccctgctca

SEQ ID NO: 2994793 - DNA, 25 bp, Homo sapien
acgtaagccaggacggcgttctgca

SEQ ID NO: 2994794 - DNA, 25 bp, Homo sapien
agagacgcgttctcgctctccctgt

SEQ ID NO: 2994795 - DNA, 25 bp, Homo sapien
agccgcagcttctcccggagagacg

SEQ ID NO: 2994796 - DNA, 25 bp, Homo sapien
agcagcgcctctcggtggtcgctcg

SEQ ID NO: 2994797 - DNA, 25 bp, Homo sapien
cagacgacccgggtctcaaagaggc

SEQ ID NO: 2994798 - DNA, 25 bp, Homo sapien
gcaaacgcgctgtatttccaaaccc

SEQ ID NO: 2994799 - DNA, 25 bp, Homo sapien
ttcccggtgtgctcccacgtggcgt

SEQ ID NO: 2994800 - DNA, 25 bp, Homo sapien
tcacggtgacatcgcaaaaggcgag

SEQ ID NO: 2994801 - DNA, 25 bp, Homo sapien
cgcgagccgagctgcggagaaatgc

SEQ ID NO: 2994802 - DNA, 25 bp, Homo sapien
gcgccgagcgatcggccggagacag

SEQ ID NO: 2994803 - DNA, 25 bp, Homo sapien
ccgcggacccgagcgccgagcgatc

SEQ ID NO: 2994804 - DNA, 25 bp, Homo sapien
ctgcggagaaatgcccggcgccgca

SEQ ID NO: 2994805 - DNA, 25 bp, Homo sapien
cgccgaccaccacgcacttgatggc

SEQ ID NO: 2994806 - DNA, 25 bp, Homo sapien
tcgccgaccaccacgcacttgatgg

SEQ ID NO: 2994807 - DNA, 25 bp, Homo sapien
gtcgccgaccaccacgcacttgatg

SEQ ID NO: 2994808 - DNA, 25 bp, Homo sapien
ccgtcgccgaccaccacgcacttga

SEQ ID NO: 2994809 - DNA, 25 bp, Homo sapien
tgaataagggcgcagggcgccccac

SEQ ID NO: 2994810 - DNA, 25 bp, Homo sapien
cgactccgagggtggcggcaggaga

SEQ ID NO: 2994811 - DNA, 25 bp, Homo sapien
tctcccggagccagaggcgagttag

SEQ ID NO: 2994812 - DNA, 25 bp, Homo sapien
agatccgtggcgacctaaggctgga

SEQ ID NO: 2994813 - DNA, 25 bp, Homo sapien
gcgttggtcgtgtagctgatcagca

SEQ ID NO: 2994814 - DNA, 25 bp, Homo sapien
ttggtcgtgtagctgatcagcaagc

SEQ ID NO: 2994815 - DNA, 25 bp, Homo sapien
gaaggcgttggtcgtgtagctgatc

SEQ ID NO: 2994816 - DNA, 25 bp, Homo sapien
tcgtgtagctgatcagcaagcatgt

SEQ ID NO: 2994817 - DNA, 25 bp, Homo sapien
gggcctgtgctctcccgggaagccc

SEQ ID NO: 2994818 - DNA, 25 bp, Homo sapien
agggcctgtgctctcccgggaagcc

SEQ ID NO: 2994819 - DNA, 25 bp, Homo sapien
cacgttggcagagtagttgtcaaaa

SEQ ID NO: 2994820 - DNA, 25 bp, Homo sapien
gatcgtagtcctcctgacccgctgt

SEQ ID NO: 2994821 - DNA, 25 bp, Homo sapien
gtggccgcagccgatcgtagtcctc

SEQ ID NO: 2994822 - DNA, 25 bp, Homo sapien
gtaggagagtggccgcagccgatcg

SEQ ID NO: 2994823 - DNA, 25 bp, Homo sapien
atcgtagtcctcctgacccgctgtg

SEQ ID NO: 2994824 - DNA, 25 bp, Homo sapien
ggacctggtggagtggtcaggggct

SEQ ID NO: 2994825 - DNA, 25 bp, Homo sapien
aaggtgggacctggtggagtggtca

SEQ ID NO: 2994826 - DNA, 25 bp, Homo sapien
acctggtggagtggtcaggggctcc

SEQ ID NO: 2994827 - DNA, 25 bp, Homo sapien
gtgggacctggtggagtggtcaggg

SEQ ID NO: 2994828 - DNA, 25 bp, Homo sapien
gagagaagcagatcagaaagacgtc

SEQ ID NO: 2994829 - DNA, 25 bp, Homo sapien
aggccgggctcaccagagagaagca

SEQ ID NO: 2994830 - DNA, 25 bp, Homo sapien
ccagagagaagcagatcagaaagac

SEQ ID NO: 2994831 - DNA, 25 bp, Homo sapien
attctcgaaggaggccgggctcacc

SEQ ID NO: 2994832 - DNA, 25 bp, Homo sapien
cagccgctcaatggtgtccttgtcg

SEQ ID NO: 2994833 - DNA, 25 bp, Homo sapien
tcccgcagccgctcaatggtgtcct

SEQ ID NO: 2994834 - DNA, 25 bp, Homo sapien
ccaccaggaggatgggcgtgtgggg

SEQ ID NO: 2994835 - DNA, 25 bp, Homo sapien
cgcagccgctcaatggtgtccttgt

SEQ ID NO: 2994836 - DNA, 25 bp, Homo sapien
gcgggcagagcaccgcgcggatcgc

SEQ ID NO: 2994837 - DNA, 25 bp, Homo sapien
ggtgcacttcttccccggcttcttc

SEQ ID NO: 2994838 - DNA, 25 bp, Homo sapien
gcaccgcgcggatcgcctcgtcaaa

SEQ ID NO: 2994839 - DNA, 25 bp, Homo sapien
tgggggcgggcagagcaccgcgcgg

SEQ ID NO: 2994840 - DNA, 25 bp, Homo sapien
acaccccagaatgaggcggcagaga

SEQ ID NO: 2994841 - DNA, 25 bp, Homo sapien
cgtctcaacacaacagcggacacgt

SEQ ID NO: 2994842 - DNA, 25 bp, Homo sapien
cctcggggcacaaggaacagaactc

SEQ ID NO: 2994843 - DNA, 25 bp, Homo sapien
cctcaggctcgggtgggccagggct

SEQ ID NO: 2994844 - DNA, 25 bp, Homo sapien
ggcacaggcgacactttttaggaca

SEQ ID NO: 2994845 - DNA, 25 bp, Homo sapien
aatatgctagccagggtccactacg

SEQ ID NO: 2994846 - DNA, 25 bp, Homo sapien
gctttaaagtgagccggcggtgtcc

SEQ ID NO: 2994847 - DNA, 25 bp, Homo sapien
taggtaatccttcgcccacagatga

SEQ ID NO: 2994848 - DNA, 25 bp, Homo sapien
ggcctattttctttgttatactgaa

SEQ ID NO: 2994849 - DNA, 25 bp, Homo sapien
gcctattttctttgttatactgaaa

SEQ ID NO: 2994850 - DNA, 25 bp, Homo sapien
caccgctcccggcctattttctttg

SEQ ID NO: 2994851 - DNA, 25 bp, Homo sapien
ccggcctattttctttgttatactg

SEQ ID NO: 2994852 - DNA, 25 bp, Homo sapien
catcaagacacggagaccagtagtg

SEQ ID NO: 2994853 - DNA, 25 bp, Homo sapien
cactaccatcaagacacggagacca

SEQ ID NO: 2994854 - DNA, 25 bp, Homo sapien
accatcaagacacggagaccagtag

SEQ ID NO: 2994855 - DNA, 25 bp, Homo sapien
ctaccatcaagacacggagaccagt

SEQ ID NO: 2994856 - DNA, 25 bp, Homo sapien
caaggttgatcccacgggaacaggc

SEQ ID NO: 2994857 - DNA, 25 bp, Homo sapien
tgggcccataaacaacaggagcctt

SEQ ID NO: 2994858 - DNA, 25 bp, Homo sapien
ggaaggtcatgttctcgaccagagc

SEQ ID NO: 2994859 - DNA, 25 bp, Homo sapien
gctctgacttgtggctcaggactac

SEQ ID NO: 2994860 - DNA, 25 bp, Homo sapien
aagcctcatagattgtttctccccc

SEQ ID NO: 2994861 - DNA, 25 bp, Homo sapien
ccagacgtttatcttcaccgacggg

SEQ ID NO: 2994862 - DNA, 25 bp, Homo sapien
gacgaccctgagctcgagctccagg

SEQ ID NO: 2994863 - DNA, 25 bp, Homo sapien
gagcctttctcgctccgaagccacg

SEQ ID NO: 2994864 - DNA, 25 bp, Homo sapien
tcgccgtcaagaccacccggaagaa

SEQ ID NO: 2994865 - DNA, 25 bp, Homo sapien
gacgacgtcttcatcgccgtcaaga

SEQ ID NO: 2994866 - DNA, 25 bp, Homo sapien
ctggccgcgctgctgttactgccgc

SEQ ID NO: 2994867 - DNA, 25 bp, Homo sapien
ccagcctgcggcctgacgacgtctt

SEQ ID NO: 2994868 - DNA, 25 bp, Homo sapien
ccaccccgccgcggcgtgccgtcca

SEQ ID NO: 2994869 - DNA, 25 bp, Homo sapien
aagttaaacacctgaaccggcagcg

SEQ ID NO: 2994870 - DNA, 25 bp, Homo sapien
agttaaacacctgaaccggcagcgg

SEQ ID NO: 2994871 - DNA, 25 bp, Homo sapien
gttaaacacctgaaccggcagcggc

SEQ ID NO: 2994872 - DNA, 25 bp, Homo sapien
taaacacctgaaccggcagcggcat

SEQ ID NO: 2994873 - DNA, 25 bp, Homo sapien
gtgcccgaccgactcctggcgcagg

SEQ ID NO: 2994874 - DNA, 25 bp, Homo sapien
cagccacggcggagacgcgccctcg

SEQ ID NO: 2994875 - DNA, 25 bp, Homo sapien
ggccgggaacctctcccgtgagctg

SEQ ID NO: 2994876 - DNA, 25 bp, Homo sapien
tgaagggagaaagagcgttagcgtc

SEQ ID NO: 2994877 - DNA, 25 bp, Homo sapien
tgcaccccccgaccctgacacagag

SEQ ID NO: 2994878 - DNA, 25 bp, Homo sapien
gcaccccccgaccctgacacagagc

SEQ ID NO: 2994879 - DNA, 25 bp, Homo sapien
caccccccgaccctgacacagagct

SEQ ID NO: 2994880 - DNA, 25 bp, Homo sapien
ctgcaccccccgaccctgacacaga

SEQ ID NO: 2994881 - DNA, 25 bp, Homo sapien
cagatctgtcactgacgaggaggcc

SEQ ID NO: 2994882 - DNA, 25 bp, Homo sapien
ctgtcactgacgaggaggccgagct

SEQ ID NO: 2994883 - DNA, 25 bp, Homo sapien
agtacagatctgtcactgacgagga

SEQ ID NO: 2994884 - DNA, 25 bp, Homo sapien
gatctgtcactgacgaggaggccga

SEQ ID NO: 2994885 - DNA, 25 bp, Homo sapien
tacaggccgacaggctggcgctcag

SEQ ID NO: 2994886 - DNA, 25 bp, Homo sapien
agagcagcgtacaggccgacaggct

SEQ ID NO: 2994887 - DNA, 25 bp, Homo sapien
tcgtagagcagcgtacaggccgaca

SEQ ID NO: 2994888 - DNA, 25 bp, Homo sapien
tcaggctgaagtccccggccgtgcc

SEQ ID NO: 2994889 - DNA, 25 bp, Homo sapien
ctgagcagcggagcagcaatactgg

SEQ ID NO: 2994890 - DNA, 25 bp, Homo sapien
gagagacccgcactgttctctgagg

SEQ ID NO: 2994891 - DNA, 25 bp, Homo sapien
gattctagccgctcatctctgaaag

SEQ ID NO: 2994892 - DNA, 25 bp, Homo sapien
gcagaaacccctcgcctgattctag

SEQ ID NO: 2994893 - DNA, 25 bp, Homo sapien
ccaggcacctggcacctcgtcctgg

SEQ ID NO: 2994894 - DNA, 25 bp, Homo sapien
caggcacctggcacctcgtcctggg

SEQ ID NO: 2994895 - DNA, 25 bp, Homo sapien
ctgcaacatgggccaggcacctggc

SEQ ID NO: 2994896 - DNA, 25 bp, Homo sapien
gggccaggcacctggcacctcgtcc

SEQ ID NO: 2994897 - DNA, 25 bp, Homo sapien
cctgggggtccacgtcgatctgcat

SEQ ID NO: 2994898 - DNA, 25 bp, Homo sapien
caggctggggttctccaccacgtag

SEQ ID NO: 2994899 - DNA, 25 bp, Homo sapien
gctggggttctccaccacgtagttg

SEQ ID NO: 2994900 - DNA, 25 bp, Homo sapien
tggggttctccaccacgtagttgac

SEQ ID NO: 2994901 - DNA, 25 bp, Homo sapien
aggctggggttctccaccacgtagt

SEQ ID NO: 2994902 - DNA, 25 bp, Homo sapien
gttctctgcacgaaggagagggcca

SEQ ID NO: 2994903 - DNA, 25 bp, Homo sapien
tgaactgcagccgttcgatgcgcat

SEQ ID NO: 2994904 - DNA, 25 bp, Homo sapien
tagctggccgcgtactgttccagat

SEQ ID NO: 2994905 - DNA, 25 bp, Homo sapien
gcttgcggtggatctcctcgtacat

SEQ ID NO: 2994906 - DNA, 25 bp, Homo sapien
gatgctctctttgatggagttgccc

SEQ ID NO: 2994907 - DNA, 25 bp, Homo sapien
tccaggtagtggtcgcccaggtcgt

SEQ ID NO: 2994908 - DNA, 25 bp, Homo sapien
cacatgttgatgacgtgtttggcgc

SEQ ID NO: 2994909 - DNA, 25 bp, Homo sapien
tcccgggcccgggaatagcacttga

SEQ ID NO: 2994910 - DNA, 25 bp, Homo sapien
ctcggcaatctctggggtggactca

SEQ ID NO: 2994911 - DNA, 25 bp, Homo sapien
tcagccttgctgacgtagctgagca

SEQ ID NO: 2994912 - DNA, 25 bp, Homo sapien
tgacgtagctgagcacatgagacca

SEQ ID NO: 2994913 - DNA, 25 bp, Homo sapien
gagcacatgagaccaattctgcaag

SEQ ID NO: 2994914 - DNA, 25 bp, Homo sapien
aagccacatgcgtgaggcccatgct

SEQ ID NO: 2994915 - DNA, 25 bp, Homo sapien
gaggaagccacatgcgtgaggccca

SEQ ID NO: 2994916 - DNA, 25 bp, Homo sapien
catttcctagagctcgatgcccagc

SEQ ID NO: 2994917 - DNA, 25 bp, Homo sapien
atgctccacatttcctagagctcga

SEQ ID NO: 2994918 - DNA, 25 bp, Homo sapien
gggtctggctgtcacgctctcctcg

SEQ ID NO: 2994919 - DNA, 25 bp, Homo sapien
ctcagggaagtcacagtgatcaaag

SEQ ID NO: 2994920 - DNA, 25 bp, Homo sapien
ggcagcctgcttgtacttcctggcg

SEQ ID NO: 2994921 - DNA, 25 bp, Homo sapien
cctgcttgtacttcctggcggccag

SEQ ID NO: 2994922 - DNA, 25 bp, Homo sapien
gtcacagtgatcaaaggaagccagc

SEQ ID NO: 2994923 - DNA, 25 bp, Homo sapien
gatgacattgcgctgcagctcctgc

SEQ ID NO: 2994924 - DNA, 25 bp, Homo sapien
agccaaggcgcacaggccaccgtag

SEQ ID NO: 2994925 - DNA, 25 bp, Homo sapien
agctcctgccggtcaaaggtagcca

SEQ ID NO: 2994926 - DNA, 25 bp, Homo sapien
acaggccaccgtagatggccacgtt

SEQ ID NO: 2994927 - DNA, 25 bp, Homo sapien
ctggtgaggcagacccctcagaact

SEQ ID NO: 2994928 - DNA, 25 bp, Homo sapien
gtgaggcagacccctcagaactctg

SEQ ID NO: 2994929 - DNA, 25 bp, Homo sapien
tggtgaggcagacccctcagaactc

SEQ ID NO: 2994930 - DNA, 25 bp, Homo sapien
gaggcagacccctcagaactctgtc

SEQ ID NO: 2994931 - DNA, 25 bp, Homo sapien
tccagcatcttgagacatgaggcgt

SEQ ID NO: 2994932 - DNA, 25 bp, Homo sapien
cttggactcgtagaatttgaagatg

SEQ ID NO: 2994933 - DNA, 25 bp, Homo sapien
ggcgtacttggactcgtagaatttg

SEQ ID NO: 2994934 - DNA, 25 bp, Homo sapien
gaagatgatgtctcggacctgtggc

SEQ ID NO: 2994935 - DNA, 25 bp, Homo sapien
gccaggcagggccccacctcacccc

SEQ ID NO: 2994936 - DNA, 25 bp, Homo sapien
gaggccaggcagggccccacctcac

SEQ ID NO: 2994937 - DNA, 25 bp, Homo sapien
ctggtcaggaccaggacaggaggcc

SEQ ID NO: 2994938 - DNA, 25 bp, Homo sapien
caggcagggccccacctcaccccta

SEQ ID NO: 2994939 - DNA, 25 bp, Homo sapien
cacggttgcgaatctgggtgtacag

SEQ ID NO: 2994940 - DNA, 25 bp, Homo sapien
ctggatgagggcacggttgcgaatc

SEQ ID NO: 2994941 - DNA, 25 bp, Homo sapien
tctgggtgtacagggtcctgacatg

SEQ ID NO: 2994942 - DNA, 25 bp, Homo sapien
catggggggccagatacatgtccag

SEQ ID NO: 2994943 - DNA, 25 bp, Homo sapien
gggcagagggaagtcagctccacag

SEQ ID NO: 2994944 - DNA, 25 bp, Homo sapien
ggcagagggaagtcagctccacagc

SEQ ID NO: 2994945 - DNA, 25 bp, Homo sapien
tgtgagtccacacgggcactgatca

SEQ ID NO: 2994946 - DNA, 25 bp, Homo sapien
tatgcatgtcggctgacacgtaggg

SEQ ID NO: 2994947 - DNA, 25 bp, Homo sapien
agcccctccaggattagctgcgtca

SEQ ID NO: 2994948 - DNA, 25 bp, Homo sapien
ccaccgtggtattgaaggctgccgc

SEQ ID NO: 2994949 - DNA, 25 bp, Homo sapien
caggcacaagctcagcggggcccag

SEQ ID NO: 2994950 - DNA, 25 bp, Homo sapien
tgtgcaggcacaagctcagcggggc

SEQ ID NO: 2994951 - DNA, 25 bp, Homo sapien
tgcaggcacaagctcagcggggccc

SEQ ID NO: 2994952 - DNA, 25 bp, Homo sapien
ctgtgcaggcacaagctcagcgggg

SEQ ID NO: 2994953 - DNA, 25 bp, Homo sapien
gctgatccacgtcccgggcgtatag

SEQ ID NO: 2994954 - DNA, 25 bp, Homo sapien
ctcaaaggtggtgctgcgctgatcc

SEQ ID NO: 2994955 - DNA, 25 bp, Homo sapien
atcaacagagacttctcaaaggtgg

SEQ ID NO: 2994956 - DNA, 25 bp, Homo sapien
agctgcccgcagcatcatggccttg

SEQ ID NO: 2994957 - DNA, 25 bp, Homo sapien
gccgtgcgcctgccccccctcaagc

SEQ ID NO: 2994958 - DNA, 25 bp, Homo sapien
gccaccaggccccacacgccgtgcg

SEQ ID NO: 2994959 - DNA, 25 bp, Homo sapien
gagacaaggagcagctcacagccac

SEQ ID NO: 2994960 - DNA, 25 bp, Homo sapien
cgcctgccccccctcaagccagccc

SEQ ID NO: 2994961 - DNA, 25 bp, Homo sapien
tcacatgttggtgctcatccgggac

SEQ ID NO: 2994962 - DNA, 25 bp, Homo sapien
catgttggtgctcatccgggactgg

SEQ ID NO: 2994963 - DNA, 25 bp, Homo sapien
tgttggtgctcatccgggactggct

SEQ ID NO: 2994964 - DNA, 25 bp, Homo sapien
ggctgttggctggagtcagctcccc

SEQ ID NO: 2994965 - DNA, 25 bp, Homo sapien
actgggcctgggtgccgcacagtct

SEQ ID NO: 2994966 - DNA, 25 bp, Homo sapien
aggccccttagctgggccgcaggca

SEQ ID NO: 2994967 - DNA, 25 bp, Homo sapien
gcctggaggtccgaggtccgtggag

SEQ ID NO: 2994968 - DNA, 25 bp, Homo sapien
ccaggaagggccacaactagcagcc

SEQ ID NO: 2994969 - DNA, 25 bp, Homo sapien
tgctctttaatggacaccgcccact

SEQ ID NO: 2994970 - DNA, 25 bp, Homo sapien
tctttaatggacaccgcccacttgt

SEQ ID NO: 2994971 - DNA, 25 bp, Homo sapien
ctttaatggacaccgcccacttgtc

SEQ ID NO: 2994972 - DNA, 25 bp, Homo sapien
cgcccacttgtctgcacctgactga

SEQ ID NO: 2994973 - DNA, 25 bp, Homo sapien
tgcacggcaggaaagaacagccaag

SEQ ID NO: 2994974 - DNA, 25 bp, Homo sapien
gcacggcaggaaagaacagccaaga

SEQ ID NO: 2994975 - DNA, 25 bp, Homo sapien
ctgcacggcaggaaagaacagccaa

SEQ ID NO: 2994976 - DNA, 25 bp, Homo sapien
acagccttggaagcaccgcctgcga

SEQ ID NO: 2994977 - DNA, 25 bp, Homo sapien
gctgggggctgttgaatctgagggc

SEQ ID NO: 2994978 - DNA, 25 bp, Homo sapien
tggaagcaccgcctgcgaggccaca

SEQ ID NO: 2994979 - DNA, 25 bp, Homo sapien
tgcctccaagcctagtcccagggag

SEQ ID NO: 2994980 - DNA, 25 bp, Homo sapien
tacatctaaatgaaggcagcatctg

SEQ ID NO: 2994981 - DNA, 25 bp, Homo sapien
gctacttaatgtggaaagacacgcc

SEQ ID NO: 2994982 - DNA, 25 bp, Homo sapien
catttcaaagatgcgagagcccaca

SEQ ID NO: 2994983 - DNA, 25 bp, Homo sapien
ttctccgaagtcatgggcagtgccc

SEQ ID NO: 2994984 - DNA, 25 bp, Homo sapien
gtggggtctgcgcttggtctttctg

SEQ ID NO: 2994985 - DNA, 25 bp, Homo sapien
gattttgaaatttactgtaactgtc

SEQ ID NO: 2994986 - DNA, 25 bp, Homo sapien
tggggtctgcgcttggtctttctgt

SEQ ID NO: 2994987 - DNA, 25 bp, Homo sapien
ccgtggggtctgcgcttggtctttc

SEQ ID NO: 2994988 - DNA, 25 bp, Homo sapien
caggcgcgttcccgcgcagggtccc

SEQ ID NO: 2994989 - DNA, 25 bp, Homo sapien
ccaggcgcgttcccgcgcagggtcc

SEQ ID NO: 2994990 - DNA, 25 bp, Homo sapien
ccgaagtgcgggcacgcgggtccgt

SEQ ID NO: 2994991 - DNA, 25 bp, Homo sapien
gcggcgtggagtcggcggccgaagt

SEQ ID NO: 2994992 - DNA, 25 bp, Homo sapien
cattgggccggtgcgaacacccctg

SEQ ID NO: 2994993 - DNA, 25 bp, Homo sapien
ccctggcgcccgattggttgctgct

SEQ ID NO: 2994994 - DNA, 25 bp, Homo sapien
cacgcctgaggctgacacagggcct

SEQ ID NO: 2994995 - DNA, 25 bp, Homo sapien
atggagagccggagctgcgtgcccg

SEQ ID NO: 2994996 - DNA, 25 bp, Homo sapien
ggtttggagcatggagagccggagc

SEQ ID NO: 2994997 - DNA, 25 bp, Homo sapien
gaatcagaagaacccccgcagtggg

SEQ ID NO: 2994998 - DNA, 25 bp, Homo sapien
agggtgctggacgagtctccaacct

SEQ ID NO: 2994999 - DNA, 25 bp, Homo sapien
gacgagtctccaacctccttgggag

SEQ ID NO: 2995000 - DNA, 25 bp, Homo sapien
ccccgctggccgctgatcaccagca

SEQ ID NO: 2995001 - DNA, 25 bp, Homo sapien
agggctcccctgtagctggcccagc

SEQ ID NO: 2995002 - DNA, 25 bp, Homo sapien
accaagcccggccgctgccgctcac

SEQ ID NO: 2995003 - DNA, 25 bp, Homo sapien
gcttgtctacaactcttgacctcgt

SEQ ID NO: 2995004 - DNA, 25 bp, Homo sapien
cctgtttcccaggcttgtctacaac

SEQ ID NO: 2995005 - DNA, 25 bp, Homo sapien
caccaagcccggccgctgccgctca

SEQ ID NO: 2995006 - DNA, 25 bp, Homo sapien
gcctccgtcacttgctccatgggaa

SEQ ID NO: 2995007 - DNA, 25 bp, Homo sapien
ccggataaccgtgacaagcagagac

SEQ ID NO: 2995008 - DNA, 25 bp, Homo sapien
tctcagtgctctgtggtctcccaca

SEQ ID NO: 2995009 - DNA, 25 bp, Homo sapien
tccatgggaatccagacggagttgg

SEQ ID NO: 2995010 - DNA, 25 bp, Homo sapien
cagcttctctgggaacacgatggga

SEQ ID NO: 2995011 - DNA, 25 bp, Homo sapien
caccttggcaaatcgtgggaccttt

SEQ ID NO: 2995012 - DNA, 25 bp, Homo sapien
ctgggtgaattgacgggccttgcca

SEQ ID NO: 2995013 - DNA, 25 bp, Homo sapien
taaaatatagacagtgccatcggct

SEQ ID NO: 2995014 - DNA, 25 bp, Homo sapien
tccacacgaacacaatgctctgcga

SEQ ID NO: 2995015 - DNA, 25 bp, Homo sapien
acttccaagagtcctcgcgtgtcct

SEQ ID NO: 2995016 - DNA, 25 bp, Homo sapien
actgggggtggttcatcacacggac

SEQ ID NO: 2995017 - DNA, 25 bp, Homo sapien
acaatgctctgcgaccggcaggagg

SEQ ID NO: 2995018 - DNA, 25 bp, Homo sapien
agcaaaatgtccctgccacctgagt

SEQ ID NO: 2995019 - DNA, 25 bp, Homo sapien
cggggacagcggtcactgctgggcc

SEQ ID NO: 2995020 - DNA, 25 bp, Homo sapien
ccacctgagtgcccggggccaggta

SEQ ID NO: 2995021 - DNA, 25 bp, Homo sapien
tccacccccacgaaggataacagca

SEQ ID NO: 2995022 - DNA, 25 bp, Homo sapien
ggttggggtgtgcatgtcaggtgct

SEQ ID NO: 2995023 - DNA, 25 bp, Homo sapien
ttggggtgtgcatgtcaggtgctgg

SEQ ID NO: 2995024 - DNA, 25 bp, Homo sapien
ggggtgtgcatgtcaggtgctggca

SEQ ID NO: 2995025 - DNA, 25 bp, Homo sapien
caggttggggtgtgcatgtcaggtg

SEQ ID NO: 2995026 - DNA, 25 bp, Homo sapien
cctggcctgcccgtgtcaccaccca

SEQ ID NO: 2995027 - DNA, 25 bp, Homo sapien
tggtgttggggacagtgtggccttc

SEQ ID NO: 2995028 - DNA, 25 bp, Homo sapien
agagcctggcctgcccgtgtcacca

SEQ ID NO: 2995029 - DNA, 25 bp, Homo sapien
ggtgttggggacagtgtggccttcc

SEQ ID NO: 2995030 - DNA, 25 bp, Homo sapien
cagccgacaggaggcccgtcaagat

SEQ ID NO: 2995031 - DNA, 25 bp, Homo sapien
gacaggaggcccgtcaagatgcagg

SEQ ID NO: 2995032 - DNA, 25 bp, Homo sapien
gaggcccgtcaagatgcaggcaggc

SEQ ID NO: 2995033 - DNA, 25 bp, Homo sapien
agcagccgacaggaggcccgtcaag

SEQ ID NO: 2995034 - DNA, 25 bp, Homo sapien
tcctttggcctcaaaagcctggcac

SEQ ID NO: 2995035 - DNA, 25 bp, Homo sapien
tcaaaagcctggcactgctggccca

SEQ ID NO: 2995036 - DNA, 25 bp, Homo sapien
cagcacggcctttcctttggcctca

SEQ ID NO: 2995037 - DNA, 25 bp, Homo sapien
agcacggcctttcctttggcctcaa

SEQ ID NO: 2995038 - DNA, 25 bp, Homo sapien
tggggaccagctccgtcctctttgt

SEQ ID NO: 2995039 - DNA, 25 bp, Homo sapien
gctggggaccagctccgtcctcttt

SEQ ID NO: 2995040 - DNA, 25 bp, Homo sapien
ctggggaccagctccgtcctctttg

SEQ ID NO: 2995041 - DNA, 25 bp, Homo sapien
ggggaccagctccgtcctctttgtg

SEQ ID NO: 2995042 - DNA, 25 bp, Homo sapien
ctggacatagcaggcccggagtgtc

SEQ ID NO: 2995043 - DNA, 25 bp, Homo sapien
agtaccctcccctcttgtgcatctg

SEQ ID NO: 2995044 - DNA, 25 bp, Homo sapien
gccctggagcatgcaatgtccagta

SEQ ID NO: 2995045 - DNA, 25 bp, Homo sapien
cagctggacatagcaggcccggagt

SEQ ID NO: 2995046 - DNA, 25 bp, Homo sapien
atggagggtgacaagccacacagca

SEQ ID NO: 2995047 - DNA, 25 bp, Homo sapien
cggaggcgcagagacgccatggagg

SEQ ID NO: 2995048 - DNA, 25 bp, Homo sapien
agcagggttcgaggcagccactccc

SEQ ID NO: 2995049 - DNA, 25 bp, Homo sapien
cacagcagggttcgaggcagccact

SEQ ID NO: 2995050 - DNA, 25 bp, Homo sapien
cctgatgctaacctcgccccgtgtg

SEQ ID NO: 2995051 - DNA, 25 bp, Homo sapien
taacctcgccccgtgtgccgtgcag

SEQ ID NO: 2995052 - DNA, 25 bp, Homo sapien
gtccgctttggcccctgatgctaac

SEQ ID NO: 2995053 - DNA, 25 bp, Homo sapien
ggggtccgctttggcccctgatgct

SEQ ID NO: 2995054 - DNA, 25 bp, Homo sapien
tccttctcctgtcacaacagggccc

SEQ ID NO: 2995055 - DNA, 25 bp, Homo sapien
gtgtttcttcaacccaggctgccct

SEQ ID NO: 2995056 - DNA, 25 bp, Homo sapien
ctgcagaccaactccatccgcccat

SEQ ID NO: 2995057 - DNA, 25 bp, Homo sapien
acagggccccattcattctggaacc

SEQ ID NO: 2995058 - DNA, 25 bp, Homo sapien
gagagcacccgatggcactgtagga

SEQ ID NO: 2995059 - DNA, 25 bp, Homo sapien
gagggccggcggctgttccctccca

SEQ ID NO: 2995060 - DNA, 25 bp, Homo sapien
gcctgttctgtaggcatctgtcctg

SEQ ID NO: 2995061 - DNA, 25 bp, Homo sapien
catctcaggtggacgccggtccacg

SEQ ID NO: 2995062 - DNA, 25 bp, Homo sapien
ggacttccatcctgaggtgtgtgca

SEQ ID NO: 2995063 - DNA, 25 bp, Homo sapien
cctgtggcctctgactctgagcttg

SEQ ID NO: 2995064 - DNA, 25 bp, Homo sapien
tgctccaacatcacgtggacagagg

SEQ ID NO: 2995065 - DNA, 25 bp, Homo sapien
tgtgtgcagagtgatccaaagcccc

SEQ ID NO: 2995066 - DNA, 25 bp, Homo sapien
tgaatgagtttttgccaggaggaca

SEQ ID NO: 2995067 - DNA, 25 bp, Homo sapien
gaacatgggtgagttaacagcttca

SEQ ID NO: 2995068 - DNA, 25 bp, Homo sapien
gtaaggttagacctcctgtgcctca

SEQ ID NO: 2995069 - DNA, 25 bp, Homo sapien
gaaagtgaatcatctacctgtaagg

SEQ ID NO: 2995070 - DNA, 25 bp, Homo sapien
accatcacagcagccttgcagtggg

SEQ ID NO: 2995071 - DNA, 25 bp, Homo sapien
ctcctgtcgttctagtcccattgct

SEQ ID NO: 2995072 - DNA, 25 bp, Homo sapien
cactacctgctcctgtcgttctagt

SEQ ID NO: 2995073 - DNA, 25 bp, Homo sapien
caccatcacagcagccttgcagtgg

SEQ ID NO: 2995074 - DNA, 25 bp, Homo sapien
tctgagcgctgttacccaattgccc

SEQ ID NO: 2995075 - DNA, 25 bp, Homo sapien
gttctgagcgctgttacccaattgc

SEQ ID NO: 2995076 - DNA, 25 bp, Homo sapien
caaaggtagggtcagtttgagttct

SEQ ID NO: 2995077 - DNA, 25 bp, Homo sapien
gaaatagctggtcaaaggtagggtc

SEQ ID NO: 2995078 - DNA, 25 bp, Homo sapien
tgcgtgtgccctgcgtgctcacaga

SEQ ID NO: 2995079 - DNA, 25 bp, Homo sapien
gctcttaagagagtgaacctcctgt

SEQ ID NO: 2995080 - DNA, 25 bp, Homo sapien
ggcctgtcgtttttagctcttaaga

SEQ ID NO: 2995081 - DNA, 25 bp, Homo sapien
tgtggacacttggacggcctgtcgt

SEQ ID NO: 2995082 - DNA, 25 bp, Homo sapien
tcaattgcatatcgtgggggcagct

SEQ ID NO: 2995083 - DNA, 25 bp, Homo sapien
ttttatgtcagtacacacagagccg

SEQ ID NO: 2995084 - DNA, 25 bp, Homo sapien
ggtagttttgtgagccgccgcatcg

SEQ ID NO: 2995085 - DNA, 25 bp, Homo sapien
gagccgacagatctttctggtagtt

SEQ ID NO: 2995086 - DNA, 25 bp, Homo sapien
gtgtgtgggcagctaagccccgcaa

SEQ ID NO: 2995087 - DNA, 25 bp, Homo sapien
ctcgcacctcgctggggcaaaggat

SEQ ID NO: 2995088 - DNA, 25 bp, Homo sapien
ttccggagcacctcgcacctcgctg

SEQ ID NO: 2995089 - DNA, 25 bp, Homo sapien
gctaagccccgcaagttccggagca

SEQ ID NO: 2995090 - DNA, 25 bp, Homo sapien
ctgtctgctccacgtacagggagat

SEQ ID NO: 2995091 - DNA, 25 bp, Homo sapien
tgtctgctccacgtacagggagata

SEQ ID NO: 2995092 - DNA, 25 bp, Homo sapien
gtctgctccacgtacagggagataa

SEQ ID NO: 2995093 - DNA, 25 bp, Homo sapien
ctatcggtctgcttcagaatgtctc

SEQ ID NO: 2995094 - DNA, 25 bp, Homo sapien
tcggtctgcttcagaatgtctcgga

SEQ ID NO: 2995095 - DNA, 25 bp, Homo sapien
gtctgcttcagaatgtctcggaggg

SEQ ID NO: 2995096 - DNA, 25 bp, Homo sapien
ggtctgcttcagaatgtctcggagg

SEQ ID NO: 2995097 - DNA, 25 bp, Homo sapien
aaccttggaaactgcgttggtgaag

SEQ ID NO: 2995098 - DNA, 25 bp, Homo sapien
gtcgctcgccagacaagcagtctga

SEQ ID NO: 2995099 - DNA, 25 bp, Homo sapien
tggttaagatgcgacactgcgccct

SEQ ID NO: 2995100 - DNA, 25 bp, Homo sapien
tgcaccgacactaggacagagcgca

SEQ ID NO: 2995101 - DNA, 25 bp, Homo sapien
agcagcacacgtccaccgaggctga

SEQ ID NO: 2995102 - DNA, 25 bp, Homo sapien
gagcgttcctgacacagcagcacac

SEQ ID NO: 2995103 - DNA, 25 bp, Homo sapien
gcaggaaggagcgttcctgacacag

SEQ ID NO: 2995104 - DNA, 25 bp, Homo sapien
aaggagcgttcctgacacagcagca

SEQ ID NO: 2995105 - DNA, 25 bp, Homo sapien
ctgagagcccgaggccggccacagg

SEQ ID NO: 2995106 - DNA, 25 bp, Homo sapien
ggctgagagcccgaggccggccaca

SEQ ID NO: 2995107 - DNA, 25 bp, Homo sapien
atccaggctgagagcccgaggccgg

SEQ ID NO: 2995108 - DNA, 25 bp, Homo sapien
caggctgagagcccgaggccggcca

SEQ ID NO: 2995109 - DNA, 25 bp, Homo sapien
tgtctttcccttgtaggacttataa

SEQ ID NO: 2995110 - DNA, 25 bp, Homo sapien
tatgatgttaactcttctgagaggg

SEQ ID NO: 2995111 - DNA, 25 bp, Homo sapien
gctagcttcatgatgccttcttcaa

SEQ ID NO: 2995112 - DNA, 25 bp, Homo sapien
aatgcatattcctccaagcgttgct

SEQ ID NO: 2995113 - DNA, 25 bp, Homo sapien
ggcagaaagaagacaggtccccaaa

SEQ ID NO: 2995114 - DNA, 25 bp, Homo sapien
cagaaagaagacaggtccccaaagc

SEQ ID NO: 2995115 - DNA, 25 bp, Homo sapien
cggcagaaagaagacaggtccccaa

SEQ ID NO: 2995116 - DNA, 25 bp, Homo sapien
ctcggcagaaagaagacaggtcccc

SEQ ID NO: 2995117 - DNA, 25 bp, Homo sapien
gagtggttggggggagtcctgtggc

SEQ ID NO: 2995118 - DNA, 25 bp, Homo sapien
tggttggggggagtcctgtggcttc

SEQ ID NO: 2995119 - DNA, 25 bp, Homo sapien
gagagggtggctttcaagacgatga

SEQ ID NO: 2995120 - DNA, 25 bp, Homo sapien
tggagagggtggctttcaagacgat

SEQ ID NO: 2995121 - DNA, 25 bp, Homo sapien
aggcccgaaggtgagagtggcggcg

SEQ ID NO: 2995122 - DNA, 25 bp, Homo sapien
agtggcggcgcccgagcaagtgcag

SEQ ID NO: 2995123 - DNA, 25 bp, Homo sapien
gaaggtgagagtggcggcgcccgag

SEQ ID NO: 2995124 - DNA, 25 bp, Homo sapien
gcccgaaggtgagagtggcggcgcc

SEQ ID NO: 2995125 - DNA, 25 bp, Homo sapien
acaggtgggcagcagacttgacgcc

SEQ ID NO: 2995126 - DNA, 25 bp, Homo sapien
ttagcgaatgtgcttgctgcccccg

SEQ ID NO: 2995127 - DNA, 25 bp, Homo sapien
taatgtgcggatgtcggatgttgta

SEQ ID NO: 2995128 - DNA, 25 bp, Homo sapien
ggcacagctcacacgtctgcatgaa

SEQ ID NO: 2995129 - DNA, 25 bp, Homo sapien
tgcggatgtcggatgttgtaacaag

SEQ ID NO: 2995130 - DNA, 25 bp, Homo sapien
agacaggtaatgtgcggatgtcgga

SEQ ID NO: 2995131 - DNA, 25 bp, Homo sapien
gatcggacacaaggctttatactca

SEQ ID NO: 2995132 - DNA, 25 bp, Homo sapien
ggctttatactcagactcaggtaca

SEQ ID NO: 2995133 - DNA, 25 bp, Homo sapien
gagagcagttgatcggacacaaggc

SEQ ID NO: 2995134 - DNA, 25 bp, Homo sapien
tactcagactcaggtacaaggcagc

SEQ ID NO: 2995135 - DNA, 25 bp, Homo sapien
gggagtgagaacagccccactcagg

SEQ ID NO: 2995136 - DNA, 25 bp, Homo sapien
gcggggagtgagaacagccccactc

SEQ ID NO: 2995137 - DNA, 25 bp, Homo sapien
tgcctgctacagggttccggccgag

SEQ ID NO: 2995138 - DNA, 25 bp, Homo sapien
tgctacagggttccggccgagacca

SEQ ID NO: 2995139 - DNA, 25 bp, Homo sapien
ggagcaagctgaccgccacttcact

SEQ ID NO: 2995140 - DNA, 25 bp, Homo sapien
cagggagcaagctgaccgccacttc

SEQ ID NO: 2995141 - DNA, 25 bp, Homo sapien
gctgctttcaggcatagagcctgtc

SEQ ID NO: 2995142 - DNA, 25 bp, Homo sapien
catgctgccggtgcccatatagatg

SEQ ID NO: 2995143 - DNA, 25 bp, Homo sapien
tggacacagacaccggagctgactt

SEQ ID NO: 2995144 - DNA, 25 bp, Homo sapien
ttggacacagacaccggagctgact

SEQ ID NO: 2995145 - DNA, 25 bp, Homo sapien
cttggacacagacaccggagctgac

SEQ ID NO: 2995146 - DNA, 25 bp, Homo sapien
ggacacagacaccggagctgacttc

SEQ ID NO: 2995147 - DNA, 25 bp, Homo sapien
gcatttgtgagaacaacaccgcagg

SEQ ID NO: 2995148 - DNA, 25 bp, Homo sapien
caaagcagccggcatttctgtgcgg

SEQ ID NO: 2995149 - DNA, 25 bp, Homo sapien
aacaccgcaggttagcaaagcagcc

SEQ ID NO: 2995150 - DNA, 25 bp, Homo sapien
gatggccgcagacttctccaggtaa

SEQ ID NO: 2995151 - DNA, 25 bp, Homo sapien
tgcgcctggttctgggtgcgggtca

SEQ ID NO: 2995152 - DNA, 25 bp, Homo sapien
gcctggttctgggtgtgcgcctggt

SEQ ID NO: 2995153 - DNA, 25 bp, Homo sapien
tgcgcctggttctgggtgtgggtca

SEQ ID NO: 2995154 - DNA, 25 bp, Homo sapien
tgtgccaggttctgggtgtgcgcct

SEQ ID NO: 2995155 - DNA, 25 bp, Homo sapien
tgcgggtcaggttctgggtgtgcac

SEQ ID NO: 2995156 - DNA, 25 bp, Homo sapien
ggtgcgggtcaggttctgggtgtgc

SEQ ID NO: 2995157 - DNA, 25 bp, Homo sapien
ctaggtgcgggtcaggttctgggtg

SEQ ID NO: 2995158 - DNA, 25 bp, Homo sapien
taggtgcgggtcaggttctgggtgt

SEQ ID NO: 2995159 - DNA, 25 bp, Homo sapien
caggttctgagtgtgcgcctggttc

SEQ ID NO: 2995160 - DNA, 25 bp, Homo sapien
cctggttctgggtgcgggtcaggtt

SEQ ID NO: 2995161 - DNA, 25 bp, Homo sapien
gcctggttctgggtgtgcgcctggt

SEQ ID NO: 2995162 - DNA, 25 bp, Homo sapien
ccaggttctgggtgtgcgcctggtt

SEQ ID NO: 2995163 - DNA, 25 bp, Homo sapien
gcgcctggttctgggtgcgggtcag

SEQ ID NO: 2995164 - DNA, 25 bp, Homo sapien
tgcgcctggttctgggtgcgggtca

SEQ ID NO: 2995165 - DNA, 25 bp, Homo sapien
cctggttctgggtgcgggtcaggtt

SEQ ID NO: 2995166 - DNA, 25 bp, Homo sapien
gcctggttctgggtgcgggtcaggt

SEQ ID NO: 2995167 - DNA, 25 bp, Homo sapien
tgcgcctggttctgggtgtgggtca

SEQ ID NO: 2995168 - DNA, 25 bp, Homo sapien
cctggttctgggtgcgggtcaggtt

SEQ ID NO: 2995169 - DNA, 25 bp, Homo sapien
tgtgccaggttctgggtgtgcgcct

SEQ ID NO: 2995170 - DNA, 25 bp, Homo sapien
caggttctgagtgtgcgcctggttc

SEQ ID NO: 2995171 - DNA, 25 bp, Homo sapien
ccaggttctgagtgtgcgcctggtt

SEQ ID NO: 2995172 - DNA, 25 bp, Homo sapien
accaggttctgagtgtgcgcctggt

SEQ ID NO: 2995173 - DNA, 25 bp, Homo sapien
caccaggttctgagtgtgcgcctgg

SEQ ID NO: 2995174 - DNA, 25 bp, Homo sapien
tgcgcctggttctgggtgcgggtca

SEQ ID NO: 2995175 - DNA, 25 bp, Homo sapien
gcgcctggttctgggtgtgggtcag

SEQ ID NO: 2995176 - DNA, 25 bp, Homo sapien
cctggttctgggtgcgggtcaggtt

SEQ ID NO: 2995177 - DNA, 25 bp, Homo sapien
caggttctgagtgtgcgcctggttc

SEQ ID NO: 2995178 - DNA, 25 bp, Homo sapien
tgcgcctggttctgggtgtgggtca

SEQ ID NO: 2995179 - DNA, 25 bp, Homo sapien
gcctggttctgggtgtgcgcctggt

SEQ ID NO: 2995180 - DNA, 25 bp, Homo sapien
caggttctgggtgtgtgccaggttc

SEQ ID NO: 2995181 - DNA, 25 bp, Homo sapien
caccaggttctgagtgtgcgcctgg

SEQ ID NO: 2995182 - DNA, 25 bp, Homo sapien
ctgggccgacccgaaagtgagtccg

SEQ ID NO: 2995183 - DNA, 25 bp, Homo sapien
ccgaaagtgagtccgggaagtggag

SEQ ID NO: 2995184 - DNA, 25 bp, Homo sapien
cagagctgggccgacccgaaagtga

SEQ ID NO: 2995185 - DNA, 25 bp, Homo sapien
cgtgcagagctgggccgacccgaaa

SEQ ID NO: 2995186 - DNA, 25 bp, Homo sapien
tgtgctggcctgttccaggaactcg

SEQ ID NO: 2995187 - DNA, 25 bp, Homo sapien
cctgttccaggaactcggagctcat

SEQ ID NO: 2995188 - DNA, 25 bp, Homo sapien
ggcctgttccaggaactcggagctc

SEQ ID NO: 2995189 - DNA, 25 bp, Homo sapien
ggacagggtgtgctggcctgttcca

SEQ ID NO: 2995190 - DNA, 25 bp, Homo sapien
gaaagcagacatctctccccttcga

SEQ ID NO: 2995191 - DNA, 25 bp, Homo sapien
gaggcactgcatacagtggctgcac

SEQ ID NO: 2995192 - DNA, 25 bp, Homo sapien
atgaacctgcggcacatgcccggag

SEQ ID NO: 2995193 - DNA, 25 bp, Homo sapien
cgagtctggactcgggctcaggcct

SEQ ID NO: 2995194 - DNA, 25 bp, Homo sapien
gacattcctgaatatgtctcaggct

SEQ ID NO: 2995195 - DNA, 25 bp, Homo sapien
gaaactgaatccgagagaagtagaa

SEQ ID NO: 2995196 - DNA, 25 bp, Homo sapien
gaagtagaatcgttcactccctgcc

SEQ ID NO: 2995197 - DNA, 25 bp, Homo sapien
cactgtgtgcagaatcacgtgacta

SEQ ID NO: 2995198 - DNA, 25 bp, Homo sapien
ttcttcgaatcgtccagatacttgg

SEQ ID NO: 2995199 - DNA, 25 bp, Homo sapien
agatacttggagacatctcctcctc

SEQ ID NO: 2995200 - DNA, 25 bp, Homo sapien
gacgtgaagacatttcagcagacca

SEQ ID NO: 2995201 - DNA, 25 bp, Homo sapien
cagcagaccaaagtttccttcgaat

SEQ ID NO: 2995202 - DNA, 25 bp, Homo sapien
tgtgttacatccctgggtccactgg

SEQ ID NO: 2995203 - DNA, 25 bp, Homo sapien
gcagtgttggccatggtgttggtgc

SEQ ID NO: 2995204 - DNA, 25 bp, Homo sapien
gggatgtgttacatccctgggtcca

SEQ ID NO: 2995205 - DNA, 25 bp, Homo sapien
gctggctctgccgagaggcgttgga

SEQ ID NO: 2995206 - DNA, 25 bp, Homo sapien
aggtgtgacgcggcactgcgtctcc

SEQ ID NO: 2995207 - DNA, 25 bp, Homo sapien
tgtgacgcggcactgcgtctccagc

SEQ ID NO: 2995208 - DNA, 25 bp, Homo sapien
gtactgaggtgtgacgcggcactgc

SEQ ID NO: 2995209 - DNA, 25 bp, Homo sapien
actgaggtgtgacgcggcactgcgt

SEQ ID NO: 2995210 - DNA, 25 bp, Homo sapien
gggcatcatccgtagaaacaccacg

SEQ ID NO: 2995211 - DNA, 25 bp, Homo sapien
ctgcacaggagagacggcgtcaggg

SEQ ID NO: 2995212 - DNA, 25 bp, Homo sapien
ggcgtcagggcatcatccgtagaaa

SEQ ID NO: 2995213 - DNA, 25 bp, Homo sapien
gagagacggcgtcagggcatcatcc

SEQ ID NO: 2995214 - DNA, 25 bp, Homo sapien
catccgtagaaacgccacgtgggac

SEQ ID NO: 2995215 - DNA, 25 bp, Homo sapien
tagaaacgccacgtgggaccctgga

SEQ ID NO: 2995216 - DNA, 25 bp, Homo sapien
cgtagaaacgccacgtgggaccctg

SEQ ID NO: 2995217 - DNA, 25 bp, Homo sapien
tcatccgtagaaacgccacgtggga

SEQ ID NO: 2995218 - DNA, 25 bp, Homo sapien
cctcaggtagaggatcaatgtgtcc

SEQ ID NO: 2995219 - DNA, 25 bp, Homo sapien
caatgtgtccgttatgttgggtata

SEQ ID NO: 2995220 - DNA, 25 bp, Homo sapien
agcatggctgagctcctggagacga

SEQ ID NO: 2995221 - DNA, 25 bp, Homo sapien
tccacagttccaggcgctagttcca

SEQ ID NO: 2995222 - DNA, 25 bp, Homo sapien
tctacatgcatggaggcgacagtcg

SEQ ID NO: 2995223 - DNA, 25 bp, Homo sapien
ctacatgcatggaggcgacagtcgg

SEQ ID NO: 2995224 - DNA, 25 bp, Homo sapien
tgtgtctacatgcatggaggcgaca

SEQ ID NO: 2995225 - DNA, 25 bp, Homo sapien
tgtctacatgcatggaggcgacagt

SEQ ID NO: 2995226 - DNA, 25 bp, Homo sapien
ctgagcgccatgtgttcccggacac

SEQ ID NO: 2995227 - DNA, 25 bp, Homo sapien
agcgccatgtgttcccggacacggg

SEQ ID NO: 2995228 - DNA, 25 bp, Homo sapien
gagctctcactgttggcccttgcgt

SEQ ID NO: 2995229 - DNA, 25 bp, Homo sapien
gcccttgcgtagttcactgtcttcc

SEQ ID NO: 2995230 - DNA, 25 bp, Homo sapien
taaggaggtcttgtcctcaggggtc

SEQ ID NO: 2995231 - DNA, 25 bp, Homo sapien
tggtaaggaggtcttgtcctcaggg

SEQ ID NO: 2995232 - DNA, 25 bp, Homo sapien
ttggtaaggaggtcttgtcctcagg

SEQ ID NO: 2995233 - DNA, 25 bp, Homo sapien
aggaggtcttgtcctcaggggtctc

SEQ ID NO: 2995234 - DNA, 25 bp, Homo sapien
cttggcagagccgaccagcagggcc

SEQ ID NO: 2995235 - DNA, 25 bp, Homo sapien
tggagacgaccccaggtcctgattc

SEQ ID NO: 2995236 - DNA, 25 bp, Homo sapien
catggctgggtttgagccacagctc

SEQ ID NO: 2995237 - DNA, 25 bp, Homo sapien
ggcactcctatcctggttttggtca

SEQ ID NO: 2995238 - DNA, 25 bp, Homo sapien
tccagcgtgagcttccccgtgaggt

SEQ ID NO: 2995239 - DNA, 25 bp, Homo sapien
cccgtgaggtggaccaggtacacct

SEQ ID NO: 2995240 - DNA, 25 bp, Homo sapien
tggagccggccgctctccagcgtga

SEQ ID NO: 2995241 - DNA, 25 bp, Homo sapien
aatgacccctaggtgctgcgggaac

SEQ ID NO: 2995242 - DNA, 25 bp, Homo sapien
tgcccggagatacagaggtacccta

SEQ ID NO: 2995243 - DNA, 25 bp, Homo sapien
tgtgcttcgtcacagccggtgctca

SEQ ID NO: 2995244 - DNA, 25 bp, Homo sapien
tgtacaaccattgctgtgccccgag

SEQ ID NO: 2995245 - DNA, 25 bp, Homo sapien
tgggagttgggactttgtacaacca

SEQ ID NO: 2995246 - DNA, 25 bp, Homo sapien
tgttccttcgtggtagtggtgcccc

SEQ ID NO: 2995247 - DNA, 25 bp, Homo sapien
aaatggctgtggctactcttcggca

SEQ ID NO: 2995248 - DNA, 25 bp, Homo sapien
gtatacgtggttctaaaagtccgca

SEQ ID NO: 2995249 - DNA, 25 bp, Homo sapien
tggcaaatgcacgttcaaagaaaac

SEQ ID NO: 2995250 - DNA, 25 bp, Homo sapien
agccaaagtcgggtcaaccccagca

SEQ ID NO: 2995251 - DNA, 25 bp, Homo sapien
gggccagtcaaatgtgcagccaaag

SEQ ID NO: 2995252 - DNA, 25 bp, Homo sapien
atctagtcctagagctgatccaggg

SEQ ID NO: 2995253 - DNA, 25 bp, Homo sapien
gaggcaaggatgtgggcatcctttt

SEQ ID NO: 2995254 - DNA, 25 bp, Homo sapien
agagccgggatacagaccaagcaag

SEQ ID NO: 2995255 - DNA, 25 bp, Homo sapien
gggttcccatagatcccactttaca

SEQ ID NO: 2995256 - DNA, 25 bp, Homo sapien
ctgaggcatgcagagccgggataca

SEQ ID NO: 2995257 - DNA, 25 bp, Homo sapien
ttctgggtgtcccagcccgtctcgg

SEQ ID NO: 2995258 - DNA, 25 bp, Homo sapien
tgtaggggtgtgtctgcacgggtgt

SEQ ID NO: 2995259 - DNA, 25 bp, Homo sapien
ctgcacaggtgactgcaaggtgtag

SEQ ID NO: 2995260 - DNA, 25 bp, Homo sapien
acaggtgtaggggtgtgtctgcacg

SEQ ID NO: 2995261 - DNA, 25 bp, Homo sapien
cacaggtgactgcaaggtgtagggg

SEQ ID NO: 2995262 - DNA, 25 bp, Homo sapien
gcggacggcggctcttcctggctag

SEQ ID NO: 2995263 - DNA, 25 bp, Homo sapien
gtgcggacggcggctcttcctggct

SEQ ID NO: 2995264 - DNA, 25 bp, Homo sapien
gtcccggtgcggacggcggctcttc

SEQ ID NO: 2995265 - DNA, 25 bp, Homo sapien
ctctccggtcccggtgcggacggcg

SEQ ID NO: 2995266 - DNA, 25 bp, Homo sapien
ccgctgggccgcctcagcccgcctc

SEQ ID NO: 2995267 - DNA, 25 bp, Homo sapien
ctgggccgcctcagcccgcctctcg

SEQ ID NO: 2995268 - DNA, 25 bp, Homo sapien
tgggccgcctcagcccgcctctcgc

SEQ ID NO: 2995269 - DNA, 25 bp, Homo sapien
ccgccgctgggccgcctcagcccgc

SEQ ID NO: 2995270 - DNA, 25 bp, Homo sapien
cacatttggcacctcactggaggga

SEQ ID NO: 2995271 - DNA, 25 bp, Homo sapien
tagctgcccctccaaagtaaagtgc

SEQ ID NO: 2995272 - DNA, 25 bp, Homo sapien
gctgggctgggatccatagagccct

SEQ ID NO: 2995273 - DNA, 25 bp, Homo sapien
cgagcctggcataagggtcactgca

SEQ ID NO: 2995274 - DNA, 25 bp, Homo sapien
gcatgcttcccctcaggcgtctgga

SEQ ID NO: 2995275 - DNA, 25 bp, Homo sapien
cctggaacgccatgccaggtggctc

SEQ ID NO: 2995276 - DNA, 25 bp, Homo sapien
aggtggctcgaaatgccgtcctgca

SEQ ID NO: 2995277 - DNA, 25 bp, Homo sapien
gcacagagggtcctgaacctgaccc

SEQ ID NO: 2995278 - DNA, 25 bp, Homo sapien
gcttgtggcttccacgtgacgctca

SEQ ID NO: 2995279 - DNA, 25 bp, Homo sapien
gtgcttgtggcttccacgtgacgct

SEQ ID NO: 2995280 - DNA, 25 bp, Homo sapien
gagagcacagcatgttctgagacct

SEQ ID NO: 2995281 - DNA, 25 bp, Homo sapien
catgttctgagacctgaggtgcttg

SEQ ID NO: 2995282 - DNA, 25 bp, Homo sapien
ccccagcttgtttggggttgcaagt

SEQ ID NO: 2995283 - DNA, 25 bp, Homo sapien
taaacaggccatgcaaggccaagga

SEQ ID NO: 2995284 - DNA, 25 bp, Homo sapien
tggggttgcaagtttgcacttttaa

SEQ ID NO: 2995285 - DNA, 25 bp, Homo sapien
tatgcacttgaggaatgaaactggg

SEQ ID NO: 2995286 - DNA, 25 bp, Homo sapien
ctaagatgacagtatacagcagggt

SEQ ID NO: 2995287 - DNA, 25 bp, Homo sapien
ggacacaccaccttaggacacactg

SEQ ID NO: 2995288 - DNA, 25 bp, Homo sapien
taggtcccgctcatactggtattgt

SEQ ID NO: 2995289 - DNA, 25 bp, Homo sapien
aaaaatatatgcactgaggccgggc

SEQ ID NO: 2995290 - DNA, 25 bp, Homo sapien
acaccggatgcccccaccacagtgc

SEQ ID NO: 2995291 - DNA, 25 bp, Homo sapien
ctggacaccggatgcccccaccaca

SEQ ID NO: 2995292 - DNA, 25 bp, Homo sapien
tggacaccggatgcccccaccacag

SEQ ID NO: 2995293 - DNA, 25 bp, Homo sapien
gacaccggatgcccccaccacagtg

SEQ ID NO: 2995294 - DNA, 25 bp, Homo sapien
gagtcaagttggaacccgaggtcag

SEQ ID NO: 2995295 - DNA, 25 bp, Homo sapien
catttctgggaaacccgggagcagc

SEQ ID NO: 2995296 - DNA, 25 bp, Homo sapien
tggatgatgacaaggcagacacggc

SEQ ID NO: 2995297 - DNA, 25 bp, Homo sapien
tgggtggtctagtccaaccggctca

SEQ ID NO: 2995298 - DNA, 25 bp, Homo sapien
aggcgggcagtctctggcggtgagg

SEQ ID NO: 2995299 - DNA, 25 bp, Homo sapien
ggcgggcagtctctggcggtgaggg

SEQ ID NO: 2995300 - DNA, 25 bp, Homo sapien
cgggcagtctctggcggtgaggggc

SEQ ID NO: 2995301 - DNA, 25 bp, Homo sapien
gaggcgggcagtctctggcggtgag

SEQ ID NO: 2995302 - DNA, 25 bp, Homo sapien
taaatctaggtggagcgtgccttgc

SEQ ID NO: 2995303 - DNA, 25 bp, Homo sapien
gtctctcccggtctaaatctaggtg

SEQ ID NO: 2995304 - DNA, 25 bp, Homo sapien
tctaggtggagcgtgccttgctctg

SEQ ID NO: 2995305 - DNA, 25 bp, Homo sapien
cggtctaaatctaggtggagcgtgc

SEQ ID NO: 2995306 - DNA, 25 bp, Homo sapien
agcagacggcacctccggtccccag

SEQ ID NO: 2995307 - DNA, 25 bp, Homo sapien
cagcagacggcacctccggtcccca

SEQ ID NO: 2995308 - DNA, 25 bp, Homo sapien
gaacatcgacctggccgtcatttct

SEQ ID NO: 2995309 - DNA, 25 bp, Homo sapien
ctcgctctggctgacccgtgctggg

SEQ ID NO: 2995310 - DNA, 25 bp, Homo sapien
gctcgctctggctgacccgtgctgg

SEQ ID NO: 2995311 - DNA, 25 bp, Homo sapien
ccgacaggaacatcgacctggccgt

SEQ ID NO: 2995312 - DNA, 25 bp, Homo sapien
gcagtggcttttttgggctcggcca

SEQ ID NO: 2995313 - DNA, 25 bp, Homo sapien
gcctcctgcaccctcacagctggct

SEQ ID NO: 2995314 - DNA, 25 bp, Homo sapien
ggtttggagggaggctagcagctgt

SEQ ID NO: 2995315 - DNA, 25 bp, Homo sapien
tgggctcggccaggactcagattac

SEQ ID NO: 2995316 - DNA, 25 bp, Homo sapien
ggggagggacacgagctgggtggcc

SEQ ID NO: 2995317 - DNA, 25 bp, Homo sapien
gctgcccggcacccacacttgtggc

SEQ ID NO: 2995318 - DNA, 25 bp, Homo sapien
ctgcccggcacccacacttgtggcc

SEQ ID NO: 2995319 - DNA, 25 bp, Homo sapien
gcccggcacccacacttgtggcccc

SEQ ID NO: 2995320 - DNA, 25 bp, Homo sapien
ggccaggagggttggttccgcctca

SEQ ID NO: 2995321 - DNA, 25 bp, Homo sapien
aagccagtgatgacgaaacagccga

SEQ ID NO: 2995322 - DNA, 25 bp, Homo sapien
cagccgccgtcaggggccttgacgc

SEQ ID NO: 2995323 - DNA, 25 bp, Homo sapien
aaacagccgaagagcacggcccagc

SEQ ID NO: 2995324 - DNA, 25 bp, Homo sapien
gccttgacgcctgtggggccctcgt

SEQ ID NO: 2995325 - DNA, 25 bp, Homo sapien
tgtgtcgctgtagccgatcccaaac

SEQ ID NO: 2995326 - DNA, 25 bp, Homo sapien
ccgatcccaaactcctgtatgagct

SEQ ID NO: 2995327 - DNA, 25 bp, Homo sapien
caggctgtgtcgctgtagccgatcc

SEQ ID NO: 2995328 - DNA, 25 bp, Homo sapien
tgtagccgatcccaaactcctgtat

SEQ ID NO: 2995329 - DNA, 25 bp, Homo sapien
ttggccccgtggagagcatgttgct

SEQ ID NO: 2995330 - DNA, 25 bp, Homo sapien
gagcgcaggccatgatgacacgtga

SEQ ID NO: 2995331 - DNA, 25 bp, Homo sapien
ccttttcaggaacggctctcaggag

SEQ ID NO: 2995332 - DNA, 25 bp, Homo sapien
aaatacagccgacccgtttggacag

SEQ ID NO: 2995333 - DNA, 25 bp, Homo sapien
catgcccagcgacgcaaagagaccc

SEQ ID NO: 2995334 - DNA, 25 bp, Homo sapien
aagcggttcacgcacacactgcaga

SEQ ID NO: 2995335 - DNA, 25 bp, Homo sapien
aaagagaccccccacaagcatgacg

SEQ ID NO: 2995336 - DNA, 25 bp, Homo sapien
acaagcatgacgggccggcagccaa

SEQ ID NO: 2995337 - DNA, 25 bp, Homo sapien
atgctccggcaaaaggacgcagcca

SEQ ID NO: 2995338 - DNA, 25 bp, Homo sapien
tgatgctccggcaaaaggacgcagc

SEQ ID NO: 2995339 - DNA, 25 bp, Homo sapien
ctggatgatgctccggcaaaaggac

SEQ ID NO: 2995340 - DNA, 25 bp, Homo sapien
gatgatgctccggcaaaaggacgca

SEQ ID NO: 2995341 - DNA, 25 bp, Homo sapien
ggtcccggaagacgctcaggtctag

SEQ ID NO: 2995342 - DNA, 25 bp, Homo sapien
caatggcactggagaacttgtgggt

SEQ ID NO: 2995343 - DNA, 25 bp, Homo sapien
tccgcgaggccgttgaagaacatgg

SEQ ID NO: 2995344 - DNA, 25 bp, Homo sapien
cggccgcgcgaagatgtcaatgaag

SEQ ID NO: 2995345 - DNA, 25 bp, Homo sapien
tcagggttggtccagcacagtgcac

SEQ ID NO: 2995346 - DNA, 25 bp, Homo sapien
cgctagccccagcagaatcagggtt

SEQ ID NO: 2995347 - DNA, 25 bp, Homo sapien
tcggtgtctcagcacgcaagggtca

SEQ ID NO: 2995348 - DNA, 25 bp, Homo sapien
caaaagccggctgttgggttgcctg

SEQ ID NO: 2995349 - DNA, 25 bp, Homo sapien
gaagaagttgcccagcagcaaaatc

SEQ ID NO: 2995350 - DNA, 25 bp, Homo sapien
ccccgccaggatgaacacgtacatg

SEQ ID NO: 2995351 - DNA, 25 bp, Homo sapien
tgaacacgtacatgtagacgtgggt

SEQ ID NO: 2995352 - DNA, 25 bp, Homo sapien
acgtgggtcgcatccaggagtttgc

SEQ ID NO: 2995353 - DNA, 25 bp, Homo sapien
tggcttcaccgcagatccactctgg

SEQ ID NO: 2995354 - DNA, 25 bp, Homo sapien
cctcaaaacactgatcgggcgacga

SEQ ID NO: 2995355 - DNA, 25 bp, Homo sapien
taaagtcacgttgtctcgaagcatg

SEQ ID NO: 2995356 - DNA, 25 bp, Homo sapien
aaataaatagcaagcgttgccggct

SEQ ID NO: 2995357 - DNA, 25 bp, Homo sapien
aggccccatgtgagcccagggtagg

SEQ ID NO: 2995358 - DNA, 25 bp, Homo sapien
ccatgtgagcccagggtaggacggg

SEQ ID NO: 2995359 - DNA, 25 bp, Homo sapien
tcttccaggggtggaaagagctgtc

SEQ ID NO: 2995360 - DNA, 25 bp, Homo sapien
ccacccacacgcaggtttatttcca

SEQ ID NO: 2995361 - DNA, 25 bp, Homo sapien
ccacatactcctaggaaaccgttgg

SEQ ID NO: 2995362 - DNA, 25 bp, Homo sapien
catcagcagacgtgcgagtcaggac

SEQ ID NO: 2995363 - DNA, 25 bp, Homo sapien
cagacgtgcgagtcaggacacaggc

SEQ ID NO: 2995364 - DNA, 25 bp, Homo sapien
gccaggccatcagcagacgtgcgag

SEQ ID NO: 2995365 - DNA, 25 bp, Homo sapien
ctctgtaagcccaggtcactcctga

SEQ ID NO: 2995366 - DNA, 25 bp, Homo sapien
ccctgggtgtgagcagtcccctggt

SEQ ID NO: 2995367 - DNA, 25 bp, Homo sapien
tgtaagcccaggtcactcctgaggt

SEQ ID NO: 2995368 - DNA, 25 bp, Homo sapien
tccagaggcggcaacccctgggtgt

SEQ ID NO: 2995369 - DNA, 25 bp, Homo sapien
tcctgaatcactgagcacggtccct

SEQ ID NO: 2995370 - DNA, 25 bp, Homo sapien
cacggtagacctgaaccacttttgg

SEQ ID NO: 2995371 - DNA, 25 bp, Homo sapien
gaggtagtagaactcagcgcccact

SEQ ID NO: 2995372 - DNA, 25 bp, Homo sapien
tgtgaagaagtctgtgcgccctctg

SEQ ID NO: 2995373 - DNA, 25 bp, Homo sapien
gcttcaccatagacccctcggaagg

SEQ ID NO: 2995374 - DNA, 25 bp, Homo sapien
agcttcaccatagacccctcggaag

SEQ ID NO: 2995375 - DNA, 25 bp, Homo sapien
tggtttagacgctgaaaagagcagg

SEQ ID NO: 2995376 - DNA, 25 bp, Homo sapien
cctcaggcatggtttagacgctgaa

SEQ ID NO: 2995377 - DNA, 25 bp, Homo sapien
gagcggacagagttagagggcttgt

SEQ ID NO: 2995378 - DNA, 25 bp, Homo sapien
gggcatgagcggacagagttagagg

SEQ ID NO: 2995379 - DNA, 25 bp, Homo sapien
ctgcgggggcatgagcggacagagt

SEQ ID NO: 2995380 - DNA, 25 bp, Homo sapien
catgagcggacagagttagagggct

SEQ ID NO: 2995381 - DNA, 25 bp, Homo sapien
gcaggggctgcatgtcctcaaggcc

SEQ ID NO: 2995382 - DNA, 25 bp, Homo sapien
ggcaagacccaagttccagttcctg

SEQ ID NO: 2995383 - DNA, 25 bp, Homo sapien
cggcaagacccaagttccagttcct

SEQ ID NO: 2995384 - DNA, 25 bp, Homo sapien
ctgcatgtcctcaaggcctgttcca

SEQ ID NO: 2995385 - DNA, 25 bp, Homo sapien
gccccagactgagacaccgtgtggg

SEQ ID NO: 2995386 - DNA, 25 bp, Homo sapien
ttgctgccccagactgagacaccgt

SEQ ID NO: 2995387 - DNA, 25 bp, Homo sapien
gggcctcactgtggccgtgggtgag

SEQ ID NO: 2995388 - DNA, 25 bp, Homo sapien
ctcactgtggccgtgggtgaggctc

SEQ ID NO: 2995389 - DNA, 25 bp, Homo sapien
tgccatagggccgtggtgctcaggg

SEQ ID NO: 2995390 - DNA, 25 bp, Homo sapien
cgcctggggtgagcgcatgtccctt

SEQ ID NO: 2995391 - DNA, 25 bp, Homo sapien
gacggttctggagagtccctgcctt

SEQ ID NO: 2995392 - DNA, 25 bp, Homo sapien
ctgtcgcttgagctgttgaagccca

SEQ ID NO: 2995393 - DNA, 25 bp, Homo sapien
tccgcagcacttgggcggtagccag

SEQ ID NO: 2995394 - DNA, 25 bp, Homo sapien
cacgatggacgatgttccctttgga

SEQ ID NO: 2995395 - DNA, 25 bp, Homo sapien
tgttcgtgggcacttcggctggacc

SEQ ID NO: 2995396 - DNA, 25 bp, Homo sapien
ctctagggcttcgaaggtgtgcacc

SEQ ID NO: 2995397 - DNA, 25 bp, Homo sapien
tgactctcccaaccggacccagaac

SEQ ID NO: 2995398 - DNA, 25 bp, Homo sapien
ccggacccagaaccttcacggccag

SEQ ID NO: 2995399 - DNA, 25 bp, Homo sapien
cccagaaccttcacggccagaaagt

SEQ ID NO: 2995400 - DNA, 25 bp, Homo sapien
ggacccagaaccttcacggccagaa

SEQ ID NO: 2995401 - DNA, 25 bp, Homo sapien
actccgtctgtatgaatgcctgtgc

SEQ ID NO: 2995402 - DNA, 25 bp, Homo sapien
gtgttaccaggcaaagcactgcgcg

SEQ ID NO: 2995403 - DNA, 25 bp, Homo sapien
gaggctttgagaccctagcaggaca

SEQ ID NO: 2995404 - DNA, 25 bp, Homo sapien
tcccttgggagaggactgtgaaccg

SEQ ID NO: 2995405 - DNA, 25 bp, Homo sapien
cctcggagagcagttagggaccgca

SEQ ID NO: 2995406 - DNA, 25 bp, Homo sapien
cttgaggccctcggagagcagttag

SEQ ID NO: 2995407 - DNA, 25 bp, Homo sapien
tcctcccgtaattgacatgcctgct

SEQ ID NO: 2995408 - DNA, 25 bp, Homo sapien
cgtaattgacatgcctgctgtcagg

SEQ ID NO: 2995409 - DNA, 25 bp, Homo sapien
gatctcaagggtgtgtgctgtgttt

SEQ ID NO: 2995410 - DNA, 25 bp, Homo sapien
tctcatcaaaagtccgtggtgtgtg

SEQ ID NO: 2995411 - DNA, 25 bp, Homo sapien
tcttcaacctgattttggcgtctca

SEQ ID NO: 2995412 - DNA, 25 bp, Homo sapien
acaggctggcttggagttagtgtat

SEQ ID NO: 2995413 - DNA, 25 bp, Homo sapien
gagagagaattgcagagaatcagac

SEQ ID NO: 2995414 - DNA, 25 bp, Homo sapien
tccctgacgattccactgtaactac

SEQ ID NO: 2995415 - DNA, 25 bp, Homo sapien
tggtggccgccctgtactccctgac

SEQ ID NO: 2995416 - DNA, 25 bp, Homo sapien
gcagagagagaattgcagagaatca

SEQ ID NO: 2995417 - DNA, 25 bp, Homo sapien
ctgcggccccccacgtgaactcggt

SEQ ID NO: 2995418 - DNA, 25 bp, Homo sapien
gaaacatactaaacggacagactcc

SEQ ID NO: 2995419 - DNA, 25 bp, Homo sapien
ccagcgacgctcgtgggggaaacat

SEQ ID NO: 2995420 - DNA, 25 bp, Homo sapien
agcgacgctcgtgggggaaacatac

SEQ ID NO: 2995421 - DNA, 25 bp, Homo sapien
gttaacaccgggagctctccaggcc

SEQ ID NO: 2995422 - DNA, 25 bp, Homo sapien
gtcgtgcaccgatgagaactctcct

SEQ ID NO: 2995423 - DNA, 25 bp, Homo sapien
cctgtgctttggctccgacagattc

SEQ ID NO: 2995424 - DNA, 25 bp, Homo sapien
cagattcctggtcgggtggcttcca

SEQ ID NO: 2995425 - DNA, 25 bp, Homo sapien
ccagtggtcttcagtctgtcgtgca

SEQ ID NO: 2995426 - DNA, 25 bp, Homo sapien
cgtcttcctgtcactcgttctgctg

SEQ ID NO: 2995427 - DNA, 25 bp, Homo sapien
gctccgcgggcaccttgcttgcatg

SEQ ID NO: 2995428 - DNA, 25 bp, Homo sapien
aagggaggcaggagcacccgtctcc

SEQ ID NO: 2995429 - DNA, 25 bp, Homo sapien
actcggatccttcgaccctgccgag

SEQ ID NO: 2995430 - DNA, 25 bp, Homo sapien
aatgtgttgacaggaactgcttttc

SEQ ID NO: 2995431 - DNA, 25 bp, Homo sapien
gaaatgtgttgacaggaactgcttt

SEQ ID NO: 2995432 - DNA, 25 bp, Homo sapien
ggaaatgtgttgacaggaactgctt

SEQ ID NO: 2995433 - DNA, 25 bp, Homo sapien
tgtgttgacaggaactgcttttcat

SEQ ID NO: 2995434 - DNA, 25 bp, Homo sapien
gcttgcgcttctgtcgggtctgtgc

SEQ ID NO: 2995435 - DNA, 25 bp, Homo sapien
ggagacccgctgcagttttcacact

SEQ ID NO: 2995436 - DNA, 25 bp, Homo sapien
cgcttctgtcgggtctgtgccgctg

SEQ ID NO: 2995437 - DNA, 25 bp, Homo sapien
gccgtcggtgcatggccggcgtcca

SEQ ID NO: 2995438 - DNA, 25 bp, Homo sapien
tctgtattaactcctccagccgcag

SEQ ID NO: 2995439 - DNA, 25 bp, Homo sapien
gtccacgcagcttcgtctgtattaa

SEQ ID NO: 2995440 - DNA, 25 bp, Homo sapien
agccgtcttgtccacgcagcttcgt

SEQ ID NO: 2995441 - DNA, 25 bp, Homo sapien
ggtctctgcccagccgtcttgtcca

SEQ ID NO: 2995442 - DNA, 25 bp, Homo sapien
gagctttggaacagagtgaccccag

SEQ ID NO: 2995443 - DNA, 25 bp, Homo sapien
gccatgccagcttttctagtcgcct

SEQ ID NO: 2995444 - DNA, 25 bp, Homo sapien
cgtgactgcgttccgtgtgccgttg

SEQ ID NO: 2995445 - DNA, 25 bp, Homo sapien
acttgagttgccttgtctgcggtcg

SEQ ID NO: 2995446 - DNA, 25 bp, Homo sapien
cttcttgtggggtgcagagcggcgg

SEQ ID NO: 2995447 - DNA, 25 bp, Homo sapien
gccccacccatgggagcttgcaggt

SEQ ID NO: 2995448 - DNA, 25 bp, Homo sapien
gagcggcggcagtccgctgcccagt

SEQ ID NO: 2995449 - DNA, 25 bp, Homo sapien
ggtagagtgaggcttcttctgctct

SEQ ID NO: 2995450 - DNA, 25 bp, Homo sapien
tctcccatcggaaggcagcactggg

SEQ ID NO: 2995451 - DNA, 25 bp, Homo sapien
caccacggcaagtagctgctcgtct

SEQ ID NO: 2995452 - DNA, 25 bp, Homo sapien
tgctcgtctcccatcggaaggcagc

SEQ ID NO: 2995453 - DNA, 25 bp, Homo sapien
ccacctcagaatagcattcctttcg

SEQ ID NO: 2995454 - DNA, 25 bp, Homo sapien
cggtctgtggacctggttgaggcaa

SEQ ID NO: 2995455 - DNA, 25 bp, Homo sapien
tctgtggacctggttgaggcaagga

SEQ ID NO: 2995456 - DNA, 25 bp, Homo sapien
ggtctgtggacctggttgaggcaag

SEQ ID NO: 2995457 - DNA, 25 bp, Homo sapien
ctgtggacctggttgaggcaaggat

SEQ ID NO: 2995458 - DNA, 25 bp, Homo sapien
tgattccagaagaggagtgggcacc

SEQ ID NO: 2995459 - DNA, 25 bp, Homo sapien
cccgtcctgagaggcaagtgaggct

SEQ ID NO: 2995460 - DNA, 25 bp, Homo sapien
tcatccagaggcccgtcctgagagg

SEQ ID NO: 2995461 - DNA, 25 bp, Homo sapien
agtgggcaccactctcatccagagg

SEQ ID NO: 2995462 - DNA, 25 bp, Homo sapien
cggcgaggatgtgcgtctcccctgc

SEQ ID NO: 2995463 - DNA, 25 bp, Homo sapien
gaagactcaggagggcctgtcccat

SEQ ID NO: 2995464 - DNA, 25 bp, Homo sapien
caggttttcttagtgcttgagaaga

SEQ ID NO: 2995465 - DNA, 25 bp, Homo sapien
ccatcctgctgggatcaggttttct

SEQ ID NO: 2995466 - DNA, 25 bp, Homo sapien
ggcaggaacccgcagctggctctta

SEQ ID NO: 2995467 - DNA, 25 bp, Homo sapien
cgcagctggctcttaggccctcgtt

SEQ ID NO: 2995468 - DNA, 25 bp, Homo sapien
gctcttaggccctcgttttccatat

SEQ ID NO: 2995469 - DNA, 25 bp, Homo sapien
aggaacccgcagctggctcttaggc

SEQ ID NO: 2995470 - DNA, 25 bp, Homo sapien
tgctgaccggacttggacagcctcg

SEQ ID NO: 2995471 - DNA, 25 bp, Homo sapien
tcgtgtcttgatgtgcggctggctc

SEQ ID NO: 2995472 - DNA, 25 bp, Homo sapien
ggcacttgcgcatcagttcctgtga

SEQ ID NO: 2995473 - DNA, 25 bp, Homo sapien
cgcttggctgacaaagactagggaa

SEQ ID NO: 2995474 - DNA, 25 bp, Homo sapien
ggttttactgcacgtttctaattca

SEQ ID NO: 2995475 - DNA, 25 bp, Homo sapien
gattttggcttcgtggttattttga

SEQ ID NO: 2995476 - DNA, 25 bp, Homo sapien
agagaccaaagatgcagggattttg

SEQ ID NO: 2995477 - DNA, 25 bp, Homo sapien
gctgcgtcacgagaatgggtccctt

SEQ ID NO: 2995478 - DNA, 25 bp, Homo sapien
gcgttttgacgacaagcctgactac

SEQ ID NO: 2995479 - DNA, 25 bp, Homo sapien
aaatttgtaagtcgcactgccagca

SEQ ID NO: 2995480 - DNA, 25 bp, Homo sapien
taagacgccattagggaacgcagag

SEQ ID NO: 2995481 - DNA, 25 bp, Homo sapien
caggctaggccagcgttttccgtaa

SEQ ID NO: 2995482 - DNA, 25 bp, Homo sapien
tacgaaaggattagcgagaagaaaa

SEQ ID NO: 2995483 - DNA, 25 bp, Homo sapien
gacagaaatacgaaaggattagcga

SEQ ID NO: 2995484 - DNA, 25 bp, Homo sapien
gaaatacgaaaggattagcgagaag

SEQ ID NO: 2995485 - DNA, 25 bp, Homo sapien
ccaagagacagaaatacgaaaggat

SEQ ID NO: 2995486 - DNA, 25 bp, Homo sapien
gcttctcgaggctccggcggctcag

SEQ ID NO: 2995487 - DNA, 25 bp, Homo sapien
cttctcgaggctccggcggctcagc

SEQ ID NO: 2995488 - DNA, 25 bp, Homo sapien
gcttgtcgaggctccgatggctcag

SEQ ID NO: 2995489 - DNA, 25 bp, Homo sapien
ctcactggcttgtcgaggctccgat

SEQ ID NO: 2995490 - DNA, 25 bp, Homo sapien
tgactggcttctcgaggcccccggc

SEQ ID NO: 2995491 - DNA, 25 bp, Homo sapien
gtcgaggctccgatggctcagctca

SEQ ID NO: 2995492 - DNA, 25 bp, Homo sapien
tagagacaagggtctccctttgtta

SEQ ID NO: 2995493 - DNA, 25 bp, Homo sapien
gacaagggtctccctttgttatcca

SEQ ID NO: 2995494 - DNA, 25 bp, Homo sapien
caagggtctccctttgttatccagg

SEQ ID NO: 2995495 - DNA, 25 bp, Homo sapien
gagacaagggtctccctttgttatc

SEQ ID NO: 2995496 - DNA, 25 bp, Homo sapien
tgacttttcatacgtaacgtcttgg

SEQ ID NO: 2995497 - DNA, 25 bp, Homo sapien
tgtttttaccagcatgtgttttcca

SEQ ID NO: 2995498 - DNA, 25 bp, Homo sapien
taacgtcttgggtgaagtgtccagg

SEQ ID NO: 2995499 - DNA, 25 bp, Homo sapien
tcttcttgtggtcgttgacttttca

SEQ ID NO: 2995500 - DNA, 25 bp, Homo sapien
tccactttggatgccggacattgag

SEQ ID NO: 2995501 - DNA, 25 bp, Homo sapien
cacaagccgtatgtgtgtagagcca

SEQ ID NO: 2995502 - DNA, 25 bp, Homo sapien
tatagttgcggatccagtgctgtga

SEQ ID NO: 2995503 - DNA, 25 bp, Homo sapien
aaggtttatccaggccgttcacaag

SEQ ID NO: 2995504 - DNA, 25 bp, Homo sapien
gcagacgtctgcatattgatacata

SEQ ID NO: 2995505 - DNA, 25 bp, Homo sapien
tccaaggtggttatgtagatttcca

SEQ ID NO: 2995506 - DNA, 25 bp, Homo sapien
ggtacgtgcaaatgtccagttctgc

SEQ ID NO: 2995507 - DNA, 25 bp, Homo sapien
cagtggctgttgcttggtacgtgca

SEQ ID NO: 2995508 - DNA, 25 bp, Homo sapien
attctctaatgccatggatgacggg

SEQ ID NO: 2995509 - DNA, 25 bp, Homo sapien
cggggtacattgttacttacagcta

SEQ ID NO: 2995510 - DNA, 25 bp, Homo sapien
gatggctagagttcgggaggttaag

SEQ ID NO: 2995511 - DNA, 25 bp, Homo sapien
caggaggatggctagagttcgggag

SEQ ID NO: 2995512 - DNA, 25 bp, Homo sapien
tagcagtaagtccatagagcacaag

SEQ ID NO: 2995513 - DNA, 25 bp, Homo sapien
gcagccttggttctcttttcaaacc

SEQ ID NO: 2995514 - DNA, 25 bp, Homo sapien
tggttctcttttcaaacccattggc

SEQ ID NO: 2995515 - DNA, 25 bp, Homo sapien
ggcttcacttgttcctgcaaaatca

SEQ ID NO: 2995516 - DNA, 25 bp, Homo sapien
cagatgagagtggagcatgtcttca

SEQ ID NO: 2995517 - DNA, 25 bp, Homo sapien
tatccccacgcatatgtttagctac

SEQ ID NO: 2995518 - DNA, 25 bp, Homo sapien
ttcacagatgagagtggagcatgtc

SEQ ID NO: 2995519 - DNA, 25 bp, Homo sapien
tggccttgtccacccgatttttatc

SEQ ID NO: 2995520 - DNA, 25 bp, Homo sapien
tgaattcactttgagactaaaccgg

SEQ ID NO: 2995521 - DNA, 25 bp, Homo sapien
gccatcgcgcccgtcagatactgta

SEQ ID NO: 2995522 - DNA, 25 bp, Homo sapien
caaaaggcctaattctggtggtggt

SEQ ID NO: 2995523 - DNA, 25 bp, Homo sapien
cgcccgtcagatactgtaaagatct

SEQ ID NO: 2995524 - DNA, 25 bp, Homo sapien
gagtccagctcttgcgagttccctg

SEQ ID NO: 2995525 - DNA, 25 bp, Homo sapien
aaggctccgcggcacatttgtaggt

SEQ ID NO: 2995526 - DNA, 25 bp, Homo sapien
tctgttagcccttttgtcacgggaa

SEQ ID NO: 2995527 - DNA, 25 bp, Homo sapien
ccatgaagcgtgtgtctcaacagca

SEQ ID NO: 2995528 - DNA, 25 bp, Homo sapien
agaagaggttgccatcaagcttgaa

SEQ ID NO: 2995529 - DNA, 25 bp, Homo sapien
caggtaattcctgttgtggttttct

SEQ ID NO: 2995530 - DNA, 25 bp, Homo sapien
ttctttgccaaggtacggacattgc

SEQ ID NO: 2995531 - DNA, 25 bp, Homo sapien
gtacggacattgctgcaggagaaga

SEQ ID NO: 2995532 - DNA, 25 bp, Homo sapien
tctgcttttcatcagggaaccttat

SEQ ID NO: 2995533 - DNA, 25 bp, Homo sapien
tggtcactggcggtgacccggtggt

SEQ ID NO: 2995534 - DNA, 25 bp, Homo sapien
ggcggtgacccggtggtggcgattc

SEQ ID NO: 2995535 - DNA, 25 bp, Homo sapien
aagtgacgttcttaaatctagaatg

SEQ ID NO: 2995536 - DNA, 25 bp, Homo sapien
agagtctctgttgatagtaagtgac

SEQ ID NO: 2995537 - DNA, 25 bp, Homo sapien
accttggtgtcggttccacaggagg

SEQ ID NO: 2995538 - DNA, 25 bp, Homo sapien
gtgtcggttccacaggagggctggc

SEQ ID NO: 2995539 - DNA, 25 bp, Homo sapien
gggcgaccttggtgtcggttccaca

SEQ ID NO: 2995540 - DNA, 25 bp, Homo sapien
cgaccttggtgtcggttccacagga

SEQ ID NO: 2995541 - DNA, 25 bp, Homo sapien
caggccccagagagttgccatcctc

SEQ ID NO: 2995542 - DNA, 25 bp, Homo sapien
tgcccagcaggtgacgaggtccctg

SEQ ID NO: 2995543 - DNA, 25 bp, Homo sapien
aggccccagagagttgccatcctca

SEQ ID NO: 2995544 - DNA, 25 bp, Homo sapien
ggccccagagagttgccatcctcac

SEQ ID NO: 2995545 - DNA, 25 bp, Homo sapien
gtttgttttgaatctgacacccagg

SEQ ID NO: 2995546 - DNA, 25 bp, Homo sapien
acaacccagacaacctggtgatctg

SEQ ID NO: 2995547 - DNA, 25 bp, Homo sapien
gtgatctgcgtgtcaccaggttttg

SEQ ID NO: 2995548 - DNA, 25 bp, Homo sapien
ttgttttgaatctgacacccagggc

SEQ ID NO: 2995549 - DNA, 25 bp, Homo sapien
gctgctgaacttgagggacgtaatt

SEQ ID NO: 2995550 - DNA, 25 bp, Homo sapien
aacacggactgaggaaagccctgtc

SEQ ID NO: 2995551 - DNA, 25 bp, Homo sapien
tcaagcagttcttccgcatcaacct

SEQ ID NO: 2995552 - DNA, 25 bp, Homo sapien
ggactaacattaactgatacccaaa

SEQ ID NO: 2995553 - DNA, 25 bp, Homo sapien
aatgtgcacaagcatcttttgggag

SEQ ID NO: 2995554 - DNA, 25 bp, Homo sapien
tccacctgttacctggatggactga

SEQ ID NO: 2995555 - DNA, 25 bp, Homo sapien
gaagcacacgtttttcccctcactg

SEQ ID NO: 2995556 - DNA, 25 bp, Homo sapien
gatggactgacttcataatgtgcac

SEQ ID NO: 2995557 - DNA, 25 bp, Homo sapien
gagggcaggagcgaatcgggccgcc

SEQ ID NO: 2995558 - DNA, 25 bp, Homo sapien
gcaggagcgaatcgggccgccgccg

SEQ ID NO: 2995559 - DNA, 25 bp, Homo sapien
agggcaggagcgaatcgggccgccg

SEQ ID NO: 2995560 - DNA, 25 bp, Homo sapien
ggagggcaggagcgaatcgggccgc

SEQ ID NO: 2995561 - DNA, 25 bp, Homo sapien
agcggcgccgcctcccagagttcag

SEQ ID NO: 2995562 - DNA, 25 bp, Homo sapien
aggaaagcgatggtgaaagcggggc

SEQ ID NO: 2995563 - DNA, 25 bp, Homo sapien
tgggagcggcggggcgacaggaaag

SEQ ID NO: 2995564 - DNA, 25 bp, Homo sapien
cggcgccgcctcccagagttcagac

SEQ ID NO: 2995565 - DNA, 25 bp, Homo sapien
cggcgctcggactgtcccatccgcc

SEQ ID NO: 2995566 - DNA, 25 bp, Homo sapien
gcggcgctcggactgtcccatccgc

SEQ ID NO: 2995567 - DNA, 25 bp, Homo sapien
ctgtcccatccgccccgtattgagg

SEQ ID NO: 2995568 - DNA, 25 bp, Homo sapien
gtcccatccgccccgtattgaggcg

SEQ ID NO: 2995569 - DNA, 25 bp, Homo sapien
aagatccgagtccatccgcggcggg

SEQ ID NO: 2995570 - DNA, 25 bp, Homo sapien
ggcccggaagatccgagtccatccg

SEQ ID NO: 2995571 - DNA, 25 bp, Homo sapien
ttaggcccggaagatccgagtccat

SEQ ID NO: 2995572 - DNA, 25 bp, Homo sapien
ccggaagatccgagtccatccgcgg

SEQ ID NO: 2995573 - DNA, 25 bp, Homo sapien
tggaaggggctggcggcccgaggtc

SEQ ID NO: 2995574 - DNA, 25 bp, Homo sapien
acgtggaaggggctggcggcccgag

SEQ ID NO: 2995575 - DNA, 25 bp, Homo sapien
ctgcacgtggaaggggctggcggcc

SEQ ID NO: 2995576 - DNA, 25 bp, Homo sapien
gcacgtggaaggggctggcggcccg

SEQ ID NO: 2995577 - DNA, 25 bp, Homo sapien
ggacacacgaaaagcccccgcgaga

SEQ ID NO: 2995578 - DNA, 25 bp, Homo sapien
gacatctcgggggacacacgaaaag

SEQ ID NO: 2995579 - DNA, 25 bp, Homo sapien
acgaaaagcccccgcgagagcagca

SEQ ID NO: 2995580 - DNA, 25 bp, Homo sapien
catctcgggggacacacgaaaagcc

SEQ ID NO: 2995581 - DNA, 25 bp, Homo sapien
gcaggtggtctggcctcattttgtg

SEQ ID NO: 2995582 - DNA, 25 bp, Homo sapien
ggcaggtggtctggcctcattttgt

SEQ ID NO: 2995583 - DNA, 25 bp, Homo sapien
ccccgatctttgaagctggccatca

SEQ ID NO: 2995584 - DNA, 25 bp, Homo sapien
tgatgggaatcaaaggccccgatct

SEQ ID NO: 2995585 - DNA, 25 bp, Homo sapien
tctcgagacacatggacgtgggacc

SEQ ID NO: 2995586 - DNA, 25 bp, Homo sapien
tcttgagtttcagcgaggatgcgac

SEQ ID NO: 2995587 - DNA, 25 bp, Homo sapien
gccctggtatgctaatgcgtcaaaa

SEQ ID NO: 2995588 - DNA, 25 bp, Homo sapien
acaccacagccctggtatgctaatg

SEQ ID NO: 2995589 - DNA, 25 bp, Homo sapien
cacagccctggtatgctaatgcgtc

SEQ ID NO: 2995590 - DNA, 25 bp, Homo sapien
tggtatgctaatgcgtcaaaacaca

SEQ ID NO: 2995591 - DNA, 25 bp, Homo sapien
ccctcattagtgactgatggtggtc

SEQ ID NO: 2995592 - DNA, 25 bp, Homo sapien
tcagaaactgggcagttccgactgc

SEQ ID NO: 2995593 - DNA, 25 bp, Homo sapien
tggagaaaggcgagcaccactgtgg

SEQ ID NO: 2995594 - DNA, 25 bp, Homo sapien
caggccctgctatgtaatttcggga

SEQ ID NO: 2995595 - DNA, 25 bp, Homo sapien
gccgcagctgcatgaagcttggggc

SEQ ID NO: 2995596 - DNA, 25 bp, Homo sapien
ccgcagctgcatgaagcttggggca

SEQ ID NO: 2995597 - DNA, 25 bp, Homo sapien
ctgccgcagctgcatgaagcttggg

SEQ ID NO: 2995598 - DNA, 25 bp, Homo sapien
tcctttgtcagtttgttgtggctgg

SEQ ID NO: 2995599 - DNA, 25 bp, Homo sapien
agggctccagggtaccactgtcctc

SEQ ID NO: 2995600 - DNA, 25 bp, Homo sapien
ggctccagggtaccactgtcctctt

SEQ ID NO: 2995601 - DNA, 25 bp, Homo sapien
gtcctcttcctttgtcagtttgttg

SEQ ID NO: 2995602 - DNA, 25 bp, Homo sapien
tggcgttcagttgtatcaggacaga

SEQ ID NO: 2995603 - DNA, 25 bp, Homo sapien
tcttgatagcaacagtaaaggagct

SEQ ID NO: 2995604 - DNA, 25 bp, Homo sapien
taaaggagctaagacactgtggcgt

SEQ ID NO: 2995605 - DNA, 25 bp, Homo sapien
gtcgggacgtccttctactctgaga

SEQ ID NO: 2995606 - DNA, 25 bp, Homo sapien
tgaaggtgctggcatgttcagcgtc

SEQ ID NO: 2995607 - DNA, 25 bp, Homo sapien
cagcagagtcccaagccagtctgat

SEQ ID NO: 2995608 - DNA, 25 bp, Homo sapien
taacacacgcttttgggaggtcacg

SEQ ID NO: 2995609 - DNA, 25 bp, Homo sapien
taggcaggtcagtctctaacacacg

SEQ ID NO: 2995610 - DNA, 25 bp, Homo sapien
gaatctgcctattttgcacatcccg

SEQ ID NO: 2995611 - DNA, 25 bp, Homo sapien
tgaggaccgccgatccaaggtctct

SEQ ID NO: 2995612 - DNA, 25 bp, Homo sapien
cacatcccgtgtaaatggactcaca

SEQ ID NO: 2995613 - DNA, 25 bp, Homo sapien
cattttcaccgtctcgaaagggaag

SEQ ID NO: 2995614 - DNA, 25 bp, Homo sapien
cggggtgacattgatgccttcagga

SEQ ID NO: 2995615 - DNA, 25 bp, Homo sapien
atgccttcaggaagctgcaagtggt

SEQ ID NO: 2995616 - DNA, 25 bp, Homo sapien
agggctggctcatccaccttcatca

SEQ ID NO: 2995617 - DNA, 25 bp, Homo sapien
ggcggggtgacattgatgccttcag

SEQ ID NO: 2995618 - DNA, 25 bp, Homo sapien
tcatagccagctgttaccctggatg

SEQ ID NO: 2995619 - DNA, 25 bp, Homo sapien
ggcaggagccacatgcatggaaagc

SEQ ID NO: 2995620 - DNA, 25 bp, Homo sapien
ctgaccaggtaaaccagcatggcag

SEQ ID NO: 2995621 - DNA, 25 bp, Homo sapien
caggtaaaccagcatggcaggagcc

SEQ ID NO: 2995622 - DNA, 25 bp, Homo sapien
aaaacccctgagcagaacgccaggg

SEQ ID NO: 2995623 - DNA, 25 bp, Homo sapien
cttgccagatgtttgacgttcttca

SEQ ID NO: 2995624 - DNA, 25 bp, Homo sapien
gatgtttgacgttcttcattaaaca

SEQ ID NO: 2995625 - DNA, 25 bp, Homo sapien
acgccaggggcctgcgcgaaggcgg

SEQ ID NO: 2995626 - DNA, 25 bp, Homo sapien
cggtgctcatcgcaaaatcattccg

SEQ ID NO: 2995627 - DNA, 25 bp, Homo sapien
ggtgctcatcgcaaaatcattccga

SEQ ID NO: 2995628 - DNA, 25 bp, Homo sapien
gcggtgctcatcgcaaaatcattcc

SEQ ID NO: 2995629 - DNA, 25 bp, Homo sapien
gtgctcatcgcaaaatcattccgac

SEQ ID NO: 2995630 - DNA, 25 bp, Homo sapien
tgaactcttagaacaggcggaagca

SEQ ID NO: 2995631 - DNA, 25 bp, Homo sapien
tgatggcatcttcggttacactact

SEQ ID NO: 2995632 - DNA, 25 bp, Homo sapien
tgggccatagagcaagtactgcctt

SEQ ID NO: 2995633 - DNA, 25 bp, Homo sapien
aacatgacgctaagggaaagacgcc

SEQ ID NO: 2995634 - DNA, 25 bp, Homo sapien
gctctggctagagtgacccgccagg

SEQ ID NO: 2995635 - DNA, 25 bp, Homo sapien
tctggctagagtgacccgccaggtc

SEQ ID NO: 2995636 - DNA, 25 bp, Homo sapien
tgctctggctagagtgacccgccag

SEQ ID NO: 2995637 - DNA, 25 bp, Homo sapien
ctgctctggctagagtgacccgcca

SEQ ID NO: 2995638 - DNA, 25 bp, Homo sapien
ctcctcagatgcaattctgacatct

SEQ ID NO: 2995639 - DNA, 25 bp, Homo sapien
atcttcatgaccccacattcaactc

SEQ ID NO: 2995640 - DNA, 25 bp, Homo sapien
tgcctcctcagatgcaattctgaca

SEQ ID NO: 2995641 - DNA, 25 bp, Homo sapien
tcttcatgaccccacattcaactcc

SEQ ID NO: 2995642 - DNA, 25 bp, Homo sapien
aaatccgtagtccagtattggcgac

SEQ ID NO: 2995643 - DNA, 25 bp, Homo sapien
gaaatgcaaagtgcaatttgcaccc

SEQ ID NO: 2995644 - DNA, 25 bp, Homo sapien
acagcttgggaacacagacggtctc

SEQ ID NO: 2995645 - DNA, 25 bp, Homo sapien
aatttgcacccatgaaattgtaagc

SEQ ID NO: 2995646 - DNA, 25 bp, Homo sapien
ggcatcctgcaggagaaatgccagc

SEQ ID NO: 2995647 - DNA, 25 bp, Homo sapien
ggcgtgggtgggagaccgcctgcca

SEQ ID NO: 2995648 - DNA, 25 bp, Homo sapien
agctcggtgggccatggcatcctgc

SEQ ID NO: 2995649 - DNA, 25 bp, Homo sapien
agccgagaaggactgcctgccctct

SEQ ID NO: 2995650 - DNA, 25 bp, Homo sapien
gcttagcttcccagcgagccagccc

SEQ ID NO: 2995651 - DNA, 25 bp, Homo sapien
tgcttagcttcccagcgagccagcc

SEQ ID NO: 2995652 - DNA, 25 bp, Homo sapien
cgcggcacgccagggacgaaagaca

SEQ ID NO: 2995653 - DNA, 25 bp, Homo sapien
tcacggccagcaaaaggcacaccct

SEQ ID NO: 2995654 - DNA, 25 bp, Homo sapien
ctcaaaggacgggagcaggaagaaa

SEQ ID NO: 2995655 - DNA, 25 bp, Homo sapien
cagcaaaaggcacaccctcaaagga

SEQ ID NO: 2995656 - DNA, 25 bp, Homo sapien
cggcagagctcctgtcatctgaggc

SEQ ID NO: 2995657 - DNA, 25 bp, Homo sapien
gagcaccacgagcccatcggcagag

SEQ ID NO: 2995658 - DNA, 25 bp, Homo sapien
gtccctgataagcagagagcaccac

SEQ ID NO: 2995659 - DNA, 25 bp, Homo sapien
tccctgataagcagagagcaccacg

SEQ ID NO: 2995660 - DNA, 25 bp, Homo sapien
tcccgtgcgtccagcactgacgggt

SEQ ID NO: 2995661 - DNA, 25 bp, Homo sapien
cgtccagcactgacgggtgggaccc

SEQ ID NO: 2995662 - DNA, 25 bp, Homo sapien
gctggttcccgtgcgtccagcactg

SEQ ID NO: 2995663 - DNA, 25 bp, Homo sapien
agcactgacgggtgggacccagaca

SEQ ID NO: 2995664 - DNA, 25 bp, Homo sapien
taaacatggataagtcactaaggta

SEQ ID NO: 2995665 - DNA, 25 bp, Homo sapien
gataagtcactaaggtacccgcatg

SEQ ID NO: 2995666 - DNA, 25 bp, Homo sapien
agtcactaaggtacccgcatgtggg

SEQ ID NO: 2995667 - DNA, 25 bp, Homo sapien
catggataagtcactaaggtacccg

SEQ ID NO: 2995668 - DNA, 25 bp, Homo sapien
tcatggtggcctctgcggtgtccac

SEQ ID NO: 2995669 - DNA, 25 bp, Homo sapien
gaacctgatgctcgggccctcggca

SEQ ID NO: 2995670 - DNA, 25 bp, Homo sapien
ggctgcagtcagcagtgtcacactg

SEQ ID NO: 2995671 - DNA, 25 bp, Homo sapien
tctcgctgaacctgatgctcgggcc

SEQ ID NO: 2995672 - DNA, 25 bp, Homo sapien
gggggctgctagcatcccagccacg

SEQ ID NO: 2995673 - DNA, 25 bp, Homo sapien
gggctgctagcatcccagccacgct

SEQ ID NO: 2995674 - DNA, 25 bp, Homo sapien
cactttggccacggtggtttcctcg

SEQ ID NO: 2995675 - DNA, 25 bp, Homo sapien
gttgggggctgctagcatcccagcc

SEQ ID NO: 2995676 - DNA, 25 bp, Homo sapien
acgagtgtccacacattcccgtctc

SEQ ID NO: 2995677 - DNA, 25 bp, Homo sapien
tgtctgcacacgagtgtccacacat

SEQ ID NO: 2995678 - DNA, 25 bp, Homo sapien
tctgcacacgagtgtccacacattc

SEQ ID NO: 2995679 - DNA, 25 bp, Homo sapien
ccacacattcccgtctctgcacacg

SEQ ID NO: 2995680 - DNA, 25 bp, Homo sapien
tgaaaaagttccatgactcgaatat

SEQ ID NO: 2995681 - DNA, 25 bp, Homo sapien
ctgtatggggtggaaaaatcaccgg

SEQ ID NO: 2995682 - DNA, 25 bp, Homo sapien
ctgccgagcctctttggacccagat

SEQ ID NO: 2995683 - DNA, 25 bp, Homo sapien
tgttcatgcttttgtcttcgtcact

SEQ ID NO: 2995684 - DNA, 25 bp, Homo sapien
gctttgggggcccttccgcggcagc

SEQ ID NO: 2995685 - DNA, 25 bp, Homo sapien
gggcttagaggctgggatggctcct

SEQ ID NO: 2995686 - DNA, 25 bp, Homo sapien
ctgtcccttggctatgagcaggctt

SEQ ID NO: 2995687 - DNA, 25 bp, Homo sapien
tcccttggctatgagcaggctttgg

SEQ ID NO: 2995688 - DNA, 25 bp, Homo sapien
gctgtggggggccttggccacatac

SEQ ID NO: 2995689 - DNA, 25 bp, Homo sapien
cagggctgtggggggccttggccac

SEQ ID NO: 2995690 - DNA, 25 bp, Homo sapien
gggctgtggggggccttggccacat

SEQ ID NO: 2995691 - DNA, 25 bp, Homo sapien
tcagggctgtggggggccttggcca

SEQ ID NO: 2995692 - DNA, 25 bp, Homo sapien
ccatatgccgcagacccatagccgc

SEQ ID NO: 2995693 - DNA, 25 bp, Homo sapien
ttccatatgccgcagacccatagcc

SEQ ID NO: 2995694 - DNA, 25 bp, Homo sapien
tccatatgccgcagacccatagccg

SEQ ID NO: 2995695 - DNA, 25 bp, Homo sapien
accatggtgagagtatgggaatgac

SEQ ID NO: 2995696 - DNA, 25 bp, Homo sapien
ccatggtgagagtatgggaatgacc

SEQ ID NO: 2995697 - DNA, 25 bp, Homo sapien
ggaccatggtgagagtatgggaatg

SEQ ID NO: 2995698 - DNA, 25 bp, Homo sapien
gcaggaccatggtgagagtatggga

SEQ ID NO: 2995699 - DNA, 25 bp, Homo sapien
catggaatgcacagcgggcagactt

SEQ ID NO: 2995700 - DNA, 25 bp, Homo sapien
ccagaaagacggacagtgccagctt

SEQ ID NO: 2995701 - DNA, 25 bp, Homo sapien
tcttcaggaagcaatcggcagggag

SEQ ID NO: 2995702 - DNA, 25 bp, Homo sapien
gcagcatctccggaacggtgcagtc

SEQ ID NO: 2995703 - DNA, 25 bp, Homo sapien
caggctgcagctgtcttctgagagg

SEQ ID NO: 2995704 - DNA, 25 bp, Homo sapien
ttctgagaggtgttggtgtgctcat

SEQ ID NO: 2995705 - DNA, 25 bp, Homo sapien
tcttctgagaggtgttggtgtgctc

SEQ ID NO: 2995706 - DNA, 25 bp, Homo sapien
gctgtcttctgagaggtgttggtgt

SEQ ID NO: 2995707 - DNA, 25 bp, Homo sapien
agggcagagccgtccacaccgtggg

SEQ ID NO: 2995708 - DNA, 25 bp, Homo sapien
agagccgtccacaccgtgggcctgg

SEQ ID NO: 2995709 - DNA, 25 bp, Homo sapien
cgtccacaccgtgggcctgggtggg

SEQ ID NO: 2995710 - DNA, 25 bp, Homo sapien
gctcagcagagaccagggcagagcc

SEQ ID NO: 2995711 - DNA, 25 bp, Homo sapien
gaagcacgttttctgccggtggtca

SEQ ID NO: 2995712 - DNA, 25 bp, Homo sapien
gtggtcagcagaggatccccggctt

SEQ ID NO: 2995713 - DNA, 25 bp, Homo sapien
ttgcccactactggtgaatcacctg

SEQ ID NO: 2995714 - DNA, 25 bp, Homo sapien
gcgggttttgctgactccgcagtaa

SEQ ID NO: 2995715 - DNA, 25 bp, Homo sapien
tcctttagcgtgaaccgcgggtgcg

SEQ ID NO: 2995716 - DNA, 25 bp, Homo sapien
ggtgcggtgcctcccgtgaaaataa

SEQ ID NO: 2995717 - DNA, 25 bp, Homo sapien
tctcctggaaaaatgctcccggcgg

SEQ ID NO: 2995718 - DNA, 25 bp, Homo sapien
ccgtcacgcttgttgtgaacgcggg

SEQ ID NO: 2995719 - DNA, 25 bp, Homo sapien
cggcccggatgcgtcttggagcctt

SEQ ID NO: 2995720 - DNA, 25 bp, Homo sapien
gatgcgtcttggagccttctacccg

SEQ ID NO: 2995721 - DNA, 25 bp, Homo sapien
gttcccggcccggatgcgtcttgga

SEQ ID NO: 2995722 - DNA, 25 bp, Homo sapien
cccggatgcgtcttggagccttcta

SEQ ID NO: 2995723 - DNA, 25 bp, Homo sapien
ccgtccattccccacatttgagggt

SEQ ID NO: 2995724 - DNA, 25 bp, Homo sapien
gggggcattgcccacgccccagtgt

SEQ ID NO: 2995725 - DNA, 25 bp, Homo sapien
ccatgaaactgggggcattgcccac

SEQ ID NO: 2995726 - DNA, 25 bp, Homo sapien
gtctggccctgctccgtccattccc

SEQ ID NO: 2995727 - DNA, 25 bp, Homo sapien
ctcacggtgcaggtgctcctgccta

SEQ ID NO: 2995728 - DNA, 25 bp, Homo sapien
tgcaggtgctcctgcctaagcagcc

SEQ ID NO: 2995729 - DNA, 25 bp, Homo sapien
acggtgcaggtgctcctgcctaagc

SEQ ID NO: 2995730 - DNA, 25 bp, Homo sapien
aggtgctcctgcctaagcagccgga

SEQ ID NO: 2995731 - DNA, 25 bp, Homo sapien
gaacagcgtcctgattctctgggaa

SEQ ID NO: 2995732 - DNA, 25 bp, Homo sapien
tgggcacggccattgacaggattcc

SEQ ID NO: 2995733 - DNA, 25 bp, Homo sapien
cacattggaggctcccctgagtcca

SEQ ID NO: 2995734 - DNA, 25 bp, Homo sapien
gagagagtagaatgtggtcagacca

SEQ ID NO: 2995735 - DNA, 25 bp, Homo sapien
agatccaggacctgcgaccttgggc

SEQ ID NO: 2995736 - DNA, 25 bp, Homo sapien
ggacctgcgaccttgggcaccctcg

SEQ ID NO: 2995737 - DNA, 25 bp, Homo sapien
acctgcgaccttgggcaccctcgga

SEQ ID NO: 2995738 - DNA, 25 bp, Homo sapien
tcagatccaggacctgcgaccttgg

SEQ ID NO: 2995739 - DNA, 25 bp, Homo sapien
taattgagcaaggtactctcctgtg

SEQ ID NO: 2995740 - DNA, 25 bp, Homo sapien
agtgaactaaatggacggccctcag

SEQ ID NO: 2995741 - DNA, 25 bp, Homo sapien
aagaaacttgaactgttcacggcct

SEQ ID NO: 2995742 - DNA, 25 bp, Homo sapien
gagtactcttatggtgatacagttg

SEQ ID NO: 2995743 - DNA, 25 bp, Homo sapien
cacggagctgacacaggcacggtga

SEQ ID NO: 2995744 - DNA, 25 bp, Homo sapien
cgacacaggcgccatgagctgacac

SEQ ID NO: 2995745 - DNA, 25 bp, Homo sapien
tggaggcacggagccgacacaggcg

SEQ ID NO: 2995746 - DNA, 25 bp, Homo sapien
agctgacacaggcacggtgagctga

SEQ ID NO: 2995747 - DNA, 25 bp, Homo sapien
aaactggtcatggaggcccacgtta

SEQ ID NO: 2995748 - DNA, 25 bp, Homo sapien
gagtgggtatttgccctaaagacaa

SEQ ID NO: 2995749 - DNA, 25 bp, Homo sapien
gcgtgtaaatctgtgcagccagaca

SEQ ID NO: 2995750 - DNA, 25 bp, Homo sapien
tggcttttaactccctcagtactga

SEQ ID NO: 2995751 - DNA, 25 bp, Homo sapien
acagccgggaacacgggagccagat

SEQ ID NO: 2995752 - DNA, 25 bp, Homo sapien
tcattcgtgttagcagaactttggg

SEQ ID NO: 2995753 - DNA, 25 bp, Homo sapien
aaagccggacagaaaggcggacaga

SEQ ID NO: 2995754 - DNA, 25 bp, Homo sapien
acgtgaccctgcgtgacagccggga

SEQ ID NO: 2995755 - DNA, 25 bp, Homo sapien
gccttcgtagctgtttgatgtcaca

SEQ ID NO: 2995756 - DNA, 25 bp, Homo sapien
ccttcgtagctgtttgatgtcacac

SEQ ID NO: 2995757 - DNA, 25 bp, Homo sapien
ggccttcgtagctgtttgatgtcac

SEQ ID NO: 2995758 - DNA, 25 bp, Homo sapien
tatattacaaagttccgccctcacc

SEQ ID NO: 2995759 - DNA, 25 bp, Homo sapien
tccagtctcaacgtttgcacaaagc

SEQ ID NO: 2995760 - DNA, 25 bp, Homo sapien
catgaatttactactgaggctcgtc

SEQ ID NO: 2995761 - DNA, 25 bp, Homo sapien
gccgaggtggcttctttacaacaga

SEQ ID NO: 2995762 - DNA, 25 bp, Homo sapien
cccagcaagtccaggaatctgacct

SEQ ID NO: 2995763 - DNA, 25 bp, Homo sapien
agcaagtccaggaatctgacctgag

SEQ ID NO: 2995764 - DNA, 25 bp, Homo sapien
ccagcaagtccaggaatctgacctg

SEQ ID NO: 2995765 - DNA, 25 bp, Homo sapien
ccccagcaagtccaggaatctgacc

SEQ ID NO: 2995766 - DNA, 25 bp, Homo sapien
cctggtgtctctgttcatgtgggca

SEQ ID NO: 2995767 - DNA, 25 bp, Homo sapien
tggtgtctctgttcatgtgggcacc

SEQ ID NO: 2995768 - DNA, 25 bp, Homo sapien
tcctggtgtctctgttcatgtgggc

SEQ ID NO: 2995769 - DNA, 25 bp, Homo sapien
tgtctctgttcatgtgggcacccag

SEQ ID NO: 2995770 - DNA, 25 bp, Homo sapien
gcagagggtggaagcttgaacttct

SEQ ID NO: 2995771 - DNA, 25 bp, Homo sapien
cagagggtggaagcttgaacttctg

SEQ ID NO: 2995772 - DNA, 25 bp, Homo sapien
tgcagagggtggaagcttgaacttc

SEQ ID NO: 2995773 - DNA, 25 bp, Homo sapien
cctactgccggggtggacagcaaga

SEQ ID NO: 2995774 - DNA, 25 bp, Homo sapien
tcttggacggtctggccacaggtgc

SEQ ID NO: 2995775 - DNA, 25 bp, Homo sapien
ctgggccttcagaggatcttggacg

SEQ ID NO: 2995776 - DNA, 25 bp, Homo sapien
ttcagaggatcttggacggtctggc

SEQ ID NO: 2995777 - DNA, 25 bp, Homo sapien
gatacatccaggaggcgtagaggta

SEQ ID NO: 2995778 - DNA, 25 bp, Homo sapien
tgaagcaaatgcttagctgatctcc

SEQ ID NO: 2995779 - DNA, 25 bp, Homo sapien
catcagctcagggtcccagttgtct

SEQ ID NO: 2995780 - DNA, 25 bp, Homo sapien
gctgatctccatgttgaagctgata

SEQ ID NO: 2995781 - DNA, 25 bp, Homo sapien
gccatagttcagtggggacaaagtg

SEQ ID NO: 2995782 - DNA, 25 bp, Homo sapien
ctgaggccatagttcagtggggaca

SEQ ID NO: 2995783 - DNA, 25 bp, Homo sapien
ggccatagttcagtggggacaaagt

SEQ ID NO: 2995784 - DNA, 25 bp, Homo sapien
gaggccatagttcagtggggacaaa

SEQ ID NO: 2995785 - DNA, 25 bp, Homo sapien
tcagcatcctcaaggcccaggccca

SEQ ID NO: 2995786 - DNA, 25 bp, Homo sapien
ccagggaagaccctgggtccagtca

SEQ ID NO: 2995787 - DNA, 25 bp, Homo sapien
cagtcagcatcctcaaggcccaggc

SEQ ID NO: 2995788 - DNA, 25 bp, Homo sapien
gaagaccctgggtccagtcagcatc

SEQ ID NO: 2995789 - DNA, 25 bp, Homo sapien
ccagtgtgagcaggtaagaagctcc

SEQ ID NO: 2995790 - DNA, 25 bp, Homo sapien
agggccagtaactaggcctcagcct

SEQ ID NO: 2995791 - DNA, 25 bp, Homo sapien
agcttcaacaccacgggctcccctg

SEQ ID NO: 2995792 - DNA, 25 bp, Homo sapien
tagatggtatcatagcagcccacca

SEQ ID NO: 2995793 - DNA, 25 bp, Homo sapien
tctgtaggtagatggtatcatagca

SEQ ID NO: 2995794 - DNA, 25 bp, Homo sapien
gggtcatcttctgtaggtagatggt

SEQ ID NO: 2995795 - DNA, 25 bp, Homo sapien
ccctgtctggggtcatcttctgtag

SEQ ID NO: 2995796 - DNA, 25 bp, Homo sapien
ggttaaattgcatcaacggccaaca

SEQ ID NO: 2995797 - DNA, 25 bp, Homo sapien
aatgctcagcatccaccagtgcagg

SEQ ID NO: 2995798 - DNA, 25 bp, Homo sapien
tccccatggccaaggtgaaataggc

SEQ ID NO: 2995799 - DNA, 25 bp, Homo sapien
caaagtcgagaacacatccaggtca

SEQ ID NO: 2995800 - DNA, 25 bp, Homo sapien
ttctcagcgtgctcattccacttct

SEQ ID NO: 2995801 - DNA, 25 bp, Homo sapien
cccgtgtcatgtaacagagtgtggg

SEQ ID NO: 2995802 - DNA, 25 bp, Homo sapien
gggccaaactcctcaccccgtgtca

SEQ ID NO: 2995803 - DNA, 25 bp, Homo sapien
tcctcaccccgtgtcatgtaacaga

SEQ ID NO: 2995804 - DNA, 25 bp, Homo sapien
caggcaccacaatttccccagtctt

SEQ ID NO: 2995805 - DNA, 25 bp, Homo sapien
aaacacctccagatatgagacacag

SEQ ID NO: 2995806 - DNA, 25 bp, Homo sapien
ctcaaacacctccagatatgagaca

SEQ ID NO: 2995807 - DNA, 25 bp, Homo sapien
tcaaacacctccagatatgagacac

SEQ ID NO: 2995808 - DNA, 25 bp, Homo sapien
tcacttgctgctcggaggtaggatg

SEQ ID NO: 2995809 - DNA, 25 bp, Homo sapien
gctcggaggtaggatgtgggccttc

SEQ ID NO: 2995810 - DNA, 25 bp, Homo sapien
cggtttcacttgctgctcggaggta

SEQ ID NO: 2995811 - DNA, 25 bp, Homo sapien
ccactcggtttcacttgctgctcgg

SEQ ID NO: 2995812 - DNA, 25 bp, Homo sapien
tccggtcactgagcggccagacctg

SEQ ID NO: 2995813 - DNA, 25 bp, Homo sapien
cgcggggaactttccgaggcgcgct

SEQ ID NO: 2995814 - DNA, 25 bp, Homo sapien
ggctccaaactcctcgcgcagcggg

SEQ ID NO: 2995815 - DNA, 25 bp, Homo sapien
gccagacctgcccgccgagcctggg

SEQ ID NO: 2995816 - DNA, 25 bp, Homo sapien
cagttgtgcgcgagcccgagtcacg

SEQ ID NO: 2995817 - DNA, 25 bp, Homo sapien
cgccgggccgctaggattgctccag

SEQ ID NO: 2995818 - DNA, 25 bp, Homo sapien
gggacggcgcagaagccgagggtgc

SEQ ID NO: 2995819 - DNA, 25 bp, Homo sapien
agggtgcaccgggctccccagttgt

SEQ ID NO: 2995820 - DNA, 25 bp, Homo sapien
atggctgcgcagggagcagtcttgg

SEQ ID NO: 2995821 - DNA, 25 bp, Homo sapien
catggctgcgcagggagcagtcttg

SEQ ID NO: 2995822 - DNA, 25 bp, Homo sapien
tcatggctgcgcagggagcagtctt

SEQ ID NO: 2995823 - DNA, 25 bp, Homo sapien
ctggatgaaacagcgcggtggtggg

SEQ ID NO: 2995824 - DNA, 25 bp, Homo sapien
tctgacccctcacgacgggctcagg

SEQ ID NO: 2995825 - DNA, 25 bp, Homo sapien
ctctgacccctcacgacgggctcag

SEQ ID NO: 2995826 - DNA, 25 bp, Homo sapien
ccctcacgacgggctcagggctggg

SEQ ID NO: 2995827 - DNA, 25 bp, Homo sapien
gacccctcacgacgggctcagggct

SEQ ID NO: 2995828 - DNA, 25 bp, Homo sapien
ccttggtgacgtaggtggccacgat

SEQ ID NO: 2995829 - DNA, 25 bp, Homo sapien
ccacgtagacgtacatggaggccac

SEQ ID NO: 2995830 - DNA, 25 bp, Homo sapien
caggtgaccaccagcgtgtaggcgt

SEQ ID NO: 2995831 - DNA, 25 bp, Homo sapien
tcatgacggtcagcgtgaagatgct

SEQ ID NO: 2995832 - DNA, 25 bp, Homo sapien
aggcgcgcgtagagcagcccgatga

SEQ ID NO: 2995833 - DNA, 25 bp, Homo sapien
gggcccgcttgaaggaggcgcgctg

SEQ ID NO: 2995834 - DNA, 25 bp, Homo sapien
gcagcgtcaggtaggcgcggtgggc

SEQ ID NO: 2995835 - DNA, 25 bp, Homo sapien
tgctggtggcgaagagcagcgtcag

SEQ ID NO: 2995836 - DNA, 25 bp, Homo sapien
aggtagttgacgatgcgcgccgtcc

SEQ ID NO: 2995837 - DNA, 25 bp, Homo sapien
ttggcgcagctgttgccgtaggtga

SEQ ID NO: 2995838 - DNA, 25 bp, Homo sapien
gccgcgcaggtggtcgcggtagttc

SEQ ID NO: 2995839 - DNA, 25 bp, Homo sapien
gttgccgtaggtgaggcaggtggtc

SEQ ID NO: 2995840 - DNA, 25 bp, Homo sapien
caggaagacagggagcggcccgaac

SEQ ID NO: 2995841 - DNA, 25 bp, Homo sapien
ggcccgaacagcgctggaagcgggc

SEQ ID NO: 2995842 - DNA, 25 bp, Homo sapien
agcggcccgaacagcgctggaagcg

SEQ ID NO: 2995843 - DNA, 25 bp, Homo sapien
ggagcggcccgaacagcgctggaag

SEQ ID NO: 2995844 - DNA, 25 bp, Homo sapien
gccgctggggccagcacgaggctgt

SEQ ID NO: 2995845 - DNA, 25 bp, Homo sapien
atggtctccagaagccgggactgcg

SEQ ID NO: 2995846 - DNA, 25 bp, Homo sapien
ggcgggtgggcgcttctgggcatca

SEQ ID NO: 2995847 - DNA, 25 bp, Homo sapien
agcgagcaggatctttccagaaggg

SEQ ID NO: 2995848 - DNA, 25 bp, Homo sapien
ctgtgacgaagccatggtctccaga

SEQ ID NO: 2995849 - DNA, 25 bp, Homo sapien
gcagccgcgccatggtctccacacg

SEQ ID NO: 2995850 - DNA, 25 bp, Homo sapien
ggcagccgcgccatggtctccacac

SEQ ID NO: 2995851 - DNA, 25 bp, Homo sapien
ctcagggttgattgttccagtggca

SEQ ID NO: 2995852 - DNA, 25 bp, Homo sapien
ctaggcaggacacggaagccagctc

SEQ ID NO: 2995853 - DNA, 25 bp, Homo sapien
cccgcgcctaggcaggacacggaag

SEQ ID NO: 2995854 - DNA, 25 bp, Homo sapien
tcccacacctcagatgtggcgtccc

SEQ ID NO: 2995855 - DNA, 25 bp, Homo sapien
gcctgcacaggcctcaaaggcaggt

SEQ ID NO: 2995856 - DNA, 25 bp, Homo sapien
acaggcctcaaaggcaggtgcaccc

SEQ ID NO: 2995857 - DNA, 25 bp, Homo sapien
tcaggtgccagaccagccgcctgca

SEQ ID NO: 2995858 - DNA, 25 bp, Homo sapien
gcctcaaaggcaggtgcaccctcta

SEQ ID NO: 2995859 - DNA, 25 bp, Homo sapien
cagtcaccagcgtctagttccagag

SEQ ID NO: 2995860 - DNA, 25 bp, Homo sapien
gctgcatgcttattcctgacgccgg

SEQ ID NO: 2995861 - DNA, 25 bp, Homo sapien
gagactgccaatgctactgtgaggt

SEQ ID NO: 2995862 - DNA, 25 bp, Homo sapien
cagtgttcagatggagccccaaggg

SEQ ID NO: 2995863 - DNA, 25 bp, Homo sapien
gggatgtacatcagtctctcttttt

SEQ ID NO: 2995864 - DNA, 25 bp, Homo sapien
caggagtgggatgtacatcagtctc

SEQ ID NO: 2995865 - DNA, 25 bp, Homo sapien
gtgggatgtacatcagtctctcttt

SEQ ID NO: 2995866 - DNA, 25 bp, Homo sapien
gagtgggatgtacatcagtctctct

SEQ ID NO: 2995867 - DNA, 25 bp, Homo sapien
gggccccgtgccacatgcaggtgct

SEQ ID NO: 2995868 - DNA, 25 bp, Homo sapien
cagcgcagaagccatgttggcgcga

SEQ ID NO: 2995869 - DNA, 25 bp, Homo sapien
gcaagaggtcaagcgtggagtctcc

SEQ ID NO: 2995870 - DNA, 25 bp, Homo sapien
gctgccgccgagagtctgcgtgtca

SEQ ID NO: 2995871 - DNA, 25 bp, Homo sapien
cactgacgtaattgcttatggaggc

SEQ ID NO: 2995872 - DNA, 25 bp, Homo sapien
ctacttgtcactgacgtaattgctt

SEQ ID NO: 2995873 - DNA, 25 bp, Homo sapien
tgtcactgacgtaattgcttatgga

SEQ ID NO: 2995874 - DNA, 25 bp, Homo sapien
ctgacgtaattgcttatggaggccc

SEQ ID NO: 2995875 - DNA, 25 bp, Homo sapien
ggttggtggccaaagccgtccttgc

SEQ ID NO: 2995876 - DNA, 25 bp, Homo sapien
gctgcttcacggacactctccgggt

SEQ ID NO: 2995877 - DNA, 25 bp, Homo sapien
ccccatcgtgggtgggaagtcgcct

SEQ ID NO: 2995878 - DNA, 25 bp, Homo sapien
tgactttccagagggtccgtggctg

SEQ ID NO: 2995879 - DNA, 25 bp, Homo sapien
cagcttctgcccgtgtatggggaac

SEQ ID NO: 2995880 - DNA, 25 bp, Homo sapien
ggacggcgtgggataggctccctgg

SEQ ID NO: 2995881 - DNA, 25 bp, Homo sapien
cacgggccacatgcggaggacggcg

SEQ ID NO: 2995882 - DNA, 25 bp, Homo sapien
gtgtatggggaaccctccttggtca

SEQ ID NO: 2995883 - DNA, 25 bp, Homo sapien
ccagcccagtgtcggtgacctagtg

SEQ ID NO: 2995884 - DNA, 25 bp, Homo sapien
tctggagtgcgttcacctctgtacc

SEQ ID NO: 2995885 - DNA, 25 bp, Homo sapien
gagactcgcaacctaagattagacg

SEQ ID NO: 2995886 - DNA, 25 bp, Homo sapien
tgtacccttctcaaagagactcgca

SEQ ID NO: 2995887 - DNA, 25 bp, Homo sapien
gtgattcccaggtctagcgccagtc

SEQ ID NO: 2995888 - DNA, 25 bp, Homo sapien
tccctgggagcgaggctgagttcac

SEQ ID NO: 2995889 - DNA, 25 bp, Homo sapien
ccgggccggtgctgagtgattccca

SEQ ID NO: 2995890 - DNA, 25 bp, Homo sapien
ctgaggtcaccgtcagtcagcggca

SEQ ID NO: 2995891 - DNA, 25 bp, Homo sapien
tgtgctttggttgccacgtgtgtca

SEQ ID NO: 2995892 - DNA, 25 bp, Homo sapien
cggctatggaaaggggcgtcagaac

SEQ ID NO: 2995893 - DNA, 25 bp, Homo sapien
aggggcgtcagaacctccactgagc

SEQ ID NO: 2995894 - DNA, 25 bp, Homo sapien
tatggaaaggggcgtcagaacctcc

SEQ ID NO: 2995895 - DNA, 25 bp, Homo sapien
gttctggggatccactaccatcaga

SEQ ID NO: 2995896 - DNA, 25 bp, Homo sapien
ttctggggatccactaccatcagac

SEQ ID NO: 2995897 - DNA, 25 bp, Homo sapien
tcgcgctccctgttacggcgttcgt

SEQ ID NO: 2995898 - DNA, 25 bp, Homo sapien
ccggaaccggagcaggtagcggtga

SEQ ID NO: 2995899 - DNA, 25 bp, Homo sapien
ctggtccgatggctcctcagcggag

SEQ ID NO: 2995900 - DNA, 25 bp, Homo sapien
atggccgagcgcgtcgcactcgcgt

SEQ ID NO: 2995901 - DNA, 25 bp, Homo sapien
gcgaggtccgggggcgcagccaggc

SEQ ID NO: 2995902 - DNA, 25 bp, Homo sapien
cgccgccgcggtcccgcgaggtccg

SEQ ID NO: 2995903 - DNA, 25 bp, Homo sapien
gtcccgcgaggtccgggggcgcagc

SEQ ID NO: 2995904 - DNA, 25 bp, Homo sapien
tgcgccgccgcggtcccgcgaggtc

SEQ ID NO: 2995905 - DNA, 25 bp, Homo sapien
gactcagttcagtaatccagcccct

SEQ ID NO: 2995906 - DNA, 25 bp, Homo sapien
acaatttacacccacaggctctgtg

SEQ ID NO: 2995907 - DNA, 25 bp, Homo sapien
gctttgcatgtgagacagactcagt

SEQ ID NO: 2995908 - DNA, 25 bp, Homo sapien
tgaccctaagggctctgtaacacag

SEQ ID NO: 2995909 - DNA, 25 bp, Homo sapien
agaaaatcaagagttatcaacaggg

SEQ ID NO: 2995910 - DNA, 25 bp, Homo sapien
gatagattaacttggaggaaactca

SEQ ID NO: 2995911 - DNA, 25 bp, Homo sapien
ttctccttatactttcagtttcagt

SEQ ID NO: 2995912 - DNA, 25 bp, Homo sapien
cagtttcagttctgatactggccag

SEQ ID NO: 2995913 - DNA, 25 bp, Homo sapien
aactcctatggcgaagtctccttgg

SEQ ID NO: 2995914 - DNA, 25 bp, Homo sapien
ttcctgtgaactcctatggcgaagt

SEQ ID NO: 2995915 - DNA, 25 bp, Homo sapien
actcctatggcgaagtctccttggg

SEQ ID NO: 2995916 - DNA, 25 bp, Homo sapien
tgtgaactcctatggcgaagtctcc

SEQ ID NO: 2995917 - DNA, 25 bp, Homo sapien
ctctgagaggtacgagacctttggt

SEQ ID NO: 2995918 - DNA, 25 bp, Homo sapien
ggtacgagacctttggtggagctcc

SEQ ID NO: 2995919 - DNA, 25 bp, Homo sapien
agaggtacgagacctttggtggagc

SEQ ID NO: 2995920 - DNA, 25 bp, Homo sapien
tctgagaggtacgagacctttggtg

SEQ ID NO: 2995921 - DNA, 25 bp, Homo sapien
tcctcataaggatgccaatcactgg

SEQ ID NO: 2995922 - DNA, 25 bp, Homo sapien
tcttgctccaccgagaaccttgtgg

SEQ ID NO: 2995923 - DNA, 25 bp, Homo sapien
tctaggtacccgtttccacagaaca

SEQ ID NO: 2995924 - DNA, 25 bp, Homo sapien
ggttcgtggcacgtcatgaccatct

SEQ ID NO: 2995925 - DNA, 25 bp, Homo sapien
gggtcctctggtcatagcactgttg

SEQ ID NO: 2995926 - DNA, 25 bp, Homo sapien
tctttcctctgttacctcctgcttg

SEQ ID NO: 2995927 - DNA, 25 bp, Homo sapien
tcctctggtcatagcactgttggag

SEQ ID NO: 2995928 - DNA, 25 bp, Homo sapien
tcatagcactgttggagtttccctc

SEQ ID NO: 2995929 - DNA, 25 bp, Homo sapien
cacagcttccgtcatcttctgagta

SEQ ID NO: 2995930 - DNA, 25 bp, Homo sapien
ttcacagcttccgtcatcttctgag

SEQ ID NO: 2995931 - DNA, 25 bp, Homo sapien
agcttccgtcatcttctgagtatct

SEQ ID NO: 2995932 - DNA, 25 bp, Homo sapien
tctttcacagcttccgtcatcttct

SEQ ID NO: 2995933 - DNA, 25 bp, Homo sapien
gccatattcaatttgtcagaacgcc

SEQ ID NO: 2995934 - DNA, 25 bp, Homo sapien
catcagctgtatgtaagttcagtct

SEQ ID NO: 2995935 - DNA, 25 bp, Homo sapien
tactcacttgtacacttcttatagt

SEQ ID NO: 2995936 - DNA, 25 bp, Homo sapien
gcactttccatggtgtctactcact

SEQ ID NO: 2995937 - DNA, 25 bp, Homo sapien
gatgaactgccggacatggaaggcc

SEQ ID NO: 2995938 - DNA, 25 bp, Homo sapien
cagttgggatgaactgccggacatg

SEQ ID NO: 2995939 - DNA, 25 bp, Homo sapien
ttgggatgaactgccggacatggaa

SEQ ID NO: 2995940 - DNA, 25 bp, Homo sapien
actgccggacatggaaggccacgcg

SEQ ID NO: 2995941 - DNA, 25 bp, Homo sapien
ctagcgcacggaacagaggaaaaat

SEQ ID NO: 2995942 - DNA, 25 bp, Homo sapien
cgtagggaaacatgtcttcatactc

SEQ ID NO: 2995943 - DNA, 25 bp, Homo sapien
tgtaggcgtacttggccctcagcag

SEQ ID NO: 2995944 - DNA, 25 bp, Homo sapien
tcagagggccctcgtagggaaacat

SEQ ID NO: 2995945 - DNA, 25 bp, Homo sapien
tcttcatactcaatgaggaggccgt

SEQ ID NO: 2995946 - DNA, 25 bp, Homo sapien
gcctcatcatgggaacatctctcaa

SEQ ID NO: 2995947 - DNA, 25 bp, Homo sapien
tctgttgctgtagagacgccctctc

SEQ ID NO: 2995948 - DNA, 25 bp, Homo sapien
cgaacataccttgctgggcaaaggc

SEQ ID NO: 2995949 - DNA, 25 bp, Homo sapien
ttctgctgggaacaaggacccaact

SEQ ID NO: 2995950 - DNA, 25 bp, Homo sapien
gggaggcagagttcgcggtgagcca

SEQ ID NO: 2995951 - DNA, 25 bp, Homo sapien
acccgggaggcagagttcgcggtga

SEQ ID NO: 2995952 - DNA, 25 bp, Homo sapien
caagatcgcaccactgcactccagc

SEQ ID NO: 2995953 - DNA, 25 bp, Homo sapien
agccaagatcgcaccactgcactcc

SEQ ID NO: 2995954 - DNA, 25 bp, Homo sapien
gatgcaagatctctttgatttcaga

SEQ ID NO: 2995955 - DNA, 25 bp, Homo sapien
ccagccagatgcaagatctctttga

SEQ ID NO: 2995956 - DNA, 25 bp, Homo sapien
cagctcattgagtccagccagatgc

SEQ ID NO: 2995957 - DNA, 25 bp, Homo sapien
tcattgagtccagccagatgcaaga

SEQ ID NO: 2995958 - DNA, 25 bp, Homo sapien
ccgcggtgtgtggaaatagaagcca

SEQ ID NO: 2995959 - DNA, 25 bp, Homo sapien
tgtgtggaaatagaagccagaatgg

SEQ ID NO: 2995960 - DNA, 25 bp, Homo sapien
ggtgtgtggaaatagaagccagaat

SEQ ID NO: 2995961 - DNA, 25 bp, Homo sapien
gcggtgtgtggaaatagaagccaga

SEQ ID NO: 2995962 - DNA, 25 bp, Homo sapien
tcatcacacccgatgtgcagccgct

SEQ ID NO: 2995963 - DNA, 25 bp, Homo sapien
tggtcaatcatggcgcccaccagcg

SEQ ID NO: 2995964 - DNA, 25 bp, Homo sapien
ccgcaggtgggcgaaggccgtgtgc

SEQ ID NO: 2995965 - DNA, 25 bp, Homo sapien
gcaggtgggcgaaggccgtgtgctt

SEQ ID NO: 2995966 - DNA, 25 bp, Homo sapien
ggccaccgcccgcatgtgtgacagg

SEQ ID NO: 2995967 - DNA, 25 bp, Homo sapien
gcatgtgtgacaggcacaacttccc

SEQ ID NO: 2995968 - DNA, 25 bp, Homo sapien
cctcaggcaggtctcggagcatgtc

SEQ ID NO: 2995969 - DNA, 25 bp, Homo sapien
cttgctgtagccaccggcgcgaggc

SEQ ID NO: 2995970 - DNA, 25 bp, Homo sapien
ttgccgtgcacatccaggtcggccg

SEQ ID NO: 2995971 - DNA, 25 bp, Homo sapien
ggctccaccagctgcggcaccccgg

SEQ ID NO: 2995972 - DNA, 25 bp, Homo sapien
ggtcggccgtgtagtcccagagcac

SEQ ID NO: 2995973 - DNA, 25 bp, Homo sapien
cgtgcacatccaggtcggccgtgta

SEQ ID NO: 2995974 - DNA, 25 bp, Homo sapien
gagactccagagtgtacgtggcccc

SEQ ID NO: 2995975 - DNA, 25 bp, Homo sapien
ctgctcactaggaaaacactggtgg

SEQ ID NO: 2995976 - DNA, 25 bp, Homo sapien
cagagccaacatgggagccgcctga

SEQ ID NO: 2995977 - DNA, 25 bp, Homo sapien
agactccagagtgtatgcggccggc

SEQ ID NO: 2995978 - DNA, 25 bp, Homo sapien
cccacagctgcggaaagccgcaccg

SEQ ID NO: 2995979 - DNA, 25 bp, Homo sapien
gctgcccacagctgcggaaagccgc

SEQ ID NO: 2995980 - DNA, 25 bp, Homo sapien
acagctgcggaaagccgcaccgccg

SEQ ID NO: 2995981 - DNA, 25 bp, Homo sapien
gctgcggaaagccgcaccgccggta

SEQ ID NO: 2995982 - DNA, 25 bp, Homo sapien
gatgatgccctgcagtgagtccgtg

SEQ ID NO: 2995983 - DNA, 25 bp, Homo sapien
ctgccagccggtcaggatgatgccc

SEQ ID NO: 2995984 - DNA, 25 bp, Homo sapien
gttcctgaggtggtgctcaacaggg

SEQ ID NO: 2995985 - DNA, 25 bp, Homo sapien
cagccactgcacgtggttcctgagg

SEQ ID NO: 2995986 - DNA, 25 bp, Homo sapien
tgaggacagactggccaggacttac

SEQ ID NO: 2995987 - DNA, 25 bp, Homo sapien
ctgcacaggccgacgtggtggccac

SEQ ID NO: 2995988 - DNA, 25 bp, Homo sapien
aaccccacgtggctgtttctgcagc

SEQ ID NO: 2995989 - DNA, 25 bp, Homo sapien
tgcttcccctttgaccaacctggga

SEQ ID NO: 2995990 - DNA, 25 bp, Homo sapien
ccaacaggacagtgggaactatcta

SEQ ID NO: 2995991 - DNA, 25 bp, Homo sapien
cgatcctggtttatgcagacagagc

SEQ ID NO: 2995992 - DNA, 25 bp, Homo sapien
cagacagagctgtatcccaacagga

SEQ ID NO: 2995993 - DNA, 25 bp, Homo sapien
gccccgctctatggacgatcctggt

SEQ ID NO: 2995994 - DNA, 25 bp, Homo sapien
ggcgagagatcaggcgtggcaggca

SEQ ID NO: 2995995 - DNA, 25 bp, Homo sapien
gctgggtagggtgcctccacctgcc

SEQ ID NO: 2995996 - DNA, 25 bp, Homo sapien
attctgggtggaccttgggtgggtg

SEQ ID NO: 2995997 - DNA, 25 bp, Homo sapien
gcatctgtcccaagcgagggctggg

SEQ ID NO: 2995998 - DNA, 25 bp, Homo sapien
tcggacgtccctgctgttgttccag

SEQ ID NO: 2995999 - DNA, 25 bp, Homo sapien
cctgacttcggacgtccctgctgtt

SEQ ID NO: 2996000 - DNA, 25 bp, Homo sapien
agaggggcgcttagctccgcagccc

SEQ ID NO: 2996001 - DNA, 25 bp, Homo sapien
aggcgccctgacttcggacgtccct

SEQ ID NO: 2996002 - DNA, 25 bp, Homo sapien
gcagctcgcacagcacagagtagtg

SEQ ID NO: 2996003 - DNA, 25 bp, Homo sapien
tgcgggcagcagctcgcacagcaca

SEQ ID NO: 2996004 - DNA, 25 bp, Homo sapien
cagggacgggactcctgcgggcagc

SEQ ID NO: 2996005 - DNA, 25 bp, Homo sapien
tcgcacagcacagagtagtggtcgt

SEQ ID NO: 2996006 - DNA, 25 bp, Homo sapien
gctttgggcttaggcctggagaccc

SEQ ID NO: 2996007 - DNA, 25 bp, Homo sapien
tgcgtgcatttctgcggattcactg

SEQ ID NO: 2996008 - DNA, 25 bp, Homo sapien
gcagtcgctaatttcccgtgtggcc

SEQ ID NO: 2996009 - DNA, 25 bp, Homo sapien
ggtgagaccatcctccgactgtgag

SEQ ID NO: 2996010 - DNA, 25 bp, Homo sapien
cgctctccgcgcgtctcggccattt

SEQ ID NO: 2996011 - DNA, 25 bp, Homo sapien
tgcgggtcccgctctccgcgcgtct

SEQ ID NO: 2996012 - DNA, 25 bp, Homo sapien
gggtcccgctctccgcgcgtctcgg

SEQ ID NO: 2996013 - DNA, 25 bp, Homo sapien
ccgcgcgtctcggccatttttcttt

SEQ ID NO: 2996014 - DNA, 25 bp, Homo sapien
tctgcccctttctaagcagttgaga

SEQ ID NO: 2996015 - DNA, 25 bp, Homo sapien
taccgtcaatattaacacagctctt

SEQ ID NO: 2996016 - DNA, 25 bp, Homo sapien
tgtctgtttttatcgtttctgcccc

SEQ ID NO: 2996017 - DNA, 25 bp, Homo sapien
gtcaatctgatctcattctgcgtcc

SEQ ID NO: 2996018 - DNA, 25 bp, Homo sapien
ggacgaatctccgacttggtgttca

SEQ ID NO: 2996019 - DNA, 25 bp, Homo sapien
ctgcaggcaccagcgtggacgaatc

SEQ ID NO: 2996020 - DNA, 25 bp, Homo sapien
cttggtgttcatggaaatgcttgct

SEQ ID NO: 2996021 - DNA, 25 bp, Homo sapien
cagcgtggacgaatctccgacttgg

SEQ ID NO: 2996022 - DNA, 25 bp, Homo sapien
ctgcttctctttaaacacgtgaaat

SEQ ID NO: 2996023 - DNA, 25 bp, Homo sapien
tgtccagggctcacgcagagtttgc

SEQ ID NO: 2996024 - DNA, 25 bp, Homo sapien
caatcgatggaatattctagagcac

SEQ ID NO: 2996025 - DNA, 25 bp, Homo sapien
gctacattgggacctgcaggcctag

SEQ ID NO: 2996026 - DNA, 25 bp, Homo sapien
aaatcacaaatgagcggggcggttg

SEQ ID NO: 2996027 - DNA, 25 bp, Homo sapien
atgagcggggcggttggaggggcct

SEQ ID NO: 2996028 - DNA, 25 bp, Homo sapien
caaatgagcggggcggttggagggg

SEQ ID NO: 2996029 - DNA, 25 bp, Homo sapien
ctgaaatcacaaatgagcggggcgg

SEQ ID NO: 2996030 - DNA, 25 bp, Homo sapien
aggttctccactttcgctttaacat

SEQ ID NO: 2996031 - DNA, 25 bp, Homo sapien
gttctccactttcgctttaacatct

SEQ ID NO: 2996032 - DNA, 25 bp, Homo sapien
ctccactttcgctttaacatcttca

SEQ ID NO: 2996033 - DNA, 25 bp, Homo sapien
aggctggaaatcccgagaaggttct

SEQ ID NO: 2996034 - DNA, 25 bp, Homo sapien
gaaggggacagggagggctgcaggg

SEQ ID NO: 2996035 - DNA, 25 bp, Homo sapien
aggggacagggagggctgcagggtg

SEQ ID NO: 2996036 - DNA, 25 bp, Homo sapien
ggaagaaggggacagggagggctgc

SEQ ID NO: 2996037 - DNA, 25 bp, Homo sapien
gggacagggagggctgcagggtgct

SEQ ID NO: 2996038 - DNA, 25 bp, Homo sapien
ctgcggagagccctgctgagaacag

SEQ ID NO: 2996039 - DNA, 25 bp, Homo sapien
tgacaagggcaaggatgttgctgcc

SEQ ID NO: 2996040 - DNA, 25 bp, Homo sapien
caagggcaaggatgttgctgccagg

SEQ ID NO: 2996041 - DNA, 25 bp, Homo sapien
cttgtgtgacaagggcaaggatgtt

SEQ ID NO: 2996042 - DNA, 25 bp, Homo sapien
tgctgccagggaaggagccggcccc

SEQ ID NO: 2996043 - DNA, 25 bp, Homo sapien
gcagcgcatccacagagctgcgcag

SEQ ID NO: 2996044 - DNA, 25 bp, Homo sapien
cagcgcatccacagagctgcgcaga

SEQ ID NO: 2996045 - DNA, 25 bp, Homo sapien
agcagcgcatccacagagctgcgca

SEQ ID NO: 2996046 - DNA, 25 bp, Homo sapien
tgacatttctaagtcttatgtcccc

SEQ ID NO: 2996047 - DNA, 25 bp, Homo sapien
taagtcttatgtcccccagaaagtc

SEQ ID NO: 2996048 - DNA, 25 bp, Homo sapien
taagaatggggttgacatttctaag

SEQ ID NO: 2996049 - DNA, 25 bp, Homo sapien
gggttgacatttctaagtcttatgt

SEQ ID NO: 2996050 - DNA, 25 bp, Homo sapien
ggggcaaatccacataggggtgtgc

SEQ ID NO: 2996051 - DNA, 25 bp, Homo sapien
caaatccacataggggtgtgccgcg

SEQ ID NO: 2996052 - DNA, 25 bp, Homo sapien
ctggggcaaatccacataggggtgt

SEQ ID NO: 2996053 - DNA, 25 bp, Homo sapien
ggcaaatccacataggggtgtgccg

SEQ ID NO: 2996054 - DNA, 25 bp, Homo sapien
ggctggatgtgctgaaccatgaccg

SEQ ID NO: 2996055 - DNA, 25 bp, Homo sapien
gatgagcttccgctggcggtggtag

SEQ ID NO: 2996056 - DNA, 25 bp, Homo sapien
tggatgtgctgaaccatgaccgggt

SEQ ID NO: 2996057 - DNA, 25 bp, Homo sapien
tgctgaaccatgaccgggtggatga

SEQ ID NO: 2996058 - DNA, 25 bp, Homo sapien
tgaacgcacagtctgcacacttggg

SEQ ID NO: 2996059 - DNA, 25 bp, Homo sapien
tgcacggcctataagagcccagggc

SEQ ID NO: 2996060 - DNA, 25 bp, Homo sapien
tcatcggcatgtcgggaggaacaag

SEQ ID NO: 2996061 - DNA, 25 bp, Homo sapien
agttctcagggaacccatggctgca

SEQ ID NO: 2996062 - DNA, 25 bp, Homo sapien
gtcctgagcaacgtccctgccaggg

SEQ ID NO: 2996063 - DNA, 25 bp, Homo sapien
actcctccacggcatccgggtagaa

SEQ ID NO: 2996064 - DNA, 25 bp, Homo sapien
gctggggtgcacgttttcctccagc

SEQ ID NO: 2996065 - DNA, 25 bp, Homo sapien
tgcacgagggtgctccactgtgcca

SEQ ID NO: 2996066 - DNA, 25 bp, Homo sapien
ctgagtgtgggcaagacactgctgg

SEQ ID NO: 2996067 - DNA, 25 bp, Homo sapien
cccgtattgcccaggccatttggca

SEQ ID NO: 2996068 - DNA, 25 bp, Homo sapien
tgggccagagggcacgacgcccacg

SEQ ID NO: 2996069 - DNA, 25 bp, Homo sapien
acgacgcccacgtgggcccgtattg

SEQ ID NO: 2996070 - DNA, 25 bp, Homo sapien
tatttccaaagaatcagtgtcacac

SEQ ID NO: 2996071 - DNA, 25 bp, Homo sapien
tttccaaagaatcagtgtcacacat

SEQ ID NO: 2996072 - DNA, 25 bp, Homo sapien
cagcttccactctttatttccaaag

SEQ ID NO: 2996073 - DNA, 25 bp, Homo sapien
aaagaatcagtgtcacacatgcaga

SEQ ID NO: 2996074 - DNA, 25 bp, Homo sapien
ggtcagctcttctagtatcgtgcag

SEQ ID NO: 2996075 - DNA, 25 bp, Homo sapien
cagtgcttaaaaaccgggagctcca

SEQ ID NO: 2996076 - DNA, 25 bp, Homo sapien
tctcgaacctgggaagacctggcag

SEQ ID NO: 2996077 - DNA, 25 bp, Homo sapien
gtgaggccagaaaaaaggtcagctc

SEQ ID NO: 2996078 - DNA, 25 bp, Homo sapien
cgtcctgaagcgttggtccctgctt

SEQ ID NO: 2996079 - DNA, 25 bp, Homo sapien
tgcccatctccagatagcctgggct

SEQ ID NO: 2996080 - DNA, 25 bp, Homo sapien
cctgggttttttgcaatgggaatga

SEQ ID NO: 2996081 - DNA, 25 bp, Homo sapien
cctgcttggaggtctccgttcatca

SEQ ID NO: 2996082 - DNA, 25 bp, Homo sapien
aactccgctgtggaagattagcccc

SEQ ID NO: 2996083 - DNA, 25 bp, Homo sapien
gagctgagatcgttggtccatgcca

SEQ ID NO: 2996084 - DNA, 25 bp, Homo sapien
gctttgggaccctctactgtgcagt

SEQ ID NO: 2996085 - DNA, 25 bp, Homo sapien
gattagcccctttggtgactcgtcg

SEQ ID NO: 2996086 - DNA, 25 bp, Homo sapien
cgatccggacaaagaaacgagcgct

SEQ ID NO: 2996087 - DNA, 25 bp, Homo sapien
agggagcccagtcatataccagcat

SEQ ID NO: 2996088 - DNA, 25 bp, Homo sapien
cagcatctaggattggtttgtgtga

SEQ ID NO: 2996089 - DNA, 25 bp, Homo sapien
gctttgccagcgcgcgtgtgcttgt

SEQ ID NO: 2996090 - DNA, 25 bp, Homo sapien
ggactgtagaaactaggcctgcatt

SEQ ID NO: 2996091 - DNA, 25 bp, Homo sapien
ttttagcagagttcaggccactccc

SEQ ID NO: 2996092 - DNA, 25 bp, Homo sapien
caaaggaagacggaattaactgtgt

SEQ ID NO: 2996093 - DNA, 25 bp, Homo sapien
taaaattagcttggcttatgcccag

SEQ ID NO: 2996094 - DNA, 25 bp, Homo sapien
taggctcggcggagtagcagcgcgc

SEQ ID NO: 2996095 - DNA, 25 bp, Homo sapien
tgacgtcgtgtcacgtaggctcggc

SEQ ID NO: 2996096 - DNA, 25 bp, Homo sapien
gccgccattgccacttgacgtcgtg

SEQ ID NO: 2996097 - DNA, 25 bp, Homo sapien
tgccacttgacgtcgtgtcacgtag

SEQ ID NO: 2996098 - DNA, 25 bp, Homo sapien
tgtcagccagctcggcgttggacac

SEQ ID NO: 2996099 - DNA, 25 bp, Homo sapien
agccagctcggcgttggacactcgc

SEQ ID NO: 2996100 - DNA, 25 bp, Homo sapien
ggctctgtcagccagctcggcgttg

SEQ ID NO: 2996101 - DNA, 25 bp, Homo sapien
agctcggcgttggacactcgcctta

SEQ ID NO: 2996102 - DNA, 25 bp, Homo sapien
gcgttcaccagggagtcggtgagcg

SEQ ID NO: 2996103 - DNA, 25 bp, Homo sapien
cagggtgctcggtccggtggtcacg

SEQ ID NO: 2996104 - DNA, 25 bp, Homo sapien
tccgcttctcgtgggtcctgcggcg

SEQ ID NO: 2996105 - DNA, 25 bp, Homo sapien
agcgcgcggactgtcccgaggccaa

SEQ ID NO: 2996106 - DNA, 25 bp, Homo sapien
tcagcctcagggaagcaccgggaga

SEQ ID NO: 2996107 - DNA, 25 bp, Homo sapien
agcaccgggagactgggacaccact

SEQ ID NO: 2996108 - DNA, 25 bp, Homo sapien
gaggccgggcgcctcagcctcaggg

SEQ ID NO: 2996109 - DNA, 25 bp, Homo sapien
agactgggacaccactgcccgccgc

SEQ ID NO: 2996110 - DNA, 25 bp, Homo sapien
tgcgcgtgcagtgctcacacttcat

SEQ ID NO: 2996111 - DNA, 25 bp, Homo sapien
cttgcgcgtgcagtgctcacacttc

SEQ ID NO: 2996112 - DNA, 25 bp, Homo sapien
ttgcgcgtgcagtgctcacacttca

SEQ ID NO: 2996113 - DNA, 25 bp, Homo sapien
acaagcaccaggcgcgcgcctcccc

SEQ ID NO: 2996114 - DNA, 25 bp, Homo sapien
aggacaagcaccaggcgcgcgcctc

SEQ ID NO: 2996115 - DNA, 25 bp, Homo sapien
gacaagcaccaggcgcgcgcctccc

SEQ ID NO: 2996116 - DNA, 25 bp, Homo sapien
ggacaagcaccaggcgcgcgcctcc

SEQ ID NO: 2996117 - DNA, 25 bp, Homo sapien
ctgaagcgagcgagcggcgggcccg

SEQ ID NO: 2996118 - DNA, 25 bp, Homo sapien
ggtctccgtgcgtttccgcgcttcg

SEQ ID NO: 2996119 - DNA, 25 bp, Homo sapien
caagttcagggagaaccgcgaagac

SEQ ID NO: 2996120 - DNA, 25 bp, Homo sapien
tcggactgtggtgcgcggcacgaga

SEQ ID NO: 2996121 - DNA, 25 bp, Homo sapien
acgagaggctcggtctccgtgcgtt

SEQ ID NO: 2996122 - DNA, 25 bp, Homo sapien
tctcgaaacgcttctgatcattccc

SEQ ID NO: 2996123 - DNA, 25 bp, Homo sapien
tcagaggggcaggttcgaaaacgcc

SEQ ID NO: 2996124 - DNA, 25 bp, Homo sapien
gatcattcccgccacgaccgctgtt

SEQ ID NO: 2996125 - DNA, 25 bp, Homo sapien
tcattcccgccacgaccgctgttta

SEQ ID NO: 2996126 - DNA, 25 bp, Homo sapien
gaaggcgccggtcagcagccgtcac

SEQ ID NO: 2996127 - DNA, 25 bp, Homo sapien
cacaggagcccattccggcaataac

SEQ ID NO: 2996128 - DNA, 25 bp, Homo sapien
ggcctggagacaaccgcggaaggcg

SEQ ID NO: 2996129 - DNA, 25 bp, Homo sapien
agcccattccggcaataacagctac

SEQ ID NO: 2996130 - DNA, 25 bp, Homo sapien
gcatcggctgacacattctcttggt

SEQ ID NO: 2996131 - DNA, 25 bp, Homo sapien
gactcggtgcatcggctgacacatt

SEQ ID NO: 2996132 - DNA, 25 bp, Homo sapien
tcggtgcatcggctgacacattctc

SEQ ID NO: 2996133 - DNA, 25 bp, Homo sapien
gctggactcggtgcatcggctgaca

SEQ ID NO: 2996134 - DNA, 25 bp, Homo sapien
aaaacagcagcagtagtttactctg

SEQ ID NO: 2996135 - DNA, 25 bp, Homo sapien
cagcagcagtagtttactctgggct

SEQ ID NO: 2996136 - DNA, 25 bp, Homo sapien
ttaaagcagtgatgtgcacggtgct

SEQ ID NO: 2996137 - DNA, 25 bp, Homo sapien
taaagcagtgatgtgcacggtgctg

SEQ ID NO: 2996138 - DNA, 25 bp, Homo sapien
aaagccagtggcccctgtctgcccg

SEQ ID NO: 2996139 - DNA, 25 bp, Homo sapien
gcccccttggtctccacacgtccag

SEQ ID NO: 2996140 - DNA, 25 bp, Homo sapien
agccagtggcccctgtctgcccggg

SEQ ID NO: 2996141 - DNA, 25 bp, Homo sapien
tctccacacgtccagccccactggc

SEQ ID NO: 2996142 - DNA, 25 bp, Homo sapien
tgctctgctcagacagctgcccctc

SEQ ID NO: 2996143 - DNA, 25 bp, Homo sapien
ctctgctctgctcagacagctgccc

SEQ ID NO: 2996144 - DNA, 25 bp, Homo sapien
tctgctctgctcagacagctgcccc

SEQ ID NO: 2996145 - DNA, 25 bp, Homo sapien
ctctgctcagacagctgcccctcac

SEQ ID NO: 2996146 - DNA, 25 bp, Homo sapien
ttcagaacgcggaagaagtccttgg

SEQ ID NO: 2996147 - DNA, 25 bp, Homo sapien
ttggcatcagccaacttgtggaatt

SEQ ID NO: 2996148 - DNA, 25 bp, Homo sapien
cttgttaaggttcagaacgcggaag

SEQ ID NO: 2996149 - DNA, 25 bp, Homo sapien
catgccaggcagtcgctcaaaaata

SEQ ID NO: 2996150 - DNA, 25 bp, Homo sapien
tctcacggaaagacaagtggcacct

SEQ ID NO: 2996151 - DNA, 25 bp, Homo sapien
tctcgtgtccgaaaacgtgcagccg

SEQ ID NO: 2996152 - DNA, 25 bp, Homo sapien
ggactaatacaacctgtctcacgga

SEQ ID NO: 2996153 - DNA, 25 bp, Homo sapien
gccttgccccaagctgatcggtcta

SEQ ID NO: 2996154 - DNA, 25 bp, Homo sapien
tagcctggccaatactctgtcttaa

SEQ ID NO: 2996155 - DNA, 25 bp, Homo sapien
tttgtcaatttcaagaacaatgtta

SEQ ID NO: 2996156 - DNA, 25 bp, Homo sapien
ctttgtcaatttcaagaacaatgtt

SEQ ID NO: 2996157 - DNA, 25 bp, Homo sapien
agcctggccaatactctgtcttaaa

SEQ ID NO: 2996158 - DNA, 25 bp, Homo sapien
caacgttaatagatggtctatgcaa

SEQ ID NO: 2996159 - DNA, 25 bp, Homo sapien
tacacaccttaatgagaaattcaga

SEQ ID NO: 2996160 - DNA, 25 bp, Homo sapien
gaaatagagaatgttaggtatctgc

SEQ ID NO: 2996161 - DNA, 25 bp, Homo sapien
aatgttaggtatctgctgattacac

SEQ ID NO: 2996162 - DNA, 25 bp, Homo sapien
cactgaggttgaatttagcagcaaa

SEQ ID NO: 2996163 - DNA, 25 bp, Homo sapien
cacagacactaccagcactttgtgc

SEQ ID NO: 2996164 - DNA, 25 bp, Homo sapien
cttctggatgcatcagttacactga

SEQ ID NO: 2996165 - DNA, 25 bp, Homo sapien
cacacagacactaccagcactttgt

SEQ ID NO: 2996166 - DNA, 25 bp, Homo sapien
cccagaggggtcagctcccactgtg

SEQ ID NO: 2996167 - DNA, 25 bp, Homo sapien
ggccagtgtgggaatctcccagtgt

SEQ ID NO: 2996168 - DNA, 25 bp, Homo sapien
ggtgacttggaggttgctgggccag

SEQ ID NO: 2996169 - DNA, 25 bp, Homo sapien
tccgtgttgtcagaaggtggtcact

SEQ ID NO: 2996170 - DNA, 25 bp, Homo sapien
tgcacactgaccatcatgctatgag

SEQ ID NO: 2996171 - DNA, 25 bp, Homo sapien
tttaaaagccgctgtagaataataa

SEQ ID NO: 2996172 - DNA, 25 bp, Homo sapien
ttctgaacttgcacactgaccatca

SEQ ID NO: 2996173 - DNA, 25 bp, Homo sapien
tggcaactcgctcattttccctttc

SEQ ID NO: 2996174 - DNA, 25 bp, Homo sapien
agcatgggcagggtgcgttcctcct

SEQ ID NO: 2996175 - DNA, 25 bp, Homo sapien
gcagctatcgtcgtatcaaatacat

SEQ ID NO: 2996176 - DNA, 25 bp, Homo sapien
tgactctccaggatactaaaatccg

SEQ ID NO: 2996177 - DNA, 25 bp, Homo sapien
cactgtgctggcgatagcgacgcac

SEQ ID NO: 2996178 - DNA, 25 bp, Homo sapien
tagagctctcctatgctcccacagg

SEQ ID NO: 2996179 - DNA, 25 bp, Homo sapien
cacctcaggctaggattcgtagtag

SEQ ID NO: 2996180 - DNA, 25 bp, Homo sapien
cagcctacgactagcttagatagag

SEQ ID NO: 2996181 - DNA, 25 bp, Homo sapien
tggtttaaacagtgcgccctgagag

SEQ ID NO: 2996182 - DNA, 25 bp, Homo sapien
agtaaggcaaaccatacagctgaaa

SEQ ID NO: 2996183 - DNA, 25 bp, Homo sapien
gtaaggcaaaccatacagctgaaag

SEQ ID NO: 2996184 - DNA, 25 bp, Homo sapien
aagaagtcactaacatccctgtccc

SEQ ID NO: 2996185 - DNA, 25 bp, Homo sapien
ctgaaagaagtcactaacatccctg

SEQ ID NO: 2996186 - DNA, 25 bp, Homo sapien
aggctactgggaaatgggagcatcc

SEQ ID NO: 2996187 - DNA, 25 bp, Homo sapien
ctggaggctactgggaaatgggagc

SEQ ID NO: 2996188 - DNA, 25 bp, Homo sapien
ggaggctactgggaaatgggagcat

SEQ ID NO: 2996189 - DNA, 25 bp, Homo sapien
gaggctactgggaaatgggagcatc

SEQ ID NO: 2996190 - DNA, 25 bp, Homo sapien
aggagctcgtgctggacccaaaacc

SEQ ID NO: 2996191 - DNA, 25 bp, Homo sapien
gctcgtgctggacccaaaacccgtc

SEQ ID NO: 2996192 - DNA, 25 bp, Homo sapien
ggagctcgtgctggacccaaaaccc

SEQ ID NO: 2996193 - DNA, 25 bp, Homo sapien
agctcgtgctggacccaaaacccgt

SEQ ID NO: 2996194 - DNA, 25 bp, Homo sapien
tctggtcttcctgtaacgcaccagg

SEQ ID NO: 2996195 - DNA, 25 bp, Homo sapien
ggaatgctgagctcgagtccctgcc

SEQ ID NO: 2996196 - DNA, 25 bp, Homo sapien
cctgtaacgcaccagggaatgctga

SEQ ID NO: 2996197 - DNA, 25 bp, Homo sapien
cctgccgccccagggtgaagccaga

SEQ ID NO: 2996198 - DNA, 25 bp, Homo sapien
ctgctgtctggcgaaataatccttc

SEQ ID NO: 2996199 - DNA, 25 bp, Homo sapien
cagtgatggggcgacccagcacccg

SEQ ID NO: 2996200 - DNA, 25 bp, Homo sapien
gctgtctggcgaaataatccttcac

SEQ ID NO: 2996201 - DNA, 25 bp, Homo sapien
acccgctcggcgtatcggacccagc

SEQ ID NO: 2996202 - DNA, 25 bp, Homo sapien
tacaggaggacacatagctctgggc

SEQ ID NO: 2996203 - DNA, 25 bp, Homo sapien
taacaaggctgccaaatgtgcgtgc

SEQ ID NO: 2996204 - DNA, 25 bp, Homo sapien
gactttcctgaatcttcccaagcga

SEQ ID NO: 2996205 - DNA, 25 bp, Homo sapien
tcggtcctgcctaaactgaacgtgt

SEQ ID NO: 2996206 - DNA, 25 bp, Homo sapien
cctcctggaagaaccgggaaggctg

SEQ ID NO: 2996207 - DNA, 25 bp, Homo sapien
agcaccagcactccatccatgtctg

SEQ ID NO: 2996208 - DNA, 25 bp, Homo sapien
gcaccagcactccatccatgtctgt

SEQ ID NO: 2996209 - DNA, 25 bp, Homo sapien
ggcagcttacgcttggtgcccagaa

SEQ ID NO: 2996210 - DNA, 25 bp, Homo sapien
gccgggccccacagatgaaagtgct

SEQ ID NO: 2996211 - DNA, 25 bp, Homo sapien
gccatcgagcctggctgcatgcagc

SEQ ID NO: 2996212 - DNA, 25 bp, Homo sapien
actgttgtgggtctgaggccgggcc

SEQ ID NO: 2996213 - DNA, 25 bp, Homo sapien
atgttaacacgcagtcagcgccccg

SEQ ID NO: 2996214 - DNA, 25 bp, Homo sapien
tcttgtcataacaaggggccacaat

SEQ ID NO: 2996215 - DNA, 25 bp, Homo sapien
ctgatgttaacacgcagtcagcgcc

SEQ ID NO: 2996216 - DNA, 25 bp, Homo sapien
ccacaatgacgtggaaaatcttctc

SEQ ID NO: 2996217 - DNA, 25 bp, Homo sapien
gcaatcttgtctcgctgtaacctct

SEQ ID NO: 2996218 - DNA, 25 bp, Homo sapien
agtggtgcaatcttgtctcgctgta

SEQ ID NO: 2996219 - DNA, 25 bp, Homo sapien
gtgtgcactaccacgcctggctaat

SEQ ID NO: 2996220 - DNA, 25 bp, Homo sapien
gtgcactaccacgcctggctaattt

SEQ ID NO: 2996221 - DNA, 25 bp, Homo sapien
ttgacattagtgaccctgggtgacc

SEQ ID NO: 2996222 - DNA, 25 bp, Homo sapien
gggtgacctccctcttatgaaatct

SEQ ID NO: 2996223 - DNA, 25 bp, Homo sapien
ctgcagacaaacgaagtaagacact

SEQ ID NO: 2996224 - DNA, 25 bp, Homo sapien
cctgcaggagatttgacattagtga

SEQ ID NO: 2996225 - DNA, 25 bp, Homo sapien
ttgctccattatttgagcaatttca

SEQ ID NO: 2996226 - DNA, 25 bp, Homo sapien
tgctccattatttgagcaatttcac

SEQ ID NO: 2996227 - DNA, 25 bp, Homo sapien
gagtgtcgacggcagcatctctcac

SEQ ID NO: 2996228 - DNA, 25 bp, Homo sapien
agtgtcgacggcagcatctctcact

SEQ ID NO: 2996229 - DNA, 25 bp, Homo sapien
tcacatggcctcgtcataaagcagg

SEQ ID NO: 2996230 - DNA, 25 bp, Homo sapien
aggcacagacggcactcaggaagaa

SEQ ID NO: 2996231 - DNA, 25 bp, Homo sapien
tgccccatagaccacacggaatgtg

SEQ ID NO: 2996232 - DNA, 25 bp, Homo sapien
tggtatcccattcaacagctatagg

SEQ ID NO: 2996233 - DNA, 25 bp, Homo sapien
ggccttgctgggtatcgaggtcacc

SEQ ID NO: 2996234 - DNA, 25 bp, Homo sapien
ttgctgggtatcgaggtcaccgccc

SEQ ID NO: 2996235 - DNA, 25 bp, Homo sapien
cctgggccttgctgggtatcgaggt

SEQ ID NO: 2996236 - DNA, 25 bp, Homo sapien
agactgccactcttggtgcaaaggg

SEQ ID NO: 2996237 - DNA, 25 bp, Homo sapien
ctgttggcgaggacacacgctgctg

SEQ ID NO: 2996238 - DNA, 25 bp, Homo sapien
ctgggatgcggactgttggcgagga

SEQ ID NO: 2996239 - DNA, 25 bp, Homo sapien
cggactgttggcgaggacacacgct

SEQ ID NO: 2996240 - DNA, 25 bp, Homo sapien
atgcggactgttggcgaggacacac

SEQ ID NO: 2996241 - DNA, 25 bp, Homo sapien
ccccaaaagggcacgaatgcagcac

SEQ ID NO: 2996242 - DNA, 25 bp, Homo sapien
cttcccccaaaagggcacgaatgca

SEQ ID NO: 2996243 - DNA, 25 bp, Homo sapien
cccccaaaagggcacgaatgcagca

SEQ ID NO: 2996244 - DNA, 25 bp, Homo sapien
ttcccccaaaagggcacgaatgcag

SEQ ID NO: 2996245 - DNA, 25 bp, Homo sapien
acaatccaagttcgccaccaaagaa

SEQ ID NO: 2996246 - DNA, 25 bp, Homo sapien
caaagaagctaaatcctgtacagat

SEQ ID NO: 2996247 - DNA, 25 bp, Homo sapien
cctgtacagatgtttaaactttgca

SEQ ID NO: 2996248 - DNA, 25 bp, Homo sapien
gcaaggcggaggactctcagtcacg

SEQ ID NO: 2996249 - DNA, 25 bp, Homo sapien
ctgacgtacagtgacagaaagagtg

SEQ ID NO: 2996250 - DNA, 25 bp, Homo sapien
tacagtgacagaaagagtgaaacca

SEQ ID NO: 2996251 - DNA, 25 bp, Homo sapien
tgacgtacagtgacagaaagagtga

SEQ ID NO: 2996252 - DNA, 25 bp, Homo sapien
gacagaaagagtgaaaccagacttc

SEQ ID NO: 2996253 - DNA, 25 bp, Homo sapien
gcagagaaaatacaagtccttcatg

SEQ ID NO: 2996254 - DNA, 25 bp, Homo sapien
agaaaatacaagtccttcatgaatg

SEQ ID NO: 2996255 - DNA, 25 bp, Homo sapien
ctcacaaggcagagaaaatacaagt

SEQ ID NO: 2996256 - DNA, 25 bp, Homo sapien
cagagaaaatacaagtccttcatga

SEQ ID NO: 2996257 - DNA, 25 bp, Homo sapien
tttgtcctccttcaagtctccaaac

SEQ ID NO: 2996258 - DNA, 25 bp, Homo sapien
ctttgtcctccttcaagtctccaaa

SEQ ID NO: 2996259 - DNA, 25 bp, Homo sapien
tgaacagctccttggccgcatgtct

SEQ ID NO: 2996260 - DNA, 25 bp, Homo sapien
ccgcatgtctgaagatgtgtgccag

SEQ ID NO: 2996261 - DNA, 25 bp, Homo sapien
tgtgtgccaggtgcccgtctgagct

SEQ ID NO: 2996262 - DNA, 25 bp, Homo sapien
tcctccacatcctcgttgaacagct

SEQ ID NO: 2996263 - DNA, 25 bp, Homo sapien
ggatcatgttctggatgtttcgaaa

SEQ ID NO: 2996264 - DNA, 25 bp, Homo sapien
gatgtttcgaaagccataggctgca

SEQ ID NO: 2996265 - DNA, 25 bp, Homo sapien
ttcttctcaagggtgacctcttgga

SEQ ID NO: 2996266 - DNA, 25 bp, Homo sapien
taggctgcagcaaagcgtaacacca

SEQ ID NO: 2996267 - DNA, 25 bp, Homo sapien
caggcgaggacctccacaaagtgga

SEQ ID NO: 2996268 - DNA, 25 bp, Homo sapien
cagcacaggcgaggacctccacaaa

SEQ ID NO: 2996269 - DNA, 25 bp, Homo sapien
agcacaggcgaggacctccacaaag

SEQ ID NO: 2996270 - DNA, 25 bp, Homo sapien
cgaggacctccacaaagtggaatgg

SEQ ID NO: 2996271 - DNA, 25 bp, Homo sapien
ctgcacgtgtgcactggactccgga

SEQ ID NO: 2996272 - DNA, 25 bp, Homo sapien
tccgcatgtccgtctggagtctggg

SEQ ID NO: 2996273 - DNA, 25 bp, Homo sapien
cgcagcagggccttatccgcatgtc

SEQ ID NO: 2996274 - DNA, 25 bp, Homo sapien
tgtcagcgtaaatgccttccatctg

SEQ ID NO: 2996275 - DNA, 25 bp, Homo sapien
cgctcctggctctggtacgtggtat

SEQ ID NO: 2996276 - DNA, 25 bp, Homo sapien
ggctctggtacgtggtatgcagcac

SEQ ID NO: 2996277 - DNA, 25 bp, Homo sapien
tcctggctctggtacgtggtatgca

SEQ ID NO: 2996278 - DNA, 25 bp, Homo sapien
cacgctcctggctctggtacgtggt

SEQ ID NO: 2996279 - DNA, 25 bp, Homo sapien
tggccccaagagcagctggaaggcc

SEQ ID NO: 2996280 - DNA, 25 bp, Homo sapien
cttggctctggccccaagagcagct

SEQ ID NO: 2996281 - DNA, 25 bp, Homo sapien
gccccaagagcagctggaaggccct

SEQ ID NO: 2996282 - DNA, 25 bp, Homo sapien
cccaagagcagctggaaggccctgg

SEQ ID NO: 2996283 - DNA, 25 bp, Homo sapien
agtgtctttaatactccactcaggg

SEQ ID NO: 2996284 - DNA, 25 bp, Homo sapien
aagtgtctttaatactccactcagg

SEQ ID NO: 2996285 - DNA, 25 bp, Homo sapien
gtgtctttaatactccactcagggc

SEQ ID NO: 2996286 - DNA, 25 bp, Homo sapien
ttaagtgtctttaatactccactca

SEQ ID NO: 2996287 - DNA, 25 bp, Homo sapien
cctattatgaagatagcaccacatg

SEQ ID NO: 2996288 - DNA, 25 bp, Homo sapien
tattatgaagatagcaccacatgaa

SEQ ID NO: 2996289 - DNA, 25 bp, Homo sapien
cacctattatgaagatagcaccaca

SEQ ID NO: 2996290 - DNA, 25 bp, Homo sapien
ccacacctattatgaagatagcacc

SEQ ID NO: 2996291 - DNA, 25 bp, Homo sapien
gaagtgctcctctcatgttaaaacg

SEQ ID NO: 2996292 - DNA, 25 bp, Homo sapien
gatctgggactgtggactgcctgcc

SEQ ID NO: 2996293 - DNA, 25 bp, Homo sapien
aagtcatgtgcattagaacctctgg

SEQ ID NO: 2996294 - DNA, 25 bp, Homo sapien
taaaacgttccaatctgccaggcac

SEQ ID NO: 2996295 - DNA, 25 bp, Homo sapien
tccattctcgtgtctgtcacccttg

SEQ ID NO: 2996296 - DNA, 25 bp, Homo sapien
actgaatgtacaagtttgagttggg

SEQ ID NO: 2996297 - DNA, 25 bp, Homo sapien
gctggtgcgggcagccttctcaatt

SEQ ID NO: 2996298 - DNA, 25 bp, Homo sapien
tgcgagtccgactgaaagactgaat

SEQ ID NO: 2996299 - DNA, 25 bp, Homo sapien
gttccatggagtttcaggcgtctgc

SEQ ID NO: 2996300 - DNA, 25 bp, Homo sapien
gagtctcccatgtagaaactcctgg

SEQ ID NO: 2996301 - DNA, 25 bp, Homo sapien
gctgggaaggccatcgctcgagtta

SEQ ID NO: 2996302 - DNA, 25 bp, Homo sapien
tggaaacccaactgtatatagactg

SEQ ID NO: 2996303 - DNA, 25 bp, Homo sapien
tctaccgacttctggtgttctaggc

SEQ ID NO: 2996304 - DNA, 25 bp, Homo sapien
caagggtggccctctaccgacttct

SEQ ID NO: 2996305 - DNA, 25 bp, Homo sapien
ggtgccctgcgcagtggttactgca

SEQ ID NO: 2996306 - DNA, 25 bp, Homo sapien
ctgtggtgccctgcgcagtggttac

SEQ ID NO: 2996307 - DNA, 25 bp, Homo sapien
ctggtgcagaggcagacccagcaca

SEQ ID NO: 2996308 - DNA, 25 bp, Homo sapien
gacacctagctggtgcagaggcaga

SEQ ID NO: 2996309 - DNA, 25 bp, Homo sapien
gtgcagaggcagacccagcacacac

SEQ ID NO: 2996310 - DNA, 25 bp, Homo sapien
agaggcagacccagcacacacctca

SEQ ID NO: 2996311 - DNA, 25 bp, Homo sapien
gggaaggagtgccagctgctacatg

SEQ ID NO: 2996312 - DNA, 25 bp, Homo sapien
gaaggagtgccagctgctacatggt

SEQ ID NO: 2996313 - DNA, 25 bp, Homo sapien
ggaaggagtgccagctgctacatgg

SEQ ID NO: 2996314 - DNA, 25 bp, Homo sapien
ctgacatcccaaaatgccagtgctg

SEQ ID NO: 2996315 - DNA, 25 bp, Homo sapien
ggacagaatcttcaggtgccacagc

SEQ ID NO: 2996316 - DNA, 25 bp, Homo sapien
acatcccaaaatgccagtgctgccg

SEQ ID NO: 2996317 - DNA, 25 bp, Homo sapien
tgtgtccagactggctcagggacag

SEQ ID NO: 2996318 - DNA, 25 bp, Homo sapien
ttgtcccagaaattgtggcagttgt

SEQ ID NO: 2996319 - DNA, 25 bp, Homo sapien
gcctcatagctttgtcccagaaatt

SEQ ID NO: 2996320 - DNA, 25 bp, Homo sapien
tgtggcagttgtgggctcattgccc

SEQ ID NO: 2996321 - DNA, 25 bp, Homo sapien
attgtggcagttgtgggctcattgc

SEQ ID NO: 2996322 - DNA, 25 bp, Homo sapien
gtgggctggcgggcgtcgtgcaggg

SEQ ID NO: 2996323 - DNA, 25 bp, Homo sapien
cctgttgctgccatcgtgggctggc

SEQ ID NO: 2996324 - DNA, 25 bp, Homo sapien
tgcacgggcccatcacctgttgctg

SEQ ID NO: 2996325 - DNA, 25 bp, Homo sapien
catcacctgttgctgccatcgtggg

SEQ ID NO: 2996326 - DNA, 25 bp, Homo sapien
aggacgcccgatgcccctcttttgg

SEQ ID NO: 2996327 - DNA, 25 bp, Homo sapien
gatgccgcagcttcgtagtcgggct

SEQ ID NO: 2996328 - DNA, 25 bp, Homo sapien
ggatctgcacgagcaaacgcttccg

SEQ ID NO: 2996329 - DNA, 25 bp, Homo sapien
tgacgctcgggcatcccgggtagaa

SEQ ID NO: 2996330 - DNA, 25 bp, Homo sapien
cgccagctccgtccgcaaacccggg

SEQ ID NO: 2996331 - DNA, 25 bp, Homo sapien
ctcgcctccgccttcagaggcgcca

SEQ ID NO: 2996332 - DNA, 25 bp, Homo sapien
tcaaggagcggggccctcgcctccg

SEQ ID NO: 2996333 - DNA, 25 bp, Homo sapien
cagaggcgccagctccgtccgcaaa

SEQ ID NO: 2996334 - DNA, 25 bp, Homo sapien
tgtactcatttgctcgtccaggaca

SEQ ID NO: 2996335 - DNA, 25 bp, Homo sapien
gcactgggccggattccagggccca

SEQ ID NO: 2996336 - DNA, 25 bp, Homo sapien
agggctgccatgtactcatttgctc

SEQ ID NO: 2996337 - DNA, 25 bp, Homo sapien
gccatgtactcatttgctcgtccag

SEQ ID NO: 2996338 - DNA, 25 bp, Homo sapien
caggatgtgtcctggagtgcaggca

SEQ ID NO: 2996339 - DNA, 25 bp, Homo sapien
aggcgcagcaggagctcccctgcaa

SEQ ID NO: 2996340 - DNA, 25 bp, Homo sapien
cctctgtgttctgagccacgtgcat

SEQ ID NO: 2996341 - DNA, 25 bp, Homo sapien
ggagctcccctgcaacctctgtgtt

SEQ ID NO: 2996342 - DNA, 25 bp, Homo sapien
tgctttgctgtgcgttttgtccgat

SEQ ID NO: 2996343 - DNA, 25 bp, Homo sapien
gacaaccacaggtaacacctgtaat

SEQ ID NO: 2996344 - DNA, 25 bp, Homo sapien
ggacaaccacaggtaacacctgtaa

SEQ ID NO: 2996345 - DNA, 25 bp, Homo sapien
tgctgtgcgttttgtccgattcttt

SEQ ID NO: 2996346 - DNA, 25 bp, Homo sapien
ccggtggcgcgggccgaggcccagg

SEQ ID NO: 2996347 - DNA, 25 bp, Homo sapien
caggccgcgcgggtcgtcggccgcc

SEQ ID NO: 2996348 - DNA, 25 bp, Homo sapien
gccgcgcaccggagctgagggaggg

SEQ ID NO: 2996349 - DNA, 25 bp, Homo sapien
gccggtggcgcgggccgaggcccag

SEQ ID NO: 2996350 - DNA, 25 bp, Homo sapien
ggtggcgtgcccgcgcccgagagcg

SEQ ID NO: 2996351 - DNA, 25 bp, Homo sapien
gcgggtggcgtgcccgcgcccgaga

SEQ ID NO: 2996352 - DNA, 25 bp, Homo sapien
ccgcgggtggcgtgcccgcgcccga

SEQ ID NO: 2996353 - DNA, 25 bp, Homo sapien
gccgcccgcgggtggcgtgcccgcg

SEQ ID NO: 2996354 - DNA, 25 bp, Homo sapien
agcgcttcttcatcagatactcgaa

SEQ ID NO: 2996355 - DNA, 25 bp, Homo sapien
ttgcggccgatggtcaccgagcgct

SEQ ID NO: 2996356 - DNA, 25 bp, Homo sapien
cgatggtcaccgagcgcttcttcat

SEQ ID NO: 2996357 - DNA, 25 bp, Homo sapien
caccgagcgcttcttcatcagatac

SEQ ID NO: 2996358 - DNA, 25 bp, Homo sapien
agcgcaggtagaagtcgccgccggc

SEQ ID NO: 2996359 - DNA, 25 bp, Homo sapien
ccggcgtcgggcctgggctgcgcgg

SEQ ID NO: 2996360 - DNA, 25 bp, Homo sapien
tgaagatctcgaggtggcgccggga

SEQ ID NO: 2996361 - DNA, 25 bp, Homo sapien
tgaagctcgagtggcccatgctcac

SEQ ID NO: 2996362 - DNA, 25 bp, Homo sapien
ggcgccccgcgcctctggaacacgc

SEQ ID NO: 2996363 - DNA, 25 bp, Homo sapien
cccgcgcctctggaacacgccgtcc

SEQ ID NO: 2996364 - DNA, 25 bp, Homo sapien
ccgcgcctctggaacacgccgtcca

SEQ ID NO: 2996365 - DNA, 25 bp, Homo sapien
gccccgcgcctctggaacacgccgt

SEQ ID NO: 2996366 - DNA, 25 bp, Homo sapien
cacatttctgttcagcgcgacctcg

SEQ ID NO: 2996367 - DNA, 25 bp, Homo sapien
cagaaaccttgacccgcgcgcgcag

SEQ ID NO: 2996368 - DNA, 25 bp, Homo sapien
acagcacacgtgaactccccgcacg

SEQ ID NO: 2996369 - DNA, 25 bp, Homo sapien
gacctcgctgcagaatagaaacagc

SEQ ID NO: 2996370 - DNA, 25 bp, Homo sapien
cagattgaaaatccatcatgcttga

SEQ ID NO: 2996371 - DNA, 25 bp, Homo sapien
gaaaatccatcatgcttgaagcgtc

SEQ ID NO: 2996372 - DNA, 25 bp, Homo sapien
gagcacagattgaaaatccatcatg

SEQ ID NO: 2996373 - DNA, 25 bp, Homo sapien
ccatcatgcttgaagcgtcttccaa

SEQ ID NO: 2996374 - DNA, 25 bp, Homo sapien
aattctggccctcactgaaaggtca

SEQ ID NO: 2996375 - DNA, 25 bp, Homo sapien
caatacaaatcgttctggctgaatg

SEQ ID NO: 2996376 - DNA, 25 bp, Homo sapien
tggctgaatggtgaggagaattttc

SEQ ID NO: 2996377 - DNA, 25 bp, Homo sapien
tgaaaggtcaacttatctccatgtt

SEQ ID NO: 2996378 - DNA, 25 bp, Homo sapien
caaataagagaccaacgacgggttg

SEQ ID NO: 2996379 - DNA, 25 bp, Homo sapien
cctaaactacttatgtactcttgca

SEQ ID NO: 2996380 - DNA, 25 bp, Homo sapien
tgaaatgagccaaattttaaaccta

SEQ ID NO: 2996381 - DNA, 25 bp, Homo sapien
tatttcagccttaggacaggcgcag

SEQ ID NO: 2996382 - DNA, 25 bp, Homo sapien
tccagaagccactgactgtcggctc

SEQ ID NO: 2996383 - DNA, 25 bp, Homo sapien
ttattggagtctccacctggaaagc

SEQ ID NO: 2996384 - DNA, 25 bp, Homo sapien
tgcccatctgcattctgagtaggac

SEQ ID NO: 2996385 - DNA, 25 bp, Homo sapien
tactgggattctccgggaagctcag

SEQ ID NO: 2996386 - DNA, 25 bp, Homo sapien
aataaattagccctgaatggccatg

SEQ ID NO: 2996387 - DNA, 25 bp, Homo sapien
cacttcactattaataaatgatcag

SEQ ID NO: 2996388 - DNA, 25 bp, Homo sapien
ggccatgcaggcctgtactctcagc

SEQ ID NO: 2996389 - DNA, 25 bp, Homo sapien
ggagccacgcctgactacaatcact

SEQ ID NO: 2996390 - DNA, 25 bp, Homo sapien
ctgcaaccgcaggtctaaatgggac

SEQ ID NO: 2996391 - DNA, 25 bp, Homo sapien
atctttctcttcaacaaagcaggaa

SEQ ID NO: 2996392 - DNA, 25 bp, Homo sapien
tctttctcttcaacaaagcaggaat

SEQ ID NO: 2996393 - DNA, 25 bp, Homo sapien
tttctcttcaacaaagcaggaatag

SEQ ID NO: 2996394 - DNA, 25 bp, Homo sapien
aatctttctcttcaacaaagcagga

SEQ ID NO: 2996395 - DNA, 25 bp, Homo sapien
tttttatgtctgcacaatgtgtgtt

SEQ ID NO: 2996396 - DNA, 25 bp, Homo sapien
ttttatgtctgcacaatgtgtgttt

SEQ ID NO: 2996397 - DNA, 25 bp, Homo sapien
ttttttatgtctgcacaatgtgtgt

SEQ ID NO: 2996398 - DNA, 25 bp, Homo sapien
gccgcatatatgagggtcccgttaa

SEQ ID NO: 2996399 - DNA, 25 bp, Homo sapien
tggtgtcaacgaacctactacgcga

SEQ ID NO: 2996400 - DNA, 25 bp, Homo sapien
cgtttcaagtcaatgatgggccgca

SEQ ID NO: 2996401 - DNA, 25 bp, Homo sapien
tctacctatcgacctgagacagggt

SEQ ID NO: 2996402 - DNA, 25 bp, Homo sapien
ccaggtctgtgcacatgctctgcag

SEQ ID NO: 2996403 - DNA, 25 bp, Homo sapien
aagactcgggaacaacaagccacca

SEQ ID NO: 2996404 - DNA, 25 bp, Homo sapien
gagccaggtctgtgcacatgctctg

SEQ ID NO: 2996405 - DNA, 25 bp, Homo sapien
gcagcacccggtgcaaagactcggg

SEQ ID NO: 2996406 - DNA, 25 bp, Homo sapien
ttacttctggggacatgtttcaacg

SEQ ID NO: 2996407 - DNA, 25 bp, Homo sapien
catgtttcaacgagttcgttaccat

SEQ ID NO: 2996408 - DNA, 25 bp, Homo sapien
gggacatgtttcaacgagttcgtta

SEQ ID NO: 2996409 - DNA, 25 bp, Homo sapien
acttctggggacatgtttcaacgag

SEQ ID NO: 2996410 - DNA, 25 bp, Homo sapien
atcatcacaggtccagtttgcaaca

SEQ ID NO: 2996411 - DNA, 25 bp, Homo sapien
gggcccctatatcctttggcaagca

SEQ ID NO: 2996412 - DNA, 25 bp, Homo sapien
aagggcccctatatcctttggcaag

SEQ ID NO: 2996413 - DNA, 25 bp, Homo sapien
ccctatatcctttggcaagcaaaaa

SEQ ID NO: 2996414 - DNA, 25 bp, Homo sapien
tgcccgcccggcaatggataatttt

SEQ ID NO: 2996415 - DNA, 25 bp, Homo sapien
tctacaagaagtattatttcacaat

SEQ ID NO: 2996416 - DNA, 25 bp, Homo sapien
catccacttttacggtctaaatgtt

SEQ ID NO: 2996417 - DNA, 25 bp, Homo sapien
accgtgcccgcccggcaatggataa

SEQ ID NO: 2996418 - DNA, 25 bp, Homo sapien
tttcagtagagatggggtttccatg

SEQ ID NO: 2996419 - DNA, 25 bp, Homo sapien
tcagtagagatggggtttccatgtt

SEQ ID NO: 2996420 - DNA, 25 bp, Homo sapien
acagagtctccattgccaggctgga

SEQ ID NO: 2996421 - DNA, 25 bp, Homo sapien
agtagagatggggtttccatgttgg

SEQ ID NO: 2996422 - DNA, 25 bp, Homo sapien
acaggcatccgccatcacactcggc

SEQ ID NO: 2996423 - DNA, 25 bp, Homo sapien
tgacctcggctcaccgcaatttcca

SEQ ID NO: 2996424 - DNA, 25 bp, Homo sapien
gctggactgcgatggcatgacctcg

SEQ ID NO: 2996425 - DNA, 25 bp, Homo sapien
ggcatccgccatcacactcggctaa

SEQ ID NO: 2996426 - DNA, 25 bp, Homo sapien
gacctgcagcgaagagctcctgcat

SEQ ID NO: 2996427 - DNA, 25 bp, Homo sapien
ctctccctccactcgggacctgcag

SEQ ID NO: 2996428 - DNA, 25 bp, Homo sapien
gggacctgcagcgaagagctcctgc

SEQ ID NO: 2996429 - DNA, 25 bp, Homo sapien
actcgggacctgcagcgaagagctc

SEQ ID NO: 2996430 - DNA, 25 bp, Homo sapien
caggtctgcagttcggtgtggcaac

SEQ ID NO: 2996431 - DNA, 25 bp, Homo sapien
tcaagtggcctcgtaaaacaaagac

SEQ ID NO: 2996432 - DNA, 25 bp, Homo sapien
agatcctcacactcggagctacagg

SEQ ID NO: 2996433 - DNA, 25 bp, Homo sapien
tgtgagaaactatcacgctggtcct

SEQ ID NO: 2996434 - DNA, 25 bp, Homo sapien
gttacgcacaacgtcctcgtccaga

SEQ ID NO: 2996435 - DNA, 25 bp, Homo sapien
gtcctcgtccagacccggctgagtg

SEQ ID NO: 2996436 - DNA, 25 bp, Homo sapien
ttctccgtagagttacgcacaacgt

SEQ ID NO: 2996437 - DNA, 25 bp, Homo sapien
ccggctgagtgctctccgcggacag

SEQ ID NO: 2996438 - DNA, 25 bp, Homo sapien
ccccatattatctgtgagctcgtac

SEQ ID NO: 2996439 - DNA, 25 bp, Homo sapien
gcttggatgccaagtggctccgcca

SEQ ID NO: 2996440 - DNA, 25 bp, Homo sapien
gatgccaagtggctccgccatctct

SEQ ID NO: 2996441 - DNA, 25 bp, Homo sapien
agggcaaggtgcttggatgccaagt

SEQ ID NO: 2996442 - DNA, 25 bp, Homo sapien
caaggtgcttggatgccaagtggct

SEQ ID NO: 2996443 - DNA, 25 bp, Homo sapien
cctttcaacagacattacttctaga

SEQ ID NO: 2996444 - DNA, 25 bp, Homo sapien
tgagatccgactgagcttagctccc

SEQ ID NO: 2996445 - DNA, 25 bp, Homo sapien
ccatgtatctgagatccgactgagc

SEQ ID NO: 2996446 - DNA, 25 bp, Homo sapien
gagcttagctccctttcaacagaca

SEQ ID NO: 2996447 - DNA, 25 bp, Homo sapien
tctctcttctcgctggacagggcag

SEQ ID NO: 2996448 - DNA, 25 bp, Homo sapien
tgtacggccttcactggagactcag

SEQ ID NO: 2996449 - DNA, 25 bp, Homo sapien
cgagatgtgtggctgtacggccttc

SEQ ID NO: 2996450 - DNA, 25 bp, Homo sapien
cagggcagtgaacgttatcttgatg

SEQ ID NO: 2996451 - DNA, 25 bp, Homo sapien
cacggtttggcattccttgcaacag

SEQ ID NO: 2996452 - DNA, 25 bp, Homo sapien
tctgcaaatgtgatactctaggaat

SEQ ID NO: 2996453 - DNA, 25 bp, Homo sapien
aatagcagccaatccaatgggtgtg

SEQ ID NO: 2996454 - DNA, 25 bp, Homo sapien
tgaagcgcattcacacagaggtgca

SEQ ID NO: 2996455 - DNA, 25 bp, Homo sapien
gatggcatcactcggcccaccttgt

SEQ ID NO: 2996456 - DNA, 25 bp, Homo sapien
ttgtcagccattaaattgaggtcag

SEQ ID NO: 2996457 - DNA, 25 bp, Homo sapien
tgagttgtcagccattaaattgagg

SEQ ID NO: 2996458 - DNA, 25 bp, Homo sapien
tcagatggcatcactcggcccacct

SEQ ID NO: 2996459 - DNA, 25 bp, Homo sapien
caaacgtgccaggtcatagtgtgac

SEQ ID NO: 2996460 - DNA, 25 bp, Homo sapien
caagtgacaaacgtgccctatacaa

SEQ ID NO: 2996461 - DNA, 25 bp, Homo sapien
acaaacatgagtggcagggtgtgca

SEQ ID NO: 2996462 - DNA, 25 bp, Homo sapien
tagtgtgactctcaacaactgctgt

SEQ ID NO: 2996463 - DNA, 25 bp, Homo sapien
gaccctgccgcccatgaggaggagc

SEQ ID NO: 2996464 - DNA, 25 bp, Homo sapien
aatacccatccacaaggagaccctg

SEQ ID NO: 2996465 - DNA, 25 bp, Homo sapien
acaaggagaccctgccgcccatgag

SEQ ID NO: 2996466 - DNA, 25 bp, Homo sapien
aaatacccatccacaaggagaccct

SEQ ID NO: 2996467 - DNA, 25 bp, Homo sapien
aatttactagatttaaagattctca

SEQ ID NO: 2996468 - DNA, 25 bp, Homo sapien
ctcagtgcttttaagtgttcctctg

SEQ ID NO: 2996469 - DNA, 25 bp, Homo sapien
cacaaaacgaatattgaagttacca

SEQ ID NO: 2996470 - DNA, 25 bp, Homo sapien
gcttttaagtgttcctctgatacct

SEQ ID NO: 2996471 - DNA, 25 bp, Homo sapien
cgcctgaactatcagctgcgcgtag

SEQ ID NO: 2996472 - DNA, 25 bp, Homo sapien
gcccttgtccgcagtcctgtagtag

SEQ ID NO: 2996473 - DNA, 25 bp, Homo sapien
tcgggagccatcgtaatcgcctgaa

SEQ ID NO: 2996474 - DNA, 25 bp, Homo sapien
atcccgttcagggtgagctgtttgt

SEQ ID NO: 2996475 - DNA, 25 bp, Homo sapien
actttcttctcggtatccatcagcc

SEQ ID NO: 2996476 - DNA, 25 bp, Homo sapien
ctttcttctcggtatccatcagcct

SEQ ID NO: 2996477 - DNA, 25 bp, Homo sapien
caacagtaaagcatgcaggcctaga

SEQ ID NO: 2996478 - DNA, 25 bp, Homo sapien
gtaaagcatgcaggcctagacgctc

SEQ ID NO: 2996479 - DNA, 25 bp, Homo sapien
gacacatgaatttccacaacagtaa

SEQ ID NO: 2996480 - DNA, 25 bp, Homo sapien
tccacaacagtaaagcatgcaggcc

SEQ ID NO: 2996481 - DNA, 25 bp, Homo sapien
taaaatgcggtttgaaaactgtctc

SEQ ID NO: 2996482 - DNA, 25 bp, Homo sapien
tatgaactgcattggtcaaagggaa

SEQ ID NO: 2996483 - DNA, 25 bp, Homo sapien
tcaaaacttctgtccattagcagga

SEQ ID NO: 2996484 - DNA, 25 bp, Homo sapien
ccattagcaggattagatgaggaag

SEQ ID NO: 2996485 - DNA, 25 bp, Homo sapien
gggttaaaattattggcataacaga

SEQ ID NO: 2996486 - DNA, 25 bp, Homo sapien
tgtgtgagctgaccaaagggaatat

SEQ ID NO: 2996487 - DNA, 25 bp, Homo sapien
cagtaaacagccaacacaacacaga

SEQ ID NO: 2996488 - DNA, 25 bp, Homo sapien
attctcatatacatccagtaaacag

SEQ ID NO: 2996489 - DNA, 25 bp, Homo sapien
gcagagaagggtgcctgacgtgtgc

SEQ ID NO: 2996490 - DNA, 25 bp, Homo sapien
tgcctgacgtgtgctagtctgtcat

SEQ ID NO: 2996491 - DNA, 25 bp, Homo sapien
ctgtcattccctgccgacgtgagct

SEQ ID NO: 2996492 - DNA, 25 bp, Homo sapien
ctgccgacgtgagctgtgcaggcac

SEQ ID NO: 2996493 - DNA, 25 bp, Homo sapien
ggctttccaaattgagcgtctgctg

SEQ ID NO: 2996494 - DNA, 25 bp, Homo sapien
taagcagacctcacgtttctcaagg

SEQ ID NO: 2996495 - DNA, 25 bp, Homo sapien
taaggacgtgtacagaaactgagga

SEQ ID NO: 2996496 - DNA, 25 bp, Homo sapien
gctttcagagaaaacgtgggctgtt

SEQ ID NO: 2996497 - DNA, 25 bp, Homo sapien
cagttcgcagcatcagaatagattc

SEQ ID NO: 2996498 - DNA, 25 bp, Homo sapien
gatttgccagccaacaagactccag

SEQ ID NO: 2996499 - DNA, 25 bp, Homo sapien
tgacaacaactccaagggcaaatga

SEQ ID NO: 2996500 - DNA, 25 bp, Homo sapien
tgagcagaagaacgtgacacgggcc

SEQ ID NO: 2996501 - DNA, 25 bp, Homo sapien
gcagcatccgagtctgaagaacaga

SEQ ID NO: 2996502 - DNA, 25 bp, Homo sapien
gccactgcctgagaaggacgacttc

SEQ ID NO: 2996503 - DNA, 25 bp, Homo sapien
aacatgactgttattggtgccccga

SEQ ID NO: 2996504 - DNA, 25 bp, Homo sapien
caagcagtgcaaatggcaatcccag

SEQ ID NO: 2996505 - DNA, 25 bp, Homo sapien
tgggaacgcggcactttgatgaaat

SEQ ID NO: 2996506 - DNA, 25 bp, Homo sapien
gaggctgggtctatcctccagaacg

SEQ ID NO: 2996507 - DNA, 25 bp, Homo sapien
tccagaacgagcctttgcctggttc

SEQ ID NO: 2996508 - DNA, 25 bp, Homo sapien
taacgattcagagagagattgtggc

SEQ ID NO: 2996509 - DNA, 25 bp, Homo sapien
agcagctcccgtgcactgacggtgg

SEQ ID NO: 2996510 - DNA, 25 bp, Homo sapien
gcactgacggtggagccggcagcga

SEQ ID NO: 2996511 - DNA, 25 bp, Homo sapien
ctcccgtgcactgacggtggagccg

SEQ ID NO: 2996512 - DNA, 25 bp, Homo sapien
cagctcccgtgcactgacggtggag

SEQ ID NO: 2996513 - DNA, 25 bp, Homo sapien
cagcactcccgcgtgattgggagag

SEQ ID NO: 2996514 - DNA, 25 bp, Homo sapien
gcagacagcactcccgcgtgattgg

SEQ ID NO: 2996515 - DNA, 25 bp, Homo sapien
tgagcagacagcactcccgcgtgat

SEQ ID NO: 2996516 - DNA, 25 bp, Homo sapien
agtgagcagacagcactcccgcgtg

SEQ ID NO: 2996517 - DNA, 25 bp, Homo sapien
accttccctcgacaggctctcaggg

SEQ ID NO: 2996518 - DNA, 25 bp, Homo sapien
gctcaggctccaggggggccggcga

SEQ ID NO: 2996519 - DNA, 25 bp, Homo sapien
gctctgggcaaaccgggcttcctgg

SEQ ID NO: 2996520 - DNA, 25 bp, Homo sapien
ctggatgacagcgagtttgggctgt

SEQ ID NO: 2996521 - DNA, 25 bp, Homo sapien
tagctgccgctggacggtgattaag

SEQ ID NO: 2996522 - DNA, 25 bp, Homo sapien
tggccacagtgtaggtgacaggctt

SEQ ID NO: 2996523 - DNA, 25 bp, Homo sapien
tctggtggacgacgtgaaccgtctg

SEQ ID NO: 2996524 - DNA, 25 bp, Homo sapien
ggtgattaagactggctgactggac

SEQ ID NO: 2996525 - DNA, 25 bp, Homo sapien
ccagatagctatcacacctgctaga

SEQ ID NO: 2996526 - DNA, 25 bp, Homo sapien
gccagtttaaaacataataaccaga

SEQ ID NO: 2996527 - DNA, 25 bp, Homo sapien
aagaaacgacattaatattactgga

SEQ ID NO: 2996528 - DNA, 25 bp, Homo sapien
cgacattaatattactggaaagcaa

SEQ ID NO: 2996529 - DNA, 25 bp, Homo sapien
aatggcgggaataggctctactttc

SEQ ID NO: 2996530 - DNA, 25 bp, Homo sapien
aatgatccggctggcagtgccgagc

SEQ ID NO: 2996531 - DNA, 25 bp, Homo sapien
tgtactatggtcaccgtctggaccg

SEQ ID NO: 2996532 - DNA, 25 bp, Homo sapien
tgacctagaggtgcctgttgtacta

SEQ ID NO: 2996533 - DNA, 25 bp, Homo sapien
ggggactgatgccacgtgagtgccg

SEQ ID NO: 2996534 - DNA, 25 bp, Homo sapien
gccgtggaccgcagtggggactgat

SEQ ID NO: 2996535 - DNA, 25 bp, Homo sapien
ctggccgtggaccgcagtggggact

SEQ ID NO: 2996536 - DNA, 25 bp, Homo sapien
cagtggggactgatgccacgtgagt

SEQ ID NO: 2996537 - DNA, 25 bp, Homo sapien
tcagaaccgaaaccacgagtgagaa

SEQ ID NO: 2996538 - DNA, 25 bp, Homo sapien
attgttacagtcagaaccgaaacca

SEQ ID NO: 2996539 - DNA, 25 bp, Homo sapien
ttacagtcagaaccgaaaccacgag

SEQ ID NO: 2996540 - DNA, 25 bp, Homo sapien
ggagccaccgaccagcatgtcttac

SEQ ID NO: 2996541 - DNA, 25 bp, Homo sapien
cacgggaatcccatgacggccgact

SEQ ID NO: 2996542 - DNA, 25 bp, Homo sapien
ccagcatgactagatttcctgcagc

SEQ ID NO: 2996543 - DNA, 25 bp, Homo sapien
cagcttcgaaatgcaaacattgcct

SEQ ID NO: 2996544 - DNA, 25 bp, Homo sapien
gaaatgcaaacattgcctcagacaa

SEQ ID NO: 2996545 - DNA, 25 bp, Homo sapien
tacaagaggcgagagtatttttccc

SEQ ID NO: 2996546 - DNA, 25 bp, Homo sapien
ttccctctcaatgtattagaaactc

SEQ ID NO: 2996547 - DNA, 25 bp, Homo sapien
ccaagggaaaagacacgcggcggct

SEQ ID NO: 2996548 - DNA, 25 bp, Homo sapien
gcggctcccgccgtttcaggccgct

SEQ ID NO: 2996549 - DNA, 25 bp, Homo sapien
caatgtcagaacatccgtgcggttt

SEQ ID NO: 2996550 - DNA, 25 bp, Homo sapien
tgtcggcgcggaggttctggtgtct

SEQ ID NO: 2996551 - DNA, 25 bp, Homo sapien
gttttctgtgcaccggcctcggacg

SEQ ID NO: 2996552 - DNA, 25 bp, Homo sapien
cagggcgaaggtagataacccggtg

SEQ ID NO: 2996553 - DNA, 25 bp, Homo sapien
ggccccaatgccagagttgactcgg

SEQ ID NO: 2996554 - DNA, 25 bp, Homo sapien
tgagccaggccccaatgccagagtt

SEQ ID NO: 2996555 - DNA, 25 bp, Homo sapien
caatgccagagttgactcggcagcc

SEQ ID NO: 2996556 - DNA, 25 bp, Homo sapien
ccagagttgactcggcagccagcag

SEQ ID NO: 2996557 - DNA, 25 bp, Homo sapien
gatttgcctgcttgagatcccgcaa

SEQ ID NO: 2996558 - DNA, 25 bp, Homo sapien
aacagcccacatgtacccaacccag

SEQ ID NO: 2996559 - DNA, 25 bp, Homo sapien
tagtcggtagcttcggatttgcctg

SEQ ID NO: 2996560 - DNA, 25 bp, Homo sapien
gcaagcgccaggatcagccacacag

SEQ ID NO: 2996561 - DNA, 25 bp, Homo sapien
tcaaggtctctgttcgtagcgttcg

SEQ ID NO: 2996562 - DNA, 25 bp, Homo sapien
caaacgtcgtgataaagccttctga

SEQ ID NO: 2996563 - DNA, 25 bp, Homo sapien
tcgtagcgttcggtaaggattcaaa

SEQ ID NO: 2996564 - DNA, 25 bp, Homo sapien
gataaagccttctgacctgtaccct

SEQ ID NO: 2996565 - DNA, 25 bp, Homo sapien
cgtgaggcactataccaggcaggga

SEQ ID NO: 2996566 - DNA, 25 bp, Homo sapien
gaatctgggaatcactaggcctctg

SEQ ID NO: 2996567 - DNA, 25 bp, Homo sapien
taagagaggtggacccagaaagcct

SEQ ID NO: 2996568 - DNA, 25 bp, Homo sapien
tctatctacaggcagcaagtgttgc

SEQ ID NO: 2996569 - DNA, 25 bp, Homo sapien
ctgcaaggccagggctacagtgcat

SEQ ID NO: 2996570 - DNA, 25 bp, Homo sapien
ctatcatcccaccaagccacctgct

SEQ ID NO: 2996571 - DNA, 25 bp, Homo sapien
tatcatcccaccaagccacctgctg

SEQ ID NO: 2996572 - DNA, 25 bp, Homo sapien
cacctgctgtcctgcaaggccaggg

SEQ ID NO: 2996573 - DNA, 25 bp, Homo sapien
atgatatttgaggaccacgtaactg

SEQ ID NO: 2996574 - DNA, 25 bp, Homo sapien
tggagtcaacaaatgatatttgagg

SEQ ID NO: 2996575 - DNA, 25 bp, Homo sapien
gaagcgtgcgccctcacaccaggcg

SEQ ID NO: 2996576 - DNA, 25 bp, Homo sapien
agcttgaggagatgccccaggaaac

SEQ ID NO: 2996577 - DNA, 25 bp, Homo sapien
ctggcacagggagaccttcacaggg

SEQ ID NO: 2996578 - DNA, 25 bp, Homo sapien
cacagggagaccttcacagggtctc

SEQ ID NO: 2996579 - DNA, 25 bp, Homo sapien
agggagaccttcacagggtctccct

SEQ ID NO: 2996580 - DNA, 25 bp, Homo sapien
tggcacagggagaccttcacagggt

SEQ ID NO: 2996581 - DNA, 25 bp, Homo sapien
tgggtctgctttcagaataagagcc

SEQ ID NO: 2996582 - DNA, 25 bp, Homo sapien
tgctttcagaataagagcctctgcc

SEQ ID NO: 2996583 - DNA, 25 bp, Homo sapien
ttcagaataagagcctctgcctggc

SEQ ID NO: 2996584 - DNA, 25 bp, Homo sapien
tctgctttcagaataagagcctctg

SEQ ID NO: 2996585 - DNA, 25 bp, Homo sapien
cacagcacgcggtgaacagggctgg

SEQ ID NO: 2996586 - DNA, 25 bp, Homo sapien
acagcacgcggtgaacagggctggg

SEQ ID NO: 2996587 - DNA, 25 bp, Homo sapien
gcacagcacgcggtgaacagggctg

SEQ ID NO: 2996588 - DNA, 25 bp, Homo sapien
cagcacgcggtgaacagggctgggc

SEQ ID NO: 2996589 - DNA, 25 bp, Homo sapien
tgtgtcctgctctgtgccgatgcac

SEQ ID NO: 2996590 - DNA, 25 bp, Homo sapien
ggctatagccgtccagccagctgat

SEQ ID NO: 2996591 - DNA, 25 bp, Homo sapien
catgggaccgtaattcctctgtggg

SEQ ID NO: 2996592 - DNA, 25 bp, Homo sapien
caggtatgtggcctgcaggcgtggg

SEQ ID NO: 2996593 - DNA, 25 bp, Homo sapien
cccaaatctggctgccagatcccca

SEQ ID NO: 2996594 - DNA, 25 bp, Homo sapien
ccaaatctggctgccagatccccac

SEQ ID NO: 2996595 - DNA, 25 bp, Homo sapien
tcactgccgttttacatgctcacaa

SEQ ID NO: 2996596 - DNA, 25 bp, Homo sapien
tgctcacaacgcaacacccatcgtc

SEQ ID NO: 2996597 - DNA, 25 bp, Homo sapien
gtgtgaaagacgtccagggaccctc

SEQ ID NO: 2996598 - DNA, 25 bp, Homo sapien
ggaccctcagacgtcactgccgttt

SEQ ID NO: 2996599 - DNA, 25 bp, Homo sapien
gcgtggcctgatcccgctgctctgg

SEQ ID NO: 2996600 - DNA, 25 bp, Homo sapien
tgctctggggctgtcaatccagtgg

SEQ ID NO: 2996601 - DNA, 25 bp, Homo sapien
ctctggggctgtcaatccagtggcg

SEQ ID NO: 2996602 - DNA, 25 bp, Homo sapien
ctcctcgtccgcgtggcctgatccc

SEQ ID NO: 2996603 - DNA, 25 bp, Homo sapien
tgccaccgccacagcgatgatgggt

SEQ ID NO: 2996604 - DNA, 25 bp, Homo sapien
atgggtgcggctcccgcagaacaca

SEQ ID NO: 2996605 - DNA, 25 bp, Homo sapien
gccggagcagctcagacacgagagc

SEQ ID NO: 2996606 - DNA, 25 bp, Homo sapien
tatactgtggacagagacgccggag

SEQ ID NO: 2996607 - DNA, 25 bp, Homo sapien
tacgtcataacacttgacaacaccc

SEQ ID NO: 2996608 - DNA, 25 bp, Homo sapien
cagttgtgggctgtgtgggtactac

SEQ ID NO: 2996609 - DNA, 25 bp, Homo sapien
cacttgacaacaccccagttgtggg

SEQ ID NO: 2996610 - DNA, 25 bp, Homo sapien
tacacgcagcaagcccctccgagac

SEQ ID NO: 2996611 - DNA, 25 bp, Homo sapien
gtgcccggcctgtctagagcatttc

SEQ ID NO: 2996612 - DNA, 25 bp, Homo sapien
gagcatttcttagcggccaactttt

SEQ ID NO: 2996613 - DNA, 25 bp, Homo sapien
ccggcctgtctagagcatttcttag

SEQ ID NO: 2996614 - DNA, 25 bp, Homo sapien
tagcggccaacttttactccacagg

SEQ ID NO: 2996615 - DNA, 25 bp, Homo sapien
gagccaggtgcacttttagggccca

SEQ ID NO: 2996616 - DNA, 25 bp, Homo sapien
cactgttagagctttcaacgaagaa

SEQ ID NO: 2996617 - DNA, 25 bp, Homo sapien
cacaggcttaataacagggaccgac

SEQ ID NO: 2996618 - DNA, 25 bp, Homo sapien
caacgaagaaaaaccgtgaccacat

SEQ ID NO: 2996619 - DNA, 25 bp, Homo sapien
gcaactccagtctgagctggcacat

SEQ ID NO: 2996620 - DNA, 25 bp, Homo sapien
actgaggcaactccagtctgagctg

SEQ ID NO: 2996621 - DNA, 25 bp, Homo sapien
gaggcaactccagtctgagctggca

SEQ ID NO: 2996622 - DNA, 25 bp, Homo sapien
actccagtctgagctggcacatggg

SEQ ID NO: 2996623 - DNA, 25 bp, Homo sapien
tccgggctgccggaaaaggctttgc

SEQ ID NO: 2996624 - DNA, 25 bp, Homo sapien
ccgggctgccggaaaaggctttgct

SEQ ID NO: 2996625 - DNA, 25 bp, Homo sapien
ggctgccggaaaaggctttgctctt

SEQ ID NO: 2996626 - DNA, 25 bp, Homo sapien
cgggctgccggaaaaggctttgctc

SEQ ID NO: 2996627 - DNA, 25 bp, Homo sapien
ttggtgtgagctgggcaaaccccgt

SEQ ID NO: 2996628 - DNA, 25 bp, Homo sapien
ccagagatgcacagacgcgcagtgt

SEQ ID NO: 2996629 - DNA, 25 bp, Homo sapien
tggcctttctcctacgctgactcgg

SEQ ID NO: 2996630 - DNA, 25 bp, Homo sapien
ggtgtggcctcaaccgactctaatg

SEQ ID NO: 2996631 - DNA, 25 bp, Homo sapien
cctgaagtaggtgagaagatgggga

SEQ ID NO: 2996632 - DNA, 25 bp, Homo sapien
tggaacctgaagtaggtgagaagat

SEQ ID NO: 2996633 - DNA, 25 bp, Homo sapien
aatggaacctgaagtaggtgagaag

SEQ ID NO: 2996634 - DNA, 25 bp, Homo sapien
catgaaatggaacctgaagtaggtg

SEQ ID NO: 2996635 - DNA, 25 bp, Homo sapien
tgggctccgaagagactcaagcagc

SEQ ID NO: 2996636 - DNA, 25 bp, Homo sapien
cacagaggtgtgttccctggaagcc

SEQ ID NO: 2996637 - DNA, 25 bp, Homo sapien
gagagccccgttttagaattcagga

SEQ ID NO: 2996638 - DNA, 25 bp, Homo sapien
gctacgccctggtgcctagagatgt

SEQ ID NO: 2996639 - DNA, 25 bp, Homo sapien
ttctggaagacgctgtcacctcccc

SEQ ID NO: 2996640 - DNA, 25 bp, Homo sapien
tgggcggcggcatttctggaagacg

SEQ ID NO: 2996641 - DNA, 25 bp, Homo sapien
gtcctccttgtgggcggcggcattt

SEQ ID NO: 2996642 - DNA, 25 bp, Homo sapien
gcacttcttggtgggccccgtgatg

SEQ ID NO: 2996643 - DNA, 25 bp, Homo sapien
caagtgaactgcctgattagcggac

SEQ ID NO: 2996644 - DNA, 25 bp, Homo sapien
aaatcagctgatcgccatgagtggg

SEQ ID NO: 2996645 - DNA, 25 bp, Homo sapien
agactgctggctgctaacggctgac

SEQ ID NO: 2996646 - DNA, 25 bp, Homo sapien
gaccaggctgagttaattccaaagg

SEQ ID NO: 2996647 - DNA, 25 bp, Homo sapien
ggccgatgcggatgcgtgtgttgcc

SEQ ID NO: 2996648 - DNA, 25 bp, Homo sapien
aggccgatgcggatgcgtgtgttgc

SEQ ID NO: 2996649 - DNA, 25 bp, Homo sapien
agggcaatgacgatgccctcgccgt

SEQ ID NO: 2996650 - DNA, 25 bp, Homo sapien
cgtcttctgtcttgatccgcttcag

SEQ ID NO: 2996651 - DNA, 25 bp, Homo sapien
tcgccgtcttctgtcttgatccgct

SEQ ID NO: 2996652 - DNA, 25 bp, Homo sapien
gatgccctcgccgtcttctgtcttg

SEQ ID NO: 2996653 - DNA, 25 bp, Homo sapien
tcactcgtaggtagaagctcagccc

SEQ ID NO: 2996654 - DNA, 25 bp, Homo sapien
gagacaccgtctcccaaatcaggtt

SEQ ID NO: 2996655 - DNA, 25 bp, Homo sapien
taaggagtgttaaggccagctgggt

SEQ ID NO: 2996656 - DNA, 25 bp, Homo sapien
ttggcaccacagagttgatatcgtt

SEQ ID NO: 2996657 - DNA, 25 bp, Homo sapien
agcaggcgctggccgtgccgtcctc

SEQ ID NO: 2996658 - DNA, 25 bp, Homo sapien
ggccgtgccgtcctcacacagcgat

SEQ ID NO: 2996659 - DNA, 25 bp, Homo sapien
tggccgtgccgtcctcacacagcga

SEQ ID NO: 2996660 - DNA, 25 bp, Homo sapien
ggcgctggccgtgccgtcctcacac

SEQ ID NO: 2996661 - DNA, 25 bp, Homo sapien
acatgtctccgctgcctggtgggtc

SEQ ID NO: 2996662 - DNA, 25 bp, Homo sapien
tgaaatccacggaaagggcctgtgt

SEQ ID NO: 2996663 - DNA, 25 bp, Homo sapien
tgcagatgccagagtagcttcgtct

SEQ ID NO: 2996664 - DNA, 25 bp, Homo sapien
gtgatgtgaaatgcccaagacccca

SEQ ID NO: 2996665 - DNA, 25 bp, Homo sapien
gcggccacagcgtccgtccacctgt

SEQ ID NO: 2996666 - DNA, 25 bp, Homo sapien
gccacagcgtccgtccacctgtcca

SEQ ID NO: 2996667 - DNA, 25 bp, Homo sapien
tccacctgtccacgcgagccacatg

SEQ ID NO: 2996668 - DNA, 25 bp, Homo sapien
tcaaggttccatgcggccacagcgt

SEQ ID NO: 2996669 - DNA, 25 bp, Homo sapien
tcattttccgtagaggagtcagcct

SEQ ID NO: 2996670 - DNA, 25 bp, Homo sapien
tacaaacataccacggagagacctg

SEQ ID NO: 2996671 - DNA, 25 bp, Homo sapien
tcagcctcaggattgggttcggttc

SEQ ID NO: 2996672 - DNA, 25 bp, Homo sapien
cagttaagtgcagctcggtgagtcc

SEQ ID NO: 2996673 - DNA, 25 bp, Homo sapien
ccccatgctgagggccgacacaatt

SEQ ID NO: 2996674 - DNA, 25 bp, Homo sapien
caatgggcgtcaccgcagtgacgct

SEQ ID NO: 2996675 - DNA, 25 bp, Homo sapien
tgagggccgacacaattcacggaac

SEQ ID NO: 2996676 - DNA, 25 bp, Homo sapien
ctttcaatgggcgtcaccgcagtga

SEQ ID NO: 2996677 - DNA, 25 bp, Homo sapien
gagtgataatccagctagtgtgcag

SEQ ID NO: 2996678 - DNA, 25 bp, Homo sapien
cgttccaggatcagaagtaaccagt

SEQ ID NO: 2996679 - DNA, 25 bp, Homo sapien
tatggactgagcttacacgggaaag

SEQ ID NO: 2996680 - DNA, 25 bp, Homo sapien
agctgcataaaaacgtctccaaggg

SEQ ID NO: 2996681 - DNA, 25 bp, Homo sapien
tgacgtgggtcatacgggagttccc

SEQ ID NO: 2996682 - DNA, 25 bp, Homo sapien
caagatgcagaatggtgcctacggc

SEQ ID NO: 2996683 - DNA, 25 bp, Homo sapien
caatgacggaagtgggtagacgact

SEQ ID NO: 2996684 - DNA, 25 bp, Homo sapien
tattctagcggaggacaatgacgga

SEQ ID NO: 2996685 - DNA, 25 bp, Homo sapien
tatatacgactgactttccatagga

SEQ ID NO: 2996686 - DNA, 25 bp, Homo sapien
aacggactaggctcagcaatgggag

SEQ ID NO: 2996687 - DNA, 25 bp, Homo sapien
taatgtgcagttcggatagaccgcc

SEQ ID NO: 2996688 - DNA, 25 bp, Homo sapien
ttccataggactgagatagttgctc

SEQ ID NO: 2996689 - DNA, 25 bp, Homo sapien
ttttccaattcctctcgtcagcgtg

SEQ ID NO: 2996690 - DNA, 25 bp, Homo sapien
gggttctgtgggagtcgccagcgtg

SEQ ID NO: 2996691 - DNA, 25 bp, Homo sapien
ggctctgtgggagtcgccagtgtct

SEQ ID NO: 2996692 - DNA, 25 bp, Homo sapien
ttcctctcgtcagcgtgaagggttc

SEQ ID NO: 2996693 - DNA, 25 bp, Homo sapien
gagcatttgcccttatttcacagag

SEQ ID NO: 2996694 - DNA, 25 bp, Homo sapien
ccagtctacacaggagttgagctca

SEQ ID NO: 2996695 - DNA, 25 bp, Homo sapien
gtctcagcaggcaagtaacccagtt

SEQ ID NO: 2996696 - DNA, 25 bp, Homo sapien
gacattcggcataccttgagactcc

SEQ ID NO: 2996697 - DNA, 25 bp, Homo sapien
gttggtttctaattcgtggctgatg

SEQ ID NO: 2996698 - DNA, 25 bp, Homo sapien
tgtctgcccatttgtacgcgctctg

SEQ ID NO: 2996699 - DNA, 25 bp, Homo sapien
aagtccttgtctgccgattccagca

SEQ ID NO: 2996700 - DNA, 25 bp, Homo sapien
tacgcgctctgtgcgctttcaagtc

SEQ ID NO: 2996701 - DNA, 25 bp, Homo sapien
tgcacgtgaacagcctcagaactga

SEQ ID NO: 2996702 - DNA, 25 bp, Homo sapien
aagtgagccggcgtcaccctggctt

SEQ ID NO: 2996703 - DNA, 25 bp, Homo sapien
tgggttttctcgcagtgcacgtgaa

SEQ ID NO: 2996704 - DNA, 25 bp, Homo sapien
cctggcttgtctaacacttgagatc

SEQ ID NO: 2996705 - DNA, 25 bp, Homo sapien
cggcctgtgacaggacaaggtggaa

SEQ ID NO: 2996706 - DNA, 25 bp, Homo sapien
tgggtgcggagcctggagcttcact

SEQ ID NO: 2996707 - DNA, 25 bp, Homo sapien
ctgtgagaatctggttggagtgtag

SEQ ID NO: 2996708 - DNA, 25 bp, Homo sapien
ttggagtgtaggcttcagaacagcc

SEQ ID NO: 2996709 - DNA, 25 bp, Homo sapien
gaatgtttcccctcgtgtgagccca

SEQ ID NO: 2996710 - DNA, 25 bp, Homo sapien
tcccggttatgtgtagggaacagca

SEQ ID NO: 2996711 - DNA, 25 bp, Homo sapien
aatgacctgaccctgtagagagaac

SEQ ID NO: 2996712 - DNA, 25 bp, Homo sapien
ggaacagcagagtgatgcacgaact

SEQ ID NO: 2996713 - DNA, 25 bp, Homo sapien
tctcagatgagctccctgtgtagca

SEQ ID NO: 2996714 - DNA, 25 bp, Homo sapien
taggattcggacagtgcttctcaga

SEQ ID NO: 2996715 - DNA, 25 bp, Homo sapien
gcttttcctagctatctgagggact

SEQ ID NO: 2996716 - DNA, 25 bp, Homo sapien
tgacttgtgcccagtgccgtgggac

SEQ ID NO: 2996717 - DNA, 25 bp, Homo sapien
ttaattgagggagcgtctcactgtg

SEQ ID NO: 2996718 - DNA, 25 bp, Homo sapien
gagaccaccctgtaaatgggaaaga

SEQ ID NO: 2996719 - DNA, 25 bp, Homo sapien
tatttggaccattaacagcctgctg

SEQ ID NO: 2996720 - DNA, 25 bp, Homo sapien
tgggagcaaagtcacgggagaccac

SEQ ID NO: 2996721 - DNA, 25 bp, Homo sapien
tgtgacttagcacctatcgtgtctg

SEQ ID NO: 2996722 - DNA, 25 bp, Homo sapien
tgttcaatgcccacgatgcggagac

SEQ ID NO: 2996723 - DNA, 25 bp, Homo sapien
tagagggtcaccattcaacgcactg

SEQ ID NO: 2996724 - DNA, 25 bp, Homo sapien
tcatgagggatgatgcaccgggcct

SEQ ID NO: 2996725 - DNA, 25 bp, Homo sapien
gcagcctgaccctaagagttgagaa

SEQ ID NO: 2996726 - DNA, 25 bp, Homo sapien
ggtccttgaggtagtcacatctgca

SEQ ID NO: 2996727 - DNA, 25 bp, Homo sapien
tgtaaggaccctcgtgattccgcct

SEQ ID NO: 2996728 - DNA, 25 bp, Homo sapien
cacatgcacaagctctgagcacggg

SEQ ID NO: 2996729 - DNA, 25 bp, Homo sapien
gattccgcctggatcatccaggtta

SEQ ID NO: 2996730 - DNA, 25 bp, Homo sapien
tccaggcgtgaggattaaaggttcc

SEQ ID NO: 2996731 - DNA, 25 bp, Homo sapien
gaaatggatccttcatgtaacagtt

SEQ ID NO: 2996732 - DNA, 25 bp, Homo sapien
gtactgctacgaatatcaacacctg

SEQ ID NO: 2996733 - DNA, 25 bp, Homo sapien
tgctccacgttccactacagaaagg

SEQ ID NO: 2996734 - DNA, 25 bp, Homo sapien
catgatgacagcaaaccccgctgga

SEQ ID NO: 2996735 - DNA, 25 bp, Homo sapien
cccagaggtgctgtcaaggctgtta

SEQ ID NO: 2996736 - DNA, 25 bp, Homo sapien
tcttctaggtgaggtgaccggctac

SEQ ID NO: 2996737 - DNA, 25 bp, Homo sapien
gctgttagccaaaggccaccgtgaa

SEQ ID NO: 2996738 - DNA, 25 bp, Homo sapien
gaattccgcatgaagatgtagcccc

SEQ ID NO: 2996739 - DNA, 25 bp, Homo sapien
cttagaaacttaagggacccagctg

SEQ ID NO: 2996740 - DNA, 25 bp, Homo sapien
agatgttcctagttcctgctgatga

SEQ ID NO: 2996741 - DNA, 25 bp, Homo sapien
tctgagaaatcagagccgtgctcct

SEQ ID NO: 2996742 - DNA, 25 bp, Homo sapien
aaggccactgtgtccgttctcagag

SEQ ID NO: 2996743 - DNA, 25 bp, Homo sapien
tcactgaagtaacccatgctcctcg

SEQ ID NO: 2996744 - DNA, 25 bp, Homo sapien
tgcacctggcgttcaagcggcaggt

SEQ ID NO: 2996745 - DNA, 25 bp, Homo sapien
tggataagtgtctgcctcccgggac

SEQ ID NO: 2996746 - DNA, 25 bp, Homo sapien
acgtgccctgtgtatgagtctgtgc

SEQ ID NO: 2996747 - DNA, 25 bp, Homo sapien
catgagtgcctgtgcgtgtgtttac

SEQ ID NO: 2996748 - DNA, 25 bp, Homo sapien
tacacgtgtgtgaaggtacatgccc

SEQ ID NO: 2996749 - DNA, 25 bp, Homo sapien
tgtgccgtcatctgagaactcaagc

SEQ ID NO: 2996750 - DNA, 25 bp, Homo sapien
tgccttcccgagagcttagtagggt

SEQ ID NO: 2996751 - DNA, 25 bp, Homo sapien
gaagagatttttggtcgtcgctcaa

SEQ ID NO: 2996752 - DNA, 25 bp, Homo sapien
cattgctgacggctgcaggacttgg

SEQ ID NO: 2996753 - DNA, 25 bp, Homo sapien
tagtagaactatctagttggaaggc

SEQ ID NO: 2996754 - DNA, 25 bp, Homo sapien
tacacagctcattctgccggtcgtc

SEQ ID NO: 2996755 - DNA, 25 bp, Homo sapien
acagctcattctgccggtcgtccat

SEQ ID NO: 2996756 - DNA, 25 bp, Homo sapien
gctacacagctcattctgccggtcg

SEQ ID NO: 2996757 - DNA, 25 bp, Homo sapien
gggctacacagctcattctgccggt

SEQ ID NO: 2996758 - DNA, 25 bp, Homo sapien
tctcacagaagctggcggccatgtc

SEQ ID NO: 2996759 - DNA, 25 bp, Homo sapien
tctctccgaggatgccagcacctct

SEQ ID NO: 2996760 - DNA, 25 bp, Homo sapien
ttccaggaaccctgtgcttgacttc

SEQ ID NO: 2996761 - DNA, 25 bp, Homo sapien
gttttccaggaaccctgtgcttgac

SEQ ID NO: 2996762 - DNA, 25 bp, Homo sapien
tggttttccaggaaccctgtgcttg

SEQ ID NO: 2996763 - DNA, 25 bp, Homo sapien
tcaggagggctggttttccaggaac

SEQ ID NO: 2996764 - DNA, 25 bp, Homo sapien
ctctccaggcaggggtagaaggaag

SEQ ID NO: 2996765 - DNA, 25 bp, Homo sapien
tcacgctctttcccctcggaagttc

SEQ ID NO: 2996766 - DNA, 25 bp, Homo sapien
cgctctttcccctcggaagttccat

SEQ ID NO: 2996767 - DNA, 25 bp, Homo sapien
cctggaccccatttccgtctggcag

SEQ ID NO: 2996768 - DNA, 25 bp, Homo sapien
tggaccccatttccgtctggcagct

SEQ ID NO: 2996769 - DNA, 25 bp, Homo sapien
cctctcggtctgtagttgcagggca

SEQ ID NO: 2996770 - DNA, 25 bp, Homo sapien
tgctccgatacggtcagcgaggcct

SEQ ID NO: 2996771 - DNA, 25 bp, Homo sapien
tgttccctttgctccgatacggtca

SEQ ID NO: 2996772 - DNA, 25 bp, Homo sapien
ctcctgggcgtttgtcttcctctcg

SEQ ID NO: 2996773 - DNA, 25 bp, Homo sapien
tgtttctaacttattgattagttca

SEQ ID NO: 2996774 - DNA, 25 bp, Homo sapien
tatgcctttcctatttgttggtaat

SEQ ID NO: 2996775 - DNA, 25 bp, Homo sapien
ttctgattatcttatgcctttccta

SEQ ID NO: 2996776 - DNA, 25 bp, Homo sapien
acagtgcgcggcctgaatttttctg

SEQ ID NO: 2996777 - DNA, 25 bp, Homo sapien
tgatgacattttactcgtggagaag

SEQ ID NO: 2996778 - DNA, 25 bp, Homo sapien
tggagaagcatcagtaaatgttcct

SEQ ID NO: 2996779 - DNA, 25 bp, Homo sapien
agaagcatcagtaaatgttcctttc

SEQ ID NO: 2996780 - DNA, 25 bp, Homo sapien
acattttactcgtggagaagcatca

SEQ ID NO: 2996781 - DNA, 25 bp, Homo sapien
cagggagctgctctgtatcacagga

SEQ ID NO: 2996782 - DNA, 25 bp, Homo sapien
cccagacgctgagaggagacttgga

SEQ ID NO: 2996783 - DNA, 25 bp, Homo sapien
ctcgtgggccacacctacatggtca

SEQ ID NO: 2996784 - DNA, 25 bp, Homo sapien
tacatggtcacaggcaggagttggc

SEQ ID NO: 2996785 - DNA, 25 bp, Homo sapien
ggtttcagttccgtgcgctcagagg

SEQ ID NO: 2996786 - DNA, 25 bp, Homo sapien
gagtgaggccgttctctctccaagg

SEQ ID NO: 2996787 - DNA, 25 bp, Homo sapien
caatgtagttgattcacccggaggt

SEQ ID NO: 2996788 - DNA, 25 bp, Homo sapien
gcagccatgtttggagagatcccct

SEQ ID NO: 2996789 - DNA, 25 bp, Homo sapien
tcacgaacactcgtccttgatccgt

SEQ ID NO: 2996790 - DNA, 25 bp, Homo sapien
gggttcactttcacgaacactcgtc

SEQ ID NO: 2996791 - DNA, 25 bp, Homo sapien
gtagctccggccctggctgatgcac

SEQ ID NO: 2996792 - DNA, 25 bp, Homo sapien
ttgatccgtgtcgtagctccggccc

SEQ ID NO: 2996793 - DNA, 25 bp, Homo sapien
caaaccaagactatcctgactgagg

SEQ ID NO: 2996794 - DNA, 25 bp, Homo sapien
gaagaagagggcttgagctttccag

SEQ ID NO: 2996795 - DNA, 25 bp, Homo sapien
tggaaatacagggaggcaaggttac

SEQ ID NO: 2996796 - DNA, 25 bp, Homo sapien
cacacttgccaacagggtaggctac

SEQ ID NO: 2996797 - DNA, 25 bp, Homo sapien
ccgcctggggcatccagaaccttga

SEQ ID NO: 2996798 - DNA, 25 bp, Homo sapien
gtttgttttcaggatggcagttaaa

SEQ ID NO: 2996799 - DNA, 25 bp, Homo sapien
ccttgatgggcttgggcactttcac

SEQ ID NO: 2996800 - DNA, 25 bp, Homo sapien
tgctcagatgcctcatgtccatgtg

SEQ ID NO: 2996801 - DNA, 25 bp, Homo sapien
gctcaggtaataaagccaggtgggg

SEQ ID NO: 2996802 - DNA, 25 bp, Homo sapien
gcttcttgttatcaaggtgtaaatc

SEQ ID NO: 2996803 - DNA, 25 bp, Homo sapien
tatcaaggtgtaaatcggccagctg

SEQ ID NO: 2996804 - DNA, 25 bp, Homo sapien
cttgttatcaaggtgtaaatcggcc

SEQ ID NO: 2996805 - DNA, 25 bp, Homo sapien
gtgtaaatcggccagctgggctcca

SEQ ID NO: 2996806 - DNA, 25 bp, Homo sapien
tcctctaggcgggagcacccgtggc

SEQ ID NO: 2996807 - DNA, 25 bp, Homo sapien
gctgaacgtcctcctctaggcggga

SEQ ID NO: 2996808 - DNA, 25 bp, Homo sapien
gaacgtcctcctctaggcgggagca

SEQ ID NO: 2996809 - DNA, 25 bp, Homo sapien
cggctgaacgtcctcctctaggcgg

SEQ ID NO: 2996810 - DNA, 25 bp, Homo sapien
gggctgcacacggattccaaatgtc

SEQ ID NO: 2996811 - DNA, 25 bp, Homo sapien
ctcgatcctgacagcgcgttatgct

SEQ ID NO: 2996812 - DNA, 25 bp, Homo sapien
ataccggaaaattccctcgatcctg

SEQ ID NO: 2996813 - DNA, 25 bp, Homo sapien
aatgtcagcagattaaaataccgga

SEQ ID NO: 2996814 - DNA, 25 bp, Homo sapien
tgttccgatcatcagcaaatctccc

SEQ ID NO: 2996815 - DNA, 25 bp, Homo sapien
acacaggccgcctgggtggatccgt

SEQ ID NO: 2996816 - DNA, 25 bp, Homo sapien
gtggatccgtcatggaccctcacag

SEQ ID NO: 2996817 - DNA, 25 bp, Homo sapien
agcatgtctccgtctcctacagcag

SEQ ID NO: 2996818 - DNA, 25 bp, Homo sapien
agcacgtcaccacgtcaaatccaaa

SEQ ID NO: 2996819 - DNA, 25 bp, Homo sapien
aggtatccacagcacgtcaccacgt

SEQ ID NO: 2996820 - DNA, 25 bp, Homo sapien
cacgtcaaatccaaaccgggccaca

SEQ ID NO: 2996821 - DNA, 25 bp, Homo sapien
gggaggtatccacagcacgtcacca

SEQ ID NO: 2996822 - DNA, 25 bp, Homo sapien
aatccagctcctaacttgctggtcc

SEQ ID NO: 2996823 - DNA, 25 bp, Homo sapien
atccagctcctaacttgctggtcct

SEQ ID NO: 2996824 - DNA, 25 bp, Homo sapien
aaatccagctcctaacttgctggtc

SEQ ID NO: 2996825 - DNA, 25 bp, Homo sapien
ccagctcctaacttgctggtcctcc

SEQ ID NO: 2996826 - DNA, 25 bp, Homo sapien
ctgcacagtaacagcaaaagcacag

SEQ ID NO: 2996827 - DNA, 25 bp, Homo sapien
gcacagtaacagcaaaagcacagtt

SEQ ID NO: 2996828 - DNA, 25 bp, Homo sapien
acagtaacagcaaaagcacagttca

SEQ ID NO: 2996829 - DNA, 25 bp, Homo sapien
tgcacagtaacagcaaaagcacagt

SEQ ID NO: 2996830 - DNA, 25 bp, Homo sapien
catgtccatctggggctgaatgcgc

SEQ ID NO: 2996831 - DNA, 25 bp, Homo sapien
aatgcgctgccgggcatagaacacg

SEQ ID NO: 2996832 - DNA, 25 bp, Homo sapien
tgccgggcatagaacacgacccagt

SEQ ID NO: 2996833 - DNA, 25 bp, Homo sapien
gggcatagaacacgacccagtcctc

SEQ ID NO: 2996834 - DNA, 25 bp, Homo sapien
tccgagtggccgtagaaagaagctg

SEQ ID NO: 2996835 - DNA, 25 bp, Homo sapien
ggtcaaaaatcaccggcccagagga

SEQ ID NO: 2996836 - DNA, 25 bp, Homo sapien
caggtcacggaacaggtcagggatc

SEQ ID NO: 2996837 - DNA, 25 bp, Homo sapien
tgaaagagctgatacaactgaaggc

SEQ ID NO: 2996838 - DNA, 25 bp, Homo sapien
caaagtggacaacgctgggatgaca

SEQ ID NO: 2996839 - DNA, 25 bp, Homo sapien
gaaaggtacctatgagcagcagtgc

SEQ ID NO: 2996840 - DNA, 25 bp, Homo sapien
gcattggtcttaagctagtccagca

SEQ ID NO: 2996841 - DNA, 25 bp, Homo sapien
agtgtggctccgtctacctacaaag

SEQ ID NO: 2996842 - DNA, 25 bp, Homo sapien
cacccaagtcttgccaaccaagaag

SEQ ID NO: 2996843 - DNA, 25 bp, Homo sapien
caacgtgaacagctcagagacattc

SEQ ID NO: 2996844 - DNA, 25 bp, Homo sapien
ttgccaaccaagaagcatcaacgtg

SEQ ID NO: 2996845 - DNA, 25 bp, Homo sapien
agtaagatggtttcatgtctacacc

SEQ ID NO: 2996846 - DNA, 25 bp, Homo sapien
aaacggaatacgcttgattctggaa

SEQ ID NO: 2996847 - DNA, 25 bp, Homo sapien
tgaagactcctggatgtacccaagg

SEQ ID NO: 2996848 - DNA, 25 bp, Homo sapien
ggcccagggatcatgcaggaagaaa

SEQ ID NO: 2996849 - DNA, 25 bp, Homo sapien
tcccagaatcagtttacagacttgc

SEQ ID NO: 2996850 - DNA, 25 bp, Homo sapien
gcaaaggatttattagcatcaatgc

SEQ ID NO: 2996851 - DNA, 25 bp, Homo sapien
gatttattagcatcaatgccattca

SEQ ID NO: 2996852 - DNA, 25 bp, Homo sapien
gccattcatgaaatatgtctcttta

SEQ ID NO: 2996853 - DNA, 25 bp, Homo sapien
aatatgtctctttactacaacagtg

SEQ ID NO: 2996854 - DNA, 25 bp, Homo sapien
ttaggctagtcctgctctttgaagc

SEQ ID NO: 2996855 - DNA, 25 bp, Homo sapien
caaatatcacagacagttcttaggc

SEQ ID NO: 2996856 - DNA, 25 bp, Homo sapien
ctgggtgacccctcaaacacgggtg

SEQ ID NO: 2996857 - DNA, 25 bp, Homo sapien
cagctaggctgcacctctggtcaaa

SEQ ID NO: 2996858 - DNA, 25 bp, Homo sapien
cagtcctggccaacgggagcaggtc

SEQ ID NO: 2996859 - DNA, 25 bp, Homo sapien
gaaactgaccacactcacggtcctt

SEQ ID NO: 2996860 - DNA, 25 bp, Homo sapien
tcctgtcaggttggaaactgaccac

SEQ ID NO: 2996861 - DNA, 25 bp, Homo sapien
taaaggaactcggttctgttctgcc

SEQ ID NO: 2996862 - DNA, 25 bp, Homo sapien
gatggcgccgctttgggacgtccct

SEQ ID NO: 2996863 - DNA, 25 bp, Homo sapien
cgggatggcgccgctttgggacgtc

SEQ ID NO: 2996864 - DNA, 25 bp, Homo sapien
ggatggcgccgctttgggacgtccc

SEQ ID NO: 2996865 - DNA, 25 bp, Homo sapien
atggcgccgctttgggacgtccctt

SEQ ID NO: 2996866 - DNA, 25 bp, Homo sapien
gggagtcgagcagcacacgtgccat

SEQ ID NO: 2996867 - DNA, 25 bp, Homo sapien
agggagtcgagcagcacacgtgcca

SEQ ID NO: 2996868 - DNA, 25 bp, Homo sapien
cagggagtcgagcagcacacgtgcc

SEQ ID NO: 2996869 - DNA, 25 bp, Homo sapien
ctgaggggcacatgcgccgtcagga

SEQ ID NO: 2996870 - DNA, 25 bp, Homo sapien
gagctgaggggcacatgcgccgtca

SEQ ID NO: 2996871 - DNA, 25 bp, Homo sapien
ggggcacatgcgccgtcaggatgga

SEQ ID NO: 2996872 - DNA, 25 bp, Homo sapien
tgaggggcacatgcgccgtcaggat

SEQ ID NO: 2996873 - DNA, 25 bp, Homo sapien
cacaggtgctgtcgggatggaccta

SEQ ID NO: 2996874 - DNA, 25 bp, Homo sapien
gcacaggtgctgtcgggatggacct

SEQ ID NO: 2996875 - DNA, 25 bp, Homo sapien
agcacaggtgctgtcgggatggacc

SEQ ID NO: 2996876 - DNA, 25 bp, Homo sapien
ctgtcgggatggacctacccagtgg

SEQ ID NO: 2996877 - DNA, 25 bp, Homo sapien
ggcgggtagtcgagcagcacaggtg

SEQ ID NO: 2996878 - DNA, 25 bp, Homo sapien
ccggcgggtagtcgagcagcacagg

SEQ ID NO: 2996879 - DNA, 25 bp, Homo sapien
cggcgggtagtcgagcagcacaggt

SEQ ID NO: 2996880 - DNA, 25 bp, Homo sapien
agcggcacacgcaccgtctggcagg

SEQ ID NO: 2996881 - DNA, 25 bp, Homo sapien
ccaagcggcacacgcaccgtctggc
